United States Patent Application Publication US 2020/0163878 A1 - sequence listing, part 4

SEQ ID NO: 19287 - protein, 469 aa, Artificial Sequence
  derived and/or modified protein sequence (wt) from neuraminidase__InfluenzaA__ADK99253
MNPNQKIITIGSVSLTISTICFFMQIAILITTVTLHFKQYEFNSPPNNQVMLCEPTIIERNITEIVYLTNTTIEKEICPKLAEYRNWSKPQCDITGFAPFSKDNSIRLSAGGDIWVTREPYVSCDPDKCYQFALGQGTTLNNVHSNNTVRDRTPYRTLLMNELGVPFHLGTKQVCIAWSSSSCHDGKAWLHVCITGDDKNATASFIYNGRLVDSVVSWSKEILRTQESECVCINGTCTVVMTDGSASGKADTKILFIEEGKIVHTSTLSGSAQHVEECSCYPRYPGVRCVCRDNWKGSNRPIVDINIKDHSIVSSYVCSGLVGDTPRKNDSSSSSHCLDPNNEEGGHGVKGWAFDDGNDVWMGRTISEKSRLGYETFKVIEGWSNHKSKLQINRQVIVDRGHRSGYSGIFSVEGKSCINRCFYVELIRGRKEETEVLWTSNSIVVFCGTSGTYGTGSWPDGADLTLMPI

SEQ ID NO: 19288 - protein, 469 aa, Artificial Sequence
  derived and/or modified protein sequence (wt) from neuraminidase__InfluenzaA__ADK99264
MNPNQKIITIGSVSLTISTICFFMQIAILITTVTLHFKQYEFNSPPNNQVMLCEPTIIERNITEIVYLTNTTIEKEICPKLAEYRNWSKPQCDITGFAPFSKDNSIRLSAGGDIWVTREPYVSCDPDKCYQFALGQGTTLNNVHSNNTVRDRTPYRTLLMNELGVPFHLGTKQVCIAWSSSSCHDGKAWLHVCITGDDKNATASFIYNGRLVDSVVSWSKEILRTQESECVCINGTCTVVMTDGSASGKADTKILFIEEGKIVHTSTLSGSAQHVEECSCYPRYPGVRCVCRDNWKGSNRPIVDINIKDHSIVSSYLCSGLVGDTPRKNDSSSSSHCLDPNNEEGGHGVKGWAFDDGNDVWMGRTISEKSRLGYETFKVIEGWSNPKSKLHINRQVIVDRGNRSGYSGIFSVEGKSCINRCFYVELIRGRKEETEVLWTSNSIVVFCGTSGTYGTGSWPDGADINLMPI

SEQ ID NO: 19289 - protein, 469 aa, Artificial Sequence
  derived and/or modified protein sequence (wt) from neuraminidase__InfluenzaA__ADK99275
MNPNQKIITIGSVSLTISTICFFMQIAVLITTVTLHFKQYEFNSPPNNQVMLCEPTIIERNITEIVYLTNTTIEKEICPKLAGYRNWSKPQCDITGFAPFSKDNSIRLSAGGDIWVTREPYVSCDPDKCYQFALGQGTTLNNVHSNDTVRDRTPYRTLLMNELGVPFHLGTKQVCIAWSSSSCHDGKAWLHVCITGDDKNATASFIYNGRLVDSVVSWSKEILRTQESECVCINGTCTVVMTDGSASGKADTKILFIEEGKIVHTSTLSGSAQHVEECSCYPRYPGVRCVCRDNWKGSNRPIVDINIKDHSIVSSYVCSGLVGDTPRKNDSSSSSHCLDPNNEEGGHGVKGWAFDDGNDVWMGRTINETSRLGYETFKVIEGWSNPKSKLQINRQVIVDRGNRSGYSGIFSVEGKSCINRCFYVELIRGRKEETEVLWTSNSIVVFCGTSGTYGTGSWPDGADLNLMPI

SEQ ID NO: 19290 - protein, 469 aa, Artificial Sequence
  derived and/or modified protein sequence (wt) from neuraminidase__InfluenzaA__ADK99286
MNPNQKIITIGSVSLTISTICFFMQIAILITTVTLHFKQYEFNPPPNNQVTPREPTIIERNITEIVYLTNTTIEKEICPKLAEYRNWSKPQCDITGFAPFSKDNSIRLSAGGDIWVTREPYVSCDPDKCYQFALGQGTTLNNIHSNNTVRDRTPYRTLLMNELGVPFHLGTKQVCIAWSSSSCHDGKAWLHVCITGDDKNATASFIYNGRLVDSVVSWSKEILRTQESECVCINGTCTVVMTDGSASGKADTKILFIEEGKIVHTSTLSGSAQHVEECSCYPRYPGVRCVCRDNWKGSNRPIVDINIKDHSIVSSYVCSGLVGDTPRKNDSSSSSHCLDPNNEEGGHGVKGWAFDDGNDVWMGRTISEKSRLGYETFKVIEGWSNPKSKLQINRQVIVDRGNRSGYSGIFSVEGKSCINRCFYVELIRGRKEETEVLWTSNSIVVFCGTSGTYGTGSWPDGADINLMPI

SEQ ID NO: 19291 - protein, 469 aa, Artificial Sequence; identical to SEQ ID NO: 17592
  derived and/or modified protein sequence (wt) from neuraminidase__InfluenzaA__ADK99297

SEQ ID NO: 19292 - protein, 469 aa, Artificial Sequence
  derived and/or modified protein sequence (wt) from neuraminidase__InfluenzaA__ADK99308
MNPNQKIITIGSVSLTISTICFFMQIAILVTTVTLHFKQYEFNSPPNNQVMLCEPTIIERNITEIVYLTNTTIEKEICPKLAEYRNWSKPQCDITGFAPFSKDNSIRLSAGGDIWVTREPYVSCDPDKCYQFALGQGTTLNNVHSNNTVRDRTPYRTLLMNELGIPFHLGTKQVCIAWSSSSCHDGKAWLHVCITGDDKNATASFIYNGRLVDSVVSWSKDILRTQESECVCINGTCTVVMTDGSASGKADTKILFIEEGKIVHTSTLSGSAQHVEECSCYPRYPGVRCVCRDNWKGSNRPIVDINIKDHSIVSSYVCSGLVGDTPRKNDSSSSSHCLDPNNEEGGHGVKGWAFDDGNDVWMGRTISEKSRLGYETFKVIEGWSNPKSKLQINRQVIVDRGNRSGYSGIFSVEGKSCINRCFYVELIRGRKEETEVLWTSNSIVVFCGTSGTYGTGSWPDGANINLMPI

SEQ ID NO: 19293 - protein, 470 aa, Artificial Sequence; identical to SEQ ID NO: 17461
  derived and/or modified protein sequence (wt) from neuraminidase__InfluenzaA__ADL14590

SEQ ID NO: 19294 - protein, 469 aa, Artificial Sequence; identical to SEQ ID NO: 18484
  derived and/or modified protein sequence (wt) from neuraminidase__InfluenzaA__ADL27992

SEQ ID NO: 19295 - protein, 469 aa, Artificial Sequence; identical to SEQ ID NO: 19123
  derived and/or modified protein sequence (wt) from neuraminidase__InfluenzaA__ADL28003

SEQ ID NO: 19296 - protein, 469 aa, Artificial Sequence; identical to SEQ ID NO: 19268
  derived and/or modified protein sequence (wt) from neuraminidase__InfluenzaA__ADL28014

SEQ ID NO: 19297 - protein, 469 aa, Artificial Sequence
  derived and/or modified protein sequence (wt) from neuraminidase__InfluenzaA__ADL28025
MNPNQKIITIGSVSLTISTICFFMQIAILITTVTLHFKQYEFNSPPNNQVMLCEPTIIERNITEIVYLTNTTIEKKICPKLAEYRNWSKPQCDITGFAPFSKDNSIRLSAGGDIWVTREPYVSCDPDKCYQFALGQGTTLNNVHSNNTVRDRTPYRTLLMNELGVPFHLGTKQVCIAWSSSSCHDGKAWLHVCITGDDKNATASFIYNGRLVDSVVSWSKEILRTQESECVCINGTCTVVMTDGSASGKADTKILFIEEGKIVHTSTLSGSAQHVEECSCYPRYPGVRCVCRDNWKGSNRPIVDINIKDHSIVSSYLCSGLVGDTPRKNDSSSSSHCLDPNNEEGGHGVKGWAFDDGNDVWMGRTISEKSRLGYETFKVIEGWSNPKSKLQINRQVIVDRGNRSGYSGIFSVEGKSCINRCFYVELIRGRKEETEVLWTSNSIVVFCGTSGTYGTGSWPDGADINLMPI

SEQ ID NO: 19298 - protein, 469 aa, Artificial Sequence; identical to SEQ ID NO: 18484
  derived and/or modified protein sequence (wt) from neuraminidase__InfluenzaA__ADL28036

SEQ ID NO: 19299 - protein, 469 aa, Artificial Sequence; identical to SEQ ID NO: 16599
  derived and/or modified protein sequence (wt) from neuraminidase__InfluenzaA__ADL28047

SEQ ID NO: 19300 - protein, 469 aa, Artificial Sequence; identical to SEQ ID NO: 17905
  derived and/or modified protein sequence (wt) from neuraminidase__InfluenzaA__ADL28058

SEQ ID NO: 19301 - protein, 469 aa, Artificial Sequence; identical to SEQ ID NO: 19276
  derived and/or modified protein sequence (wt) from neuraminidase__InfluenzaA__ADL28069

SEQ ID NO: 19302 - protein, 469 aa, Artificial Sequence; identical to SEQ ID NO: 19123
  derived and/or modified protein sequence (wt) from neuraminidase__InfluenzaA__ADL28080

SEQ ID NO: 19303 - protein, 469 aa, Artificial Sequence; identical to SEQ ID NO: 18484
  derived and/or modified protein sequence (wt) from neuraminidase__InfluenzaA__ADL28091

SEQ ID NO: 19304 - protein, 469 aa, Artificial Sequence
  derived and/or modified protein sequence (wt) from neuraminidase__InfluenzaA__ADL28102
MNPNQKIITIGSVSLTISTICFFMQIAILITTVTLHFKQYEFNSPPNNQVMLCEPTIIERNITEIVYLTNTTIEKEICPKLAEYRNWSKPQCDITGFAPFSKDNSIRLSAGGDIWVTREPYVSCDPDKCYQFALGQGTTLNNVHSNNTVRDRTPYRTLLMNELGVPFHLGTKQVCIAWSSSSCHDGKAWLHVCITGDDKNATASFIYNGRLVDSVVSWSKDILRTQESECVCINGTCTVVMTDGSASGKADTKILFIEEGKIVHTSTLSGSAQHVEECSCYPRYPGVRCVCRDNWKGSNRPIVDINIKDHSIVSSYVCSGLVGDTPRKNDSSSSSHCLDPNNEEGGHGVKGWAFDDGNDVWMGRTISEKSRLGYETFKVIEGWSNPKSKLQINRQVIVDRGNRSGYSGIFSVEGKSCINRCFYVELIRGRKEETEVLWTSNSIVVFCGTSGTYGTGSWPDGADINLMPI

SEQ ID NO: 19305 - protein, 469 aa, Artificial Sequence; identical to SEQ ID NO: 16599
  derived and/or modified protein sequence (wt) from neuraminidase__InfluenzaA__ADL28113

SEQ ID NO: 19306 - protein, 469 aa, Artificial Sequence
  derived and/or modified protein sequence (wt) from neuraminidase__InfluenzaA__ADL28129
MNPNQKIITIGSVSLTISTICFFMQIAILVTTVTLHFKQYEFNSPPNNQVMLCEPTIIERNITEIVYLTNTTIEKEICPKLAEYRNWSKPQCDITGFAPFSKDNSIRLSAGGDIWVTREPYVSCDPDKCYQFALGQGTTLNNVHSNNTVRDRTPYRTLLMNELGVPFHLGTKQVCIAWSSSSCHDGKAWLHVCITGDDKNATASFIYNGRLVDSVVSWSKDILRTQESECVCINGTCTVVMTDGSASGKADTKILFIEEGKIVHTSTLSGSAQHVEECSCYPRYPGVRCVCRDNWKGSNRPIVDINIKDHSIVSSYVCSGLVGDTPRKNDSSSSSHCLDPNNEEGGHGVKGWAFDDGNDVWMGRTISEKSRLGYETFKVIEGWSNPKSKLQINRQVIVDRGNRSGYSGIFSVEGKSCINRCFYVELIRGRKEETEILWTSNSIVVFCGTSGTYGTGSWPDGANINLMPI

SEQ ID NO: 19307 - protein, 469 aa, Artificial Sequence
  derived and/or modified protein sequence (wt) from neuraminidase__InfluenzaA__ADL28140
MNPNQKIITIGSVSLTISTICFFMQIAILITTVTLHFKQYEFNSPPNNQVMLCEPTIIERNITEIVYLTNTTIEKEICPKLAEYRNWSKPQCDITGFAPFSKDNSIRLSAGGDIWVTREPYVSCDPDKCYQFALGQGTTLNNVHSNNTVRDRTPYRTLLMNELGVPFHLGTKQVCIAWSSSSCHDGKAWLHVCITGDDKNATASFIYNGKLVDSVVSWSKEILRTQESECVCINGTCTVVMTDGSASGKADTKILFIEEGKIVHTSTLSGSAQHVEECSCYPRYPGVRCVCRDNWKGSNRPIVDINIKDHSIVSSYVCSGLVGDTPRKNDSSSSSHCLDPNNEEGGHGVKGWAFDDGNDVWMGRTISEKSRLGYETFKVIEGWSNPKSKLQINRQVIVDRGNRSGYSGIFSVEGKSCINRCFYVELIRGRKEETEVLWTSNSIVVFCGTSGTYGTGSWPDGANINLMPI

SEQ ID NO: 19308 - protein, 469 aa, Artificial Sequence; identical to SEQ ID NO: 18484
  derived and/or modified protein sequence (wt) from neuraminidase__InfluenzaA__ADL28151

SEQ ID NO: 19309 - protein, 469 aa, Artificial Sequence; identical to SEQ ID NO: 17905
  derived and/or modified protein sequence (wt) from neuraminidase__InfluenzaA__ADL28162

SEQ ID NO: 19310 - protein, 469 aa, Artificial Sequence; identical to SEQ ID NO: 19123
  derived and/or modified protein sequence (wt) from neuraminidase__InfluenzaA__ADL28173

SEQ ID NO: 19311 - protein, 469 aa, Artificial Sequence; identical to SEQ ID NO: 18484
  derived and/or modified protein sequence (wt) from neuraminidase__InfluenzaA__ADL28184

SEQ ID NO: 19312 - protein, 469 aa, Artificial Sequence
  derived and/or modified protein sequence (wt) from neuraminidase__InfluenzaA__ADL28195
MNPNQKIITIGSVSLTISTICFFMQIAILITTVTLHFKQYEFNSPPNNQVMLCEPTIIERNITEIVYLTNTTIEKEICPKLAEYRNWSKPQCDITGFAPFSKDNSIRLSAGGDIWVTREPYVSCDPDKCYQFALGQGTTLNNVHSNNTVRDRTPYRTLLMNELGVPFHLGTKQVCIAWSSSSCHDGKAWLHVCITGDDKNATASFIYNGRLVDSVVSWSKEILRTQESECVCVNGTCTVVMTDGSASGKADTKILFIEEGKIVHTSTLSGSAQHVEECSCYPRYPGVRCVCRDNWKGSNRPIVDINIKDHSIVSSYVCSGLVGDTPRKNDSSSSSHCLDPNNEEGGHGVKGWAFDDGNDVWMGRTISEKSRLGYETFKVIEGWSNPKSKLQINRQVIVDRGNRSGYSGIFSVEGKSCINRCFYVELIRGRKEETEVLWTSNSIVVFCGTSGTYGTGSWPDGADINLMPI

SEQ ID NO: 19313 - protein, 469 aa, Artificial Sequence; identical to SEQ ID NO: 19273
  derived and/or modified protein sequence (wt) from neuraminidase__InfluenzaA__ADL28206

SEQ ID NO: 19314 - protein, 469 aa, Artificial Sequence; identical to SEQ ID NO: 17592
  derived and/or modified protein sequence (wt) from neuraminidase__InfluenzaA__ADL28217

SEQ ID NO: 19315 - protein, 469 aa, Artificial Sequence; identical to SEQ ID NO: 18484
  derived and/or modified protein sequence (wt) from neuraminidase__InfluenzaA__ADL28228

SEQ ID NO: 19316 - protein, 469 aa, Artificial Sequence; identical to SEQ ID NO: 19123
  derived and/or modified protein sequence (wt) from neuraminidase__InfluenzaA__ADL28239

SEQ ID NO: 19317 - protein, 469 aa, Artificial Sequence; identical to SEQ ID NO: 17905
  derived and/or modified protein sequence (wt) from neuraminidase__InfluenzaA__ADL28250

SEQ ID NO: 19318 - protein, 469 aa, Artificial Sequence; identical to SEQ ID NO: 19123
  derived and/or modified protein sequence (wt) from neuraminidase__InfluenzaA__ADL28261

SEQ ID NO: 19319 - protein, 469 aa, Artificial Sequence; identical to SEQ ID NO: 18484
  derived and/or modified protein sequence (wt) from neuraminidase__InfluenzaA__ADL28373

SEQ ID NO: 19320 - protein, 469 aa, Artificial Sequence; identical to SEQ ID NO: 16603
  derived and/or modified protein sequence (wt) from neuraminidase__InfluenzaA__ADL28387

SEQ ID NO: 19321 - protein, 469 aa, Artificial Sequence
  derived and/or modified protein sequence (wt) from neuraminidase__InfluenzaA__ADL28391
MNPNQKIITIGSVSLTISTICFFMQIAILITTVTLHFKQYEFNSSPNNQVMLCEPTIIERNITEIVYLTNTTIEKEICPKLAEYRNWSKPQCDITGFAPFSKDNSIRLSAGGDIWVTRVPYVSCDPDKCYQFALGQGTTLNNVHSNNTVRDRTPYRTLLMNELGVPFHLGTKQVCIAWSSSSCHDGKAWLHVCITGDDKNATASFIYNGRLVDSIVSWSKEILRTQESECVCINGTCTVVMTDGSASGKADTKILFIEEGKIVHTSTLSGSAQHVEECSCYPRYPGVRCVCRDNWKGSNRPIVDINIKDHSIVSSYVCSGLVGDTPRKNDSSSSSHCLDPNNEEGGHGVKGWAFDDGNDVWMGRTISEKSRLGYETFKVIEGWSNPKSKLQINRQVIVDRGNRSGYSGIFSVEGKSCINRCFYVELIRGRKEETEVLWTSNSIVVFCGTSGTYGTGSWPDGADINLMPI

SEQ ID NO: 19322 - protein, 469 aa, Artificial Sequence
  derived and/or modified protein sequence (wt) from neuraminidase__InfluenzaA__ADL28395
MNPNQKIITIGSVSLTIATICFLMQIAILVTTVTLHFKQYECNSPPNNQVMLCEPAIIERNITEIVYLTNTTIEKEICPKLAEYRNWSKPQCNITGFAPFSKDNSIRLSAGGDIWVTRVPYVSCDPDKCYQFALGQGTTLNNGHSNDTVHDRTPYRTLLMNELGVPFHLGTRQVCIAWSSSSCHDGKAWLHVCVTGDDENATASFIYNGRLVDSIGSWSKKILRTQESECVCINGTCTVVMTDGSASGKADTKILFIEEGKIVNISTLSGSAQHVEECSCYPRYPGVRCVCRDNWKGSNRPIVDINVKDYSIVSSYVCSGLVGDTPRKNDSFSSSHCLDPNNEEGGHGVKGWAFDDGNDVWMGRTISEKFRSGYETFKVIEGWSKPNSKLQINRQVIVERGNRSGYSGIFSVEGKSCINRCFYVELIRGRKEETEVWWTSNSIVVFCGTSGTYGTGSWPDGADINLMPI

SEQ ID NO: 19323 - protein, 469 aa, Artificial Sequence; identical to SEQ ID NO: 16738
  derived and/or modified protein sequence (wt) from neuraminidase__InfluenzaA__ADL29675

SEQ ID NO: 19324 - protein, 469 aa, Artificial Sequence; identical to SEQ ID NO: 16738
  derived and/or modified protein sequence (wt) from neuraminidase__InfluenzaA__ADL29685

SEQ ID NO: 19325 - protein, 469 aa, Artificial Sequence
  derived and/or modified protein sequence (wt) from neuraminidase__InfluenzaA__ADL29695
MNPNQKIITIGSVCMTIGMANLILQIGNIISIWISHSIQLGNQNQIETCNQSVITYENNTWVNQTYVNISNTNFAAGQSVVSVKLAGNSSLCPVSGWAIYSKDNSIRIGSKGDVFVIREPFISCSPLECRTFFLTQGALLNDKHSNGTIKDRSPYRTLMSCPIGEVPSPYNSRFESVAWSASACHDGINWLTIGISGPDNGAVAVLKYNGIITDTIKSWRNNILRTQESECACVNGSCFTVMTDGPSDGQASYKIFRIEKGKIVKSVEMNAPNYHYEECSCYPDSSEITCVCRDNWHGSNRPWVSFNQNLEYQIGYICSGIFGDNPRPNDKTGSCGPVSSNGANGVKGFSFKYGNGVWIGRTKSISSRNGFEMIWDPNGWTGTDNNFSIKQDIVGINEWSGYSGSFVQHPELTGLDCIRPCFWVELIRGRPKENTIWTSGSSISFCGVNSDIVGWSWPDGAELPFTIDK

SEQ ID NO: 19326 - protein, 469 aa, Artificial Sequence; identical to SEQ ID NO: 16738
  derived and/or modified protein sequence (wt) from neuraminidase__InfluenzaA__ADL29705

SEQ ID NO: 19327 - protein, 469 aa, Artificial Sequence; identical to SEQ ID NO: 19325
  derived and/or modified protein sequence (wt) from neuraminidase__InfluenzaA__ADL29733

SEQ ID NO: 19328 - protein, 469 aa, Artificial Sequence; identical to SEQ ID NO: 16738
  derived and/or modified protein sequence (wt) from neuraminidase__InfluenzaA__ADL29743

SEQ ID NO: 19329 - protein, 469 aa, Artificial Sequence
  derived and/or modified protein sequence (wt) from neuraminidase__InfluenzaA__ADL29753
MNPNQKIITIGSVCMAIGMANLILQIGNIISIWISHSIQLGNQNQIETCNQSVITYENNTWVNQTYVNISNTNFAAGQSVVSVKLAGNSSLCPVSGWAIYSKDNSIRIGSKGDVFVIREPFISCSPLECRTFFLTQGALLNDKHSNGTIKDRSPYRTLMSCPIGEVPSPYNSRFESVAWSASACHDGINWLTIGISGPDNGAVAVLKYNGIITDTIKSWRNNILRTQESECACVNGSCFTVMTDGPSDGQASYKIFRIEKGKIVKSVEMNAPNYHYEECSCYPDSSEITCVCRDNWHGSNRPWVSFNQNLEYQIGYICSGIFGDNPRPNDKTGSCGPVSSNGANGVKGFSFKYGNGVWIGRTKSISSRNGFEMIWDPNGWTGTDNNFSIKQDIVGINEWSGYSGSFVQHPELTGLDCIRPCFWVELIRGRPKENTIWTSGSSISFCGVNSDIVGWSWPDGAELPFTIDK

SEQ ID NO: 19330 - protein, 469 aa, Artificial Sequence; identical to SEQ ID NO: 16738
  derived and/or modified protein sequence (wt) from neuraminidase__InfluenzaA__ADL29763

SEQ ID NO: 19331 - protein, 469 aa, Artificial Sequence; identical to SEQ ID NO: 19325
  derived and/or modified protein sequence (wt) from neuraminidase__InfluenzaA__ADL29773

SEQ ID NO: 19332 - protein, 469 aa, Artificial Sequence; identical to SEQ ID NO: 16738
  derived and/or modified protein sequence (wt) from neuraminidase__InfluenzaA__ADL29783

SEQ ID NO: 19333 - protein, 469 aa, Artificial Sequence; identical to SEQ ID NO: 19325
  derived and/or modified protein sequence (wt) from neuraminidase__InfluenzaA__ADL29882

SEQ ID NO: 19334 - protein, 469 aa, Artificial Sequence
  derived and/or modified protein sequence (wt) from neuraminidase__InfluenzaA__ADL32020
MNPNQKIITIGSVCMTIGMANLILQIGNIISTWISHSIQLGNQNQIETCNQSVITYENNTWVNQTYVNISNTNFAAGQSVVSVKLAGNSSLCPVSGWAIYSKDNSIRIGSKGDVFVIREPFISCSPLECRTFFLTQGALLNDKHSNGTIKDRSPYRTLMSCPIGEVPSPYNSRFESVAWSASACHDGINWLTIGISGPDNGAVAVLKYNGIITDTIKSWRNNILRTQESECACVNGSCFTVMTDGPSDGQASYKIFRIEKGKIVKSVEMNAPNYHYEECSCYPDSSEITCVCRDNWHGSNRPWVSFNQNLEYQIGYICSGIFGDNPRPNDKTGSCGPVSSNGANGVKGFSFKYGNGVWIGRTKSISSRNGFEMIWDPNGWTGTDNNFSIKQDIVGINEWSGYSGSFVQHPELTGLDCIRPCFWVELIRGRPKENTIWTSGSSISFCGVNSDTVGWSWPDGAELPFTIDK

SEQ ID NO: 19335 - protein, 469 aa, Artificial Sequence; identical to SEQ ID NO: 19325
  derived and/or modified protein sequence (wt) from neuraminidase__InfluenzaA__ADL32030

SEQ ID NO: 19336 - protein, 469 aa, Artificial Sequence; identical to SEQ ID NO: 16738
  derived and/or modified protein sequence (wt) from neuraminidase__InfluenzaA__ADL32040

SEQ ID NO: 19337 - protein, 469 aa, Artificial Sequence; identical to SEQ ID NO: 16738
  derived and/or modified protein sequence (wt) from neuraminidase__InfluenzaA__ADL32050

SEQ ID NO: 19338 - protein, 469 aa, Artificial Sequence; identical to SEQ ID NO: 16738
  derived and/or modified protein sequence (wt) from neuraminidase__InfluenzaA__ADL32060

SEQ ID NO: 19339 - protein, 469 aa, Artificial Sequence; identical to SEQ ID NO: 16738
  derived and/or modified protein sequence (wt) from neuraminidase__InfluenzaA__ADL32093

SEQ ID NO: 19340 - protein, 469 aa, Artificial Sequence; identical to SEQ ID NO: 16738
  derived and/or modified protein sequence (wt) from neuraminidase__InfluenzaA__ADL32117

SEQ ID NO: 19341 - protein, 469 aa, Artificial Sequence; identical to SEQ ID NO: 16738
  derived and/or modified protein sequence (wt) from neuraminidase__InfluenzaA__ADL32347

SEQ ID NO: 19342 - protein, 469 aa, Artificial Sequence
  derived and/or modified protein sequence (wt) from neuraminidase__InfluenzaA__ADL32357
MNPNQKIITIGSVCMTIGMANLILQIGNIISIWISHSIQLGNQNQIETCNQSVITYENNTWVNQTYVNISNTNFAAGQSVVSVKLAGNSSLCPVSGWAIYSKDNSIRIGSKGDVFVIREPFISCSPLECRTFFLTQGALLNDKHSNGTIKDRSPYRTLMSCPIGEVPSPYNSRFESVAWSASACHDGINWLTIGISGPDNGAVAVLKYNGIITDTIKSWRNNILRTQESECACVNGSCFTVMTDGPSDGQASYKIFRIEKGKIVKSVEMNAPNYHYEECSCYPDSSEITCVCRDNWHGSNRPWVSFNQNLEYQIGYICSGIFGDNPRPNDKTGSCGPVSSNGANGVKGFSFKYGNGVWIGRTKSISSRNGFEMIWDPNGWTGTDNNFSIKQDIVGINEWSGYSGSFVQHPELTGLDCIRPCFWVELIRGRPKENTIWTSGSSISFCGVNSDTVGWSWPDGAELPFTVDK

SEQ ID NO: 19343 - protein, 469 aa, Artificial Sequence; identical to SEQ ID NO: 16738
  derived and/or modified protein sequence (wt) from neuraminidase__InfluenzaA__ADL32367

SEQ ID NO: 19344 - protein, 469 aa, Artificial Sequence; identical to SEQ ID NO: 16738
  derived and/or modified protein sequence (wt) from neuraminidase__InfluenzaA__ADL32377

SEQ ID NO: 19345 - protein, 469 aa, Artificial Sequence; identical to SEQ ID NO: 16738
  derived and/or modified protein sequence (wt) from neuraminidase__InfluenzaA__ADL32387

SEQ ID NO: 19346 - protein, 469 aa, Artificial Sequence; identical to SEQ ID NO: 16738
  derived and/or modified protein sequence (wt) from neuraminidase__InfluenzaA__ADL32397

SEQ ID NO: 19347 - protein, 469 aa, Artificial Sequence; identical to SEQ ID NO: 16738
  derived and/or modified protein sequence (wt) from neuraminidase__InfluenzaA__ADL32407

SEQ ID NO: 19348 - protein, 469 aa, Artificial Sequence; identical to SEQ ID NO: 16738
  derived and/or modified protein sequence (wt) from neuraminidase__InfluenzaA__ADL32417

SEQ ID NO: 19349 - protein, 469 aa, Artificial Sequence
  derived and/or modified protein sequence (wt) from neuraminidase__InfluenzaA__ADL32427
MNPNQKIITIGSVCMTIGMANLILQIGNIISIWISHSIQLGNQNQIETCNQSVITYENNTWVNQTYVNISNTNFAAGQSVVSVKLAGNSSLCPVSGWAIYSKDNSIRIGSKGDVFVIREPFISCSPLECRTFFLTQGALLNDKHSNGTIKDRSPYRTLMSCPIGEVPSPYNSRFESVAWSASACHDGINWLTIGISGPDNGAVAVLKYNGIITDTIKSWRNNILRTQESECACVNGSCFTVMTDGPSDGQASYKIFRIEKGKIVKSVEMNAPNYHYEECSCYPDSSEITCVCRDNWHGSNRPWVSFNQNLEYQIGYICSGIFGDNPRPNDKTGSCGPVSSNGANGVKGFSFKYGNGVWIGRTKSISSRNGFEMIWDPNGWTGTDNNFSIKQDIVGINEWSGYSGSFVQHPELTGLDCIRPCFWVELIRGRPKEKTIWTSGSIISFCGVNSDTVGWSWPDGAELPFTIDK

SEQ ID NO: 19350 - protein, 469 aa, Artificial Sequence; identical to SEQ ID NO: 16738
  derived and/or modified protein sequence (wt) from neuraminidase__InfluenzaA__ADL32447

SEQ ID NO: 19351 - protein, 469 aa, Artificial Sequence
  derived and/or modified protein sequence (wt) from neuraminidase__InfluenzaA__ADL32457
MNPNQKIITIGSVCMTIGMANLILQIGNIISIWISHSIQLGNQNQIETCNQSVITYENNTWVNQTYVNISNTNFAAGQSVVSVKLAGNSSLCPVSGWAIYSKDKSIRIGSKGDVFVIREPFISCSPLECRTFFLTQGALLNDKHSNGTIKDRSPYRTLMSCPIGEVPSPYNSRFESVAWSASACHDGISWLTIGISGPDNGAVAVLKYNGIITDTIKSWRNNILRTQESECACVNGSCFTVMTDGPSDGQASYKIFRIEKGKIVKSVEMNAPNYHYEECSCYPDSSEITCVCRDNWHGSNRPWVSFNQNLEYQIGYICSGIFGDNPRPNDKTGSCGPVSSNGANGVKGFSFKYGNGVWIGRTKSISSRNGFEMIWDPNGWTGTDNNFSIKQDIVGINEWSGYSGSFVQHPELTGLDCIRPCFWVELIRGRPKENTIWTSGSSISFCGVSSDTVGWSWPDGAELPFTIDK

SEQ ID NO: 19352 - protein, 469 aa, Artificial Sequence; identical to SEQ ID NO: 17915
  derived and/or modified protein sequence (wt) from neuraminidase__InfluenzaA__ADL32487

SEQ ID NO: 19353 - protein, 469 aa, Artificial Sequence; identical to SEQ ID NO: 16738
  derived and/or modified protein sequence (wt) from neuraminidase__InfluenzaA__ADL32497

SEQ ID NO: 19354 - protein, 469 aa, Artificial Sequence; identical to SEQ ID NO: 16738
  derived and/or modified protein sequence (wt) from neuraminidase__InfluenzaA__ADL32507

SEQ ID NO: 19355 - protein, 469 aa, Artificial Sequence; identical to SEQ ID NO: 18200
  derived and/or modified protein sequence (wt) from neuraminidase__InfluenzaA__ADL32517

SEQ ID NO: 19356 - protein, 469 aa, Artificial Sequence; identical to SEQ ID NO: 17915
  derived and/or modified protein sequence (wt) from neuraminidase__InfluenzaA__ADL32527

SEQ ID NO: 19357 - protein, 469 aa, Artificial Sequence; identical to SEQ ID NO: 16738
  derived and/or modified protein sequence (wt) from neuraminidase__InfluenzaA__ADL32537

SEQ ID NO: 19358 - protein, 469 aa, Artificial Sequence; identical to SEQ ID NO: 17625
  derived and/or modified protein sequence (wt) from neuraminidase__InfluenzaA__ADL32547

SEQ ID NO: 19359 - protein, 469 aa, Artificial Sequence; identical to SEQ ID NO: 18089
  derived and/or modified protein sequence (wt) from neuraminidase__InfluenzaA__ADL32673

SEQ ID NO: 19360 - protein, 469 aa, Artificial Sequence; identical to SEQ ID NO: 16738
  derived and/or modified protein sequence (wt) from neuraminidase__InfluenzaA__ADL32683

SEQ ID NO: 19361 - protein, 469 aa, Artificial Sequence; identical to SEQ ID NO: 16728
  derived and/or modified protein sequence (wt) from neuraminidase__InfluenzaA__ADL32693

SEQ ID NO: 19362 - protein, 469 aa, Artificial Sequence; identical to SEQ ID NO: 17961
  derived and/or modified protein sequence (wt) from neuraminidase__InfluenzaA__ADL32703

SEQ ID NO: 19363 - protein, 469 aa, Artificial Sequence; identical to SEQ ID NO: 16728
  derived and/or modified protein sequence (wt) from neuraminidase__InfluenzaA__ADL32713

SEQ ID NO: 19364 - protein, 469 aa, Artificial Sequence; identical to SEQ ID NO: 16738
  derived and/or modified protein sequence (wt) from neuraminidase__InfluenzaA__ADL32723

SEQ ID NO: 19365 - protein, 469 aa, Artificial Sequence; identical to SEQ ID NO: 18419
  derived and/or modified protein sequence (wt) from neuraminidase__InfluenzaA__ADL32733

SEQ ID NO: 19366 - protein, 469 aa, Artificial Sequence; identical to SEQ ID NO: 18419
  derived and/or modified protein sequence (wt) from neuraminidase__InfluenzaA__ADL32743

SEQ ID NO: 19367 - protein, 469 aa, Artificial Sequence
  derived and/or modified protein sequence (wt) from neuraminidase__InfluenzaA__ADL39139
MNPNQKIITIGSVSLTISTICFFMQIAILITTVTLHFKQYEFNSPPNNQVMLSEPTIIERNITEIVYLTNTTIEKEICPKLAEYRNWSKPQCDITGFAPFSKDNSIRLSAGGDIWVTREPYVSCDPDKCYQFALGQGTTLNNVHSNNTVRERTPYRTLLMNELGVPFHLGTKQVCIAWSSSSCHDGKAWLHVCITGDDKNATASFIYNGRLVDSVVSWSKEILRTQESECVCINGTCTVVMTDGSASGKADTKILFIEEGKIVHTSTLSGSAQHVEECSCYPRYPGVRCVCRDNWKGSNRPIVDINIKDHSIVSSYVCSGLVGDTPRKNDSSSSSHCLDPNNEEGGHGVKGWAFDDGNDVWMGRTISEKSRLGYETFKVIEGWSNPKSKLQINRQVIVDRGNRSGYSGIFSVEGKSCINRCFYVELIRGRKEETEVLWTSNSIVVFCGTSGTYGTGSWPDGADINLMPI

SEQ ID NO: 19368 - protein, 470 aa, Artificial Sequence
  derived and/or modified protein sequence (wt) from neuraminidase__InfluenzaA__ADL39150
MNPNQKIITIGSISIAIGIISLMLQIGNIISIWASHSIQTGSQNNTGICNQRIITYENSTWVNHTYVNINNTNVVAGEDKTSVTLAGNSSLCSISGWAIYTKDNSIRIGSKGDVFVIREPFISCSHLECRTFFLTQGALLNDKHSNGTVKDRSPYRALMSCPLGEAPSPYNSKFESVAWSASACHDGMGWLTIGISGPDNGAVAVLKYNGIITETIKSWKKQILRTQESECVCMNGSCFTIMTDGPSNKAASYKIFKIEKGKVTKSIELNAPNFYYEECSCYPDTGIVMCVCRDNWHGSNRPWVSFNQNLDYQIGYICSGVFGDNPRPEDGEGSCNPVTVDGANGVKGFSYKYGNGVWIGRTKSNRLRKGFEMIWDPNGWTNTDSDFSVKQDVVAITDWSGYSGSFVQHPELTGLDCIRPCFWVELVRGLPRENTTIWTSGSSISFCGVNSDTANWSWPDGAELPFTIDK

SEQ ID NO: 19369 - protein, 469 aa, Artificial Sequence
  derived and/or modified protein sequence (wt) from neuraminidase__InfluenzaA__ADL39172
MNPNQKIITIGSVSLTISTICFFMQIAILITTVTLHFKQYEFNSPPNNQVMLCEPTIIERNITEIVYLTNTTIEKEICPKLAEYRNWSKPQCDITGFAPFSKDNSIRLSAGGDIWVTREPYVSCDPDKCYQFALGQGTTLNNVHSNNTVRDRTPYRTLLMNELGVPFHLGTKQVCIAWSSSSCHDGKAWLHVCITGDDKNATASFIYNGRLVDSVVSWSKEILRTQESECVCINGTCTVVMTDGSASGEADTKILFIEEGKIVHTSTLSGSAQHVEECSCYPRYPGVRCVCRDNWKGSNRPIVDINIKDHSIVSSYVCSGLVGDTPRKNDSSSSSHCLDPNNEEGGHGVKGWAFDDGNDVWMGRTISEKSRLGYETFKVIEGWSNPKSKLQINRQVIVDRGNRSGYSGIFSVEGKSCINRCFYVELIRGRKEETEVLWTSNSIVVFCGTSGTYGTGSWPDGADINLMPI

SEQ ID NO: 19370 - protein, 469 aa, Artificial Sequence; identical to SEQ ID NO: 16599
  derived and/or modified protein sequence (wt) from neuraminidase__InfluenzaA__ADL39183

SEQ ID NO: 19371 - protein, 470 aa, Artificial Sequence; identical to SEQ ID NO: 18930
  derived and/or modified protein sequence (wt) from neuraminidase__InfluenzaA__ADL39194

SEQ ID NO: 19372 - protein, 469 aa, Artificial Sequence; identical to SEQ ID NO: 16599
  derived and/or modified protein sequence (wt) from neuraminidase__InfluenzaA__ADL39205

SEQ ID NO: 19373 - protein, 470 aa, Artificial Sequence; identical to SEQ ID NO: 17461
  derived and/or modified protein sequence (wt) from neuraminidase__InfluenzaA__ADL39227

SEQ ID NO: 19374 - protein, 470 aa, Artificial Sequence; identical to SEQ ID NO: 18930
  derived and/or modified protein sequence (wt) from neuraminidase__InfluenzaA__ADL39238

SEQ ID NO: 19375 - protein, 470 aa, Artificial Sequence; identical to SEQ ID NO: 18930
  derived and/or modified protein sequence (wt) from neuraminidase__InfluenzaA__ADL39249

SEQ ID NO: 19376 - protein, 470 aa, Artificial Sequence; identical to SEQ ID NO: 17461
  derived and/or modified protein sequence (wt) from neuraminidase__InfluenzaA__ADL39260

SEQ ID NO: 19377 - protein, 469 aa, Artificial Sequence
  derived and/or modified protein sequence (wt) from neuraminidase__InfluenzaA__ADL39282
MNPNQKIITIGSVSLTISTICFFMQIAILITTVTLHFKQYEFNSPPNNQVMLCEPTIIEKNITEIVYLTNTTIEKEICPRLAEYRNWSKPQCDITGFAPFSKDNSIRLSAGGDIWVTREPYVSCDPDKCYQFALGQGTTLNNVHSNNKVRDRTPYRTLLMNELGVPFHLGTKQVCIAWSSSSCHDGKAWLHVCITGDDKNATASFIYNGRLVDSVVSWSKEILRTQESECVCINGTCTVVMTDGSASGKADTKILFIEEGKIVHTSTLSGSAQHVEECSCYPRYPGVRCVCRDNWKGSNRPIVDINIKDHSIVSSYVCSGLVGDTPRKNDSSSSSHCLDPNNEEGGHGVKGWAFDDGNDVWMGRTISEKSRLGYETFKVIEGWSNPKSKLQINRQVIVDRGNRSGYSGIFSVEGKSCINRCFYVELIRGRKEETEVLWTSNSIVVFCGTSGTYGTGSWPDGADINLMPI

SEQ ID NO: 19378 - protein, 470 aa, Artificial Sequence; identical to SEQ ID NO: 17461
  derived and/or modified protein sequence (wt) from neuraminidase__InfluenzaA__ADL39293

SEQ ID NO: 19379 - protein, 469 aa, Artificial Sequence
  derived and/or modified protein sequence (wt) from neuraminidase__InfluenzaA__ADL39304
MNPNQKIITIGSVSLTISTICFFMQIAILITTVTLHFKQYEFNFPPNNQVMLCEPTIIERNITEIVYLTNTTIEKEICPKLAEYRNWSKPQCDITGFAPFSKDNSIRLSAGGDIWVTREPYVSCDPDKCYQFALGQGTTLNNVHSNNTVRDRTPYRTLLMNELGVPFHLGTKQVCIAWSSSSCHDGKAWLHVCITGDDKNATASFIYNGRLVDSVVSWSKEILRTQESECVCINGTCTVVMTDGSASGKADTKILFIEEGKIVHTSTLSGSAQHVEECSCYPRYPGVRCVCRDNWKGSNRPIVDINIKDHSIVSSYVCSGLVGDTPRKNDSSSSSHCLDPNNEEGGHGVKGWAFDDGNDVWMGRTISEKSRLGYETFKVIEGWSNPKSKLQINRQVIVDRGNRSGYSGIFSVEGKSCINRCFYVELIRGRKEETEVLWTSNSIVVFCGTSGTYGTGSWPDGADINLMPI

SEQ ID NO: 19380 - protein, 469 aa, Artificial Sequence; identical to SEQ ID NO: 16599
  derived and/or modified protein sequence (wt) from neuraminidase__InfluenzaA__ADL39326

SEQ ID NO: 19381 - protein, 470 aa, Artificial Sequence; identical to SEQ ID NO: 18930
  derived and/or modified protein sequence (wt) from neuraminidase__InfluenzaA__ADL39392

SEQ ID NO: 19382 - protein, 469 aa, Artificial Sequence
  derived and/or modified protein sequence (wt) from neuraminidase__InfluenzaA__ADL39403
MNPNQKIITIGSVSLTISTICFFMQIAILITTVTLHFKQYEFNPPPNNQVMLCEPTIIERNITEIVYLTNTTIEKEICPKLAEYRNWSKPQCDITGFAPFSKDNSIRLSAGGDIWVTREPYVSCDPDKCYQFALGQGTTLNNVHSNNTVRDRTPYRTLLMNELGVPFHLGTKQVCIAWSSSSCHDGKAWLHVCITGDDKNATASFIYNGRLVDSVVSWSKEILRTQESECVCINGTCTVVMTDGSASGKADTKILFIEEGKIVHTSTLSGSAQHVEECSCYPRYPGVRCVCRDNWKGSNRPIVDINIKDHSIVSSYVCSGLVGDTPRKNDSSSSSHCLDPNNEEGGHGVKGWAFDDGNDVWMGRTISEKSRLGYETFKVIEGWSNHKSKLQINRQVIVDRGNRSGYSGIFSVEGKSCINRCFYVELIRGRKEETEVLWTSNSIVVFCGTSGTYGTGSWPDGADLNLMPI

SEQ ID NO: 19383 - protein, 470 aa, Artificial Sequence; identical to SEQ ID NO: 17461
  derived and/or modified protein sequence (wt) from neuraminidase__InfluenzaA__ADL39425

SEQ ID NO: 19384 - protein, 470 aa, Artificial Sequence
  derived and/or modified protein sequence (wt) from neuraminidase__InfluenzaA__ADL39447
MNPNQKIITIGSISIAIGIISLMLQIGSIISIWASHSIQTGSQNNTGICNQRIITYENSTWVNHTYVNINNTNVVAGEDKTSVTLTGNSSLCSISGWAIYTKDNSIRIGSKGDVFVIREPFISCSHLECRTFFLTQGALLNDKHSNGTVKDRSPYRALMSCPLGEAPSPYNSKFESVAWSASACHDGMGWLTIGISGPDNGAVAVLKYNGIITGTIKSWKKQILRTQESECVCMNGSCFTIMTDGPSNKAASYKIFKIEKGKVTKSIELNAPNFYYEECSCYPDTGIVMCVCRDNWHGSNRPWVSFNQNLDYQIGYICSGVFGDNPRPEDGEGSCNPVTVDGANGVKGFSYKYGNGVWIGRTKSNRLRKGFEMIWDPNGWTNTDSDFSVKQDVVAITDWSGYSGSFVQHPELTGLDCIRPCFWVELVRGLPRENTTIWTSGSSISFCGVNSDTANWSWPDGAELPFTIDK

SEQ ID NO: 19385 - protein, 470 aa, Artificial Sequence; identical to SEQ ID NO: 17461
  derived and/or modified protein sequence (wt) from neuraminidase__InfluenzaA__ADL39458

SEQ ID NO: 19386 - protein, 470 aa, Artificial Sequence
  derived and/or modified protein sequence (wt) from neuraminidase__InfluenzaA__ADL39469
MNPNQKIITIGSISIAIGIISLMLQIGSIISIWASHSIQTGSQNNTGICNQRIITYENSTWVNHTYVNINNTNVVAGEDKTSVTLAGNSSLCSISGWAIYTKDNSIRIGSKGDVFVIREPFISCSHLECRTFFLTQGALLNDKHSNGTVKDRSPYRALMSCPLGEAPSPYNSKFESVAWSASACHDGMGWLTIGISGPDNGAVAVLKYNGIITGTIKSWKKQILRTQESECVCMNGSCFTIMTDGPSNKAASYKIFKIEKGKVTKSIELDAPNFYYEECSCYPDTGIVMCVCRDNWHGSNRPWVSFNQNLDYQIGYICSGVFGDNPRPEDGEGSCNPVTVDGANGVKGFSYKYGNGVWIGRTKSNRLRKGFEMIWDPNGWTNTDSDFSVKQDVVAITDWSGYSGSFVQHPELTGLDCIRPCFWVELVRGLPRENTTIWTSGSSISFCGVNSDTANWSWPDGAELPFTIDK

SEQ ID NO: 19387 - protein, 470 aa, Artificial Sequence
  derived and/or modified protein sequence (wt) from neuraminidase__InfluenzaA__ADL39480
MNPNQKIITIGSISIAIGIISLMLQIGSIISIWASHSIQTGSQNNTGICNQRIITYENSTWVNHTYVNINNTNVVAGEDKTSVTLAGNSSLCSISGWAIYTKDNSIRIGSKGDVFVIREPFISCSHLECRTFFLTQGALLNDKHSNGTVKDRSPYRALMSCPLGEAPSPYNSKFESVAWSASACHDGMGWLTIGISGPDNGAVAVLKYNGIITGTIKSWKKQILRTQESECVCMNGSCFTIMTDGPSNKAASYKIFKIEKGKVTKSIELNAPNFYYEECSCYPDTGIVMCVCRDNWHGSNRPWVSFNQNLDYQIGYICSGVFGDNPRPEDGEGSCNPVTVDGANGVKGFSYKYGNGVWIGRTKSNRLRKGFEMVWDPNGWTNTDSDFSVKQDVVAITDWSGYSGSFVQHPELTGLDCIRPCFWVELVRGLPRENTTIWTSGSSISFCGVNSDTANWSWPDGAELPFTIDK

SEQ ID NO: 19388 - protein, 469 aa, Artificial Sequence
  derived and/or modified protein sequence (wt) from neuraminidase__InfluenzaA__ADL39491
MNPNQKIITIGSVSLTISTICFFMQIAILITTVTLHFKQYEFNSSPNNQVMLCEPTIIERNITEIVYLTNTTIEKEICPKLAEYRNWSKPQCDITGFAPFSKDNSIRLSAGGDIWVTREPYVSCDPDKCYQFALGQGTTLNNVHSNNIVRDRTPYRTLLMNELGVPFHLGTKQVCIAWSSSSCHDGKAWLHVCITGDDKNATASFIYNGRLVDSIVSWSKEILRTQESECVCINGTCTVVMTDGSASGKADTKILFIEEGKIVHTSTLSGSAQHVEECSCYPRYPGVRCVCRDNWKGSNRPIVDINIKDHSIVSSYVCSGLVGDTPRKNDSSSSSHCLDPNNEEGGHGVKGWAFDDGNDVWMGRTISEKSRLGYETFKVIEGWSNPKSKLQINRQVIVDRGNRSGYSGIFSVEGKSCINRCFYVELIRGRKEETEVLWTSSSIVVFCGTSGTYGTGSWPDGADINLMPI

SEQ ID NO: 19389 - protein, 469 aa, Artificial Sequence; identical to SEQ ID NO: 16738
  derived and/or modified protein sequence (wt) from neuraminidase__InfluenzaA__ADL41165

SEQ ID NO: 19390 - protein, 469 aa, Artificial Sequence
  derived and/or modified protein sequence (wt) from neuraminidase__InfluenzaA__ADL41175
MNPNQKIITIGSVCMTIGMANLILQIGNIISTWISHSIQLGNQNQIETCNQSVITYENNTWVNQTYVNISNTNFAAGQSVVSVKLAGNSSLCPVSGWAIYSKDNSVRIGSKGDVFVIREPFISCSPLECRTFFLTQGALLNDKHSNGTIKDRSPYRTLMSCPIGEVPSPYNSRFESVAWSASACHDGINWLTIGISGPDNGAVAVLKYNGIITDTIKSWRNNILRTQESECACVNGSCFTVMTDGPSNGQASYKIFRIEKGKIVKSVEMNAPNYHYEECSCYPDSSEITCVCRDNWHGSNRPWVSFNQNLEYQIGYICSGIFGDNPRPNDKTGSCGPVSSNGANGVKGFSFKYGNGVWIGRTKSISSRNGFEMIWDPNGWTGTDNNFSIKQDIVGINEWSGYSGSFVQHPELTGLDCIRPCFWVELIRGRPKENTIWTSGSSISFCGVNSDTVGWSWPDGAELPFTIDK

SEQ ID NO: 19391 - protein, 470 aa, Artificial Sequence
  derived and/or modified protein sequence (wt) from neuraminidase__InfluenzaA__ADL60255
MNPNQKIITIGSISIAIGIISLMLQIGNIISIWASHSIQTGSQNNTGICNQRIITYENSTWVNYTYVNINNTNVVAGEDKTSVTLAGNSSLCSISGWAIYTKDNSIRIGSKGDVFVIREPFISCSHLECRTFFLTQGALLNDKHSNGTVKDRSPYRALMSCPLGEAPSPYNSKFESVAWSASACHDGMGWLTIGISGPDNGAVAVLKYNGIITGTIKSWKKQILRTQESECVCMNGSCFTIMTDGPSNKAASYKIFKIEKGKVTKSIELNAPNFHYEECSCYPDTGIVMCVCRDNWHGSNRPWVSFNQNLDYQIGYICSGVFGDNPRPKDGRGSCNPVTVDGANGVKGFSYKYDNGVWIGRTKSNRLRKGFEMIWDPNGWTNTDSDFSVKQDVVAITDWSGYSGSFVQHPELTGLDCIRPCFWVELVRGLPRENTTIWTSGSSISFCGVNSDTANWSWPDGAELPFTIDK

SEQ ID NO: 19392 - protein, 470 aa, Artificial Sequence
  derived and/or modified protein sequence (wt) from neuraminidase__InfluenzaA__ADL60277
MNPNQRIITIGSISIAIGIISLMLQIGNIISIWASHSIQIGSQNNTGICNQRIITYENSTWVNHTYVNINNTNVVAGEDKTPVTLAGNSSLCSISGWAIYTKDNSIRIGSKGDVFVIREPFISCSHLECRTFFLTQGALLNDKHSNGTAKDRSPYRALMSCPLGEAPSPYNSKFESVAWSASACHDGMGWLTIGISGPDNGAVAVLKYNGIITGTIKSWKKQILRTQESECVCMNGSCFTIMTDGPSNKAASYKIFKIEKGKVTKSIELNAPNFYYEECSCYPDTGIVMCVCRDNWHGSNRPWVSFNQNLDYQIGYICSGVFGDNPRPEDGEGSCNPVTVDGANGVKGFSYKYGNGVWIGRTKSNRLRKGFEMIWDPNGWTNTDSDFSVKQDVVAITDWSGYSGSFVQHPELTGLDCIRPCFWVELVRGLPRENTTIWTSGSSISFCGVNSDTANWSWPDGAELPFTIDK

SEQ ID NO: 19393 - protein, 470 aa, Artificial Sequence
  derived and/or modified protein sequence (wt) from neuraminidase__InfluenzaA__ADL60288
MNPNQKIITIGSISIAIGIISLMLQIGNIISIWASHSIQTGSQNNTGICNQRIITYENSTWVNHTYVNINNTNVVAGEDKTSVTLAGNSSLCSISGWAIYTKDNSIRIGSKGDVFVIREPFISCSHLECRTFFLTQGALLNDKHSNGTVKDRSPYRALMSCPLGEAPSPYNSKFESVAWSASACHDGMGWLTIGISGPDNGAVAVLKYNGIITGTIKSWKKQILRTQESECVCMNGSCFTIMTDGPSNKAASYKIFKIEKGKVTKSIELNAPNFYYEECSCYPDTGIVMCVCRDNWHGSNRPWVSFNQNLDYQIGYICSGVFGDNPRPKDGKGSCNPVTVDGANGVKGFSYKYGNGVWIGRTKSNRLRKGFEMIWDPNGWTNTDSDFSVKQDVVAITDWSGYSGSFVQHPELTGLDCIRPCFWVELVRGLPRENTTIWTSGSSISFCGVNSDTANWSWPDGAELPFTIDK

SEQ ID NO: 19394 - protein, 470 aa, Artificial Sequence
  derived and/or modified protein sequence (wt) from neuraminidase__InfluenzaA__ADL60299
MNPNQKIITIGSISIAIGIISLMLQIGNIISIWASHSIQTGSQNNTGICNQRIITYENSTWVNHTYVSINNTNVVAGKDKTSVTLAGNSSLCSISGWAIYTKDNSIRIGSKGDVFVIREPFISCSHLECRTFFLTQGALLNDKHSNGTVKDRSPYRALMSCPLGEAPSPYNSKFESVAWSASACHDGMGWLTIGISGPDNGAVAVLKYNGIITGTIKSWKKQILRTQESECVCMNGSCFTIMTDGPSNKAASYKIFKIEKGKVTKSIELNAPNFYYEECSCYPDTGIVMCVCRDNWHGSNRPWVSFNQDLDYQIGYICSGVFGDNPRPKDGKGSCNPVTVDGANGVKGFSYKYGNGVWIGRTKSNRLRKGFEMIWDPNGWTNTDSDFSVKQDVVAITDWSGYSGSFVQHPELTGLDCIRPCFWVELVRGLPRENTTIWTSGSSISFCGVNSDTANWSWPDGAELPFTIDK

SEQ ID NO: 19395 - protein, 470 aa, Artificial Sequence; identical to SEQ ID NO: 16632
  derived and/or modified protein sequence (wt) from neuraminidase__InfluenzaA__ADL60310

SEQ ID NO: 19396 - protein, 470 aa, Artificial Sequence
  derived and/or modified protein sequence (wt) from neuraminidase__InfluenzaA__ADL60321
MNPNQKIITIGSISIAIGIISLMLQIGNIISIWASHSIQTGSQNNTGICNQRIITYENSTWVNHTYVNINNTNVVAGEDKTSVTLAGNSSLCSISGWAIYTKDNSIRIGSKGDVFVIREPFISCSHLECRTFFLTQGALLNDKHSNGTVKDRSPYRALMSCPLGEAPSPYNSKFESVAWSASACHDGMGWLTIGISGPDNGAVAVLKYNGIITGTIKSWKKQILRTQESECVCMNGSCFTIMTDGPSNKAASYKIFKIEKGKVTKSIELNAPNFHYEECSCYPDTGMVMCVCRDNWHGSNRPWVSFNQNLDYQIGYICSGVFGDNPRPEDGEGSCNPVTVDGANGVKGFSYKYDNGVWIGRTKSNRLRKGFEMIWDPNGWTNTDSDFSVKQDVVAITDWSGYSGSFVQHPELTGLDCIRPCFWVELVRGLPRENTTIWTSGSSISFCGVNSDTANWSWPDGAELPFTIDK

SEQ ID NO: 19397 - protein, 470 aa, Artificial Sequence
  derived and/or modified protein sequence (wt) from neuraminidase__InfluenzaA__ADL60332
MNPNQKIITIGSISIAIGIISLMLQIGNIISIWASHSIQTGSQNNTGICNQRIITYENSTWVNHTYVNINNTNVVAGEDKTSVTLAGNSSLCSISGWAIYTKDNSIRIGSKGDVFVIREPFISCSHLECRTFFLTQGALLNDKHSNGTVKDRSPYRALMSCPLGEAPSPYNSKFESVAWSASACHDGMGWLTIGISGPDNGAVAVLKYNGIITGTIKSWKKQILRTQESECVCMNGSCFTIMTDGPSNKAASYKIFKIEKGKVTKSIELNAPNFHYEECSCYPDTGIVMCVCRDNWHGSNRPWVSFNQNLDYQIGYICSGVFGDNPRPKDGRGSCNPVTVDGANGVKGFSYKYDNGVWIGRTKSNRLRKGFEMIWDPNGWTNTDSDFSVKQDVVAITDWSGYSGSFVQHPELTGLDCIRPCFWVELVRGLPRENTTIWTSGSSISFCGVNSDTANWSWPDGAELPFTIDK

SEQ ID NO: 19398 - protein, 470 aa, Artificial Sequence; identical to SEQ ID NO: 16632
  derived and/or modified protein sequence (wt) from neuraminidase__InfluenzaA__ADL60343

SEQ ID NO: 19399 - protein, 470 aa, Artificial Sequence
  derived and/or modified protein sequence (wt) from neuraminidase__InfluenzaA__ADL60354
MNPNQRIITIGSISIAIGIISLMLQIGNIISIWASHSIQIGSQNNTGICNQRIITYENSTWVNHTYVNINNTNVVAGEDKTSVTLAGNSSLCSISGWAIYTKDNSIRIGSKGDVFVIREPFISCSHLECRTFFLTQGALLNDKHSNGTAKDRSPYRALMSCPLGEAPSPYNSKFESVAWSASACHDGMGWLTIGISGPDNGAVAVLKYNGIITGTIKSWKKQILRTQESECVCMNGSCFTIMTDGPSNKAASYKIFKIEKGKVTKSIELNAPNFYYEECSCYPDTGIVMCVCRDNWHGSNRPWVSFNQNLDYQIGYICSGVFGDNPRPKDGKGSCNPVTVDGANGVKGFSYKYGNGVWIGRTKSNRLRKGFEMIWDPNGWTNTDSDFSVKQDVVAITDWSGYSGSFVQHPELTGLDCIRPCFWVELVRGLPRENTTIWTSGSSISFCGVNSDTANWSWPDGAELPFTIDK

SEQ ID NO: 19400 - protein, 469 aa, Artificial Sequence
  derived and/or modified protein sequence (wt) from neuraminidase__InfluenzaA__ADL60365
MNPNQKIITIGSVSLTISTICFFMQIAILITTVTLHFKQYEFNSSPNNQVMLCEPTIIERNITEIVYLTNTTIEKEISPKLAEYRNWSKPQCDITGFAPFSKDNSIRLSAGGDIWVTREPYVSCDPDKCYQFALGQGTTLNNVHSNNIVRDRTPYRTLLMNELGVPFHLGTKQVCIAWSSSSCHDGKAWLHVCITGDDKNATASFIYNGRLVDSIVSWSKEILRTQESECVCINGTCTVVMTDGSASGKADTKILFIEEGKIVHTSTLSGSAQHVEECSCYPRYPGVRCVCRDNWKGSNRPIVDINIKDHSTVSSYVCSGLVGDTPRKNDSSSSSHCLDPNNEEGGHGVKGWAFDDGNDVWMGRTISEKSRLGYETFKVIEGWSNPKSKLQINRQVIVDRGNRSGYSGIFSVEGKSCINRCFYVELIRGRKEETEVLWTSNSIVVFCGTSGTYGTGSWPDGADINLMPI

SEQ ID NO: 19401 - protein, 470 aa, Artificial Sequence
  derived and/or modified protein sequence (wt) from neuraminidase__InfluenzaA__ADL60376
MNPNQKIITIGSISIAIGIISLMLQIGNIISIWASHSIQTGSQNNTGICNQRIITYENSTWVNHTYVNINNTNVVAGEDKTSVTLAGNSSLCSISGWAIYTKDNSIRIGSKGDVFVIREPFISCSHLECRTFFLTQGALLNDKHSNGTGKDRSPYRALMSCPLGEAPSPYNSKFESVAWSASACHDGMGWLTIGISGPDNGAVAVLKYNGIITGTIKSWKKQILRTQESECVCMNGSCFTIMTDGPSNKAASYKIFKIEKGKVTKSIELNAPNFHYEECSCYPDTGIVMCVCRDNWHGSNRPWVSFNQNLDYQIGYICSGVFGDNPRPKDGKGSCNPVTVDGANGVKGFSYKYDNGVWIGRTKSNRLRKGFEMIWDPNGWTNTDSDFSVKQDVVAITDWSGYSGSFVQHPELTGLDCIRPCFWVELVRGLPRENTTIWTSGSSISFCGVNSDTANWSWPDGAELPFTIDK

SEQ ID NO: 19402 - protein, 469 aa, Artificial Sequence; identical to SEQ ID NO: 16738
  derived and/or modified protein sequence (wt) from neuraminidase__InfluenzaA__ADM07137

SEQ ID NO: 19403 - protein, 469 aa, Artificial Sequence; identical to SEQ ID NO: 16738
  derived and/or modified protein sequence (wt) from neuraminidase__InfluenzaA__ADM07146

SEQ ID NO: 19404 - protein, 469 aa, Artificial Sequence; identical to SEQ ID NO: 16738
  derived and/or modified protein sequence (wt) from neuraminidase__InfluenzaA__ADM07156

SEQ ID NO: 19405 - protein, 469 aa, Artificial Sequence; identical to SEQ ID NO: 16738
  derived and/or modified protein sequence (wt) from neuraminidase__InfluenzaA__ADM07165

SEQ ID NO: 19406 - protein, 470 aa, Artificial Sequence; identical to SEQ ID NO: 17461
  derived and/or modified protein sequence (wt) from neuraminidase__InfluenzaA__ADM07474

SEQ ID NO: 19407 - protein, 470 aa, Artificial Sequence; identical to SEQ ID NO: 17461
  derived and/or modified protein sequence (wt) from neuraminidase__InfluenzaA__ADM07485

SEQ ID NO: 19408 - protein, 469 aa, Artificial Sequence
  derived and/or modified protein sequence (wt) from neuraminidase__InfluenzaA__ADM07496
MNPNQKIITIGSVSLTISTICFFMQIAILITTVTLHFKQYEFNSPPNNQVMLCEPTIIERNITEIVYLTNTTIEKEICPKLAEYRNWSKPQCDITGFAPFSKDNSIRLSAGGDIWVTREPYVSCDPDKCYQFALGQGTTLNNVHSNNTVRDRTPYRTLLMNELGVPFHLGTKQVCIAWSSSSCHDGKAWLHVCITGDDKNATASFIYNGRLVDSVVSWSKEILRTQESECVCINGTCTVVMTDGSASGKADTKILFIEEGKIVHTSTLSGSAQHVEECSCYPRYPGVRCVCRDNWKGSNRPIVDINIKDHSIVSSYVCSGLVGDTPRKNDSSSSSHCLDPNNEEGGHGVKGWAFDDGNDVWMGRTISEKSRLGYETFKVIEGWSNPKSKLQINRQVIVDRGNRSGYSGIFSVEGKSCINRCFYVELIRGRKEETEVLWTSNSIVVFCGTSGTYGTGSWPDGADINIMPI

SEQ ID NO: 19409 - protein, 469 aa, Artificial Sequence
  derived and/or modified protein sequence (wt) from neuraminidase__InfluenzaA__ADM07507
MNPNQKIITIGSVSLTISTICFFMQTAILITTVTLHFKQFEFNSPPNNQVMLCEPAIIERNITEIVYLTNTTIEKEICPKLAEYRNWSKPQCDITGFAPFSKDNSIRLSAGGDIWVTREPYVSCDPDKCYQFALGQGTTLNNVHSNNTVRDRTPYRTLLMNELGVPFHLGTKQVCIAWSSSSCHDGKAWLHVCITGDDKNATASFIYNGRLVDSVVSWSKEILRTQESECVCINGTCTVVMTDGSASGKADTKILFIEEGKIVHTSTLSGSAQHVEECSCYPRYPGVRCVCRDNWKGSNRPIVDINIKDHSIVSSYVCSGLVGDTPRKNDSSSSSHCLDPNNEEGGHGVKGWAFDDGNDVWMGRTISEKSRLGYETFKVIEGWSNPKSKLQINRQVIVDRGNRSGYSGIFSVEGKSCINRCFYVELIRGRKEETEVLWTSNSIVVFCGTSGTYGTGSWPDGADINLMPI

SEQ ID NO: 19410 - protein, 469 aa, Artificial Sequence
  derived and/or modified protein sequence (wt) from neuraminidase__InfluenzaA__ADM12820
MNPNQKIITIGSVSLTISTICFFMQIAILITTVTLHFKQYKFNSPPNNQVMLCEPTIIERNITEIVYLTNTTIEKEICPKLAEYRNWSKPQCDITGFAPFSKDNSIRLSAGGDIWVTREPYVSCDPDKCYQFALGQGTTLNNVHSNNTVRDRTPYRTLLMNELGVPFHLGTKQVCIAWSSSSCHDGKAWLHVCITGDDKNATASFIYNGRLVDSVVSWSKEILRTQESECVCINGTCTVVMTDGSASGKADTKILFIEEGKIVHTSTLSGSAQHVEECSCYPRYPGVRCVCRDNWKGSNRPIVDINIKDHSIVSSYVCSGLVGDTPRKNDSSSSSHCLDPNNEEGGHGVKGWAFDDGNDVWMGRTINETSRLGYETFKVIEGWSNPKSKLQINRQVIVDRGNRSGYSGIFSVEGKSCINRCFYVELIRGRKEETEVLWTSNSIVVFCGTSGTYGTGSWPDGADLNLMPI

SEQ ID NO: 19411 - protein, 469 aa, Artificial Sequence; identical to SEQ ID NO: 19410
  derived and/or modified protein sequence (wt) from neuraminidase__InfluenzaA__ADM12831

SEQ ID NO: 19412 - protein, 469 aa, Artificial Sequence; identical to SEQ ID NO: 19410
  derived and/or modified protein sequence (wt) from neuraminidase__InfluenzaA__ADM12842

SEQ ID NO: 19413 - protein, 469 aa, Artificial Sequence; identical to SEQ ID NO: 19410
  derived and/or modified protein sequence (wt) from neuraminidase__InfluenzaA__ADM12853

SEQ ID NO: 19414 - protein, 469 aa, Artificial Sequence; identical to SEQ ID NO: 16738
  derived and/or modified protein sequence (wt) from neuraminidase__InfluenzaA__ADM12864

SEQ ID NO: 19415 - protein, 469 aa, Artificial Sequence; identical to SEQ ID NO: 16738
  derived and/or modified protein sequence (wt) from neuraminidase__InfluenzaA__ADM12874

SEQ ID NO: 19416 - protein, 469 aa, Artificial Sequence; identical to SEQ ID NO: 16738
  derived and/or modified protein sequence (wt) from neuraminidase__InfluenzaA__ADM12884

SEQ ID NO: 19417 - protein, 469 aa, Artificial Sequence
  derived and/or modified protein sequence (wt) from neuraminidase__InfluenzaA__ADM12894
MNPNQKIITIGSVCMTIGMANLILQIGNIISIWISHSIQLGNQNQIETCNQSVITYENNTWVNQTYVNISNTNFAAGQSVVSVKLAGNSSLCPVSGWAIYSKDNSIRIGSKGDVFVIREPFISCSPLECRTFFLTQGALLNDKHSNGTIKDRSPYRTLMSCPIGEVPSPYNSRFESVAWSASACHDGINWLTIGISGPDNGAVAVLKYNGIITDTIKSWRNNILRTQESECACVNGSCFTVMTDGPSDGQSSYKIFRIEKGKIVKSVEMNAPNYHYEECSCYPDSSEITCVCRDNWHGSNRPWVSFNQNLEYQIGYICSGIFGDNPRPNDKTGSCGPVSSNGANGVKGFSFKYGNGVWIGRTKSISSRNGFEMIWDPNGWTGTDNNFSIKQDIVGINEWSGYSGSFVQHPELTGLDCIRPCFWVELIRGRPKENTIWTSGSSISFCGVNSDTVGWSWPDGAELPFTIDK

SEQ ID NO: 19418 - protein, 469 aa, Artificial Sequence; identical to SEQ ID NO: 16738
  derived and/or modified protein sequence (wt) from neuraminidase__InfluenzaA__ADM12904

SEQ ID NO: 19419 - protein, 469 aa, Artificial Sequence
  derived and/or modified protein sequence (wt) from neuraminidase__InfluenzaA__ADM12914
MNPNQKIITIGSVCMTIGMANLILQIGNIISIWISHSIQLGNQNQIETCNQSVITYENNTWVNQTYVNISNTNFAAGQSVVSVKLAGNSSLCPVSGWAIYSKDNSIRIGSKGDVFVIREPFISCSPLECRTFFLTQGALLNDKHSNGTIKDRSPYRTLMSCPIGEVPSPYNSRFESVAWSASACHDGINWLTIGISGPDNGAVAVLKYNGIITDTIKSWRNNILRTQESECACVNGSCFTVMTDGPSDGQASYKIFRIEKGKIVKSVEMNAPNYHYEECSCYPDSSEITCVCRDNWHGSNRPWVSFNQNLEYQIGYICSGIFGDNPRPNDKTGSCGPVSSYGANGVKGFSFKYGNGVWIGRTKSISSRNGFEMIWDPNGWTGTDNNFSIKQDIVGINEWSGYSGSFVQHPELTGLDCIRPCFWVELIRGRPKENTIWTSGSSISFCGVNSDTVGWSWPDGAELPFTIDK

SEQ ID NO: 19420 - protein, 469 aa, Artificial Sequence; identical to SEQ ID NO: 16738
  derived and/or modified protein sequence (wt) from neuraminidase__InfluenzaA__ADM12924

SEQ ID NO: 19421 - protein, 469 aa, Artificial Sequence; identical to SEQ ID NO: 16738
  derived and/or modified protein sequence (wt) from neuraminidase__InfluenzaA__ADM12934

SEQ ID NO: 19422 - protein, 469 aa, Artificial Sequence; identical to SEQ ID NO: 16738
  derived and/or modified protein sequence (wt) from neuraminidase__InfluenzaA__ADM12944

SEQ ID NO: 19423 - protein, 469 aa, Artificial Sequence; identical to SEQ ID NO: 16738
  derived and/or modified protein sequence (wt) from neuraminidase__InfluenzaA__ADM12954

SEQ ID NO: 19424 - protein, 469 aa, Artificial Sequence; identical to SEQ ID NO: 16738
  derived and/or modified protein sequence (wt) from neuraminidase__InfluenzaA__ADM12964

SEQ ID NO: 19425 - protein, 469 aa, Artificial Sequence; identical to SEQ ID NO: 18026
  derived and/or modified protein sequence (wt) from neuraminidase__InfluenzaA__ADM12974

SEQ ID NO: 19426 - protein, 469 aa, Artificial Sequence
  derived and/or modified protein sequence (wt) from neuraminidase__InfluenzaA__ADM12984
MNPNQKIITIGSVCMTIGMANLILQIGNIISIWISHSIQLGNQNQIETCNQSVITYENNTWVNQTYVNISNTNFAAGQSVVSVKLAGNSSLCPVSGWAIYSKDNSIRIGSKGDVFVIREPFISCSPLECRTFFLTQGALLNDKHSNGTIKDRSPYRTLMSCPIGEVPSPYNSRFESVAWSASACHDGINWLTIGISGPDNGAVAVLKYNGIITDTIRSWRNNILRTQESECACVNGSCFTVMTDGPSDGQASYKIFRIEKGKIVKSVEMNAPNYHYEECSCYPDSSEITCVCRDNWHGSNRPWVSFNQNLEYQIGYICSGIFGDNPRPNDKTGSCGPVSSNGANGVKGFSFKYGNGVWIGRTKSISSRNGFEMIWDPNGWTGTDNNFSIKQDIVGINEWSGYSGSFVQHPELTGLDCIRPCFWVELIRGRPKENTIWTSGSSISFCGVNSDTVGWSWPDGAELPFTIDK

SEQ ID NO: 19427 - protein, 469 aa, Artificial Sequence; identical to SEQ ID NO: 16738
  derived and/or modified protein sequence (wt) from neuraminidase__InfluenzaA__ADM12994

SEQ ID NO: 19428 - protein, 469 aa, Artificial Sequence; identical to SEQ ID NO: 16738
  derived and/or modified protein sequence (wt) from neuraminidase__InfluenzaA__ADM13004

SEQ ID NO: 19429 - protein, 469 aa, Artificial Sequence; identical to SEQ ID NO: 16738
  derived and/or modified protein sequence (wt) from neuraminidase__InfluenzaA__ADM13014

SEQ ID NO: 19430 - protein, 469 aa, Artificial Sequence
  derived and/or modified protein sequence (wt) from neuraminidase__InfluenzaA__ADM13034
MNPNQKIITIGSVCMTIGMANLILQIGNIISIWISHSIQLGNQNQIETCNQSVITYENNTWVNQTYVNISNTNFAAGQSVVSVKLAGNSSLCPVSGWAIYSKDNSIRIGSKGDVFVIREPFISCSPLECRTFFLTQGALLNDKHSNGTIKDRSPYRTLMSCPIGEVPSPYNSRFESVAWSASACHDGINWLTIGISGPDNGAVAVLKYNGIITDTIKSWRNNILRTQESECACVNGSCFTVMTDGPSDGQASYKIFRIEKGKIVKSVEMNAPNYHYEECSCYPDSSEITCVCRDNWHGSNRPWVSFNQNLEYQIGYICSGIFGDNPRPNDKTGNCGPVSSNGANGVKGFSFKYGNGVWIGRTKSISSRNGFEMIWDPNGWTGTDNNFSIKQDIVGINEWSGYSGSFVQHPELTGLDCIRPCFWVELIRGRPKENTIWTSGSSISFCGVNSDTVGWSWPDGAELPFTIDK

SEQ ID NO: 19431 - protein, 469 aa, Artificial Sequence; identical to SEQ ID NO: 18651
  derived and/or modified protein sequence (wt) from neuraminidase__InfluenzaA__ADM13044

SEQ ID NO: 19432 - protein, 469 aa, Artificial Sequence; identical to SEQ ID NO: 17564
  derived and/or modified protein sequence (wt) from neuraminidase__InfluenzaA__ADM13054

SEQ ID NO: 19433 - protein, 469 aa, Artificial Sequence; identical to SEQ ID NO: 17915
  derived and/or modified protein sequence (wt) from neuraminidase__InfluenzaA__ADM13064

SEQ ID NO: 19434 - protein, 469 aa, Artificial Sequence
  derived and/or modified protein sequence (wt) from neuraminidase__InfluenzaA__ADM13074
MNPNQKIITIGSVCMTIGMANLILQIGNIISIWISHSIQLGNQNQIETCNQSVITYENNTWVNQTYVNISNTNLAAGQSVVSVKLAGNSSLCPVSGWAIYSKDNSIRIGSKGDVFVIREPFISCSPLECRTFFLTQGALLNDKHSNGTIKDRSPYRTLMSCPIGEVPSPYNSRFESVAWSASACHDGINWLTIGISGPDNGAVAVLKYNGIITDTIKSWRNNILRTQESECACVNGSCFTVMTDGPSDGQASYKIFRIEKGKIVKSVEMNAPNYHYEECSCYPDSSEITCVCRDNWHGSNRPWVSFNQNLEYQIGYICSGIFGDNPRPNDKTGSCGPVSSNGANGVKGFSFKYGNGVWIGRTKSISSRNGFEMIWDPNGWTGTDNKFSIKQDIVGINEWSGYSGSFVQHPELTGLDCIRPCFWVELIRGRPKENTIWTSGSSISFCGVNSDTVGWSWPDGAELPFTIDK

SEQ ID NO: 19435 - protein, 469 aa, Artificial Sequence; identical to SEQ ID NO: 17915
  derived and/or modified protein sequence (wt) from neuraminidase__InfluenzaA__ADM13084

SEQ ID NO: 19436 - protein, 469 aa, Artificial Sequence
  derived and/or modified protein sequence (wt) from neuraminidase__InfluenzaA__ADM13094
MNPNQKIITIGSVCMTIGMANLILQIGNTISIWISHSIQLGNQNQIETCNQSVITYENNTWVNQTYVNISNTNFAAGQSVVSAKLAGNSSLCPVSGWAIYSKDNSIRIGSKGDVFVIREPFISCSPLECRTFFLTQGALLNDKHSNGTIKDRSPYRTLMSCPIGEVPSPYNSRFESVAWSASACHDGINWLTIGISGPDNGAVAVLKYNGIITDTIKSWRNNILRTQESECACVNGSCFTVMTDGPSDGQASYKIFRIEKGKIVKSVEMNAPNYHYEECSCYPDSSEITCVCRDNWHGSNRPWVSFNQNLEYQIGYICSGIFGDNPRPNDKTGSCGPVSSNGANGVKGFSFKYGNGVWIGRTKSISSRNGFEMIWDPNGWTGTDNNFSIKQDIVGINEWSGYSGSFVQHPELTGLDCIRPCFWVELIRGRPKENTIWTSGSSISFCGVNSDTVGWSWPDGAELPFTIDK

SEQ ID NO: 19437 - protein, 469 aa, Artificial Sequence; identical to SEQ ID NO: 17915
  derived and/or modified protein sequence (wt) from neuraminidase__InfluenzaA__ADM13104

SEQ ID NO: 19438 - protein, 469 aa, Artificial Sequence; identical to SEQ ID NO: 18640
  derived and/or modified protein sequence (wt) from neuraminidase__InfluenzaA__ADM13124

SEQ ID NO: 19439 - protein, 469 aa, Artificial Sequence
  derived and/or modified protein sequence (wt) from neuraminidase__InfluenzaA__ADM13134
MNPNQKIITIGSVCMTIGMANLILQIGNIISIWISHSIQLGNQNQIETCNQSVITYENNTWVNQTYVNISNTNFAAGQSVVSVKLAGNSSLCPVSGWAIYSKDNSIRIGSKGDVFVIREPFISCSPLECRTFFLTQGALLNDKHSNGTIKDRSPYRTLMSCPIGEVPSPYNSRFESVAWSASACHDGINWLTIGISGPDNGAVAVLKYNGIITDTIKSWRNNTLRTQESECACVNGSCFTVMTDGPSDGQASYKIFRIEKGKIVKSVEMNAPNYHYEECSCYPDSSEITCVCRDNWHGSNRPWVSFNQNLEYQIGYICSGIFGDNPRPNDKKGSCGPVSSNGANGVKGFSFKYGNGVWIGRTKSISSRNGFEMIWDPNGWTGTDNNFSIKQDIVGINEWSGYSGSFVQHPELTGLDCIRPCFWVELIRGRPKENTIWTSGSSISFCGVNSDTVGWSWPDGAELPFTIDK

SEQ ID NO: 19440 - protein, 469 aa, Artificial Sequence
  derived and/or modified protein sequence (wt) from neuraminidase__InfluenzaA__ADM13154
MNPNQKIITIGSVCMTIGMANLILQIGNIISIWISHSIQLGNQKQIETCNQSVFTYENNTWVNQTYVNISNTNFAAGQSVVSVKLAGNSSLCPVSGWAIYSKDNSIRIGSKGDVFVIREPFISCSPLECRTFFLTQGALLNDKHSNGTIKDRSPYRTLMSCPIGEVPSPYNSRFESVAWSASACHDGINWLTIGISGPDNGAVAVLKYNGIITDTIKSWRNNILRTQESECACVNGSCFTVMTDGPSDGQASYKIFKIEKGKIVKSVEMNAPNYHYEECSCYPDSSEITCVCRDNWHGSNRPWVSFNQNLEYQIGYICSGIFGDNPRPNDKTGSCGPVSSNGANGVKGFSFKYGNGVWIGRTKSISSRNGFEMIWDPNGWTGTDNNFSIKQDIVGINEWSGYSGSFVQHPELTGLDCIRPCFWVELIRGRPKENTIWTSGSSISFCGVNSDTVGWSWPDGAELPFTIDK

SEQ ID NO: 19441 - protein, 469 aa, Artificial Sequence; identical to SEQ ID NO: 18168
  derived and/or modified protein sequence (wt) from neuraminidase__InfluenzaA__ADM13164

SEQ ID NO: 19442 - protein, 469 aa, Artificial Sequence; identical to SEQ ID NO: 16738
  derived and/or modified protein sequence (wt) from neuraminidase__InfluenzaA__ADM13174

SEQ ID NO: 19443 - protein, 469 aa, Artificial Sequence; identical to SEQ ID NO: 16738
  derived and/or modified protein sequence (wt) from neuraminidase__InfluenzaA__ADM13184

SEQ ID NO: 19444 - protein, 469 aa, Artificial Sequence; identical to SEQ ID NO: 16738
  derived and/or modified protein sequence (wt) from neuraminidase__InfluenzaA__ADM13194

SEQ ID NO: 19445 - protein, 469 aa, Artificial Sequence; identical to SEQ ID NO: 16738
  derived and/or modified protein sequence (wt) from neuraminidase__InfluenzaA__ADM13204

SEQ ID NO: 19446 - protein, 469 aa, Artificial Sequence; identical to SEQ ID NO: 17915
  derived and/or modified protein sequence (wt) from neuraminidase__InfluenzaA__ADM13214

SEQ ID NO: 19447 - protein, 469 aa, Artificial Sequence
  derived and/or modified protein sequence (wt) from neuraminidase__InfluenzaA__ADM13224
MNPNQKIITIGSVCMTIGMANLILQIGNIISIWISHSIQLGNQNQIETCNQSVITYENNTWVNQTYVNISNTNFAAGQSVVSVKLAGNSSLCPVSGWAIYSKDNSIRIGSKGDVFVIREPFISCSPLECRTFFLTQGALLNDKHSNGTIKDRSPYRTLMSCPIGEVPSPYNSRFESVAWSASACHDGINWLTIGISGPDNGAVAVLKYNGIITDTIRSWRNNILRTQESECACVNGSCFTVMTDGPSDGQASYKIFRIEKGKIVKSVEMNAPNYHYEECSCYPDSSKITCVCRDNWHGSNRPWVSFNQNLEYQIGYICSGIFGDNPRPNDKTGSCGPVSSNGANGVKGFSFKYGNGVWIGRTKSISSRNGFEMIWDPNGWTGTDNNFSIKQDIVGINEWSGYSGSFVQHPELTGLDCIRPCFWVELIRGRPKENTIWTSGSSISFCGVNSDTVGWSWPDGAELPFTIDK

SEQ ID NO: 19448 - protein, 469 aa, Artificial Sequence; identical to SEQ ID NO: 16738
  derived and/or modified protein sequence (wt) from neuraminidase__InfluenzaA__ADM13234

SEQ ID NO: 19449 - protein, 469 aa, Artificial Sequence; identical to SEQ ID NO: 18026
  derived and/or modified protein sequence (wt) from neuraminidase__InfluenzaA__ADM13244

SEQ ID NO: 19450 - protein, 469 aa, Artificial Sequence; identical to SEQ ID NO: 17092
  derived and/or modified protein sequence (wt) from neuraminidase__InfluenzaA__ADM13254

SEQ ID NO: 19451 - protein, 469 aa, Artificial Sequence; identical to SEQ ID NO: 17915
  derived and/or modified protein sequence (wt) from neuraminidase__InfluenzaA__ADM13264

SEQ ID NO: 19452 - protein, 469 aa, Artificial Sequence; identical to SEQ ID NO: 16738
  derived and/or modified protein sequence (wt) from neuraminidase__InfluenzaA__ADM13274

SEQ ID NO: 19453 - protein, 469 aa, Artificial Sequence; identical to SEQ ID NO: 16738
  derived and/or modified protein sequence (wt) from neuraminidase__InfluenzaA__ADM13284

SEQ ID NO: 19454 - protein, 469 aa, Artificial Sequence
  derived and/or modified protein sequence (wt) from neuraminidase__InfluenzaA__ADM13294
MNPNQKIITIGSVCMTIGMANLILQIGNIISIWISHSIQLGNQNQIETCNQSVITYENNTWVNQTYVNISNTNFAAGQSVVSVKLAGNSSLCPVSGWAIYSKDNSIRIGSKGDVFVIREPFISCSPLECRTFFLTQGALLNDKHSNGTIKDRSPYRALMSCPIGEVPSPYNSRFESVAWSASACHDGINWLTIGISGPDNGAVAVLKYNGIITDTIKSWRNNILRTQESECACVNGSCFTVMTDGPSDGQASYKIFRIEKGKIVKSVEMNAPNYHYEECSCYPDSSEITCVCRDNWHGSNRPWVSFNQNLEYQIGYICSGIFGDNPRPNDKTGSCGPVSSNGANGVKGFSFKYGNGVWIGRTKSISSRNGFEMIWDPNGWTGTDNSFSIKQDIVGINEWSGYSGSFVQHPELTGLDCIRPCFWVELIRGRPKENTIWTSGSSISFCGVNSDTVGWSWPDGAELPFTIDK

SEQ ID NO: 19455 - protein, 469 aa, Artificial Sequence; identical to SEQ ID NO: 16738
  derived and/or modified protein sequence (wt) from neuraminidase__InfluenzaA__ADM13304

SEQ ID NO: 19456 - protein, 469 aa, Artificial Sequence; identical to SEQ ID NO: 18200
  derived and/or modified protein sequence (wt) from neuraminidase__InfluenzaA__ADM13314

SEQ ID NO: 19457 - protein, 469 aa, Artificial Sequence; identical to SEQ ID NO: 16738
  derived and/or modified protein sequence (wt) from neuraminidase__InfluenzaA__ADM13324

SEQ ID NO: 19458 - protein, 469 aa, Artificial Sequence
  derived and/or modified protein sequence (wt) from neuraminidase__InfluenzaA__ADM13344
MNPNQKIIIIGSVCMTIGMANLILQIGNIISIWILHSIQLGNQNQIETCNQSVITYENNTWVNQTYVNISNTNFAAGQSVVSVKLAGNSSLCPVSGWAIYSKDNSIRIGSKGDVFVIREPFISCSPLECRTFFLTQGALLNDKHSNGTIKDRSPYRTLMSCPIGEVPSPYNSRFESVAWSASACHDGINWLTIGISGPDNGAVAVLKYNGIITDTIKSWRNNILRTQESECACVNGSCFTVMTDGPSDGQASYKIFRIEKGKIVKSVEMNAPNYHYEECSCYPDSSEITCVCRDNWHGSNRPWVSFNQNLEYQIGYICSGIFGDNPRPNDKTGSCGPVSSNGANGVKGFSFKYGNGVWIGRTKSISSRNGFEMIWDPNGWTGTDNNFAIKQDIVGINEWSGYSGSFVQHPELTGLDCIRPCFWVELIRGRPKENTIWTSGSSISFCGVNSDTVGWSWPDGAELPFTIDK

SEQ ID NO: 19459 - protein, 469 aa, Artificial Sequence; identical to SEQ ID NO: 18640
  derived and/or modified protein sequence (wt) from neuraminidase__InfluenzaA__ADM13354

SEQ ID NO: 19460 - protein, 469 aa, Artificial Sequence; identical to SEQ ID NO: 17915
  derived and/or modified protein sequence (wt) from neuraminidase__InfluenzaA__ADM13363

SEQ ID NO: 19461 - protein, 469 aa, Artificial Sequence
  derived and/or modified protein sequence (wt) from neuraminidase__InfluenzaA__ADM13464
MNPNQKIITIGSVSLTIATVCFLMQIAILVTTVTLHFKQYECDSPASNQVMPCEPIIIERNITEIVYLNNTTIEKEICPKVVEYRNWSKPQCQITGFAPFSKDNSIRLSAGGDIWVTREPYVSCDHGKCYQFALGQGTTLDNKHSNDTIHDRIPHRTLLMNELGVPFHLGTRQVCIAWSSSSCHDGKAWLHVCITGNDKNATASFIYDGRLVDSIGSWSQNILRTQESECVCINGTCTVVMTDGSASGRADTRILFIEEGKIVHISPLSGSAQHVEECSCYPRYPGVRCICRDNWKGSNRPVVDINMEDYSIDSSYVCSGLVGDTPRNDDRSSNSNCRNPNNERGNQGVKGWAFDNGDDVWMGRTISKDLRSGYETFKVIGGWSTPNSKSQINRQVIVDSDNRSGYSGIFSVEGKSCINRCFYVELIRGREQETRVWWTSNSIVVFCGTSGTYGTGSWPDGANINFMPI

SEQ ID NO: 19462 - protein, 469 aa, Artificial Sequence
  derived and/or modified protein sequence (wt) from neuraminidase__InfluenzaA__ADM13465
MNPNQKIITIGSVSLTIATVCFLMQIAILVTTVTLHFKQYECDSPASNQVMPCEPIIIERNITEIVYLNNTTIEKEICPKVVEYRNWSKPQCQITGFAPFSKDNSIRLSAGGDIWVTREPYVSCDHGKCYQFALGQGTTLDNKHSNDTIHDRIPHRTLLMNELGVPFHLGTRQVCIAWSSSSCHDGKAWLHVCITGDDKNATASFIYDGRLVDSIGSWSQNILRTQESECVCINGTCTVVMTDGSASGRADTRILFIEEGKIVHISPLSGSAQHVEECSCYPRYPGVRCICRDNWKGSNRPVVDINMEDYSIDSSYVCSGLVGDTPRNDDRSSNSNCRNPNNERGNQGVKGWAFDNGDDVWMGRTISKDLRSGYETFKVIGGWSTPNSKSQINRQVIVDSDNRSGYSGIFSVEGKSCINRCFYVELMRGRKQETRVWWTSNSIVVFCGTSGTYGTGSWPDGANINFMPI

SEQ ID NO: 19463 - protein, 469 aa, Artificial Sequence; identical to SEQ ID NO: 14095
  derived and/or modified protein sequence (wt) from neuraminidase__InfluenzaA__ADM13466

SEQ ID NO: 19464 - protein, 469 aa, Artificial Sequence
  derived and/or modified protein sequence (wt) from neuraminidase__InfluenzaA__ADM13467
MNPNQKIITIGSVSLTIATVCFLMQIAILVTTVTLHFKQYECDSPASNQVMPCEPIIIERNITEIVYLNNTTIEKEICPKVVEYRNWSKPQCQITGFAPFSKDNSIRLSSGGDIWVTREPYVSCDHGKCYQFALGQGTTLDNKHSNDTIHDRIPHRTLLMNELGVPFHLGTRQVCIAWSSSSCHDGKAWLHVCITGDDKNATASFIYDGRLVDSIGSWSQNILRTQESECVCINGTCTVVMTDGSASGRADTRILFIEEGKIVHISPLSGSAQHVEECSCYPRYPGVRCICRDNWKGSNRPVVDINMEDYSIDSSYVCSGLVGDTPRNDDRSSNSNCRNPNNERGNQGVKGWAFDNGDDVWMGRTISKDLRSGYETFKVIGGWSTPNSKSQINRQVIVDSDNRSGYSGIFSVEGKSCINRCFYVELIRGRKQETRVWWTSNSIVVFCGTSGTYGTGSWPDGANINFMPI

SEQ ID NO: 19465 - protein, 469 aa, Artificial Sequence; identical to SEQ ID NO: 14095
  derived and/or modified protein sequence (wt) from neuraminidase__InfluenzaA__ADM13468

SEQ ID NO: 19466 - protein, 469 aa, Artificial Sequence
  derived and/or modified protein sequence (wt) from neuraminidase__InfluenzaA__ADM13469
MNPNQKIITIGSVSLTIATACFLMQIAILVTTVTLHFKQYECDSPASNQVMPCEPIIIERNITEIVYLNNTTIEKEICPKVVEYRNWSKPQCQITGFAPFSKDNSIRLSAGGDIWVTREPYVSCDHGKCYQFALGQGTTLDNKHSNDTIHDRIPHRTLLMNELGVPFHLGTRQVCIAWSSSSCHDGKAWLHVCITGDDKNATASFIYDGRLVDSIGSWSQNILRTQESECVCINGTCTVVMTDGSASGRADTRILFIEEGKIVHISPLSGSAQHVEECSCYPRYPGVRCICRDNWKGSNRPVVDINMEDYSIDSSYVCSGLVGDTPRNDDRSSNSNCRNPNNERGNQGVKGWAFDNGDDVWMGRTISKDLRSGYETFKVIGGWSTPNSKSQINRQVIVDSDNRSGYSGIFSVEGKSCINRCFYVELIRGRKQETRVWWTSNSIVVFCGTSGTYGTGSWPDGANINFMPI

SEQ ID NO: 19467 - protein, 469 aa, Artificial Sequence
  derived and/or modified protein sequence (wt) from neuraminidase__InfluenzaA__ADM13470
MNPNQKIITIGSVSLTIATVCFLMQIAILVTTVTLHFKQYECDSPASNQVMPCEPIIIERNITEIVYLNNTTIEKEICPKVVEYRNWSKPQCQITGFAPFSKDNSIRLSAGGDIWVTREPYVSCDHGKCYQFALGQGTTLDNKHSNDTIHDRIPHRTLLMNELGVPFHLGTRQVCIAWSSSSCHDGKAWLHVCITGDDKNATASFIYDGRLVDSIGSWSQNILRTQESECVCINGTCTVVMTDGSASGRADTRILFIEEGKIVHISPLSGSAQHVEECSCYPRYPGVRCICRDNWKGSNRPVVDINMEDYSIDSSYVCSGLVGDTPRNDDRSSNSNCRNPNNERGNQGVKGWAFDNGDDVWMGRTISKDLRSGYETFKVIGGWSTPNSKSQINRQVIIDSDNRSGYSGIFSVEGKSCINRCFYVELIRGRKQETRVWWTSNSIVVFCGTSGTYGTGSWPDGANINFMPI

SEQ ID NO: 19468 - protein, 469 aa, Artificial Sequence
  derived and/or modified protein sequence (wt) from neuraminidase__InfluenzaA__ADM13471
MNPNQKIITIGSVSLTIATVCFLMQIAILVTTVTLHFKQYECDSPASNQVMPCEPIIIERNITEIVYLNNTTIEKEICPKVVEYRNWSKPQCQITGFAPFSKDNSIRISAGGDIWVTREPYVSCDHGKCYQFALGQGTTLDNKHSNDTIHDRIPHRTLLMNELGVPFHLGTRQVCIAWSSSSCHDGKAWLHVCITGDDKNATASFIYDGRLVDSIGSWSQNILRTQESECVCINGTCTVVMTDGSASGRADTRILFIEEGKIVHISPLSGSAQHVEECSCYPRYPGVRCICRDNWKGSNRPVVDINMEDYSIDSSYVCSGLVGDTPRNDDRSSNSNCRNPNNERGNQGVKGWAFDNGDDVWMGRTISKDLRSGYETFKVIGGWSTPNSKSQINRQVIVDSDNRSGYSGIFSVEGKSCINRCFYVELIRGRKQETRVWWTSNSIVVFCGTSGTYGTGSWPDGANINFMPI

SEQ ID NO: 19469 - protein, 469 aa, Artificial Sequence; identical to SEQ ID NO: 16508
  derived and/or modified protein sequence (wt) from neuraminidase__InfluenzaA__ADM13472

SEQ ID NO: 19470 - protein, 469 aa, Artificial Sequence; identical to SEQ ID NO: 14095
  derived and/or modified protein sequence (wt) from neuraminidase__InfluenzaA__ADM13473

SEQ ID NO: 19471 - protein, 469 aa, Artificial Sequence; identical to SEQ ID NO: 16503
  derived and/or modified protein sequence (wt) from neuraminidase__InfluenzaA__ADM13474

SEQ ID NO: 19472 - protein, 469 aa, Artificial Sequence
  derived and/or modified protein sequence (wt) from neuraminidase__InfluenzaA__ADM14469
MNPNQKIITIGSVCMTIGMANLILQIGNIISIWISHSIQLGNQNQIETCNQSVITYENNTWVNQTYVNISNTNFAAGQSVVSVKLAGNSSLCPVSGWAIYSKDNSMRIGSKGDVFVIREPFISCSPLECRTFFLTQGALLNDKHSNGTIKDRSPYRTLMSCPIGEVPSPYNSRFESVAWSASACHDGINWLTIGISGPDNGAVAVLKYNGIITDTIKSWRNNILRTQESECACVNGSCFTVMTDGPSDGQASYKIFRIEKGKIVKSVEMNAPNYHYEECSCYPDSSEITCVCRDNWHGSNRPWVSFNQNLEYQIGYICSGIFGDNPRPNDKTGSCGPVSSNGANGVKGFSFKYGNGVWIGRTKSISSRTGFEMIWDPNGWTGTDNNFSIKQDIVGINEWSGYSGSFVQHPELTGLDCIRPCFWVELIRGRPKENTIWTSGSSISFCGVNSDTVGWSWPDGAELPFTIDK

SEQ ID NO: 19473 - protein, 469 aa, Artificial Sequence; identical to SEQ ID NO: 16738
  derived and/or modified protein sequence (wt) from neuraminidase__InfluenzaA__ADM14479

SEQ ID NO: 19474 - protein, 469 aa, Artificial Sequence; identical to SEQ ID NO: 16738
  derived and/or modified protein sequence (wt) from neuraminidase__InfluenzaA__ADM14499

SEQ ID NO: 19475 - protein, 469 aa, Artificial Sequence; identical to SEQ ID NO: 18251
  derived and/or modified protein sequence (wt) from neuraminidase__InfluenzaA__ADM14518

SEQ ID NO: 19476 - protein, 469 aa, Artificial Sequence; identical to SEQ ID NO: 19076
  derived and/or modified protein sequence (wt) from neuraminidase__InfluenzaA__ADM14527

SEQ ID NO: 19477 - protein, 469 aa, Artificial Sequence; identical to SEQ ID NO: 18169
  derived and/or modified protein sequence (wt) from neuraminidase__InfluenzaA__ADM14537

SEQ ID NO: 19478 - protein, 469 aa, Artificial Sequence; identical to SEQ ID NO: 16738
  derived and/or modified protein sequence (wt) from neuraminidase__InfluenzaA__ADM14546

SEQ ID NO: 19479 - protein, 469 aa, Artificial Sequence
  derived and/or modified protein sequence (wt) from neuraminidase__InfluenzaA__ADM14555
MNPNQKIITIGSVCMTIGMANLILQIGNIISIWISHSIQLGNQNQIETCNQSVITYENNTWVNQTYVNISNTNFAAGQSVVSVKLAGNSSLCPVSGWAIYSKDNSIRIGSKGDVFVIREPFISCSPLECRTFFLTQGALLNDKHSNGTIKDRSPYRTLMSCPIGEVPSPYNSRFESVAWSASACHDGINWLTIGISGPDNGAVAVLKYNGIITDTIKSWRNNILRTQESECACVNGSCFTVMTDGPSDGQASYKIFRIEKGKIVKSVEMNAPNYHYEECSCYPDSSEITCVCRDNWHGSNRPWVSFNQNLEYQIGYICSGIFGDNPRPNDKTGSCGPVSSNGANGVKGFSFRYGNGVWIGRTKSISSRNGFEMIWDPNGWTGTDNNFSIKQDIVGINEWSGYSGSFVQHPELTGLDCIRPCFWVELIRGRPKENTIWTSGSSISFCGVNSDTVGWSWPDGAELPFTIDK

SEQ ID NO: 19480 - protein, 469 aa, Artificial Sequence; identical to SEQ ID NO: 16738
  derived and/or modified protein sequence (wt) from neuraminidase__InfluenzaA__ADM14573

SEQ ID NO: 19481 - protein, 469 aa, Artificial Sequence; identical to SEQ ID NO: 16738
  derived and/or modified protein sequence (wt) from neuraminidase__InfluenzaA__ADM14582

SEQ ID NO: 19482 - protein, 469 aa, Artificial Sequence; identical to SEQ ID NO: 16738
  derived and/or modified protein sequence (wt) from neuraminidase__InfluenzaA__ADM14591

SEQ ID NO: 19483 - protein, 469 aa, Artificial Sequence
  derived and/or modified protein sequence (wt) from neuraminidase__InfluenzaA__ADM14601
MNPNQKIITIGSVCMTIGMANLILQIGNIISIWISHSIQLGNQNQIETCNQSVITYENNTWVNQTYVNISNTNFAAGQSVVSVKLAGNSSLCPVNGWAIYSKDNSVRIGSKGDVFVIREPFISCSPLECRTFFLTQGALLNDKHSNGTIKDRSPYRTLMSCPIGEVPSPYNSRFESVAWSASACHDGINWLTIGISGPDNGAVAVLKYNGIITDTIKSWRNNILRTQESECACVNGSCFTVMTDGPSDGQASYKIFRIEKGKIVKSVEMNAPNYHYEECSCYPDSSEITCVCRDNWHGSNRPWVSFNQNLEYQIGYICSGIFGDNPRPNDKTGSCGPVSSNGANGVKGFSFKYGNGVWIGRTKSISSRNGFEMIWDPNGWTGTDNNFSIKQDIVGINEWSGYSGSFVQHPELTGLDCIRPCFWVELIRGRPKENTIWTSGSSISFCGVNSDTVGWSWPDGAELPFTIDK

SEQ ID NO: 19484 - protein, 469 aa, Artificial Sequence
  derived and/or modified protein sequence (wt) from neuraminidase__InfluenzaA__ADM14611
MNPNQKIITIGSVCMTIGMANLILQIGNIISIWISHSIQLGNQNQIETCNQSVITYENNTWVNQTYVNISNTNFAAGQSVVSVKLSGNSSLCPVSGWAIYSKDNSIRIGSKGDVFVIREPFISCSPLECRTFFLTQGALLNDKHSNGTIKDRSPYRTLMSCPIGEVPSPYNSRFESVAWSASACHDGINWLTIGISGPDNGAVAVLKYNGIITDTIKSWRNNILRTQESECACVNGSCFTVMTDGPSDGQASYKIFRIEKGKIVKSVEMNAPNYHYEECSCYPDSSEITCVCRDNWHGSNRPWVSFNQNLEYQIGYICSGIFGDNPRPNDKTGSCGPVSSNGANGVKGFSFKYGNGVWIGRTKSISSRNGFEMIWDPNGWTGTDNNFSIKQDIVGINEWSGYSGSFVQHPELTGLDCIRPCFWVELIRGRPKENTIWTSGSSISFCGVNSDTVGWSWPDGAELPFTIDK

SEQ ID NO: 19485 - protein, 469 aa, Artificial Sequence; identical to SEQ ID NO: 16738
  derived and/or modified protein sequence (wt) from neuraminidase__InfluenzaA__ADM14620

SEQ ID NO: 19486 - protein, 469 aa, Artificial Sequence; identical to SEQ ID NO: 16738
  derived and/or modified protein sequence (wt) from neuraminidase__InfluenzaA__ADM14629

SEQ ID NO: 19487 - protein, 469 aa, Artificial Sequence; identical to SEQ ID NO: 16738
  derived and/or modified protein sequence (wt) from neuraminidase__InfluenzaA__ADM14639

SEQ ID NO: 19488 - protein, 469 aa, Artificial Sequence; identical to SEQ ID NO: 16738
  derived and/or modified protein sequence (wt) from neuraminidase__InfluenzaA__ADM14657

SEQ ID NO: 19489 - protein, 469 aa, Artificial Sequence; identical to SEQ ID NO: 16738
  derived and/or modified protein sequence (wt) from neuraminidase__InfluenzaA__ADM14666

SEQ ID NO: 19490 - protein, 469 aa, Artificial Sequence; identical to SEQ ID NO: 16738
  derived and/or modified protein sequence (wt) from neuraminidase__InfluenzaA__ADM14684

SEQ ID NO: 19491 - protein, 469 aa, Artificial Sequence
  derived and/or modified protein sequence (wt) from neuraminidase__InfluenzaA__ADM14693
MNPNQKMITIGSVCMTIGMANLILQIGNIISIWISHSIQLGNQNQIETCNQSVITYENNTWVNQTYVNISNTNFAAGQSVVSVKLAGNSSLCPVSGWAIYSKDNSIRIGSKGDVFVIREPFISCSPLECRTFFLTQGALLNDKHSNGTIKDRSPYRTLMSCPIGEVPSPYNSRFESVAWSASACHDGINWLTIGISGPDNGAVAVLKYNGIITDTIKSWRNNILRTQESECACVNGSCFTVMTDGPSDGQASYKIFRIEKGKIVKSVEMNAPNYHYEECSCYPDSSEITCVCRDNWHGSNRPWVSFNQNLEYQIGYICSGIFGDNPRPNDKTGSCGPVSSNGANGVKGFSFKYGNGVWIGRTKSISSRNGFEMIWDPNGWTGTDNNFSIKQDIVGINEWSGYSGSFVQHPELTGLDCIRPCFWVELIRGRPKENTIWTSGSSISFCGVNSDTVGWSWPDGAELPFTIDK

SEQ ID NO: 19492 - protein, 469 aa, Artificial Sequence
  derived and/or modified protein sequence (wt) from neuraminidase__InfluenzaA__ADM14702
MNPNQKIITIGSVCMTIGMANLILQIGNIISIWISHSIQLGNQNQIETCNQSVITYENNTWVNQTYVNISNTNFAAGQSVVSVKLAGNSSLCPVSGWAIYSKDNSIRIGSKGDVFVIREPFISCSHLECRTFFLTQGALLNDKHSNGTIKDRSPYRTLMSCPIGEVPSPYNSRFESVAWSASACHDGINWLTIGISGPDNGAVAVLKYNGIITDTIKSWRNNILRTQESECACVNGSCFTVMTDGPSDGQASYKIFRIEKGKIVKSVEMNAPNYHYEECSCYPDSSEITCVCRDNWHGSNRPWVSFNQNLEYQIGYICSGIFGDNPRPNDKTGSCGPVSSNGANGVKGFSFKYGNGAWIGRTKSTSSRNGFEMIWDPNGWTGTDNNFSIKQDIVGINEWSGYSGSFVQHPELTGLDCIRPCFWVELIRGRPKENTIWTSGSSISFCGVNSDTVGWSWPDGAELPFTIDK

SEQ ID NO: 19493 - protein, 469 aa, Artificial Sequence; identical to SEQ ID NO: 18640
  derived and/or modified protein sequence (wt) from neuraminidase__InfluenzaA__ADM14711

SEQ ID NO: 19494 - protein, 469 aa, Artificial Sequence
  derived and/or modified protein sequence (wt) from neuraminidase__InfluenzaA__ADM14720
MNPNQKIITIGSVCMTIGMANLILQIGNIISIWISHSIQLGNQNQIETCNQSVITYENNTWVNQTYVNISNTNFAAGQSVVSVKLAGNSSLCPVSGWAIYSKDNSIRIGSKGDVFVIREPFISCSPLECRTFFLTQGALLNDKHSNGTIKDRSPYRTLMSCPIGEVPSPYNSRFESVAWSASACHDGINWLTIGISGPDNGAVAVLKYNGIITDTIKSWRNNILRTQESECACVNGSCFTVMTDGPSDGQASYKIFRIEKGKIVKSVEMNAPNYHYEECSCYPDSSEITCVCRDNWHGSNRPWVSFNQNLEYQIGYICSGVFGDNPRPNDKTGSCGPVSSNGANGVKGFSFKYGNGVWIGRTKSISSRNGFEMIWDPNGWTGTDNNFSIKQDIVGINEWSGYSGSFVQHPELTGLDCIRPCFWVELIRGRPKENTIWTSGSSISFCGVNSDTVGWSWPDGAELPFTIDK

SEQ ID NO: 19495 - protein, 469 aa, Artificial Sequence
  derived and/or modified protein sequence (wt) from neuraminidase__InfluenzaA__ADM14730
MNPNQKIITIGSVCMTIGMANLILQIGNIISIWISHSIQLGNQNQIETCNQSIITYENNTWVNQTYVNISNTNFAAGQSVVSVKLAGNSSLCPVSGWAVYSKDNSIRIGSKGDVLVIREPFISCSPLECRTFFLTQGALLNDKHSNGTIKDRSPYRTLMSCPIGEVPSPYNSRFESVAWSASACHDGINWLTIGISGPDNGAVAVLKYNGIITDTIKSWRNNILRTQESECACVNGSCFTVMTDGPSDGQASYKIFRIEKGKIVKSVEMNAPNYHYEECSCYPDSSEITCVCRDNWHGSNRPWVSFNQNLEYQIGYICSGIFGDNPRPNDKTGSCGPVSSNGANGVKGFSFKYGNGVWIGRTKSISSRSGFEMIWDPNGWTGTDNNFSIKQDIVGINEWSGYSGSFVQHPELTGLDCIRPCFWVELIRGRPKENTIWTSGSSISFCGVNSDTVGWSWPDGAELPFTIDK

SEQ ID NO: 19496 - protein, 449 aa, Artificial Sequence
  derived and/or modified protein sequence (wt) from neuraminidase__InfluenzaA__ADM14748
MNPNQKIITIGSVCMTIGMANLILQIGNIISIWISHSIQLGNQNQIETCNQSVITYENNTWVNQTYVNISNTNFAAGQSVVSVKLAGNSSLCPVSGWAIYSKDNSIRICRTFFLTQGALLNDKHSNGTIKDRSPYRTLMSCPIGEVPSPYNSRFESVAWSASACHDGINWLTIGISGPDNGAVAVLKYNGIITDTIKSWRNNILRTQESECACVNGSCFTVMTDGPSDGQASYKIFRIEKGKIVKSVEMNAPNYHYEECSCYPDSSEITCVCRDNWHGSNRPWVSFNQNLEYQIGYICSGIFGDNPRPNDKTGSCGPVSSNGANGVKGFSFKYGNGVWIGRTKSISSRNGFEMIWDPNGWTGTDNNFSIKQDIVGINEWSGYSGSFVQHPELTGLDCIRPCFWVELIRGRPKENTIWTSGSSISFCGVNSDTVGWSWPDGAELPFTIDK

SEQ ID NO: 19497 - protein, 469 aa, Artificial Sequence
  derived and/or modified protein sequence (wt) from neuraminidase__InfluenzaA__ADM14758
MNPNQKIITIGSVCMTIGMANLILQIGNIISIWISHSIQLGNQNQIETCNQSVITYENNTWVNQTYVNISNTNFAAGQSVVSVKLAGNSSLCPVSGWAIYSKDNSIRIGSKGDVFVIREPFISCSPLECRTFFLTQGALLNDKHSNGTIKDRSPYRTLMSCPIGEVPSPYNSRFESVAWSASACHDGINWLTIGISGPDNGAVAVLKYNGIITDTIKSWRNNILRTQESECACVNGSCFTVMTDGPSDGQASYKIFRIEKGKIVKSVEINAPNYHYEECSCYPDSSEITCVCRDNWHGSNRPWVSFNQNLEYQIGYICSGIFGDNPRPNDKTGSCGPVSSNGANGVKGFSFKYGNGVWIGRTKSISSRNGFEMIWDPNGWTGTDNNFSIKQDIVGINEWSGYSGSFVQHPELTGLDCIRPCFWVELIRGRPKENTIWTSGSSISFCGVNSDTVGWSWPDGAELPFTIDK

SEQ ID NO: 19498 - protein, 469 aa, Artificial Sequence; identical to SEQ ID NO: 19497
  derived and/or modified protein sequence (wt) from neuraminidase__InfluenzaA__ADM14767

SEQ ID NO: 19499 - protein, 469 aa, Artificial Sequence; identical to SEQ ID NO: 16738
  derived and/or modified protein sequence (wt) from neuraminidase__InfluenzaA__ADM14777

SEQ ID NO: 19500 - protein, 469 aa, Artificial Sequence; identical to SEQ ID NO: 16738
  derived and/or modified protein sequence (wt) from neuraminidase__InfluenzaA__ADM14814

SEQ ID NO: 19501 - protein, 469 aa, Artificial Sequence; identical to SEQ ID NO: 16738
  derived and/or modified protein sequence (wt) from neuraminidase__InfluenzaA__ADM14823

SEQ ID NO: 19502 - protein, 469 aa, Artificial Sequence; identical to SEQ ID NO: 18361
  derived and/or modified protein sequence (wt) from neuraminidase__InfluenzaA__ADM14841

SEQ ID NO: 19503 - protein, 469 aa, Artificial Sequence; identical to SEQ ID NO: 18361
  derived and/or modified protein sequence (wt) from neuraminidase__InfluenzaA__ADM14859

SEQ ID NO: 19504 - protein, 469 aa, Artificial Sequence; identical to SEQ ID NO: 17875
  derived and/or modified protein sequence (wt) from neuraminidase__InfluenzaA__ADM14868

SEQ ID NO: 19505 - protein, 469 aa, Artificial Sequence; identical to SEQ ID NO: 18361
  derived and/or modified protein sequence (wt) from neuraminidase__InfluenzaA__ADM14878

SEQ ID NO: 19506 - protein, 469 aa, Artificial Sequence; identical to SEQ ID NO: 16738
  derived and/or modified protein sequence (wt) from neuraminidase__InfluenzaA__ADM14887

SEQ ID NO: 19507 - protein, 469 aa, Artificial Sequence
  derived and/or modified protein sequence (wt) from neuraminidase__InfluenzaA__ADM14896
MNPNQKIITIGSVCMTIGMANLILQIGNIISIWISHSIQLGNQNQIETCNQSVITYENNTWVNQTYVNISNTNFAAGQSVVSVKLAGNSSLCPVSGWAIYSKDNSIRIGSKGDVLVIREPFISCSPLECRTFFLTQGALLNDKHSNGTIKDRSPYRTLMSCPIGEVPSPYNSRFESVAWSASACHDGINWLTIGISGPDNGAVAVLKYNGIITDTIKSWRNNILRTQESECACVNGSCFTVMTDGPSDGQASYKIFRIEKGKIVKSVEMNAPNYHYEECSCYPDSSEITCVCRDNWHGSNRPWVSFNQNLEYQIGYICSGIFGDNPRPNDKTGSCGPVSSNGANGVKGFSFKYGNGVWIGRTKSISSRNGFEMIWDPNGWTGTDNNFSIKQDIVGINEWSGYSGSFVQHPELTGLDCIRPCFWVELIRGRPKENTIWTSGSSISFCGVNSDTVGWSWPDGAELPFTIDK

SEQ ID NO: 19508 - protein, 469 aa, Artificial Sequence; identical to SEQ ID NO: 16738
  derived and/or modified protein sequence (wt) from neuraminidase__InfluenzaA__ADM14905

SEQ ID NO: 19509 - protein, 469 aa, Artificial Sequence; identical to SEQ ID NO: 16738
  derived and/or modified protein sequence (wt) from neuraminidase__InfluenzaA__ADM14923

SEQ ID NO: 19510 - protein, 469 aa, Artificial Sequence; identical to SEQ ID NO: 18026
  derived and/or modified protein sequence (wt) from neuraminidase__InfluenzaA__ADM14932

SEQ ID NO: 19511 - protein, 469 aa, Artificial Sequence; identical to SEQ ID NO: 16738
  derived and/or modified protein sequence (wt) from neuraminidase__InfluenzaA__ADM14950

SEQ ID NO: 19512 - protein, 469 aa, Artificial Sequence; identical to SEQ ID NO: 17756
  derived and/or modified protein sequence (wt) from neuraminidase__InfluenzaA__ADM14959

SEQ ID NO: 19513 - protein, 469 aa, Artificial Sequence
  derived and/or modified protein sequence (wt) from neuraminidase__InfluenzaA__ADM14977
MNPNQKIITIGSVCMTIGMANLILQIGNIISIWISHSIQLGNQNQIETCNQSVITYENNTWVNQTYVNISNTNFAAGQSVVSVKLAGNSSLCPVNGWAIYSKDNSVRIGSKGDVFVIREPFISCSPLECRTFFLTQGALLNDKHSNGTIKDRSPYRTLMSCPIGEVPSPYNSRFESVAWSASACHDGINWLTIGISGPDNGAVAVLKYNGIITDTIKSWRNNILRTQESECACVNGSCFTVMTDGPSNGQASYKIFRIEKGKIVKSVEMNAPNYHYEECSCYPDSSEITCVCRDNWHGSNRPWVSFNQNLEYQIGYICSGIFGDNPRPNDKTGSCGPVSSNGANGVKGFSFKYGNGVWIGRTKSISSRNGFEMIWDPNGWTGTDNNFSIKQDIVGINEWSGYSGSFVQHPELTGLDCIRPCFWVELIRGRPKENTIWTSGSSISFCGVNSDTVGWSWPDGAELPFTIDK

SEQ ID NO: 19514 - protein, 469 aa, Artificial Sequence; identical to SEQ ID NO: 18361
  derived and/or modified protein sequence (wt) from neuraminidase__InfluenzaA__ADM14987

SEQ ID NO: 19515 - protein, 469 aa, Artificial Sequence; identical to SEQ ID NO: 17905
  derived and/or modified protein sequence (wt) from neuraminidase__InfluenzaA__ADM26787

SEQ ID NO: 19516 - protein, 469 aa, Artificial Sequence; identical to SEQ ID NO: 18484
  derived and/or modified protein sequence (wt) from neuraminidase__InfluenzaA__ADM26798

SEQ ID NO: 19517 - protein, 469 aa, Artificial Sequence
  derived and/or modified protein sequence (wt) from neuraminidase__InfluenzaA__ADM26809
MNPNQKIITIGSVSLTISTICFFMQIAILITTVTLHFKQYEFNSPPNNQVMLCEPTIIERNITEIVYLTNTTIEKEICPKLAEYRNWSKPQCDITGFAPFSKDNSIRLSAGGDIWVTREPYVSCDPDKCYQFALGQGTTVNNVHSNNTVRDRTPYRTLLMNELGVPFHLGTKQVCIAWSSSSCHDGKAWLHVCITGDDKNATASFIYNGRLVDSVVSWSKEILRTQESECVCINGTCTVVMTDGSASGKADTKILFIEEGKIVHTSTLSGSAQHVEECSCYPRYPGVRCVCRDNWKGSNRPIVDINIKDHSIVSSYVCSGLVGDTPRKNDSSSSSHCLDPNNEEGGHGVKGWAFDDGNDVWMGRTISEKSRLGYETFKVIEGWSNHKSKLQINRQVIVDRGNRSGYSGIFSVEGKSCINRCFYVELIRGRKEETEVLWTSNSIVVFCGTSGTYGTGSWPDGADLNLMPI

SEQ ID NO: 19518 - protein, 469 aa, Artificial Sequence
  derived and/or modified protein sequence (wt) from neuraminidase__InfluenzaA__ADM26820
MNPNQKIITIGSVSLTISTICFFMQIAILITTVTLHFKQYEFNSPPNNQVMLCEPTIIERNITEIVYLTNTTIEKEICPKLAEYRNWSKPQCDITGFAPFSKDNSIRLSAGGDIWVTREPYVSCDPDKCYQFALGQGTTLNNVHSNNTVRDRTPYRTLLMNELGVPFHLGTKQVCIAWSSSSCHDGKAWLHVCITGDDKNATASFIYNGRLVDSVVSWSKEILRTQESECVCINGTCTVVMTDGSASGKADTKILFIEEGKIVHTSTLSGSAQHVEECSCYPRYPGVRCVCRDNWKGSNRPIVDINIKDHSIVSSYVCSGLVGDTPRKNDSSSSSHCLDPNNEEGGHGVKGWAFDDGNDVWMGRTINETSRLGYETFKVIEGWSNPKSKLQINRQVIVDRGNRSGYSGIFSVEGKSCINRCFYVELIRGRKEETEVLWTSNSIVVFCGTSGTYGTGSWPDGADLNLMPI

SEQ ID NO: 19519 - protein, 449 aa, Artificial Sequence
  derived and/or modified protein sequence (wt) from neuraminidase__InfluenzaA__ADM31427
MNPNQKIITIGSVCMIIGIVSLMLQIGNMISIWVSHSIQTGNQHQAEPIRNTNFLTENAVASVTLAGNSSLCPIRGWAVHSKDNSIRIGSKGDVFVIREPFISCSHMECRTFFLTQGALLNDKHSNGTVKDRSPHRTLMSCPVGEAPSPYNSRFESVAWSASACHDGISWLTIGISGPDNGAVAVLKYNGIITDTIKSWGNNILRTQESECACVNGSCFTVMTDGPSNGQASYKIFKIEKGKVVKSVELNAPNYHYEECSCYPDSGEIICVCRDNWHGSNRPWVSFNQNLEYQIGYICSGVFGDNPRPNDGTGSCGPMSPNGAYGIKGFSFKYGNGVWIGRTKSTNSRSGFEMIWDPNGWTGTDSEFSVKQDIVAITDWSGYSGSFVQHPELTGLDCIRPCFWVELIRGRPKESTIWTSGSSISFCGVNSDTVSWSWPDGAELPFTIDK

SEQ ID NO: 19520 - protein, 469 aa, Artificial Sequence
  derived and/or modified protein sequence (wt) from neuraminidase__InfluenzaA__ADM31481
MNPNQKIITIGSVCMTIGMANLILQIGNIISIWISHSIQLGNQNQIETCNQSVITYENNTWVNQTYVNISNTNFAAGQSVVSVKLAGNSSLCPVSGWAIYSKDNSIRIGSKGDVFVIREPFISCSPLECRTFFLTQGALLNDKHSNGTIKDRSPYRTLMSCPIGEVPSPYNSRFESVAWSASACHDGINWLTIGISGPDKGAVAVLKYNGIITDTIKSWRNNILRTQESECACVNGSCFTVMTDGPSDGQASYKIFRIEKGKIVKSVEMNAPNYHYEECSCYPDSSEITCVCRDNWHGSNRPWVSFNQNLEYQIGYICSGIFGDNPRPNDKTGSCGPVSSNGANGVKGFSFKYGNGVWIGRTKSISSRNGFEMIWDPNGWTGTDNNFSIKQDIVGINEWSGYSGSFVQHPELTGLDCIRPCFWVELIRGRPKENTIWTSGSSISFCGVNSDTVGWSWPDGAELPFTIDK

SEQ ID NO: 19521 - protein, 469 aa, Artificial Sequence; identical to SEQ ID NO: 17321
  derived and/or modified protein sequence (wt) from neuraminidase__InfluenzaA__ADM31491

SEQ ID NO: 19522 - protein, 469 aa, Artificial Sequence; identical to SEQ ID NO: 18943
  derived and/or modified protein sequence (wt) from neuraminidase__InfluenzaA__ADM31501

SEQ ID NO: 19523 - protein, 469 aa, Artificial Sequence; identical to SEQ ID NO: 16738
  derived and/or modified protein sequence (wt) from neuraminidase__InfluenzaA__ADM31511

SEQ ID NO: 19524 - protein, 469 aa, Artificial Sequence; identical to SEQ ID NO: 18939
  derived and/or modified protein sequence (wt) from neuraminidase__InfluenzaA__ADM31521

SEQ ID NO: 19525 - protein, 469 aa, Artificial Sequence; identical to SEQ ID NO: 16738
  derived and/or modified protein sequence (wt) from neuraminidase__InfluenzaA__ADM31531

SEQ ID NO: 19526 - protein, 469 aa, Artificial Sequence; identical to SEQ ID NO: 18026
  derived and/or modified protein sequence (wt) from neuraminidase__InfluenzaA__ADM31541

SEQ ID NO: 19527 - protein, 469 aa, Artificial Sequence; identical to SEQ ID NO: 16738
  derived and/or modified protein sequence (wt) from neuraminidase__InfluenzaA__ADM31551

SEQ ID NO: 19528 - protein, 469 aa, Artificial Sequence; identical to SEQ ID NO: 16738
  derived and/or modified protein sequence (wt) from neuraminidase__InfluenzaA__ADM31561

SEQ ID NO: 19529 - protein, 469 aa, Artificial Sequence; identical to SEQ ID NO: 16738
  derived and/or modified protein sequence (wt) from neuraminidase__InfluenzaA__ADM31571

SEQ ID NO: 19530 - protein, 469 aa, Artificial Sequence; identical to SEQ ID NO: 17915
  derived and/or modified protein sequence (wt) from neuraminidase__InfluenzaA__ADM31581

SEQ ID NO: 19531 - protein, 469 aa, Artificial Sequence; identical to SEQ ID NO: 16738
  derived and/or modified protein sequence (wt) from neuraminidase__InfluenzaA__ADM31601

SEQ ID NO: 19532 - protein, 469 aa, Artificial Sequence; identical to SEQ ID NO: 18026
  derived and/or modified protein sequence (wt) from neuraminidase__InfluenzaA__ADM31611

SEQ ID NO: 19533 - protein, 469 aa, Artificial Sequence
  derived and/or modified protein sequence (wt) from neuraminidase__InfluenzaA__ADM31621
MNPNQKIITIGSVCMTIGMANLILQIGNIISIWISHSIQLGNQNQIETCNQSVITYENNTWVNQTYVNISNTNFAAGQSVVSVKLAGNSSLCPVSGWAIYSKDNSIRIGSKGDVFVIREPFISCSSLECRTFFLTQGALLNDKHSNGTIKDRSPYRTLMSCPIGEVPSPYNSRFESVAWSASACHDGINWLTIGISGPDNGAVAVLKYNGIITDTIKSWRNNILRTQESECACVNGSCFTVMTDGPSDGQASYKIFRIEKGKIVKSVEMNAPNYHYEECSCYPDSSEITCVCRDNWHGSNRPWVSFNQNLEYQIGYICSGIFGDNPRPNDKTGSCGPVSSNGANGVKGFSFKYGNGVWIGRTKSISSRNGFEMIWDPNGWTGTDNNFSIKQDIVGINEWSGYSGSFVQHPELTGLDCIRPCFWVELIRGRPKENTIWTSGSSISFCGVNSDTVGWSWPDGAELPFTIDK

SEQ ID NO: 19534 - protein, 469 aa, Artificial Sequence; identical to SEQ ID NO: 18026
  derived and/or modified protein sequence (wt) from neuraminidase__InfluenzaA__ADM31631

SEQ ID NO: 19535 - protein, 469 aa, Artificial Sequence; identical to SEQ ID NO: 17915
  derived and/or modified protein sequence (wt) from neuraminidase__InfluenzaA__ADM31641

SEQ ID NO: 19536 - protein, 469 aa, Artificial Sequence; identical to SEQ ID NO: 18200
  derived and/or modified protein sequence (wt) from neuraminidase__InfluenzaA__ADM31651

SEQ ID NO: 19537 - protein, 469 aa, Artificial Sequence; identical to SEQ ID NO: 17915
  derived and/or modified protein sequence (wt) from neuraminidase__InfluenzaA__ADM31661

SEQ ID NO: 19538 - protein, 469 aa, Artificial Sequence
  derived and/or modified protein sequence (wt) from neuraminidase__InfluenzaA__ADM31671
MNPNQKIITIGSVCMTIGMANLILQIGNIISIWISHSTQLGNQNQIETCNQSVITYENNTWVNQTYVNISNTNFAAGQSVVSAKLAGNSSLCPVSGWAIYSKDNSIRIGSKGDVFVIREPFISCSPLECRTFFLTQGALLNDKHSNGTIKDRSPYRTLMSCPIGEVPSPYNSRFESVAWSASACHDGINWLTIGISGPDNGAVAVLKYNGIITDTIKSWRNNILRTQESECACVNGSCFTVMTDGPSDGQASYKIFRIEKGKIVKSVEMNAPNYHYEECSCYPDSSEITCVCRDNWHGSNRPWVSFNQNLEYQIGYICSGIFGDNPRPNDKTGSCGPVSSNGANGVKGFSFKYGNGVWIGRTKSISSRNGFEMIWDPNGWTGTDNNFSIKQDIVGINEWSGYSGSFVQHPELTGLDCIRPCFWVELIRGRPKENTIWTSGSSISFCGVNSDTVGWSWPDGAELPFTIDK

SEQ ID NO: 19539 - protein, 469 aa, Artificial Sequence; identical to SEQ ID NO: 18026
  derived and/or modified protein sequence (wt) from neuraminidase__InfluenzaA__ADM31681

SEQ ID NO: 19540 - protein, 469 aa, Artificial Sequence
  derived and/or modified protein sequence (wt) from neuraminidase__InfluenzaA__ADM31691
MNPNQKILTIGSVCMTIGMANLILQIGNIISIWISHSIQLGNQNQTETCNQSVITYENNTWVNQTYVNISNTNFAAGQSVVSVKLAGNSSLCPVSGWAIYSKDNSIRIGSKGDVFVIREPFISCSPLECRTFFLTQGALLNDKHSNGTIKDRSPYRTLMSCPIGEVPSPYNSRFESVAWSASACHDGINWLTIGISGPDNGAVAVLKYNGIITDTIKSWRNNILRTQESECACVNGSCFTVMTDGPSDGQASYKIFRIEKGKIVKSVEMNAPNYHYEECSCYPDSSEITCVCRDNWHGSNRPWVSFNQNLEYQIGYICSGIFGDNPRPNDKTGSCGPVSSNGANGVKGFSFKYGNGVWIGRTKSISSRNGFEMIWDPNGWTGTDNNFSIKQDIVGINEWSGYSGSFVQHPELTGLDCIRPCFWVELIRGRPKENTIWTSGSSISFCGVNSDTVGWSWPDGAELPFTIDK

SEQ ID NO: 19541 - protein, 469 aa, Artificial Sequence; identical to SEQ ID NO: 16738
  derived and/or modified protein sequence (wt) from neuraminidase__InfluenzaA__ADM31701

SEQ ID NO: 19542 - protein, 469 aa, Artificial Sequence; identical to SEQ ID NO: 16738
  derived and/or modified protein sequence (wt) from neuraminidase__InfluenzaA__ADM31711

SEQ ID NO: 19543 - protein, 469 aa, Artificial Sequence; identical to SEQ ID NO: 18026
  derived and/or modified protein sequence (wt) from neuraminidase__InfluenzaA__ADM31721

SEQ ID NO: 19544 - protein, 469 aa, Artificial Sequence
  derived and/or modified protein sequence (wt) from neuraminidase__InfluenzaA__ADM31731
MNPNQKIIIIGSVCMTIGMANLILQIGNIISIWISHSIQLGNQNQIETCNQSVITYENNTWVNQTYVNISNTNFAAGQSVVSVKLAGNSSLCPVSGWAIYSKDNSIRIGSKGDVFVIREPFISCSPLECRTFFLTQGALLNDKHSNGTIKDRSPYRTLMSCPIGEVPSPYNSRFESVAWSASACHDGINWLTIGISGPDNGAVAVLKYNGIITDTIKSWRNNILRTQESECACVNGSCFTVMTDGPSDGQASYKIFRIEKGRIVKSVEMNAPNYHYEECSCYPDSSEITCVCRDNWHGSNRPWVSFNQNLEYQIGYICSGIFGDNPRPNDKTGSCGPVSSNGANGVKGFSFKYGNGVWIGRTKSISSRNGFEMIWDPNGWTGTDNNFSIKQDIVGINEWSGYSGSFVQHPELTGLDCIRPCFWVELIRGRPKENTIWTSGSSISFCGVNSDTVGWSWPDGAELPFTIDK

SEQ ID NO: 19545 - protein, 469 aa, Artificial Sequence; identical to SEQ ID NO: 19113
  derived and/or modified protein sequence (wt) from neuraminidase__InfluenzaA__ADM31741

SEQ ID NO: 19546 - protein, 469 aa, Artificial Sequence; identical to SEQ ID NO: 16738
  derived and/or modified protein sequence (wt) from neuraminidase__InfluenzaA__ADM31751

SEQ ID NO: 19547 - protein, 469 aa, Artificial Sequence
  derived and/or modified protein sequence (wt) from neuraminidase__InfluenzaA__ADM31761
MNPNQKIITIGSVCMTIGMANLILQIGNIISIWISHSIQLGNQNQIETCNQSVITYENNTWVNQTYVNISNTNFAAGQSVVSVKLAGNSSLCPVSGWAIYSKDNSIRIGSKGDVFVIREPFISCSPLECRTFFLTQGALLNDKHSNGTIKDRSPYRTLMSCPIGEVPSPYNSRFESVAWSASACHDGINWLTIGISGPDNGAVAVLKYNGIITDTIKSWRNNILRTQESECACVNGSCFTVMTDGPSDGQASYKIFRIEKGKIVKSVEMNAPNYHYEECSCYPDSSEITCVCRDNWHGSNRPWVSFNHNLEYQIGYICSGIFGDNPRPNDKTGSCGPVSSNGANGVKGFSFKYGNGVWIGRTKSISSRNGFEMIWDPNGWTGTDNKFSIKQDIVGISEWSGYSGSFVQHPELTGLDCIRPCFWVELIRGRPKENTIWTSGSSISFCGVNSDTVGWSWPDGAELPFTIDK

SEQ ID NO: 19548 - protein, 469 aa, Artificial Sequence
  derived and/or modified protein sequence (wt) from neuraminidase__InfluenzaA__ADM31771
MNPNQKILTIGSVCMTIGMANLILQIGNIISIWISHSIQLGNQNQTETCNQSVIIYENNTWVNQTYVNISNTNFAAGQSVVSVKLAGNSSLCPVSGWAIYSKDNSIRIGSKGDVFVIREPFISCSPLECRTFFLTQGALLNDKHSNGTIKDRSPYRTLMSCPIGEVPSPYNSRFESVAWSASACHDGINWLTIGISGPDNGAVAVLKYNGIITDTIKSWRNNILRTQESECACVNGSCFTVMTDGPSDGQASYKIFRIEKGKIVKSVEMNAPNYHYEECSCYPDSSEITCVCRDNWHGSNRPWVSFNQNLEYQIGYICSGIFGDNPRPNDKTGSCGPVSSNGANGVKGFSFKYGNGVWIGRTKSISSRNGFEMIWDPNGWTGTDNNFSIKQDIVGINEWSGYSGSFVQHPELTGLDCIRPCFWVELIRGRPKENTIWTSGSSISFCGVNSDTVGWSWPDGAELPFTIDK

SEQ ID NO: 19549 - protein, 469 aa, Artificial Sequence
  derived and/or modified protein sequence (wt) from neuraminidase__InfluenzaA__ADM31801
MNPNQKIITIGSVCMTIGMANLILQIGNIISIWISHSIQLGNQNQIETCNQSVITYENNTWVNQTYVNINNTNFAAGQSVVSVKLAGNSSLCPVSGWAIYSKDNSIRIGSKGDVFVIREPFISCSPLECRTFFLTQGALLNDKHSNGTIKDRSPYRTLMSCPIGEVPSPYNSRFESVAWSASACHDGINWLTIGISGPDNGAVAVLKYNGIITDTIKSWRNNILRTQESECACVNGSCFTVMTDGPSDGQASYKIFRIEKGKIVKSVEMNAPNYHYEECSCYPDSSEITCVCRDNWHGSNRPWVSFNQNLEYQIGYICSGIFGDNPRPNDKTGSCGPVSSNGANGVKGFSFKYGNGVWIGRTKSISSRNGFEMIWDPNGWTGTDNKFSIKQDIVGINEWSGYSGSFVQHPELTGLDCIRPCFWVELIRGRPKENTIWTSGSSISFCGVNSDTVGWSWPDGAELPFTIDK

SEQ ID NO: 19550 - protein, 469 aa, Artificial Sequence
  derived and/or modified protein sequence (wt) from neuraminidase__InfluenzaA__ADM31811
MNPNQKIITIGSVCMTIGMANLILQIGNIISIWISHSIQLGNQNQIETCNQSVITYENNTWVNQTYVNISNTNFAAGQSVVSVKFAGNSSLCPVSGWAIYSKDNSIRIGSKGDVFVIREPFISCSPLECRTFFLTQGALLNDKHSNGTIKDRSPYRTLMSCPIGEVPSPYNSRFESVAWSASACHDGINWLTIGISGPDNGAVAVLKYNGIITDTIKSWRNNILRTQESECACVNGSCFTVMTDGPSDGQASYKIFRIEKGKIVKSVEMNAPNYHYEECSCYPDSSEITCVCRDNWHGSNRPWVSFNQNLEYQIGYICSGIFGDNPRPNDKTGSCGPVSSNGANGVKGFSFKYGNGVWIGRTKSISSRNGFEMIWDPNGWTGTDNKFSIKQDIVGINEWSGYSGSFVQHPELTGLDCIRPCFWVELIRGRPKENTIWTSGSSISFCGVNSDTVGWSWPDGAELPFTIDK

SEQ ID NO: 19551 - protein, 469 aa, Artificial Sequence; identical to SEQ ID NO: 17915
  derived and/or modified protein sequence (wt) from neuraminidase__InfluenzaA__ADM31821

SEQ ID NO: 19552 - protein, 469 aa, Artificial Sequence; identical to SEQ ID NO: 16738
  derived and/or modified protein sequence (wt) from neuraminidase__InfluenzaA__ADM31831

SEQ ID NO: 19553 - protein, 469 aa, Artificial Sequence; identical to SEQ ID NO: 16738
  derived and/or modified protein sequence (wt) from neuraminidase__InfluenzaA__ADM31841

SEQ ID NO: 19554 - protein, 469 aa, Artificial Sequence
  derived and/or modified protein sequence (wt) from neuraminidase__InfluenzaA__ADM31851
MNPNQKILTIGSVCMTIGMANLILQIGNIISIWISHSIQLGNQNQTETCNQSVITYENNTWVNQTYVNISNTNFAAGQSVVSVKLAGNSSLCPVSGWAIYSKDNSIRIGSKGDVFVIREPFISCSPLECRTFFLTQGALLNDKHSNGTIKDRSPYRTLMSCPIGEVPSPYNSRFESVAWSASACHDGINWLTIGISGPDNGAVAVLKYNGIITDTIKSWRNNILRTQESECACVNGSCFTVMTDGPSDGQASYKIFRIERGKIVKSVEMNAPNYHYEECSCYPDSSEITCVCRDNWHGSNRPWVSFNQNLEYQIGYICSGIFGDNPRPNDKTGSCGPVSSNGANGVKGFSFKYGNGVWIGRTKSISSRNGFEMIWDPNGWTGTDNNFSIKQDIVGINEWSGYSGSFVQHPELTGLDCIRPCFWVELIRGRPKENTIWTSGSSISFCGVNSDTVGWSWPDGAELPFTIDK

SEQ ID NO: 19555 - protein, 469 aa, Artificial Sequence; identical to SEQ ID NO: 16738
  derived and/or modified protein sequence (wt) from neuraminidase__InfluenzaA__ADM31861

SEQ ID NO: 19556 - protein, 469 aa, Artificial Sequence; identical to SEQ ID NO: 16738
  derived and/or modified protein sequence (wt) from neuraminidase__InfluenzaA__ADM31871

SEQ ID NO: 19557 - protein, 469 aa, Artificial Sequence
  derived and/or modified protein sequence (wt) from neuraminidase__InfluenzaA__ADM31881
MNPNQKIITIGSVCMTIGMANLILQIGNTISIWISHSIQLGNQNQIETCNQSVITYENNTWVNQTYVNISNTNFAAGQSVVSVKLAGNSSLCPVSGWAIYSKDNSIRIGSKGDVFVIREPFISCSPLECRTFFLTQGALLNDKHSNGTIKDRSPYRTLMSCPIGEVPSPYNSRFESVAWSASACHDGINWLTIGISGPDNGAVAVLKYNGIITDTIKSWRNNILRTQESECACVNGSCFTVMTDGPSDGQASYKIFRIEKGKIVKSVEMNAPNYHYEECSCYPDSSEITCVCRDNWHGSNRPWVSFNQNLEYQIGYICSGIFGDNPRPNDKTGSCGPVSSNGANGVKGFSFKYGNGVWIGRTKSISSRNGFEMIWDPNGWTGTDNNFSIKQDIVGINEWSGYSGSFVQHPELTGLDCIRPCFWVELIRGRPKENTIWTSGSSISFCGVNSDTVGWSWPDGAELPFTIDK

SEQ ID NO: 19558 - protein, 469 aa, Artificial Sequence; identical to SEQ ID NO: 16738
  derived and/or modified protein sequence (wt) from neuraminidase__InfluenzaA__ADM31891

SEQ ID NO: 19559 - protein, 469 aa, Artificial Sequence; identical to SEQ ID NO: 16728
  derived and/or modified protein sequence (wt) from neuraminidase__InfluenzaA__ADM31901

SEQ ID NO: 19560 - protein, 469 aa, Artificial Sequence; identical to SEQ ID NO: 17961
  derived and/or modified protein sequence (wt) from neuraminidase__InfluenzaA__ADM31911

SEQ ID NO: 19561 - protein, 469 aa, Artificial Sequence; identical to SEQ ID NO: 17961
  derived and/or modified protein sequence (wt) from neuraminidase__InfluenzaA__ADM31921

SEQ ID NO: 19562 - protein, 469 aa, Artificial Sequence; identical to SEQ ID NO: 18419
  derived and/or modified protein sequence (wt) from neuraminidase__InfluenzaA__ADM31931

SEQ ID NO: 19563 - protein, 469 aa, Artificial Sequence; identical to SEQ ID NO: 16728
  derived and/or modified protein sequence (wt) from neuraminidase__InfluenzaA__ADM31941

SEQ ID NO: 19564 - protein, 469 aa, Artificial Sequence; identical to SEQ ID NO: 18419
  derived and/or modified protein sequence (wt) from neuraminidase__InfluenzaA__ADM31951

SEQ ID NO: 19565 - protein, 469 aa, Artificial Sequence
  derived and/or modified protein sequence (wt) from neuraminidase__InfluenzaA__ADM31961
MNPNQKIITIGSVCMAIGMANLILQIGNIISIWISHSIQLGNQNQIETCNQSVITYENNTWVNQTYVNISNTNFAAGQSVVSVKLAGNSSLCPVSGWAIYSKDNSIRIGSKGDVFVIREPFISCSPLECRTFFLTQGALLNDKHSNGTIKDRSPYRTLMSCPIGEVPSPYNSRFESVAWSASACHDGINWLTIGISGPDNGAVAVLKYNGIITDTIKSWRNNILRTQESECACVNGSCFTVMTDGPSDGQASYKIFRIEKGKIVKSVEMNAPNYHYEECSCYPDSSEITCVCRDNWHGSNRPWVSFNQNLEYQIGYICSGIFGDNPRPNDKTGSCGPVSSNGANGVKGFSFKYGNGVWIGRTKSISSRNGFEMIWDPNGWTGTDNNFSIKQDIVGINEWSGYSGSFVQHPELTGLDCIRPCFWVELIRGRPKENTIWTSGSSISFCGVNSDTVGWSWPDGAELPFTIDK

SEQ ID NO: 19566 - protein, 469 aa, Artificial Sequence
  derived and/or modified protein sequence (wt) from neuraminidase__InfluenzaA__ADM31971
MNPNQKIITIGSVCMTIGMANLILQIGNIISIWISHSIQLGNQNQIETCNQSVITYENNTWVNQTYVNISNTNFAAGQSVVSMKLAGNSSLCPVSGWAIYSKDNSVRIGSKGDVFVIREPFISCSPLECRTFFLTQGALLNDKHSNGTIKDRSPYRTLMSCPIGEVPSPYNSRFESVAWSASACHDGINWLTIGISGPDNGAVAVLKYNGVITDTIKSWRNNILRTQESECACVNGSCFTVMTDGPSNGQASYKIFRIEKGKIVKSVEMNAPNYHYEECSCYPDSSEITCVCRDNWHGSNRPWVSFNQNLEYQIGYICSGIFGDNPRPNDKTGSCGPVSSNGANGVKGFSFKYGNGVWIGRTKSISSRNGFEMIWDPNGWTGTDNNFSIKQDIVGINEWSGYSGSFVQHPELTGLDCIRPCFWVELIRGRPKENTIWTSGSSISFCGVNSDTVGWSWPDGAELPFTIDK

SEQ ID NO: 19567 - protein, 469 aa, Artificial Sequence; identical to SEQ ID NO: 17961
  derived and/or modified protein sequence (wt) from neuraminidase__InfluenzaA__ADM31981

SEQ ID NO: 19568 - protein, 469 aa, Artificial Sequence; identical to SEQ ID NO: 16728
  derived and/or modified protein sequence (wt) from neuraminidase__InfluenzaA__ADM31991

SEQ ID NO: 19569 - protein, 469 aa, Artificial Sequence; identical to SEQ ID NO: 16728
  derived and/or modified protein sequence (wt) from neuraminidase__InfluenzaA__ADM32001

SEQ ID NO: 19570 - protein, 469 aa, Artificial Sequence; identical to SEQ ID NO: 16728
  derived and/or modified protein sequence (wt) from neuraminidase__InfluenzaA__ADM32011

SEQ ID NO: 19571 - protein, 469 aa, Artificial Sequence; identical to SEQ ID NO: 16738
  derived and/or modified protein sequence (wt) from neuraminidase__InfluenzaA__ADM32021

SEQ ID NO: 19572 - protein, 469 aa, Artificial Sequence; identical to SEQ ID NO: 17708
  derived and/or modified protein sequence (wt) from neuraminidase__InfluenzaA__ADM32031

SEQ ID NO: 19573 - protein, 469 aa, Artificial Sequence; identical to SEQ ID NO: 18462
  derived and/or modified protein sequence (wt) from neuraminidase__InfluenzaA__ADM32051

SEQ ID NO: 19574 - protein, 469 aa, Artificial Sequence; identical to SEQ ID NO: 16738
  derived and/or modified protein sequence (wt) from neuraminidase__InfluenzaA__ADM32061

SEQ ID NO: 19575 - protein, 469 aa, Artificial Sequence; identical to SEQ ID NO: 16738
  derived and/or modified protein sequence (wt) from neuraminidase__InfluenzaA__ADM32071

SEQ ID NO: 19576 - protein, 469 aa, Artificial Sequence; identical to SEQ ID NO: 16738
  derived and/or modified protein sequence (wt) from neuraminidase__InfluenzaA__ADM32081

SEQ ID NO: 19577 - protein, 469 aa, Artificial Sequence; identical to SEQ ID NO: 17961
  derived and/or modified protein sequence (wt) from neuraminidase__InfluenzaA__ADM32091

SEQ ID NO: 19578 - protein, 469 aa, Artificial Sequence; identical to SEQ ID NO: 16738
  derived and/or modified protein sequence (wt) from neuraminidase__InfluenzaA__ADM32101

SEQ ID NO: 19579 - protein, 469 aa, Artificial Sequence; identical to SEQ ID NO: 16738
  derived and/or modified protein sequence (wt) from neuraminidase__InfluenzaA__ADM32111

SEQ ID NO: 19580 - protein, 469 aa, Artificial Sequence; identical to SEQ ID NO: 18419
  derived and/or modified protein sequence (wt) from neuraminidase__InfluenzaA__ADM32554

SEQ ID NO: 19581 - protein, 469 aa, Artificial Sequence; identical to SEQ ID NO: 16728
  derived and/or modified protein sequence (wt) from neuraminidase__InfluenzaA__ADM32564

SEQ ID NO: 19582 - protein, 469 aa, Artificial Sequence; identical to SEQ ID NO: 17961
  derived and/or modified protein sequence (wt) from neuraminidase__InfluenzaA__ADM32574

SEQ ID NO: 19583 - protein, 469 aa, Artificial Sequence; identical to SEQ ID NO: 16738
  derived and/or modified protein sequence (wt) from neuraminidase__InfluenzaA__ADM32584

SEQ ID NO: 19584 - protein, 469 aa, Artificial Sequence; identical to SEQ ID NO: 18419
  derived and/or modified protein sequence (wt) from neuraminidase__InfluenzaA__ADM32594

SEQ ID NO: 19585 - protein, 469 aa, Artificial Sequence; identical to SEQ ID NO: 16738
  derived and/or modified protein sequence (wt) from neuraminidase__InfluenzaA__ADM32604

SEQ ID NO: 19586 - protein, 469 aa, Artificial Sequence; identical to SEQ ID NO: 16738
  derived and/or modified protein sequence (wt) from neuraminidase__InfluenzaA__ADM32614

SEQ ID NO: 19587 - protein, 469 aa, Artificial Sequence; identical to SEQ ID NO: 16738
  derived and/or modified protein sequence (wt) from neuraminidase__InfluenzaA__ADM32624

SEQ ID NO: 19588 - protein, 469 aa, Artificial Sequence; identical to SEQ ID NO: 18419
  derived and/or modified protein sequence (wt) from neuraminidase__InfluenzaA__ADM32634

SEQ ID NO: 19589 - protein, 469 aa, Artificial Sequence; identical to SEQ ID NO: 16738
  derived and/or modified protein sequence (wt) from neuraminidase__InfluenzaA__ADM32644

SEQ ID NO: 19590 - protein, 469 aa, Artificial Sequence; identical to SEQ ID NO: 16738
  derived and/or modified protein sequence (wt) from neuraminidase__InfluenzaA__ADM32664

SEQ ID NO: 19591 - protein, 469 aa, Artificial Sequence; identical to SEQ ID NO: 17961
  derived and/or modified protein sequence (wt) from neuraminidase__InfluenzaA__ADM32674

SEQ ID NO: 19592 - protein, 469 aa, Artificial Sequence; identical to SEQ ID NO: 16738
  derived and/or modified protein sequence (wt) from neuraminidase__InfluenzaA__ADM32684

SEQ ID NO: 19593 - protein, 469 aa, Artificial Sequence; identical to SEQ ID NO: 16728
  derived and/or modified protein sequence (wt) from neuraminidase__InfluenzaA__ADM32694

SEQ ID NO: 19594 - protein, 469 aa, Artificial Sequence; identical to SEQ ID NO: 16738
  derived and/or modified protein sequence (wt) from neuraminidase__InfluenzaA__ADM32704

SEQ ID NO: 19595 - protein, 469 aa, Artificial Sequence; identical to SEQ ID NO: 18462
  derived and/or modified protein sequence (wt) from neuraminidase__InfluenzaA__ADM32714

SEQ ID NO: 19596 - protein, 469 aa, Artificial Sequence; identical to SEQ ID NO: 18462
  derived and/or modified protein sequence (wt) from neuraminidase__InfluenzaA__ADM32724

SEQ ID NO: 19597 - protein, 469 aa, Artificial Sequence; identical to SEQ ID NO: 16738
  derived and/or modified protein sequence (wt) from neuraminidase__InfluenzaA__ADM32734

SEQ ID NO: 19598 - protein, 469 aa, Artificial Sequence; identical to SEQ ID NO: 17961
  derived and/or modified protein sequence (wt) from neuraminidase__InfluenzaA__ADM32744

SEQ ID NO: 19599 - protein, 469 aa, Artificial Sequence; identical to SEQ ID NO: 18462
  derived and/or modified protein sequence (wt) from neuraminidase__InfluenzaA__ADM32754

SEQ ID NO: 19600 - protein, 469 aa, Artificial Sequence; identical to SEQ ID NO: 17961
  derived and/or modified protein sequence (wt) from neuraminidase__InfluenzaA__ADM32764

SEQ ID NO: 19601 - protein, 469 aa, Artificial Sequence
  derived and/or modified protein sequence (wt) from neuraminidase__InfluenzaA__ADM32774
MNPNQKIIIIGSVCMTIGMANLILQIGNIISIWISHSIQLGNQNQIETCNQSVTTYENNTWVNQTYVNISNTNFAAGQSVVSVKLAGNSSLCPVSGWAIYSKDNSIRIGSKGDVFVIREPFISCSPLECRTFFLTQGALLNDKHSNGTIKDRSPYRTLMSCPIGEVPSPYNSRFESVAWSASACHDGINWLTIGISGPDNGAVAVLKYNGIITDTIKSWRNNILRTQESECACVNGSCFTVMTDGPSDGQASYKIFRIEKGKIVKSVEMNAPNYHYEECSCYPDSSEITCVCRDNWHGSNRPWVSFNQNLEYQIGYICSGIFGDNPRPNDKTGSCGPVSSNGANGVKGFSFKYGNGVWIGRTKSISSRNGFEMIWDPNGWTGTDNNFSIKQDIVGINEWSGYSGSFVQHPELTGLDCIRPCFWVELIRGRPKENTIWTSGSSISFCGVNSDTVGWSWPDGAELPFTIDK

SEQ ID NO: 19602 - protein, 469 aa, Artificial Sequence; identical to SEQ ID NO: 17708
  derived and/or modified protein sequence (wt) from neuraminidase__InfluenzaA__ADM32784

SEQ ID NO: 19603 - protein, 469 aa, Artificial Sequence; identical to SEQ ID NO: 17961
  derived and/or modified protein sequence (wt) from neuraminidase__InfluenzaA__ADM32794

SEQ ID NO: 19604 - protein, 469 aa, Artificial Sequence
  derived and/or modified protein sequence (wt) from neuraminidase__InfluenzaA__ADM32804
MNPNQKIITIGSVCMTIGMANLILQIGNIISIWISHSIQLGNQNQIETCNQSVITYENNTWVNQTYVNISNTNFAAGQSVVSVKLVGNSSLCPVSGWAIYSKDNSVRIGSKGDVFVIREPFISCSPLECRTFFLTQGALLNDKHSNGTIKDRSPYRTLMSCPIGEVPSPYNSRFESVAWSASACHDGINWLTIGISGPDNGAVAVLKYNGIITDTIKSWRNNILRTQESECACVNGSCFTVMTDGPSNGQASYKIFRIEKGKIVKSVEMNAPNYHYEECSCYPDSSEITCVCRDNWHGSNRPWVSFNQNLEYQIGYICSGIFGDNPRPNDKTGSCGPVSSNGANGVKGFSFKYGNGVWIGRTKSISSRNGFEMIWDPNGWTGTDNNFSIKQDIVEINEWSGYSGSFVQHPELTGLDCIRPCFWVELIRGRPKENTIWTSGSSISFCGVNSDTVGWSWPDGAELPFTIDK

SEQ ID NO: 19605 - protein, 469 aa, Artificial Sequence
  derived and/or modified protein sequence (wt) from neuraminidase__InfluenzaA__ADM32814
MNPNQKIITIGSVCMTIGMANLILQIGNIISIWISHSIQLGNQNQVETCNQSVITYENNTWVNQTYVNISNTNFAAGQSVVSVKLAGNSSLCPVSGWAIYSKDNSIRIGSKGDVFVIREPFISCSPLECRTFFLTQGALLNDKHSNGTIKDRSPYRTLMSCPIGEVPSPYNSRFESVAWSASACHDGINWLTIGISGPDNGAVAVLKYNGIITDTIKSWRNNILRTQESECACVNGSCFTVMTDGPSDGQASYKIFRIEKGKIVKSVEMNAPNYHYEECSCYPDSSEITCVCRDNWHGSNRPWVSFNQNLEYQIGYICSGIFGDNPRPNDKTGSCGPVSSNGANGVKGFSFKYGNGVWIGRTKSISSRNGFEMIWDPNGWTGTDNNFSIKQDIVGINEWSGYSGSFVQHPELTGLDCIRPCFWVELIRGRPKENTIWTSGSSISFCGVNSDTVGWSWPDGAELPFTIDK

SEQ ID NO: 19606 - protein, 469 aa, Artificial Sequence; identical to SEQ ID NO: 16738
  derived and/or modified protein sequence (wt) from neuraminidase__InfluenzaA__ADM32824

SEQ ID NO: 19607 - protein, 469 aa, Artificial Sequence; identical to SEQ ID NO: 17961
  derived and/or modified protein sequence (wt) from neuraminidase__InfluenzaA__ADM32834

SEQ ID NO: 19608 - protein, 469 aa, Artificial Sequence; identical to SEQ ID NO: 16728
  derived and/or modified protein sequence (wt) from neuraminidase__InfluenzaA__ADM32844

SEQ ID NO: 19609 - protein, 469 aa, Artificial Sequence
  derived and/or modified protein sequence (wt) from neuraminidase__InfluenzaA__ADM32854
MNPNQKIITIGSVCTTIGMANLILQIGNIISIWISHSIQFGNQNQIETCNQSVITYENNTWVNQTYVNISNTNFAAGQSVVSVKLVGNSSLCPVSGWAIYSKDNSVRIGSKGDVFVIREPFISCSPLECRTFFLTQGALLNDKHSNGTIKDRSPYRTLMSCPIGEVPSPYNSRFESVAWSASACHDGINWLTIGISGPDNGAVAVLKYNGIITDTIKSWRNNILRTQESECACVNGSCFTVMTDGPSNGQASYKIFRIEKGKIVKSVEMNAPNYHYEECSCYPDSSEITCVCRDNWHGSNRPWVSFNQNLEYQIGYICSGIFGDNPRPNDKTGSCGPVSSNGANGVKGFSFKYGNGVWIGRTKSISSRNGFEMIWDPNGWTGTDNNFSIKQDIVGINEWSGYSGSFVQHPELTGLDCIRPCFWVELIRGRPKENTIWTSGSSISFCGVNSDTVGWSWPDGAELPFTIDK

SEQ ID NO: 19610 - protein, 469 aa, Artificial Sequence; identical to SEQ ID NO: 16728
  derived and/or modified protein sequence (wt) from neuraminidase__InfluenzaA__ADM32864

SEQ ID NO: 19611 - protein, 469 aa, Artificial Sequence; identical to SEQ ID NO: 16738
  derived and/or modified protein sequence (wt) from neuraminidase__InfluenzaA__ADM32874

SEQ ID NO: 19612 - protein, 469 aa, Artificial Sequence
  derived and/or modified protein sequence (wt) from neuraminidase__InfluenzaA__ADM32884
MNPNQKIITIGSVCMTIGMANLILQIGNIISIWISHSIQLGNQNQIETCNQSVITYENNTWVNQTYVNISNTNFAVGQSVVSVKLAGNSSLCPVSGWAIYSKDNSIRIGSKGDVFVIREPFISCSPLECRTFFLTQGALLNDKHSNGTIKDRSPYRTLMSCPIGEVPSPYNSRFESVAWSASACHDGINWLTIGISGPDNGAVAVLKYNGIITDTIKSWRNNILRTQESECACVNGSCFTVMTDGPSDGQASYKIFRIEKGKIVKSVEMNAPNYHYEECSCYPDSSEITCVCRDNWHGSNRPWVSFNQNLEYQIGYICSGIFGDNPRPNDKTGSCGPVSSNGANGVKGFSFKYGNGVWIGRTKSISSRNGFEMIWDPNGWTGTDNKFSIKQDIVGINEWSGYSGSFVQHPELTGLDCIRPCFWVELIRGRPKENTIWTSGSSISFCGVNSDTVGWSWPDGAELPFTIDK

SEQ ID NO: 19613 - protein, 469 aa, Artificial Sequence; identical to SEQ ID NO: 16738
  derived and/or modified protein sequence (wt) from neuraminidase__InfluenzaA__ADM32921

SEQ ID NO: 19614 - protein, 469 aa, Artificial Sequence; identical to SEQ ID NO: 16738
  derived and/or modified protein sequence (wt) from neuraminidase__InfluenzaA__ADM32931

SEQ ID NO: 19615 - protein, 469 aa, Artificial Sequence
  derived and/or modified protein sequence (wt) from neuraminidase__InfluenzaA__ADM32941
MNPNQKIIIIGSVCMTIGMANLILQIGNIISIWISHSIQLGNQNQIETCNQSVITYENNTWVNQTYVNISNTNFAAGQSVVSVKLAGNSSLCPVSGWAIYSKDNSIRIGSKGDVFVIREPFISCSPLECRTFFLTQGALLNDKHSNGTIKDRSPYRTLMSCPIGEVPSPYNSRFESVAWSASACHDGINWLTIGISGPDNGAVAVLKYNGIITDTIKSWRNNILRTQESECACVNGSCFTVMTDGPSDGQASYKIFRIEKGKIVKSVEMNAPNYHYEECSCYPDSSEITCVCRDNWHGSNRPWVSFNQNLEYQIGYICSGIFGDNPRPNDKTGSCGPVSSNGANGVKGFSFKYGNGVWIGRTKSINSRNGFEMIWDPNGWTGTDNNFSIKQDIVGINEWSGYSGSFVQHPELTGLDCIRPCFWVELIRGRPKENTIWTSGSSISFCGVNSDTVGWSWPDGAELPFTIDK

SEQ ID NO: 19616 - protein, 469 aa, Artificial Sequence; identical to SEQ ID NO: 16738
  derived and/or modified protein sequence (wt) from neuraminidase__InfluenzaA__ADM32951

SEQ ID NO: 19617 - protein, 469 aa, Artificial Sequence; identical to SEQ ID NO: 17321
  derived and/or modified protein sequence (wt) from neuraminidase__InfluenzaA__ADM32960

SEQ ID NO: 19618 - protein, 469 aa, Artificial Sequence; identical to SEQ ID NO: 16738
  derived and/or modified protein sequence (wt) from neuraminidase__InfluenzaA__ADM32969

SEQ ID NO: 19619 - protein, 469 aa, Artificial Sequence; identical to SEQ ID NO: 16738
  derived and/or modified protein sequence (wt) from neuraminidase__InfluenzaA__ADM32979

SEQ ID NO: 19620 - protein, 469 aa, Artificial Sequence; identical to SEQ ID NO: 18640
  derived and/or modified protein sequence (wt) from neuraminidase__InfluenzaA__ADM32988

SEQ ID NO: 19621 - protein, 469 aa, Artificial Sequence; identical to SEQ ID NO: 18640
  derived and/or modified protein sequence (wt) from neuraminidase__InfluenzaA__ADM32997

SEQ ID NO: 19622 - protein, 469 aa, Artificial Sequence; identical to SEQ ID NO: 16738
  derived and/or modified protein sequence (wt) from neuraminidase__InfluenzaA__ADM33006

SEQ ID NO: 19623 - protein, 469 aa, Artificial Sequence; identical to SEQ ID NO: 18640
  derived and/or modified protein sequence (wt) from neuraminidase__InfluenzaA__ADM33015

SEQ ID NO: 19624 - protein, 469 aa, Artificial Sequence
  derived and/or modified protein sequence (wt) from neuraminidase__InfluenzaA__ADM33025
MNPNQKIITIGSVCMTIGMANLILQIGNIISIWISHSIQLGNQNQIETCNQSVITYENNTWVNQTYVNISNTNFAAGQSVVSVKLAGNSSLCPVSGWAIYSKDNSIRIGSKGDVFVIREPFISCSPLECRTFFLTQGALLNDKHSNGTIKDRSPYRTLMSCPIGEVPSPYNSRFESVAWSASACHDGINWLTIGISGPDNGAVAVLKYNGIITDTIKSWRSNILRTQESECACVNGSCFTVMTDGPSDGQASYKIFRIEKGKIVKSVEMNAPNYHYEECSCYPDSSEITCVCRDNWHGSNRPWVSFNQNLEYQIGYICSGIFGDNPRPNDKTGSCGPVSSNGANGVKGFSFKYGNGVWIGRTKSISSRNGFEMIWDPNGWTGTDNNFSIKQDIVGINEWSGYSGSFVQHPELTGLDCIRPCFWVELIRGRPKENTIWTSGSSISFCGVNSDTVGWSWPDGAELPFTIDK

SEQ ID NO: 19625 - protein, 469 aa, Artificial Sequence; identical to SEQ ID NO: 16738
  derived and/or modified protein sequence (wt) from neuraminidase__InfluenzaA__ADM33042

SEQ ID NO: 19626 - protein, 469 aa, Artificial Sequence; identical to SEQ ID NO: 16738
  derived and/or modified protein sequence (wt) from neuraminidase__InfluenzaA__ADM33062

SEQ ID NO: 19627 - protein, 469 aa, Artificial Sequence
  derived and/or modified protein sequence (wt) from neuraminidase__InfluenzaA__ADM33071
MNPNQKIITIGSVCMTIGMANLILQIGNIISIWISHSIQLGNQNQIETCNQSVITYENNTWVNQTYVNISNTNFAAGQSVVSVKLAGNSSLCPVSGWAIYSKDNSIRIGSKGDVFVIREPFISCSPLECRTFFLTQGALLNDKHSNGTIKDRSPYRTLMSCPIGEVPSPYNSRFESVAWSASACHDGINWLTIGISGPDNGAVAVLKYNGIITDTIKSWRNNILRTQESECACVNGSCFTVMTDGPSDGQASYKIFRIEKGKIVKSVEMNAPNYHYEECSCYPDSSKITCVCRDNWHGSNRPWVSFNQNLEYQIGYICSGIFGDNPRPNDKTGSCGPVSSNGANGVKGFSFKYGNGVWIGRTKSISSRNGFEMIWDPNGWTGTDNNFSIKQDIVGINEWSGYSGSFVQHPELTGLDCIRPCFWVELIRGRPKENTIWTSGSSISFCGVNGDTVGWSWPDGAELPFTIDK

SEQ ID NO: 19628 - protein, 469 aa, Artificial Sequence; identical to SEQ ID NO: 16738
  derived and/or modified protein sequence (wt) from neuraminidase__InfluenzaA__ADM33081

SEQ ID NO: 19629 - protein, 469 aa, Artificial Sequence; identical to SEQ ID NO: 17811
  derived and/or modified protein sequence (wt) from neuraminidase__InfluenzaA__ADM33091

SEQ ID NO: 19630 - protein, 469 aa, Artificial Sequence; identical to SEQ ID NO: 17811
  derived and/or modified protein sequence (wt) from neuraminidase__InfluenzaA__ADM33101

SEQ ID NO: 19631 - protein, 469 aa, Artificial Sequence; identical to SEQ ID NO: 17811
  derived and/or modified protein sequence (wt) from neuraminidase__InfluenzaA__ADM33111

SEQ ID NO: 19632 - protein, 469 aa, Artificial Sequence; identical to SEQ ID NO: 16738
  derived and/or modified protein sequence (wt) from neuraminidase__InfluenzaA__ADM33121

SEQ ID NO: 19633 - protein, 469 aa, Artificial Sequence; identical to SEQ ID NO: 16738
  derived and/or modified protein sequence (wt) from neuraminidase__InfluenzaA__ADM33130

SEQ ID NO: 19634 - protein, 469 aa, Artificial Sequence; identical to SEQ ID NO: 16738
  derived and/or modified protein sequence (wt) from neuraminidase__InfluenzaA__ADM33139

SEQ ID NO: 19635 - protein, 469 aa, Artificial Sequence; identical to SEQ ID NO: 16738
  derived and/or modified protein sequence (wt) from neuraminidase__InfluenzaA__ADM33149

SEQ ID NO: 19636 - protein, 469 aa, Artificial Sequence; identical to SEQ ID NO: 16738
  derived and/or modified protein sequence (wt) from neuraminidase__InfluenzaA__ADM33159

SEQ ID NO: 19637 - protein, 469 aa, Artificial Sequence; identical to SEQ ID NO: 16738
  derived and/or modified protein sequence (wt) from neuraminidase__InfluenzaA__ADM33169

SEQ ID NO: 19638 - protein, 469 aa, Artificial Sequence; identical to SEQ ID NO: 16738
  derived and/or modified protein sequence (wt) from neuraminidase__InfluenzaA__ADM33179

SEQ ID NO: 19639 - protein, 469 aa, Artificial Sequence; identical to SEQ ID NO: 16738
  derived and/or modified protein sequence (wt) from neuraminidase__InfluenzaA__ADM33188

SEQ ID NO: 19640 - protein, 469 aa, Artificial Sequence; identical to SEQ ID NO: 16738
  derived and/or modified protein sequence (wt) from neuraminidase__InfluenzaA__ADM33197

SEQ ID NO: 19641 - protein, 469 aa, Artificial Sequence; identical to SEQ ID NO: 16738
  derived and/or modified protein sequence (wt) from neuraminidase__InfluenzaA__ADM33206

SEQ ID NO: 19642 - protein, 469 aa, Artificial Sequence; identical to SEQ ID NO: 16738
  derived and/or modified protein sequence (wt) from neuraminidase__InfluenzaA__ADM33215

SEQ ID NO: 19643 - protein, 469 aa, Artificial Sequence; identical to SEQ ID NO: 16738
  derived and/or modified protein sequence (wt) from neuraminidase__InfluenzaA__ADM33224

SEQ ID NO: 19644 - protein, 469 aa, Artificial Sequence; identical to SEQ ID NO: 16738
  derived and/or modified protein sequence (wt) from neuraminidase__InfluenzaA__ADM33234

SEQ ID NO: 19645 - protein, 469 aa, Artificial Sequence; identical to SEQ ID NO: 17162
  derived and/or modified protein sequence (wt) from neuraminidase__InfluenzaA__ADM33243

SEQ ID NO: 19646 - protein, 469 aa, Artificial Sequence; identical to SEQ ID NO: 16738
  derived and/or modified protein sequence (wt) from neuraminidase__InfluenzaA__ADM33253

SEQ ID NO: 19647 - protein, 469 aa, Artificial Sequence; identical to SEQ ID NO: 17162
  derived and/or modified protein sequence (wt) from neuraminidase__InfluenzaA__ADM33262

SEQ ID NO: 19648 - protein, 469 aa, Artificial Sequence; identical to SEQ ID NO: 16768
  derived and/or modified protein sequence (wt) from neuraminidase__InfluenzaA__ADM33272

SEQ ID NO: 19649 - protein, 469 aa, Artificial Sequence; identical to SEQ ID NO: 16768
  derived and/or modified protein sequence (wt) from neuraminidase__InfluenzaA__ADM33282

SEQ ID NO: 19650 - protein, 469 aa, Artificial Sequence; identical to SEQ ID NO: 16738
  derived and/or modified protein sequence (wt) from neuraminidase__InfluenzaA__ADM33292

SEQ ID NO: 19651 - protein, 469 aa, Artificial Sequence; identical to SEQ ID NO: 16738
  derived and/or modified protein sequence (wt) from neuraminidase__InfluenzaA__ADM33302

SEQ ID NO: 19652 - protein, 469 aa, Artificial Sequence; identical to SEQ ID NO: 16728
  derived and/or modified protein sequence (wt) from neuraminidase__InfluenzaA__ADM33312

SEQ ID NO: 19653 - protein, 469 aa, Artificial Sequence; identical to SEQ ID NO: 16768
  derived and/or modified protein sequence (wt) from neuraminidase__InfluenzaA__ADM33322

SEQ ID NO: 19654 - protein, 469 aa, Artificial Sequence; identical to SEQ ID NO: 16768
  derived and/or modified protein sequence (wt) from neuraminidase__InfluenzaA__ADM33332

SEQ ID NO: 19655 - protein, 469 aa, Artificial Sequence; identical to SEQ ID NO: 16768
  derived and/or modified protein sequence (wt) from neuraminidase__InfluenzaA__ADM33342

SEQ ID NO: 19656 - protein, 469 aa, Artificial Sequence
  derived and/or modified protein sequence (wt) from neuraminidase__InfluenzaA__ADM33367
MNPNQKIITIGSVCMTIGMANLILQIGNIISIWISHSIQLGNQNQIETCNQSVVTYENNTWVNQTYVNISNTNFAAGQSVVSVKLAGNSSLCPVGGWAIYSKDNSVRIGSKGDVFVIREPFISCSPLECRTFFLTQGALLNDKHSNGTIKDRSPYRTLMSCPIGEVPSPYNSRFESVAWSASACHDGINWLTIGISGPDNGAVAVLKYNGIITDTIKSWRNNILRTQESECACVNGSCFTVMTDGPSNGQASYKIFRIEKGKIVKSVEMNAPNYHYEECSCYPDSSEITCVCRDNWHGSNRPWVSFNQNLEYQIGYICSGIFGDNPRPNDKTGSCGPVSSNGANGVKGFSFKYGNGVWIGRTKSISSRNGFEMIWDPNGWTGTDNNFSIKQDIVGINEWSGYSGSFVQHPELTGLDCIRPCFWVELIRGRPKENTIWTSGSSISFCGVNSDTVGWSWPDGAELPFTIDK

SEQ ID NO: 19657 - protein, 469 aa, Artificial Sequence; identical to SEQ ID NO: 16768
  derived and/or modified protein sequence (wt) from neuraminidase__InfluenzaA__ADM33377

SEQ ID NO: 19658 - protein, 469 aa, Artificial Sequence; identical to SEQ ID NO: 16768
  derived and/or modified protein sequence (wt) from neuraminidase__InfluenzaA__ADM33387

SEQ ID NO: 19659 - protein, 469 aa, Artificial Sequence; identical to SEQ ID NO: 16738
  derived and/or modified protein sequence (wt) from neuraminidase__InfluenzaA__ADM33397

SEQ ID NO: 19660 - protein, 469 aa, Artificial Sequence; identical to SEQ ID NO: 16738
  derived and/or modified protein sequence (wt) from neuraminidase__InfluenzaA__ADM33407

SEQ ID NO: 19661 - protein, 469 aa, Artificial Sequence; identical to SEQ ID NO: 16768
  derived and/or modified protein sequence (wt) from neuraminidase__InfluenzaA__ADM33417

SEQ ID NO: 19662 - protein, 469 aa, Artificial Sequence; identical to SEQ ID NO: 16738
  derived and/or modified protein sequence (wt) from neuraminidase__InfluenzaA__ADM33427

SEQ ID NO: 19663 - protein, 469 aa, Artificial Sequence
  derived and/or modified protein sequence (wt) from neuraminidase__InfluenzaA__ADM33437
MNPNQKIITIGSVCMTIGMANLILQIGNIISIWISHSIQLGNQNQIETCNQSVITYENNTWVNQTYVNISNTNFAAGQSVVSVKLAGNSSLCPVSGWAIYSKDNSIRIGSKGDVFVIREPFISCSPLECRTFFLTQGALLNDKHSNGTIKDRSPYRTLMSCPIGEVPSAYNSRFESVAWSASACHDGINWLTIGISGPDNGAVAVLKYNGIITDTIKSWRNNILRTQESECACVNGSCFTVMTDGPSDGQASYKIFRIEKGKIVKSVEMNAPNYHYEECSCYPDSSEITCVCRDNWHGSNRPWVSFNQNLEYQIGYICSGIFGDNPRPNDKTGSCGPVSSNGANGVKGFSFKYGNGVWIGRTKSISSRNGFEMIWDPNGWTGTDNNFSIKQDIVGINEWSGYSGSFVQHPELTGLDCIRPCFWVELIRGRPKENTIWTSGSSISFCGVNSDTVGWSWPDGAELPFTIDK

SEQ ID NO: 19664 - protein, 469 aa, Artificial Sequence; identical to SEQ ID NO: 17092
  derived and/or modified protein sequence (wt) from neuraminidase__InfluenzaA__ADM33443

SEQ ID NO: 19665 - protein, 469 aa, Artificial Sequence; identical to SEQ ID NO: 16738
  derived and/or modified protein sequence (wt) from neuraminidase__InfluenzaA__ADM52446

SEQ ID NO: 19666 - protein, 469 aa, Artificial Sequence; identical to SEQ ID NO: 16738
  derived and/or modified protein sequence (wt) from neuraminidase__InfluenzaA__ADM52456

SEQ ID NO: 19667 - protein, 469 aa, Artificial Sequence; identical to SEQ ID NO: 18943
  derived and/or modified protein sequence (wt) from neuraminidase__InfluenzaA__ADM52466

SEQ ID NO: 19668 - protein, 469 aa, Artificial Sequence; identical to SEQ ID NO: 16738
  derived and/or modified protein sequence (wt) from neuraminidase__InfluenzaA__ADM52486

SEQ ID NO: 19669 - protein, 469 aa, Artificial Sequence; identical to SEQ ID NO: 16728
  derived and/or modified protein sequence (wt) from neuraminidase__InfluenzaA__ADM52496

SEQ ID NO: 19670 - protein, 469 aa, Artificial Sequence; identical to SEQ ID NO: 16738
  derived and/or modified protein sequence (wt) from neuraminidase__InfluenzaA__ADM52506

SEQ ID NO: 19671 - protein, 469 aa, Artificial Sequence; identical to SEQ ID NO: 16728
  derived and/or modified protein sequence (wt) from neuraminidase__InfluenzaA__ADM52516

SEQ ID NO: 19672 - protein, 469 aa, Artificial Sequence; identical to SEQ ID NO: 16728
  derived and/or modified protein sequence (wt) from neuraminidase__InfluenzaA__ADM52527

SEQ ID NO: 19673 - protein, 469 aa, Artificial Sequence; identical to SEQ ID NO: 17961
  derived and/or modified protein sequence (wt) from neuraminidase__InfluenzaA__ADM52537

SEQ ID NO: 19674 - protein, 469 aa, Artificial Sequence; identical to SEQ ID NO: 18462
  derived and/or modified protein sequence (wt) from neuraminidase__InfluenzaA__ADM52547

SEQ ID NO: 19675 - protein, 469 aa, Artificial Sequence; identical to SEQ ID NO: 16728
  derived and/or modified protein sequence (wt) from neuraminidase__InfluenzaA__ADM52557

SEQ ID NO: 19676 - protein, 469 aa, Artificial Sequence; identical to SEQ ID NO: 16728
  derived and/or modified protein sequence (wt) from neuraminidase__InfluenzaA__ADM52567

SEQ ID NO: 19677 - protein, 469 aa, Artificial Sequence; identical to SEQ ID NO: 16728
  derived and/or modified protein sequence (wt) from neuraminidase__InfluenzaA__ADM52577

SEQ ID NO: 19678 - protein, 469 aa, Artificial Sequence; identical to SEQ ID NO: 16738
  derived and/or modified protein sequence (wt) from neuraminidase__InfluenzaA__ADM52587

SEQ ID NO: 19679 - protein, 469 aa, Artificial Sequence; identical to SEQ ID NO: 16738
  derived and/or modified protein sequence (wt) from neuraminidase__InfluenzaA__ADM52597

SEQ ID NO: 19680 - protein, 469 aa, Artificial Sequence; identical to SEQ ID NO: 16728
  derived and/or modified protein sequence (wt) from neuraminidase__InfluenzaA__ADM52607

SEQ ID NO: 19681 - protein, 469 aa, Artificial Sequence; identical to SEQ ID NO: 16728
  derived and/or modified protein sequence (wt) from neuraminidase__InfluenzaA__ADM52617

SEQ ID NO: 19682 - protein, 469 aa, Artificial Sequence; identical to SEQ ID NO: 18419
  derived and/or modified protein sequence (wt) from neuraminidase__InfluenzaA__ADM52627

SEQ ID NO: 19683 - protein, 469 aa, Artificial Sequence; identical to SEQ ID NO: 17961
  derived and/or modified protein sequence (wt) from neuraminidase__InfluenzaA__ADM52637

SEQ ID NO: 19684 - protein, 469 aa, Artificial Sequence; identical to SEQ ID NO: 17961
  derived and/or modified protein sequence (wt) from neuraminidase__InfluenzaA__ADM52647

SEQ ID NO: 19685 - protein, 469 aa, Artificial Sequence; identical to SEQ ID NO: 16728
  derived and/or modified protein sequence (wt) from neuraminidase__InfluenzaA__ADM52657

SEQ ID NO: 19686 - protein, 469 aa, Artificial Sequence; identical to SEQ ID NO: 17961
  derived and/or modified protein sequence (wt) from neuraminidase__InfluenzaA__ADM52667

SEQ ID NO: 19687 - protein, 469 aa, Artificial Sequence; identical to SEQ ID NO: 16728
  derived and/or modified protein sequence (wt) from neuraminidase__InfluenzaA__ADM52687

SEQ ID NO: 19688 - protein, 469 aa, Artificial Sequence; identical to SEQ ID NO: 16728
  derived and/or modified protein sequence (wt) from neuraminidase__InfluenzaA__ADM52697

SEQ ID NO: 19689 - protein, 469 aa, Artificial Sequence; identical to SEQ ID NO: 18419
  derived and/or modified protein sequence (wt) from neuraminidase__InfluenzaA__ADM52707

SEQ ID NO: 19690 - protein, 469 aa, Artificial Sequence
  derived and/or modified protein sequence (wt) from neuraminidase__InfluenzaA__ADM52717
MNPNQKIITIGSVCMTIGMANLILQIGNIISIWISHSIQLGNQNQIETCNQSVITYENNTWVNQTYVNISNTNFAAGQSAVSVKLVGNSSLCPVSGWAIYSKDNSVRIGSKGDVFVIREPFISCSPLECRTFFLTQGALLNDKHSNGTIKDRSPYRTLMSCPIGEVPSPYNSRFESVAWSASACHDGINWLTIGISGPDNGAVAVLKYNGIITDTIKSWRNNILRTQESECACVNGSCFTVMTDGPSNGQASYKIFRIEKGKIVKSVEMNAPNYHYEECSCYPDSSEITCVCRDNWHGSNRPWVSFNQNLEYQIGYICSGIFGDNPRPNDKTGSCGPVSSNGANGVKGFSFKYGNGVWIGRTKSISSRNGFEMIWDPNGWTGTDNNFSIKQDIVGINEWSGYSGSFVQHPELTGLDCIRPCFWVELIRGRPKENTIWTSGSSISFCGVNSDTVGWSWPDGAELPFTIDK

SEQ ID NO: 19691 - protein, 469 aa, Artificial Sequence
  derived and/or modified protein sequence (wt) from neuraminidase__InfluenzaA__ADM86402
MNPNQKIITIGSVCMTIGMANLILQIGNIISIWISHSIQLGNQNQIETCNQSVITYENNTWVNQTYVNISNTNFAAGQSVASVKLAGNSSLCPVSGWAIYSKDNSVRIGSKGDVFVIREPFISCSPLECRTFFLTQGALLNDKHSNGTVKDRSPYRTLMSCPIGEVPSPYNSRFESVAWSASACHDGINWLTIGISGPDNGAVAVLKYNGIITDTIKSWRNNILRTQESECACVNGSCFTVMTDGPSDGQASYKIFRIEKGKIVKSVEMNAPNYHYEECSCYPDSSEITCVCRDNWHGSNRPWVSFNQNLEYQIGYICSGIFGDNPRPNDKTGSCGPVSSNGANGVKGFSFKYGNGVWIGRTKSISSRNGFEMIWDPNGWTGTDNNFSIKQDIVGINEWSGYSGSFVQHPELTGLDCIRPCFWVELIRGRPKENTIWTSGSSISFCGVNSDTVGWSWPDGAELPFTIDK

SEQ ID NO: 19692 - protein, 469 aa, Artificial Sequence; identical to SEQ ID NO: 16738
  derived and/or modified protein sequence (wt) from neuraminidase__InfluenzaA__ADM86412

SEQ ID NO: 19693 - protein, 469 aa, Artificial Sequence
  derived and/or modified protein sequence (wt) from neuraminidase__InfluenzaA__ADM86422
MNPNQKIITIGSVCMTIGMANLILQIGNIISIWISHSIQLGNQNQIETCNQSVITYENNTWVNQTYVNISNTNFVAGQSVVSVKLAGNSSLCPVSGWAIYSKDNSIRIGSKGDVFVIREPFISCSPLECRTFFLTQGALLNDKHSNGTIKDRSPYRTLMSCPIGEVPSPYNSRFESVAWSASACHDGINWLTIGISGPDNGAVAVLKYNGIITDTIKSWRNNILRTQESECACVNGSCFTVMTDGPSDGQASYKIFRIEKGKVVKSVEMNAPNYHYEECSCYPDSSEITCVCRDNWHGSNRPWVSFNQNLEYQIGYICSGIFGDNPRPNDKTGSCGPVSSNGANGVKGFSFKYGNGVWIGRTKSISSRNGFEMIWDPNGWTGTDNNFSIKQDIVGINEWSGYSGSFVQHPELTGLDCIRPCFWVELIRGRPKENTIWTSGSSISFCGVNSDTVGWSWPDGAELPFTIDK

SEQ ID NO: 19694 - protein, 469 aa, Artificial Sequence; identical to SEQ ID NO: 17592
  derived and/or modified protein sequence (wt) from neuraminidase__InfluenzaA__ADM86432

SEQ ID NO: 19695 - protein, 469 aa, Artificial Sequence
  derived and/or modified protein sequence (wt) from neuraminidase__InfluenzaA__ADM86443
MNPNQKIITIGSVCMTIGMANLILQIGNIISIWISHSIQLGNQNQIETCNQSVITYENNTWVNQTYVNISNTNFAAGQSVVSVKLAGNSSLCPVSGWAIYSKDNSIRIGSKGDVFVIREPFISCSPLECRTFFLTQGALLNDKHSNGTIKDRSPYRTLMSCPIGEVPSPYNSRFESVAWSASACHDGINWLTIGISGPDNGAVAVLKYNGIITDTIKSWRNNILRTQESECVCVNGSCFTVMTDGPSDGQASYKIFRIEKGKIVKSVEMNAPNYHYEECSCYPDSSEITCVCRDNWHGSNRPWVSFNQNLEYQIGYICSGIFGDNPRPNDKTGSCGPVSSNGANGVKGFSFKYGNGVWIGRTKSISSRNGFEMIWDPNGWTGTDNNFSIKQDIVGMNEWSGYSGSFVQHPELTGLDCIRPCFWVELIRGRPKENTIWTSGSSISFCGVNSDTVGWSWPDGAELPFTIDK

SEQ ID NO: 19696 - protein, 469 aa, Artificial Sequence; identical to SEQ ID NO: 17321
  derived and/or modified protein sequence (wt) from neuraminidase__InfluenzaA__ADM86453

SEQ ID NO: 19697 - protein, 449 aa, Artificial Sequence
  derived and/or modified protein sequence (wt) from neuraminidase__InfluenzaA__ADM95377
MNPNQKIITIGSICMVTGIVSLMLQVGSMISIWVSHSIHTGNQHQAEPISNTNFLTEKAVASVKLAGNSSLCPINGWAVYSKDNSIRIGSKGDVFVIREPFISCSHLECRTFFLTQGALLNDKHSNGTVKDRSPHRTLMSCPMGEAPSPYNSRFESVAWSASACHDGTSWLTIGISGPDNGAVAVLKYNGIITDTIKSWRNNILRTQESECACVNGSCFTVMTDGPSNGQASHKIFKMEKGKVIKSVELDAPNYHYEECSCYPDAGEITCVCRDNWHGSNRPWVSFNQNLEYQIGYICSGVFGDNPRPNDGTGSCGPVSSNGAYGVKGFSFKYGNGVWIGRTKSTNSRSGFEMIWDPNGWTETDSRFSVKQDIVAITDWSGYSGSFVQHPELTGLDCIRPCFWVELIRGRPKESTIWTSGSSISFCGVNSDTVGWSWPDGAELPFTIDK

SEQ ID NO: 19698 - protein, 469 aa, Artificial Sequence; identical to SEQ ID NO: 16738
  derived and/or modified protein sequence (wt) from neuraminidase__InfluenzaA__ADM95650

SEQ ID NO: 19699 - protein, 469 aa, Artificial Sequence; identical to SEQ ID NO: 16738
  derived and/or modified protein sequence (wt) from neuraminidase__InfluenzaA__ADM95651

SEQ ID NO: 19700 - protein, 469 aa, Artificial Sequence
  derived and/or modified protein sequence (wt) from neuraminidase__InfluenzaA__ADM95652
MNPNQKIITIGSVCMTIGMANLILQIGNIISIWISHSIQLGNQNQIETCNQSVITYENNTWVNQTYVNISNTNFAAGQSVVSVKFAGNSSLCPVSGWAIYSKDNSIRIGSKGDVFVIREPFISCSPLECRTFFLTQGALLNDKHSNGTIKDRSPYRTLMSCPIGEVPSPYNSRFESVAWSASACHDGINWLTIGISGPDNGAVAVLKYNGIITDTIKSWRNNILRTQESECACVNGSCFTVMTDGPSDGQASYKIFRIEKGKIVKSVEMNAPNYHYEECSCYPDSSEITCVCRDNWHGSNRPWVSFNQNLEYQIGYICSGIFGDNPRPNDKTGNCGPVSSNGANGVKGFSFKYGNGVWIGRTKSISSRNGFEMIWDPNGWTGTDNNFSIKQDIVGINEWSGYSGSFVQHPELTGLDCIRPCFWVELIRGRPKENTIWTSGSSISFCGVNSDTVGWSWPDGAELPFTIDK

SEQ ID NO: 19701 - protein, 469 aa, Artificial Sequence
  derived and/or modified protein sequence (wt) from neuraminidase__InfluenzaA__ADM95654
MNPNQKIITIGSVCMTIGMANLILQIGNIISIWISHSIQLGNQNQIETCNQSVITYENNTWVNQTYVNISNTNFAAGQSVVSVKLAGNSSLCPVSGWAIYSKDNSIRIGSKGDVFVIREPFISCSPLECRTFFLTQGALLNDKHSNGTIKDRSPYRTLMSCPIGEVPSPYNSRFESVAWSASACHDGINWLTIGISGPDNGAVAVLKYNGIITDTIKSWRNNILRTQESECACVNGSCFTVMTDGPSDGQASYKIFRIEKGKIVKSVEMNAPNYHYEECSCYPDSSEITCVCRDNWHGSNRPWVSFNQNLEYQIGYICSGIFGDNPRPNDKTGSCGPVSSNGANGVKGFSFKYGNGVWIGRTKSISSRHGFEMIWDPNGWTGTDNNFSIKQDIVGTNEWSGYSGSFVQHPELTGLDCIRPCFWVELIRGRPKENTIWTSGSSISFCGVNSDTVGWSWPDGAELPFTIDK

SEQ ID NO: 19702 - protein, 469 aa, Artificial Sequence
  derived and/or modified protein sequence (wt) from neuraminidase__InfluenzaA__ADM95655
MNPNQKIITIGSVCMTIGMANLILQIGNIISIWISHSIQLGNQNQIETCNQSVITYENNTWVNQTYVNISNTNFAAGQSVVSVKLAGNSSLCPVSGWAIYSKDNSIRIGSKGDVFVIREPFISCSPLECRTFFLTQGALLNDKHSNGTIKDRSPYRTLMSCPIGEVPSPYNSRFESVAWSASACHDGINWLTIGISGPDNGAVAVLKYNGIITDTIKSWRNNILRTQESECACVNGSCFTVMTDGPSDGQASYKIFRIEKGKIVKSVEMNAPNYHYEECSCYPDSSEITCVCRDNWHGSNRPWVSFNQNLEYQIGYICSGIFGDNPRPSDKTGSCGPVSSNGANGVKGFSFKYGNGVWIGRTKSISSRNGFEMIWDPNGWTGTDNDFSIKQDIVGINEWSGYSGSFVQHPELTGLDCIRPCFWVELIRGRPKENTIWTSGSSISFCGVNSDTVGWSWPDGAELPFTIDK

SEQ ID NO: 19703 - protein, 469 aa, Artificial Sequence; identical to SEQ ID NO: 18350
  derived and/or modified protein sequence (wt) from neuraminidase__InfluenzaA__ADM95656

SEQ ID NO: 19704 - protein, 469 aa, Artificial Sequence; identical to SEQ ID NO: 17915
  derived and/or modified protein sequence (wt) from neuraminidase__InfluenzaA__ADM95658

SEQ ID NO: 19705 - protein, 469 aa, Artificial Sequence
  derived and/or modified protein sequence (wt) from neuraminidase__InfluenzaA__ADM95659
MNPNQKIITIGSVCMTIGMANLILQIGNIISIWISHSIQLGNQNQIETCNQSVITYENNTWVNQTYVNISNTNFAAGQSVVSVKLAGNSSLCPVSGWAIYSKDNSIRIGSKGDVFVIREPFISCSPLECRTFFLTQGALLNDKHSNGTIKDRSPYRTLMSCPIGEVPSPYNSRFESVAWSASACHDGINWLTIGISGPDNGAVAVLKYNGIITDTIKSWRNNILRTQESECACVNGSCFTVMTDGPSDGQASYKIFRIEKGKIVKSVEMNAPNYHYEECSCYPDSSEITCVCRDNWHGSNRPWVSFNQNLEYQIGYICSGIFGDNPRPNDKTGSCGPVSSNGANGVKGFSFKYGNGVWIGRTKSISSRSGFEMIWDPNGWTGTDNNFSIKQDIIGTNEWSGYSGSFVQHPELTGLDCIRPCFWVELIRGRPKENTIWTSGSSISFCGVNSDTVGWSWPDGAELPFTIDK

SEQ ID NO: 19706 - protein, 469 aa, Artificial Sequence; identical to SEQ ID NO: 16738
  derived and/or modified protein sequence (wt) from neuraminidase__InfluenzaA__ADM95660

SEQ ID NO: 19707 - protein, 469 aa, Artificial Sequence
  derived and/or modified protein sequence (wt) from neuraminidase__InfluenzaA__ADM95661
MNPNQKIITIGSVCMTIGMANLILQIGNIISIWISHSIQLGNQNQIETCNQSVITYENNTWVNQTYVNISNTNFAAGQSVVSVKLAGNSSLCPVSGWAIYSKDNSIRIGSKGDVFVIREPFISCSPLECRTFFLTQGALLNDKHSNGTIKDRSPYRTLMSCPIGEVPSPYNSRFESVAWSASACHDGINWLTIGISGPDNGAVAVLKYNGIITDTIKSWRNNILRTQESECACVNGSCFTVMTDGPSDGQASYKIFRIEKGKIVKSVEMNAPNYHYEECSCYPDSSEITCVCRDNWHGSNRPWVSFNQNLEYQIGYICSGIFGDNPRPNDKTGSCGPVSSNGANGVKGFSFKYGNGVWIGRTKSISSRNGFEMIWDPNGWTGTDNNFSIKQDIVGTNEWSGYSGSFVQHPELTGLDCIRPCFWVELIRGRPKENTIWTSGSIISFCGVNSDTVGWSWPDGAELPFTIDK

SEQ ID NO: 19708 - protein, 469 aa, Artificial Sequence; identical to SEQ ID NO: 18350
  derived and/or modified protein sequence (wt) from neuraminidase__InfluenzaA__ADM95662

SEQ ID NO: 19709 - protein, 469 aa, Artificial Sequence
  derived and/or modified protein sequence (wt) from neuraminidase__InfluenzaA__ADM95663
MNPNQKIITIGSVCMTIGMANLILQIGNIISIWISHSIQLGNQNQIETCNQSVITYENNTWVNQTYVNISNTNFAAGQSVVSVKLAGNSSLCPVNGWAIYSKDNSIRIGSKGDVFVIREPFISCSPLECRTFFLTQGALLNDKHSNGTIKDRSPYRTLMSCPIGEVPSPYNSRFESVAWSASACHDGINWLTIGISGPDNGAVAVLKYNGIITDTIKSWRNNILRTQESECACVNGSCFTVMTDGPSDGQASYKIFRIEKGKIVKSIEMNAPNYHYEECSCYPDSSEITCVCRDNWHGSNRPWVSFNQNLEYQIGYICSGIFGDNPRPNDKTGSCGPVSSNGANGVKGFSFKYGNGVWIGRTKSISSRNGFEMIWDPNGWTGTDNNFSIKQDIVGTNEWSGYSGSFVQHPELTGLDCIRPCFWVELIRGRPKENTIWTSGSIISFCGVNSDTVGWSWPDGAELPFTIDK

SEQ ID NO: 19710 - protein, 469 aa, Artificial Sequence; identical to SEQ ID NO: 18350
  derived and/or modified protein sequence (wt) from neuraminidase__InfluenzaA__ADM95664

SEQ ID NO: 19711 - protein, 469 aa, Artificial Sequence; identical to SEQ ID NO: 18350
  derived and/or modified protein sequence (wt) from neuraminidase__InfluenzaA__ADM95665

SEQ ID NO: 19712 - protein, 469 aa, Artificial Sequence
  derived and/or modified protein sequence (wt) from neuraminidase__InfluenzaA__ADM95666
MNPNQKIITIGSVCMTIGMANLILQIGNIISIWISHSIQLGNQNQIETCNQSVITYENNTWVNQTYVNISNTNFAAGQSVVSVKLAGNSSLCPVNGWAIYSKDNSIRIGSKGDVFVIREPFISCSPLECRTFFLTQGALLNDKHSNGTIKDRSPYRTLMSCPIGEVPSPYNSRFESVAWSASACHDGINWLTIGISGPDNGAVAVLKYNGIITDTIKSWRNNILRTQESECACVNGSCFTVMTDGPSDGQASYKIFKIEKGKIVKSVEMNAPNYHYEECSCYPDSSEITCVCRDNWHGSNRPWVSFNQNLEYQIGYICSGIFGDNPRPNDKTGSCGPVSFNGANGVKGFSFKYGNGVWIGRTKSISSRNGFEMIWDPNGWTGTDNNFSIKQDIVGTNEWSGYSGSFVQHPELTGLDCIRPCFWVELIRGRPKENTIWTSGSIISFCGVNSDTVGWSWPDGAELPFTIDK

SEQ ID NO: 19713 - protein, 469 aa, Artificial Sequence; identical to SEQ ID NO: 18350
  derived and/or modified protein sequence (wt) from neuraminidase__InfluenzaA__ADM95667

SEQ ID NO: 19714 - protein, 469 aa, Artificial Sequence; identical to SEQ ID NO: 18350
  derived and/or modified protein sequence (wt) from neuraminidase__InfluenzaA__ADM95668

SEQ ID NO: 19715 - protein, 469 aa, Artificial Sequence; identical to SEQ ID NO: 16738
  derived and/or modified protein sequence (wt) from neuraminidase__InfluenzaA__ADM95669

SEQ ID NO: 19716 - protein, 469 aa, Artificial Sequence; identical to SEQ ID NO: 16738
  derived and/or modified protein sequence (wt) from neuraminidase__InfluenzaA__ADM95670

SEQ ID NO: 19717 - protein, 469 aa, Artificial Sequence
  derived and/or modified protein sequence (wt) from neuraminidase__InfluenzaA__ADM95672
MNPNQKIITIGSVCMTIGMANLILQIGNIISIWISHTIQLGNQNQIETCNQSVITYENNTWVNQTYVNISNTNFAAGQSVVSVKLAGNSSLCPVSGWAIYSKDNSIRIGSKGDVFVIREPFISCSPLECRTFFLTQGALLNDKHSNGTIKDRSPYRTLMSCPIGEVPSPYNSRFESVAWSASACHDGINWLTIGISGPDNGAVAVLKYNGIITDTIKSWRNNILRTQESECACVNGSCFTVMTDGPSDGQASYKIFRIEKGKIVKSVEMNAPNYHYEECSCYPDSSEITCVCRDNWHGSNRPWVSFNQNLEYQIGYICSGIFGDNPRPNDKTGSCGPVSSNGANGVKGFSFKYGNGVWIGRTKSISSRNGFEMIWDPNGWTGTDNNFSIKQDIVGTNEWSGYSGSFVQHPELTGLDCIRPCFWVELIRGRPKENTIWTSGSSISFCGVNSDTVGWSWPDGAELPFTIDK

SEQ ID NO: 19718 - protein, 469 aa, Artificial Sequence; identical to SEQ ID NO: 16738
  derived and/or modified protein sequence (wt) from neuraminidase__InfluenzaA__ADM95673

SEQ ID NO: 19719 - protein, 469 aa, Artificial Sequence; identical to SEQ ID NO: 18350
  derived and/or modified protein sequence (wt) from neuraminidase__InfluenzaA__ADM95674

SEQ ID NO: 19720 - protein, 469 aa, Artificial Sequence; identical to SEQ ID NO: 16738
  derived and/or modified protein sequence (wt) from neuraminidase__InfluenzaA__ADM95675

SEQ ID NO: 19721 - protein, 469 aa, Artificial Sequence
  derived and/or modified protein sequence (wt) from neuraminidase__InfluenzaA__ADM95677
MNPNQKIITIGSVCMTIGMANLILQIGNIISIWISHSIQLGNQNQIETCNQSVITYENNTWVNQTYVNISNTNFAAGQSVVSVKLAGNSSLCPVNGWAIYSKDNSIRIGSKGDVFVIREPFISCSPLECRTFFLTQGALLNDKHSNGTIKDRSPYRTLMSCPIGEVPSPYNSRFESVAWSASACHDGINWLTIGISGPDNGAVAVLKYNGIITDTIKSWRNNILRTQESECACVNGSCFTVMTDGPSDGQASYKIFRIEKGKIVKSVEMNAPNYHYEECSCYPDSSEITCVCRDNWHGSNRPWVSFNQNLEYQIGYICSGIFGDNPRPNDKTGSCGPVSSNGANGVKGFSFKYGNGVWIGRTKSISSRNGFEMIWDPNGWTGTDNNFSIKQDIVGTNEWSGYSGSFVQHPELTGLDCIRPCFWVELIRGRPKENTIWTSGSIISFCGVNSDTVGWSWPDGAELPFTIDK

SEQ ID NO: 19722 - protein, 469 aa, Artificial Sequence
  derived and/or modified protein sequence (wt) from neuraminidase__InfluenzaA__ADM95678
MNPNQKIITIGSVCMTIGMANLILQIGNIISIWISHSIQLGNQNQIETCNQSVITYENNTWVNQTYVNISNTNFAAGQSVVSVKFAGNSSLCPVSGWAIYSKDNSIRIGSKGDVFVIREPFISCSPLECRTFFLTQGALLNDKHSNGTIKDRSPYRTLMSCPIGEVPSPYNSRFESVAWSASACHDGINWLTIGISGPDNGAVAVLKYNGIITDTIKSWRNNILRTQESECACVNGSCFTVMTDGPSDGQASYKIFRIEKGKIVKSVEMNAPNYHYEECSCYPDSSEITCVCRDNWHGSNRPWVSFNQNLEYQIGYICSGIFGDNPRPNDKTGSCGPVSSNGANGVKGFSFKYGNGVWIGRTKSISSRNGFEMIWDPNGWTGTDNNFSIKQDIVGINEWSGYSGSFVQHPELTGLDCIRPCFWVELIRGRPKENTIWTSGSSISFCGVNSDTVGWSWPDGAELPFTIDK

SEQ ID NO: 19723 - protein, 469 aa, Artificial Sequence; identical to SEQ ID NO: 19721
  derived and/or modified protein sequence (wt) from neuraminidase__InfluenzaA__ADM95679

SEQ ID NO: 19724 - protein, 469 aa, Artificial Sequence; identical to SEQ ID NO: 19721
  derived and/or modified protein sequence (wt) from neuraminidase__InfluenzaA__ADM95680

SEQ ID NO: 19725 - protein, 469 aa, Artificial Sequence; identical to SEQ ID NO: 16738
  derived and/or modified protein sequence (wt) from neuraminidase__InfluenzaA__ADM95681

SEQ ID NO: 19726 - protein, 469 aa, Artificial Sequence
  derived and/or modified protein sequence (wt) from neuraminidase__InfluenzaA__ADM95682
MNPNQKIITIGSVCMTIGMANLILQIGNIISIWISHSIQLGNQNQIEICNQSVITYENNTWVNQTYVNISNTNFAAGQSVVSVKLAGNSSLCPVSGWAIYSKDNSIRIGSKGDVFVIREPFISCSPLECRTFFLTQGALLNDKHSNGTIKDRSPYRTLMSCPIGEVPSPYNSRFESVAWSASACHDGINWLTIGISGPDNGAVAVLKYNGIITDTIKSWRNNILRTQESECACVNGSCFTVMTDGPSDGQASYKIFRIEKGKIVKSVEMNAPNYHYEECSCYPDSSEITCVCRDNWHGSNRPWVSFNQNLEYQIGYICSGIFGDNPRPNDKTGSCGPVSSNGANGVKGFSFKYGNGVWIGRTKSISSRNGFEMIWDPNGWTGTDNNFSIKQDIVGTNEWSGYSGSFVQHPELTGLDCIRPCFWVELIRGRPKENTIWTSGSSISFCGVNSDTVGWSWPDGAELPFTIDK

SEQ ID NO: 19727 - protein, 469 aa, Artificial Sequence
  derived and/or modified protein sequence (wt) from neuraminidase__InfluenzaA__ADM95683
MNPNQKIITIGSVCMTIGMANLILQIGNIISIWISHSIQLGNQNQIETCNQSVITYENNTWVNQTYVNISNTNFAAGQSVVSVKLAGNSSLCPVSGWAIYSKDNSIRIGSKGDVFVIREPFISCSPLECRTFFLTQGALLNDKHSNGTIKDRSPYRTLMSCPIGEVPSPYNSRFESVAWSASACHDGINWLTIGISGPDNGAVAVLKYNGIITDTIKSWRNNILRTQESECACVNGSCFTVMTDGPSDGQASYKIFRIEKGKIVKSVEMNAPNYHYEECSCYPDSSEITCVCRDNWHGSNRPWVSFNQNLEYQIGYICSGIFGDNPRPNDKTGSCGPVSSNGANGVKGFSFKYGNGVWIGRTKSISSRNGFEMIWDPNGWTGTDNNFSIKQDIVGINEWSGYSGSFVQHPELTGLDCIRPCFWVELIRGRPKENTIWTSGSSMSFCGVNSDTVGWSWPDGAELPFTIDK

SEQ ID NO: 19728 - protein, 469 aa, Artificial Sequence; identical to SEQ ID NO: 16738
  derived and/or modified protein sequence (wt) from neuraminidase__InfluenzaA__ADM95684

SEQ ID NO: 19729 - protein, 469 aa, Artificial Sequence
  derived and/or modified protein sequence (wt) from neuraminidase__InfluenzaA__ADM95685
MNPNQKIITIGSVCMTIGMANLILQIGNIISIWISHSIQLGNQNQIETCNQSVITYENNTWVNQTYVNISNTNFAAGQSVVSVKLAGNSSLCPVSGWAIYSKDNSIRIGSKGDVFVIREPFISCSPLECRTFFLTQGALLNDKHSNGTIKDRSPYRTLMSCPIGEVPSPYNSRFESVAWSASACHDGINWLTIGISGPDNGAVAVLKYNGIITDTIKSWRNNILRTQESECACVNGSCFTVMTDGPSDGQASYKIFRIEKGKIVKSVEMNAPNYHYEECSCYPDSSEITCVCRDNWHGSNRPWVSFNQNLEYQIGYICSGIFGDNPRPNDKTGSCGPVSSNGANGVKGFSFKYGNGVWIGRTKSISSRHGFEMIWDPNGWTGTDNNFSIKQDIVGTNEWSGYSGSFVQHPELTGLDCIRPCFWVELIRGRPKENTVWTSGSSISFCGVNSDTVGWSWPDGAELPFTIDK

SEQ ID NO: 19730 - protein, 469 aa, Artificial Sequence
  derived and/or modified protein sequence (wt) from neuraminidase__InfluenzaA__ADM95686
MNPNQKIITIGSVCMTIGMANLILQIGNIISIWISHSIQLGNQNQIETCNQSVITYENNTWVNQTYVNISNTNFAAGQSVVSVKLAGNSSLCPVSGWAIYSKDNSIRIGSKGDVFVIREPFISCSPLECRTFFLTQGALLNDKHSNGTIKDRSPYRTLMSCPIGEVPSPYNSRFESVAWSASACHDGINWLTIGISGPDNGAVAVLKYNGIITDTIKSWRNNILRTQESECACVNGSCFTVMTDGPSDGQASYKIFRIEKGKIVKSVEMNAPNYHYEECSCYPDSSEITCVCRDNWHGSNRPWVSFNQNLEYQIGYICSGIFGDNPRPNDKTGSCGPVSSNGANGVKGFSFKYGNGVWIGRTKSISSRNGFEMIWDPNGWTGTDNDFSIKQDIVGINEWSGYSGSFVQHPELTGLDCIRPCFWVELIRGRPKENTIWTSGSSISFCGVNSDTVGWSWPDGAELPFTIDK

SEQ ID NO: 19731 - protein, 469 aa, Artificial Sequence; identical to SEQ ID NO: 16738
  derived and/or modified protein sequence (wt) from neuraminidase__InfluenzaA__ADM95687

SEQ ID NO: 19732 - protein, 469 aa, Artificial Sequence
  derived and/or modified protein sequence (wt) from neuraminidase__InfluenzaA__ADM95688
MNPNQKIITIGSVCMTIGMANLILQIGNIISIWISHSIQLGNQNQIETCNQSVITYENNTWVNQTYVNISNTNFAAGQSVVSVKLAGNSSLCPVSGWAIYSKDNSIRIGSKGDVFVIREPFISCSPLECRTFFLTQGALLNDKHSNGTIKDRSPYRTLMSCPIGEVPSPYNSRFESVAWSASACHDGINWLTIGISGPDNGAVAVLKYNGIITDTIKSWRNNILRTQESECACVNGSCFTVMTDGPSDGQASYKIFRIEKGKIVKSVEMNAPNYHYEECSCYPDSSEITCVCRDNWHGSNRPWVSFNQNLEYQIGYICSGIFGDNPRPNDKTGSCGPVSSNGANGVKGFSFKYGNGVWIGRTKSISSRNGFEMIWDPNGWTGTDNNFSIKQDIVGTNEWSGYSGSFVQHPELTRLDCIRPCFWVELIRGRPKENTIWTSGSIISFCGVNSDTVGWSWPDGAELPFTIDK

SEQ ID NO: 19733 - protein, 469 aa, Artificial Sequence; identical to SEQ ID NO: 19730
  derived and/or modified protein sequence (wt) from neuraminidase__InfluenzaA__ADM95689

SEQ ID NO: 19734 - protein, 469 aa, Artificial Sequence
  derived and/or modified protein sequence (wt) from neuraminidase__InfluenzaA__ADM95690
MNPNQKIITIGSVCMTIGMANLILQIGNIISIWISHSIQLGNQNQIETCNQSVITYENNTWVNQTYVNISNTNFAAGQSVVSVKLAGNSSLCPVSGWAIYSKDNSIRIGSKGDVFVIREPFISCSPLECRTFFLTQGALLNDKHSNGTIKDRSPYRTLMSCPIGEVPSPYNSRFESVAWSASACHDGINWLTIGISGPDNGAVAVLKYNGIITDTIKSWRNNILRTQESECACVNGSCFTVMTDGPSDGQASYKIFRIEKGKIVKSVEMNAPNYHYEECSCYPDSSEITCVCRDNWHGSNRPWVSFNQNLEYQIGYICSGIFGDNPRPNDKTGSCGPVSSNGANGVKGFSFKYGNGVWIGRTKSISSRNGFEMIWDPNGWTGTDNNFSIKQDIIGTNEWSGYSGSFVQHPELTGLDCIRPCFWVELIRGRPKENTIWTSGSSISFCGVNSDTVGWSWPDGAELPFTIDK

SEQ ID NO: 19735 - protein, 469 aa, Artificial Sequence; identical to SEQ ID NO: 16738
  derived and/or modified protein sequence (wt) from neuraminidase__InfluenzaA__ADM95691

SEQ ID NO: 19736 - protein, 469 aa, Artificial Sequence
  derived and/or modified protein sequence (wt) from neuraminidase__InfluenzaA__ADM95692
MNPNQKIITIGSVCMTIGMANLILQIGNIISIWISHSIQLGNQNQIETCNQSVITYENNTWVNQTYVNIINTNFAAGQSVVSVKLAGNSSLCPVSGWAIYSKDNSIRIGSKGDVFVIREPFISCSPLECRTFFLTQGALLNDKHSNGTIKDRSPYRTLMSCPIGEVPSPYNSRFESVAWSASACHDGINWLTIGISGPDNGAVAVLKYNGIITDTIKSWRNNILRTQESECACVNGSCFTVMTDGPSDGQASYKIFRIEKGKIVKSVEMNAPNYHYEECSCYPDSSEITCVCRDNWHGSNRPWVSFNQNLEYQIGYICSGIFGDNPRPNDKTGSCGPVSSNGANGVKGFSFKYGNGVWIGRTKSISSRNGFEMIWDPNGWTGTDNNFSIKQDIVGINEWSGYSGSFVQHPELTGLDCIRPCFWVELIRGRPKENTIWTSGSSISFCGVNSDTVGWSWPDGAELPFTIDK

SEQ ID NO: 19737 - protein, 469 aa, Artificial Sequence; identical to SEQ ID NO: 16738
  derived and/or modified protein sequence (wt) from neuraminidase__InfluenzaA__ADM95693

SEQ ID NO: 19738 - protein, 469 aa, Artificial Sequence; identical to SEQ ID NO: 16738
  derived and/or modified protein sequence (wt) from neuraminidase__InfluenzaA__ADM95694

SEQ ID NO: 19739 - protein, 469 aa, Artificial Sequence; identical to SEQ ID NO: 16738
  derived and/or modified protein sequence (wt) from neuraminidase__InfluenzaA__ADM95695

SEQ ID NO: 19740 - protein, 469 aa, Artificial Sequence; identical to SEQ ID NO: 19730
  derived and/or modified protein sequence (wt) from neuraminidase__InfluenzaA__ADM95696

SEQ ID NO: 19741 - protein, 469 aa, Artificial Sequence; identical to SEQ ID NO: 18350
  derived and/or modified protein sequence (wt) from neuraminidase__InfluenzaA__ADM95697

SEQ ID NO: 19742 - protein, 470 aa, Artificial Sequence
  derived and/or modified protein sequence (wt) from neuraminidase__InfluenzaA__ADM95698
MNPNQKIITIGSISIAIGIISLMLQIGNIISIWASHSIQTGSQNNTGICNQRIITYENNTWVNHTYVNINNTNVVAEEDKTSVTLAGNSSLCSISGWAIYTKDNSIRIGSKGDVFVIREPFISCSHLECRTFFLTQGALLNDKHSNGTVKDRSPYRALMSCPLGEAPSPYNSKFESVAWSASACHDGMGWLTIGISGPDNGAVAVLKYNGIITGTIKSWKKQILRTQESECVCMNGSCFTIMTDGPSNKAASYKIFKIEKGKVTKSIELNAPNFHYEECSCYPDTGIVMCVCRDNWHGSNRPWVSFNQNLDYQIGYICSGVFGDNPRPEDGEGSCNPVTVDGANGVKGFSYKYDNGVWIGRTKSNRLRKGFEMIWDPNGWTNTDSDFSVKQDVVAITDWSGYSGSFVQHPELTGLDCIRPCFWVELVRGQPRENTTIWTSGSSISFCGVNSDTANWSWPDGAELPFTIDK

SEQ ID NO: 19743 - protein, 470 aa, Artificial Sequence
  derived and/or modified protein sequence (wt) from neuraminidase__InfluenzaA__ADM95699
MNPNQKIITIGSISIAIGIISLMLQIGNIISIWASHSIQTGSQNNTGICNQRIITYENNTWVNHTYVNINNTNVVAEEDKTSVTLAGNSSLCSISGWAIYTKDNSIRIGSKGDVFVIREPFISCSHLECRTFFLTQGALLNDKHSNGTVKDRSPYRALMSCPLGEAPSPYNSKFESVAWSASACHDGMGWLTIGISGPDNGAVAVLKYNGIITGTIKSWKKQILRTQESECVCMNGSCFTIMTDGPSNKAASYKIFKIEKGKVTKSIELNAPNFYYEECSCYPDTGIVMCVCRDNWHGSNRPWVSFNQNLDYQIGYICSGVFGDNPRPEDGEGSCNPVTVDGANGVKGFSYKYDNGVWIGRTKSNRLRKGFEMIWDPNGWTNTDSDFSVKQDVVAITDWSGYSGSFVQHPELTGLDCIRPCFWVELVRGLPRENTTIWTSGSSISFCGVNSDTANWSWPDGAELPFTIDK

SEQ ID NO: 19744 - protein, 470 aa, Artificial Sequence
  derived and/or modified protein sequence (wt) from neuraminidase__InfluenzaA__ADM95701
MNPNQKIITIGSISIAIGIISLMLQIGNIISIWASHSIQTGSQNNTGICNQRIITYENNTWVNHTYVNINNTNVVAEEDKTSVTLAGNSSLCSISGWAIYTKDNSIRIGSKGDVFVIREPFISCSHLECRTFFLTQGALLNDKHSNGTVKDRSPYRALMSCPLGEAPSPYNSKFESVAWSASACHDGMGWLTIGISGPDNGAVAVLKYNGIITGTIKSWKKQILRTQESECVCMNGSCFTIMTDGPSNKAASYKIFKIEKGKVTKSIELNAPNFHYEECSCYPDTGIVMCVCRDNWHGSNRPWVSFNQNLDYQIGYICSGVFGDNPRPEDGEGSCNPVTVDGANGVKGFSYKYDNGVWIGRTKSNRLRKGFEMIWDPNGWTNTDSDFSVKQDVVAITDWSGYSGSFVQHPELTGLDCIRPCFWVELVRGLPRENTTIWTSGSSISFCGVNSDTANWSWPDGAELPFTIDK

SEQ ID NO: 19745 - protein, 470 aa, Artificial Sequence
  derived and/or modified protein sequence (wt) from neuraminidase__InfluenzaA__ADM95702
MNPNQKIITIGSISIAIGIISLMLQIGNIISIWASHSIQTGRQNNTGICNQRIITYENSTWVNHTYVNINNTKVVAGEDKTSVTLAGNSSLCSISGWAIYTKDNSIRIGSKGDVFVIREPFISCSHLECRTFFLTQGALLNDKHSNGTVKDRSPYRALMSCPLGEAPSPYNSKFESVAWSASACHDGMGWLTIGISGPDNGAVAVLKYNGIITGTIKSWKKQILRTQESECVCMNGSCFTIMTDGPSNKAASYKIFKIEKGKVTKSIELNAPNFYYEECSCYPDTGIVMCVCRDNWHGSNRPWVSFNQNLDYQIGYICSGVFGDNPRPEDGEGSCNPVTVDGANGVKGFSYKYGNGVWIGRTKSNRLRKGFEVIWDPNGWTNTDSDFSVKQDVVAITDWSGYSGSFVQHPELTGLDCIRPCFWVELVRGLPRENTTIWTSGSSISFCGVNSDTANWSWPDGAELPFTIDK

SEQ ID NO: 19746 - protein, 470 aa, Artificial Sequence
  derived and/or modified protein sequence (wt) from neuraminidase__InfluenzaA__ADM95704
MNPNQKIITIGSISIAIGIISLMLQIGNIVSIWASHSIQTGSQNNTGICNQRIITYENNTWVNHTYVNINNTNVVAEEDKTSVTLAGNSSLCSISGWAIYTKDNSIRIGSKGDVFVIREPFISCSHLECRTFFLTQGALLNDKHSNGTVKDRSPYRALMSCPLGEAPSPYNSKFESVAWSASACHDGMGWLTIGISGPDNGAVAVLKYNGIITGTIKSWKKQILRTQESECVCMNGSCFTIMTDGPSNRAASYKIFKIEKGKVTKSIELNAPNFHYEECSCYPDTGIVMCVCRDNWHGSNRPWVSFNQNLDYQIGYICSGVFGDNPRPEDGEGSCNPVTVDGANGVKGFSYKYDNGVWIGRTKSNRLRKGFEMIWDPNGWTNTDSDFSVKQDVVAITDWSGYSGSFVQHPELTGLDCIRPCFWVELVRGLPRENTTIWTSGSSISFCGVNSDTANWSWPDGAELPFTIDK

SEQ ID NO: 19747 - protein, 470 aa, Artificial Sequence
  derived and/or modified protein sequence (wt) from neuraminidase__InfluenzaA__ADM95705
MNPNQKIITIGSISIAIGIISLMLQIGNIISIWASHSIQTGRQNNTGICNQRIITYENSTWVNHTYVNINNTKVVAGEDKTSVTLAGNSSLCSISGWAIYTKDNSIRIGSKGDVFVIREPFISCSHLECRTFFLTQGALLNDKHSNGTVKDRSPYRALMSCPLGEAPSPYNSKFESVAWSASACHDGMGWLTIGISGPDNGAVAVLKYNGIITGTIKSWKKQILRTQESECVCMNGSCFTIMTDGPSNKAASYKIFKIEKGKVTKSIELNAPNFYYEECSCYPDTGIVMCVCRDNWHGSNRPWVSFNQNLDYQIGYICSGVFGDNPRPEDGEGSCNPVTVDGANGVKGFSYKYGNGVWIGRTKSNRLRKGFEMIWDPNGWTNTDSDFSVKQDVVAITDWSGYSGSFVQHPELTGLDCIRPCFWVELVRGLPRENTTIWTSGSSISFCGVNSDTANWSWPDGAELPFTIDK

SEQ ID NO: 19748 - protein, 470 aa, Artificial Sequence; identical to SEQ ID NO: 19747
  derived and/or modified protein sequence (wt) from neuraminidase__InfluenzaA__ADM95706

SEQ ID NO: 19749 - protein, 470 aa, Artificial Sequence; identical to SEQ ID NO: 19747
  derived and/or modified protein sequence (wt) from neuraminidase__InfluenzaA__ADM95707

SEQ ID NO: 19750 - protein, 470 aa, Artificial Sequence; identical to SEQ ID NO: 17461
  derived and/or modified protein sequence (wt) from neuraminidase__InfluenzaA__ADM95708

SEQ ID NO: 19751 - protein, 469 aa, Artificial Sequence
  derived and/or modified protein sequence (wt) from neuraminidase__InfluenzaA__ADM95710
MNPNQKIITIGSVSLTISTICFFMQIAILITTVTLHFKQYEFNSPPNNQVMLCEPTIIERNITEIVYLTNTTIEKEICPKLAEYRNWSKPQCDITGFAPFSKDNSIRLSAGGDIWVTREPYVSCDPDKCYQFALGQGTTLNNVHSNNTVRDRTPYRTLLMNELGVPFHLGTKQVCIAWSSSSCHDGKAWLHVCITGDDKNATASFIYNGRLVDSVVSWSKEILRTQESECVCINGTCTVVMTDGSASGKADTKILFIEEGKIVHTSTLSGSAQHVEECSCYPRYPGVRCVCRDNWKGSNRPIVDINIKDHNIVSSYVCSGLVGDTPRKNDSSSSSHCLDPNNEEGGHGVKGWAFDDGNDVWMGRTISEKSRLGYETFKVIEGWSNPKSKLQINRQVIVDRGNRSGYSGIFSVEGKSCINRCFYVELIRGRKEETDVLWTSNSIVVFCGTSGTYGTGSWPDGADINLMPI

SEQ ID NO: 19752 - protein, 469 aa, Artificial Sequence; identical to SEQ ID NO: 16599
  derived and/or modified protein sequence (wt) from neuraminidase__InfluenzaA__ADM95711

SEQ ID NO: 19753 - protein, 469 aa, Artificial Sequence; identical to SEQ ID NO: 16599
  derived and/or modified protein sequence (wt) from neuraminidase__InfluenzaA__ADM95712

SEQ ID NO: 19754 - protein, 469 aa, Artificial Sequence; identical to SEQ ID NO: 16599
  derived and/or modified protein sequence (wt) from neuraminidase__InfluenzaA__ADM95713

SEQ ID NO: 19755 - protein, 469 aa, Artificial Sequence
  derived and/or modified protein sequence (wt) from neuraminidase__InfluenzaA__ADM95714
MNPNQKIITIGSVSLTISTICFFMQIAILITTVTLHFKQYEFNSPPNNQVMLCEPTIIERNITEIVYLTNTTIEKEICPKLAEYRNWSKPQCDITGFAPFSKDNSIRLSAGGDIWVTREPYVSCDPDKCYQFALGQGTTLNNVHSNNTVRDRTPYRTLLMNELGVPFHLGTKQVCIAWSSSSCHDGKAWLHVCITGDDKNATASFIYNGRLVDSVVSWSKEILRTQESECVCINGTCTVVMTDGSASGKADTKILFIEEGKIVHTSTLSGSAQHVEECSCYPRYPGVRCVCRDNWKGSNRPIVDINIKDHSIVSSYVCSGLVGDTPRKNDSSSSSHCLDPNNEEGGHGVKGWAFDDGNDVWMGRTISEKSRLGYETFKVIEGWSNPKSKLQINRQVIVDRGNRSGYSGIFSVEGKSCINRCFYVELIRGRKEETDVLWTSNSIVVFCGTSGTYGTGSWPDGADINLMPI

SEQ ID NO: 19756 - protein, 469 aa, Artificial Sequence; identical to SEQ ID NO: 16599
  derived and/or modified protein sequence (wt) from neuraminidase__InfluenzaA__ADM95715

SEQ ID NO: 19757 - protein, 469 aa, Artificial Sequence; identical to SEQ ID NO: 19755
  derived and/or modified protein sequence (wt) from neuraminidase__InfluenzaA__ADM95716

SEQ ID NO: 19758 - protein, 469 aa, Artificial Sequence; identical to SEQ ID NO: 19755
  derived and/or modified protein sequence (wt) from neuraminidase__InfluenzaA__ADM95717

SEQ ID NO: 19759 - protein, 469 aa, Artificial Sequence; identical to SEQ ID NO: 16599
  derived and/or modified protein sequence (wt) from neuraminidase__InfluenzaA__ADM95718

SEQ ID NO: 19760 - protein, 469 aa, Artificial Sequence
  derived and/or modified protein sequence (wt) from neuraminidase__InfluenzaA__ADM95719
MNPNQKIITIGSVSLTISTICFFMQIAILITTVTLHFKQYEFNSPPNNQVMLCEPTIIERNITEIVYLTNTTIEKEICPKLAEYRNWSKPQCDITGFAPFSKDNSIRLSAGGDIWVTREPYVSCDPDKCYQFALGQGTTLNNVHSNNTVRDRTPYRTLLMNELGVPFHLGTKQVCIAWSSSSCHDGKAWLHVCITGDDKNATASFIYNGRLVDSVVSWSKEILRTQESECVCINGTCTVVMTDGSASGKADTKILFIEEGKIVHTSTLSGSAQHVEECSCYPRYPGVRCVCRDNWKGSNRPIVDINIKDHSIVSSYVCSGLVGDTPRKNDSSSSSHCLDPNNEEGGHGVKGWAFDDGNDVWMGRTISEKSRSGYETFKVIEGWSNPKSKLQINRQVIVDRGNRSGYSGIFSVEGKSCINRCFYVELIRGRKEETEVLWTSNSIVVFCGTSGTYGTGSWPDGADINLMPI

SEQ ID NO: 19761 - protein, 469 aa, Artificial Sequence; identical to SEQ ID NO: 16599
  derived and/or modified protein sequence (wt) from neuraminidase__InfluenzaA__ADM95720

SEQ ID NO: 19762 - protein, 469 aa, Artificial Sequence; identical to SEQ ID NO: 16599
  derived and/or modified protein sequence (wt) from neuraminidase__InfluenzaA__ADM95721

SEQ ID NO: 19763 - protein, 469 aa, Artificial Sequence; identical to SEQ ID NO: 16599
  derived and/or modified protein sequence (wt) from neuraminidase__InfluenzaA__ADM95723

SEQ ID NO: 19764 - protein, 469 aa, Artificial Sequence
  derived and/or modified protein sequence (wt) from neuraminidase__InfluenzaA__ADM95724
MNPNQKIITIGSVSLTISTICFFMQIAILITTVTLHFKQYEFNSPPNNQVMLCEPTIIERNITEIVYLTNTTIEKEICPKLAEYRNWSKPQCDITGFAPFSKDNSIRLSAGGDIWVTREPYVSCDPDKCYQFALGQGTTLNNVHSNNTVRDRTPYRTLLMNELGVPFHLGTKQVCIAWSSSSCHDGKAWLHVCITGDDKNATASFIYNGRLVDSVVSWSKEILRTQESECVCINGTCTVVMTDGSASGKADTKILFIEEGKIVHTSTLSGSAQHVEECSCYPRYPGVRCVCRDNWKGSNRPIVDINIKDHSIVSSYVCSGLVGDTPRKNDSSSSSHCLDPNNEEGGHGVKGWAFDDGNDVWMGRTISEKSRLGYETFKVIEGWSNPNSKLQINRQVIVDRGNRSGYSGIFSVEGKSCINRCFYVELIRGRKEETEVLWTSNSIVVFCGTSGTYGTGSWPDGADINLMPI

SEQ ID NO: 19765 - protein, 469 aa, Artificial Sequence
  derived and/or modified protein sequence (wt) from neuraminidase__InfluenzaA__ADM95725
MNPNQKIITIGSVSLTISTICFFMQIAILITTVTLHFKQYEFNPPPNNQVMLCEPTIIERNITEIVYLTNTTIEKEVCPKLAEYRNWSKPQCDITGFAPFSKDNSIRLSAGGDIWVTREPYVSCDPDKCYQFALGQGTTLNNVHSNNTVRDRTPYRTLLMNELGVPFHLGTKQVCIAWSSSSCHDGKAWLHVCITGDDKNATASFIYNGRLVDSVVSWSKEILRTQESECVCINGTCTVVITDGSASGKADTKILFIEEGKIVHTSTLSGSAQHVEECSCYPRYPGVRCVCRDNWKGSNRPIVDINIKDHSIVSSYVCSGLVGDTPRKNDSSSSSHCLDPNNEEGGHGVKGWAFDDGNDVWMGRTISEKSRLGYETFKVIEGWSNPKSKLQINRQVIVDRGNRSGYSGIFSVEGKSCINRCFYVELIRGRKEETDVLWTSNSIVVFCGTSGTYGTGSWPDGADINLMPI

SEQ ID NO: 19766 - protein, 469 aa, Artificial Sequence
  derived and/or modified protein sequence (wt) from neuraminidase__InfluenzaA__ADM95726
MNPNQKIITIGSVSLTISTICFFMQIAILITAVTLHFKQYEFNSPPNNQVMLCEPTIIERNITEIVYLTNTTIEKEICPKLAEYRNWSKPQCDITGFAPFSKDNSIRLSAGGDIWVTREPYVSCDPDKCYQFALGQGTTLNNVHSNNTVRDRTPYRTLLMNELGVPFHLGTKQVCIAWSSSSCHDGKAWLHVCITGDDKNATASFIYNGRLVDSVVSWSKEILRTQESECVCINGTCTVVMTDGSASGKADTKILFIEEGKIVHTSTLSGSAQHVEECSCYPRYPGVRCVCRDNWKGSNRPIVDINIKDHSIVSSYVCSGLVGDTPRKNDSSSSSHCLDPNNEEGGHGVKGWAFDDGNDVWMGRTISEKSRLGYETFKVIEGWSNPKSKLQINRQVIVDRGNRSGYSGIFSVEGKSCINRCFYVELIRGRKEETDVLWTSNSIVVFCGTSGTYGTGSWPDGADINLMPI

SEQ ID NO: 19767 - protein, 469 aa, Artificial Sequence; identical to SEQ ID NO: 16599
  derived and/or modified protein sequence (wt) from neuraminidase__InfluenzaA__ADM95727

SEQ ID NO: 19768 - protein, 469 aa, Artificial Sequence
  derived and/or modified protein sequence (wt) from neuraminidase__InfluenzaA__ADM95728
MNPNQKIITIGSVSLTISTICFFMQIAILITTVTLHFKQYEFNSPPNNQVMLCEPTIIERNITEIVYLTNTTIEKEICPELAEYRNWSKPQCDITGFAPFSKDNSIRLSAGGDIWVTREPYVSCDPDKCYQFALGQGTTLNNVHSNNTVRDRTPYRTLLMNELGVPFHLGTKQVCIAWSSSSCHDGKAWLHVCITGDDKNATASFIYNGRLVDSVVSWSKEILRTQESECVCINGTCTVVMTDGSASGKADTKILFIEEGKIVHTSTLSGSAQHVEECSCYPRYPGVRCVCRDNWKGSNRPIVDINIKDHSIVSSYVCSGLVGDTPRKNDSSSSSHCLDPNNEEGGHGVKGWAFDDGNDVWMGRTISEKSRLGYETFKVIEGWSNPKSKLQINRQVIVDRGNRSGYSGIFSVEGKSCINRCFYVELIRGRKEETEVLWTSNSIVVFCGTSGTYGTGSWPDGADINLMPI

SEQ ID NO: 19769 - protein, 469 aa, Artificial Sequence
  derived and/or modified protein sequence (wt) from neuraminidase__InfluenzaA__ADM95729
MNPNQKIITIGSVSLTISTICFFMQIAILITTVTLHFKQYEFNSPPNNQVMLCEPTIIERNITEIVYLTNTTIEKEICPKLAEYRNWSKPQCDITGFAPFSKDNSIRLSAGGDIWVTREPYVSCDPDKCYQFALGQGTTLNNVHSNNTVRDRTPYRTLLMNELGVPFHLGTKQVCIAWSSSSCHDGKAWLHVCITGDDKNATASFIYNGRLVDSVVSWSKEILRTQESECVCINGTCTVVMTDGSASGKADTKILFIEEGKIVHTSTLSGSAQHVEECSCYPRYPGVRCVCRDNWKGSNRPIVDINIKDHSIVSSYVCSGLVGDTPRKNDSSSRSHCLDPNNEEGGHGVKGWAFDDGNDVWMGRTISEKSRLGYETFKVIEGWSNPKSKLQINRQVIVDRGNRSGYSGIFSVEGKSCINRCFYVELIRGRKEETEVLWTSNSIVVFCGTSGTYGTGSWPDGADINLMPI

SEQ ID NO: 19770 - protein, 469 aa, Artificial Sequence
  derived and/or modified protein sequence (wt) from neuraminidase__InfluenzaA__ADM95730
MNPNQKIITIGSVSLTISTICFFMQIAILITTVTLHFKQYEFNSPPSNQVMLCEPTIIERNITEIVYLTNTTIEKEICPKLAEYRNWSKPQCDITGFAPFSKDNSIRLSAGGDIWVTREPYVSCDPDKCYQFALGQGTTLNNVHSNNTVRDRTPYRTLLMNELGVPFHLGTKQVCIAWSSSSCHDGKAWLHVCITGDDKNATASFIYNGRLVDSVVSWSKEILRTQESECVCINGTCTVVMTDGSASGKADTKILFIEEGKIVHTSTLSGSAQHVEECSCYPRYPGVRCVCRDNWKGSNRPIVDINIKDHSIVSSYVCSGLVGDTPRKNDSSSSSHCLDPNNEEGGHGVKGWAFDDGNDVWMGRTISEKSRLGYETFKVIEGWSNPKSKLQINRQVIVDRGNRSGYSGIFSVEGKSCINRCFYVELIRGRKEETEVLWTSNSIVVFCGTSGTYGTGSWPDGADINLMPI

SEQ ID NO: 19771 - protein, 469 aa, Artificial Sequence
  derived and/or modified protein sequence (wt) from neuraminidase__InfluenzaA__ADM95732
MNPNQKIITIGSVSLTISTICFFMQIAILITTVTLHFKQYEFNSPPNNQVMLCEPTIIERNITEIVYLTNTTIEKEICPKLAEYRNWSKPQCDITGFAPFSKDNSIRLSAGGDIWVTREPYVSCDPDKCYQFALGQGTTLNNVHSNDTVRDRTPYRTLLMNELGVPFHLGTKQVCIAWSSSSCHDGKAWLHVCITGDDKNATASFIYNGRLVDSIVSWSKEILRTQESECVCINGTCTVVMTDGSASGKADTKILFIEEGKIVHTSTLSGSAQHVEECSCYPRYPGVRCVCRDNWKGSNRPIVDINIKDRSIVSSYVCSGLVGDTPRKNDSSSSSHCLDPNNEEGGHGVKGWAFDDGNDVWMGRTISEKSRLGYETFKVIEGWSNHKSKLQINRQVIVDRGNRSGYSGIFSVEGKSCINRCFYVELIRGRKEETEVLWTSNSIVVFCGTSGTYGTGSWPDGADINLMPI

SEQ ID NO: 19772 - protein, 469 aa, Artificial Sequence; identical to SEQ ID NO: 16599
  derived and/or modified protein sequence (wt) from neuraminidase__InfluenzaA__ADM95733

SEQ ID NO: 19773 - protein, 469 aa, Artificial Sequence; identical to SEQ ID NO: 16599
  derived and/or modified protein sequence (wt) from neuraminidase__InfluenzaA__ADM95734

SEQ ID NO: 19774 - protein, 469 aa, Artificial Sequence; identical to SEQ ID NO: 16599
  derived and/or modified protein sequence (wt) from neuraminidase__InfluenzaA__ADM95735

SEQ ID NO: 19775 - protein, 469 aa, Artificial Sequence; identical to SEQ ID NO: 16599
  derived and/or modified protein sequence (wt) from neuraminidase__InfluenzaA__ADM95736

SEQ ID NO: 19776 - protein, 469 aa, Artificial Sequence
  derived and/or modified protein sequence (wt) from neuraminidase__InfluenzaA__ADM95737
MNPNQKIITIGSVSLTISTICFFMQIAILITTVTLHFKQYEFNSPPNNQVMLCEPTIIERNITEIVYLTNTTIEKEICPKLAEYRNWSKPQCDITGFAPFSKDNSIRLSAGGDIWVTREPYVSCDPDKCYQFALGQGTTLNNVHSNNTVRDRTPYRTLLMNELGVPFHLGTKQVCIAWSSSSCHDGKAWLHVCITGDDKNATASFIYNGRLVDSVVSWSKEILRTQESECVCINGTCTVVMTDGSASGRADTKILFIEEGKIVHTSTLSGSAQHVEECSCYPRYPGVRCVCRDNWKGSNRPIVDINIKDHSIVSSYVCSGLVGDTPRKNDSSSSSHCLDPNNEEGGHGVKGWAFDDGNDVWMGRTISEKSRLGYETFKVIEGWSNPKSKLQINRQVIVDRGNRSGYSGIFSVEGKSCINRCFYVELIRGRKEETDVLWTSNSIVVFCGTSGTYGTGSWPDGADINLMPI

SEQ ID NO: 19777 - protein, 469 aa, Artificial Sequence; identical to SEQ ID NO: 16599
  derived and/or modified protein sequence (wt) from neuraminidase__InfluenzaA__ADM95738

SEQ ID NO: 19778 - protein, 469 aa, Artificial Sequence; identical to SEQ ID NO: 16599
  derived and/or modified protein sequence (wt) from neuraminidase__InfluenzaA__ADM95739

SEQ ID NO: 19779 - protein, 469 aa, Artificial Sequence
  derived and/or modified protein sequence (wt) from neuraminidase__InfluenzaA__ADM95740
MNPNQKIITIGSVSLTISTICFFMQIAILITTVTLHFKQYEFNSPPNNQVMLCEPTIIERNITEIVYLTNTTIEKEICPKLAEYRNWSKPQCDITGFAPFSKDNSIRLSAGGDIWVTREPYVSCDPDKCYQFALGQGTTLNNVHSNNTVRDRTPYRTLLMNELGVPFHLGTKQVCIAWSSSSCHDGKAWLHVCITGDDKNATASFIYNGRLVDSVVSWSKEILRTQESECVCINGTCTVVMTDGSASGKADTKILFIEEGKIVHTSTLSGSAQHVEECSCYPRYPGVRCVCRDNWKGSNRPIVDINIKDHSIVSSYVCSGLVGDTPRKNDSSSSSHCLDPNDEEGGHGVKGWAFDDGNDVWMGRTISEKSRLGYETFKVIEGWSNPKSKLQINRQVIVDRGNRSGYSGIFSVEGKSCINRCFYVELIRGRKEETKVLWTSNSIVVFCGTSGTYGTGSWPDGADINLMPI

SEQ ID NO: 19780 - protein, 469 aa, Artificial Sequence; identical to SEQ ID NO: 19755
  derived and/or modified protein sequence (wt) from neuraminidase__InfluenzaA__ADM95741

SEQ ID NO: 19781 - protein, 469 aa, Artificial Sequence; identical to SEQ ID NO: 16599
  derived and/or modified protein sequence (wt) from neuraminidase__InfluenzaA__ADM95742

SEQ ID NO: 19782 - protein, 469 aa, Artificial Sequence
  derived and/or modified protein sequence (wt) from neuraminidase__InfluenzaA__ADM95743
MNPNQKIITIGSVSLTISTICFFMQIAILITTVTLHFKQYEFNSSPNNQVMLCEPTIIERNITEIVYLTNTTIEKEICPKLAEYRNWSKPQCDITGFAPFSKDNSIRLSAGGDIWVTREPYVSCDPDKCYQFALGQGTTLNNVHSNNTVRDRTPYRTLLMNELGVPFHLGTKQVCIAWSSSSCHDGKAWLHVCITGDDKNATASFIYNGRLVDSVVSWSKEILRTQESECVCINGTCTVVMTDGSASGKADTKILFIEEGKIVHTSTLSGSAQHVEECSCYPRYPGVRCVCRDNWKGSNRPIVDINIKDHSIVSSYVCSGLVGDTPRKNDSSSSSHCLDPNNEEGGHGVKGWAFDDGNDVWMGRTISEKSRLGYETFKVIEGWSNPKSKLQINRQVIVDRGNRSGYSGIFSVEGKSCINRCFYVELIRGRKEETEVLWTSNSIVVFCGTSGTYGTGSWPDGADINLMPI

SEQ ID NO: 19783 - protein, 469 aa, Artificial Sequence; identical to SEQ ID NO: 16599
  derived and/or modified protein sequence (wt) from neuraminidase__InfluenzaA__ADM95744

SEQ ID NO: 19784 - protein, 469 aa, Artificial Sequence; identical to SEQ ID NO: 16738
  derived and/or modified protein sequence (wt) from neuraminidase__InfluenzaA__ADN05229

SEQ ID NO: 19785 - protein, 470 aa, Artificial Sequence; identical to SEQ ID NO: 17461
  derived and/or modified protein sequence (wt) from neuraminidase__InfluenzaA__ADN06292

SEQ ID NO: 19786 - protein, 470 aa, Artificial Sequence; identical to SEQ ID NO: 18930
  derived and/or modified protein sequence (wt) from neuraminidase__InfluenzaA__ADN06303

SEQ ID NO: 19787 - protein, 470 aa, Artificial Sequence
  derived and/or modified protein sequence (wt) from neuraminidase__InfluenzaA__ADN06314
MNPNQKIITIGSISIAIGIISLMLQIGNIISIWASHSIQTGSQNNTGICNQRIITYENSTWVNHTYVNINNTNVVAGEDKTSVTLAGNSSLCSISGWAIYTKDNSIRIGSKGEVFVIREPFISCSHLECRTFFLTQGALLNDKHSNGTVKDRSPYRALMSCPLGEAPSPYNSKFESVAWSASACHDGMGWLTIGISGPDNGAVAVLKYNGIITGTIKSWKKQILRTQESECVCMNGSCFTIMTDGPSNKAASYKIFKIEKGKVTKSIELNAPNFYYEECSCYPDTGIVMCVCRDNWHGSNRPWVSFNQNLDYQIGYICSGVFGDNPRPEDGEGSCNPVTVDGANGVKGFSYKYGNGVWIGRTKSNRLRKGFEMIWDPNGWTNTDSDFSVKQDVVAITDWSGYSGSFVQHPELTGLDCIRPCFWVELVRGLPRENTTIWTSGSSISFCGVNGDTANWSWPDGAELPFTIDK

SEQ ID NO: 19788 - protein, 470 aa, Artificial Sequence; identical to SEQ ID NO: 18930
  derived and/or modified protein sequence (wt) from neuraminidase__InfluenzaA__ADN06325

SEQ ID NO: 19789 - protein, 470 aa, Artificial Sequence
  derived and/or modified protein sequence (wt) from neuraminidase__InfluenzaA__ADN06347
MNPNQKIITIGSISIAIGIISLMLQIGNIISIWASHSIQTESQNNTGICNQRIITYENSTWVNHTYVNINNTNVVAGEDKTSVTLAGNSSLCSISGWAIYTKDNSIRIGSKGDVFVIREPFISCSHLECRTFFLTQGALLNDKHSNGTVKDRSPYRALMSCPLGEAPSPYNSKFESVAWSASACHDGMGWLTIGISGPDNGAVAVLKYNGIITGTIKSWKKQILRTQESECVCMNGSCFTIMTDGPSNKAASYKIFKIEKGKVTKSIELNAPNFYYEECSCYPDTGIVMCVCRDNWHGSNRPWVSFNQNLDYQMGYICSGVFGDNPRPEDGEGSCNPVNVDGANGVKGFSYKYGNGVWIGRTKSNRLRKGFEMIWDPNGWTNTDSDFSVKQDVVAITDWSGYSGSFVQHPELTGLDCIRPCFWVELVRGLPRENTTIWTSGSSISFCGVNSDTANWSWPDGAELPFTIDK

SEQ ID NO: 19790 - protein, 469 aa, Artificial Sequence; identical to SEQ ID NO: 19410
  derived and/or modified protein sequence (wt) from neuraminidase__InfluenzaA__ADN06369

SEQ ID NO: 19791 - protein, 469 aa, Artificial Sequence; identical to SEQ ID NO: 16738
  derived and/or modified protein sequence (wt) from neuraminidase__InfluenzaA__ADN26031

SEQ ID NO: 19792 - protein, 469 aa, Artificial Sequence; identical to SEQ ID NO: 16738
  derived and/or modified protein sequence (wt) from neuraminidase__InfluenzaA__ADN26032

SEQ ID NO: 19793 - protein, 469 aa, Artificial Sequence; identical to SEQ ID NO: 16738
  derived and/or modified protein sequence (wt) from neuraminidase__InfluenzaA__ADN26033

SEQ ID NO: 19794 - protein, 469 aa, Artificial Sequence; identical to SEQ ID NO: 16738
  derived and/or modified protein sequence (wt) from neuraminidase__InfluenzaA__ADN26034

SEQ ID NO: 19795 - protein, 469 aa, Artificial Sequence; identical to SEQ ID NO: 16738
  derived and/or modified protein sequence (wt) from neuraminidase__InfluenzaA__ADN26035

SEQ ID NO: 19796 - protein, 469 aa, Artificial Sequence; identical to SEQ ID NO: 16738
  derived and/or modified protein sequence (wt) from neuraminidase__InfluenzaA__ADN26036

SEQ ID NO: 19797 - protein, 469 aa, Artificial Sequence
  derived and/or modified protein sequence (wt) from neuraminidase__InfluenzaA__ADN26037
MNPNQKIITIGSVCMTIGMANLILQIGNIISIWISHSIQLGNQNQIETCNQSVITYENNTWVNQTYVNISNTNFAAGQSVVSVKLAGNSSLCPVSGWAIYSKDNSVRIGSKGDVFVIREPFISCSPLECRTFFLTQGALLNDKHSNGTIKDRSPYRTLMSCPIGEVPSPYNSRFESVAWSASACHDGINWLTIGISGPDNGAVAVLKYNGIITDTIKSWRNNILRTQESECACVNGSCFTVMTDGPSNGQASYKIFRIEKGKIVKSVEMNAPNYHYEECSCYPDSSEITCVCRDNWHGSNRPWVSFNQNLEYQIGYICSGIFGDNPRPIDKTGSCGPVSSNGANGVKGFSFKYGNGVWIGRTKSISSRNGFEMIWDPNGWTGTDNNFSIKQDIVGINEWSGYSGSFVQHPELTGLDCIRPCFWVELIRGRPKENTIWTSGSSISFCGVNSDTVGWSWPDGAELPFTIDK

SEQ ID NO: 19798 - protein, 469 aa, Artificial Sequence; identical to SEQ ID NO: 16738
  derived and/or modified protein sequence (wt) from neuraminidase__InfluenzaA__ADN26038

SEQ ID NO: 19799 - protein, 469 aa, Artificial Sequence; identical to SEQ ID NO: 16738
  derived and/or modified protein sequence (wt) from neuraminidase__InfluenzaA__ADN26041

SEQ ID NO: 19800 - protein, 469 aa, Artificial Sequence; identical to SEQ ID NO: 16738
  derived and/or modified protein sequence (wt) from neuraminidase__InfluenzaA__ADN26042

SEQ ID NO: 19801 - protein, 469 aa, Artificial Sequence
  derived and/or modified protein sequence (wt) from neuraminidase__InfluenzaA__ADN26043
MNPNQKIITIGSVCMTIGMANLILQIGNIISIWISHSIQLGNQNQIETCNQSVITYENNTWVNQTYVNISNTNFAAGQSVVSVKLAGNSSLCPVSGWAIYSKDNSIRIGSKGDVFVIREPFISCSPLECRTFFLTQGALLNDKHSNGTIKDRSPYRTLMSCPIGEVPSPYNSRFESVAWSASACHDGINWLTIGISGPDNGAVAVLKYNGIITDTIKSWRNNILRTQESECACVNGSCFTVMTDGPSDGQASYKIFRIEKGKIVKSVEMNAPNYHYEECSCYPDSSEITCVCRDNWHGSNRPWVSFNQNLEYQVGYICSGIFGDNPRPNDKTGSCGPVSSNGANGVKGFSFKYGNGVWIGRTKSISSRNGFEMIWDPNGWTGTDNNFSIKQDIVGINEWSGYSGSFVQHPELTGLDCIRPCFWVELIRGRPKENTIWTSGSSISFCGVNSDTVGWSWPDGAELPFTIDK

SEQ ID NO: 19802 - protein, 469 aa, Artificial Sequence; identical to SEQ ID NO: 16738
  derived and/or modified protein sequence (wt) from neuraminidase__InfluenzaA__ADN26044

SEQ ID NO: 19803 - protein, 469 aa, Artificial Sequence; identical to SEQ ID NO: 16738
  derived and/or modified protein sequence (wt) from neuraminidase__InfluenzaA__ADN26045

SEQ ID NO: 19804 - protein, 469 aa, Artificial Sequence
  derived and/or modified protein sequence (wt) from neuraminidase__InfluenzaA__ADN26047
MNPNQKIITIGSVCMTIGMANLILQIGNIISIWISHSIQLGNQNQIETCNQSVITYENNTWVNQTYVNISNTNFAAGQSMVSVKLTGNSSLCPVSGWAIYSKDNSVRIGSKGDVFVIREPFISCSPLECRTFFLTQGALLNDKHSNGTIKDRSPYRTLMSCPIGEVPSPYNSRFESVAWSASACHDGINWLTIGISGPDNGAVAVLKYNGIITDTIKSWRNNILRTQESECACVNGSCFTVMTDGPSNGQASYKIFRIEKGKIVKSVEMNAPNYHYEECSCYPDSSEITCVCRDNWHGSNRPWVSFNQNLEYQIGYICSGIFGDNPRPNDKTGSCGPVSSNGANGVKGFSFKYGNGVWIGRTKSISSRNGFEMIWDPNGWTGTDNNFSIKQDIVGINEWSGYSGSFVQHPELTGLDCIRPCFWVELIRGRPKENTIWTSGSSISFCGVNSDTVGWSWPDGAELPFTIDK

SEQ ID NO: 19805 - protein, 469 aa, Artificial Sequence; identical to SEQ ID NO: 16738
  derived and/or modified protein sequence (wt) from neuraminidase__InfluenzaA__ADN26048

SEQ ID NO: 19806 - protein, 469 aa, Artificial Sequence; identical to SEQ ID NO: 16738
  derived and/or modified protein sequence (wt) from neuraminidase__InfluenzaA__ADN26049

SEQ ID NO: 19807 - protein, 469 aa, Artificial Sequence; identical to SEQ ID NO: 16738
  derived and/or modified protein sequence (wt) from neuraminidase__InfluenzaA__ADN26050

SEQ ID NO: 19808 - protein, 469 aa, Artificial Sequence; identical to SEQ ID NO: 16738
  derived and/or modified protein sequence (wt) from neuraminidase__InfluenzaA__ADN26051

SEQ ID NO: 19809 - protein, 469 aa, Artificial Sequence; identical to SEQ ID NO: 16738
  derived and/or modified protein sequence (wt) from neuraminidase__InfluenzaA__ADN26052

SEQ ID NO: 19810 - protein, 469 aa, Artificial Sequence; identical to SEQ ID NO: 16728
  derived and/or modified protein sequence (wt) from neuraminidase__InfluenzaA__ADN26053

SEQ ID NO: 19811 - protein, 469 aa, Artificial Sequence; identical to SEQ ID NO: 16738
  derived and/or modified protein sequence (wt) from neuraminidase__InfluenzaA__ADN26054

SEQ ID NO: 19812 - protein, 469 aa, Artificial Sequence; identical to SEQ ID NO: 16738
  derived and/or modified protein sequence (wt) from neuraminidase__InfluenzaA__ADN26057

SEQ ID NO: 19813 - protein, 469 aa, Artificial Sequence; identical to SEQ ID NO: 16738
  derived and/or modified protein sequence (wt) from neuraminidase__InfluenzaA__ADN26058

SEQ ID NO: 19814 - protein, 469 aa, Artificial Sequence; identical to SEQ ID NO: 16738
  derived and/or modified protein sequence (wt) from neuraminidase__InfluenzaA__ADN26059

SEQ ID NO: 19815 - protein, 469 aa, Artificial Sequence; identical to SEQ ID NO: 17105
  derived and/or modified protein sequence (wt) from neuraminidase__InfluenzaA__ADN26060

SEQ ID NO: 19816 - protein, 469 aa, Artificial Sequence; identical to SEQ ID NO: 16738
  derived and/or modified protein sequence (wt) from neuraminidase__InfluenzaA__ADN26061

SEQ ID NO: 19817 - protein, 469 aa, Artificial Sequence; identical to SEQ ID NO: 16738
  derived and/or modified protein sequence (wt) from neuraminidase__InfluenzaA__ADN26063

SEQ ID NO: 19818 - protein, 469 aa, Artificial Sequence; identical to SEQ ID NO: 16738
  derived and/or modified protein sequence (wt) from neuraminidase__InfluenzaA__ADN26064

SEQ ID NO: 19819 - protein, 469 aa, Artificial Sequence; identical to SEQ ID NO: 17811
  derived and/or modified protein sequence (wt) from neuraminidase__InfluenzaA__ADN26065

SEQ ID NO: 19820 - protein, 469 aa, Artificial Sequence; identical to SEQ ID NO: 16738
  derived and/or modified protein sequence (wt) from neuraminidase__InfluenzaA__ADN26066

SEQ ID NO: 19821 - protein, 469 aa, Artificial Sequence; identical to SEQ ID NO: 16738
  derived and/or modified protein sequence (wt) from neuraminidase__InfluenzaA__ADN26067

SEQ ID NO: 19822 - protein, 469 aa, Artificial Sequence; identical to SEQ ID NO: 16738
  derived and/or modified protein sequence (wt) from neuraminidase__InfluenzaA__ADN26069

SEQ ID NO: 19823 - protein, 469 aa, Artificial Sequence; identical to SEQ ID NO: 16738
  derived and/or modified protein sequence (wt) from neuraminidase__InfluenzaA__ADN26070

SEQ ID NO: 19824 - protein, 469 aa, Artificial Sequence; identical to SEQ ID NO: 16738
  derived and/or modified protein sequence (wt) from neuraminidase__InfluenzaA__ADN26072

SEQ ID NO: 19825 - protein, 469 aa, Artificial Sequence; identical to SEQ ID NO: 16738
  derived and/or modified protein sequence (wt) from neuraminidase__InfluenzaA__ADN26073

SEQ ID NO: 19826 - protein, 469 aa, Artificial Sequence; identical to SEQ ID NO: 16738
  derived and/or modified protein sequence (wt) from neuraminidase__InfluenzaA__ADN26075

SEQ ID NO: 19827 - protein, 469 aa, Artificial Sequence; identical to SEQ ID NO: 16738
  derived and/or modified protein sequence (wt) from neuraminidase__InfluenzaA__ADN26076

SEQ ID NO: 19828 - protein, 469 aa, Artificial Sequence; identical to SEQ ID NO: 16738
  derived and/or modified protein sequence (wt) from neuraminidase__InfluenzaA__ADN26077

SEQ ID NO: 19829 - protein, 469 aa, Artificial Sequence; identical to SEQ ID NO: 16738
  derived and/or modified protein sequence (wt) from neuraminidase__InfluenzaA__ADN26078

SEQ ID NO: 19830 - protein, 469 aa, Artificial Sequence; identical to SEQ ID NO: 16738
  derived and/or modified protein sequence (wt) from neuraminidase__InfluenzaA__ADN26079

SEQ ID NO: 19831 - protein, 469 aa, Artificial Sequence; identical to SEQ ID NO: 16738
  derived and/or modified protein sequence (wt) from neuraminidase__InfluenzaA__ADN26080

SEQ ID NO: 19832 - protein, 469 aa, Artificial Sequence; identical to SEQ ID NO: 16738
  derived and/or modified protein sequence (wt) from neuraminidase__InfluenzaA__ADN26081

SEQ ID NO: 19833 - protein, 469 aa, Artificial Sequence; identical to SEQ ID NO: 16738
  derived and/or modified protein sequence (wt) from neuraminidase__InfluenzaA__ADN26082

SEQ ID NO: 19834 - protein, 469 aa, Artificial Sequence; identical to SEQ ID NO: 16738
  derived and/or modified protein sequence (wt) from neuraminidase__InfluenzaA__ADN26083

SEQ ID NO: 19835 - protein, 469 aa, Artificial Sequence; identical to SEQ ID NO: 18640
  derived and/or modified protein sequence (wt) from neuraminidase__InfluenzaA__ADN26084

SEQ ID NO: 19836 - protein, 469 aa, Artificial Sequence; identical to SEQ ID NO: 16738
  derived and/or modified protein sequence (wt) from neuraminidase__InfluenzaA__ADN26085

SEQ ID NO: 19837 - protein, 469 aa, Artificial Sequence; identical to SEQ ID NO: 16738
  derived and/or modified protein sequence (wt) from neuraminidase__InfluenzaA__ADN26086

SEQ ID NO: 19838 - protein, 469 aa, Artificial Sequence; identical to SEQ ID NO: 16738
  derived and/or modified protein sequence (wt) from neuraminidase__InfluenzaA__ADN26087

SEQ ID NO: 19839 - protein, 469 aa, Artificial Sequence; identical to SEQ ID NO: 16738
  derived and/or modified protein sequence (wt) from neuraminidase__InfluenzaA__ADN26088

SEQ ID NO: 19840 - protein, 469 aa, Artificial Sequence; identical to SEQ ID NO: 16738
  derived and/or modified protein sequence (wt) from neuraminidase__InfluenzaA__ADN26090

SEQ ID NO: 19841 - protein, 469 aa, Artificial Sequence; identical to SEQ ID NO: 16738
  derived and/or modified protein sequence (wt) from neuraminidase__InfluenzaA__ADN26091

SEQ ID NO: 19842 - protein, 469 aa, Artificial Sequence; identical to SEQ ID NO: 16738
  derived and/or modified protein sequence (wt) from neuraminidase__InfluenzaA__ADN26092

SEQ ID NO: 19843 - protein, 469 aa, Artificial Sequence; identical to SEQ ID NO: 16738
  derived and/or modified protein sequence (wt) from neuraminidase__InfluenzaA__ADN26093

SEQ ID NO: 19844 - protein, 469 aa, Artificial Sequence
  derived and/or modified protein sequence (wt) from neuraminidase__InfluenzaA__ADN26094
MNPNQKIITIGSVCMTIGMANLILQIGNIISIWISHSIQLGNQNQIETCNQSVITYENNTWVNQTYVNISNTNFAAGQSVVSVKLAGNSSLCPVSGWAIYSKDNSIRIGSKGDVFVIREPFISCSPLECRTFFLTQGALLNDKHSNGTIKDRSPYRTLMSCPIGEVPSPYNSRFESVAWSASACHDGINWLTIGISGPDNGAVAVLKYNGIITDTIKSWRNNILRTQESECACVNGSCFTVMTDGPSDGQASYKIFRIEKGKIVKSVEMNAPNYHYEECSCYPDSSEITCVCRDNWHGSNRPWVSFNQNLEYQIGYICSGIFGDNPRPNDKTGSCGPVSSNGANGVKGFSFKYGNGVWIGRTKSISSRNGFEMIWDPNGWTGKDNNFSIKQDIVGINEWSGYSGSFVQHPELTGLDCIRPCFWVELIRGRPKENTIWTSGSSISFCGVNSDTVGWSWPDGAELPFTIDK

SEQ ID NO: 19845 - protein, 469 aa, Artificial Sequence; identical to SEQ ID NO: 18640
  derived and/or modified protein sequence (wt) from neuraminidase__InfluenzaA__ADN26095

SEQ ID NO: 19846 - protein, 469 aa, Artificial Sequence
  derived and/or modified protein sequence (wt) from neuraminidase__InfluenzaA__ADN26096
MNPNQKIITIGSVCMTIGMANLILQIGNIISIWISHSIQLGNQNQIETCNQSVITYENNTWVNQTYVNISNTNFAAGQSVVSVKLAGNSSLCPVNGWAIYSKDNSIRIGSKGDVFVIREPFISCSPLECRTFFLTQGALLNDKHSNGTIKDRSPYRTLMSCPIGEVPSPYNSRFESVAWSASACHDGINWLTIGISGPDNGAVAVLKYNGIITDTIKSWRNNILRTQESECACVNGSCFTVMTDGPSDGQASYKIFRIEKGKIVKSVEMNAPNYHYEECSCYPDSSEITCVCRDNWHGSNRPWVSFNQNLEYQIGYICSGIFGDNPRPNDKTGSCGPVSSNGANGVKGFSFKYGNGVWIGRTKNISSRNGFEMIWDPNGWTGTDNNFSIKQDIVGINEWSGYSGSFVQHPELTGLDCIRPCFWVELIRGRPKENTIWTSGSSISFCGVNSDTVGWSWPDGAELPFTIDK

SEQ ID NO: 19847 - protein, 469 aa, Artificial Sequence; identical to SEQ ID NO: 16738
  derived and/or modified protein sequence (wt) from neuraminidase__InfluenzaA__ADN26097

SEQ ID NO: 19848 - protein, 469 aa, Artificial Sequence; identical to SEQ ID NO: 16738
  derived and/or modified protein sequence (wt) from neuraminidase__InfluenzaA__ADN26098

SEQ ID NO: 19849 - protein, 469 aa, Artificial Sequence; identical to SEQ ID NO: 16738
  derived and/or modified protein sequence (wt) from neuraminidase__InfluenzaA__ADN26099

SEQ ID NO: 19850 - protein, 469 aa, Artificial Sequence; identical to SEQ ID NO: 16738
  derived and/or modified protein sequence (wt) from neuraminidase__InfluenzaA__ADN26100

SEQ ID NO: 19851 - protein, 469 aa, Artificial Sequence; identical to SEQ ID NO: 16738
  derived and/or modified protein sequence (wt) from neuraminidase__InfluenzaA__ADN26101

SEQ ID NO: 19852 - protein, 469 aa, Artificial Sequence
  derived and/or modified protein sequence (wt) from neuraminidase__InfluenzaA__ADN26102
MNPNQKIITIGSVCMTIGMANLILQIGNIISIWISHLIQLGNQNQIETCNQSVITYENNTWVNQTYVNISNTNFAAGQSVVSVKLAGNSSLCPVSGWAIYSKDNSIRIGSKGDVFVIREPFISCSPLECRTFFLTQGALLNDKHSNGTIKDRSPYRTLMSCPIGEVPSPYNSRFESVAWSASACHDGINWLTIGISGPDNGAVAVLKYNGIITDTIKSWRNNILRTQESECACVNGSCFTVMTDGPSDGQASYKIFKIEKGKIVKSVEMNAPNYHYEECSCYPDSSEITCVCRDNWHGSNRPWVSFNQNLEYQIGYICSGIFGDNPRPNDKTGSCGPVSSNGANGVKGFSFKYGNGVWIGRTKSISSRNGFEMIWDPNGWTGTDNNFSIKQDIVGINEWSGYSGSFVQHPELTGLDCIRPCFWVELIRGRPKENSIWTSGSSISFCGVNSDTVGWSWPDGAELPFTIDK

SEQ ID NO: 19853 - protein, 469 aa, Artificial Sequence; identical to SEQ ID NO: 16738
  derived and/or modified protein sequence (wt) from neuraminidase__InfluenzaA__ADN26103

SEQ ID NO: 19854 - protein, 469 aa, Artificial Sequence; identical to SEQ ID NO: 16738
  derived and/or modified protein sequence (wt) from neuraminidase__InfluenzaA__ADN26104

SEQ ID NO: 19855 - protein, 469 aa, Artificial Sequence; identical to SEQ ID NO: 16738
  derived and/or modified protein sequence (wt) from neuraminidase__InfluenzaA__ADN26105

SEQ ID NO: 19856 - protein, 469 aa, Artificial Sequence; identical to SEQ ID NO: 16738
  derived and/or modified protein sequence (wt) from neuraminidase__InfluenzaA__ADN26106

SEQ ID NO: 19857 - protein, 469 aa, Artificial Sequence; identical to SEQ ID NO: 18640
  derived and/or modified protein sequence (wt) from neuraminidase__InfluenzaA__ADN26107

SEQ ID NO: 19858 - protein, 469 aa, Artificial Sequence; identical to SEQ ID NO: 18640
  derived and/or modified protein sequence (wt) from neuraminidase__InfluenzaA__ADN26108

SEQ ID NO: 19859 - protein, 469 aa, Artificial Sequence; identical to SEQ ID NO: 16738
  derived and/or modified protein sequence (wt) from neuraminidase__InfluenzaA__ADN26109

SEQ ID NO: 19860 - protein, 469 aa, Artificial Sequence; identical to SEQ ID NO: 17712
  derived and/or modified protein sequence (wt) from neuraminidase__InfluenzaA__ADN26110

SEQ ID NO: 19861 - protein, 469 aa, Artificial Sequence; identical to SEQ ID NO: 18640
  derived and/or modified protein sequence (wt) from neuraminidase__InfluenzaA__ADN26111

SEQ ID NO: 19862 - protein, 469 aa, Artificial Sequence; identical to SEQ ID NO: 17712
  derived and/or modified protein sequence (wt) from neuraminidase__InfluenzaA__ADN26112

SEQ ID NO: 19863 - protein, 469 aa, Artificial Sequence; identical to SEQ ID NO: 18640
  derived and/or modified protein sequence (wt) from neuraminidase__InfluenzaA__ADN26113

SEQ ID NO: 19864 - protein, 469 aa, Artificial Sequence
  derived and/or modified protein sequence (wt) from neuraminidase__InfluenzaA__ADN26114
MNPNQKIITIGSVCMTIGMANLILQIGNIISIWISHSIQLGNQNQIETCNQSVITYENNTWVNQTYVNINNTNFAAGQSVVSVKLAGNSSLCPVSGWAIYSKDNSIRIGSKGDVFVIREPFISCSPLECRTFFLTQGALLNDKHSNGTIKDRSPYRTLMSCPIGEVPSPYNSRFESVAWSASACHDGINWLTIGISGPDNGAVAVLKYNGIITDTIKSWRNNILRTQESECACVNGSCFTVMTDGPSDGQASYKIFRIEKGKIVKSVEMNAPNYHYEECSCYPDSSEITCVCRDNWHGSNRPWVSFNQNLEYQIGYICSGIFGDNPRPNDKTGSCGPVSSNGANGVKGFSFKYGNGVWIGRTKSISSRNGFEMIWDPNGWTGTDNNFSIKQDIVGINEWSGYSGSFVQHPELTGLDCIRPCFWVELIRGRPKENTIWTSGSSISFCGVNSDTVGWSWPDGAELPFTIDK

SEQ ID NO: 19865 - protein, 469 aa, Artificial Sequence; identical to SEQ ID NO: 16738
  derived and/or modified protein sequence (wt) from neuraminidase__InfluenzaA__ADN26115

SEQ ID NO: 19866 - protein, 469 aa, Artificial Sequence
  derived and/or modified protein sequence (wt) from neuraminidase__InfluenzaA__ADN26116
MNPNQKIITIGSVCMTIGMANLILQIGNIISIWISHSIQLGNQNQIETCNQSVITYENNTWVNQTYVNISNTNFAAGQSVVSVKLAGNSSLCPVNGWAIYSKDNSIRIGSKGDVFVIREPFISCSPLECRTFFLTQGALLNDKHSNGTIKDRSPYRTLMSCPIGEVPSPYNSRFESVAWSASACHDGINWLTIGISGPDNGAVAVLKYNGIITDTIKSWRNNILRTQESECACVNGSCFTVMTDGPSDGQASYKIFRIEKGKIVKSVEMNAPNYHYEECSCYPDSSEITCVCRDNWHGSNRPWVSFNQNLEYQIGYICSGIFGDNPRPNDKTGSCGPVSSNGANGVKGFSFKYGNGVWIGRTKSISSRNGFEMIWDPNGWTGTDNNFSIKQDIVGINEWSGYSGSFVQHPELTRLDCIRPCFWVELIRGRPKENTIWTSGSSISFCGVNSDTVGWSWPDGAELPFTIDK

SEQ ID NO: 19867 - protein, 469 aa, Artificial Sequence; identical to SEQ ID NO: 18640
  derived and/or modified protein sequence (wt) from neuraminidase__InfluenzaA__ADN26117

SEQ ID NO: 19868 - protein, 469 aa, Artificial Sequence; identical to SEQ ID NO: 18640
  derived and/or modified protein sequence (wt) from neuraminidase__InfluenzaA__ADN26118

SEQ ID NO: 19869 - protein, 469 aa, Artificial Sequence; identical to SEQ ID NO: 16738
  derived and/or modified protein sequence (wt) from neuraminidase__InfluenzaA__ADN26119

SEQ ID NO: 19870 - protein, 469 aa, Artificial Sequence; identical to SEQ ID NO: 17712
  derived and/or modified protein sequence (wt) from neuraminidase__InfluenzaA__ADN26120

SEQ ID NO: 19871 - protein, 469 aa, Artificial Sequence; identical to SEQ ID NO: 18640
  derived and/or modified protein sequence (wt) from neuraminidase__InfluenzaA__ADN26121

SEQ ID NO: 19872 - protein, 469 aa, Artificial Sequence; identical to SEQ ID NO: 16738
  derived and/or modified protein sequence (wt) from neuraminidase__InfluenzaA__ADN26122

SEQ ID NO: 19873 - protein, 469 aa, Artificial Sequence; identical to SEQ ID NO: 16738
  derived and/or modified protein sequence (wt) from neuraminidase__InfluenzaA__ADN26123

SEQ ID NO: 19874 - protein, 469 aa, Artificial Sequence; identical to SEQ ID NO: 16738
  derived and/or modified protein sequence (wt) from neuraminidase__InfluenzaA__ADN26124

SEQ ID NO: 19875 - protein, 469 aa, Artificial Sequence; identical to SEQ ID NO: 17712
  derived and/or modified protein sequence (wt) from neuraminidase__InfluenzaA__ADN26125

SEQ ID NO: 19876 - protein, 469 aa, Artificial Sequence; identical to SEQ ID NO: 17712
  derived and/or modified protein sequence (wt) from neuraminidase__InfluenzaA__ADN26126

SEQ ID NO: 19877 - protein, 469 aa, Artificial Sequence; identical to SEQ ID NO: 17503
  derived and/or modified protein sequence (wt) from neuraminidase__InfluenzaA__ADN26127

SEQ ID NO: 19878 - protein, 469 aa, Artificial Sequence; identical to SEQ ID NO: 16738
  derived and/or modified protein sequence (wt) from neuraminidase__InfluenzaA__ADN26128

SEQ ID NO: 19879 - protein, 469 aa, Artificial Sequence; identical to SEQ ID NO: 17712
  derived and/or modified protein sequence (wt) from neuraminidase__InfluenzaA__ADN26129

SEQ ID NO: 19880 - protein, 469 aa, Artificial Sequence; identical to SEQ ID NO: 18640
  derived and/or modified protein sequence (wt) from neuraminidase__InfluenzaA__ADN26130

SEQ ID NO: 19881 - protein, 469 aa, Artificial Sequence
  derived and/or modified protein sequence (wt) from neuraminidase__InfluenzaA__ADN26131
MNPNQKIITIGSVCMTIGMANLILQIGNIISIWISHSIQLGNQNQIETCNQSVITYENNTWVNQTYVNISNTNFAAGQSVVSVKLAGNSSLCPVSGWAIYSKDNSIRIGSKGDVFVIREPFISCSPLECRTFFLTQGALLNDKHSNGTIKDRSPYRTLMSCPIGEVPSPYNSRFESVAWSASACHDGINWLTIGISGPDNGAVAVLKYNGIITDTIKSWRNNILRTQESECACVNGSCFTVMTDGPSDGQASYKIFRIEKGKIVKSVEMNAPNYHYEECSCYPDSSEITCVCRDNWHGSNRPWVSFNQNLEYQIGYICSGIFGDNPRPNDKKGSCGPVSSNGANGVKGFSFKYGNGVWIGRTKSISSRNGFEMIWDPNGWTGTDNNFSIKQDIVGINEWSGYSGSFVQHPELTGLDCIRPCFWVELIRGRPKENTIWTSGSSISLCGVNSDTVGWSWPDGAELPFTIDK

SEQ ID NO: 19882 - protein, 469 aa, Artificial Sequence; identical to SEQ ID NO: 18640
  derived and/or modified protein sequence (wt) from neuraminidase__InfluenzaA__ADN26132

SEQ ID NO: 19883 - protein, 469 aa, Artificial Sequence; identical to SEQ ID NO: 17712
  derived and/or modified protein sequence (wt) from neuraminidase__InfluenzaA__ADN26134

SEQ ID NO: 19884 - protein, 469 aa, Artificial Sequence; identical to SEQ ID NO: 16738
  derived and/or modified protein sequence (wt) from neuraminidase__InfluenzaA__ADN26135

SEQ ID NO: 19885 - protein, 469 aa, Artificial Sequence; identical to SEQ ID NO: 16738
  derived and/or modified protein sequence (wt) from neuraminidase__InfluenzaA__ADN26136

SEQ ID NO: 19886 - protein, 469 aa, Artificial Sequence; identical to SEQ ID NO: 16738
  derived and/or modified protein sequence (wt) from neuraminidase__InfluenzaA__ADN26137

SEQ ID NO: 19887 - protein, 469 aa, Artificial Sequence; identical to SEQ ID NO: 18640
  derived and/or modified protein sequence (wt) from neuraminidase__InfluenzaA__ADN26138

SEQ ID NO: 19888 - protein, 469 aa, Artificial Sequence; identical to SEQ ID NO: 17712
  derived and/or modified protein sequence (wt) from neuraminidase__InfluenzaA__ADN26140

SEQ ID NO: 19889 - protein, 469 aa, Artificial Sequence
  derived and/or modified protein sequence (wt) from neuraminidase__InfluenzaA__ADN26141
MNPNQKIITIGSVCMTIGMANLILQIGNIISIWISHSIQLGNQNRIETCNQSVITYENNTWVNQTYVNISNTNFAAGQSVVSVKLAGNSSLCPVSGWAIYSKDNSIRIGSKGDVFVIREPFISCSPLECRTFFLTQGALLNDKHSNGTIKDRSPYRTLMSCPIGEVPSPYNSRFESVAWSASACHDGINWLTIGISGPDNGAVAVLKYNGIITDTIKSWRNNILRTQESECACVNGSCFTVMTDGPSDGQASYKIFRIEKGKIVKSVEMNAPNYHYEECSCYPDSSEITCVCRDNWHGSNRPWVSFNQNLEYQIGYICSGIFGDNPRPNDKTGSCGPVSSNGANGVKGFSFKYGNGVWIGRTKSISSRNGFEMIWDPNGWTGTDNNFSIKQDIVGINEWSGYSGSFVQHPELTGLDCIRPCFWVELIRGRPKENTIWTSGSSISFCGVNSDTVGWSWPDGAELPFTIDK

SEQ ID NO: 19890 - protein, 469 aa, Artificial Sequence
  derived and/or modified protein sequence (wt) from neuraminidase__InfluenzaA__ADN26142
MNPNQKIITIGSVCMTIGMANLILQIGNIISIWISHSIQLGNQNQIETCNQSVITYENNTWVNQTYVNISNNNFAAGQSVVSVKLAGNSSLCPVNGWAIYSKDNSIRIGSKGDVFVIREPFISCSPLECRTFFLTQGALLNDKHSNGTIKDRSPYRTLMSCPIGEVPSPYNSRFESVAWSASACHDGINWLTIGISGPDNGAVAVLKYNGIITDTIKSWRNNILRTQESECACVNGSCFTVMTDGPSDGQASYKIFRIEKGKIVKSVEMNAPNYHYEECSCYPDSSEITCVCRDNWHGSNRPWVSFNQNLEYQIGYICSGIFGDNPRPNDKTGSCGPVSSNGANGVKGFSFKYGNGVWIGRTKSISSRNGFEMIWDPNGWTGTDNNFSIKQDIVGINEWSGYSGSFVQHPELTGLDCIRPCFWVELIRGRPKENTIWTSGSSISFCGVNSDTVGWSWPDGAELPFTIDK

SEQ ID NO: 19891 - protein, 469 aa, Artificial Sequence; identical to SEQ ID NO: 16738
  derived and/or modified protein sequence (wt) from neuraminidase__InfluenzaA__ADN26143

SEQ ID NO: 19892 - protein, 469 aa, Artificial Sequence; identical to SEQ ID NO: 18640
  derived and/or modified protein sequence (wt) from neuraminidase__InfluenzaA__ADN26144

SEQ ID NO: 19893 - protein, 469 aa, Artificial Sequence; identical to SEQ ID NO: 18640
  derived and/or modified protein sequence (wt) from neuraminidase__InfluenzaA__ADN26145

SEQ ID NO: 19894 - protein, 469 aa, Artificial Sequence; identical to SEQ ID NO: 16738
  derived and/or modified protein sequence (wt) from neuraminidase__InfluenzaA__ADN26146

SEQ ID NO: 19895 - protein, 469 aa, Artificial Sequence; identical to SEQ ID NO: 18640
  derived and/or modified protein sequence (wt) from neuraminidase__InfluenzaA__ADN26147

SEQ ID NO: 19896 - protein, 469 aa, Artificial Sequence; identical to SEQ ID NO: 16738
  derived and/or modified protein sequence (wt) from neuraminidase__InfluenzaA__ADN26148

SEQ ID NO: 19897 - protein, 469 aa, Artificial Sequence; identical to SEQ ID NO: 18640
  derived and/or modified protein sequence (wt) from neuraminidase__InfluenzaA__ADN26149

SEQ ID NO: 19898 - protein, 469 aa, Artificial Sequence
  derived and/or modified protein sequence (wt) from neuraminidase__InfluenzaA__ADN26150
MNPNQKIITIGSVCMTIGMASLILQIGNIISIWISHSIQLGNQNQIETCNQSVITYENNTWVNQTYVNISNTNFAAGQSVVSVKLAGNSSLCPVSGWAIYSKDNSIRIGSKGDVFVIREPFISCSPLECRTFFLTQGALLNDKHSNGTIKDRSPYRTLMSCPIGEVPSPYNSRFESVAWSASACHDGINWLTIGISGPDNGAVAVLKYNGIITDTIKSWRNNILRTQESECACVNGSCFTVMTDGPSDGQASYKIFRIEKGKIVKSVEMNAPNYHYEECSCYPDSSEITCVCRDNWHGSNRPWVSFNQNLEYQIGYICSGIFGDNPRPNDKTGSCGPVSSNGANGVKGFSFKYGNGVWIGRTKSISSRNGFEMIWDPNGWTGTDNNFSIKQDIVGINEWSGYSGSFVQHPELTGLDCIRPCFWVELIRGRPKENTIWTSGSSISFCGVNSDTVGWSWPDGAELPFTIDK

SEQ ID NO: 19899 - protein, 469 aa, Artificial Sequence; identical to SEQ ID NO: 17712
  derived and/or modified protein sequence (wt) from neuraminidase__InfluenzaA__ADN26151

SEQ ID NO: 19900 - protein, 469 aa, Artificial Sequence
  derived and/or modified protein sequence (wt) from neuraminidase__InfluenzaA__ADN26152
MNPNQKIITIGSVCMTIGMANLILQIGNIISIWISHSIQLGNQNQIETCNQSVITYENNTWVNQTYVNISNTNFAAGQSVVSMKLAGNSSLCPVNGWAIYSKDNSIRIGSKGDVFVIREPFISCSPLECRTFFLTQGALLNDKHSNGTIKDRSPYRTLMSCPIGEVPSPYNSRFESVAWSASACHDGINWLTIGISGPDNGAVAVLKYNGIITDTIKSWRNNILRTQESECACVNGSCFTVMTDGPSDGQASYKIFRIEKGKIVKSVEMNAPNYHYEECSCYPDSSEITCVCRDNWHGSNRPWVSFNQNLEYQIGYICSGIFGDNPRPNDKTGSCGPVSSNGANGVKGFSFKYGNGVWIGRTKSISSRNGFEMIWDPNGWTRTDNNFSIKQDIVGINEWSGYSGSFVQHPELTGLDCIRPCFWVELIRGRPKENTIWTSGSSISFCGVNSDTVGWSWPDGAELPFTIDK

SEQ ID NO: 19901 - protein, 469 aa, Artificial Sequence; identical to SEQ ID NO: 18640
  derived and/or modified protein sequence (wt) from neuraminidase__InfluenzaA__ADN26153

SEQ ID NO: 19902 - protein, 469 aa, Artificial Sequence; identical to SEQ ID NO: 17321
  derived and/or modified protein sequence (wt) from neuraminidase__InfluenzaA__ADN26154

SEQ ID NO: 19903 - protein, 469 aa, Artificial Sequence; identical to SEQ ID NO: 16738
  derived and/or modified protein sequence (wt) from neuraminidase__InfluenzaA__ADN26155

SEQ ID NO: 19904 - protein, 469 aa, Artificial Sequence; identical to SEQ ID NO: 17712
  derived and/or modified protein sequence (wt) from neuraminidase__InfluenzaA__ADN26157

SEQ ID NO: 19905 - protein, 469 aa, Artificial Sequence; identical to SEQ ID NO: 16738
  derived and/or modified protein sequence (wt) from neuraminidase__InfluenzaA__ADN26159

SEQ ID NO: 19906 - protein, 469 aa, Artificial Sequence; identical to SEQ ID NO: 16738
  derived and/or modified protein sequence (wt) from neuraminidase__InfluenzaA__ADN26161

SEQ ID NO: 19907 - protein, 469 aa, Artificial Sequence
  derived and/or modified protein sequence (wt) from neuraminidase__InfluenzaA__ADN26162
MNPNQKIITISSVCMTVGMANLILQIGNIISIWISHSIQLGNQNQIETCNQSVITYENNTWVNQTYVNISNTNFAAGQSVVSVKLAGNSSLCPVSGWAIYSKDNSIRIGSKGDVFVIREPFISCSPLECRTFFLTQGALLNDKHSNGTIKDRSPYRTLMSCPIGEVPSPYNSRFESVAWSASACHDGINWLTIGISGPDNGAVAVLKYNGIITDTIKSWRNNILRTQESECACVNGSCFTVMTDGPSDGQASYKIFRIEKGKIVKSVEMNAPNYHYEECSCYPDSSEITCVCRDNWHGSNRPWVSFNQNLEYQIGYICSGIFGDNPRPNDKTGSCGPVSSNGANGVKGFSFKYGNGVWIGRTKSISSRNGFEMIWDPNGWTGTDNNFSIKQDIVGINEWSGYSGSFVQHPELTGLDCIRPCFWVELIRGRPKENTIWTSGSSISFCGVNSDTVGWSWPDGAELPFTIDK

SEQ ID NO: 19908 - protein, 469 aa, Artificial Sequence
  derived and/or modified protein sequence (wt) from neuraminidase__InfluenzaA__ADN26163
MNPNQKIITIGSVCMTIGMANLILQIGNIISIWISHSIQLGNQNQIETCNQSVITYENNTWVNQTYVNISNTNFAAGQSVVSVKLAGNSSLCPVSGWAIYSKDNSIRIGSKGDVFVIREPFISCSPLECRTFFLTQGALLNDKHSNGTIKDRSPYRTLMSCPIGEVPSPYNSRFESVAWSASACHDGINWLTIGISGPDNGAVAVLKYNGIITDTIKSWRNNILRTQESECACVNGSCFTVMTDGPSDGQASYKIFRIEKGKIVKSVEMNAPNYHYEECSCYPDSSEITCVCRDNWHGSNRPWVSFNQNLEYQIGYICSGIFGDNPRPNDKTGSCGPVSSNGANGVKGFSFKYGNGVWIGRTKSISSRNGFEMIWDPNGWTGTDNNFSIKQDIIGINEWSGYSGSFVQHPELTGLDCIRPCFWVELIRGRPKENTIWTSGSSISFCGVNSDTVGWSWPDGAELPFIIDK

SEQ ID NO: 19909 - protein, 469 aa, Artificial Sequence
  derived and/or modified protein sequence (wt) from neuraminidase__InfluenzaA__ADN26164
MNPNQKIITIGSVCMTIGMANLILQIGNIISIWISHSIQLGNQNQIETCNQSVITYENNTWVNQTYVNISNTNFAAGQSVVSVKLAGNSSLCPVSGWAIYSKDNSIRIGSKGDVFVIREPFISCSPLECRTFFLTQGALLNDKHSNGTIKDRSPYRTLMSCPIGEVPSPYNSRFESVAWSASACHDGINWLTIGISGPDNGAVAVLKYNGIITDTIKSWRNNILRTQESECACLNGSCFTVMTDGPSDGQASYKIFRIEKGKIVKSVEMNAPNYHYEECSCYPDSSEITCVCRDNWHGSNRPWVSFNQNLEYQIGYICSGIFGDNPRPNDKTGSCGPVSSNGANGVKGFSFKYGNGVWIGRTKSISSRNGFEMIWDPNGWTGTDNDFSIKQDIVGINEWSGYSGSFVQHPELTGLDCIRPCFWVELIRGRPKENTIWTSGSSISFCGVNSDTVGWSWPDGAELPFTIDK

SEQ ID NO: 19910 - protein, 469 aa, Artificial Sequence; identical to SEQ ID NO: 18695
  derived and/or modified protein sequence (wt) from neuraminidase__InfluenzaA__ADN26168

SEQ ID NO: 19911 - protein, 469 aa, Artificial Sequence; identical to SEQ ID NO: 17961
  derived and/or modified protein sequence (wt) from neuraminidase__InfluenzaA__ADN26178

SEQ ID NO: 19912 - protein, 469 aa, Artificial Sequence; identical to SEQ ID NO: 16738
  derived and/or modified protein sequence (wt) from neuraminidase__InfluenzaA__ADN26868

SEQ ID NO: 19913 - protein, 469 aa, Artificial Sequence; identical to SEQ ID NO: 16738
  derived and/or modified protein sequence (wt) from neuraminidase__InfluenzaA__ADN26869

SEQ ID NO: 19914 - protein, 469 aa, Artificial Sequence; identical to SEQ ID NO: 16738
  derived and/or modified protein sequence (wt) from neuraminidase__InfluenzaA__ADN26870

SEQ ID NO: 19915 - protein, 469 aa, Artificial Sequence
  derived and/or modified protein sequence (wt) from neuraminidase__InfluenzaA__ADN26871
MNPNQKIITIGSVCMTIGMANLILQIGNIISIWISHSIQLGNQNQIETYNQSVITYENNTWVNQTYVNISNTNFAAGQSVVSVKLAGNSSLCPVSGWAIYSKDNSIRIGSKGDVFVIREPFISCSPLECRTFFLTQGALLNDKHSNGTIKDRSPYRTLMSCPIGEVPSPYNSRFESVAWSASACHDGINWLTIGISGPDNGAVAVLKYNGIITDTIKSWRNNILRTQESECACVNGSCFTVMTDGPSDGQASYKIFRIEKGKIVKSVEMNAPNYHYEECSCYPDSSEITCVCRDNWHGSNRPWVSFNQNLEYQIGYICSGIFGDNPRPNDKTGSCGPVSSNGANGVKGFSFKYGNGVWIGRTKSISSRNGFEMIWDPNGWTGTDNNFSIKQDIVGINEWSGYSGSFVQHPELTGLDCIRPCFWVELIRGRPKENTIWTSGSSISFCGVNSDTVGWSWPDGAELPFTIDK

SEQ ID NO: 19916 - protein, 469 aa, Artificial Sequence
  derived and/or modified protein sequence (wt) from neuraminidase__InfluenzaA__ADN26872
MNPNQKIITIGSVCMTIGMANLILQIGNIISIWISHSIQLGNQNQIETCNQSVITYENNTWVNQTYVNISNTNFAAGLSVVSVKLAGNSSLCPVSGWAIYSKDNSIRIGSKGDVFVIREPFISCSPLECRTFFLTQGALLNDKHSNGTIKDRSPYRTLMSCPIGEVPSPYNSRFESVAWSASACHDGISWLTIGISGPDNGAVAVLKYNGIITDTIKSWRNNILRTQESECACVNGSCFTVMTDGPSDGQASYKIFRIEKGKIVKSVEMNAPNYHYEECSCYPDSSEITCVCRDNWHGSNRPWVSFNQNLEYQIGYICSGIFGDNPRPNDKTGSCGPVSSNGANGVKGFSFKYGNGVWIGRTKSISSRNGFEMIWDPNGWTGTDNNFSIKQDIVGINEWSGYSGSFVQHPELTGLDCIRPCFWVELIRGRPKENTIWTSGSSISFCGVNSDTVGWSWPDGAELPFTIDK

SEQ ID NO: 19917 - protein, 469 aa, Artificial Sequence; identical to SEQ ID NO: 16738
  derived and/or modified protein sequence (wt) from neuraminidase__InfluenzaA__ADN26873

SEQ ID NO: 19918 - protein, 469 aa, Artificial Sequence; identical to SEQ ID NO: 16738
  derived and/or modified protein sequence (wt) from neuraminidase__InfluenzaA__ADN26874

SEQ ID NO: 19919 - protein, 469 aa, Artificial Sequence; identical to SEQ ID NO: 16738
  derived and/or modified protein sequence (wt) from neuraminidase__InfluenzaA__ADN26875

SEQ ID NO: 19920 - protein, 469 aa, Artificial Sequence; identical to SEQ ID NO: 16738
  derived and/or modified protein sequence (wt) from neuraminidase__InfluenzaA__ADN26876

SEQ ID NO: 19921 - protein, 469 aa, Artificial Sequence; identical to SEQ ID NO: 16738
  derived and/or modified protein sequence (wt) from neuraminidase__InfluenzaA__ADN26877

SEQ ID NO: 19922 - protein, 469 aa, Artificial Sequence; identical to SEQ ID NO: 16738
  derived and/or modified protein sequence (wt) from neuraminidase__InfluenzaA__ADN26878

SEQ ID NO: 19923 - protein, 469 aa, Artificial Sequence; identical to SEQ ID NO: 17875
  derived and/or modified protein sequence (wt) from neuraminidase__InfluenzaA__ADN26879

SEQ ID NO: 19924 - protein, 469 aa, Artificial Sequence; identical to SEQ ID NO: 16738
  derived and/or modified protein sequence (wt) from neuraminidase__InfluenzaA__ADN26880

SEQ ID NO: 19925 - protein, 469 aa, Artificial Sequence; identical to SEQ ID NO: 16738
  derived and/or modified protein sequence (wt) from neuraminidase__InfluenzaA__ADN26881

SEQ ID NO: 19926 - protein, 469 aa, Artificial Sequence; identical to SEQ ID NO: 16738
  derived and/or modified protein sequence (wt) from neuraminidase__InfluenzaA__ADN26882

SEQ ID NO: 19927 - protein, 469 aa, Artificial Sequence; identical to SEQ ID NO: 16738
  derived and/or modified protein sequence (wt) from neuraminidase__InfluenzaA__ADN26883

SEQ ID NO: 19928 - protein, 470 aa, Artificial Sequence
  derived and/or modified protein sequence (wt) from neuraminidase__InfluenzaA__ADN89064
MNPNQKIITIGSISIAIGIISLMLQIGNIISIWASHSIQTGSQNNTGICNQRIITYENSTWVNHTYVNINNTNVVAGEDKTSVTLAGNSSLCSISGWAIYTKDNSIRIGSKGDVFVIREPFISCSHLECRTFFLTQGALLNDKHSNGTVKDRSPYRALMSCPLGEAPSPYNSKFESVAWSASACHDGMGWLTIGISGPDNGAVAVLKYNGIITGTIKSWKKQILRTQESECVCMNGSCFTIMTDGPSNKAASYKIFKIEKGKVTKSIELNAPNFYYEECSCYPDTGIVMCVCRDNWHGSNRPWVSFNQNLDYQIGYICSGVFGDNPRPEDGEGSCNPVTVDGANGVKGFSYKYGNGVWIGRTKSNRLRRGFEMIWDPNGWTNTDSDFSVKQDVVAITDWSGYSGSFVQHPELTGLDCIRPCFWVELVRGLPRENTTIWTSGSSISFCGVNSDTANWSWPDGAELPFTIDK

SEQ ID NO: 19929 - protein, 470 aa, Artificial Sequence; identical to SEQ ID NO: 17461
  derived and/or modified protein sequence (wt) from neuraminidase__InfluenzaA__ADN89075

SEQ ID NO: 19930 - protein, 470 aa, Artificial Sequence
  derived and/or modified protein sequence (wt) from neuraminidase__InfluenzaA__ADN89086
MNPNQKIITIGSISIAIGIISLMLQIGNIISIWASHSIQTGSQNNTGICNQRIITYENSTWVNHTYVNINNTNVVAGEDKTSVTLAGNSSLCSISGWAIYTKDNSIRIGSKGDVFVIREPFISCSHLECRTFFLTQGALLNDKHSNGTVKDRSPYRALMSCPLGEAPSPYNSKFESVAWSASACHDGMGWLTIGISGPDNGAVAVLKYNGIITGTIKSWKKQILRTQESECVCMNGSCFTIMTDGPSNKTASYKIFKIEKGKVTKSIELNAPNFYYEECSCYPDTGIVMCVCRDNWHGSNRPWVSFNQNLDYQIGYICSGVFGDNPRPEDGEGSCNPVTVDGANGVKGFSYKYGNGVWIGRTKSNRLRKGFEMIWDPNGWTNTDSDFSVKQDVVAITDWSGYSGSFVQHPELTGLDCIRPCFWVELVRGLPRENTTIWTSGSSISFCGVNSDTANWSWPDGAELPFTIDK

SEQ ID NO: 19931 - protein, 470 aa, Artificial Sequence; identical to SEQ ID NO: 17461
  derived and/or modified protein sequence (wt) from neuraminidase__InfluenzaA__ADN89097

SEQ ID NO: 19932 - protein, 470 aa, Artificial Sequence
  derived and/or modified protein sequence (wt) from neuraminidase__InfluenzaA__ADN89108
MNPNQKIITIGSISIAIGIISLMLQIGNIISIWASHSIQTGSQNNTGICNQRIITYENSTWVNHTYVNINNTNVVAGEDKTSVTLAGNSSLCSISGWAIYTKDNSIRIGSKGDVFVIREPFISCSHLECRTFFLTQGALLNDKHSNGTVKDRSPYRALMSCPLGEAPSPYNSKFESVAWSASACHDGMGWLTIGISGPDNGAVAVLKYNGIITGTIKSWKKQILRTQESECVCMNGSCFTIMTDGPSNKAASYKIFKIEKGKVTKSIELNAPNFYYEECSCYPDTGIVMCVCRDNWHGSNRPWVSFNQNLDYQIGYICSGVFGDNPRPEDGEGSCNPVTVDGANGVKGFSYKYGNGVWIGRTKSNRLRKGFEMIWDPNGWTNTDSDFSVKQDVVSITDWSGYSGSFVQHPELTGLDCIRPCFWVELVRGLPRENTTIWTSGSSISFCGVNSDTANWSWPDGAELPFTIDK

SEQ ID NO: 19933 - protein, 470 aa, Artificial Sequence
  derived and/or modified protein sequence (wt) from neuraminidase__InfluenzaA__ADN89119
MNPNQKIITIGSISIAIGIISLMLQIGNIISIWASHSIQTGSQNNTGICNQRIITYENSTWVNHTYVNINNTNVVAGEDKTSVTLAGNSSLCSISGWAIYTKDNSIRIGSKGDVFVIREPFISCSHLECRTFFLTQGALLNDKHSNGTVKDRSPYRALMSCPLGEAPSPYNSKFESVAWSASACHDGMGWLTIGISGPDNGAVAVLKYNGIITGTIKSWKKQILRTQESECVCMNGSCFTIMTDGPSNKAASYKIFKIEKGKVTKSIELNAPNFYYEECSCYPDTGIVMCVCRDNWHGSNRPWVSFNQNLDYQIGYICSGVFGDNPRPEDGEGSCNPVTVNGADGVKGFSYKYGNGVWIGRTKSNRLRKGFEMIWDPNGWTNTDSDFSVKQDVVAITDWSGYSGSFVQHPELTGLDCTRPCFWVELVRGLPRENTTIWTSGSSISFCGVNSDTANWSWPDGAELPFTIDK

SEQ ID NO: 19934 - protein, 470 aa, Artificial Sequence
  derived and/or modified protein sequence (wt) from neuraminidase__InfluenzaA__ADN89130
MNPNQKIITIGSISIAIGIISLMLQIGNIISIWASHSIQTGSQNNTGICNQRIITYENSTWVNHTYVNINNTNVVAGEDKTSVTLAGNSSLCSISGWAIYTKDNSIRIGSKGDVFVIREPFISCSHLECRTFFLTQGALLNDKHSNGTVKDRSPYRALMSCPLGEAPSPYNSNFESVAWSASACHDGMGWLTIGISGPDNGAVAVLKYNGIITGTIKSWKKQILRTQESECVCMNGSCFTIMTDGPSNKAASYKIFKIEKGKVTKSIELNAPNFYYEECSCYPDTGIVMCVCRDNWHGSNRPWVSFNQNLDYQIGYICSGVFGDNPRPEDGEGSCNPVTVDGANGVKGFSYKYGNGVWIGRTKSNRLRKGFEMIWDPNGWTNTDSDFSVKQDVVAITDWSGYSGSFVQHPELTGLDCIRPCFWVELVRGLPRENTTIWTSGSSISFCGVNGDTANWSWPDGAELPFTIDK

SEQ ID NO: 19935 - protein, 470 aa, Artificial Sequence; identical to SEQ ID NO: 19932
  derived and/or modified protein sequence (wt) from neuraminidase__InfluenzaA__ADN89141

SEQ ID NO: 19936 - protein, 470 aa, Artificial Sequence
  derived and/or modified protein sequence (wt) from neuraminidase__InfluenzaA__ADN89152
MNPNQKIITIGSISIAIGIISLMLQIGNIISIWASHSIQTGSQNNTGICNQRIITYENSTWVNHTYVNINNTNVVAGEDKTSVTLAGNSSLCSISGWAIYTKDNSIRIGSKGDVFVIREPFISCSHLECRTFFLTQGALLNDKHSNGTVKDRSPYRALMSCPLGEAPSPYNSKFESVAWSASACHDGMGWLTIGISGPDNGAVAVLKYNGIITGTIKSWKKQILRTQESECVCMNGSCFTIMTDGPSNKAASYKIFKIEKGKVTKSIELNAPNFYYEECSCYPDTGIVMCVCRDNWHGSNRPWVSFNQNLDYQIGYICSGVFGDNPRPEDGEGSCNPVTIDGANGVKGFSYKYGNGVWIGRTKSNRLRKGFEMIWDPNGWTNTDSDFSVKQDVVAITDWSGYSGSFVQHPELTGLDCIRPCFWVELVRGLPRENTTIWTSGSSISFCGVNSDTANWSWPDGAELPFTIDK

SEQ ID NO: 19937 - protein, 470 aa, Artificial Sequence
  derived and/or modified protein sequence (wt) from neuraminidase__InfluenzaA__ADN89163
MNPNQRIITIGSISIAIGIISLMLQIGNIISIWASHSIQTGSQNNTGICNQRIITYENSTWVNHTYVNINNTNVVAGEDKTSVTLAGNSSLCSISGWAIYTKDNSIRIGSKGDVFVIREPFISCSHLECRTFFLTQGALLNDKHSNGTAKDRSPYRALMSCPLGEAPSPYNSKFESVAWSASACHDGMGWLTIGISGPDNGAVAVLKYNGIITGTIKSWKKQILRTQESECVCMNGSCFTIMTDGPSNKAASYKIFKIEKGKVTKSIELNAPNFYYEECSCYPDTGIVMCVCRDNWHGSNRPWVSFNQNLDYQIGYICSGVFGDNPRPEDGEGSCNPVTVDGANGVKGFSYKYGNGVWIGRTKSNRLRKGFEMIWDPNGWTNTDSDFSVKQDVVAITDWSGYSGSFVQHPELTGLDCIRPCFWVELVRGLPRENTTIWTSGSSISFCGVNSDTANWSWPDGAELPFTIDK

SEQ ID NO: 19938 - protein, 470 aa, Artificial Sequence; identical to SEQ ID NO: 18930
  derived and/or modified protein sequence (wt) from neuraminidase__InfluenzaA__ADN89174

SEQ ID NO: 19939 - protein, 470 aa, Artificial Sequence; identical to SEQ ID NO: 19932
  derived and/or modified protein sequence (wt) from neuraminidase__InfluenzaA__ADN89185

SEQ ID NO: 19940 - protein, 470 aa, Artificial Sequence
  derived and/or modified protein sequence (wt) from neuraminidase__InfluenzaA__ADN89196
MNPNQKIITIGSISIAIGIISLMLQIGSIISIWASHSIQTGSQNNTGICNQRIITYENSTWVNHTYVNINNTNVVAGEDKTSVTLAGNSSLCSISGWAIYTKDNSIRIGSKGDVFVIREPFISCSHLECRTFFLTQGALLNDKHSNGTVKDRSPYRALMSCPLGEAPSPYNSKFESVAWSASACHDGMGWLTIGISGPDNGAVAVLKYNGIITGTIKSWKKQILRTQESECVCMNGSCFTIMTDGPSNKAASYKIFKIEKGKVTKSIELNAPNFYYEECSCYPDTGIVMCVCRDNWHGSNRPWVSFNQNLDYQMGYICSGVFGDNPRPEDGEGSCNPVTVDGANGVKGFSYKYGNGVWIGRTKSNRLRKGFEMIWDPNGWTNTDSDFSLKQDVVAITDWSGYSGSFVQHPELTGLDCIRPCFWVELVRGLPRENTTIWTSGSSISFCGVNSDTANWSWPDGAELPFTIDK

SEQ ID NO: 19941 - protein, 470 aa, Artificial Sequence; identical to SEQ ID NO: 19940
  derived and/or modified protein sequence (wt) from neuraminidase__InfluenzaA__ADN89207

SEQ ID NO: 19942 - protein, 470 aa, Artificial Sequence
  derived and/or modified protein sequence (wt) from neuraminidase__InfluenzaA__ADN89218
MNPNQKIITIGSISIAIGIISLMLQIGNIISIWASHSIQPGSQNNTGICNQRIITYENSTWVNHTYVNINNTNVVAGEDKTSVTLAGNSSLCSISGWAIYTKDNSIRIGSKGDVFVIREPFISCSHLECRTFFLTQGALLNDKHSNGTVKDRSPYRALMSCPLGEAPSPYNSKFESVAWSASACHDGMGWLTIGISGPDNGAVAVLKYNGIITGTIKSWKKQILRTQESECVCMNGSCFTIMTDGPSNKAASYKIFKIEKGKVTKSIELNAPNFYYEECSCYPDTGIVMCVCRDNWHGSNRPWVSFNQNLDYQIGYICSGVFGDNPRPEDGEGSCNPVTVDGANGVKGFSYKYGNGVWIGRTKSNRLRKGFEMIWDPNGWTNTDSDFSVKQDVVAITDWSGYSGSFVQHPELTGLDCIRPCFWVELVRGLPRENTTIWTSGSSISFCGVNGDTANWSWPDGAELPFTIDK

SEQ ID NO: 19943 - protein, 470 aa, Artificial Sequence
  derived and/or modified protein sequence (wt) from neuraminidase__InfluenzaA__ADN89229
MNPNQKIITIGSISIAIGIISLMLQIGNIISIWASHSIQTGSQNNTGICNQRIITYENSTWVNHTYVNINNTNVVAGEDKTSVTLAGNSSLCSISGWAIYTKDNSIRIGSKGDVFVIREPFISCSHLECRTFFLTQGALLNDKHSNGTVKDRSPYRALMSCPLGEAPSPYNSKFESVAWSASACHDGMGWLTIGISGPDNGAVAVLKYNGIITGTIKSWKKQILRTQESECVCMNGSCFTIMTDGPSNKAASYKIFKIEKGKVTKSIELNAPNFYYEECSCYPDTGIVMCVCRDNWHGSNRPWVSFNQNLDYQIGYICSGVFGDNPRPEDGEGSCNPVTVDGANGVKGFSYKYGNGVWIGRTKSNRLRKGFEMIWDPNGWTNTDSDFSVKQDVVATTDWSGYSGSFVQHPELTGLDCIRPCFWVELVRGLPRENTTIWTSGSSISFCGVNSDTANWSWPDGAELPFTIDK

SEQ ID NO: 19944 - protein, 470 aa, Artificial Sequence
  derived and/or modified protein sequence (wt) from neuraminidase__InfluenzaA__ADN89240
MNPNQKIITIGSISIAIGIISLMLQIGNIISIWASHSIQTGSQNNTGICNQRIITYENSTWVNHTYVNINNTNVVAGEDKTSVTLAGNSSLCSISGWAIYTKDNSIRIGSKGDVFVIREPFISCSHLECRTFFLTQGALLNDKHSNGTVKDRSPYRALMSCPLGEAPSPYNSKFESVAWSASACHDGMGWLTIGISGPDNGAVAVLKYNGIITGTIKSWKKQILRTQESECVCMNGSCFTIMTDGPSNKAASYKIFKIEKGKVTKSIELNAPNFYYEECSCYPDTGIVMCVCRDNWHGSNRPWVSFNQNLDYQIGYICSGVFGDNPRPEDGEGSCNPVTVDGANGVKGFSYKYGNGVWIGRTKSNRLRKGFEMIWDPNGWTNTDSDFSVKQDVVAITDWSGYSGSFVQHPELTGLDCIRPCFWVELVRGLPRENTTIWTSGSSISFCGVNGDTANWSWPDGAELPFTIDK

SEQ ID NO: 19945 - protein, 470 aa, Artificial Sequence; identical to SEQ ID NO: 17461
  derived and/or modified protein sequence (wt) from neuraminidase__InfluenzaA__ADN89251

SEQ ID NO: 19946 - protein, 470 aa, Artificial Sequence; identical to SEQ ID NO: 17461
  derived and/or modified protein sequence (wt) from neuraminidase__InfluenzaA__ADN89262

SEQ ID NO: 19947 - protein, 470 aa, Artificial Sequence; identical to SEQ ID NO: 17461
  derived and/or modified protein sequence (wt) from neuraminidase__InfluenzaA__ADN89273

SEQ ID NO: 19948 - protein, 470 aa, Artificial Sequence; identical to SEQ ID NO: 17461
  derived and/or modified protein sequence (wt) from neuraminidase__InfluenzaA__ADN89284

SEQ ID NO: 19949 - protein, 470 aa, Artificial Sequence; identical to SEQ ID NO: 17461
  derived and/or modified protein sequence (wt) from neuraminidase__InfluenzaA__ADN89295

SEQ ID NO: 19950 - protein, 470 aa, Artificial Sequence; identical to SEQ ID NO: 17461
  derived and/or modified protein sequence (wt) from neuraminidase__InfluenzaA__ADN89306

SEQ ID NO: 19951 - protein, 470 aa, Artificial Sequence
  derived and/or modified protein sequence (wt) from neuraminidase__InfluenzaA__ADN89317
MNPNQRIITIGSISIAIGIISLMLQIGNIISIWASHSIQTGSQNNTGICNQRIITYENSTWVNHTYVNINSTNVVAGEDKTSVTLAGNSSLCSISGWAIYTKDNSIRIGSKGDVFVIREPFISCSHLECRTFFLTQGALLNDKHSNGTVKDRSPYRALMSCPLGEAPSPYNSKFESVAWSASACHDGMGWLTIGISGPDNGAVAVLKYNGIITGTIKSWKKQILRTQESECVCMNGSCFTIMTDGPSNKAASYKIFKIEKGKVTKSIELNAPNFYYEECSCYPDTGIVMCVCRDNWHGSNRPWVSFNQNLDYQIGYICSGVFGDNPRPEDGEGSCNPVTVDGANGVKGFSYKYGNGVWIGRTKSNRLRKGFEMIWDPNGWTNTDSDFSVKQDVVAITDWSGYSGSFVQHPELTGLDCIRPCFWVELVRGLPRENTTIWTSGSSISFCGVNGDTANWSWPDGAELPFTIDK

SEQ ID NO: 19952 - protein, 470 aa, Artificial Sequence
  derived and/or modified protein sequence (wt) from neuraminidase__InfluenzaA__ADN89328
MNPNQKIITIGSISIAIGIISLMLQIGSIISIWASHSIQTGSQNNTGICNQRIITYENSTWVNHTYVNINNTNVVAGEDKTSVTLAGNSSLCSISGWAIYTKDNSIRIGSKGDVFVIREPFISCSHLECRTFFLTQGALLNDKHSNGTVKDRSPYRALMSCPLGEAPSPYNSKFESVAWSASACHDGMGWLTIGISGPDNGAVAVLKYNGIITGTIKSWKKQILRTQESECVCMNGSCFTIMTDGPSNKAASYKIFKIEKGKVTKSIELNAPNFYYEECSCYPDTGIVMCVCRDNWHGSNRPWVSFNQNLDYQIGYICSGVFGDNPRPEDGEGSCNPVTVDGANGVKGFSYKYGNGVWIGRTKSNRLRKGFEMIWDPNGWTNTDSDFSVKQDVVAITDWSGYSGSFVQHPELTGLDCIRPCFWVELVRGLPRENTTIWASGSSISFCGVNSDTANWSWPDGAELPFTIDK

SEQ ID NO: 19953 - protein, 470 aa, Artificial Sequence; identical to SEQ ID NO: 19937
  derived and/or modified protein sequence (wt) from neuraminidase__InfluenzaA__ADN89339

SEQ ID NO: 19954 - protein, 470 aa, Artificial Sequence; identical to SEQ ID NO: 19943
  derived and/or modified protein sequence (wt) from neuraminidase__InfluenzaA__ADN89350

SEQ ID NO: 19955 - protein, 470 aa, Artificial Sequence
  derived and/or modified protein sequence (wt) from neuraminidase__InfluenzaA__ADN89361
MNPNQKIITIGSISIAIGIISLMLQIGSIISIWASHSIQTGSQNNTGICNQRIITYENSTWVNHTYVNINNTNVVAGEDKTSVTLAGNSSLCSISGWAIYTKDNSIRIGSKGDVFIIREPFISCSHLECRTFFLTQGALLNDKHSNGTVKDRSPYRALMSCPLGEAPSPYNSKFESVAWSASACHDGMGWLTIGISGPDNGAVAVLKYNGIITGTIKSWKKQILRTQESECVCMNGSCFTIMTDGPSNKAASYKIFKIEKGKVTKSIELNAPNFYYEECSCYPDTGIVMCVCRDNWHGSNRPWVSFNQNLDYQIGYICSGVFGDNPRPEDGEGSCNPVTVDGANGVKGFSYKYGNGVWIGRTKSNRLRKGFEMIWDPNGWTNTDSDFSVKQDVVAITDWSGYSGSFVQHPELTGLDCIRPCFWVELVRGLPRENTTIWTSGSSISFCGVNSDTANWSWPDGAELPFTIDK

SEQ ID NO: 19956 - protein, 470 aa, Artificial Sequence
  derived and/or modified protein sequence (wt) from neuraminidase__InfluenzaA__ADN89372
MNPNQKIITIGSISIAIGIISLMLQIGNIISIWASHSIQTGSQNNTGICNQRIITYENSTWVNHTYVNINNTNIVAGEDKTSVTLAGNSSLCSISGWAIYTKDNSIRIGSKGDVFVIREPFISCSHLECRTFFLTQGALLNDKHSNGTVKDRSPYRALMSCPLGEAPSPYNSKFESVAWSASACHDGMGWLTIGISGPDNGAVAVLKYNGIITGTIKSWKKQILRTQESECVCMNGSCFTIMTDGPSNKAASYKIFKIEKGKVTKSIELNAPNFYYEECSCYPDTGIVMCVCRDNWHGSNRPWVSFNQNLDYQIGYICSGVFGDNPRPEDGEGSCNPVTVNGADGVKGFSYKYGNGVWIGRTKSNRLRKGFEMIWDPNGWTNTDSDFSVKQDVVAITDWSGYSGSFVQHPELTGLDCIRPCFWVELVRGLPRENTTIWTSGSSISFCGVNSDTANWSWPDGAELPFTIDK

SEQ ID NO: 19957 - protein, 470 aa, Artificial Sequence; identical to SEQ ID NO: 19932
  derived and/or modified protein sequence (wt) from neuraminidase__InfluenzaA__ADN89383

SEQ ID NO: 19958 - protein, 470 aa, Artificial Sequence
  derived and/or modified protein sequence (wt) from neuraminidase__InfluenzaA__ADN89405
MNPNQKIITIGSISIAIGIISLMLQIGSIISIWASHSIQTGSQNNTGICNQRIITYENSTWVNHTYVNINNTNVVAGEDKTSVTLAGNSSLCSTSGWAIYTKDNSIRIGSKGDVFVIREPFISCSHLECRTFFLTQGALLNDKHSNGTVKDRSPYRALMSCPLGEAPSPYNSKFESVAWSASACHDGMGWLTIGISGPDNGAVAVLKYNGIITGTIKSWKKQILRTQESECVCMNGSCFTIMTDGPSNKAASYKIFKIEKGKVTKSIELNAPNFYYEECSCYPDTGIVMCVCRDNWHGSNRPWVSFNQNLDYQIGYICSGVFGDNPRPEDGEGSCNPVTVDGANGVKGFSYKYGNGVWIGRTKSNRLRKGFEMIWDPNGWTNTDSDFSVKQDVVAITDWSGYSGSFVQHPELTGLDCIRPCFWVELVRGLPRENTTIWTSGSSISFCGVNSDTANWSWPDGAELPFTIDK

SEQ ID NO: 19959 - protein, 470 aa, Artificial Sequence
  derived and/or modified protein sequence (wt) from neuraminidase__InfluenzaA__ADN89416
MNPNQKIITIGSISIAIGIISLMLQIGNIISIWASHSIQTGSQNNTGICNQRIITYENSTWVNHTYVNINNTNVVAGEDKTSVTLAGNSSLCSISGWAIYTKDNSIRIGSKGDVFVIREPFISCSHLECRTFFLTQGALLNDKHSNGTVKDRSPYRALMSCPLGEAPSPYNSKFESVAWSASACHDGMGWLTIGISGPDNGAVAVLKYNGIITGTIKSWKKQILRTQESECVCMNGSCFTIMTDGPSNKAASYKIFKIEKGKVTKSIELNAPNFYYEECSCYPDTGIVMCVCRDNWHGSNRPWVSFNQNLDYQIGYICSGVLGDNPRPEDGEGSCNPVTVDGANGVKGFSYKYGNGVWIGRTKSNRLRKGFEMIWDPNGWTNTDSDFSVKQDVVAITDWSGYSGSFVQHPELTGLDCIRPCFWVELVRGLPRENTTIWTSGSSISFCGVNGDTANWSWPDGAELPFTIDK

SEQ ID NO: 19960 - protein, 470 aa, Artificial Sequence
  derived and/or modified protein sequence (wt) from neuraminidase__InfluenzaA__ADN89427
MNPNQKIITIGSISIAIGIISLMLQIGSIISIWASHSIQTGSQNNTGICNQRIITYENSTWVNHTYVNINNTNVVAGEDKTSVTLAGNSSLCSISGWAIYTKDNSIRIGSKGDVFVIREPFISCSHLECRTFFLTQGALLNDKHSNGTVKDRSPYRALMSCPLGEAPSPYNSKFESVAWSASACHDGMGWLTIGISGPDNGAVAVLKYNGIITGTIKSWKKQILRTQESECVCMNGSCFTIMTDGPSNKAASYKIFKIEKGKVTKSIELNAPNFYYEECSCYPDTGIVMCVCRDNWHGSNRPWVSFNQNLDYQIGYICSGVFGDNPRPEDGEGSCNPVTVDGANGVKGFSYKYGNGVWIGRTKSNRLRKGFEMIWDPNGWTNTDSDFSVKQDVVAITDWSGYSGSFVQHPELTGLDCIRPCFWVELVRGLPRENTTIWTSGSSISFCGVDSDAADWSWPDGAELPFTIDK

SEQ ID NO: 19961 - protein, 470 aa, Artificial Sequence; identical to SEQ ID NO: 17461
  derived and/or modified protein sequence (wt) from neuraminidase__InfluenzaA__ADN89438

SEQ ID NO: 19962 - protein, 470 aa, Artificial Sequence
  derived and/or modified protein sequence (wt) from neuraminidase__InfluenzaA__ADN89449
MNPNQKIITIGSISIAIGIISLMLQIGNIISIWASHSIQTGSQNNTGICNQRIITYENSTWVNHTYVNINNTNVVAGEDKPSVTLAGNSSLCSISGWAIYTKDNSIRIGSKGDVFVIREPFISCSHLECRTFFLTQGALLNDKHSNGTVKDRSPYRALMSCPLGEAPSPYNSKFESVAWSASACHDGMGWLTIGISGPDNGAVAVLKYNGIITGTIKSWKKQILRTQESECVCMNGSCFTIMTDGPSNKAASYKIFKIEKGKVTKSIELNAPNFYYEECSCYPDTGIVMCVCRDNWHGSNRPWVSFNQNLDYQIGYICSGVFGDNPRPEDGEGSCNPVTVDGANGVKGFSYKYGNGVWIGRTKSNRLRKGFEMIWDPNGWTNTDSDFSVKQDVVAITDWSGYSGSFVQHPELTGLDCIRPCFWVELVRGLPRENTTIWTSGSSISFCGVNSDTANWSWPDGAELPFTIDK

SEQ ID NO: 19963 - protein, 470 aa, Artificial Sequence; identical to SEQ ID NO: 18930
  derived and/or modified protein sequence (wt) from neuraminidase__InfluenzaA__ADN89460

SEQ ID NO: 19964 - protein, 470 aa, Artificial Sequence; identical to SEQ ID NO: 17461
  derived and/or modified protein sequence (wt) from neuraminidase__InfluenzaA__ADN89482

SEQ ID NO: 19965 - protein, 470 aa, Artificial Sequence
  derived and/or modified protein sequence (wt) from neuraminidase__InfluenzaA__ADN89493
MNPNQKIITIGSISIAIGIISLMLQIGNIISIWASHSIQTESQNNTGICNQRIITYENSTWVNHTYVNINNTNVVAGEDKTSVTLAGNSSLCSISGWAIYTKDNSIRIGSKGDVFVIREPFISCSHLECRTFFLTQGALLNDKHSNGTVKDRSPYRALMSCPLGEAPSPYNSKFESVAWSASACHDGMGWLTIGISGPDNGAVAVLKYNGIITGTIKSWKKQILRTQESECVCMNGSCFTIMTDGPSNKAASYKIFKIEKGKVTKSIELNAPNFYYEECSCYPDTGIVMCVCRDNWHGSNRPWVSFNQNLDYQMGYICSGVFGDNPRPEDGEGSCNPVTVDGANGVKGFSYKYGNGVWIGRTKSNRLRKGFEMIWDPNGWTNTDSDFSVKQDVVAITDWSGYSGSFVQHPELTGLDCIRPCFWVELVRGLPRENTTIWTSGSSISFCGVNSDTANWSWPDGAELPFTIDK

SEQ ID NO: 19966 - protein, 470 aa, Artificial Sequence; identical to SEQ ID NO: 17461
  derived and/or modified protein sequence (wt) from neuraminidase__InfluenzaA__ADN89504

SEQ ID NO: 19967 - protein, 470 aa, Artificial Sequence
  derived and/or modified protein sequence (wt) from neuraminidase__InfluenzaA__ADN89515
MNPNQKIITIGSISIAIGIISLMLQIGNIISIWASHSIQTGSQNNTGICNQRIITYENSTWVNHTYVNINNTNVVAGEDKTSVTLAGNSSLCSISGWAIYTKDNSIRIGSKGDVFVIREPFISCSHLECRTFFLTQGALLNDKHSNGTVKDRSPYRALMSCPLGEAPSPYNSKFESVAWSASACHDGMGWLTIGISGPDNGAVAVLKYNGIITGTIKSWKKQILRTQESECVCMNGSCFTIMTDGPSNKAASYKIFKIEKGKVTKSIELNAPNFYYEECSCYPDTGIVMCVCRDNWHGSNRPWVSFNQNLDYQIGYICSGVFGDNPRPEDGEGSCNPVTVDGANGVKGFSYKYGNGVWIGRTKSNRLRKGFEMIWDPNGWTNTDSDFTVKQDVVAITDWSGYSGSFVQHPELTGLDCIRPCFWVELVRGLPRENTTIWTSGSSISFCGVNSDTANWSWPDGAELPFTIDK

SEQ ID NO: 19968 - protein, 470 aa, Artificial Sequence; identical to SEQ ID NO: 17461
  derived and/or modified protein sequence (wt) from neuraminidase__InfluenzaA__ADN89526

SEQ ID NO: 19969 - protein, 470 aa, Artificial Sequence; identical to SEQ ID NO: 19932
  derived and/or modified protein sequence (wt) from neuraminidase__InfluenzaA__ADN89537

SEQ ID NO: 19970 - protein, 470 aa, Artificial Sequence; identical to SEQ ID NO: 17461
  derived and/or modified protein sequence (wt) from neuraminidase__InfluenzaA__ADN89548

SEQ ID NO: 19971 - protein, 470 aa, Artificial Sequence; identical to SEQ ID NO: 17461
  derived and/or modified protein sequence (wt) from neuraminidase__InfluenzaA__ADN89570

SEQ ID NO: 19972 - protein, 470 aa, Artificial Sequence
  derived and/or modified protein sequence (wt) from neuraminidase__InfluenzaA__ADN89581
MNPNQKIITIGSISIAIGIISLMLQIGNIISIWASHSIQTGSQNNTGICNQRIITYENSTWVNHTYVNINNTNVVAGEDKTSVTLAGNSSLCSISGWAIYTKDNSIRIGSKGDVFVIREPFISCSHLECRTFFLTQGALLNDKHSNGTVKDRSPYRALMSCPLGEAPSPYNSKFESVAWSASACHDGMGWLTIGISGPDNGAVAVLKYNGIITGTIKSWKKQILRTQESECVCMNGSCFTIMTDGPSNKTASYKIFKIEKGKVTKSIELNAPNFYYEECSCYPDTGIVMCVCRDNWHGSNRPWVSFNQNLDYQIGYICSGVFGDNPRPEDGEGSCNPVTVDGANGVKGFSYKYGNGVWIGRTKSNRLRKGFEMIWDPNGWTNTDSDFSVKQDVVAITDWSGYSGSFVQHPELTGLDCIRPCFWVELVRGLPRENTTIWTSGSSISFCGVNGDTANWSWPDGAELPFTIDK

SEQ ID NO: 19973 - protein, 470 aa, Artificial Sequence; identical to SEQ ID NO: 18930
  derived and/or modified protein sequence (wt) from neuraminidase__InfluenzaA__ADN89592

SEQ ID NO: 19974 - protein, 470 aa, Artificial Sequence; identical to SEQ ID NO: 18930
  derived and/or modified protein sequence (wt) from neuraminidase__InfluenzaA__ADN89603

SEQ ID NO: 19975 - protein, 470 aa, Artificial Sequence; identical to SEQ ID NO: 19940
  derived and/or modified protein sequence (wt) from neuraminidase__InfluenzaA__ADN89614

SEQ ID NO: 19976 - protein, 470 aa, Artificial Sequence; identical to SEQ ID NO: 19959
  derived and/or modified protein sequence (wt) from neuraminidase__InfluenzaA__ADN89625

SEQ ID NO: 19977 - protein, 470 aa, Artificial Sequence; identical to SEQ ID NO: 17461
  derived and/or modified protein sequence (wt) from neuraminidase__InfluenzaA__ADN89636

SEQ ID NO: 19978 - protein, 470 aa, Artificial Sequence; identical to SEQ ID NO: 17461
  derived and/or modified protein sequence (wt) from neuraminidase__InfluenzaA__ADN89647

SEQ ID NO: 19979 - protein, 470 aa, Artificial Sequence; identical to SEQ ID NO: 17461
  derived and/or modified protein sequence (wt) from neuraminidase__InfluenzaA__ADN89658

SEQ ID NO: 19980 - protein, 470 aa, Artificial Sequence; identical to SEQ ID NO: 18930
  derived and/or modified protein sequence (wt) from neuraminidase__InfluenzaA__ADN89669

SEQ ID NO: 19981 - protein, 470 aa, Artificial Sequence; identical to SEQ ID NO: 17461
  derived and/or modified protein sequence (wt) from neuraminidase__InfluenzaA__ADN89680

SEQ ID NO: 19982 - protein, 470 aa, Artificial Sequence; identical to SEQ ID NO: 17461
  derived and/or modified protein sequence (wt) from neuraminidase__InfluenzaA__ADN89691

SEQ ID NO: 19983 - protein, 470 aa, Artificial Sequence; identical to SEQ ID NO: 19959
  derived and/or modified protein sequence (wt) from neuraminidase__InfluenzaA__ADN89702

SEQ ID NO: 19984 - protein, 470 aa, Artificial Sequence; identical to SEQ ID NO: 17461
  derived and/or modified protein sequence (wt) from neuraminidase__InfluenzaA__ADN89713

SEQ ID NO: 19985 - protein, 470 aa, Artificial Sequence; identical to SEQ ID NO: 17461
  derived and/or modified protein sequence (wt) from neuraminidase__InfluenzaA__ADN89724

SEQ ID NO: 19986 - protein, 470 aa, Artificial Sequence; identical to SEQ ID NO: 17461
  derived and/or modified protein sequence (wt) from neuraminidase__InfluenzaA__ADN89735

SEQ ID NO: 19987 - protein, 470 aa, Artificial Sequence; identical to SEQ ID NO: 17461
  derived and/or modified protein sequence (wt) from neuraminidase__InfluenzaA__ADN89746

SEQ ID NO: 19988 - protein, 470 aa, Artificial Sequence; identical to SEQ ID NO: 17461
  derived and/or modified protein sequence (wt) from neuraminidase__InfluenzaA__ADN89757

SEQ ID NO: 19989 - protein, 470 aa, Artificial Sequence; identical to SEQ ID NO: 17461
  derived and/or modified protein sequence (wt) from neuraminidase__InfluenzaA__ADN89768

SEQ ID NO: 19990 - protein, 470 aa, Artificial Sequence; identical to SEQ ID NO: 19936
  derived and/or modified protein sequence (wt) from neuraminidase__InfluenzaA__ADN89779

SEQ ID NO: 19991 - protein, 470 aa, Artificial Sequence; identical to SEQ ID NO: 17461
  derived and/or modified protein sequence (wt) from neuraminidase__InfluenzaA__ADN89790

SEQ ID NO: 19992 - protein, 470 aa, Artificial Sequence
  derived and/or modified protein sequence (wt) from neuraminidase__InfluenzaA__ADN89801
MNPNQKIITIGSISIAIGTISLMLQIGNIISIWASHSIQTGSQNNTGICNQRIITYKNSTWVNHTYVNINNTNVVAGEDKTSVTLAGNSSLCSISGWAIYTKDNSIRIGSKGDVFVIREPFISCSHLECRTFFLTQGALLNDKHSNGTVKDRSPYRALMSCPLGEAPSPYNSKFESVAWSASACHDGMGWLTIGISGPDNGAVAVLKYNGIITGTIKSWKKQILRTQESECVCMNGSCFTIMTDGPSNKAASYKIFKIEKGKVTKSIELNAPNFYYEECSCYPDTGIVMCVCRDNWHGSNRPWVSFNQNLDYQIGYICSGVFGDNPRPEDGEGSCNPVTVDGANGVKGFSYKYGNGVWIGRTKSNRLRKGFEMIWDPNGWTNTDSDFSVKQDVVAITDWSGYSGSFVQHPELTGLDCIRPCFWVELVRGLPRENTTIWTSGSSISFCGVNSDTANWSWPDGAELPFTIDK

SEQ ID NO: 19993 - protein, 470 aa, Artificial Sequence
  derived and/or modified protein sequence (wt) from neuraminidase__InfluenzaA__ADN89823
MNPNQKIITIGSISIAIGIISLMLQIGSIISIWASHSIHTGSQNNTGICNQRIITYENSTWVNHTYVNINNTNVVAGEDKTSVTLAGNSSLCSISGWAIYTKDNSIRIGSKGDVFVIREPFISCSHLECRTFFLTQGALLNDKHSNGTVKDRSPYRALMSCPLGEAPSPYNSKFESVAWSASACHDGMGWLTIGISGPDNGAVAVLKYNGIITGTIKSWKKQILRTQESECVCMNGSCFTIMTDGPSNKAASYKIFKIEKGKVTKSIELNAPNFYYEECSCYPDTGIVMCVCRDNWHGSNRPWVSFNQNLDYQIGYICSGVFGDNPRPEDGEGSCNPVTVDGANGVKGFSYKYGNGVWIGRTKSNRLRKGFEMIWDPNGWTNTDSDFSVKQDVVAITDWSGYSGSFVQHPELTGLDCIRPCFWVELVRGLPRENTTIWTSGSSISFCGVNSDTANWSWPDGAELPFTIDK

SEQ ID NO: 19994 - protein, 470 aa, Artificial Sequence; identical to SEQ ID NO: 18930
  derived and/or modified protein sequence (wt) from neuraminidase__InfluenzaA__ADN89834

SEQ ID NO: 19995 - protein, 470 aa, Artificial Sequence; identical to SEQ ID NO: 19932
  derived and/or modified protein sequence (wt) from neuraminidase__InfluenzaA__ADN89845

SEQ ID NO: 19996 - protein, 470 aa, Artificial Sequence; identical to SEQ ID NO: 17461
  derived and/or modified protein sequence (wt) from neuraminidase__InfluenzaA__ADN89856

SEQ ID NO: 19997 - protein, 469 aa, Artificial Sequence; identical to SEQ ID NO: 19410
  derived and/or modified protein sequence (wt) from neuraminidase__InfluenzaA__ADN89867

SEQ ID NO: 19998 - protein, 469 aa, Artificial Sequence; identical to SEQ ID NO: 19410
  derived and/or modified protein sequence (wt) from neuraminidase__InfluenzaA__ADN89878

SEQ ID NO: 19999 - protein, 469 aa, Artificial Sequence; identical to SEQ ID NO: 19410
  derived and/or modified protein sequence (wt) from neuraminidase__InfluenzaA__ADN89889

SEQ ID NO: 20000 - protein, 469 aa, Artificial Sequence; identical to SEQ ID NO: 19410
  derived and/or modified protein sequence (wt) from neuraminidase__InfluenzaA__ADN89900

SEQ ID NO: 20001 - protein, 469 aa, Artificial Sequence; identical to SEQ ID NO: 19410
  derived and/or modified protein sequence (wt) from neuraminidase__InfluenzaA__ADN89911

SEQ ID NO: 20002 - protein, 469 aa, Artificial Sequence
  derived and/or modified protein sequence (wt) from neuraminidase__InfluenzaA__ADN89922
MNPNQKIITIGSVSLTISTICFFMQIAILITTVTLHFKQYKFNSPPNNQVMLCEPTIIERNITEIVYLTNTTIEKEICPKLAEYRNWSKPQCDITGFAPFSKDNSIRLSAGGDIWVTREPYVSCDPDKCYQFALGQGTTLNNVHSNNTVRDRTPYRTLLMNELGVPFHLGTKQVCIAWSSSSCHDGKAWLHVCITGDDKNATASFIYNGRLVDSVVSWSKEILRTQESECVCINGTCTVVMTDGSASGKADTKILFIEEGKIVHTSTLSGSAQHVEECSCYPRYPGVRCVCRDNWKGSNRPIVDINIKDHSIVSSYVCSGLVGDTPRKNDSSSSSHCLDPNNEEGGHGVKGWAFDDGNDVWMGRTINETSRLGYETFKVIEGWSNPKSKLQINRQVIVDRGNRSGYSGIFSVEGKSCINRCFYVELIRGRKEETEVLWTSNSIVVFCGTSGTYGTGSWPDGADLNIMPI

SEQ ID NO: 20003 - protein, 469 aa, Artificial Sequence; identical to SEQ ID NO: 19410
  derived and/or modified protein sequence (wt) from neuraminidase__InfluenzaA__ADN89933

SEQ ID NO: 20004 - protein, 469 aa, Artificial Sequence; identical to SEQ ID NO: 19410
  derived and/or modified protein sequence (wt) from neuraminidase__InfluenzaA__ADN89955

SEQ ID NO: 20005 - protein, 469 aa, Artificial Sequence; identical to SEQ ID NO: 19410
  derived and/or modified protein sequence (wt) from neuraminidase__InfluenzaA__ADN89966

SEQ ID NO: 20006 - protein, 469 aa, Artificial Sequence; identical to SEQ ID NO: 19410
  derived and/or modified protein sequence (wt) from neuraminidase__InfluenzaA__ADN89977

SEQ ID NO: 20007 - protein, 469 aa, Artificial Sequence; identical to SEQ ID NO: 19410
  derived and/or modified protein sequence (wt) from neuraminidase__InfluenzaA__ADN89988

SEQ ID NO: 20008 - protein, 469 aa, Artificial Sequence; identical to SEQ ID NO: 19410
  derived and/or modified protein sequence (wt) from neuraminidase__InfluenzaA__ADN89999

SEQ ID NO: 20009 - protein, 469 aa, Artificial Sequence; identical to SEQ ID NO: 19410
  derived and/or modified protein sequence (wt) from neuraminidase__InfluenzaA__ADN90010

SEQ ID NO: 20010 - protein, 469 aa, Artificial Sequence; identical to SEQ ID NO: 19410
  derived and/or modified protein sequence (wt) from neuraminidase__InfluenzaA__ADN90021

SEQ ID NO: 20011 - protein, 469 aa, Artificial Sequence; identical to SEQ ID NO: 19410
  derived and/or modified protein sequence (wt) from neuraminidase__InfluenzaA__ADN90032

SEQ ID NO: 20012 - protein, 469 aa, Artificial Sequence; identical to SEQ ID NO: 19410
  derived and/or modified protein sequence (wt) from neuraminidase__InfluenzaA__ADN90043

SEQ ID NO: 20013 - protein, 469 aa, Artificial Sequence; identical to SEQ ID NO: 19410
  derived and/or modified protein sequence (wt) from neuraminidase__InfluenzaA__ADN90054

SEQ ID NO: 20014 - protein, 469 aa, Artificial Sequence; identical to SEQ ID NO: 19410
  derived and/or modified protein sequence (wt) from neuraminidase__InfluenzaA__ADN90065

SEQ ID NO: 20015 - protein, 469 aa, Artificial Sequence; identical to SEQ ID NO: 19410
  derived and/or modified protein sequence (wt) from neuraminidase__InfluenzaA__ADN90076

SEQ ID NO: 20016 - protein, 469 aa, Artificial Sequence; identical to SEQ ID NO: 19410
  derived and/or modified protein sequence (wt) from neuraminidase__InfluenzaA__ADN90087

SEQ ID NO: 20017 - protein, 469 aa, Artificial Sequence; identical to SEQ ID NO: 19410
  derived and/or modified protein sequence (wt) from neuraminidase__InfluenzaA__ADN90098

SEQ ID NO: 20018 - protein, 469 aa, Artificial Sequence; identical to SEQ ID NO: 19410
  derived and/or modified protein sequence (wt) from neuraminidase__InfluenzaA__ADN90109

SEQ ID NO: 20019 - protein, 469 aa, Artificial Sequence; identical to SEQ ID NO: 19410
  derived and/or modified protein sequence (wt) from neuraminidase__InfluenzaA__ADN90120

SEQ ID NO: 20020 - protein, 469 aa, Artificial Sequence; identical to SEQ ID NO: 19410
  derived and/or modified protein sequence (wt) from neuraminidase__InfluenzaA__ADN90131

SEQ ID NO: 20021 - protein, 469 aa, Artificial Sequence; identical to SEQ ID NO: 19410
  derived and/or modified protein sequence (wt) from neuraminidase__InfluenzaA__ADN90142

SEQ ID NO: 20022 - protein, 469 aa, Artificial Sequence; identical to SEQ ID NO: 19410
  derived and/or modified protein sequence (wt) from neuraminidase__InfluenzaA__ADN90153

SEQ ID NO: 20023 - protein, 469 aa, Artificial Sequence; identical to SEQ ID NO: 19410
  derived and/or modified protein sequence (wt) from neuraminidase__InfluenzaA__ADN90164

SEQ ID NO: 20024 - protein, 469 aa, Artificial Sequence; identical to SEQ ID NO: 19410
  derived and/or modified protein sequence (wt) from neuraminidase__InfluenzaA__ADN90186

SEQ ID NO: 20025 - protein, 469 aa, Artificial Sequence; identical to SEQ ID NO: 19410
  derived and/or modified protein sequence (wt) from neuraminidase__InfluenzaA__ADN90197

SEQ ID NO: 20026 - protein, 469 aa, Artificial Sequence
  derived and/or modified protein sequence (wt) from neuraminidase__InfluenzaA__ADN90208
MNPNQKIITIGSVSLTISTICFFMQIAILITTVTLHFKQYKFNSPPNNQVMLCEPTIIERNITEIVYLTNTTIEKEICPKLAEYRNWSKPQCDITGFAPFSKDNSIRLSAGGDIWVTREPYVSCDPDKCYQFALGQGTTLNNVHSNNTVRDRTPYRTLLMNELGVPFHLGTKQVCIAWSSSSCHDGKAWLHVCITGDDKNATASFIYNGRLVDSVVSWSKEILRTQESECVCINGTCTVVMTDGSASGKADTKILFIEEGKIVHTSTLSGSAQHVEECSCYPRYPGVRCVCRDNWKGSNRPIVDINIKDHSIVSSYVCSGLVGDTPRKNDSSSSSHCLDPNNEEGGHGVKGWAFDDGNDVWMGRTINETSRLGYETFKVIEGWSNPKSKLQINRQVIVDRSNRSGYSGIFSVEGKSCINRCFYVELIRGRKEETEVLWTSNSIVVFCGTSGTYGTGSWPDGADLNLMPI

SEQ ID NO: 20027 - protein, 469 aa, Artificial Sequence; identical to SEQ ID NO: 19410
  derived and/or modified protein sequence (wt) from neuraminidase__InfluenzaA__ADN90219

SEQ ID NO: 20028 - protein, 469 aa, Artificial Sequence
  derived and/or modified protein sequence (wt) from neuraminidase__InfluenzaA__ADN92469
MNPNQKIITIGSVSLTISTICFFMQIAILITTVTLHFKQYEFNSPPNNQVMLCEPTIIERNITEIVYLTNTTIEKEICPKLAEYRNWSKPQCDITGFAPFSKDNSIRLSAGGDIWVTREPYVSCDPDKCYQFALGQGTTLNNVHSNNTVRDRTPYRTLLMNELGVPFHLGTKQVCIAWSSSSCHDGKAWLHVCITGDDKNATASFIYNGRLVDSVVSWSKEILRTQESECVCINGTCTVVMTDGSASEKADTKILFIEEGKIVHTSTLSGSAQHVEECSCYPRYPGVRCVCRDNWKGSNRPIVDINIKDHSIVSSYVCSGLVGDTPRKNDSSSSSHCLDPNNEEGGHGVKGWAFDDGNDVWMGRTISEKSRLGYETFKVIEGWSNPKSKLQINRQVIVDRGNRSGYSGIFSVEGKSCINRCFYVELIRGRKEETEVLWTSNSIVVFCGTSGTYGTGSWPDGADINLMPI

SEQ ID NO: 20029 - protein, 469 aa, Artificial Sequence; identical to SEQ ID NO: 19255
  derived and/or modified protein sequence (wt) from neuraminidase__InfluenzaA__ADN92480

SEQ ID NO: 20030 - protein, 469 aa, Artificial Sequence; identical to SEQ ID NO: 19255
  derived and/or modified protein sequence (wt) from neuraminidase__InfluenzaA__ADN92491

SEQ ID NO: 20031 - protein, 469 aa, Artificial Sequence
  derived and/or modified protein sequence (wt) from neuraminidase__InfluenzaA__ADN92502
MNPNQKIITIGSVSLTISTICFFMQIAILITTVTLHFKQYEFNSPPNNQVMLCEPTIIERNITEIVYLTNTTIEKEICPKLAEYRNWSKPQCDITGFAPFSKDNSIRLSAGGDIWVTREPYVSCDPDKCYQFALGQGTTLNNVHSNNTVRDRTPYRTLLMNELGVPFHLGTKQVCIAWSSSSCHDGKAWLHVCITGDDKNATASFIYNGRLVDSVVSWSKEILRTQESECVCINGTCTVVMTDGSASGKADTKILFIEEGKIVHTSTLSGSAQHVEECSCYPRYPGVRCVCRDNWKGSNRPIVDINIKDHSIVSSYVCSGLVGDTPRKNDSSSSSHCLDPNNEEGGNGVKGWAFDDGNDVWMGRTISEKSRLGYETFKVIEGWSNPKSKLQINRQVIVDRGNRSGYSGIFSVEGKSCINRCFYVELIRGRKEENEVLWTSNSIVVFCGTSGTYGTGSWPDGADINLMPI

SEQ ID NO: 20032 - protein, 469 aa, Artificial Sequence; identical to SEQ ID NO: 16738
  derived and/or modified protein sequence (wt) from neuraminidase__InfluenzaA__ADN92512

SEQ ID NO: 20033 - protein, 469 aa, Artificial Sequence; identical to SEQ ID NO: 16738
  derived and/or modified protein sequence (wt) from neuraminidase__InfluenzaA__ADN92522

SEQ ID NO: 20034 - protein, 469 aa, Artificial Sequence; identical to SEQ ID NO: 16738
  derived and/or modified protein sequence (wt) from neuraminidase__InfluenzaA__ADN92532

SEQ ID NO: 20035 - protein, 469 aa, Artificial Sequence; identical to SEQ ID NO: 16738
  derived and/or modified protein sequence (wt) from neuraminidase__InfluenzaA__ADN92542

SEQ ID NO: 20036 - protein, 469 aa, Artificial Sequence; identical to SEQ ID NO: 16738
  derived and/or modified protein sequence (wt) from neuraminidase__InfluenzaA__ADN92552

SEQ ID NO: 20037 - protein, 469 aa, Artificial Sequence; identical to SEQ ID NO: 16738
  derived and/or modified protein sequence (wt) from neuraminidase__InfluenzaA__ADO00733

SEQ ID NO: 20038 - protein, 469 aa, Artificial Sequence
  derived and/or modified protein sequence (wt) from neuraminidase__InfluenzaA__ADO00743
MNPNQKIITIGSVCMTIGMANLILQIGNIISIWISHSIQLGNQNQIETCNQSVITYENNTWVNQTYVNISNTNFAAGQSVVSAKLAGNSSLCPVSGWAIYSKDNSIRIGSKGDVFVIREPFISCSPLECRTFFLTQGALLNDKHSNGTIKDRSPYRTLMSCPIGEVPSPYNSRFESVAWSASACHDGINWLTIGISGPDNGAVAVLKYNGIITDTIKSWRNNILRTQESECACVNGSCFTVMTDGPSDGQASYKIFRIEKGKIVKSVEMNAPNYHYEECSCYPDSSEITCVCRDNWHGSNRPWVSFNQNLEYQIGYICSGIFGDNPRPNDKTGSCGPVSSNGANGVKGFSFKYGNGVWIGRTKSISSRNGFEMIWDPNGWTGTDNNFSIRQDIVGINEWSGYSGSFVQHPELTGLDCIRPCFWVELIRGRPKENTIWTSGSSISFCGVNSDTVGWSWPDGAELPFTIDK

SEQ ID NO: 20039 - protein, 469 aa, Artificial Sequence; identical to SEQ ID NO: 17915
  derived and/or modified protein sequence (wt) from neuraminidase__InfluenzaA__ADO00753

SEQ ID NO: 20040 - protein, 469 aa, Artificial Sequence; identical to SEQ ID NO: 16738
  derived and/or modified protein sequence (wt) from neuraminidase__InfluenzaA__ADO12146

SEQ ID NO: 20041 - protein, 469 aa, Artificial Sequence; identical to SEQ ID NO: 16738
  derived and/or modified protein sequence (wt) from neuraminidase__InfluenzaA__ADO12156

SEQ ID NO: 20042 - protein, 469 aa, Artificial Sequence; identical to SEQ ID NO: 16738
  derived and/or modified protein sequence (wt) from neuraminidase__InfluenzaA__ADO12166

SEQ ID NO: 20043 - protein, 469 aa, Artificial Sequence; identical to SEQ ID NO: 16738
  derived and/or modified protein sequence (wt) from neuraminidase__InfluenzaA__ADO12176

SEQ ID NO: 20044 - protein, 469 aa, Artificial Sequence; identical to SEQ ID NO: 16738
  derived and/or modified protein sequence (wt) from neuraminidase__InfluenzaA__ADO12186

SEQ ID NO: 20045 - protein, 469 aa, Artificial Sequence; identical to SEQ ID NO: 16738
  derived and/or modified protein sequence (wt) from neuraminidase__InfluenzaA__ADO12196

SEQ ID NO: 20046 - protein, 469 aa, Artificial Sequence; identical to SEQ ID NO: 16738
  derived and/or modified protein sequence (wt) from neuraminidase__InfluenzaA__ADO12206

SEQ ID NO: 20047 - protein, 469 aa, Artificial Sequence; identical to SEQ ID NO: 16738
  derived and/or modified protein sequence (wt) from neuraminidase__InfluenzaA__ADO12216

SEQ ID NO: 20048 - protein, 469 aa, Artificial Sequence; identical to SEQ ID NO: 16738
  derived and/or modified protein sequence (wt) from neuraminidase__InfluenzaA__ADO12226

SEQ ID NO: 20049 - protein, 469 aa, Artificial Sequence; identical to SEQ ID NO: 16738
  derived and/or modified protein sequence (wt) from neuraminidase__InfluenzaA__ADO12246

SEQ ID NO: 20050 - protein, 469 aa, Artificial Sequence; identical to SEQ ID NO: 16738
  derived and/or modified protein sequence (wt) from neuraminidase__InfluenzaA__ADO12266

SEQ ID NO: 20051 - protein, 469 aa, Artificial Sequence
  derived and/or modified protein sequence (wt) from neuraminidase__InfluenzaA__ADO12276
MNPNQKIITIGSVCMTIGMANLILQIGNIISIWISHSIQLGNQNQIETCNQSVITYENNTWVNQTYVNISNTNFAAGQSVVSVKLAGNSSLCPVSGWAIYSKDNSIRIGSKGDVFVIREPFISCSPLECRTFFLTQGALLNDKHSNGTIKDRSPYRTLMSCPIGEVPSPYNSRFESVAWSASACHDGINWLTIGISGPDNGAVAVLKYNGIITDTIKSWRNNILRTQESECACVNGSCFTVMTDGPSDGQASYKIFRIEKGKIVKSVEMNAPNYHYEECSCYPDSSEITCVCRDNWHGSNRPWVSFNQNLEYQIGYICSGIFGDNPRPNDKSGSCGPVSSNGANGVKGFSFKYGNGVWIGRTKSISSRNGFEMIWDPNGWTGTDNNFSIKQDIVGINEWSGYSGSFVQHPELTGLDCIRPCFWVELIRGRPKENTIWTSGSSISFCGVNSDTVGWSWPDGAELPFTIDK

SEQ ID NO: 20052 - protein, 469 aa, Artificial Sequence; identical to SEQ ID NO: 16738
  derived and/or modified protein sequence (wt) from neuraminidase__InfluenzaA__ADO12286

SEQ ID NO: 20053 - protein, 469 aa, Artificial Sequence; identical to SEQ ID NO: 16738
  derived and/or modified protein sequence (wt) from neuraminidase__InfluenzaA__ADO12296

SEQ ID NO: 20054 - protein, 469 aa, Artificial Sequence; identical to SEQ ID NO: 16738
  derived and/or modified protein sequence (wt) from neuraminidase__InfluenzaA__ADO12306

SEQ ID NO: 20055 - protein, 469 aa, Artificial Sequence
  derived and/or modified protein sequence (wt) from neuraminidase__InfluenzaA__ADO12316
MNPNQKIITIGSVCMTIGMANLILQIGNIISIWISHSIQLGNQNQIETCNQSVITYENNTWVNQTYVNISNTNFAAGQSVVSVKLAGNSSLCPVSGWAIYSKDNSIRIGSKGDVFVIREPFISCSPLECRTFFLTQGALLNDKHSNGTIKDRSPYRTLMSCPIGEVPSPYNSRFESVAWSASACHDGINWLTIGISGPDNGAVAVLKYNGIITDTIKSWRNNILRTQESECACVNGSCFTVMTDGPSDGQASYKIFRIEKGKIVKSVEMNAPNYHYEECSCYPDSSEITCVCRDNWHGSNRPWVSFNQNLEYQIGYICSGIFGDNPRPNDKTGSCGPVSSNGANGVKGFSFKYGDGVWIGRTKSISSRNGFEMIWDPNGWTGTDNNFSIKQDIVGINEWSGYSGSFVQHPELTGLDCIRPCFWVELIRGRPKENTIWTSGSSISFCGVNSDTVGWSWPDGAELPFTIDK

SEQ ID NO: 20056 - protein, 469 aa, Artificial Sequence; identical to SEQ ID NO: 16738
  derived and/or modified protein sequence (wt) from neuraminidase__InfluenzaA__ADO12326

SEQ ID NO: 20057 - protein, 469 aa, Artificial Sequence; identical to SEQ ID NO: 16738
  derived and/or modified protein sequence (wt) from neuraminidase__InfluenzaA__ADO12336

SEQ ID NO: 20058 - protein, 469 aa, Artificial Sequence; identical to SEQ ID NO: 16738
  derived and/or modified protein sequence (wt) from neuraminidase__InfluenzaA__ADO12346

SEQ ID NO: 20059 - protein, 469 aa, Artificial Sequence; identical to SEQ ID NO: 16738
  derived and/or modified protein sequence (wt) from neuraminidase__InfluenzaA__ADO12356

SEQ ID NO: 20060 - protein, 469 aa, Artificial Sequence; identical to SEQ ID NO: 16738
  derived and/or modified protein sequence (wt) from neuraminidase__InfluenzaA__ADO12366

SEQ ID NO: 20061 - protein, 469 aa, Artificial Sequence; identical to SEQ ID NO: 16738
  derived and/or modified protein sequence (wt) from neuraminidase__InfluenzaA__ADO12376

SEQ ID NO: 20062 - protein, 469 aa, Artificial Sequence; identical to SEQ ID NO: 16738
  derived and/or modified protein sequence (wt) from neuraminidase__InfluenzaA__ADO12386

SEQ ID NO: 20063 - protein, 469 aa, Artificial Sequence; identical to SEQ ID NO: 16738
  derived and/or modified protein sequence (wt) from neuraminidase__InfluenzaA__ADO12396

SEQ ID NO: 20064 - protein, 469 aa, Artificial Sequence; identical to SEQ ID NO: 16738
  derived and/or modified protein sequence (wt) from neuraminidase__InfluenzaA__ADO12406

SEQ ID NO: 20065 - protein, 469 aa, Artificial Sequence; identical to SEQ ID NO: 17505
  derived and/or modified protein sequence (wt) from neuraminidase__InfluenzaA__ADO12416

SEQ ID NO: 20066 - protein, 469 aa, Artificial Sequence; identical to SEQ ID NO: 16738
  derived and/or modified protein sequence (wt) from neuraminidase__InfluenzaA__ADO12426

SEQ ID NO: 20067 - protein, 469 aa, Artificial Sequence; identical to SEQ ID NO: 16738
  derived and/or modified protein sequence (wt) from neuraminidase__InfluenzaA__ADO12436

SEQ ID NO: 20068 - protein, 469 aa, Artificial Sequence; identical to SEQ ID NO: 16738
  derived and/or modified protein sequence (wt) from neuraminidase__InfluenzaA__ADO12446

SEQ ID NO: 20069 - protein, 469 aa, Artificial Sequence; identical to SEQ ID NO: 16738
  derived and/or modified protein sequence (wt) from neuraminidase__InfluenzaA__ADO12456

SEQ ID NO: 20070 - protein, 469 aa, Artificial Sequence; identical to SEQ ID NO: 16738
  derived and/or modified protein sequence (wt) from neuraminidase__InfluenzaA__ADO12466

SEQ ID NO: 20071 - protein, 469 aa, Artificial Sequence; identical to SEQ ID NO: 16738
  derived and/or modified protein sequence (wt) from neuraminidase__InfluenzaA__ADO12476

SEQ ID NO: 20072 - protein, 469 aa, Artificial Sequence; identical to SEQ ID NO: 16738
  derived and/or modified protein sequence (wt) from neuraminidase__InfluenzaA__ADO12486

SEQ ID NO: 20073 - protein, 469 aa, Artificial Sequence; identical to SEQ ID NO: 16738
  derived and/or modified protein sequence (wt) from neuraminidase__InfluenzaA__ADO12496

SEQ ID NO: 20074 - protein, 469 aa, Artificial Sequence; identical to SEQ ID NO: 16738
  derived and/or modified protein sequence (wt) from neuraminidase__InfluenzaA__ADO12506

SEQ ID NO: 20075 - protein, 469 aa, Artificial Sequence; identical to SEQ ID NO: 16738
  derived and/or modified protein sequence (wt) from neuraminidase__InfluenzaA__ADO12516

SEQ ID NO: 20076 - protein, 469 aa, Artificial Sequence; identical to SEQ ID NO: 16738
  derived and/or modified protein sequence (wt) from neuraminidase__InfluenzaA__ADO12526

SEQ ID NO: 20077 - protein, 469 aa, Artificial Sequence; identical to SEQ ID NO: 16738
  derived and/or modified protein sequence (wt) from neuraminidase__InfluenzaA__ADO12536

SEQ ID NO: 20078 - protein, 469 aa, Artificial Sequence; identical to SEQ ID NO: 16738
  derived and/or modified protein sequence (wt) from neuraminidase__InfluenzaA__ADO12546

SEQ ID NO: 20079 - protein, 469 aa, Artificial Sequence; identical to SEQ ID NO: 16738
  derived and/or modified protein sequence (wt) from neuraminidase__InfluenzaA__ADO12556

SEQ ID NO: 20080 - protein, 469 aa, Artificial Sequence; identical to SEQ ID NO: 16738
  derived and/or modified protein sequence (wt) from neuraminidase__InfluenzaA__ADO12566

SEQ ID NO: 20081 - protein, 469 aa, Artificial Sequence; identical to SEQ ID NO: 16738
  derived and/or modified protein sequence (wt) from neuraminidase__InfluenzaA__ADO12576

SEQ ID NO: 20082 - protein, 469 aa, Artificial Sequence
  derived and/or modified protein sequence (wt) from neuraminidase__InfluenzaA__ADO12586
MNPNQKIITIGSVCMTIGMANLILQIGNIISIWISHSIQLGNQNQIETCNQSVITYENNTWVNQTYVNISNTNFAAGQSVVSVKLAGNSSLCPVSGWAIYSKDNSIRIGSKGDVFVIREPFISCSPLECRTFFLTQGALLNDKHSNGTIKDRSPYRTLMSCPIGEVPSPYNSRFESVAWSASACHDGINWLTIGISGPDSGAVAVLKYNGIITDTIKSWRNNILRTQESECACVNGSCFTVMTDGPSDGQASYKIFRIEKGKIVKSVEMNAPNYHYEECSCYPDSSEITCVCRDNWHGSNRPWVSFNQNLEYQIGYICSGIFGDNPRPNDKTGSCGPVSSNGANGVKGFSFKYGNGVWIGRTKSISSRNGFEMIWDPNGWTGTDNNFSIKQDIVGINEWSGYSGSFVQHPELTGLDCIRPCFWVELIRGRPKENTIWTSGSSISFCGVNSDTVGWSWPDGAELPFTIDK

SEQ ID NO: 20083 - protein, 469 aa, Artificial Sequence; identical to SEQ ID NO: 20082
  derived and/or modified protein sequence (wt) from neuraminidase__InfluenzaA__ADO12596

SEQ ID NO: 20084 - protein, 469 aa, Artificial Sequence; identical to SEQ ID NO: 16738
  derived and/or modified protein sequence (wt) from neuraminidase__InfluenzaA__ADO12606

SEQ ID NO: 20085 - protein, 469 aa, Artificial Sequence; identical to SEQ ID NO: 16738
  derived and/or modified protein sequence (wt) from neuraminidase__InfluenzaA__ADO12616

SEQ ID NO: 20086 - protein, 469 aa, Artificial Sequence; identical to SEQ ID NO: 16738
  derived and/or modified protein sequence (wt) from neuraminidase__InfluenzaA__ADO12626

SEQ ID NO: 20087 - protein, 469 aa, Artificial Sequence; identical to SEQ ID NO: 16738
  derived and/or modified protein sequence (wt) from neuraminidase__InfluenzaA__ADO14355

SEQ ID NO: 20088 - protein, 466 aa, Artificial Sequence
  derived and/or modified protein sequence (wt) from neuraminidase__InfluenzaA__ADO21028
MNPNQKIIAIGSVSLTIATICFLMQIAILATTMTLHFKQNECSNPSNNQVVPCEPTIIERNIVHLNSTTIEKEICPKVAEYKNWSKPQCQITGSAPFSKGNSIRLSAGGDIWVTREPYVSCSLGKCYQFALGQGTTLKNKHSNGTTHDRVPHRTLLMSELGVPFHLGTKQVCIAWSSSSCHDGKAWLHVCVTGDDKNATASIIYDGMLVDSIGSWSKNILRTQESECVCINGTCTVVMTDGSASGKADTRILFIREGKIVHISPLSGSAQHVEECSCYPRYPEVRCVCRDNWKGSNRPVLYINMADYSIESSYVCSGLVGDTPRNDDSYSSSNCRDPNNERGAPGVKGWAFDNGNDIWMGRTIKEDSRSGYETFRVVGGWTTANSKSQINRQVIVDSDNWSGYSGIFSVEGKNCINRCFYVELIRGRPQETRVWWTSNSIIVFCGTSGTYGTGSWPDGANINFMPI

SEQ ID NO: 20089 - protein, 466 aa, Artificial Sequence
  derived and/or modified protein sequence (wt) from neuraminidase__InfluenzaA__ADO21039
MNPNQKIIAIGSVSLTIATICFLMQIAILATTMTLHFKQNECSNPSNNQVVPCEPTIIERNIVHLNSTTIEKEICPKVAEYKNWSKPQCQITGSAPFSKGNSIRLSAGGDIWVTREPYVSCSLGKCYQFALGQGTTLKNKHSNGTTHDRDPHRTLLMSELGVPFHLGTKQVCIAWSSSSCHDGKAWLHVCVTGDDKNATASIIYDGMLVDSIGSWSKNILRTQESECVCINGTCTVVMTDGSASGKADTRILFIREGKIVHISPLSGSAQHVEECSCYPRYPEVRCVCRDNWKGSNRPVLYINMADYTIESSYVCSGLVGDTPRNDDSYSSSNCRDPNNERGAPGVKGWAFDNGNDIWMGRTIKEDSRSGYETFRVVGGWTTANSKSQINRQVIVDSDNWSGYSGIFSVEGKNCINRCFYVELIRGRPQETRVWWTSNSIIVFCGTSGTYGTGSWPDGANINFMPI

SEQ ID NO: 20090 - protein, 466 aa, Artificial Sequence
  derived and/or modified protein sequence (wt) from neuraminidase__InfluenzaA__ADO21050
MNPNQKIIAIGSVSLTIATICFLMQIAILATTMTLHFKQNECSNPSNNQVVPCEPTIIERNIVHLNSTTIEKEICPKVAEYKNWSKPQCQITGSAPFSKGNSIRLSAGGDIWVTREPYVSCSLGKCYQFALGQGTTLKNKHSNGTTHDRGPHRTLLMSELGVPFHLGTKQVCIAWSSSSCHDGKAWLHVCVTGDDKNATASIIYDGMLVDSIGSWSKNILRTQESECVCINGTCTVVMTDGSASGKADTRILFIREGKIVHISPLSGSAQHVEECSCYPRYPEVRCVCRDNWKGSNRPVLYINMADYSIESSYVCSGLVGDTPRNDDSYSSSNCRDPNNESGAPGVKGWAFDNGNDIWMGRTIKEDSRSGYETFRVVGGWTTANSKSQINRQVIVDSDNWSGYSGIFSVEGKNCINRCFYVELIRGRPQETRVWWTSNSIIVFCGTSGTYGTGSWPDGANINFMPI

SEQ ID NO: 20091 - protein, 469 aa, Artificial Sequence
  derived and/or modified protein sequence (wt) from neuraminidase__InfluenzaA__ADO25095
MNPNQKIITIGSVCMTIGMANLILQIGNIISIWISHSIQLGNQNQIETCNQSIITYENNTWVNQTYVNISNTNFAAGQSVVSVKLAGNSSLCPVSGWAIYSKDNSIRIGSKGDVFVIREPFISCSPLECRTFFLTQGALLNDKHSNGTIKDRSPYRTLMSCPIGEVPSPYNSRFESVAWSASACHDGINWLTIGISGPDNGAVAVLKYNGIITDTIKSWRNNILRTQESECACVNGSCFTVMTDGPSDGQASYKIFRIEKGKIVKSVEMNAPNYHYEECSCYPDSSEITCVCRDNWHGSNRPWVSFNQNLEYQIGYICSGIFGDNPRPNDKTGSCGPVSSNGANGVKGFSFKYGNGVWIGRTKSISSRSGFEMIWDPNGWTGTDNNFSIKQDIVGINEWSGYSGSFVQHPELTGLDCIRPCFWVELIRGRPKENTIWTSGSSISFCGVNSDTVGWSWPDGAELPFTIDK

SEQ ID NO: 20092 - protein, 469 aa, Artificial Sequence
  derived and/or modified protein sequence (wt) from neuraminidase__InfluenzaA__ADO25105
MNPNQKIITIGSVCMTIGMANLILQIGNIISIWISHSIQLGNQNQIGTCNQSVITYETNTWVNQTYVNISNTNFAAGQSVVSVKLAGNSSLCPVSGWAIYSKDNSIRIGSKGDVFVIREPFISCSPLECRTFFLTQGALLNDKHSNGTIKDRSPYRTLMSCPIGEVPSPYNSRFESVAWSASACHDGINWLTIGISGPDNGAVAVLKYNGIITDTIKSWRNNILRTQESECACVNGSCFTVMTDGPSDRQASYKIFRIEKGKIVKSVEMNAPNYHYEECSCYPDSSEITCVCRDNWHGSNRPWVSFNQNLEYQIGYICSGIFGDNPRPNDKTGSCGPVSSNGANGVKGFSFKYGNGVWIGRTKSISSRNGFEMIWDPNGWTGTDNNFSIKQDIVGINEWSGYSGSFVQHPELTGLDCIRPCFWVELIRGRPKENTIWTSGSSISFCGVNSDTVGWSWPDGAELPFTIDK

SEQ ID NO: 20093 - protein, 469 aa, Artificial Sequence; identical to SEQ ID NO: 18519
  derived and/or modified protein sequence (wt) from neuraminidase__InfluenzaA__ADO25115

SEQ ID NO: 20094 - protein, 469 aa, Artificial Sequence; identical to SEQ ID NO: 18519
  derived and/or modified protein sequence (wt) from neuraminidase__InfluenzaA__ADO25125

SEQ ID NO: 20095 - protein, 469 aa, Artificial Sequence
  derived and/or modified protein sequence (wt) from neuraminidase__InfluenzaA__ADO25135
MNPNQKIITIGSVCMTIGMANLVLQIGNIISIWISHSIQLGNQNQIETCNQSVITYENNTWVNQTYVNISNTNFAAGQSVVSVKLAGNSSLCPVSGWAIYSKDNSIRIGSKGDVFVIREPFISCSPLECRTFFLTQGALLNDKHSNGTIKDRSPYRTLMSCPIGEVPSPYNSRFESVAWSASACHDGINWLTIGISGPDNGAVAVLKYNGIITDTIKSWRNNILRTQESECACVNGSCFTVMTDGPSDGQASYKIFRIEKGKIVKSVEMNAPNYHYEECSCYPDSSEITCVCRDNWHGSNRPWVSFNQNLEYQIGYICSGIFGDNPRPNDKTGSCGPVSSNGANGVKGFSFKYGNGVWIGRTKSISSRNGFEMIWDPNGWTGTDNNFSIKQDIVGINEWSGYSGSFVQHPELTGLDCIRPCFWVELIRGRPKENTIWTSGSSISFCGVNSDTVGWSWPDGAELPFTIDK

SEQ ID NO: 20096 - protein, 469 aa, Artificial Sequence; identical to SEQ ID NO: 18089
  derived and/or modified protein sequence (wt) from neuraminidase__InfluenzaA__ADO25145

SEQ ID NO: 20097 - protein, 469 aa, Artificial Sequence; identical to SEQ ID NO: 16738
  derived and/or modified protein sequence (wt) from neuraminidase__InfluenzaA__ADO25155

SEQ ID NO: 20098 - protein, 469 aa, Artificial Sequence; identical to SEQ ID NO: 16738
  derived and/or modified protein sequence (wt) from neuraminidase__InfluenzaA__ADO25165

SEQ ID NO: 20099 - protein, 469 aa, Artificial Sequence; identical to SEQ ID NO: 16738
  derived and/or modified protein sequence (wt) from neuraminidase__InfluenzaA__ADO25175

SEQ ID NO: 20100 - protein, 469 aa, Artificial Sequence
  derived and/or modified protein sequence (wt) from neuraminidase__InfluenzaA__ADO25185
MNPNQKIITIGSVCMTIGMANLILQIGNIISIWISHSIQLGNQNQIETCNQSVITYENNTWVNQTYVNISNTNFAAGQSVVSVKLAGNSSLCPVSGWAIYSKDNSIRIGSKGDVFVIREPFISCSPLECRTFFLTQGALLNDKHSNGTIKDRSPYRTLMSCPIGEVPSPYNSRFESVAWSASACHDGINWLTIGISGPDNGAVAVLKYNGIITDTIKSWRNNILRTQESECACVNGSCFTVMTDGPSDGQASYKIFRIEKGKIVKSVEMNAPNYHYEECSCYPDSSEITCVCRDNWHGSNRPWVSFNQNLEYQIGYICSGIFGDNPRPNDKTGSCGPVSSNGANGVKGFSFKYGNGVWIGRTKSMSSRNGFEMIWDPNGWTGTDNNFSIKQDIVGINEWSGYSGSFVQHPELTGLDCIRPCFWVELIRGRPKENTIWTSGSSISFCGVNSDTVGWSWPDGAELPFTIDK

SEQ ID NO: 20101 - protein, 469 aa, Artificial Sequence; identical to SEQ ID NO: 19167
  derived and/or modified protein sequence (wt) from neuraminidase__InfluenzaA__ADO25195

SEQ ID NO: 20102 - protein, 469 aa, Artificial Sequence; identical to SEQ ID NO: 17875
  derived and/or modified protein sequence (wt) from neuraminidase__InfluenzaA__ADO25205

SEQ ID NO: 20103 - protein, 469 aa, Artificial Sequence; identical to SEQ ID NO: 18089
  derived and/or modified protein sequence (wt) from neuraminidase__InfluenzaA__ADO25215

SEQ ID NO: 20104 - protein, 469 aa, Artificial Sequence; identical to SEQ ID NO: 16738
  derived and/or modified protein sequence (wt) from neuraminidase__InfluenzaA__ADO25225

SEQ ID NO: 20105 - protein, 469 aa, Artificial Sequence; identical to SEQ ID NO: 18089
  derived and/or modified protein sequence (wt) from neuraminidase__InfluenzaA__ADO25235

SEQ ID NO: 20106 - protein, 469 aa, Artificial Sequence; identical to SEQ ID NO: 16738
  derived and/or modified protein sequence (wt) from neuraminidase__InfluenzaA__ADO25245

SEQ ID NO: 20107 - protein, 469 aa, Artificial Sequence; identical to SEQ ID NO: 16738
  derived and/or modified protein sequence (wt) from neuraminidase__InfluenzaA__ADO25255

SEQ ID NO: 20108 - protein, 469 aa, Artificial Sequence; identical to SEQ ID NO: 18519
  derived and/or modified protein sequence (wt) from neuraminidase__InfluenzaA__ADO25265

SEQ ID NO: 20109 - protein, 469 aa, Artificial Sequence; identical to SEQ ID NO: 18330
  derived and/or modified protein sequence (wt) from neuraminidase__InfluenzaA__ADO25275

SEQ ID NO: 20110 - protein, 469 aa, Artificial Sequence; identical to SEQ ID NO: 18089
  derived and/or modified protein sequence (wt) from neuraminidase__InfluenzaA__ADO25285

SEQ ID NO: 20111 - protein, 470 aa, Artificial Sequence
  derived and/or modified protein sequence (wt) from neuraminidase__InfluenzaA__ADO27623
MNPNQKIITIGSISIAIGIISLMLQIGNIISIWASHSIQTGSQNNTGICNQRIITYENSTWVNHTYVNINNTNVAAGEDKTSVTLAGNSSLCSISGWAIYTKDNSIRIGSKGDVFVIREPFISCSHLECRTFFLTQGALLNDKHSNGTVKDRSPYRALMSCPLGEAPSPYNSKFESVAWSASACHDGMGWLTIGISGPDNGAVAVLKYNGIITGTIKSWKKQILRTQESECVCMNGSCFTIMTDGPSNKAASYKIFKIEKGKVTKSIELNAPNFYYEECSCYPDTGIVMCVCRDNWHGSNRPWVSFNQNLDYQIGYICSGVFGDNPRPEDGEGSCNPVTVDGANGVKGFSYKYGNGVWIGRTKSNRLRKGFEMIWDPNGWTNTDSDFSVKQDVVAITDWSGYSGSFVQHPELTGLDCIRPCFWVELVRGLPRENTTIWTSGSSISFCGVNSDTANWSWPDGAELPFTIDK

SEQ ID NO: 20112 - protein, 469 aa, Artificial Sequence; identical to SEQ ID NO: 16738
  derived and/or modified protein sequence (wt) from neuraminidase__InfluenzaA__ADO30410

SEQ ID NO: 20113 - protein, 469 aa, Artificial Sequence; identical to SEQ ID NO: 18089
  derived and/or modified protein sequence (wt) from neuraminidase__InfluenzaA__ADO30420

SEQ ID NO: 20114 - protein, 469 aa, Artificial Sequence; identical to SEQ ID NO: 17446
  derived and/or modified protein sequence (wt) from neuraminidase__InfluenzaA__ADP95343

SEQ ID NO: 20115 - protein, 469 aa, Artificial Sequence; identical to SEQ ID NO: 16728
  derived and/or modified protein sequence (wt) from neuraminidase__InfluenzaA__ADP95353

SEQ ID NO: 20116 - protein, 469 aa, Artificial Sequence; identical to SEQ ID NO: 16728
  derived and/or modified protein sequence (wt) from neuraminidase__InfluenzaA__ADP95363

SEQ ID NO: 20117 - protein, 469 aa, Artificial Sequence; identical to SEQ ID NO: 16728
  derived and/or modified protein sequence (wt) from neuraminidase__InfluenzaA__ADP95373

SEQ ID NO: 20118 - protein, 469 aa, Artificial Sequence; identical to SEQ ID NO: 16728
  derived and/or modified protein sequence (wt) from neuraminidase__InfluenzaA__ADP95383

SEQ ID NO: 20119 - protein, 469 aa, Artificial Sequence; identical to SEQ ID NO: 16728
  derived and/or modified protein sequence (wt) from neuraminidase__InfluenzaA__ADP95393

SEQ ID NO: 20120 - protein, 469 aa, Artificial Sequence
  derived and/or modified protein sequence (wt) from neuraminidase__InfluenzaA__ADQ43774
MNPNQKIITIGSGCMTIGMANLILQIGNIISIWISHSIQLGNQNQIETCNQSVITYENNTWVNQTYVNISNTNFAAGQSVVSVKLAGNSSLCPVSGWAIYSKDNSIRIGSKGDVFVIREPFISCSPLECRTFFLTQGALLNDKHSNGTIKDRSPYRTLMSCPIGEVPSPYNSRFESVAWSASACHDGINWLTIGISGPDNGAVAVLKYNGIITDTIKSWRNNILRTQESECACVNGSCFTVMTDGPSDGQASYKIFRIEKGKIVKSVEMKAPNYHYEECSCYPDSSEITCVCRDNWHGSNRPWVSFNQNLEYQIGYICSGIFGDNPRPNDKTGSCGPVSSNGANGVKGFSFKYGNGVWIGRTKSISSRNGFEMIWDPNGWTGTDNNFSIKQDIVGINEWSGYSGSFVQHPELTGLDCIRPCFWVELIRGRPKENTIWTSGSSISFCGVNSDTVGWSWPDGAELPFTIDK

SEQ ID NO: 20121 - protein, 469 aa, Artificial Sequence
  derived and/or modified protein sequence (wt) from neuraminidase__InfluenzaA__ADQ92578
MNPNQKIITIGSVSLTISTICFFMQIAILITTVTLHFKQYEFNSPPNNQVILCEPTIIERNITEIVYLTNATIEKEICPKLAEYRNWSKPQCDITGFAPFSKDNSIRLSAGGDIWVTREPYVSCDPDKCYQFALGQGTTLNNVHSNNTVRDRTPYRTLLMNELGVPFHLGTKQVCIAWSSSSCHDGKAWLHVCITGDDKNATASFIYNGRLVDSVVSWSKEILRTQESECVCINGTCTVVMTDGSASGKADTKILFIEEGKIVHTSTLSGSAQHVEECSCYPRYPGVRCVCRDNWKGSNRPIVDINIKDHSIVSSYVCSGLVGDTPRKNDSSSSSHCLDPNNEEGGHGVKGWAFDDGNDVWMGRTISEKSRLGYETFKVIEGWSNPKSKLQINRQVIVDRGNRSGYSGIFSVEGKSCINRCFYVELIRGRKEETEVLWTSNSIVVFCGTSGTYGTGSWPDGADINLMPI

SEQ ID NO: 20122 - protein, 469 aa, Artificial Sequence; identical to SEQ ID NO: 16599
  derived and/or modified protein sequence (wt) from neuraminidase__InfluenzaA__ADR32364

SEQ ID NO: 20123 - protein, 469 aa, Artificial Sequence
  derived and/or modified protein sequence (wt) from neuraminidase__InfluenzaA__ADT64478
MNPNQKIITIGSVCMTIGMANLILQIGNIISIWIGHSIQLGNQNQIETCNQSVITYENNTWVNQTYVNISNTNFAAGQSVVSVKLAGNSSLCPVSGWAIYSKDNSVRIGSKGDVFVIREPFISCSPLECRTFFLTQGALLNDKHSNGTIKDRSPYRTLMSCPIGEVPSPYNSRFESVAWSASACHDGINWLTIGISGPDNGAVAVLKYNGIITDTIKSWRNNILRTQESECACVNGSCFTVMTDGPSNGQASYKIFRIEKGKIVKSVEMNAPNYHYEECSCYPDSSEITCVCRDNWHGSNRPWVSFNQNLEYQIGYICSGIFGDNPRPNDKTGSCGPVSSNGANGVKGFSFKYGNGVWIGRTKSISSRNGFEMIWDPNGWTGTDNNFSIKQDIVGINEWSGYSGSFVQHPELTGLDCIRPCFWVELIRGRPKENTIWTSGSSISFCGVNSDTVGWSWPDGAELPFTIDK

SEQ ID NO: 20124 - protein, 469 aa, Artificial Sequence
  derived and/or modified protein sequence (wt) from neuraminidase__InfluenzaA__ADT78889
MNPNQKIITIGSVSLTIATVCFLMQIAILVTTVTLHFKQHECDSPASNQVMPCEPIIIERNITEIVYLNNTTIEKEICPKVVEYRNWSKPQCQITGFAPFSKDNSIRLSAGGDIWVTREPYVSCDPGKCYQFALGQGTTLDNKHSNDTIHDRIPHRTLLMNELGVPFHLGTRQVCVAWSSSSCHDGKAWLHVCVTGDDKNATASFIYDGRLVDSIGSWSQNILRTQESECVCINGTCTVVMTDGSASGRADTRILFIEEGKIVHISPLSGSAQHVEECSCYPRYPDVRCICRDNWKGSNRPVIDINMEDYSIDSSYVCSGLVGDTPRNDDRSSNSNCRDPNNERGNPGVKGWAFDNGDDVWMGRTISKDLRSGYETFKVIGGWSTPNSKSQINRQVIVDSNNWSGYSGIFSVEGKSCINRCFYVELIRGRQQETRVWWTSNSIVVFCGTSGTYGTGSWPDGANISFMPI

SEQ ID NO: 20125 - protein, 469 aa, Artificial Sequence
  derived and/or modified protein sequence (wt) from neuraminidase__InfluenzaA__ADT78899
MNPNQKIITIGSVSLTIATVCFLMQIAILATTVTLHFKQHECDSPASNQVMPCEPIIIERNITEIVYLNNTTIEKEICPEVVEYRNWSKPQCQITGFAPFSKDNSIRLSAGGDIWVMREPYVSCNPGKCYQFALGQGTTLDNKHSNGTIHDRIPHRTLLMNELGVPFHLGTKQVCVAWSSSSCHDGKAWLHVCVTGDDRNATASFIYDGRLVDSIGSWSQNILRTQESECVCINGTCTVVMTDGSASGRADTRILFIKEGKIVHISPLSGSAQHIEECSCYPRYPDVRCICRDNWKGSNRPVIDINMEDYSIDSSYVCSGLVGDTPRNDDSSSNSNCRDPNNERGNPGVKGWAFDNGDDVWMGRTISKDLRSGYETFKVIGGWSTPNSKSQVNRQVIVDNNNWSGYSGIFSVEGKSCINRCFYVELIRGRPQETRVWWTSSSIVVFCGTSGTYGTGSWPDGANINFMPI

SEQ ID NO: 20126 - protein, 469 aa, Artificial Sequence
  derived and/or modified protein sequence (wt) from neuraminidase__InfluenzaA__ADT78963
MNPNQKIITIGSVSLTIATVCFLMQIAILATTVTLHFKQHECDSPASNQVMPCEPIIIERNITEIVYLNNTTIEKEICPEVVEYRNWSKPQCQITGFAPFSKDNSIRLSAGGDIWVTREPYVSCDPGKCYQFALGQGTTLDNKHSNDTIHDRIPHRTLLMNELGVPFHLGTRQVCVAWSSSSCHDGKAWLHVCVTGDDRNATASFIYDGRLVDSIGSWSQNILRTQESECVCINGTCTVVMTDGSASGRADTRILFIKEGKIVHISPLSGSAQHVEECSCYPRYPDVRCICRDNWKGSNRPVIDINMEDYSIDSSYVCSGLVGDTPRNDDRSSNSNCRDPNNERGNPGVKGWAFDNGNDVWMGRTISKDLRSGYETFKVIGGWSTPNSKSQVNRQVIVDNNNWSGYSGIFSVEGKSCINRCFYVELIRGRQQETRVWWTSNSIVVFCGTSGTYGTGSWPDGANINFMPI

SEQ ID NO: 20127 - protein, 469 aa, Artificial Sequence
  derived and/or modified protein sequence (wt) from neuraminidase__InfluenzaA__ADT79001
MNPNQKIITIGSISLTIATICFLMQIAILVTTVTLHFKQYECDSPANNQVMPCEPIIIERNITEIVYLTNTTIEKEICPKLVEYRNWSKPQCKITGFAPFSKDNSIRLSAGGDIWVTREPYVSCDPGKCYQFALGQGTTLDNKHSNDTIHDRIPHRTLLMNELGVPFHLGTRQVCIAWSSSSCHDGKAWLHVCVTGDDKNATASFIYDGRLVDSIGSWSQNILRTQESECVCINGTCTVVMTDGSASGKADTRILFIEEGKIVHISPLSGSAQHVEECSCYPRYPGVRCICRDNWKGSNRPVVDINVKDYSIDSSYVCSGLVGDTPRNNDRSSSSYCRNPNNERGNHGVKGWAFDDGNDVWMGRTISKDSRSGYETFKVIGGWSTPNSKSQINRQVIVDSDNRSGYSGIFSVEGKSCINRCFYVELIRGREQETRVWWTSNSIVVFCGTSGTYGTGSWPDGADINLMPI

SEQ ID NO: 20128 - protein, 469 aa, Artificial Sequence; identical to SEQ ID NO: 14118
  derived and/or modified protein sequence (wt) from neuraminidase__InfluenzaA__ADT79021

SEQ ID NO: 20129 - protein, 469 aa, Artificial Sequence
  derived and/or modified protein sequence (wt) from neuraminidase__InfluenzaA__ADT79041
MNPNQKIITIGSVSLTIATVCFLMQIAILVTTVTLHFRQYECDSPANNQVMPCEPIIIERNITEIVYLNNTTIEKEICPKLVEYRNWSKPQCKITGFAPFSKDNSIRLSAGGDIWVTREPYVSCDPGKCYQFALGQGTTLDNKHSNDTIHDRIPHRTLLMNELGVPFHLGTRQVCIAWSSSSCHDGKAWLHVCVTGDDKNATASFIYDGRLVDSIGSWSQNILRTQESECVCINGTCTVVMTDGSASGRADTKILFIEEGKIVHISPLSGSAQHVEECSCYPRYPGVRCICRDNWKGSNRPVVDINVEDYSIDSSYVCSGLVGDTPRNNDRSSNSNCRNPNNERGNHGVKGWAFDDGNDVWMGRTISKDLRSGYETFKVIGGWSTPNSKSQINRQVIVDSDNRSGYSGIFSVEGKSCINRCFYVELIRGREQETRVWWTSNSIVVFCGTSGTYGTGSWPDGADINLMPI

SEQ ID NO: 20130 - protein, 469 aa, Artificial Sequence; identical to SEQ ID NO: 15760
  derived and/or modified protein sequence (wt) from neuraminidase__InfluenzaA__ADT79121

SEQ ID NO: 20131 - protein, 469 aa, Artificial Sequence
  derived and/or modified protein sequence (wt) from neuraminidase__InfluenzaA__ADT79131
MNPNQKIITIGSVSLTIATVCFLMQIAILATTVTLHFKQHECDSPASNQVMPCEPIIIERNITEIVYLNNTTIEKEICPEVVEYRNWSKPQCQITGFAPFSKDNSIRLSAGGDIWVTREPYVSCDPGKCYQFALGQGTTLDNKHSNGTIHDRIPHRTLLMNELGVPFHLGTKQVCVAWSSSSCHDGKAWLHVCVTGDDRNATASFIYDGRLEDSIGSWSQNILRTQESECVCINGTCTVVMTDGSASGRADTRILFIKEGKIVHISPLSGSAQHIEECSCYPRYPDVRCICRDNWKGSNRPVLDISMEDYSIDSSYVCSGLVGDTPRNDDSSSNSNCRDPNNERGNPGVKGWAFDNGDDVWMGRTISKDLRSGYETFKVIGGWSTPNSKSQVNRQVIVDNNNWSGYSGIFSVEGKSCINRCFYVELIRGRSQETRVWWTSNSIVVFCGTSGTYGTGSWPDGANINFMPI

SEQ ID NO: 20132 - protein, 469 aa, Artificial Sequence; identical to SEQ ID NO: 16738
  derived and/or modified protein sequence (wt) from neuraminidase__InfluenzaA__ADT79234

SEQ ID NO: 20133 - protein, 469 aa, Artificial Sequence; identical to SEQ ID NO: 16728
  derived and/or modified protein sequence (wt) from neuraminidase__InfluenzaA__ADT79244

SEQ ID NO: 20134 - protein, 469 aa, Artificial Sequence
  derived and/or modified protein sequence (wt) from neuraminidase__InfluenzaA__ADU25480
MNPNQKIIIISSICLINGITSLILQIGNIISIWISHSIQIGNQNQTETCSQNIITYENNTWVNQTYVNISNNNFVAEQAVVSMKLAGSSPLCPVSGWAIYSKDNSVRIGSKGDVFVIREPFISCSHLECRTFFLTQGALLNDKHSNGTIKDRSPYRTLMSCPIGEVPSPYNSRFESVAWSASACHDGTSWLTIGISGPDNGAVAVLKYNDIITDTIKSWRNNILRTQESECVCVNGSCFTVMTDGPSNGQASYKIFKIEKGKVVKSVELNAPNYHYEECSCYPDSGEIICVCRDNWHGSNRPWVSFNQNLEYQIGYICSGILGDNPRPNDRTGSCGPVSLNGANGVKGFSFKYGNGVWIGRTKSSSSRSGFEMIWDPNGWTETDNNFLVKQDIVGMTDWSGYSGSFVQHPELTGMNCMRPCFWVELIRGRPKENTIWTSGSSISFCGVNSDTVDWSWPDGAELPFTIDK

SEQ ID NO: 20135 - protein, 469 aa, Artificial Sequence; identical to SEQ ID NO: 16738
  derived and/or modified protein sequence (wt) from neuraminidase__InfluenzaA__ADU59780

SEQ ID NO: 20136 - protein, 469 aa, Artificial Sequence
  derived and/or modified protein sequence (wt) from neuraminidase__InfluenzaA__ADU59789
MNPNQKIITIGSVCMTIGMANLILQIGNIISIWISHSIQLGNQNQIETCNQSVITYENNTWVNQTYVNVSNTNFAAGQSVVSVKLAGNSSLCPVSGWAIYSKDNSIRIGSKGDVFVIREPFISCSPLECRTFFLTQGALLNDKHSNGTIKDRSPYRTLMSCPIGEVPSPYNSRFESVAWSASACHDGINWLTIGISGPDNGAVAVLKYNGIITDTIKSWRNNILRTQESECACVNGSCFTVMTDGPSDGQASYKIFRIEKGKIVKSVEMNAPNYHYEECSCYPDSSEITCVCRDNWHGSNRPWVSFNQNLEYQIGYICSGIFGDNPRPNDKTGSCGPVSSNGANGVKGFSFKYGNGVWIGRTKSISSRNGFEMIWDPNGWTGTDNNFSIKQDIVGINEWSGYSGSFVQHPELTGLDCIRPCFWVELIRGRPKENTIWTSGSSISFCGVNSDTVGWSWPDGAELPFTIDK

SEQ ID NO: 20137 - protein, 469 aa, Artificial Sequence; identical to SEQ ID NO: 16738
  derived and/or modified protein sequence (wt) from neuraminidase__InfluenzaA__ADU59829

SEQ ID NO: 20138 - protein, 469 aa, Artificial Sequence
  derived and/or modified protein sequence (wt) from neuraminidase__InfluenzaA__ADU59838
MNPNQKIIIIGSVCMTIGMANLILQIGNIISIWISHSIQLGNQNQIETCNQSVITYENNTWVNQTYVNISNTNFAAGQSVVSVKLAGNSSLCPVSGWAIYSKDNSIRIGSKGDVFVIREPFISCSPLECRTFFLTQGALLNDKHSNGTIKDRSPYRTLMSCPIGEVPSPYNSRFESVAWSASACHDGINWLTIGISGPDNGAVAVLKYNGIITDTIKSWRNNILRTQESECACVNGSCFTVMTDGPSDGQASYKIFRIEKGKIVKSVEMNAPNYHFEECSCYPDSSEITCVCRDNWHGSNRPWVSFNQNLEYQIGYICSGIFGDNPRPNDKTGSCGPVSSNGANGVKGFSFKYGNGVWIGRTKSISSRNGFEMIWDPNGWTGTDNNFSIKQDIVGINEWSGYSGSFVQHPELTGLDCIRPCFWVELIRGRPKENTIWTSGSSISFCGVNSDTVDWSWPDGAELPFTIDK

SEQ ID NO: 20139 - protein, 469 aa, Artificial Sequence; identical to SEQ ID NO: 18089
  derived and/or modified protein sequence (wt) from neuraminidase__InfluenzaA__ADU59847

SEQ ID NO: 20140 - protein, 469 aa, Artificial Sequence; identical to SEQ ID NO: 16738
  derived and/or modified protein sequence (wt) from neuraminidase__InfluenzaA__ADU59907

SEQ ID NO: 20141 - protein, 469 aa, Artificial Sequence; identical to SEQ ID NO: 16738
  derived and/or modified protein sequence (wt) from neuraminidase__InfluenzaA__ADU59917

SEQ ID NO: 20142 - protein, 469 aa, Artificial Sequence; identical to SEQ ID NO: 16738
  derived and/or modified protein sequence (wt) from neuraminidase__InfluenzaA__ADU59920

SEQ ID NO: 20143 - protein, 469 aa, Artificial Sequence; identical to SEQ ID NO: 16738
  derived and/or modified protein sequence (wt) from neuraminidase__InfluenzaA__ADU59941

SEQ ID NO: 20144 - protein, 469 aa, Artificial Sequence
  derived and/or modified protein sequence (wt) from neuraminidase__InfluenzaA__ADU76311
MNPNQKIITIGSVCMTIGMANLILQIGNIISIWISHSIQLGNQNQIETCNQSVITYENNTWVNQTYVNISNTNFAAGQSVVSVKLAGNSSLCPVSGWAIYSKDNSIRIGSKGDVFVIREPFISCSPLECRTFFLTQGALLNDKHSNGTIKDRSPYRTLMSCPIGEVPSPYNSRFESVAWSASACHDGINWLTIGISGPDNGAVAVLKYNGIITDTIKSWRNNILRTQESECACVNGSCFTVMTDGPSDGQASYKIFRIEKGKIVKSVEMNAPNYHYEECSCYPDSSEITCVCRDNWHGSNRPWVSFNQNLEYQIGYICSGIFGDNPRPNDKTGSCGPVSSNGANGVKGFSFKYGNGVWIGRTKSISSRNGFEMIWDPNGWTGTDNNFSIKQDIVGINEWSGYSGSFVQHPELTGLDCIRPCFWVELIRGRPKENTIWTSGSSISFCGVNSDTVGWSWPDGAKLPFTIDK

SEQ ID NO: 20145 - protein, 469 aa, Artificial Sequence
  derived and/or modified protein sequence (wt) from neuraminidase__InfluenzaA__ADU76313
MNPNQKIITIGSVCMTIGMANLILQIGNIISIWISHSIQLGNQNQIETCNQSVITYENNTWVNQTYVNISNTNFAAGQSVVSVKLAGNSSLCPVSGWAIYSKDNSIRIGSKGDVFVIREPFISCSPLECRTFFLTQGALLNDKHSNGTIKDRSPYRTLMSCPIGEVPSPYNSRFESVAWSASACHDGINWLTIGISGPDNGAVAVLKYNGIITDTIKSWRNNILRTQESECACVNGSCFTVMTDGPSDGQASYKIFRIEKGKIVKSVEMNAPNYYYEECSCYPDSSEITCVCRDNWHGSNRPWVSFNQNLEYQIGYICSGIFGDNPRPNDKTGSCGPVSSNGANGVKGFSFKYGNGVWIGRTKSISSRNGFEMIWDPNGWTGTDNNFSIKQDIVGINEWSGYSGSFVQHPELTGLDCIRPCFWVELIRGRPKENTIWTSGSSISFCGVNSDTVGWSWPDGAKLPFTIDK

SEQ ID NO: 20146 - protein, 469 aa, Artificial Sequence; identical to SEQ ID NO: 20145
  derived and/or modified protein sequence (wt) from neuraminidase__InfluenzaA__ADU76314

SEQ ID NO: 20147 - protein, 469 aa, Artificial Sequence; identical to SEQ ID NO: 20145
  derived and/or modified protein sequence (wt) from neuraminidase__InfluenzaA__ADU76315

SEQ ID NO: 20148 - protein, 469 aa, Artificial Sequence; identical to SEQ ID NO: 20145
  derived and/or modified protein sequence (wt) from neuraminidase__InfluenzaA__ADU76316

SEQ ID NO: 20149 - protein, 469 aa, Artificial Sequence
  derived and/or modified protein sequence (wt) from neuraminidase__InfluenzaA__ADU76317
MNPNQKIITIGSVCMTIGMANLILQIGNIISIWISHSIQLGNQNQIETCNQSVITYENNTWVNQTYVNISNTNFAAGQSVVSVKLAGNSSLCPVSGWAIYSKDNSIRIGSKGDVFVIREPFISCSPLECRTFFLTQGALLNDKHSNGTIKDRSPYRTLMSCPIGEVPSPYNSRFESVAWSASACHDGINWLTIGISGPDNGAVAVLKYNGIITDTIKSWRNNILRTQESECACVNGSCFTVMTDGPSDGQASYKIFRIEKGKIVKSVEMNAPNYHYEECSCYPDSSEITCVCRDNWHGSNRPWVSFNQNLEYQIGYICSGIFGDNPRPNDKTGSCGPVSSNGANGVKGFSFKYGNGVWIGRTKSTSSRNGFEMIWDPNGWTGTDNNFSIKQDIVGINEWSGYSGSFVQHPELTGLDCIRPCFWVELIRGRPKENTIWTSGSSISFCGVNSDTVGWSWPDGAELPFTIDK

SEQ ID NO: 20150 - protein, 469 aa, Artificial Sequence
  derived and/or modified protein sequence (wt) from neuraminidase__InfluenzaA__ADU76318
MNPNQKIITIGSVCMTIGMANLILQIGNIISIWISHSIQLGNQNQIETCNQSVITYENNTWVNQTYVNISNTNFAAGQSVVSVKLAGNSSLCPVSGWAIYSKDNSIRIGSKGDVFVIREPFISCSPLECRTFFLTQGALLNDKHSNGTIKDRSPYRTLMSCPIGEVPSPYNSRFESVAWSASACHDGINWLTIGISGPDNGAVAVLKYNGIITDTIKSWRNNILRTQESECACVNGSCFTVMTDGPSDGQASYKIFRIEKGKIVKSVEMNAPNYHYEECSCYPDSSEITCVCRDNWHGSNRPWVSFNHNLEYQIGYICSGIFGDNPRPNDKTGSCGPVSSNGANGVKGFSFKYGNGVWIGRTKSISSRNGFEMIWDPNGWTGTDNNFSIKQDIVGINEWSGYSGSFVQHPELTGLDCIRPCFWVELIRGRPKENTIWTSGSSISFCGVNSDTVGWSWPDGAELPFTIDK

SEQ ID NO: 20151 - protein, 469 aa, Artificial Sequence; identical to SEQ ID NO: 17981
  derived and/or modified protein sequence (wt) from neuraminidase__InfluenzaA__ADU76319

SEQ ID NO: 20152 - protein, 469 aa, Artificial Sequence; identical to SEQ ID NO: 16738
  derived and/or modified protein sequence (wt) from neuraminidase__InfluenzaA__ADU76320

SEQ ID NO: 20153 - protein, 469 aa, Artificial Sequence; identical to SEQ ID NO: 16738
  derived and/or modified protein sequence (wt) from neuraminidase__InfluenzaA__ADU76321

SEQ ID NO: 20154 - protein, 469 aa, Artificial Sequence
  derived and/or modified protein sequence (wt) from neuraminidase__InfluenzaA__ADU76322
MNPNQKIITIGSVCMTIGMANLILQIGNIISIWISHSIQLGNQNQIETCNQSVITYENNTWVNQTYVNISNTNFAAGQSVVSVKLAGNSSLCPVSGWAIYSKDNSIRIGSKGDVFVIREPFISCSPLECRTFFLTQGALLNDKHSNGTIKDRSPYRTLMSCPIGEVPSPYNSRFESVAWSASACHDGINWLTIGISGPDNGAVAVLKYNGIITDTIKSWRNNILRTQESECACVNGSCFTVMTDGPSDGQASYKIFRIEKGKVVKSVEMNAPNYHYEECSCYPDSSEITCVCRDNWHGSNRPWVSFNQNLEYQIGYICSGIFGDNPRPNDKTGSCGPVSSNGANGVKGFSFKYGNGVWIGRTKSISSRNGFEMIWDPNGWTGTDNNFSIKQDIVGINEWSGYSGSFVQHPELTGLDCIRPCFWVELIRGRPKENTIWTSGSIISFCGVNSDTVGWSWPDGAELPFTIDK

SEQ ID NO: 20155 - protein, 469 aa, Artificial Sequence; identical to SEQ ID NO: 20144
  derived and/or modified protein sequence (wt) from neuraminidase__InfluenzaA__ADU76323

SEQ ID NO: 20156 - protein, 469 aa, Artificial Sequence; identical to SEQ ID NO: 20145
  derived and/or modified protein sequence (wt) from neuraminidase__InfluenzaA__ADU76324

SEQ ID NO: 20157 - protein, 469 aa, Artificial Sequence; identical to SEQ ID NO: 20144
  derived and/or modified protein sequence (wt) from neuraminidase__InfluenzaA__ADU76325

SEQ ID NO: 20158 - protein, 469 aa, Artificial Sequence; identical to SEQ ID NO: 20145
  derived and/or modified protein sequence (wt) from neuraminidase__InfluenzaA__ADU76326

SEQ ID NO: 20159 - protein, 469 aa, Artificial Sequence; identical to SEQ ID NO: 20145
  derived and/or modified protein sequence (wt) from neuraminidase__InfluenzaA__ADU76327

SEQ ID NO: 20160 - protein, 469 aa, Artificial Sequence; identical to SEQ ID NO: 20144
  derived and/or modified protein sequence (wt) from neuraminidase__InfluenzaA__ADU76328

SEQ ID NO: 20161 - protein, 469 aa, Artificial Sequence; identical to SEQ ID NO: 20145
  derived and/or modified protein sequence (wt) from neuraminidase__InfluenzaA__ADU76329

SEQ ID NO: 20162 - protein, 469 aa, Artificial Sequence; identical to SEQ ID NO: 20145
  derived and/or modified protein sequence (wt) from neuraminidase__InfluenzaA__ADU76330

SEQ ID NO: 20163 - protein, 469 aa, Artificial Sequence; identical to SEQ ID NO: 20145
  derived and/or modified protein sequence (wt) from neuraminidase__InfluenzaA__ADU76331

SEQ ID NO: 20164 - protein, 469 aa, Artificial Sequence; identical to SEQ ID NO: 20145
  derived and/or modified protein sequence (wt) from neuraminidase__InfluenzaA__ADU76332

SEQ ID NO: 20165 - protein, 469 aa, Artificial Sequence; identical to SEQ ID NO: 16738
  derived and/or modified protein sequence (wt) from neuraminidase__InfluenzaA__ADU76333

SEQ ID NO: 20166 - protein, 469 aa, Artificial Sequence; identical to SEQ ID NO: 16738
  derived and/or modified protein sequence (wt) from neuraminidase__InfluenzaA__ADU76334

SEQ ID NO: 20167 - protein, 469 aa, Artificial Sequence; identical to SEQ ID NO: 16738
  derived and/or modified protein sequence (wt) from neuraminidase__InfluenzaA__ADU76335

SEQ ID NO: 20168 - protein, 469 aa, Artificial Sequence; identical to SEQ ID NO: 20145
  derived and/or modified protein sequence (wt) from neuraminidase__InfluenzaA__ADU76336

SEQ ID NO: 20169 - protein, 469 aa, Artificial Sequence; identical to SEQ ID NO: 17505
  derived and/or modified protein sequence (wt) from neuraminidase__InfluenzaA__ADU76337

SEQ ID NO: 20170 - protein, 469 aa, Artificial Sequence; identical to SEQ ID NO: 18640
  derived and/or modified protein sequence (wt) from neuraminidase__InfluenzaA__ADU76338

SEQ ID NO: 20171 - protein, 469 aa, Artificial Sequence; identical to SEQ ID NO: 20144
  derived and/or modified protein sequence (wt) from neuraminidase__InfluenzaA__ADU76339

SEQ ID NO: 20172 - protein, 469 aa, Artificial Sequence; identical to SEQ ID NO: 16738
  derived and/or modified protein sequence (wt) from neuraminidase__InfluenzaA__ADU76341

SEQ ID NO: 20173 - protein, 469 aa, Artificial Sequence; identical to SEQ ID NO: 16738
  derived and/or modified protein sequence (wt) from neuraminidase__InfluenzaA__ADU76342

SEQ ID NO: 20174 - protein, 469 aa, Artificial Sequence; identical to SEQ ID NO: 16738
  derived and/or modified protein sequence (wt) from neuraminidase__InfluenzaA__ADU76343

SEQ ID NO: 20175 - protein, 469 aa, Artificial Sequence; identical to SEQ ID NO: 20145
  derived and/or modified protein sequence (wt) from neuraminidase__InfluenzaA__ADU76344

SEQ ID NO: 20176 - protein, 469 aa, Artificial Sequence; identical to SEQ ID NO: 20145
  derived and/or modified protein sequence (wt) from neuraminidase__InfluenzaA__ADU76345

SEQ ID NO: 20177 - protein, 469 aa, Artificial Sequence
  derived and/or modified protein sequence (wt) from neuraminidase__InfluenzaA__ADU76346
MNPNQKIITIGSVCMTIGMANLILQIGNIISIWISHSIQLGNQNQIETCNQSVITYENNTWVNQTYVNISNTNFAAGQSVVSVKLAGNSSLCPVSGWAIYSKDNSIRIGSKGDVFVIREPFISCSPLECRTFFLTQGALLNDKHSNGTIKDRSPYRTLMSCPIGEVPSPYNSRFESVAWSASACHDGINWLTIGISGPDNGAVAVLKYNGIITDTIKSWRNNILRTQESECACVNGSCFTVMTDGPSDGQASYKIFRIEKGKIVKSVEMNAPNYHYEECSCYPDSSEITCVCRDNWHGSNRPWVSFNQNLEYQIGYICSGIFGDNPRPNDKTGSCGPVSSNGANGVKGFSFKYGNGVWIGRTKSISSRNGFEMIWDPNGWTETDNNFSIKQDIVGINEWSGYSGSFVQHPELTGLDCIRPCFWVELIRGRPKENTIWTSGSSISFCGVNSDTVGWSWPDGAELPFTIDK

SEQ ID NO: 20178 - protein, 469 aa, Artificial Sequence; identical to SEQ ID NO: 17505
  derived and/or modified protein sequence (wt) from neuraminidase__InfluenzaA__ADU76347

SEQ ID NO: 20179 - protein, 469 aa, Artificial Sequence
  derived and/or modified protein sequence (wt) from neuraminidase__InfluenzaA__ADV17285
MNPNQEIITIGSVCMTIGMANLILQIGNIISIWISHSIQLGNQNQIETCNQSVITYENNTWVNQTYVNISNTNFAAGQSVVSVKLAGNSSLCPVSGWAIYSKDNSIRIGSKGDVFVIREPFISCSPLECRTFFLTQGALLNDKHSNGTIKDRSPYRTLMSCPIGEVPSPYNSRFESVAWSASACHDGINWLTIGISGPDNGAVAVLKYNGIITDTIKSWRNNILRTQESECACVNGSCFTVMTDGPSDGQASYKIFRIEKGKIVKSVEMNAPNYHYEECSCYPDSSEITCVCRDNWHGSNRPWVSFNQNLEYQIGYICSGIFGDNPRPNDKTGSCGPVSSNGANGVKGFSFRYGNGVWIGRTKSISSRNGFEMIWDPNGWTGTDNNFSIKQDIVGINEWSGYSGSFVQHPELTGLDCIRPCFWVELIRGRPKENTIWTSGSSISFCGVNSDTVGWSWPDGAELPFTIDK

SEQ ID NO: 20180 - protein, 469 aa, Artificial Sequence; identical to SEQ ID NO: 16738
  derived and/or modified protein sequence (wt) from neuraminidase__InfluenzaA__ADV17295

SEQ ID NO: 20181 - protein, 469 aa, Artificial Sequence
  derived and/or modified protein sequence (wt) from neuraminidase__InfluenzaA__ADV17305
MNPNQKIITIGSVCMTIGMANLILQIGNIISIWISHSIQLGNQNQIETCNQSVITYENNTWVNQTYVNISNTNFAAGQSVVSVKLAGNSSLCPVSGWAIYSKDNSIRIGSKGDVFVIREPFISCSSLECRTFFLTQGALLNDKHSNGTIKDRSPYRTLMSCPIGEVPSPYNSRFESVAWSASACHDGINWLTIGISGSDNGAVAVLKYNGIITDTIKSWRNNILRTQESECACVNGSCFTIMTDGPSDGQASYKIFRIEKGKIVKSVEMNAPNYHYEECSCYPDSSEITCVCRDNWHGSNRPWVSFNQNLEYQIGYICSGIFGDNPRPNDKTGSCGPVSSNGANGVKGFSFKYGNGVWIGRTKSISSRNGFEMIWDPNGWTGTDNNFSIKQDIVGINEWSGYSGSFVQHPELTGLDCIRPCFWVELIRGRPKENTIWTSGSSISFCGVNSDTVGWSWPDGAELPFTIDK

SEQ ID NO: 20182 - protein, 469 aa, Artificial Sequence; identical to SEQ ID NO: 16738
  derived and/or modified protein sequence (wt) from neuraminidase__InfluenzaA__ADV17315

SEQ ID NO: 20183 - protein, 469 aa, Artificial Sequence; identical to SEQ ID NO: 18169
  derived and/or modified protein sequence (wt) from neuraminidase__InfluenzaA__ADV17325

SEQ ID NO: 20184 - protein, 469 aa, Artificial Sequence
  derived and/or modified protein sequence (wt) from neuraminidase__InfluenzaA__ADV17335
MNPNQKIITIGSVCMTIGMANLILQIGNIISIWISHSIQLGNQNQIETCNQSVITYENNTWVNQTYVNISNTNFAAGQSVVSVKLAGNSSLCPVSGWAIYSKDNSIRIGSKGDVFVIREPFISCSPLECRTFFLTQGALLNDKHSNGTIKDRSPYRTLMSCPIGEVPSPYNSRFESVAWSASACHDGINWLTIGISGPDNGAVAVLKYNGIITDTIKSWRNNILRTQESECACVNGSCFTVMTDGPSDGQASYKIFRIEKGKIVKSVEMNAPNYHYEECSCYPDSSEITCVCRDNWHGSNRPWVSFNQNLEYQIGYICSGVFGDNPRPNDKTGSCGPVSSNGANGVKGFSFKYGNGVWIGRTKSISSRNGFEMIWDPNGWTGTDNNFSIKQDIVGINEWSGYSGSFVQHPELTGLDCIRPCFWVELIRGRPKENTIWTSGSSISFCGVNSDTVGWSWPDGAECPFTIDK

SEQ ID NO: 20185 - protein, 469 aa, Artificial Sequence; identical to SEQ ID NO: 16738
  derived and/or modified protein sequence (wt) from neuraminidase__InfluenzaA__ADV19022

SEQ ID NO: 20186 - protein, 469 aa, Artificial Sequence
  derived and/or modified protein sequence (wt) from neuraminidase__InfluenzaA__ADV41679
MNPNQKIITIGSVCMTIGMANLILQIGNIISIWISHSIQLRNQNQIETCNQSVITYENNTWVNQTYVNISNTNFAAGQSVVSVKLAGNSSLCPVSGWAIYSKDNSIRIGSKGDVFVIREPFISCSPLECRTFFLTQGALLNDKHSNGTIKDRSPYRTLMSCPIGEVPSPYNSRFESVAWSASACHDGINWLTIGISGPDNGAVAVLKYNGIITDTIKSWRNNILRTQESECACVNGSCFTVMTDGPSDGQASYKIFRIEKGKIVKSVEMNAPNYHYEECSCYPDSSEITCVCRDNWHGSNRPWVSFNQNLEYQIGYICSGIFGDNPRPNDKTGSCGPVSSNGANGVKGFSFKYGNGVWIGRTKSISSRNGFEMIWDPNGWTGTDNNFSIKQDIVGINEWSGYSGSFVQHPELTGLDCIRPCFWVELIRGRPKENTIWTSGSSISFCGVNSDTVGWSWPDGAELPFTIDK

SEQ ID NO: 20187 - protein, 469 aa, Artificial Sequence
  derived and/or modified protein sequence (wt) from neuraminidase__InfluenzaA__ADV76582
MNPNQKIITIGSVSLTISTVCFFMQIAILITTVTLHFKQYEFNSPPNNQVMLCEPTIIERNITEIVYLTNTTIEKEICPKLAEYRNWSKPQCDITGFAPFSKDNSIRLSAGGDIWVTREPYVSCDPDKCYQFALGQGTTLNNVHSNNTVRDRTPYRTLLMNELGVPFHLGTKQVCIAWSSSSCHDGKAWLHVCITGDDKNATASFIYNGRLVDSVVSWSKEILRTQESECVCINGTCTVVMTDGSASGKADTKILFIEEGKIVHTSTLSGSAQHVEECSCYPRYPGVRCVCRDNWKGSNRPIVDINIKDHSIVSSYVCSGLVGDTPRKNDSSSSSHCLDPNNEEGGHGVKGWAFDDGNDVWMGRTINETSRLGYETFKVIEGWSNPKSKLQINRQVIVDKGNRSGYSGIFSVEGKSCINRCFYVELIRGRKEETEVLWTSNSIVVFCGTSGTYGTGSWPDGADLNLMPI

SEQ ID NO: 20188 - protein, 469 aa, Artificial Sequence; identical to SEQ ID NO: 16599
  derived and/or modified protein sequence (wt) from neuraminidase__InfluenzaA__ADV76590

SEQ ID NO: 20189 - protein, 469 aa, Artificial Sequence; identical to SEQ ID NO: 16599
  derived and/or modified protein sequence (wt) from neuraminidase__InfluenzaA__ADV76601

SEQ ID NO: 20190 - protein, 469 aa, Artificial Sequence; identical to SEQ ID NO: 17592
  derived and/or modified protein sequence (wt) from neuraminidase__InfluenzaA__ADV76612

SEQ ID NO: 20191 - protein, 469 aa, Artificial Sequence; identical to SEQ ID NO: 16599
  derived and/or modified protein sequence (wt) from neuraminidase__InfluenzaA__ADV76623

SEQ ID NO: 20192 - protein, 469 aa, Artificial Sequence; identical to SEQ ID NO: 16599
  derived and/or modified protein sequence (wt) from neuraminidase__InfluenzaA__ADV76634

SEQ ID NO: 20193 - protein, 469 aa, Artificial Sequence; identical to SEQ ID NO: 19466
  derived and/or modified protein sequence (wt) from neuraminidase__InfluenzaA__ADV76645

SEQ ID NO: 20194 - protein, 469 aa, Artificial Sequence
  derived and/or modified protein sequence (wt) from neuraminidase__InfluenzaA__ADV76667
MNPNQKIITIGSVSLTIATVCFLMQIAILVTTVTLHFKQYECDSPASNQVMPCEPIIIERNITEIVYLNNTTIEKEICPKVVEYRNWSKPQCQITGFAPFSKDNSIRLSAGGDIWVTREPYVSCDHGKCYQFALGQGTTLDNKHSNDTIHDRIPHRTLLMNELGVPFHLGTRQVCIAWSSSSCHDGKAWLHVCITGDDKNATASFIYDGRLVDSIGSWSQNILRTQESECVCINGTCTVVMTDGSASGRADTRILFIEEGKIVHISPLSGSAQHVEECSCYPRYPGVRCICRDNWKGSNRPVVDINMEDYSIDSSYVCSGLVGDTPRNDDRSSNSKSRNPNNERGNQGVKGWAFDNGDDVWMGRTISRDLRSGYETFKVIGGWSTPNSKSQINRQVIVDSDNRSGYSGIFSVEGKSCINRCFYVELIRGRKQETRVWWTSNSIVVFCGTSGTYGTGSWPDGANINFMPI

SEQ ID NO: 20195 - protein, 469 aa, Artificial Sequence; identical to SEQ ID NO: 19468
  derived and/or modified protein sequence (wt) from neuraminidase__InfluenzaA__ADV76676

SEQ ID NO: 20196 - protein, 469 aa, Artificial Sequence; identical to SEQ ID NO: 18609
  derived and/or modified protein sequence (wt) from neuraminidase__InfluenzaA__ADV76697

SEQ ID NO: 20197 - protein, 469 aa, Artificial Sequence
  derived and/or modified protein sequence (wt) from neuraminidase__InfluenzaA__ADV76708
MNPNQKIITIGSVSLTISTICFFMQTAILITTVTLHFKQCEFNSPPNNQVMLCEPTIIERNITEIVYLTNITIEKEICPKLAEYRNWSKPQCDITGFAPFSKDNSIRLSAGGDIWVTREPYVSCDPDKCYQFALGQGTTLNNVHSNNTVRDRTPYRTLLMNELGVPFHLGTKQVCIAWSSSSCHDGKAWLHVCITGDDKNATASFIYNGRLVDSVVSWSKEILRTQESECVCINGTCTVVMTDGSASGKADTKILFIEEGKIVHTSTLSGSAQHVEECSCYPRYPGVRCVCRDNWKGSNRPIVDINIKDHSIVSSYVCSGLVGDTPRKNDSSSSSHCLDPNNEEGGHGVKGWAFDDGNDVWMGRTISEKSRLGYETFKVIEGWSNPKSKLQINRQVIVDRGNRSGYSGIFSVEGKSCINRCFYVELIRGRKEETEVLWTSNSIVVFCGTSGTYGTGSWPDGADINLMPI

SEQ ID NO: 20198 - protein, 469 aa, Artificial Sequence
  derived and/or modified protein sequence (wt) from neuraminidase__InfluenzaA__ADV76719
MNPNQKIITIGSVSLTISTICFFMQIAILITTVTLHFKQYEFNSPPNNQVMLCEPTIIEKNITEIVYLTNTTIEKEICPKLAEYRNWSKPQCDITGFAPFSKDNSIRLSAGGDIWVTREPYVSCDPDKCYQFALGQGTTLNNVHSNNTVRDRTPYRTLLMNELGVPFHLGTKQVCIAWSSSSCHDGKAWLHVCITGDDKNATASFIYNGRLVDSVVSWSKEILRTQESECVCINGTCTVVMTDGSASGKADTKILFIEEGKIVHTSTLSGSAQHVEECSCYPRYPGVRCVCRDNWKGSNRPIVDINIKDHSIVSSYVCSGLVGDTPRKNDSSSSSHCLDPNNEEGGHGVKGWAFDDGNDVWMGRTISEKSRLGYETFKVIEGWSNPKSKLQMNRQVIVDRGNRSGYSGIFSVEGKSCINRCFYVELIRGRKEETEVLWTSNSIVVFCGTSGTYGTGSWPDGADINLMPI

SEQ ID NO: 20199 - protein, 469 aa, Artificial Sequence
  derived and/or modified protein sequence (wt) from neuraminidase__InfluenzaA__ADV76730
MNPNQKIITIGSVSLTISTICFFMQIAILITTVTLHFKQYEFNSPPNNQVMLCEPTIIERNITEIVYLTNTTIEKEICPKLAEYRNWSKPQCDITGFAPFSKDNSIRLSAGGDIWVTREPYVSCDPDKCYQFALGQGTTLNNVHSNNTVRDRTPYRTLLMNELGVPFHLGTKQVCIAWSSSSCHDGKAWLHVCITGDDKNATASFIYNGRLVDSVVSWSKETLRTQESECVCINGTCTVVMTDGSASGKADTKILFIEEGKIVHTSTLSGSAQHVEECSCYPRYPGVRCVCRDNWKGSNRPIVDINIKDHSIVSSYVCSGLVGDTPRKDDSSSSSHCLDPNNEEGGHGVKGWAFDDGNDVWMGRTISEKSRLGYETFKVIEGWSNPKSKLQINRQVIVDRGNRSGYSGIFSVEGKSCINRCFYVELIRGRKEETEVLWTSNSIVVFCGTSGTYGTGSWPDGADINLMPI

SEQ ID NO: 20200 - protein, 469 aa, Artificial Sequence
  derived and/or modified protein sequence (wt) from neuraminidase__InfluenzaA__ADV78132
MNPNQKIITIGSVCMTIGMANLILQIGNIISIWISHSIQLGNQSQIETCNQSVITYENNTWLNQTYVNISNTNFAAGQSVVSVKLAGNSSLCPVSGWAIYSKDNSIRIGSKGDVFVIREPFISCSPSECRTFFLTQGALLNDKHSNGTIKDRSPYRTLMSCPIGEVPSPYNSRFESVAWSASACHDGINWLTIGISGPDNGAVAVLKYNGIITDTIKSWRNNILRTQESECACVNGSCFTIMTDGPSDGQASYKIFRIEKGKIVKSVGMNAPNYHYEECSCYPDSSEITCVCRDNWHGSNRPWVSFNQNLEYQIGYICSGIFGDNPRPNDKTGSCGPVSSNGANGVKGFSFKYGNGVWIGRTKSISSRKGFEMIWDPNGWTGTDNNFSIKQDIVGINEWSGYSGSFVQHPELTGLDCIRPCFWVELIRGRPKENTIWASGSSISFCGVNSDTVGWSWPDGAELPFIIDK

SEQ ID NO: 20201 - protein, 470 aa, Artificial Sequence
  derived and/or modified protein sequence (wt) from neuraminidase__InfluenzaA__ADW09104
MNPNQKIITIGSISIAIGIISLMLQIGNIISIWASHSIQTGSQNNTGICNQRIITYENSTWVNHTYVNINNTNVVAGEDKTSVTLAGNSSLCSISGWAIYTKDNSIRIGSKGDVFVIREPFISCSHLECRTFFLTQGALLNDKHSNGTVKDRSPYRALMSCPLGEAPSPYNSKFESVAWSASACHDGMGWLTIGISGPDNGAVAVLKYNGIITGTIKSWKKQILRTQESECVCMNGSCFTIMTDGPNNKAASYKIFKIEKGKVTKSIELNAPNFYYEECSCYPDTGIVMCVCRDNWHGSNRPWVSFNQNLDYQIGYICSGVFGDNPRPEDGEGSCNPVTVDGANGVKGFSYKYGNGVWIGRTKSNRLRKGFEMIWDPNGWTNTDSDFSVKQDVVAITDWSGYSGSFVQHPELTGLDCIRPCFWVELVRGLPRENTTIWTSGSSISFCGVNSDTANWSWPDGAELPFTIDK

SEQ ID NO: 20202 - protein, 470 aa, Artificial Sequence; identical to SEQ ID NO: 17461
  derived and/or modified protein sequence (wt) from neuraminidase__InfluenzaA__ADW09114

SEQ ID NO: 20203 - protein, 470 aa, Artificial Sequence
  derived and/or modified protein sequence (wt) from neuraminidase__InfluenzaA__ADW09123
MNPNQKIITIGSISIAIGITSLMLQIGNIISIWASHSIQTGSQNNTGICNQRIITYENSTWVNHTYVNINNTNVVAGEDKTSVTLAGNSSLCSISGWAIYTKDNSIRIGSKGDVFVIREPFISCSHLECRTFFLTQGALLNDKHSNGTVKDRSPYRALMSCPLGEAPSPYNSKFESVAWSASACHDGMGWLTIGISGPDNGAVAVLKYNGIITGTIKSWKKQILRTQESECVCMNGSCFTIMTDGPSNKAASYKIFKIEKGKVTKSIELNAPNFYYEECSCYPDTGIVMCVCRDNWHGSNRPWVSFNQNLDYQIGYICSGVFGDNPRPEDGEGSCNPVTVDGADGVKGFSYKYGNGVWIGRTKSNRLRKGFEMIWDPNGWTNTDSDFSVKQDVVAITDWSGYSGSFVQHPELTGLDCIRPCFWVELVRGLPRENTTIWTSGSSISFCGVNSDTANWSWPDGAELPFTIDK

SEQ ID NO: 20204 - protein, 470 aa, Artificial Sequence
  derived and/or modified protein sequence (wt) from neuraminidase__InfluenzaA__ADW09156
MNPNQKIITIGSISIAIGIISLMLQIGNIISIWASHSIQTGSQNNTGICNQRIITYENSTWVNHTYVNINNTNVVAGEDKTSVTLAGNSSLCSISGWAIYTKDNSIRIGSKGDVFVIREPFISCSHLECRTFFLTQGALLNDKHSNGTVKDRSPYRALMSCPLGEAPSPYNSKFESVAWSASACHDGMGWLTIGISGPDNGAVAVLKYNGIITGTIKSWKKQILRTQESECVCMNGSCFTIMTDGPSNKAASYKIFKIEKGKVTKSIELNAPNFYYEECSCYPDTGIVMCVCRDNWHGSNRPWVSFNQNLDYQIGYICSGVFGDNPRPEDGEGSCNPVTVDGADGVKGFSYKYGNGVWIGRTKSNRLRKGFEMIWDPNGWTNTDSDFSVKQDVVAITDWSGYSGSFVQHPELTGLDCIRPCFWVELVRGLPRENTTIWTSGSSISFCGVNSDTANWSWPDGAELPFTIDK

SEQ ID NO: 20205 - protein, 470 aa, Artificial Sequence
  derived and/or modified protein sequence (wt) from neuraminidase__InfluenzaA__ADW09167
MNPNQKIITIGSISIAIGIISLMLQIGNIISIWASHSIQTGSQNNTGICNQRIITYENSTWVNHTYVNINNTNVVAGEDKTSVTLAGNSSLCSISGWAIYTKDNSIRIGSKGDVFVIREPFISCSHLECRTFFLTQGALLNDKHSNGTVKDRSPYRALMSCPLGEAPSPYNSKFESVAWSASACHDGMGWLTIGISGPDNGAVAVLKYNGIITGTIKSWKKQILRTQESECVCMNGSCFTIMTDGPSNKAASYKIFKIEKGKVTKSIELNAPNFYYEECSCYPDTGIVMCVCRDNWHGSNRPWVSFNQNLDYQIGYICSGVFGDNPRPEDGEGSCNPVTVNGADGVKGFSYKYGNGVWIGRTKSNRLRKGFEMIWDPNGWTNTDSDFSVKQDVVAITDWSGYSGSFVQHPELTGLDCIRPCFWVELVRGLPRENTTIWTSGSSISFCGVNSDTANWSWPDGAELPFTIDK

SEQ ID NO: 20206 - protein, 470 aa, Artificial Sequence; identical to SEQ ID NO: 17461
  derived and/or modified protein sequence (wt) from neuraminidase__InfluenzaA__ADW09178

SEQ ID NO: 20207 - protein, 470 aa, Artificial Sequence; identical to SEQ ID NO: 17461
  derived and/or modified protein sequence (wt) from neuraminidase__InfluenzaA__ADW09189

SEQ ID NO: 20208 - protein, 470 aa, Artificial Sequence; identical to SEQ ID NO: 20205
  derived and/or modified protein sequence (wt) from neuraminidase__InfluenzaA__ADW09211

SEQ ID NO: 20209 - protein, 470 aa, Artificial Sequence
  derived and/or modified protein sequence (wt) from neuraminidase__InfluenzaA__ADW09222
MNPNQKIITIGSISIAIGIISLMLQIGNIISIWASHSIQTGSQNNTGICNQRIITYENSTWVNHTYVNINNTNVVAGEDKTSVTLAGNSSLCSISGWAIYTKDNSIRIGSKGDVFVIREPFISCSHLECRTFFLTQGALLNDKHSNGTVKDRSPYRALMSCPLGEAPSPYNSKFESVAWSASACHDGMGWLTIGISGPDNGAVAVLKYNGIITGTIKSWKKQILRTQESECVCMNGSCFTIMTDGPSNKAASYKIFKIEKGKVTKSIELNAPNFYYEECSCYPDTGIVMCVCRDNWHGSNRPWVSFNQNLDYQIGYICSGVFGDNPRPEDGEGSCNSVTVDGADGVKGFSYKYGNGVWIGRTKSNRLRKGFEMIWDPNGWTNTDSDFSVKQDVVAITDWSGYSGSFVQHPELTGLDCIRPCFWVELVRGLPRENTTIWTSGSSISFCGVNSDTANWSWPDGAELPFTIDK

SEQ ID NO: 20210 - protein, 470 aa, Artificial Sequence
  derived and/or modified protein sequence (wt) from neuraminidase__InfluenzaA__ADW09233
MNPNQKIITIGSISIAIGTISLMLQIGNIISIWASHSIQTGSQNNTGICNQRIITYENSTWVNHTYVNINNTNVVAGEDKTSVTLAGNSSLCSISGWAIYTKDNSIRIGSKGDVFVIREPFISCSHLECRTFFLTQGALLNDKHSNGTVKDRSPYRALMSCPLGEAPSPYNSKFESVAWSASACHDGMGWLTIGISGPDNGAVAVLKYNGIITGTIKSWKKQILRTQESECVCMNGSCFTIMTDGPSNKAASYKIFKIEKGKVTKSIELNAPNFYYEECSCYPDTGIVMCVCRDNWHGSNRPWVSFNQNLDYQIGYICSGVFGDNPRPEDGEGSCNPVTVDGANGVKGFSYKYGNGVWIGRTKSNRLRKGFEMIWDPNGWTNTDSDFSVKQDVVAITDWSGYSGSFVQHPELTGLDCIRPCFWVELVRGLPRENTTIWTSGSSISFCGVNSDTANWSWPDGAELPFTIDK

SEQ ID NO: 20211 - protein, 470 aa, Artificial Sequence; identical to SEQ ID NO: 20204
  derived and/or modified protein sequence (wt) from neuraminidase__InfluenzaA__ADW09244

SEQ ID NO: 20212 - protein, 470 aa, Artificial Sequence; identical to SEQ ID NO: 20204
  derived and/or modified protein sequence (wt) from neuraminidase__InfluenzaA__ADW09255

SEQ ID NO: 20213 - protein, 470 aa, Artificial Sequence; identical to SEQ ID NO: 20204
  derived and/or modified protein sequence (wt) from neuraminidase__InfluenzaA__ADW09266

SEQ ID NO: 20214 - protein, 470 aa, Artificial Sequence; identical to SEQ ID NO: 20204
  derived and/or modified protein sequence (wt) from neuraminidase__InfluenzaA__ADW09277

SEQ ID NO: 20215 - protein, 470 aa, Artificial Sequence; identical to SEQ ID NO: 17461
  derived and/or modified protein sequence (wt) from neuraminidase__InfluenzaA__ADW09288

SEQ ID NO: 20216 - protein, 470 aa, Artificial Sequence; identical to SEQ ID NO: 20205
  derived and/or modified protein sequence (wt) from neuraminidase__InfluenzaA__ADW09299

SEQ ID NO: 20217 - protein, 470 aa, Artificial Sequence; identical to SEQ ID NO: 17461
  derived and/or modified protein sequence (wt) from neuraminidase__InfluenzaA__ADW09310

SEQ ID NO: 20218 - protein, 470 aa, Artificial Sequence; identical to SEQ ID NO: 17461
  derived and/or modified protein sequence (wt) from neuraminidase__InfluenzaA__ADW09330

SEQ ID NO: 20219 - protein, 470 aa, Artificial Sequence; identical to SEQ ID NO: 20204
  derived and/or modified protein sequence (wt) from neuraminidase__InfluenzaA__ADW10475

SEQ ID NO: 20220 - protein, 470 aa, Artificial Sequence; identical to SEQ ID NO: 20205
  derived and/or modified protein sequence (wt) from neuraminidase__InfluenzaA__ADW10486

SEQ ID NO: 20221 - protein, 470 aa, Artificial Sequence; identical to SEQ ID NO: 17461
  derived and/or modified protein sequence (wt) from neuraminidase__InfluenzaA__ADW10497

SEQ ID NO: 20222 - protein, 470 aa, Artificial Sequence
  derived and/or modified protein sequence (wt) from neuraminidase__InfluenzaA__ADW10508
MNPNQKIITIGSISIAIGIISLMLQIGNIISIWASHSIQTGSQNNTGICNQRIITYENSTWVNHTYVNINNTNVVAGEDKTSVTLAGNSSLCSISGWAIYTKDNSIRIGSKGDVFVIREPFISCSHLECRTFFLTQGALVNDKHSNGTVKDRSPYRALMSCPLGEAPSPYNSKFESVAWSASACHDGMGWLTIGISGPDNGAVAVLKYNGIITGTIKSWKKQILRTQESECVCMNGSCFTIMTDGPSNKAASYKIFKIEKGKVTKSIELNAPNFYYEECSCYPDTGIVMCVCRDNWHGSNRPWVSFNQNLDYQIGYICSGVFGDNPRPEDGEGSCNPVTVNGADGVKGFSYKYGNGVWIGRTKSNRLRKGFEMIWDPNGWTNTDSDFSVKQDVVAITDWSGYSGSFVQHPELTGLDCIRPCFWVELVRGLPRENTTIWTSGSSISFCGVNSDTANWSWPDGAELPFTIDK

SEQ ID NO: 20223 - protein, 470 aa, Artificial Sequence; identical to SEQ ID NO: 17461
  derived and/or modified protein sequence (wt) from neuraminidase__InfluenzaA__ADW10519

SEQ ID NO: 20224 - protein, 470 aa, Artificial Sequence; identical to SEQ ID NO: 17461
  derived and/or modified protein sequence (wt) from neuraminidase__InfluenzaA__ADW10530

SEQ ID NO: 20225 - protein, 470 aa, Artificial Sequence
  derived and/or modified protein sequence (wt) from neuraminidase__InfluenzaA__ADW10541
MNPNQKIITIGSISIAIGIISLMLQIGNIISIWASHSIQTGSQNNTGICNQRIITYENSTWVNHTYVNINNTNVVAGEDKTSVTLAGNSSLCSISGWAIYTKDNSIRIGSKGDVFVIREPFISCSHLECRTFFLTQGALLNDKHSNGTVKDRSPYRALMSCPLGEAPSPYNSKFESVAWSASACHDGMGWLTIGISGPDNGAVAVLKYNGIITGTIKSWKKQILRTQESECVCMDGSCFTIMTDGPSNKAASYKIFKIEKGKVTKSIELNAPNFYYEECSCYPDTGIVMCVCRDNWHGSNRPWVSFNQNLDYQIGYICSGVFGDNPRPEDGEGSCNPVTVDGANGVKGFSYKYGNGVWIGRTKSNRLRKGFEMIWDPNGWTNTDSDFSVKQDVVAITDWSGYSGSFVQHPELTGLDCIRPCFWVELVRGLPRENTTIWTSGSSISFCGVNSDTANWSWPDGAELPFTIDK

SEQ ID NO: 20226 - protein, 470 aa, Artificial Sequence
  derived and/or modified protein sequence (wt) from neuraminidase__InfluenzaA__ADW10552
MNPNQKIITIGSISIAIGIISLMLQIGNIISIWASHSIQTGSQNNTGICNQRIITYENSTWVNHTYVNINNTNVVAGEDKTSVTLAGNSSLCSISGWAIYTKDNSIRIGSKGDVFVIREPFISCSHLECRTFFLTQGALLNDKHSNGTVKDRSPYRALMSCPLGEAPSPYNSKFESVAWSASACHDGMGWLTIGISGPDNGAVAVLKYNGIITGTIKSWKKQILRTQESECVCMNGSCFTIMTDGPSNKAASYKIFKIEKGKVTKSIELNAPDFYYEECSCYPDTGIVMCVCRDNWHGSNRPWVSFNQNLDYQIGYICSGVFGDNPRPEDGEGSCNPVTVNGADGVKGFSYKYGNGVWIGRTKSNRLRKGFEMIWDPNGWTNTDSDFSVKQDVVAITDWSGYSGSFVQHPELTGLDCIRPCFWVELVRGLPRENTTIWTSGSSISFCGVNSDTANWSWPDGAELPFTIDK

SEQ ID NO: 20227 - protein, 470 aa, Artificial Sequence; identical to SEQ ID NO: 19937
  derived and/or modified protein sequence (wt) from neuraminidase__InfluenzaA__ADW10563

SEQ ID NO: 20228 - protein, 470 aa, Artificial Sequence; identical to SEQ ID NO: 17461
  derived and/or modified protein sequence (wt) from neuraminidase__InfluenzaA__ADW10574

SEQ ID NO: 20229 - protein, 470 aa, Artificial Sequence
  derived and/or modified protein sequence (wt) from neuraminidase__InfluenzaA__ADW10585
MNPNQKIITIGSISIAIGIISLMLQIGSIISIWASHSIQTGSQNNTGICNQRIITYENSTWVNHTYVNINNTNVVAGEDKKSVTLAGNSSLCSISGWAIYTKDNSIRIGSKGDVFVIREPFISCSHLECRTFFLTQGALLNDKHSNGTVKDRSPYRALMSCPLGEAPSPYNSKFESVAWSASACHDGMGWLTIGISGPDNGAVAVLKYNGIITGTIKSWKKQILRTQESECVCMNGSCFTIMTDGPSNKAASYKIFKIEKGKVTKSIELNAPNFYYEECSCYPDTGIVMCVCRDNWHGSNRPWVSFNQNLEYQIGYICSGVFGDNPRPEDGEGSCNPVTVDGANGVKGFSYKYGNGVWIGRTKSNRLRKGFEMIWDPNGWTNTDSDFSVKQDVVAITDWSGYSGSFVQHPELTGLDCIRPCFWVELVRGLPRENTTIWTSGSSISFCGVNSDTANWSWPDGAELPFTIDK

SEQ ID NO: 20230 - protein, 470 aa, Artificial Sequence; identical to SEQ ID NO: 20205
  derived and/or modified protein sequence (wt) from neuraminidase__InfluenzaA__ADW10596

SEQ ID NO: 20231 - protein, 470 aa, Artificial Sequence; identical to SEQ ID NO: 20204
  derived and/or modified protein sequence (wt) from neuraminidase__InfluenzaA__ADW10607

SEQ ID NO: 20232 - protein, 470 aa, Artificial Sequence; identical to SEQ ID NO: 20204
  derived and/or modified protein sequence (wt) from neuraminidase__InfluenzaA__ADW10618

SEQ ID NO: 20233 - protein, 470 aa, Artificial Sequence; identical to SEQ ID NO: 20204
  derived and/or modified protein sequence (wt) from neuraminidase__InfluenzaA__ADW10629

SEQ ID NO: 20234 - protein, 470 aa, Artificial Sequence; identical to SEQ ID NO: 20204
  derived and/or modified protein sequence (wt) from neuraminidase__InfluenzaA__ADW10724

SEQ ID NO: 20235 - protein, 470 aa, Artificial Sequence; identical to SEQ ID NO: 20205
  derived and/or modified protein sequence (wt) from neuraminidase__InfluenzaA__ADW10735

SEQ ID NO: 20236 - protein, 470 aa, Artificial Sequence; identical to SEQ ID NO: 20205
  derived and/or modified protein sequence (wt) from neuraminidase__InfluenzaA__ADW10746

SEQ ID NO: 20237 - protein, 470 aa, Artificial Sequence
  derived and/or modified protein sequence (wt) from neuraminidase__InfluenzaA__ADW10757
MNPNQKIITIGSISIAIGIISLMLQIGNIISIWASHSIQTRSQNNTGICNQRIITYENSTWVNHTYVNINNTNVVAGGDKTSVTLAGNSSLCSISGWAIYTKDNSIRIGSKGDVFVIREPFISCSHLECRTFFLTQGALLNDKHSNGTVKDRSPYRALMSCPLGEAPSPYNSKFESVAWSASACHDGMGWLTIGISGPDNGAVAVLKYNGIITGTIKSWKKQILRTQESECVCMNGSCFTLMTDGPSNKAASYKIFKIEKGKVTKSIELNAPNFYYEECSCYPDTGIVMCVCRDNWHGSNRPWVSFNQNLDYQIGYICSGVFGDNPRPEDGEGSCNPVTVDGANGVKGFSYKYGNGVWIGRTKSNRLRKGFEMIWDPNGWTNTDSDFSVKQDVVAITDWSGYSGSFVQHPELTGLDCIRPCFWVELVRGLPRENTTIWTSGSSISFCGVNSDTANWSWPDGAELPFTIDK

SEQ ID NO: 20238 - protein, 470 aa, Artificial Sequence; identical to SEQ ID NO: 20204
  derived and/or modified protein sequence (wt) from neuraminidase__InfluenzaA__ADW10768

SEQ ID NO: 20239 - protein, 470 aa, Artificial Sequence; identical to SEQ ID NO: 17461
  derived and/or modified protein sequence (wt) from neuraminidase__InfluenzaA__ADW10779

SEQ ID NO: 20240 - protein, 470 aa, Artificial Sequence
  derived and/or modified protein sequence (wt) from neuraminidase__InfluenzaA__ADW10790
MNPNQKIITIGSISIAIGIISLMLQIGNIISIWASHSIQTGSQNNTGICNQRIITYENSTWVNHTYVNINNTNVVAGEDKTSVTLAGNSSLCSISGWAIYTKDNSIRIGSKGDVFVIREPFISCSHLECRTFFLTQGALLNDKHSNGTVKDRSPYRALMSCPLGEAPSPYNSKFESVAWSASACHDGMGWLTIGISGPDNGAVAVLKYNGIITGTIKSWKKQILRTQESECVCMNGSCFTIMTDGPSNKAASYKIFKIEKGKVTKSIELNAPNFYYEECSCYPDTGIVMCVCRDNWHGSNRPWVSFNQNLDYQIGYICSGVFGDNPRPEDGEGSCNPVTVDGANGVKGFSYKYGNGVWIGRTKSNRLRKGFEMIWDPNGWTNTDSDFSVKQDVVAITDWSGYSGSFVQHPELTGLDCIIPCFWVELVRGLPRENATIWTSGSSISFCGVNSDTANWSWPDGAELPFTIDK

SEQ ID NO: 20241 - protein, 470 aa, Artificial Sequence; identical to SEQ ID NO: 18930
  derived and/or modified protein sequence (wt) from neuraminidase__InfluenzaA__ADW10801

SEQ ID NO: 20242 - protein, 470 aa, Artificial Sequence; identical to SEQ ID NO: 20204
  derived and/or modified protein sequence (wt) from neuraminidase__InfluenzaA__ADW10812

SEQ ID NO: 20243 - protein, 470 aa, Artificial Sequence; identical to SEQ ID NO: 19956
  derived and/or modified protein sequence (wt) from neuraminidase__InfluenzaA__ADW10823

SEQ ID NO: 20244 - protein, 470 aa, Artificial Sequence
  derived and/or modified protein sequence (wt) from neuraminidase__InfluenzaA__ADW10834
MNPNQKIITIGSISIAIGIISLMLQIGNIISIWASHSIQTGSQNNTGICNQRIITYENSTWVNHTYVNINNTNVVAGEDKTSVTLAGNSSLCSISGWAIYTKDNSIRIGSKGDVFVIREPFISCSHLECRTFFLTQGALLNDKHSNGTVKDRSPYRALMSCPLGEAPSPYNSKFESVAWSASACHDGMGWLTIGISGPDNGAVAVLKYNGIITGTIKSWKKQILRTQESECVCMNGSCFTIMTDGPSNKAASYKIFKIEKGKVIKSIELNAPNFYYEECSCYPDTGIVMCVCRDNWHGSNRPWVSFNQNLDYQIGYICSGVFGDNPRPEDGEGSCNPVTVDGANGVKGFSYKYGNGVWIGRTKSNRLRKGFEMIWDPNGWTNTDSDFSVKQDVVAITDWSGYSGSFVQHPELTGLDCIRPCFWVELVRGLPRENTTIWTSGSSISFCGVNSDTANWSWPDGAELPFTIDK

SEQ ID NO: 20245 - protein, 470 aa, Artificial Sequence; identical to SEQ ID NO: 20205
  derived and/or modified protein sequence (wt) from neuraminidase__InfluenzaA__ADW10845

SEQ ID NO: 20246 - protein, 470 aa, Artificial Sequence
  derived and/or modified protein sequence (wt) from neuraminidase__InfluenzaA__ADW10856
MNPNQRIITIGSISIAIGIISLMLQIGNIISIWASHSIQTGSQNNTGICNQRIITYENSTWVNHTYVNINNTNVVAGEDKTSMTLAGNSSLCSISGWAIYTKDNSIRIGSKGDVFVIREPFISCSHLECRTFFLTQGALLNDKHSNGTAKDRSPYRALMSCPLGEAPSPYNSKFESVAWSASACHDGMGWLTIGISGPDNGAVAVLKYNGIITGTIKSWKKQILRTQESECVCMNGSCFTIMTDGPSNKAASYKIFKIEKGKVTKSIELNAPNFYYEECSCYPDTGIVMCVCRDNWHGSNRPWVSFNQNLDYQIGYICSGVFGDNPRPEDGEGSCNPVTVDGANGVKGFSYKYGNGVWIGRTKSNRLRKGFEMIWDPNGWTNTDSDFSVKQDVVAITDWSGYSGSFVQHPELTGLDCIRPCFWVELVRGLPRENTTIWTSGSSISFCGVNSDTANWSWPDGAELPFTIDK

SEQ ID NO: 20247 - protein, 470 aa, Artificial Sequence; identical to SEQ ID NO: 20204
  derived and/or modified protein sequence (wt) from neuraminidase__InfluenzaA__ADW10867

SEQ ID NO: 20248 - protein, 470 aa, Artificial Sequence; identical to SEQ ID NO: 20204
  derived and/or modified protein sequence (wt) from neuraminidase__InfluenzaA__ADW10878

SEQ ID NO: 20249 - protein, 470 aa, Artificial Sequence; identical to SEQ ID NO: 20204
  derived and/or modified protein sequence (wt) from neuraminidase__InfluenzaA__ADW10889

SEQ ID NO: 20250 - protein, 470 aa, Artificial Sequence; identical to SEQ ID NO: 17461
  derived and/or modified protein sequence (wt) from neuraminidase__InfluenzaA__ADW10900

SEQ ID NO: 20251 - protein, 469 aa, Artificial Sequence; identical to SEQ ID NO: 18484
  derived and/or modified protein sequence (wt) from neuraminidase__InfluenzaA__ADW11155

SEQ ID NO: 20252 - protein, 469 aa, Artificial Sequence; identical to SEQ ID NO: 16738
  derived and/or modified protein sequence (wt) from neuraminidase__InfluenzaA__ADW23530

SEQ ID NO: 20253 - protein, 469 aa, Artificial Sequence
  derived and/or modified protein sequence (wt) from neuraminidase__InfluenzaA__ADW54483
MNPNQKIITIGSVCMTIGMANLMLQIGNIISIWISHSIQLGNQSQIETCNQSVITYENNTWVNQTYVNISNTNFAAGQSVVSVKLAGNSSLCPVSGWAIYSKDNSIRIGSKGDVFVIREPFISCSPLECRTFFLTQGALLNDKHSNGTIKDRSPYRTLMSCPIGEVPSPYNSRFESVAWSASACHDGINWLTIGISGPDNGAVAVLKYNGIITDTIKSWRNNILRTQESECACVNGSCFTIMTDGPSDGQASYKIFRIEKGKIVKSVEMNAPNYHYEECSCYPDSSEITCVCRDNWHGSNRPWVSFNQNLEYQIGYICSGIFGDNPRPNDKTGSCGPVSSNGANGVKGFSFKYGNGVWIGRTKSISSRKGFEMIWDPNGWTGTDNNFSIKQDIVGINEWSGYSGSFVQHPELTGLDCIRPCFWVELIRGRPKENTIWTSGSSISFCGVNSDTVGWSWPDGAELPFTIDK

SEQ ID NO: 20254 - protein, 469 aa, Artificial Sequence
  derived and/or modified protein sequence (wt) from neuraminidase__InfluenzaA__ADW54494
MNPNQKIITIGSVCMTIGMANLILQIGNIISIWISHSIQLGNQNQIETCNQSVITYENNTWVNQTYVNISNTNFAAGQSVVSVKLAGNSSLCPVSGWAIYSKDNSIRIGSKGDVFVIREPFISCSPLECRTFFLTQGALLNDKHSNGTIKDRSPYRTLMSCPIGEVPSPYNSRFESVAWSASACHDGINWLTIGISGPDNGAVAVLKYNGIITDTIKSWRNNILRTQESECACVNGSCFTVMTDGPSDGQASYKIFRIEKGKIVKSVEMNAPNYHYEECSCYPDSSEITCVCRDNWHGSNRPWVSFNQNLEYRIGYICSGIFGDNPRPNDKTGSCGPVSSNGANGVKGFSFKYGNGVWIGRTKSISSRNGFEMIWDPNGWTGTDNNFSIKQDIIGINEWSGYSGSFVQHPELTGLDCIRPCFWVELIRGRPKENTIWTSGSSISFCGVNSDTVGWSWPDGAELPFTIDK

SEQ ID NO: 20255 - protein, 469 aa, Artificial Sequence
  derived and/or modified protein sequence (wt) from neuraminidase__InfluenzaA__ADW54514
MNPNQKIITIGSVCMTIGMANLILQIGNIISIWISHSIQLGNQNQIETCNQSVITYENNTWVNQTYVNISNTNFAAGQSVVSVKLAGNSSLCPVSGWAIYSKDNSIRIGSKGDVFVIREPFISCSPLECRTFFLTQGALLNDKHSNGTIKDRSPYRTLMSCPIGEVPSPYNSRFESVAWSASACHDGINWLTIGISGPDNGAVAVLKYNGIITDTIKSWKNNILRTQESECACVNGSCFTVMTDGPSDGQASYKIFRIEKGKIVKSVEMNAPNYHYEECSCYPDSSEITCVCRDNWHGSNRPWVSFNQNLEYRIGYICSGIFGDNPRPNDKTGSCGPVSSNGANGVKGFSFKYGNGVWIGRTKSISSRNGFEMIWDPNGWTGTDNNFSKKQDIIGINEWSGYSGSFVQHPELTGLDCIRPCFWVELIRGRPKENTIWTSGSSISFCGVNSDTVGWSWPDGAELPFTIDK

SEQ ID NO: 20256 - protein, 469 aa, Artificial Sequence
  derived and/or modified protein sequence (wt) from neuraminidase__InfluenzaA__ADW54522
MNPNQKIITIGSVCMIIGMANLILQIGNIISIWISHSIQLGNQNQIETCNQSVITYENNTWVNQTYVNISNTNFAAGQSVVSVKLAGNSSLCPVSGWAIYSKDNSIRIGSKGDVFVIREPFISCSPLECRTFFLTQGALLNDKHSNGTIKDRSPYRTLMSCPIGEVPSPYNSRFESVAWSASACHDGINWLTIGISGPDNGAVAVLKYNGIITDTIKSWRNNRLRTQESECACVNGSCFTVMTDGPSDGQASYKIFRIEKGKIVKSVEMNAPNYHYEECSCYPDSSEITCVCRDNWHGSNRPWVSFNQNLEYQIGYICSGIFGDNPRPNDKTGSCGPVSSNGANGVKGFSFKYGNGVWIGRTKSISSRKGFEMIWDPNGWTGTDNNFSIKQDIVGINEWSGYSGSFVQHPELTGLDCIRPCFWVELIRGRPKENTIWTSGSSISFCGVNSDTVGWSWPDGAELPFTIDK

SEQ ID NO: 20257 - protein, 469 aa, Artificial Sequence
  derived and/or modified protein sequence (wt) from neuraminidase__InfluenzaA__ADW65826
MNPNQKIITIGSVCMTIGMANLILQIGNIISIWISHSIQLGNQSQIETCNQSVITYENNTWVNQTYVNISNTNFAAGQSVVSVKLAGNSSLCPVSGWAIYSKDNSIRIGSKGDVFVIREPFISCSPLECRTFFLTQGALLNDKHSNGTIKDRSPYRTLMSCPIGEVPSPYNSRFESVAWSASACHDGINWLTIGISGPDNGAVAVLKYNGIITDTIKSWRNNILRTQESECACVNGSCFTIMTDGPSDGQASYKIFRIEKGKIVKSVEMNAPNYHYEECSCYPDSSEITCVCRDNWHGSNRPWVSFNQNLEYQIGYICSGIFGDNPRPNDKTGSCGPVSSNGANGVKGFSFKYGNGVWIGRTKSISSRKGFEMIWDPNGWTGTDNNFSIKQDIVGINEWSGYSGSFVQHPELTGLDCIRPCFWVELIRGRPKENTIWTSGSSISFCGVNSDTVGWSWPDGAELPFTIDK

SEQ ID NO: 20258 - protein, 469 aa, Artificial Sequence; identical to SEQ ID NO: 16599
  derived and/or modified protein sequence (wt) from neuraminidase__InfluenzaA__ADW80519

SEQ ID NO: 20259 - protein, 469 aa, Artificial Sequence; identical to SEQ ID NO: 16599
  derived and/or modified protein sequence (wt) from neuraminidase__InfluenzaA__ADW82127

SEQ ID NO: 20260 - protein, 469 aa, Artificial Sequence; identical to SEQ ID NO: 16599
  derived and/or modified protein sequence (wt) from neuraminidase__InfluenzaA__ADW82138

SEQ ID NO: 20261 - protein, 469 aa, Artificial Sequence; identical to SEQ ID NO: 16599
  derived and/or modified protein sequence (wt) from neuraminidase__InfluenzaA__ADW82149

SEQ ID NO: 20262 - protein, 469 aa, Artificial Sequence; identical to SEQ ID NO: 16599
  derived and/or modified protein sequence (wt) from neuraminidase__InfluenzaA__ADW82158

SEQ ID NO: 20263 - protein, 469 aa, Artificial Sequence; identical to SEQ ID NO: 16599
  derived and/or modified protein sequence (wt) from neuraminidase__InfluenzaA__ADW82169

SEQ ID NO: 20264 - protein, 469 aa, Artificial Sequence; identical to SEQ ID NO: 16599
  derived and/or modified protein sequence (wt) from neuraminidase__InfluenzaA__ADW82180

SEQ ID NO: 20265 - protein, 469 aa, Artificial Sequence; identical to SEQ ID NO: 16738
  derived and/or modified protein sequence (wt) from neuraminidase__InfluenzaA__ADW82191

SEQ ID NO: 20266 - protein, 469 aa, Artificial Sequence; identical to SEQ ID NO: 16738
  derived and/or modified protein sequence (wt) from neuraminidase__InfluenzaA__ADW82201

SEQ ID NO: 20267 - protein, 469 aa, Artificial Sequence; identical to SEQ ID NO: 16738
  derived and/or modified protein sequence (wt) from neuraminidase__InfluenzaA__ADW82211

SEQ ID NO: 20268 - protein, 469 aa, Artificial Sequence; identical to SEQ ID NO: 16738
  derived and/or modified protein sequence (wt) from neuraminidase__InfluenzaA__ADW82221

SEQ ID NO: 20269 - protein, 469 aa, Artificial Sequence; identical to SEQ ID NO: 16738
  derived and/or modified protein sequence (wt) from neuraminidase__InfluenzaA__ADW82231

SEQ ID NO: 20270 - protein, 469 aa, Artificial Sequence; identical to SEQ ID NO: 16738
  derived and/or modified protein sequence (wt) from neuraminidase__InfluenzaA__ADW82241

SEQ ID NO: 20271 - protein, 469 aa, Artificial Sequence; identical to SEQ ID NO: 16738
  derived and/or modified protein sequence (wt) from neuraminidase__InfluenzaA__ADW82251

SEQ ID NO: 20272 - protein, 469 aa, Artificial Sequence; identical to SEQ ID NO: 16738
  derived and/or modified protein sequence (wt) from neuraminidase__InfluenzaA__ADW82261

SEQ ID NO: 20273 - protein, 469 aa, Artificial Sequence; identical to SEQ ID NO: 16738
  derived and/or modified protein sequence (wt) from neuraminidase__InfluenzaA__ADW82271

SEQ ID NO: 20274 - protein, 469 aa, Artificial Sequence; identical to SEQ ID NO: 20257
  derived and/or modified protein sequence (wt) from neuraminidase__InfluenzaA__ADW95306

SEQ ID NO: 20275 - protein, 469 aa, Artificial Sequence; identical to SEQ ID NO: 20257
  derived and/or modified protein sequence (wt) from neuraminidase__InfluenzaA__ADW95313

SEQ ID NO: 20276 - protein, 469 aa, Artificial Sequence; identical to SEQ ID NO: 20257
  derived and/or modified protein sequence (wt) from neuraminidase__InfluenzaA__ADW95320

SEQ ID NO: 20277 - protein, 469 aa, Artificial Sequence; identical to SEQ ID NO: 20257
  derived and/or modified protein sequence (wt) from neuraminidase__InfluenzaA__ADW95327

SEQ ID NO: 20278 - protein, 469 aa, Artificial Sequence
  derived and/or modified protein sequence (wt) from neuraminidase__InfluenzaA__ADW95333
MNPNQKIITIGSVCMTIGMANLILQIGNIISIWISHSIQLGNQSQIETCNQSVITYENNTWVNQTYVNISNTNFAAGQSVVSVKLAGNSSLCPVSGWAIYSKDNSIRIGSKGDVFVIREPFISCSPLECRTFFLTQGALLNDKHSNGTIKDRSPYRTLMSCPIGEVPSPYNSRFESVAWSASACHDGINWLTIGISGPDNGAVAVLKYNGIITDTIKSWRNNILRTQESECACVNGSCFTIMTDGPSDGQASYKIFRIEKGKIVKSVEMNAPNYHYEECSCYPDSSEITCVCRDNWHGSNRPWVSFNQNLEYQIGYICSGIFGDNPRPNDKTGSCGPVSSNGANGVKGFSFKYGNGVWIGSAKSISSRKAFEMIWDPNGWTGTDNNFSIKQYIVGINEWSGYSGSFVEHPELTGLDCIRPCFWVELIRGRPKENTIWTSGSSISFCGVNSDTVGWSWPDGAELPFTIDK

SEQ ID NO: 20279 - protein, 469 aa, Artificial Sequence
  derived and/or modified protein sequence (wt) from neuraminidase__InfluenzaA__ADX20813
MNPNQKIITIGSVCMTIGMANLILQIGNIISIWISHSIQLGNQNQIETCNQSVITYENNTWVNQTYVNISNTNFAAGQSVVSVKLAGNSSLCPVSGWAIYSKDNSIRIGSKGDVFVIREPFISCSPLECRTFFLTQGALLNDKHSNGTIKDRSPYRTLMSCPIGEVPSPYNSRFELVAWSASACHDGINWLTIGISGPDNGAVAVLKYNGIITDTIKSWRNNILRTQESECACVNGSCFTVMTDGPSDGQTSYKIFRIEKGKIVKSVEMNAPNYYYEECSCYPDSSEITCVCRDNWHGSNRPWVSFNQNLEYQIGYICSGIFGDNPRPNDKTGSCGPVSSNGANGVKGFSFKYGNGVWIGRTKSISSRKGFEMIWDPNGWTGTDNNFSIKQDIVGINEWSGYSGSFVQHPELTGLDCIRPCFWVELIRGRPKENTIWTSGSSISFCGVNSDTVGWSWPDGAELPFTIDK

SEQ ID NO: 20280 - protein, 469 aa, Artificial Sequence
  derived and/or modified protein sequence (wt) from neuraminidase__InfluenzaA__ADX20814
MNPNQKIITIGSVCMTIGMANLILQIGNIISIWISHSIQLGNQSQIETCNQSVITYENNTWVNQTYVNISNTNFAAGQSVVSVKLAGNSSLCPVSGWAIYSKDNSIRIGSKGDVFVIREPFISCSPLECRTFFLTQGALLNDKHSNGTIKDRSPYRTLMSCPIGEVPSPYNSRFESVAWSASACHDGINWLTIGISGPDNGAVAVLKYNGIITDTIKSWRNNILRTQESECACVNGSCFTIMTDGPSDGQASYKIFRIEKGKIVKSVEMNAPNYYYEECSCYPDSSEITCVCRDNWHGSNRPWVSFNQNLEYQIGYICSGIFGDNPRPNDKTGSCGPVSSNGANGVKGFSFKYGNGVWIGRTKSISSRKGFEMIWDPNGWTGTDNNFSIKQDIVGINEWSGYSGSFVQHPELTGLDCIRPCFWVELIRGRPKENTIWTSGSSISFCGVNSDTVGWSWPDGAELPFTIDK

SEQ ID NO: 20281 - protein, 469 aa, Artificial Sequence; identical to SEQ ID NO: 16599
  derived and/or modified protein sequence (wt) from neuraminidase__InfluenzaA__ADX21091

SEQ ID NO: 20282 - protein, 469 aa, Artificial Sequence; identical to SEQ ID NO: 16738
  derived and/or modified protein sequence (wt) from neuraminidase__InfluenzaA__ADX21101

SEQ ID NO: 20283 - protein, 469 aa, Artificial Sequence; identical to SEQ ID NO: 17605
  derived and/or modified protein sequence (wt) from neuraminidase__InfluenzaA__ADX36112

SEQ ID NO: 20284 - protein, 469 aa, Artificial Sequence
  derived and/or modified protein sequence (wt) from neuraminidase__InfluenzaA__ADX87386
MNPNQRIITIGSVSLTISTICFFMQIAILITTVTLHFKQYEFNSPPNNQVMLCEPTIIERNITEIVYLTNTTIEKEICPKLAEYRNWSKPQCDITGFAPFSKDNSIRLSAGGDIWVTREPYVSCDPDKCYQFALGQGTTLNNVHSNNTVRDRTPYRTLLMNELGVPFHLGTKQVCIAWSSSSCHDGKAWLHVCITGDDKNATASFIYNGRLVDSVVSWSKEILRTQESECVCINGTCTVVMTDGSASGKADTKILFIEEGKIVHTSTLSGSAQHVEECSCYPRYPGVRCVCRDNWKGSNRPIVDINIKDHSIVSSYVCSGLVGDTPRKNDSSSSSHCLDPNNEEGGHGVKGWAFDDGNDVWMGRTISEKSRLGYETFKVIEGWSNPKSKLQINRQVIVDRGNRSGYSGIFSVEGKSCINRCFYVELIRGRKEETEVLWTSNSIVVFCGTSGTYGTGSWPDGADINLMPV

SEQ ID NO: 20285 - protein, 469 aa, Artificial Sequence
  derived and/or modified protein sequence (wt) from neuraminidase__InfluenzaA__ADX96270
MNPNQKIITIGSVCMTIGMANLILQIGNIISIWISHSIQLGNQNQIETCNQSIITYENNTWVNQTYVNISNTNFAAGQSVASVKLAGNSSLCPVSGWAIYSKDNSVRIGSKGDVFVIREPFISCSPLECRTFFLTQGALLNDKHSNGTIKDRSPYRTLMSCPIGEVPSPYNSRFESVAWSASACHDGINWLTIGISGPDNGAVAVLKYNGIITDTIKSWRNNILRTQESECACVNGSCFTVMTDGPSDGQASYKIFRIEKGKIVKSVEMNAPNYHYEECSCYPDSSEITCVCRDNWHGSNRPWVSFNQNLEYQIGYICSGIFGDNPRPNDKTGSCGPVSSNGANGVKGFSFKYGNGVWIGRTKSISSRNGFEMIWDPNGWTGTDNNFSIKQDIVGINEWSGYSGSFVQHPELTGLDCIRPCFWVELIRGRPKENTIWTSGSSISFCGVNSDTVGWSWPDGAELPFTIDK

SEQ ID NO: 20286 - protein, 469 aa, Artificial Sequence; identical to SEQ ID NO: 20285
  derived and/or modified protein sequence (wt) from neuraminidase__InfluenzaA__ADX96280

SEQ ID NO: 20287 - protein, 469 aa, Artificial Sequence; identical to SEQ ID NO: 17321
  derived and/or modified protein sequence (wt) from neuraminidase__InfluenzaA__ADX96290

SEQ ID NO: 20288 - protein, 469 aa, Artificial Sequence; identical to SEQ ID NO: 16738
  derived and/or modified protein sequence (wt) from neuraminidase__InfluenzaA__ADX96300

SEQ ID NO: 20289 - protein, 469 aa, Artificial Sequence; identical to SEQ ID NO: 16738
  derived and/or modified protein sequence (wt) from neuraminidase__InfluenzaA__ADX96310

SEQ ID NO: 20290 - protein, 469 aa, Artificial Sequence
  derived and/or modified protein sequence (wt) from neuraminidase__InfluenzaA__ADX96330
MNPNQKIITIGSVCMTIGMANLILQIGNGISIWISHSIQLGNQNQIETCNQSVITYENNTWVNQTYVNISNTNFAAGQSVVSVKLAGNSSLCPVSGWAIYSKDNSIRIGSKGDVFVIREPFISCSPLECRTFFLTQGALLNDKHSNGTIKDRSPYRTLMSCPIGEVPSPYNSRFESVAWSASACHDGINWLTIGISGPDNGAVAVLKYNGIITDTIKSWRNNILRTQESECACVNGSCFTVMTDGPSDGQASYKIFRIEKGKIVKSVEMNAPNYHYEECSCYPDSNEITCVCRDNWHGSNRPWVSFNQNLEYQIGYICSGIFGDNPRPNDKTGSCGPVSSNGANGVKGFSFKYGNGVWIGRTKSISSRNGFEMIWDPNGWTGTDNNFSIKQDIVGINEWSGYSGSFVQHPELTGLDCIRPCFWVELIRGRPKENTIWTSGSSISFCGVNSDTVGWSWPDGAELPFTIDK

SEQ ID NO: 20291 - protein, 469 aa, Artificial Sequence; identical to SEQ ID NO: 16738
  derived and/or modified protein sequence (wt) from neuraminidase__InfluenzaA__ADX96339

SEQ ID NO: 20292 - protein, 469 aa, Artificial Sequence
  derived and/or modified protein sequence (wt) from neuraminidase__InfluenzaA__ADX96349
MNPNQKIITIGSVCMTIGMANLILQIGNIISIWISHSIQLGNQNQIETCNQSVITYENNTWVNQTYVNISNTNFAAGQSVVSVKLAGNSSLCPVSGWAIYSKDNSIRIGSKGDVFVIREPFISCSPLECRTFFLTQGALLNDKHSNGTIKDRSPYRTLMSCPIGEVPSPYNSRFESVAWSASACHDGINWLTIGISGPDNGAVAVLKYNGIITDTIKSWRNNILRTQESECACVNGSCFTVMTDGPSDGQASYKIFRIEKGKIVKSVEMNAPNYHYEECSCYPDSNEITCVCRDNWHGSNRPWVSFNQNLEYQIGYICSGIFGDNPRPNDKTGSCGPVSSNGANGVKGFSFKYGNGVWIGRTKSISSRNGFEMIWDPNGWTGTDNNFSIKQDIVGINEWSGYSGSFVQHPELTGLDCIRPCFWVELIRGRPKENTIWTSGSSISFCGVNSDTVGWSWPDGAELPFTIDK

SEQ ID NO: 20293 - protein, 469 aa, Artificial Sequence; identical to SEQ ID NO: 16738
  derived and/or modified protein sequence (wt) from neuraminidase__InfluenzaA__ADX96359

SEQ ID NO: 20294 - protein, 469 aa, Artificial Sequence; identical to SEQ ID NO: 16738
  derived and/or modified protein sequence (wt) from neuraminidase__InfluenzaA__ADX96369

SEQ ID NO: 20295 - protein, 469 aa, Artificial Sequence
  derived and/or modified protein sequence (wt) from neuraminidase__InfluenzaA__ADX96380
MNPNQKIITIGSVCMTIGMANLILQIGNIISIWPVHSIQLGNQNQIETCNQSVITYENNTWVNQTYVNISNTNFAAGQSVVSMKLAGNSSLCPVGGWAIYSKDNSVRIGSKGDVFVIREPFISCSPLECRTFFLTQGALLNDKHSNGTIKDRSPYRTLMSCPIGEVPSPYNSRFESVAWSASACHDGINWLTIGISGPDNGAVAVLKYNGIITDTIKSWRNNILRTQESECACVNGSCFTVMTDGPSDGQASYKIFRIEKGKIVESVEMNAPNYHYEECSCYPDSSEITCVCRDNWHGSNRPWVSFNQNLEYQIGYICSGIFGDNPRPNDKTGSCGPVSSNGANGVKGFSFKYGNGVWIGRTKSISSRNGFEMIWDPNGWTGTDNNFSIKQDIVGINEWSGYSGSFVQHPELTGLDCIRPCFWVELIRGRPKENTIWTSGSSISFCGVNSDTVGWSWPDGAELPFTIDK

SEQ ID NO: 20296 - protein, 469 aa, Artificial Sequence
  derived and/or modified protein sequence (wt) from neuraminidase__InfluenzaA__ADX96390
MNPNQKIITIGSVCMTIGMANLILQIGNIISIWLSHSIQLGNQNQIETCNQSVITYENNTWVNQTYVNISNTNFAAGQSVVSVKLAGNSSLCPVSGWAIYSKDNSIRIGSKGDVFVIREPFISCSPLECRTFFLTQGALLNDKHSNGTIKDRSPYRTLMSCPIGEVPSPYNSRFESVAWSASACHDGINWLTIGISGPDNGAVAVLKYNGIITDTIKSWRNNILRTQESECACVNGSCFTVMTDGPSDGQASYKIFRIEKGKIVKSVEMNAPNYHYEECSCYPDSSEITCVCRDNWHGSNRPWVSFNQNLEYQIGYICSGIFGDNPRPNDKTGSCGPVSSNGANGVKGFSFKYGNGVWIGRTKSISSRNGFEMIWDPNGWTGTDNNFSIKQDIVGINEWSGYSGSFVQHPELTGLDCIRPCFWVELIRGRPKENTIWTSGSSISFCGVNSDTVGWSWPDGAELPFTIDK

SEQ ID NO: 20297 - protein, 469 aa, Artificial Sequence; identical to SEQ ID NO: 16738
  derived and/or modified protein sequence (wt) from neuraminidase__InfluenzaA__ADX96400

SEQ ID NO: 20298 - protein, 469 aa, Artificial Sequence; identical to SEQ ID NO: 16738
  derived and/or modified protein sequence (wt) from neuraminidase__InfluenzaA__ADX96410

SEQ ID NO: 20299 - protein, 469 aa, Artificial Sequence; identical to SEQ ID NO: 16738
  derived and/or modified protein sequence (wt) from neuraminidase__InfluenzaA__ADX96419

SEQ ID NO: 20300 - protein, 469 aa, Artificial Sequence
  derived and/or modified protein sequence (wt) from neuraminidase__InfluenzaA__ADX96429
MNPNQKIITIGSVCMTIGMANLILQIGNIISIWISHSIQLGNQNQIETCNQSVITYENNTWVNQTYVNISNTNFAAGQSVVSVKLAGNSSLCPVSGWAIYSKDNSVRIGSKGDVFVIREPFISCSPLECRTFFLTQGALLNDKHSNGTIKDRSPYRTLMSCPIGEVPSPYNSRFESVAWSASACHDGINWLTIGISGPDNGAVAVLKYNGIITDTIKSWRNNILRTQESECACVNGSCFTVMTDGPSNGQASYKIFRIEKGKIVKSVEMNAPNYHYEECSCYPDSSEITCVCRDNWHGSNRPWVSFNQNLEYQIGYICSGIFGDNPRPNDKTGSCGPVSSNGANGVKGFSFKYGNGVWIGRTKSISSRNGFEMIWDPNGWTGTDNNFSIKQDIVRINEWSGYSGSFVQHPELTGLDCIRPCFWVELIRGRPKENTIWTSGSSISFCGVNSDTVGWSWPDGAELPFTIDK

SEQ ID NO: 20301 - protein, 469 aa, Artificial Sequence; identical to SEQ ID NO: 16738
  derived and/or modified protein sequence (wt) from neuraminidase__InfluenzaA__ADX96449

SEQ ID NO: 20302 - protein, 469 aa, Artificial Sequence; identical to SEQ ID NO: 16738
  derived and/or modified protein sequence (wt) from neuraminidase__InfluenzaA__ADX96469

SEQ ID NO: 20303 - protein, 469 aa, Artificial Sequence; identical to SEQ ID NO: 16738
  derived and/or modified protein sequence (wt) from neuraminidase__InfluenzaA__ADX96489

SEQ ID NO: 20304 - protein, 469 aa, Artificial Sequence; identical to SEQ ID NO: 16738
  derived and/or modified protein sequence (wt) from neuraminidase__InfluenzaA__ADX96499

SEQ ID NO: 20305 - protein, 469 aa, Artificial Sequence
  derived and/or modified protein sequence (wt) from neuraminidase__InfluenzaA__ADX96509
MNPNQKIITIGSVCMTIGMANLILQIGNIISIWISHSIQLGNQNQIETCNQSVITYENNTWVNQTYVNISNTNFAAGQSVVSVKLAGNSSLCPVSGWAIYSKDNSIRIGSNGDVFVIREPFISCSPLECRTFFLTQGALLNDKHSNGTIKDRSPYRTLMSCPIGEVPSPYNSRFESVAWSASACHDGINWLTIGISGPDNGAVAVLKYNGIITDTIKSWRNNILRTQESECACVNGSCFTVMTDGPSDGQASYKIFRIEKGKIVKSVEMNAPNYHYEECSCYPDSSEITCVCRDNWHGSNRPWVSFNQNLEYQIGYICSGIFGDNPRPNDKTGSCGPVSSNGANGVKGFSFKYGNGVWIGRTKSISSRNGFEMIWDPNGWTGTDNNFSIKQDIVGINEWSGYSGSFVQHPELTGLDCIRPCFWVELIRGRPKENTIWTSGSSISFCGVNSDTVGWSWPDGAELPFTIDK

SEQ ID NO: 20306 - protein, 469 aa, Artificial Sequence; identical to SEQ ID NO: 16738
  derived and/or modified protein sequence (wt) from neuraminidase__InfluenzaA__ADX96519

SEQ ID NO: 20307 - protein, 469 aa, Artificial Sequence; identical to SEQ ID NO: 16738
  derived and/or modified protein sequence (wt) from neuraminidase__InfluenzaA__ADX96529

SEQ ID NO: 20308 - protein, 469 aa, Artificial Sequence; identical to SEQ ID NO: 16738
  derived and/or modified protein sequence (wt) from neuraminidase__InfluenzaA__ADX96539

SEQ ID NO: 20309 - protein, 469 aa, Artificial Sequence; identical to SEQ ID NO: 16738
  derived and/or modified protein sequence (wt) from neuraminidase__InfluenzaA__ADX96549

SEQ ID NO: 20310 - protein, 469 aa, Artificial Sequence; identical to SEQ ID NO: 16738
  derived and/or modified protein sequence (wt) from neuraminidase__InfluenzaA__ADX96559

SEQ ID NO: 20311 - protein, 469 aa, Artificial Sequence; identical to SEQ ID NO: 16738
  derived and/or modified protein sequence (wt) from neuraminidase__InfluenzaA__ADX96569

SEQ ID NO: 20312 - protein, 469 aa, Artificial Sequence; identical to SEQ ID NO: 16728
  derived and/or modified protein sequence (wt) from neuraminidase__InfluenzaA__ADX96579

SEQ ID NO: 20313 - protein, 469 aa, Artificial Sequence; identical to SEQ ID NO: 16738
  derived and/or modified protein sequence (wt) from neuraminidase__InfluenzaA__ADX96589

SEQ ID NO: 20314 - protein, 469 aa, Artificial Sequence; identical to SEQ ID NO: 16738
  derived and/or modified protein sequence (wt) from neuraminidase__InfluenzaA__ADX96599

SEQ ID NO: 20315 - protein, 469 aa, Artificial Sequence
  derived and/or modified protein sequence (wt) from neuraminidase__InfluenzaA__ADX96609
MNPNQKIITIGSVCMTIGMANLILQIGNIISIWISHSIQLGNQNQIETCNQSVITYENNTWVNQTYVNISNTNFAAGQSVVSVKLAGNSSLCPVGGWAIYSKDNSVRIGSKGDVFVIREPFISCSPLECRTFFLTQGALLNDKHSNGTIKDRSPYRTLMSCPIGEVPSPYNSRFESVAWSASACHDGINWLTIGISGPDNGAVAVLKYNGIITDTIKSWRNNILRTQESECACVNGSCFTVMTDGPSNGQASYKIFRIEKGKIVKSVEMNAPNYHYEECSCYPDSSEITCVCRDNWHGSNRPWVSFNQNLEYQIGYICSGIFGDNPRPNDKTGSCGPVSSNGANGVKGFSFKYGDGVWIGRTKSISSRNGFEMIWDPNGWTGTDNNFSIKQDIVGINEWSGYSGSFVQHPELTGLDCIRPCFWVELIRGRPKENTIWTSGSSISFCGVNSDTVGWSWPDGAELPFTIDK

SEQ ID NO: 20316 - protein, 469 aa, Artificial Sequence; identical to SEQ ID NO: 16728
  derived and/or modified protein sequence (wt) from neuraminidase__InfluenzaA__ADX96619

SEQ ID NO: 20317 - protein, 469 aa, Artificial Sequence; identical to SEQ ID NO: 16738
  derived and/or modified protein sequence (wt) from neuraminidase__InfluenzaA__ADX96629

SEQ ID NO: 20318 - protein, 469 aa, Artificial Sequence; identical to SEQ ID NO: 16738
  derived and/or modified protein sequence (wt) from neuraminidase__InfluenzaA__ADX96639

SEQ ID NO: 20319 - protein, 469 aa, Artificial Sequence; identical to SEQ ID NO: 16738
  derived and/or modified protein sequence (wt) from neuraminidase__InfluenzaA__ADX96649

SEQ ID NO: 20320 - protein, 469 aa, Artificial Sequence; identical to SEQ ID NO: 16728
  derived and/or modified protein sequence (wt) from neuraminidase__InfluenzaA__ADX96659

SEQ ID NO: 20321 - protein, 469 aa, Artificial Sequence; identical to SEQ ID NO: 16738
  derived and/or modified protein sequence (wt) from neuraminidase__InfluenzaA__ADX96669

SEQ ID NO: 20322 - protein, 469 aa, Artificial Sequence; identical to SEQ ID NO: 16738
  derived and/or modified protein sequence (wt) from neuraminidase__InfluenzaA__ADX96679

SEQ ID NO: 20323 - protein, 469 aa, Artificial Sequence; identical to SEQ ID NO: 16738
  derived and/or modified protein sequence (wt) from neuraminidase__InfluenzaA__ADX96689

SEQ ID NO: 20324 - protein, 469 aa, Artificial Sequence; identical to SEQ ID NO: 16738
  derived and/or modified protein sequence (wt) from neuraminidase__InfluenzaA__ADX96699

SEQ ID NO: 20325 - protein, 469 aa, Artificial Sequence
  derived and/or modified protein sequence (wt) from neuraminidase__InfluenzaA__ADX96709
MNPNQKIITIGSVCMTIGMANLILQIGNIISIWISHSIQLGNQNQIETCNQSVITYENNTWVNQTYVNISNTNFAAGQSVVSVKLAGNSSLCPVSGWAIYSKDNSIRIGSKGDVFVIREPFISCSPLECRTFFLTQGALLNDKHSNGTIKDRSPYRTLMSCPIGEVPSPYNSRFESVAWSASACHDGINWLTIGISGPDNGAVAVLKYNGIITDTIKSWRNNILRTQESECACVNGSCFTVMTDGPSDGQASYKIFRIEKGKIVKSVEINAPNYHYEECSCYPDSSEITCVCRDNWHGSNRPWVSFNQNLEYQIGYICSGIFGDNPRPNDETGSCGPVSSNGANGVKGFSFKYGNGVWIGRTKSISSRNGFEMIWDPNGWTGTDNNFSIKQDIVGINEWSGYSGSFVQHPELTGLDCIRPCFWVELIRGRPKENTIWTSGSSISFCGVNSDTVGWSWPDGAELPFTIDK

SEQ ID NO: 20326 - protein, 469 aa, Artificial Sequence
  derived and/or modified protein sequence (wt) from neuraminidase__InfluenzaA__ADX96719
MNPNQKIITIGSVCMTIGMANLILQIGNIISIWISHSIQLGNQNQIETCNQSVITYENNTWVNQTYVNISNTNFAAGQSVVSVKFAGNSSLCPVSGWAIYSKDNSIRIGSKGDVFVIREPFISCSPLECRTFFLTQGALLNDKHSNGTIKDRSPYRTLMSCPIGEVPSPYNSRFESVAWSASACHDGINWLTIGISGPDNGAVAVLKYNGIITDTIKSWRNNILRTQESECACVNGSCFTVMTDGPSDGQASYKIFRIEKGKIVKSVEMNAPNYHYEECSCYPDSSEITCVCRDNWHGSNRPWVSFNQNLEYQIGYICSGIFGDNPRPNDKTGSCGPVSSNGANGVKGFSFKYGNGVWIGRTKSISSRNGFEMIWDPNGWTGTDNNFSIKQDIVGINEWSGYSGSFVQHPELTGLDCIRPCFWVELIRGRPKESTVWTSGSSISFCGVNSDTVGWSWPDGAELPFTIDK

SEQ ID NO: 20327 - protein, 469 aa, Artificial Sequence; identical to SEQ ID NO: 16738
  derived and/or modified protein sequence (wt) from neuraminidase__InfluenzaA__ADX96729

SEQ ID NO: 20328 - protein, 469 aa, Artificial Sequence
  derived and/or modified protein sequence (wt) from neuraminidase__InfluenzaA__ADX96739
MNPNQKIITIGSVCMTIGMANLILQIGNIISIWISHSIQLGNQNQIETCNQSVITYENNTWVNQTYVNISNTNFAAGQSVVSVKLAGNSSLCPVSGWAIYSKDNSIRIGSKGDVFVIREPFISCSPLECRTFFLTQGALLNDKHSNGTIKDRSPYRTLMSCPIGEVPSPYNSRFESVAWSASACHDGINWLTIGISGPDNGAVAVLKYNGIITDTIKSWRNNILRTQESECACVNGSCFTVMTDGPSDGQASYKIFRIEKGKIVKSVEMNAPNYHYEECSCYPDSSEITCVCRDNWHGSNRPWVSFNQNLEYQIGYICSGIFGDNPRPNDKTGSCGPVSSNGANGVKGFSFKYGNGVWIGRTKSISSRNGFEMIWDPNGWTGTDNNFSIKQDIVGINEWSGYSGSFVQHPELTGLDCIRPCFWVELIRGRPKENTIWTSGSSISFCGVKSDTVGWSWPDGAELPFTIDK

SEQ ID NO: 20329 - protein, 469 aa, Artificial Sequence; identical to SEQ ID NO: 16738
  derived and/or modified protein sequence (wt) from neuraminidase__InfluenzaA__ADX96749

SEQ ID NO: 20330 - protein, 469 aa, Artificial Sequence; identical to SEQ ID NO: 16738
  derived and/or modified protein sequence (wt) from neuraminidase__InfluenzaA__ADX96759

SEQ ID NO: 20331 - protein, 469 aa, Artificial Sequence; identical to SEQ ID NO: 17712
  derived and/or modified protein sequence (wt) from neuraminidase__InfluenzaA__ADX96769

SEQ ID NO: 20332 - protein, 469 aa, Artificial Sequence; identical to SEQ ID NO: 16738
  derived and/or modified protein sequence (wt) from neuraminidase__InfluenzaA__ADX96779

SEQ ID NO: 20333 - protein, 469 aa, Artificial Sequence
  derived and/or modified protein sequence (wt) from neuraminidase__InfluenzaA__ADX96789
MNPNQKIITIGSVCMTIGMANLILQIGNIISIWISHSIQLGNQNQIETCNQSVITYENNTWVNQTYVNISNTNFAAGQSVVSLKLAGNSSLCPVSGWAIYSKDNSIRIGSKGDVFVIREPFISCSPLECRTFFLTQGALLNDKHSNGTIKDRSPYRTLMSCPIGEVPSPYNSRFESVAWSASACHDGINWLTIGISGPDNGAVAVLKYNGIITDTIKSWRNNILRTQESECACVNGSCFTVMTDGPSDGQASYKIFRIEKGKIVKSVEMNAPNYHYEECSCYPDSSEITCVCRDNWHGSNRPWVSFNQNLEYQIGYICSGIFGDNPRPNDKTGSCGPVSSNGANGVKGFSFKYGNGVWIGRTKSISSRNGFEMIWDPNGWTGTDNNFSIKQDIVGINEWSGYSGSFVQHPELTGLDCIRPCFWVELIRGRPKENTIWTSGSSISFCGVNSDTVGWSWPDGAELPFTIDK

SEQ ID NO: 20334 - protein, 469 aa, Artificial Sequence; identical to SEQ ID NO: 16738
  derived and/or modified protein sequence (wt) from neuraminidase__InfluenzaA__ADX96799

SEQ ID NO: 20335 - protein, 469 aa, Artificial Sequence; identical to SEQ ID NO: 16893
  derived and/or modified protein sequence (wt) from neuraminidase__InfluenzaA__ADX96809

SEQ ID NO: 20336 - protein, 469 aa, Artificial Sequence; identical to SEQ ID NO: 16738
  derived and/or modified protein sequence (wt) from neuraminidase__InfluenzaA__ADX96819

SEQ ID NO: 20337 - protein, 469 aa, Artificial Sequence; identical to SEQ ID NO: 17961
  derived and/or modified protein sequence (wt) from neuraminidase__InfluenzaA__ADX96829

SEQ ID NO: 20338 - protein, 469 aa, Artificial Sequence
  derived and/or modified protein sequence (wt) from neuraminidase__InfluenzaA__ADX96839
MNPNQKIITIGSVCMTIGMANLILQIGNIISIWISHSIQLGNQNQIETCNQSVITYENNTWVNQTYVNISNTNFAAGQSVVSVKLAGNSSLCPVSGWAIYSKDNNVRIGSKGDVFVIREPFISCSPLECRTFFLTQGALLNDKHSNGTIKDRSPYRTLMSCPIGEVPSPYNSRFESVAWSASACHDGINWLTIGISGPDNGAVAVLKYNGIITDTIKSWRNNILRTQESECACVNGSCFTVMTDGPSDGQASYKIFRIEKGKIVKSVEMNAPNYHYEECSCYPDSSEITCVCRDNWHGSNRPWVSFNQNLEYQIGYICSGIFGDNPRPNDKTGSCGPVSSNGANGVKGFSFKYGNGVWIGRTKSISSRNGFEMIWDPNGWTGTDNNFSIKQDIVGINEWSGYSGSFVQHPELTGLDCIRPCFWVELIRGRPKENTIWTSGSSISFCGVNSDTVGWSWPDGAELPFTIDK

SEQ ID NO: 20339 - protein, 469 aa, Artificial Sequence; identical to SEQ ID NO: 16738
  derived and/or modified protein sequence (wt) from neuraminidase__InfluenzaA__ADX96849

SEQ ID NO: 20340 - protein, 469 aa, Artificial Sequence; identical to SEQ ID NO: 16738
  derived and/or modified protein sequence (wt) from neuraminidase__InfluenzaA__ADX96859

SEQ ID NO: 20341 - protein, 469 aa, Artificial Sequence; identical to SEQ ID NO: 17961
  derived and/or modified protein sequence (wt) from neuraminidase__InfluenzaA__ADX96869

SEQ ID NO: 20342 - protein, 469 aa, Artificial Sequence; identical to SEQ ID NO: 16738
  derived and/or modified protein sequence (wt) from neuraminidase__InfluenzaA__ADX96879

SEQ ID NO: 20343 - protein, 469 aa, Artificial Sequence; identical to SEQ ID NO: 16738
  derived and/or modified protein sequence (wt) from neuraminidase__InfluenzaA__ADX96899

SEQ ID NO: 20344 - protein, 469 aa, Artificial Sequence
  derived and/or modified protein sequence (wt) from neuraminidase__InfluenzaA__ADX96909
MNPNQKIITIGSVCMTIGMANLILQIGNIISIWISHSIQLGNQNQIETCNQSVITYENNTWVNQTYVNISNTNFAAGQSVVSVKLAGNSSLCPVSGWAIYSKDNSIRIGSKGDVFVIREPFISCSPLECRTFFLTQGALLNDKHSNGTIKDRSPYRTLMSCPIGEVPSPYNSRFESVAWSASACHDGINWLTIGISGPDNGAVAVLKYNGIITDTIKSWRNDILRTQESECACVNGSCFTVMTDGPSDGQASYKIFRIEKGKIVKSVEINAPNYHYEECSCYPDSSEITCVCRDNWHGSNRPWVSFNQNLEYQIGYICSGIFGDNPRPNDKTGSCGPVSSNGANGVKGFSFKYGNGVWIGRTKSINSRNGFEMIWDPNGWTGTDNNFSIKQDIVGINEWSGYSGSFVQHPELTGLDCIRPCFWVELIRGRPKENTIWTSGSSISFCGVNSDTVGWSWPDGAELPFTIDK

SEQ ID NO: 20345 - protein, 469 aa, Artificial Sequence; identical to SEQ ID NO: 16738
  derived and/or modified protein sequence (wt) from neuraminidase__InfluenzaA__ADX96919

SEQ ID NO: 20346 - protein, 469 aa, Artificial Sequence; identical to SEQ ID NO: 16738
  derived and/or modified protein sequence (wt) from neuraminidase__InfluenzaA__ADX96929

SEQ ID NO: 20347 - protein, 469 aa, Artificial Sequence; identical to SEQ ID NO: 16738
  derived and/or modified protein sequence (wt) from neuraminidase__InfluenzaA__ADX96939

SEQ ID NO: 20348 - protein, 469 aa, Artificial Sequence; identical to SEQ ID NO: 17321
  derived and/or modified protein sequence (wt) from neuraminidase__InfluenzaA__ADX96949

SEQ ID NO: 20349 - protein, 469 aa, Artificial Sequence; identical to SEQ ID NO: 16738
  derived and/or modified protein sequence (wt) from neuraminidase__InfluenzaA__ADX96959

SEQ ID NO: 20350 - protein, 469 aa, Artificial Sequence
  derived and/or modified protein sequence (wt) from neuraminidase__InfluenzaA__ADX96969
MNPNQMIITIGSVCMTIGMANLILQIGNIISIWISHSIQLGNQNQIETCNQSVITYENNTWVNQTYVNISNTNFAAGQSVVSVKLAGNSSLCPVSGWAIYSKDNSVRIGSKGDVFVIREPFISCSPLECRTFFLTQGALLNDKHSNGTIKDRSPYRTLMSCPIGEVPSPYNSRFESVAWSASACHDGINWLTIGISGPDNGAVAVLKYNGIITDTIKSWRNNILRTQESECACVNGSCFTVMTDGPSNGQASYKIFRIEKGKIVKSVEMNAPNYHYEECSCYPDSSEITCVCRDNWHGSNRPWVSFNQNLEYQIGYICSGIFGDNPRPNDKTGSCGPVSSNGANGVKGFSFKYGNGVWIGRTKSISSRNGFEMIWDPNGWTGTDNNFSIKQDIVGINEWSGYSGSFVQHPELTGLDCIRPCFWVELIRGRPKENTIWTSGSSISFCGVNSDTVGWSWPDGAELPFTIDK

SEQ ID NO: 20351 - protein, 469 aa, Artificial Sequence; identical to SEQ ID NO: 17961
  derived and/or modified protein sequence (wt) from neuraminidase__InfluenzaA__ADX96979

SEQ ID NO: 20352 - protein, 469 aa, Artificial Sequence; identical to SEQ ID NO: 17961
  derived and/or modified protein sequence (wt) from neuraminidase__InfluenzaA__ADX96989

SEQ ID NO: 20353 - protein, 468 aa, Artificial Sequence
  derived and/or modified protein sequence (wt) from neuraminidase__InfluenzaA__ADX96999
MNPNQKIITIGSVCMTIGMANLILQIGIISIWISHSIQLGNQNQIETCNQSVITYENNTWVNQTYVNISNTNFAAGQSVVSVKLAGNSSLCPVSGWAIYSKDNSIRIGSKGDVFVIREPFISCSPLECRTFFLTQGALLNDKHSNGTIKDRSPYRTLMSCPIGEVPSPYNSRFESVAWSASACHDGINWLTIGISGPDNGAVAVLKYNGIITDTIKSWRNNILRTQESECACVNGSCFTVMTDGPSNGQASYKIFRIEKGKIVKSVEMNAPNYHYEECSCYPDSSEITCVCRDNWHGSNRPWVSFNQNLEYQIGYICSGIFGDNPRPNDKTGSCGPVSSNGANGVKGFSFKYGNGVWIGRTKSISSRNGFEMIWDPNGWTGTDNNFSIKQDIVGINEWSGYSGSFVQHPELTGLDCIRPCFWVELIRGRPKENTIWTSGSSISFCGVNSDTVGWSWPDGAELPFTIDK

SEQ ID NO: 20354 - protein, 469 aa, Artificial Sequence; identical to SEQ ID NO: 16738
  derived and/or modified protein sequence (wt) from neuraminidase__InfluenzaA__ADX97009

SEQ ID NO: 20355 - protein, 469 aa, Artificial Sequence; identical to SEQ ID NO: 16893
  derived and/or modified protein sequence (wt) from neuraminidase__InfluenzaA__ADX97020

SEQ ID NO: 20356 - protein, 469 aa, Artificial Sequence
  derived and/or modified protein sequence (wt) from neuraminidase__InfluenzaA__ADX97030
MNPNQKIITIGSVCMIIGMANLMLQIGNIISIWISHSIQLGNQNQIETCNQSVITYENNTWVNQTYVNISNTNFAAGQSVVSVKLAGNSSLCPVSGWAIYSKDNSVRIGSKGDVFVIREPFISCSPLECRTFFLTQGALLNDKHSNGTIKDRSPYRTLMSCPIGEVPSPYNSRFESVAWSASACHDGINWLTIGISGPDNGAVAVLKYNGIITDTIKSWRNNILRTQESECACVNGSCFTVMTDGPSDGQASYKIFRIEKGKIVKSVEMNAPNYHYEECSCYPDSSEITCVCRDNWHGSNRPWVSFNQNLEYQIGYICSGIFGDNPRPNDKTGSCGPVSSNGANGVKGFSFKYGNGVWIGRTKSISSRNGFEMIWDPNGWTGTDNNFSIKQDIVGINEWSGYSGSFVQHPELTGLDCIRPCFWVELIRGRPKENTIWTSGSSISFCGVNSDTVGWSWPDGAELPFTIDK

SEQ ID NO: 20357 - protein, 469 aa, Artificial Sequence; identical to SEQ ID NO: 18286
  derived and/or modified protein sequence (wt) from neuraminidase__InfluenzaA__ADX98643

SEQ ID NO: 20358 - protein, 469 aa, Artificial Sequence; identical to SEQ ID NO: 16738
  derived and/or modified protein sequence (wt) from neuraminidase__InfluenzaA__ADX98653

SEQ ID NO: 20359 - protein, 469 aa, Artificial Sequence
  derived and/or modified protein sequence (wt) from neuraminidase__InfluenzaA__ADX98668
MNPNQKIITIGSICITIGMANLILQIGNIISIWISHSIQLGNQNQIETCNQSVITYENNTWVNQTYVNISNTNFAAGQSVVSVKLAGNSSLCPVSGWAIYSKDNSIRIGSKGDVFVIREPFISCSPLECRTFFLTQGALLNDKHSNGTIKDRSPYRTLMSCPIGEVPSPYNSRFESVAWSASACHDGINWLTIGISGPDNGAVAVLKYNGIITDTIKSWRNNILRTQESECACVNGSCFTVMTDGPSDGQASYKIFRIEKGKIVKSVEMNAPNYHYEECSCYPDSSEITCVCRDNWHGSNRPWVSFNQNLEYQIGYICSGIFGDNPRPNDKTGSCGPVSSNGANGVKGFSFKYGNGVWIGRTKSISSRNGFEMIWDPNGWTGTDNNFSIKQDIVGINEWSGYSGSFVQHPELTGLDCIRPCFWVELIRGRPKENTIWTSGSSISFCGVNSDTVGWSWPDGAELPFTIDK

SEQ ID NO: 20360 - protein, 469 aa, Artificial Sequence; identical to SEQ ID NO: 16738
  derived and/or modified protein sequence (wt) from neuraminidase__InfluenzaA__ADX98678

SEQ ID NO: 20361 - protein, 469 aa, Artificial Sequence; identical to SEQ ID NO: 16738
  derived and/or modified protein sequence (wt) from neuraminidase__InfluenzaA__ADX98698

SEQ ID NO: 20362 - protein, 469 aa, Artificial Sequence
  derived and/or modified protein sequence (wt) from neuraminidase__InfluenzaA__ADX98708
MNPNQKIITIGSVCMTIGMANLILQIGNIISIWISHSIQLGNQNQIETCNQSVIIYENNTWVNQTYVNISNTNFAAGQSVVSVKLAGNSSLCPVSGWAIYSKDNSIRIGSKGDVFVIREPFISCSPLECRTFFLTQGALLNDKHSNGTIKDRSPYRTLMSCPIGEVPSPYNSRFESVAWSASACHDGINWLTIGISGPDNGAVAVLKYNGIITDTIKSWRNNILRTQESECACVNGSCFTVMTDGPSDGQASYKIFRIEKGKIVKSVEMNAPNYHYEECSCYPDSSEITCVCRDNWHGSNRPWVSFNQNLEYQIGYICSGIFGDNPRPNDKTGSCGPVSSNGANGVKGFSFKYGNGVWIGRTKSISSRNGFEMIWDPNGWTGTDNNFSIKQDIVGINEWSGYSGSFVQHPELTGLDCIRPCFWVELIRGRPKENTIWTSGSSISFCGVNSDTVGWSWPDGAELPFTIDK

SEQ ID NO: 20363 - protein, 469 aa, Artificial Sequence; identical to SEQ ID NO: 16738
  derived and/or modified protein sequence (wt) from neuraminidase__InfluenzaA__ADX98722

SEQ ID NO: 20364 - protein, 469 aa, Artificial Sequence; identical to SEQ ID NO: 16738
  derived and/or modified protein sequence (wt) from neuraminidase__InfluenzaA__ADX98732

SEQ ID NO: 20365 - protein, 469 aa, Artificial Sequence; identical to SEQ ID NO: 16738
  derived and/or modified protein sequence (wt) from neuraminidase__InfluenzaA__ADX98742

SEQ ID NO: 20366 - protein, 469 aa, Artificial Sequence; identical to SEQ ID NO: 18089
  derived and/or modified protein sequence (wt) from neuraminidase__InfluenzaA__ADX98751

SEQ ID NO: 20367 - protein, 469 aa, Artificial Sequence; identical to SEQ ID NO: 16738
  derived and/or modified protein sequence (wt) from neuraminidase__InfluenzaA__ADX98761

SEQ ID NO: 20368 - protein, 469 aa, Artificial Sequence
  derived and/or modified protein sequence (wt) from neuraminidase__InfluenzaA__ADX98770
MNPNQKIITIGSVCMTIGMANLILQIGNIISIWISHSIQLGNQNQIETCNQSVITYENNTWVNQTYVNISNTNFAAGQSVVSVKLAGNSSLCPVSGWAIYSKDNSIRIGSKGDVFVIREPFISCSPLECRTFFLTQGALLNDKHSNGTIKDRSPYRTLMSCPIGEVPSPYNSRFESVAWSASACHDGINWLTIGISGPDNGAVAVLKYNGIITDTIKSWRNNILRTQESECACVNGSCFTVMTDGPSDGQASYKIFRIEKGKIVKSVEMNAPNYHYEECSCYPDSSEITCVCRDNWHGSNRPWGSFNQNLEYQIGYICSGIFGDNPRPNDKTGSCGPVSSNGANGVKGFSFKYGNGVWIGRTKSISSRNGFEMIWDPNGWTGTDNNFSIKQDIVGINEWSGYSGSFVQHPELTGLDCIRPCFWVELIRGRPKENTIWTSGSSISFCGVNSDTVGWSWPDGAELPFTIDK

SEQ ID NO: 20369 - protein, 469 aa, Artificial Sequence; identical to SEQ ID NO: 16738
  derived and/or modified protein sequence (wt) from neuraminidase__InfluenzaA__ADX98780

SEQ ID NO: 20370 - protein, 469 aa, Artificial Sequence
  derived and/or modified protein sequence (wt) from neuraminidase__InfluenzaA__ADX98788
MNPNQKIITIGSVCMTIGMANLVLQIGNIISIWISHSIQLGNQNQIETCNQSVITYENNTWVNQTYVNISNTNFAAGQSVVSVKLAGNSSLCPVSGWAIYSKDNSIRIGSKGDVFVIREPFISCSPLECRTFFLTQGALLNDKHSNGTIKDRSPYRTLMSCPIGEVPSPYNSRFESVAWSASACHDGINWLTIGISGPDNGAVAVLKYNGIITDTIKSWRNNILRTQESECACVNGSCFTVMTDGPSDGQASYKIFRIEKGKIVKSVEMNAPNYHYEECSCYPDSSEITCVCRDNWHGSNRPWVSFNQNLEYQIGYICSGIFGDNPRPNDKTGSCGPVSSNGANGVKGFSFKYGNGVWIGRTKSISSRNGFEMIWDPNGWTGTDNKFSIKQDIVGINEWSGYSGSFVQHPELTGLDCIRPCFWVELIRGRPKENTIWTSGSSISFCGVNSDTVGWSWPDGAELPFTIDK

SEQ ID NO: 20371 - protein, 469 aa, Artificial Sequence
  derived and/or modified protein sequence (wt) from neuraminidase__InfluenzaA__ADX98809
MNPNQKIITIGSVCMTIGMANLILQIGNIILIWISHSIQLGNQNQIETCNQSVITYENNTWVNQTYVNISNTNFAAGQSVVSVKLAGNSSLCPVSGWAIYSKDNSIRIGSKGDVFVIREPFISCSPLECRTFFLTQGALLNDKHSNGTIKDRSPYRTLMSCPIGEVPSPYNSRFESVAWSASACHDGINWLTIGISGPDNGAVAVLKYNGIITDTIKSWRNNILRTQESECACVNGSCFTVMTDGPSDGQASYKIFRIEKGKIVKSVEMNAPNYHYEECSCYPDSSEITCVCRDNWHGSNRPWVSFNQNLEYQIGYICSGIFGDNPRPNDKTGSCGPVSSNGANGVKGFSFKYGNGVWIGRTKSISSRNGFEMIWDPNGWTGTDNNFSIKQDIVGINEWSGYSGSFVQHPELTGLDCIRPCFWVELIRGRPKENTIWTSGSSISFCGVNSDTVGWSWPDGAELPFTIDK

SEQ ID NO: 20372 - protein, 469 aa, Artificial Sequence; identical to SEQ ID NO: 16738
  derived and/or modified protein sequence (wt) from neuraminidase__InfluenzaA__ADX98821

SEQ ID NO: 20373 - protein, 469 aa, Artificial Sequence; identical to SEQ ID NO: 16738
  derived and/or modified protein sequence (wt) from neuraminidase__InfluenzaA__ADX98846

SEQ ID NO: 20374 - protein, 469 aa, Artificial Sequence
  derived and/or modified protein sequence (wt) from neuraminidase__InfluenzaA__ADX98856
MNPNQKIMTIGSVCMTIGMANLILQIGNIISIWISHSIQLGIQNQIETCNQSVITYENNTWVNQTYVNISNTNFAAGQSVVSVKLAGNSSLCPVSGWAIYSKDNSIRIGSKGDVFVIREPFISCSPLECRTFFLTQGALLNDKHSNGTIKDRSPYRTLMSCPIGEVPSPYNSRFESVAWSASACHDGINWLTIGISGPDNGAVAVLKYNGIITDTIKSWRNNILRTQESECACVNGSCFTVMTDGPSDGQASYKIFRIEKGKIVKSVEMNAPNYHYEECSCYPDSSEITCVCRDNWHGSNRPWVSFNQNLEYQIGYICSGIFGDNPRPNDKTGSCGPVSSNGANGVKGFSFKYGNGVWIGRTKSISSRNGFEMIWDPNGWTGTDNNFSIKQDIVGINEWSGYSGSFVQHPELTGLDCIRPCFWVELIRGRPKENTIWTSGSSISFCGVNSDTVGWSWPDGAELPFTIDK

SEQ ID NO: 20375 - protein, 469 aa, Artificial Sequence; identical to SEQ ID NO: 16738
  derived and/or modified protein sequence (wt) from neuraminidase__InfluenzaA__ADX98863

SEQ ID NO: 20376 - protein, 469 aa, Artificial Sequence; identical to SEQ ID NO: 16738
  derived and/or modified protein sequence (wt) from neuraminidase__InfluenzaA__ADX98873

SEQ ID NO: 20377 - protein, 469 aa, Artificial Sequence
  derived and/or modified protein sequence (wt) from neuraminidase__InfluenzaA__ADX98883
MNPNQKIITIGSVCMTIGMANLILQIGNIISIWISHSIQLGNQNQIETCNQSVITYENNTWVNQTYVNISNTNVAAGQSVVSVKLAGNSSLCPVSGWAIYSKDNSIRIGSKGDAFVIREPFISCSPLECRTFFLTQGALLNDKHSNGTIKDRSPYRTLMSCPIGEVPSPYNSRFESVAWSASACHDGINWLTIGISGPDNGAVAVLKYNGIITDTIKSWRNNILRTQESECACVNGSCFTVMTDGPSDGQASYKIFRIEKGKIVKSVEMNAPNYHYEECSCYPDSSEITCVCRDNWHGSNRPWVSFNQNLEYQIGYICSGIFGDNPRPNDKTGSCGPVSSNGANGVKGFSFKYGNGVWIGRTKSISSRSGFEMIWDPNGWTGTDNNFSIKQDIVGINEWSGYSGSFVQHPELTGLDCIRPCFWVELIRGRPKENTIWTSGSSISFCGVNSDTVGWSWPDGAELPFTIDK

SEQ ID NO: 20378 - protein, 469 aa, Artificial Sequence; identical to SEQ ID NO: 16738
  derived and/or modified protein sequence (wt) from neuraminidase__InfluenzaA__ADX98893

SEQ ID NO: 20379 - protein, 469 aa, Artificial Sequence; identical to SEQ ID NO: 16738
  derived and/or modified protein sequence (wt) from neuraminidase__InfluenzaA__ADX98903

SEQ ID NO: 20380 - protein, 469 aa, Artificial Sequence; identical to SEQ ID NO: 18291
  derived and/or modified protein sequence (wt) from neuraminidase__InfluenzaA__ADX98913

SEQ ID NO: 20381 - protein, 469 aa, Artificial Sequence; identical to SEQ ID NO: 18169
  derived and/or modified protein sequence (wt) from neuraminidase__InfluenzaA__ADX98923

SEQ ID NO: 20382 - protein, 469 aa, Artificial Sequence; identical to SEQ ID NO: 18175
  derived and/or modified protein sequence (wt) from neuraminidase__InfluenzaA__ADX98933

SEQ ID NO: 20383 - protein, 469 aa, Artificial Sequence; identical to SEQ ID NO: 16738
  derived and/or modified protein sequence (wt) from neuraminidase__InfluenzaA__ADX98943

SEQ ID NO: 20384 - protein, 469 aa, Artificial Sequence; identical to SEQ ID NO: 18695
  derived and/or modified protein sequence (wt) from neuraminidase__InfluenzaA__ADX98953

SEQ ID NO: 20385 - protein, 469 aa, Artificial Sequence; identical to SEQ ID NO: 16738
  derived and/or modified protein sequence (wt) from neuraminidase__InfluenzaA__ADX98963

SEQ ID NO: 20386 - protein, 469 aa, Artificial Sequence
  derived and/or modified protein sequence (wt) from neuraminidase__InfluenzaA__ADX98973
MNPNQKIITIGSVCMTIGMANLILQIGNIISIWISHSIQLGNQNQIETCNQSVITYENNTWVNQTYVNISNTNFAAGQSVVSVKLAGNSSLCPVSGWAIYSKDNSIRIGSKGDVFVIREPFISCSPLECRTFFLTQGALLNDKHSNGTIKDRSPYRTLMICPIGEVPSPYNSRFESVAWSASACHDGINWLTIGISGPDNGAVAVLKYNGIITDTIKSWRNNILRTQESECACVNGSCFTVMTDGPSDGQASYKIFRIEKGKIVKSVEMNAPNYHYEECSCYPDSSEITCVCRDNWHGSNRPWVSFNQNLEYQIGYICSGIFGDNPRPNDKTGSCGPVSSNGANGVKGFSFKYGNGVWIGRTKSISSRNGFEMIWDPNGWTGTDNNFSIKQDIVGINEWSGYSGSFVQHPELTGLDCIRPCFWVELIRGRPKENTIWTSGSSISFCGVNSDTVGWSWPDGAELPFTIDK

SEQ ID NO: 20387 - protein, 469 aa, Artificial Sequence; identical to SEQ ID NO: 16738
  derived and/or modified protein sequence (wt) from neuraminidase__InfluenzaA__ADX98983

SEQ ID NO: 20388 - protein, 469 aa, Artificial Sequence; identical to SEQ ID NO: 16738
  derived and/or modified protein sequence (wt) from neuraminidase__InfluenzaA__ADX98993

SEQ ID NO: 20389 - protein, 469 aa, Artificial Sequence; identical to SEQ ID NO: 16738
  derived and/or modified protein sequence (wt) from neuraminidase__InfluenzaA__ADX99003

SEQ ID NO: 20390 - protein, 454 aa, Artificial Sequence
  derived and/or modified protein sequence (wt) from neuraminidase__InfluenzaA__ADX99584
MNPNQKITTIGSICLVVGLISLILQIGNIISIWISHSIQTGSQNHTGICNQNIITYKNSTWVKDTTSVILTGNSSLCPIRGWAIYSKDNSIRIGSKGDVFVIREPFISCSHLECRTFFLTQGALLNDKHSNGTVKDRSPYRALMSCPVGEAPSPYNSRFESVAWSASACHDGMGWLTIGISGPDNGAVAVLKYNGIITETIKSWRKKILRTQESECACVNGSCFTIMTDGPSDGLASYKIFKIEKGKVTKSIELNAPNSHYEECSCYPDTGKVMCVCRDNWHGSNRPWVSFDQNLDYQIGYICSGVFGDNPRPEDGTGSCGPVYVDGANGVKGFSYRYGNGVWIGRTKSHSSRHGFEMIWDPNGWTETDSKFSVRQDVVAMTDWSGYSGSFVQHPELTGLDCMRPCFWVELIRGRPKEKTIWTSASSISFCGVNSDTVDWSWPDGAELPFSIDK

SEQ ID NO: 20391 - protein, 454 aa, Artificial Sequence; identical to SEQ ID NO: 20390
  derived and/or modified protein sequence (wt) from neuraminidase__InfluenzaA__ADX99595

SEQ ID NO: 20392 - protein, 454 aa, Artificial Sequence; identical to SEQ ID NO: 20390
  derived and/or modified protein sequence (wt) from neuraminidase__InfluenzaA__ADX99606

SEQ ID NO: 20393 - protein, 454 aa, Artificial Sequence; identical to SEQ ID NO: 20390
  derived and/or modified protein sequence (wt) from neuraminidase__InfluenzaA__ADX99617

SEQ ID NO: 20394 - protein, 454 aa, Artificial Sequence; identical to SEQ ID NO: 20390
  derived and/or modified protein sequence (wt) from neuraminidase__InfluenzaA__ADX99628

SEQ ID NO: 20395 - protein, 454 aa, Artificial Sequence; identical to SEQ ID NO: 20390
  derived and/or modified protein sequence (wt) from neuraminidase__InfluenzaA__ADX99639

SEQ ID NO: 20396 - protein, 454 aa, Artificial Sequence; identical to SEQ ID NO: 15719
  derived and/or modified protein sequence (wt) from neuraminidase__InfluenzaA__ADX99650

SEQ ID NO: 20397 - protein, 454 aa, Artificial Sequence; identical to SEQ ID NO: 15719
  derived and/or modified protein sequence (wt) from neuraminidase__InfluenzaA__ADX99672

SEQ ID NO: 20398 - protein, 454 aa, Artificial Sequence; identical to SEQ ID NO: 15719
  derived and/or modified protein sequence (wt) from neuraminidase__InfluenzaA__ADX99683

SEQ ID NO: 20399 - protein, 454 aa, Artificial Sequence; identical to SEQ ID NO: 15719
  derived and/or modified protein sequence (wt) from neuraminidase__InfluenzaA__ADX99694

SEQ ID NO: 20400 - protein, 454 aa, Artificial Sequence; identical to SEQ ID NO: 15719
  derived and/or modified protein sequence (wt) from neuraminidase__InfluenzaA__ADX99705

SEQ ID NO: 20401 - protein, 454 aa, Artificial Sequence; identical to SEQ ID NO: 15719
  derived and/or modified protein sequence (wt) from neuraminidase__InfluenzaA__ADX99846

SEQ ID NO: 20402 - protein, 454 aa, Artificial Sequence; identical to SEQ ID NO: 15719
  derived and/or modified protein sequence (wt) from neuraminidase__InfluenzaA__ADX99857

SEQ ID NO: 20403 - protein, 454 aa, Artificial Sequence; identical to SEQ ID NO: 15719
  derived and/or modified protein sequence (wt) from neuraminidase__InfluenzaA__ADX99868

SEQ ID NO: 20404 - protein, 454 aa, Artificial Sequence; identical to SEQ ID NO: 15719
  derived and/or modified protein sequence (wt) from neuraminidase__InfluenzaA__ADX99879

SEQ ID NO: 20405 - protein, 454 aa, Artificial Sequence; identical to SEQ ID NO: 15719
  derived and/or modified protein sequence (wt) from neuraminidase__InfluenzaA__ADX99890

SEQ ID NO: 20406 - protein, 454 aa, Artificial Sequence; identical to SEQ ID NO: 15719
  derived and/or modified protein sequence (wt) from neuraminidase__InfluenzaA__ADX99901

SEQ ID NO: 20407 - protein, 454 aa, Artificial Sequence
  derived and/or modified protein sequence (wt) from neuraminidase__InfluenzaA__ADX99912
MNPNQKIITIGSICLVVGLISLILQIGNIISIWISHSIQTGSQNHTGICNQNIITYKNSTWVKDTTSVILTGNSSLCPIRGWAIYSKDNSIRIGSKGDVFIIREPFISCSHLECRTFFLTQGALLNDKHSSGTVKDRSPYRALMSCPVGEAPSPYNSRFESVAWSASACHDGMGWLTIGISGPDNGAVAVLKYNGIITETIKSWRKKILRTQESECACVNGSCFTIMTDGPSDGLASYKIFKIEKGKVTKSIELNAPNSHYEECSCYPDTGKVMCVCRDNWHGSNRPWVSFDQNLDYQIGYICSGVFGDNPRPEDGTGSCGPVYVDGANGVKGFSYRYGNGVWIGRTKSHSSRHGFEMIWDPNGWTETDSKFSVRQDVVAMTDWSGYSGSFVQHPELTGLDCMRPCFWVELIRGRPKEKTIWTSASSISFCGVNSDTVDWSWPDGAELPFSIDK

SEQ ID NO: 20408 - protein, 454 aa, Artificial Sequence; identical to SEQ ID NO: 15719
  derived and/or modified protein sequence (wt) from neuraminidase__InfluenzaA__ADX99923

SEQ ID NO: 20409 - protein, 454 aa, Artificial Sequence; identical to SEQ ID NO: 15719
  derived and/or modified protein sequence (wt) from neuraminidase__InfluenzaA__ADX99934

SEQ ID NO: 20410 - protein, 454 aa, Artificial Sequence; identical to SEQ ID NO: 15719
  derived and/or modified protein sequence (wt) from neuraminidase__InfluenzaA__ADX99956

SEQ ID NO: 20411 - protein, 454 aa, Artificial Sequence; identical to SEQ ID NO: 15719
  derived and/or modified protein sequence (wt) from neuraminidase__InfluenzaA__ADX99967

SEQ ID NO: 20412 - protein, 454 aa, Artificial Sequence; identical to SEQ ID NO: 15719
  derived and/or modified protein sequence (wt) from neuraminidase__InfluenzaA__ADX99978

SEQ ID NO: 20413 - protein, 454 aa, Artificial Sequence; identical to SEQ ID NO: 15719
  derived and/or modified protein sequence (wt) from neuraminidase__InfluenzaA__ADX99989

SEQ ID NO: 20414 - protein, 454 aa, Artificial Sequence; identical to SEQ ID NO: 15719
  derived and/or modified protein sequence (wt) from neuraminidase__InfluenzaA__ADY00001

SEQ ID NO: 20415 - protein, 454 aa, Artificial Sequence; identical to SEQ ID NO: 15719
  derived and/or modified protein sequence (wt) from neuraminidase__InfluenzaA__ADY00012

SEQ ID NO: 20416 - protein, 454 aa, Artificial Sequence; identical to SEQ ID NO: 15719
  derived and/or modified protein sequence (wt) from neuraminidase__InfluenzaA__ADY00023

SEQ ID NO: 20417 - protein, 470 aa, Artificial Sequence
  derived and/or modified protein sequence (wt) from neuraminidase__InfluenzaA__ADY04729
MNPNQKIITIGSISIAIGIISLMLQIGNIISIWASHSIQTGSQNHTGVCNQRIITYENSTWVNHTYVNINNTNVIAGKDKTSVTMAGNSSLCSISGWAIYTKDNSIRIGSKGDVFVIREPFISCSHLECRTFFLTQGALLNDKHSNGTVKDRSPYRALMSCPLGEAPSPYNSKFESVAWSASACHDGMGWLTIGISGPDNGAVAVLKYNGIITETIKSWKKQILRTQESECVCVNGSCFTIMTDGPSNGAASYKIFKIEKGKVTKSIELNAPNFHYEECSCYPDTGTVMCVCRDNWHGSNRPWVSFNQNLDYQIGYICSGVFGDNPRPKDGEGSCNPVTVDGANGVKGFSYKYGNGVWIGRTKSNRLRKGFEMIWDPNGWTDTDSDFSVKQDVVAITDWSGYSGSFVQHPELTGLDCIRPCFWVELVRGLPKENTTIWTSGSSISFCGVNSDTANWSWPDGAELPFTIDK

SEQ ID NO: 20418 - protein, 469 aa, Artificial Sequence; identical to SEQ ID NO: 19518
  derived and/or modified protein sequence (wt) from neuraminidase__InfluenzaA__ADY11828

SEQ ID NO: 20419 - protein, 469 aa, Artificial Sequence; identical to SEQ ID NO: 16599
  derived and/or modified protein sequence (wt) from neuraminidase__InfluenzaA__ADY11839

SEQ ID NO: 20420 - protein, 469 aa, Artificial Sequence; identical to SEQ ID NO: 16599
  derived and/or modified protein sequence (wt) from neuraminidase__InfluenzaA__ADY17657

SEQ ID NO: 20421 - protein, 469 aa, Artificial Sequence; identical to SEQ ID NO: 16599
  derived and/or modified protein sequence (wt) from neuraminidase__InfluenzaA__ADY17668

SEQ ID NO: 20422 - protein, 469 aa, Artificial Sequence; identical to SEQ ID NO: 16599
  derived and/or modified protein sequence (wt) from neuraminidase__InfluenzaA__ADY17679

SEQ ID NO: 20423 - protein, 469 aa, Artificial Sequence; identical to SEQ ID NO: 16599
  derived and/or modified protein sequence (wt) from neuraminidase__InfluenzaA__ADY17690

SEQ ID NO: 20424 - protein, 469 aa, Artificial Sequence; identical to SEQ ID NO: 16599
  derived and/or modified protein sequence (wt) from neuraminidase__InfluenzaA__ADY17701

SEQ ID NO: 20425 - protein, 469 aa, Artificial Sequence; identical to SEQ ID NO: 16738
  derived and/or modified protein sequence (wt) from neuraminidase__InfluenzaA__ADY38722

SEQ ID NO: 20426 - protein, 469 aa, Artificial Sequence; identical to SEQ ID NO: 18487
  derived and/or modified protein sequence (wt) from neuraminidase__InfluenzaA__ADY38723

SEQ ID NO: 20427 - protein, 469 aa, Artificial Sequence; identical to SEQ ID NO: 16738
  derived and/or modified protein sequence (wt) from neuraminidase__InfluenzaA__ADY38734

SEQ ID NO: 20428 - protein, 469 aa, Artificial Sequence; identical to SEQ ID NO: 18330
  derived and/or modified protein sequence (wt) from neuraminidase__InfluenzaA__ADY38753

SEQ ID NO: 20429 - protein, 469 aa, Artificial Sequence; identical to SEQ ID NO: 16738
  derived and/or modified protein sequence (wt) from neuraminidase__InfluenzaA__ADY38763

SEQ ID NO: 20430 - protein, 469 aa, Artificial Sequence; identical to SEQ ID NO: 16738
  derived and/or modified protein sequence (wt) from neuraminidase__InfluenzaA__ADZ04600

SEQ ID NO: 20431 - protein, 469 aa, Artificial Sequence; identical to SEQ ID NO: 16738
  derived and/or modified protein sequence (wt) from neuraminidase__InfluenzaA__ADZ04610

SEQ ID NO: 20432 - protein, 469 aa, Artificial Sequence; identical to SEQ ID NO: 16738
  derived and/or modified protein sequence (wt) from neuraminidase__InfluenzaA__ADZ04693

SEQ ID NO: 20433 - protein, 469 aa, Artificial Sequence; identical to SEQ ID NO: 16738
  derived and/or modified protein sequence (wt) from neuraminidase__InfluenzaA__ADZ04701

SEQ ID NO: 20434 - protein, 469 aa, Artificial Sequence; identical to SEQ ID NO: 16738
  derived and/or modified protein sequence (wt) from neuraminidase__InfluenzaA__ADZ04711

SEQ ID NO: 20435 - protein, 469 aa, Artificial Sequence
  derived and/or modified protein sequence (wt) from neuraminidase__InfluenzaA__ADZ05393
MNPNQKIITIDSVCMTIGMANLILQIGNIISIWISHSIQLGNQNQIETCNQSVITYENNTWVNQTYVNISNTNFAAGQSVVSVKLAGNSSLCPVSGWAIYSKDNSVRIGSKGDVFVIREPFISCSPLECRTFFLTQGALLNDKHSNGTIKDRSPYRTLMSCPIGEVPSPYNSRFESVAWSASACHDGINWLTIGISGPDNGAVAVLKYNGIITDTIKSWRNNILRTQESECACVNGSCFTVMTDGPSNGQASYKIFRIEKGKIVKSVEMNAPNYHYEECSCYPDSSEITCVCRDNWHGSNRPWVSFNQNLEYQIGYICSGIFGDNPRPNDKTGSCGPVSSNGANGVKGFSFKYGNGVWIGRTKSISSRNGFEMIWDPNGWTGTDNNFSIKQDIVGINEWSGYSGSFVQHPELTGLDCIRPCFWVELIRGRPKENTIWTSGSSISFCGVNSDTVGWSWPDGAELPFTIDK

SEQ ID NO: 20436 - protein, 470 aa, Artificial Sequence
  derived and/or modified protein sequence (wt) from neuraminidase__InfluenzaA__ADZ05837
MNPNQKIITIGSISIAIGIISLMLQIGNIISIWASHSIQTGSQNNTGICNQRIITCENSTWVNHTYVNINNTNVVAGEDKTSVTLAGNSSLCSISGWAIYTKDNSIRIGSKGDVFVIREPFISCSHLECRTFFLTQGALLNDKHSNGTVKDRSPYRALMSCPLGEAPSPYNSKFESVAWSASACHDGMGWLTIGISGPDNGAVAVLKYNGIITGTIKSWKKQILRTQESECVCMNGSCFTIMTDGPSNKAASYKIFKIEKGKVTKSIELNAPNFYYEECSCYPDTGIVMCVCRDNWHGSNRPWVSFNQNLDYQIGYICSGVFGDNPRPEDGEGSCNPVTVDGANGVKGFSYKYGNGVWIGRTKSNRLRKGFEMIWDPNGWTNTDSDFSVKQDVVATTDWSGYSGSFVQHPELTGLDCIRPCFWVELVRGLPRENTTIWTSGSSISFCGVNSDTANWSWPDGAELPFTIDK

SEQ ID NO: 20437 - protein, 470 aa, Artificial Sequence; identical to SEQ ID NO: 17461
  derived and/or modified protein sequence (wt) from neuraminidase__InfluenzaA__ADZ05848

SEQ ID NO: 20438 - protein, 469 aa, Artificial Sequence; identical to SEQ ID NO: 17905
  derived and/or modified protein sequence (wt) from neuraminidase__InfluenzaA__ADZ05858

SEQ ID NO: 20439 - protein, 469 aa, Artificial Sequence; identical to SEQ ID NO: 16738
  derived and/or modified protein sequence (wt) from neuraminidase__InfluenzaA__ADZ47841

SEQ ID NO: 20440 - protein, 469 aa, Artificial Sequence; identical to SEQ ID NO: 16738
  derived and/or modified protein sequence (wt) from neuraminidase__InfluenzaA__ADZ47851

SEQ ID NO: 20441 - protein, 469 aa, Artificial Sequence
  derived and/or modified protein sequence (wt) from neuraminidase__InfluenzaA__ADZ47861
MNPNQKIITIGSVCMTIGLANLILQIGNIISIWISHSIQLGNQNQIETCNQSVITYENNTWVNQTYVNISNINFAAGQSVVSVKLAGNSSLCPVSGWAIYSKDNSVRIGSKGDVFVIREPFISCSPLECRTFFLTQGALLNDKHSNGTIKDRSPYRTLMSCPIGEVPSPYNSRFESVAWSASACHDGINWLTIGISGPDNGAVAVLKYNGIITDTIKSWRNNILRTQESECACVNGSCFTVMTDGPSDGQASYKIFRIEKGKIVKSVEMNAPNYHYEECSCYPDSSEITCVCRDNWHGSNRPWVSFNQNLEYRIGYICSGIFGDNPRPNDKTGSCGPVSSNGANGVKGFSFKYGNGVWIGRTKSISSRNGFEMIWDPNGWTGTDKNFSIKQDIVGINEWSGYSGSFVQHPELTGLDCIRPCFWVELIRGRPKENTIWTSGSSISFCGVNSDTVGWSWPDGAELPFTIDK

SEQ ID NO: 20442 - protein, 470 aa, Artificial Sequence
  derived and/or modified protein sequence (wt) from neuraminidase__InfluenzaA__ADZ53101
MNPNQKIITIGSISIAIGIISLMLQIGNIISIWASHSIQTGSQNNTGICNQRIITYENSTWVNHTYVNINNTKVVAGEDKTSVTLAGNSSLCSISGWAINTKDNSIRIGSKGDVFVIREPFISCSHLECRTFFLTQGALLNDKHSNGTVKDRSPYRALMSCPLGEAPSPYNSKFESVAWSASACHDGMGWLTIGISGPDNGAVAVLKYNGIITGTIKSWKKQILRTQESECVCMNGSCFTIMTDGPSNKAASYKIFKIEKGKVTKSIELNAPNFYYEECSCYPDTGIVMCVCRDNWHGSNRPWVSFNQNLDYQIGYICSGVFGDNPRPEDGEGSCNPVTVDGANGVKGFSYKYGNGVWIGRTKSNRLRKGFEMIWDPNGWTNTDSDFSVKQDVVAITDWSGYSGSFVQHPELTGLDCIRPCFWVELVRGLPRENTTIWTSGSSISFCGVNSDTANWSWPDGAELPFTIDK

SEQ ID NO: 20443 - protein, 469 aa, Artificial Sequence
  derived and/or modified protein sequence (wt) from neuraminidase__InfluenzaA__ADZ53124
MNPNQKIITIGSVCMTIGMANLILQIGNIISIWISHSIQLGNQNQIETCNQSVITYENNTWVNQTYVNISNTNFAAGQSVVSVKLAGNSSLCPVSGWAIYSKDNSIRIGSKGDVFVIREPFISCSPLECRTFFLTQGALLNDKHSNGTIKDRSPYRTLMSCPIGEVPSPYNSRFESVAWSASACHDGINWLTIGISGPDNGAVAVLKYNGIITDTIKSWRNNILRTQESECACVNGSCFTVMTDGPSDGQASYKIFRIEKGKIVKSVEMNAPNYYYEECSCYPDSSEITCVCRDNWHGSNRPWVSFNQNLEYQIGYICSGIFGDNPRPNDKTGSCGPVSSNGANGVKGFSFKYGNGVWIGRTKSISSRNGFEMIWDPNGWTGTDNDFSIKQDIVGINEWSGYSGSFVQHPELTGLDCIRPCFWVELIRGRPKENTIWTSGSSISFCGVNSDTVGWSWPDGAELPFTIDK

SEQ ID NO: 20444 - protein, 469 aa, Artificial Sequence; identical to SEQ ID NO: 16738
  derived and/or modified protein sequence (wt) from neuraminidase__InfluenzaA__ADZ53130

SEQ ID NO: 20445 - protein, 469 aa, Artificial Sequence; identical to SEQ ID NO: 16728
  derived and/or modified protein sequence (wt) from neuraminidase__InfluenzaA__ADZ53132

SEQ ID NO: 20446 - protein, 469 aa, Artificial Sequence; identical to SEQ ID NO: 16738
  derived and/or modified protein sequence (wt) from neuraminidase__InfluenzaA__ADZ53134

SEQ ID NO: 20447 - protein, 469 aa, Artificial Sequence; identical to SEQ ID NO: 16738
  derived and/or modified protein sequence (wt) from neuraminidase__InfluenzaA__ADZ53136

SEQ ID NO: 20448 - protein, 469 aa, Artificial Sequence; identical to SEQ ID NO: 17092
  derived and/or modified protein sequence (wt) from neuraminidase__InfluenzaA__ADZ53137

SEQ ID NO: 20449 - protein, 469 aa, Artificial Sequence; identical to SEQ ID NO: 16738
  derived and/or modified protein sequence (wt) from neuraminidase__InfluenzaA__ADZ53139

SEQ ID NO: 20450 - protein, 469 aa, Artificial Sequence
  derived and/or modified protein sequence (wt) from neuraminidase__InfluenzaA__ADZ53141
MNPNQKIITIGSVCMTIGMANLILQIGNIISIWISHSIQLGNQNQIETCNQSVITYENNTWVNQTYVNISNTNFAAGQSVVSVKLAGNSSLCPVSGWAIYSKDNSIRIGSKGDVFVIREPFISCSPLECRTFFLTQGALLNDKHSNGTIKDRSPYRTLMSCPIGEVPSPYNSRFESVAWSASACHDGINWLTIGISGPDNGAVAVLKYNGIITDTIKSWRNNILRTQESECACVNGSCFTVMTDGPSDGQASYKIFRIEKGKIVKSVEMNAPNYHYEECSCYPDSSEITCVCRDNWHGSNRPWVSFNQNLEYQIGYICSGIFGDNPRPNDKTGSCGPVSSNGANGVKGFSFKYGNGVWIGRTKSISSRNGFEMIWDPNGWTGTDNDFSIKQDIVGINEWSGYSGSFVQHSELTGLDCIRPCFWVELIRGRPKENTIWTSGSSISFCGVNSDTVGWSWPDGAELPFTIDK

SEQ ID NO: 20451 - protein, 469 aa, Artificial Sequence; identical to SEQ ID NO: 16599
  derived and/or modified protein sequence (wt) from neuraminidase__InfluenzaA__AEA03712

SEQ ID NO: 20452 - protein, 469 aa, Artificial Sequence; identical to SEQ ID NO: 16599
  derived and/or modified protein sequence (wt) from neuraminidase__InfluenzaA__AEA03722

SEQ ID NO: 20453 - protein, 469 aa, Artificial Sequence; identical to SEQ ID NO: 16599
  derived and/or modified protein sequence (wt) from neuraminidase__InfluenzaA__AEA03744

SEQ ID NO: 20454 - protein, 469 aa, Artificial Sequence
  derived and/or modified protein sequence (wt) from neuraminidase__InfluenzaA__AEA03755
MNPNQKIITIGSVSLTISTICFFMQIAILITTVTLHFKQYEFNSPPNNQVMLCEPTIIERNITEIVYLTNTTIEKEICPKLAEYRNWSKPQCDITGFAPFSKDNSIRLSAGGDIWVTREPYVSCDPDKCYQFALGQGTTLNNVHSNNTVRGRTPYRTLLMNELGVPFHLGTKQVCIAWSSSSCHDGKAWLHVCITGDDKNATASFIYNGRLVDSVVSWSKEILRTQESECVCINGTCTVVMTDGSASGKADTKILFIEEGKIVHTSTLSGSAQHVEECSCYPRYPGVRCVCRDNWKGSNRPIVDINIKDHSIVSSYVCSGLVGDTPRKNDSSSSSHCLDPNNEEGGHGVKGWAFDDGNDVWMGRTISEKSRLGYETFKVIEGWSNPKSKLQINRQVIVDRGNRSGYSGIFSVEGKSCINRCFYVELIRGRKEETEVLWTSNSIVVFCGTSGTYGTGSWPDGADINLMPI

SEQ ID NO: 20455 - protein, 469 aa, Artificial Sequence; identical to SEQ ID NO: 16599
  derived and/or modified protein sequence (wt) from neuraminidase__InfluenzaA__AEA03766

SEQ ID NO: 20456 - protein, 469 aa, Artificial Sequence; identical to SEQ ID NO: 16599
  derived and/or modified protein sequence (wt) from neuraminidase__InfluenzaA__AEA03796

SEQ ID NO: 20457 - protein, 469 aa, Artificial Sequence; identical to SEQ ID NO: 16599
  derived and/or modified protein sequence (wt) from neuraminidase__InfluenzaA__AEA03806

SEQ ID NO: 20458 - protein, 469 aa, Artificial Sequence
  derived and/or modified protein sequence (wt) from neuraminidase__InfluenzaA__AEA03817
MNPNQKIITIGSVSLTISTICFFMQIAILITTVTLHFKQYEFNSPPNNQVMLCEPTIIERNITEIVYLTNTTIEKEICPKLAEYRNWSKPQCDITGFAPFSKDNSIRLSAGGDIWVTREPYVSCDPDRCYQFALGQGTTLNNVHSNNTVRDRTPYRTLLMNELGVPFHLGTKQVCIAWSSSSCHDGKAWLHVCITGDDKNATASFIYNGRLVDSVVSWSKEILRTQESECVCINGTCTVVMTDGSASGKADTKILFIEEGKIVHTSTLSGSAQHVEECSCYPRYPGVRCVCRDNWKGSNRPIVDINIKDHSIVSSYVCSGLVGDTPRKNDSSSSSHCLDPNNEEGGHGVKGWAFDDGNDVWMGRTISEKSRLGYETFKVIEGWSNPKSKLQINRQVIVDRGNRSGYSGIFSVEGKSCINRCFYVELIRGRKEETEVLWTSNSIVVFCGTSGTYGTGSWPDGADINLMPI

SEQ ID NO: 20459 - protein, 469 aa, Artificial Sequence; identical to SEQ ID NO: 16599
  derived and/or modified protein sequence (wt) from neuraminidase__InfluenzaA__AEA03828

SEQ ID NO: 20460 - protein, 469 aa, Artificial Sequence; identical to SEQ ID NO: 16599
  derived and/or modified protein sequence (wt) from neuraminidase__InfluenzaA__AEA03838

SEQ ID NO: 20461 - protein, 469 aa, Artificial Sequence; identical to SEQ ID NO: 19755
  derived and/or modified protein sequence (wt) from neuraminidase__InfluenzaA__AEA03849

SEQ ID NO: 20462 - protein, 469 aa, Artificial Sequence; identical to SEQ ID NO: 16599
  derived and/or modified protein sequence (wt) from neuraminidase__InfluenzaA__AEA03860

SEQ ID NO: 20463 - protein, 469 aa, Artificial Sequence
  derived and/or modified protein sequence (wt) from neuraminidase__InfluenzaA__AEA03871
MNPNQKIITIGSVSLTISTICFFMQIAILITTVTLHFKQYEFNSPPNNQVMLCEPTIIERNITEIVYLTNTTIEKEICPKLAEYRNWSKPQCDITGFAPFSKDNSIRLSAGGDIWVTREPYVSCDPDKCYQFALGQGTTLNNVHSNNTVRDRTPYRTLLMNELGVPFHLGTKQVCIAWSSSSCHDGKAWLHVCITGDDKNATASFIYNGRLVDSVVSWSKEILRTQESECVCINGTCTVVITDGSASGKADTKILFIEEGKIVHTSTLSGSAQHVEECSCYPRYPGVRCVCRDNWKGSNRPIVDINIKDHSIVSSYVCSGLVGDTPRKNDSSSSSHCLDPNNEEGGHGVKGWAFDDGNDVWMGRTISEKSRLGYETFKVIEGWSNPKSKLQINRQVIVDRGNRSGYSGIFSVEGKSCINRCFYVELIRGRKEETEVLWTSNSIVVFCGTSGTYGTGSWPDGADINLMPI

SEQ ID NO: 20464 - protein, 469 aa, Artificial Sequence; identical to SEQ ID NO: 16599
  derived and/or modified protein sequence (wt) from neuraminidase__InfluenzaA__AEA03879

SEQ ID NO: 20465 - protein, 469 aa, Artificial Sequence
  derived and/or modified protein sequence (wt) from neuraminidase__InfluenzaA__AEA03889
MNPNQKIITIGSVSLTISTICFFMQIAILITTVTLHFKQYEFNSPPNNQVMLCEPTIIERNITEIVYLTNTTIEKEICPKLAEYRNWSKPQCDITGFAPFSKDNSIRLSAGGDIWVTREPYVSCDPDKCYQFALGQGTTLNNVHSNNKVRDRTPYRTLLMNELGVPFHLGTKQVCIAWSSSSCHDGKAWLHVCITGDDKNATASFIYNGRLVDSVVSWSKEILRTQESECVCINGTCTVVMTDGSASGKADTKILFIEEGKIVHTSTLSGSAQHVEECSCYPRYPGVRCVCRDNWKGSNRPIVDINIKDHSIVSSYVCSGLVGDTPRKNDSSSSSHCLDPNNEEGGHGVKGWAFDDGNDVWMGRTISEKSRLGYETFKVIEGWSNPKSKLQINRQVIVDRGNRSGYSGIFSVEGKSCINRCFYVELIRGRKEETEVLWTSNSIVVFCGTSGTYGTGSWPDGADINLMPI

SEQ ID NO: 20466 - protein, 469 aa, Artificial Sequence
  derived and/or modified protein sequence (wt) from neuraminidase__InfluenzaA__AEA03898
MNPNQKIITIGSVSLTISTICFFMQIAILITTVTLHFKQYEFNSPPNNQVMLCEPTIIERNITEIVYLTNTTIEKEICPKLAEYRNWSKPQCDITGFAPFSKDNSIRLSAGGDIWVTREPYVSCDPDKCYQFALGQGTTLNNVHSNNTVRDRTPYRTLLMNELGVPFHLGTKQVCIAWSSSSCHDGKAWLHVCITGDDKNATASFIYNGRLVDSVVSWSKEILRTQESECVCINGTCTVVMTDGSASGKADTKILFIEEGKIVHTSTLSGSAQHVEECSCYPRYPGVRCVCRDNWKGSNRPIVDINIKDHSIVSSYVCSGLVGDTPRKSDSSSSSHCLDPNNEEGGHGVKGWAFDDGNDVWMGRTISEKSRLGYETFKVIEGWSNPKSKLQINRQVIVDRGNRSGYSGIFSVEGKSCINRCFYVELIRGRKEETEVLWTSNSIVVFCGTSGTYGTGSWPDGADINLMPI

SEQ ID NO: 20467 - protein, 469 aa, Artificial Sequence; identical to SEQ ID NO: 16599
  derived and/or modified protein sequence (wt) from neuraminidase__InfluenzaA__AEA03909

SEQ ID NO: 20468 - protein, 469 aa, Artificial Sequence
  derived and/or modified protein sequence (wt) from neuraminidase__InfluenzaA__AEA03924
MNPNQKIITIGSVSLTISTICFFMQIAILITTVTLHFKQYEFNSPPNNQVMLCEPTIIERNITEIVYLTNTTIEKEICPKLAEYRNWSKPQCDITGFAPFSKDNSIRLSAGGDIWVTREPYVSCDPDKCYQFALGQGTTLNNVHSNNTVRDRTPYRTLLMNELGVPFHLGTKQVCIAWSSSSCHDGKAWLHVCITGDDKNATASFIYNGRLVDSVVSWSKEILRTQESECVCINGTCTVVMTDGSASGKADTKILFIEEGKIIHTSTLSGSAQHVEECSCYPRYPGVRCVCRDNWKGSNRPIVDINIKDHSIVSSYVCSGLVGDTPRKNDSSSSSHCLDPNNEEGGHGVKGWAFDDGNDVWMGRTISEKSRLGYETFKVIEGWSNPKSKLQINRQVIVDRGNRSGYSGIFSVEGKSCINRCFYVELIRGRKEETEVLWTSNSIVVFCGTSGTYGTGSWPDGADINLMPI

SEQ ID NO: 20469 - protein, 469 aa, Artificial Sequence; identical to SEQ ID NO: 16599
  derived and/or modified protein sequence (wt) from neuraminidase__InfluenzaA__AEA03935

SEQ ID NO: 20470 - protein, 469 aa, Artificial Sequence
  derived and/or modified protein sequence (wt) from neuraminidase__InfluenzaA__AEA03946
MNPNQKIITIGSVSLTISTICFFMQIAILITTVTLHFKQYEFNSPPNNQVMLCEPTIIERNITEIVYLTNTTIEKEICPKLAEYRNWSKPQCDITGFAPFSKDNSIRLSAGGDIWVTREPYVSCDPDKCYQFALGQGTTLNNVHSNNTVRDRTPYRTLLMNELGVPFHLGTKQVCIAWSSSSCHDGKAWLHVCITGDDKNATASFIYNGRLVDSVVSWSEEILRTQESECVCINGTCTVVMTDGSASGKADTKILFIEEGKIVHTSTLSGSAQHVEECSCYPRYPGVRCVCRDNWKGSNRPIVDINIKDHSIVSSYVCSGLVGDTPRKNDSSSSSHCLDPNNEEGGHGVKGWAFDDGNDVWMGRTISEKSRLGYETFKVIEGWSNPKSKLQINRQVIVDRGNRSGYSGIFSVEGKSCINRCFYVELIRGRKEETEVLWTSNSIVVFCGTSGTYGTGSWPDGADINLMPI

SEQ ID NO: 20471 - protein, 469 aa, Artificial Sequence
  derived and/or modified protein sequence (wt) from neuraminidase__InfluenzaA__AEA03957
MNPNQKIITIGSVSLTISTICFFMQIAILITTVTLHFKQYEFNSPPNNQVMLCEPTIIERNITEIVYLTNTTIEKEICPKLAEYRNWSKPQCDITGFAPFSKDNSIRLSAGGDIWVTREPYVSCDPDKCYQFALGQGTTLNNVHSNNTVRDRTPYRTLLMNELGVPFHLGTKQVCIAWSSSSCHDGKAWLHVCITGDDKNATASFIYNGRLVDSVVSWSKEILRTQESECVCINGTCTVVMTDGSASGKADTKILFIEEGKIVHTSTLSGSAQHVEECSCYPRYPGVRCVCRDNWKGSNRPIVDINIKDHSIVSSYVCSGLVGDTPRKNDSSSSSHCLDPNNEEGGHGVKGWAFDDGNDVWMGRTISEKSRLGYETFKVIEGWSNSKSKLQINRQVIVDRGNRSGYSGIFSVEGKSCINRCFYVELIRGRKEETEVLWTSNSIVVFCGTSGTYGTGSWPDGADINLMPI

SEQ ID NO: 20472 - protein, 469 aa, Artificial Sequence; identical to SEQ ID NO: 16599
  derived and/or modified protein sequence (wt) from neuraminidase__InfluenzaA__AEA03989

SEQ ID NO: 20473 - protein, 469 aa, Artificial Sequence; identical to SEQ ID NO: 19755
  derived and/or modified protein sequence (wt) from neuraminidase__InfluenzaA__AEA04000

SEQ ID NO: 20474 - protein, 469 aa, Artificial Sequence; identical to SEQ ID NO: 16599
  derived and/or modified protein sequence (wt) from neuraminidase__InfluenzaA__AEA04011

SEQ ID NO: 20475 - protein, 469 aa, Artificial Sequence; identical to SEQ ID NO: 19755
  derived and/or modified protein sequence (wt) from neuraminidase__InfluenzaA__AEA04022

SEQ ID NO: 20476 - protein, 469 aa, Artificial Sequence; identical to SEQ ID NO: 16599
  derived and/or modified protein sequence (wt) from neuraminidase__InfluenzaA__AEA04033

SEQ ID NO: 20477 - protein, 469 aa, Artificial Sequence; identical to SEQ ID NO: 16599
  derived and/or modified protein sequence (wt) from neuraminidase__InfluenzaA__AEA04044

SEQ ID NO: 20478 - protein, 469 aa, Artificial Sequence; identical to SEQ ID NO: 16599
  derived and/or modified protein sequence (wt) from neuraminidase__InfluenzaA__AEA04049

SEQ ID NO: 20479 - protein, 469 aa, Artificial Sequence; identical to SEQ ID NO: 16599
  derived and/or modified protein sequence (wt) from neuraminidase__InfluenzaA__AEA04059

SEQ ID NO: 20480 - protein, 469 aa, Artificial Sequence; identical to SEQ ID NO: 16599
  derived and/or modified protein sequence (wt) from neuraminidase__InfluenzaA__AEA04070

SEQ ID NO: 20481 - protein, 469 aa, Artificial Sequence; identical to SEQ ID NO: 19755
  derived and/or modified protein sequence (wt) from neuraminidase__InfluenzaA__AEA04081

SEQ ID NO: 20482 - protein, 469 aa, Artificial Sequence; identical to SEQ ID NO: 16599
  derived and/or modified protein sequence (wt) from neuraminidase__InfluenzaA__AEA04092

SEQ ID NO: 20483 - protein, 469 aa, Artificial Sequence; identical to SEQ ID NO: 16599
  derived and/or modified protein sequence (wt) from neuraminidase__InfluenzaA__AEA04103

SEQ ID NO: 20484 - protein, 469 aa, Artificial Sequence; identical to SEQ ID NO: 16599
  derived and/or modified protein sequence (wt) from neuraminidase__InfluenzaA__AEA04125

SEQ ID NO: 20485 - protein, 469 aa, Artificial Sequence; identical to SEQ ID NO: 16599
  derived and/or modified protein sequence (wt) from neuraminidase__InfluenzaA__AEA04133

SEQ ID NO: 20486 - protein, 469 aa, Artificial Sequence
  derived and/or modified protein sequence (wt) from neuraminidase__InfluenzaA__AEA04144
MNPNQKIITIGSVSLTISTICFFMQIAILITTVTLHFKQYEFNSPPNNQVMLCEPTIIERNITEIVYLTNTTIEKEICPKLAEYRNWSKPQCDITGFAPFSKDNSIRLSAGGDIWVTREPYVSCDPDKCYQFALGQGTTLNNVHSNNTVRDRTPYRTLLMNELGVPFHLGTKQVCIAWSSSSCHDGKAWLHVCITGDDKNATASFIYNGRLVDSVVSWSKEILRTQESECVCINGTCTVVMTDGSASGKADTKILFIEEGKIIHTSTLSGSAQHVEECSCYPRYPGVRCVCRDNWKGSNRPIVDINIKDHSIVSSYVCSGLVGDTPRKNDSSSSSHCLDPNNEEGGHGVKGWAFDDGNDVWMGRTISEKSRLGYETFKVIEGWSNPKSKLQINRQVIVDRGNRSGYSGIFSVEGKSCINRCFYVELIRGRKEETEVLWTSNSIIVFCGTSGTYGTGSWPDGADINLMPI

SEQ ID NO: 20487 - protein, 469 aa, Artificial Sequence; identical to SEQ ID NO: 16599
  derived and/or modified protein sequence (wt) from neuraminidase__InfluenzaA__AEA04155

SEQ ID NO: 20488 - protein, 469 aa, Artificial Sequence; identical to SEQ ID NO: 16599
  derived and/or modified protein sequence (wt) from neuraminidase__InfluenzaA__AEA04166

SEQ ID NO: 20489 - protein, 469 aa, Artificial Sequence
  derived and/or modified protein sequence (wt) from neuraminidase__InfluenzaA__AEA04177
MNPNQKIITIGSVSLTISTICFFMQIAILITTVTLHFKQYEFNSPPNNQVMLCEPTIIERNITEIVYLTNTTIEKEICPKLAEYRNWSKPQCDITGFAPFSKDNSIRLSAGGDIWVTREPYVSCDPDKCYQFALGQGTTLNNVHSNNTVRNRTPYRTLLMNELGVPFHLGTKQVCIAWSSSSCHDGKAWLHVCITGDDKNATASFIYNGRLVDSVVSWSKEILRTQESECVCINGTCTVVMTDGSASGKADTKILFIEEGKIVHTSTLSGSAQHVEECSCYPRYPGVRCVCRDNWKGSNRPIVDINIKDHSIVSSYVCSGLVGDTPRKNDSSSSSHCLDPNNEEGGHGVKGWAFDDGNDVWMGRTISEKSRLGYETFKVIEGWSNPKSKLQINRQVIVDRGNRSGYSGIFSVEGKSCINRCFYVELIRGRKEETEVLWTSNSIVVFCGTSGTYGTGSWPDGADINLMPI

SEQ ID NO: 20490 - protein, 469 aa, Artificial Sequence; identical to SEQ ID NO: 16599
  derived and/or modified protein sequence (wt) from neuraminidase__InfluenzaA__AEA04188

SEQ ID NO: 20491 - protein, 469 aa, Artificial Sequence; identical to SEQ ID NO: 17592
  derived and/or modified protein sequence (wt) from neuraminidase__InfluenzaA__AEA04199

SEQ ID NO: 20492 - protein, 469 aa, Artificial Sequence; identical to SEQ ID NO: 16599
  derived and/or modified protein sequence (wt) from neuraminidase__InfluenzaA__AEA04210

SEQ ID NO: 20493 - protein, 469 aa, Artificial Sequence; identical to SEQ ID NO: 17592
  derived and/or modified protein sequence (wt) from neuraminidase__InfluenzaA__AEA04229

SEQ ID NO: 20494 - protein, 469 aa, Artificial Sequence; identical to SEQ ID NO: 17592
  derived and/or modified protein sequence (wt) from neuraminidase__InfluenzaA__AEA04239

SEQ ID NO: 20495 - protein, 469 aa, Artificial Sequence
  derived and/or modified protein sequence (wt) from neuraminidase__InfluenzaA__AEA04250
MNPNQKIITIGSVSLTISTICFFMQTAILITTVTLHFKQCEFNSPPNNQVMLCEPTIIERNITEIVYLTNTTIEKEICPKLAEYRNWSKPQCDITGFAPFSKDNSIRLSAGGDIWVTREPYVSCDPDKCYQFALGQGTTLNNVHSNNTVRVRTPYRTLLMNELGVPFHLGTKQVCIAWSSSSCHDGKAWLHVCITGDDKNATASFIYNGRLVDSVVSWSKEILRTQESECVCINGTCTVVMTDGSASGKADTKILFIEEGKIVHTSTLSGSAQHVEECSCYPRYPGVRCVCRDNWKGSNRPIVDINIKDHSIVSSYVCSGLVGDTPRKNDSSSSSHCLDPNNEEGGHGVKGWAFDDGNDVWMGRTISEKSRLGYETFKVIEGWSNPKSKLQINRQVIVDRGNRSGYSGIFSVEGKSCINRCFYVELIRGRKEETEVLWTSNSIVVFCGTSGTYGTGSWPDGADINLMPI

SEQ ID NO: 20496 - protein, 469 aa, Artificial Sequence; identical to SEQ ID NO: 17592
  derived and/or modified protein sequence (wt) from neuraminidase__InfluenzaA__AEA04260

SEQ ID NO: 20497 - protein, 469 aa, Artificial Sequence
  derived and/or modified protein sequence (wt) from neuraminidase__InfluenzaA__AEA04268
MNPNQKIITIGSVSLTISTICLFMQTAILITTVTLHFKQCEFNSPPNNQAMLCEPTIIERNITEIVYLTNTTIEKEICPKLAEYRNWSKPQCDITGFAPFSKDNSIRLSAGGDIWVTREPYVSCDPDKCYQFALGQGTTLNNVHSNNTVRDRTPYRTLLMNELGVPFHLGTKQVCIAWSSSSCHDGKAWLHVCITGDDKNATASFIYNGRLVDSVVSWSKEILRTQESECVCINGTCTVVMTDGSASGKADTKILFIEEGKIVHTSTLSGSAQHVEECSCYPRYPGVRCVCRDNWKGSNRPIVDINIKDHSIVSSYVCSGLVGDTPRKNDSSSSSHCLDPNNEEGGHGVKGWAFDDGNDVWMGRTISEKSRLGYETFKVIEGWSNPKSKLQINRQVIVDRGNRSGYSGIFSVEGKSCINRCFYVELIRGRKEETEVLWTSNSIVVFCGTSGTYGTGSWPDGADINLMPI

SEQ ID NO: 20498 - protein, 469 aa, Artificial Sequence; identical to SEQ ID NO: 17592
  derived and/or modified protein sequence (wt) from neuraminidase__InfluenzaA__AEA04276

SEQ ID NO: 20499 - protein, 469 aa, Artificial Sequence; identical to SEQ ID NO: 17592
  derived and/or modified protein sequence (wt) from neuraminidase__InfluenzaA__AEA04287

SEQ ID NO: 20500 - protein, 469 aa, Artificial Sequence; identical to SEQ ID NO: 17592
  derived and/or modified protein sequence (wt) from neuraminidase__InfluenzaA__AEA04298

SEQ ID NO: 20501 - protein, 469 aa, Artificial Sequence
  derived and/or modified protein sequence (wt) from neuraminidase__InfluenzaA__AEA04307
MNPNQKIITIGSVSLTISTICFFMQTAILITTVTLHFKQCEFNSPPNNQVMLCEPTIIERNITEIVYLTNTTIEKEICPKLAEYRNWSKPQCDITGFAPFSKDNSIRLSAGGDIWVTREPYVSCDPDKCYQFALGQGTTLNNVHSNNTVRDRTPYRTLLMNELGVPFHLGTKQVCIAWSSSSCHDGKAWLHVCITGDDKNATASFIYNGRLVDSVVSWSKEILRTQESECVCINGTCTVVMTDGSASGKADTKILFIEEGKIVHTSTLSGSAQHVEECSCYPRYPDVRCVCRDNWKGSNRPIVDINIKDHSIVSSYVCSGLVGDTPRKNDSSSSSHCLDPNNEEGGHGVKGWAFDDGNDVWMGRTISEKSRLGYETFKVIEGWSNPKSKLQINRQVIVDRGNRSGYSGIFSVEGKSCINRCFYVELIRGRKEETEVLWTSNSIVVFCGTSGTYGTGSWPDGADINLMPI

SEQ ID NO: 20502 - protein, 464 aa, Artificial Sequence
  derived and/or modified protein sequence (wt) from neuraminidase__InfluenzaA__AEA04357
MNPNQKIITIGSICMVVGIISLILQIGNIVSIWISHSIQTGNQNHTGTCDQSIITYKNSTWVNQTYVNVVAGKDTTSVILAGNSSLCPIRGWAIYSKDNGVRIGSKGDVFVIREPFISCSHLECRTFFLTQGALLNDKHSNGTVKDRSPYRALMSCPVGEAPSPYNSRFESVAWSASACHDGMGWLTIGISGPDDGAVAVLKYNGIITETIKSWRKEILRTQESECVCVNGSCFTIMTDGPSGGPASYKIFKIEKGKVTKSIELDAPNSHYEECSCYPDTSKVMCVCRDNWHGSNRPWVSFDQNLDYQMGYICSGVFGDNPRPKDGKGSCGPVYVDGANGVKGFSYKYGNGVWIGRTKSISSRQGFEMIWDPNGWTETDSNFFTKQDVVAVTDWSGYSGSFVQHPELTGLDCMRPCFWVELIRGRPKENTIWTSGSSISFCGVNSDTVDWSWPDGAELPFTIDK

SEQ ID NO: 20503 - protein, 469 aa, Artificial Sequence; identical to SEQ ID NO: 16467
  derived and/or modified protein sequence (wt) from neuraminidase__InfluenzaA__AEA04368

SEQ ID NO: 20504 - protein, 469 aa, Artificial Sequence
  derived and/or modified protein sequence (wt) from neuraminidase__InfluenzaA__AEA04379
MNPNQKTITIGSVSLTIETVCFLMQIAILATTVTLHFKQHECDSPASNQVMPCEPIIIERNITEIVYLNNTTIEKEICPEVVEYRNWSKPQCQITGFAPFSKDNSIRLSAGGDIWVTREPYVSCDPGKCYQFALGQGTTLDNKHSNGTIHDRIPHRTLLMNELGVPFHLGTKQVCVAWSSSSCHDGKAWLHVCVTGDDRNATASFIYDGRLVDSIGSWSQNILRTQESECVCINGTCTVVMTDGSASGRADTRILFIKEGKIVHISPLSGSAQHIEECSCYPRYPDVRCICRDNWKGSNRPVIDINMEDYSIDSSYVCSGLVGDTPRNDDSSSNSKSRDPNNERGNPGVKGWAFDNGDDVWMGRTISKDSRSGYETFKVIGGWSTPNSKSQVNRQVIVDNNNWSGYSGIFSVEGKSCINRCFYVELIRGRPQETRVWWTSNSIVVFCGTSGTYGTGSWPDGANINFMPI

SEQ ID NO: 20505 - protein, 470 aa, Artificial Sequence; identical to SEQ ID NO: 20204
  derived and/or modified protein sequence (wt) from neuraminidase__InfluenzaA__AEA10295

SEQ ID NO: 20506 - protein, 469 aa, Artificial Sequence; identical to SEQ ID NO: 16738
  derived and/or modified protein sequence (wt) from neuraminidase__InfluenzaA__AEA10306

SEQ ID NO: 20507 - protein, 469 aa, Artificial Sequence; identical to SEQ ID NO: 20091
  derived and/or modified protein sequence (wt) from neuraminidase__InfluenzaA__AEA10316

SEQ ID NO: 20508 - protein, 469 aa, Artificial Sequence; identical to SEQ ID NO: 16738
  derived and/or modified protein sequence (wt) from neuraminidase__InfluenzaA__AEA10326

SEQ ID NO: 20509 - protein, 469 aa, Artificial Sequence; identical to SEQ ID NO: 18026
  derived and/or modified protein sequence (wt) from neuraminidase__InfluenzaA__AEA10335

SEQ ID NO: 20510 - protein, 469 aa, Artificial Sequence; identical to SEQ ID NO: 16738
  derived and/or modified protein sequence (wt) from neuraminidase__InfluenzaA__AEA10342

SEQ ID NO: 20511 - protein, 469 aa, Artificial Sequence
  derived and/or modified protein sequence (wt) from neuraminidase__InfluenzaA__AEA10352
MNPNQKIITIGSVCMTIGMANLILQIGNIISIWISHSIQLGNQNQIETCNQSVITYENNTWVNQTYVNISNTNFAAGQSVVSVKLAGNSSLCPVSGWAIYSKDNSIRIGSKGDVFVIREPFISCSPLECRTFFLTQGALLNDKHSNGTIKDRSPYRTLMSCPIGEVPSPYNSRFESVAWSASACHDGINWLTIGISGPDNGAVAVLKYNGIITDTIKSWRNNILRTQESECACINGSCFTVMTDGPSDGQASYKIFRIEKGKIVKSVEMNAPNYHYEECSCYPDSSEITCVCRDNWHGSNRPWVSFNQNLEYQIGYICSGIFGDNPRPNDKTGSCSPVSSNGANGVKGFSFKYGNGVWIGRTKSISSRNGFEMIWDPNGWTGTDNNFSIKQDIVGINEWSGYSGSFVQHPELTGLDCIRPCFWVELIRGRPKENTIWTSGSSISFCGVNSDTVGWSWPDGAELPFTIDK

SEQ ID NO: 20512 - protein, 469 aa, Artificial Sequence; identical to SEQ ID NO: 16738
  derived and/or modified protein sequence (wt) from neuraminidase__InfluenzaA__AEA48991

SEQ ID NO: 20513 - protein, 469 aa, Artificial Sequence; identical to SEQ ID NO: 19410
  derived and/or modified protein sequence (wt) from neuraminidase__InfluenzaA__AEA72707

SEQ ID NO: 20514 - protein, 469 aa, Artificial Sequence; identical to SEQ ID NO: 19410
  derived and/or modified protein sequence (wt) from neuraminidase__InfluenzaA__AEA72718

SEQ ID NO: 20515 - protein, 469 aa, Artificial Sequence; identical to SEQ ID NO: 19410
  derived and/or modified protein sequence (wt) from neuraminidase__InfluenzaA__AEA72729

SEQ ID NO: 20516 - protein, 469 aa, Artificial Sequence
  derived and/or modified protein sequence (wt) from neuraminidase__InfluenzaA__AEA72742
MNPNQKIITIGSVCMTIGMANLILQIGNIISIWISHSIQLGNQSQIETCNQSVITYENNTWVNQTYVNISNTNFAAGQSVVSVKLAGNSSLCPVSGWAIYSKDNSIRIGSKGDVFVIREPFISCSPLECRTFFLTQGALLNDKHSNGTIKDRSPYRTLMSCPIGEVPSPYNSRFESVAWSASACHDGINWLTIGISGPDNGAVAVLKYNGIITDTIKSWRNNILRTQESECACVNGSCFTIMTDGPSDGQASYKIFRIEKGKIVKSVEMNAPNYHYEECSCYPDSSEITCVCRDNWHGSNRPWVSFNQNLEYQIGYICSGIFGDNPRPNDKTGSCGPVSSNGANGVKGFSFKYGNGVWIGRTKSISSRNGFEMIWDPNGWTGTDNNFSIKQDIVGINEWSGYSGSFVQHPELTGLDCIRPCFWVELIRGRPKENTIWTSGSSISFCGVNSDTVGWSWPDGAELPFTIDK

SEQ ID NO: 20517 - protein, 469 aa, Artificial Sequence; identical to SEQ ID NO: 19013
  derived and/or modified protein sequence (wt) from neuraminidase__InfluenzaA__AEA72779

SEQ ID NO: 20518 - protein, 469 aa, Artificial Sequence
  derived and/or modified protein sequence (wt) from neuraminidase__InfluenzaA__AEA72789
MNPNQKIITIGSVCMTIGMANLILQIGNIISIWISHSIQLGNQSQIETCNQSVITYENNTWVNQTYVNISNTNFAAGQSVVSVKLAGNSSLCPVSGWAIYSKDDSIRIGSKGDVFVIREPFISCSPLECRTFFLTQGALLNDKHSNGTIKDRSPYRTLMSCPIGEVPSPYNSRFESVAWSASACHDGINWLTIGISGPDNGAVAVLKYNGIITDTIKSWRNNILRTQESECACVNGSCFTVMTDGPSDGQASYKIFRIEKGKIVKSVEMNAPNYHYEECSCYPDSSEITCVCRDNWHGSNRPWVSFNQNLEYQIGYICSGIFGDNPRPNDKTGSCGPVSSNGANGVKGFSFKYGNGVWIGRTKSISSRNGFEMIWDPNGWTGTDNNFSIKQDIVGINEWSGYSGSFVQHPELTGLDCIRPCFWVELIRGRPKENTIWTSGSSISFCGVNSDTVGWSWPDGAELPFTIDK

SEQ ID NO: 20519 - protein, 469 aa, Artificial Sequence; identical to SEQ ID NO: 19410
  derived and/or modified protein sequence (wt) from neuraminidase__InfluenzaA__AEA73291

SEQ ID NO: 20520 - protein, 469 aa, Artificial Sequence; identical to SEQ ID NO: 19410
  derived and/or modified protein sequence (wt) from neuraminidase__InfluenzaA__AEA73302

SEQ ID NO: 20521 - protein, 469 aa, Artificial Sequence; identical to SEQ ID NO: 19410
  derived and/or modified protein sequence (wt) from neuraminidase__InfluenzaA__AEA73313

SEQ ID NO: 20522 - protein, 469 aa, Artificial Sequence; identical to SEQ ID NO: 19410
  derived and/or modified protein sequence (wt) from neuraminidase__InfluenzaA__AEA73324

SEQ ID NO: 20523 - protein, 469 aa, Artificial Sequence; identical to SEQ ID NO: 19410
  derived and/or modified protein sequence (wt) from neuraminidase__InfluenzaA__AEA73335

SEQ ID NO: 20524 - protein, 469 aa, Artificial Sequence; identical to SEQ ID NO: 19410
  derived and/or modified protein sequence (wt) from neuraminidase__InfluenzaA__AEA73346

SEQ ID NO: 20525 - protein, 469 aa, Artificial Sequence; identical to SEQ ID NO: 19410
  derived and/or modified protein sequence (wt) from neuraminidase__InfluenzaA__AEA73357

SEQ ID NO: 20526 - protein, 469 aa, Artificial Sequence; identical to SEQ ID NO: 19410
  derived and/or modified protein sequence (wt) from neuraminidase__InfluenzaA__AEA73368

SEQ ID NO: 20527 - protein, 469 aa, Artificial Sequence; identical to SEQ ID NO: 19410
  derived and/or modified protein sequence (wt) from neuraminidase__InfluenzaA__AEA73379

SEQ ID NO: 20528 - protein, 469 aa, Artificial Sequence; identical to SEQ ID NO: 19410
  derived and/or modified protein sequence (wt) from neuraminidase__InfluenzaA__AEA73390

SEQ ID NO: 20529 - protein, 469 aa, Artificial Sequence; identical to SEQ ID NO: 19410
  derived and/or modified protein sequence (wt) from neuraminidase__InfluenzaA__AEA73401

SEQ ID NO: 20530 - protein, 469 aa, Artificial Sequence; identical to SEQ ID NO: 19410
  derived and/or modified protein sequence (wt) from neuraminidase__InfluenzaA__AEA73412

SEQ ID NO: 20531 - protein, 469 aa, Artificial Sequence; identical to SEQ ID NO: 19410
  derived and/or modified protein sequence (wt) from neuraminidase__InfluenzaA__AEA73423

SEQ ID NO: 20532 - protein, 469 aa, Artificial Sequence; identical to SEQ ID NO: 19410
  derived and/or modified protein sequence (wt) from neuraminidase__InfluenzaA__AEA73455

SEQ ID NO: 20533 - protein, 469 aa, Artificial Sequence; identical to SEQ ID NO: 19410
  derived and/or modified protein sequence (wt) from neuraminidase__InfluenzaA__AEA73466

SEQ ID NO: 20534 - protein, 469 aa, Artificial Sequence
  derived and/or modified protein sequence (wt) from neuraminidase__InfluenzaA__AEA73477
MNPNQKIITIGSVSLTISTICFFMQIAILITTVTLHFKQYKFNSPPNNQVMLCEPTIIERNITEIVYLTNTTIEKEICPKLAEYRNWSKPQCDITGFAPFSKDNSIRLSAGGDIWVTREPYVSCDPDKCYQFALGQGTTLNNVHSNNTVRDRTPYRTLLMNELGVPFHLGTKQVCIAWSSSSCHDGKAWLHVCITGDDKNATASFIYNGRLVDSVVSWSKEILRTQESECVCINGTCTVVMTDGSASGKADTKILFIEEGKIVHTSTLSGSAQHVEECSCYPRYPGVRCVCRDNWKGSNRPIVDINIKDHSIVSSYVCSGLVGDTPRKNDSSSSSHCLDPNNEEGGHGVKGWAFDDGNDVWMGRTINETSRLGYETFKVIEGWSNPKSKLQINRQVIVDRGNRSGYSGIFSVEGKSCINRCFYVELIRGRKEETKVLWTSNSIVVFCGTSGTYGTGSWPDGADLNLMPI

SEQ ID NO: 20535 - protein, 469 aa, Artificial Sequence; identical to SEQ ID NO: 19410
  derived and/or modified protein sequence (wt) from neuraminidase__InfluenzaA__AEA73488

SEQ ID NO: 20536 - protein, 469 aa, Artificial Sequence
  derived and/or modified protein sequence (wt) from neuraminidase__InfluenzaA__AEA73499
MNPNQKIITIGSVSLTISTICFFMQIAILITTVTLHFKQYKFNSPPNNQVMLCEPTIIERNITEIVYLTNTTIEKEICPKLAEYRNWSKPQCDITGFAPFSKDNSIRLSAGGDIWVTREPYVSCDPDKCYQFALGQGTTINNVHSNNTVRDRTPYRTLLMNELGVPFHLGTKQVCIAWSSSSCHDGKAWLHVCITGDDKNATASFIYNGRLVDSVVSWSKEILRTQESECVCINGTCTVVMTDGSASGKADTKILFIEEGKIVHTSTLSGSAQHVEECSCYPRYPGVRCVCRDNWKGSNRPIVDINIKDHSIVSSYVCSGLVGDTPRKNDSSSSSHCLDPNNEEGGHGVKGWAFDDGNDVWMGRTINETSRLGYETFKVIEGWSNPKSKLQINRQVIVDRGNRSGYSGIFSVEGKSCINRCFYVELIRGRKEETEVLWTSNSIVVFCGTSGTYGTGSWPDGADLNLMPI

SEQ ID NO: 20537 - protein, 469 aa, Artificial Sequence; identical to SEQ ID NO: 19410
  derived and/or modified protein sequence (wt) from neuraminidase__InfluenzaA__AEA73510

SEQ ID NO: 20538 - protein, 469 aa, Artificial Sequence; identical to SEQ ID NO: 19410
  derived and/or modified protein sequence (wt) from neuraminidase__InfluenzaA__AEA73521

SEQ ID NO: 20539 - protein, 469 aa, Artificial Sequence; identical to SEQ ID NO: 19410
  derived and/or modified protein sequence (wt) from neuraminidase__InfluenzaA__AEA73532

SEQ ID NO: 20540 - protein, 469 aa, Artificial Sequence; identical to SEQ ID NO: 19410
  derived and/or modified protein sequence (wt) from neuraminidase__InfluenzaA__AEA73543

SEQ ID NO: 20541 - protein, 469 aa, Artificial Sequence; identical to SEQ ID NO: 19410
  derived and/or modified protein sequence (wt) from neuraminidase__InfluenzaA__AEA73554

SEQ ID NO: 20542 - protein, 469 aa, Artificial Sequence; identical to SEQ ID NO: 19410
  derived and/or modified protein sequence (wt) from neuraminidase__InfluenzaA__AEA73565

SEQ ID NO: 20543 - protein, 470 aa, Artificial Sequence; identical to SEQ ID NO: 17461
  derived and/or modified protein sequence (wt) from neuraminidase__InfluenzaA__AEA73576

SEQ ID NO: 20544 - protein, 470 aa, Artificial Sequence; identical to SEQ ID NO: 17461
  derived and/or modified protein sequence (wt) from neuraminidase__InfluenzaA__AEA73587

SEQ ID NO: 20545 - protein, 470 aa, Artificial Sequence; identical to SEQ ID NO: 20204
  derived and/or modified protein sequence (wt) from neuraminidase__InfluenzaA__AEA73598

SEQ ID NO: 20546 - protein, 470 aa, Artificial Sequence; identical to SEQ ID NO: 17461
  derived and/or modified protein sequence (wt) from neuraminidase__InfluenzaA__AEA73609

SEQ ID NO: 20547 - protein, 470 aa, Artificial Sequence; identical to SEQ ID NO: 17461
  derived and/or modified protein sequence (wt) from neuraminidase__InfluenzaA__AEA73620

SEQ ID NO: 20548 - protein, 470 aa, Artificial Sequence
  derived and/or modified protein sequence (wt) from neuraminidase__InfluenzaA__AEA73631
MNPNQKIITIGSISIAIGIISLMLQIGNIISIWASHSIQTGSQNNTGICNQRIITYENSTWVNHTYVNINNTNVVAGEDKTSVTLAGNSSLCSISGWAIYTKDNSIRIGSKGDVFVIREPFISCSHLECRTFFLTQGALLNDKHSNGTVKDRSPYRALMSCPLGEAPSPYNSKFESVAWSASACHDGMGWLTIGISGPDNGAVAVLKYNGIITGTIKSWKKQILRTQESECVCMNGSCFTIMTDGPSNKAASYKIFKIEKGKVTKSIELNAPNFYYEECSCYPDTGIVMCVCRDNWHGSNRPWVSFNQNLDYQIGYICSGVFGDNPRPEDGEGSCNPVTVDGANGVKGFSYKYGNGVWIGRIKSNRLRKGFEMIWDPNGWTNTDSDFSVKQDVVAITDWSGYSGSFVQHPELTGLDCIRPCFWVELVRGLPRENTTIWTSGSSISFCGVNSDTANWSWPDGAELPFTIDK

SEQ ID NO: 20549 - protein, 470 aa, Artificial Sequence
  derived and/or modified protein sequence (wt) from neuraminidase__InfluenzaA__AEA73642
MNPNQRIITIGSISIAIGIISLMLQIGNIISIWASHSIQTGSQNNTGICKQRIITYENSTWVNHTYVNINNTNVVAGEDKTSVTLAGNSSLCSISGWAIYTKDNSIRIGSKGDVFVIREPFISCSHLECRTFFLTQGALLNDKHSNGTAKDRSPYRALMSCPLGEAPSPYNSKFESVAWSASACHDGMGWLTIGISGPDNGAVAVLKYNGIITGTIKSWKKQILRTQESECVCMNGSCFTIMTDGPSNKAASYKIFKIEKGKVTKSIELNAPNFYYEECSCYPDTGIVMCVCRDNWHGSNRPWVSFNQNLDYQIGYICSGVFGDNPRPEDGEGSCNPVTVDGANGVKGFSYKYGNGVWLGRTKSNRLRKGFEMIWDPNGWTNTDSDFSVKQDVVAITDWSGYSGSFVQHPELTGLDCIRPCFWVELVRGLPRENTTIWTSGSSISFCGVNSDTANWSWPDGAELPFTIDK

SEQ ID NO: 20550 - protein, 470 aa, Artificial Sequence; identical to SEQ ID NO: 17461
  derived and/or modified protein sequence (wt) from neuraminidase__InfluenzaA__AEA73653

SEQ ID NO: 20551 - protein, 470 aa, Artificial Sequence
  derived and/or modified protein sequence (wt) from neuraminidase__InfluenzaA__AEA73664
MNPNQKIITIGSISIAIGIISLMLQIGNIISIWASHSIQTGSQNNTGICNQRIITYENSTWVNHTYVNINNTNVVAGEDKTSVTLAGNSSLCSISGWAIYTKDNSIRIGSKGDVFVIREPFISCSHLECRTFFLTQGALLNDKHSNGTVKDRSPYRALMSCPLGEAPSPYNSKFESVAWSASACHDGMGWLTIGISGPDNGAVAVLKYNGIITGTIKSWKKQILRTQESECVCMNGSCFTIMTDGPSNKAASYKIFKIEKGKVTKSIELNAPNFYYEECSCYPDTGIVMCVCRDNWHGSNRPWVSFNQNLDYQIGYICSGVFGDNPRPEDGEGSCNPVTVNGADGVKGFSYKYGNGVWIGRTKSNRLRKGFEMIWDPNGWTNTDSDFSVKQDVVAITDWSGYSGSFVQHPELTGLDCIRPCFWVELVRGLPKENTTIWTSGSSISFCGVNSDTANWSWPDGAELPFTIDK

SEQ ID NO: 20552 - protein, 470 aa, Artificial Sequence
  derived and/or modified protein sequence (wt) from neuraminidase__InfluenzaA__AEA73675
MNPNQKIITIGSISIAIGIISLMLQIGNIISIWASHSIQTGSQNNTGICNQRIITYENSTWVNHTYVNINNTNVVAGEDKTSVTLAGNSSLCSISGWAIYTKDNSIRIGSKGDVFVIREPFISCSHLECRTFFLTQGALLNDKHSNGTVKDRSPYRALMSCPLGEAPSPYNSKFESVAWSASACHDGMGWLTIGISGPDNGAVAVLKYNGIITGTIKSWKKQILRTQESECVCMNGSCFTIMTDGPSNKAASYKIFKIEKGKVTKSIELNAPNFYYEECSCYPDTGIVMCVCRDNWHGSNRPWVSFNQNLDYQIGYICSGVFGDNPRPEDGEGSCNPVTVDGADGVKGFSYKYGNGVWIGRTKSNRLRKGFEMIWDPNGWTNTDSDFSVKQDVVAITDWSGYSGSFVQHPELTGLDCIRPCFWIELVRGLPRENTTIWTSGSSISFCGVNSDTANWSWPDGAELPFTIDK

SEQ ID NO: 20553 - protein, 470 aa, Artificial Sequence; identical to SEQ ID NO: 20204
  derived and/or modified protein sequence (wt) from neuraminidase__InfluenzaA__AEA73686

SEQ ID NO: 20554 - protein, 470 aa, Artificial Sequence
  derived and/or modified protein sequence (wt) from neuraminidase__InfluenzaA__AEA73697
MNPNQKIITIGSISIAIGIISLMLQIGNIISIWASHSIQTGSQNNTGICNQRIITYENSTWVNHTYVNINNTNIVAGEDKTSVTLAGNSSLCSISGWAIYTKDNSIRIGSKGDVFVIREPFISCSHLECRTFFLTQGALLNDKHSNGTVKDRSPYRALMSCPLGEAPSPYNSKFESVAWSASACHDGMGWLTIGISGPDNGAVAVLKYNGIITGTIKSWKKQILRTQESECVCMNGSCFTIMTDGPSNKAASYKIFKIEKGKVTKSVELNAPNFYYEECSCYPDTGIVMCVCRDNWHGSNRPWVSFNQNLDYQIGYICSGVFGDNPRPEDGEGSCNPVTVNGADGVKGFSYKYGNGVWIGRTKSNRLRKGFEMIWDPNGWTNTDSDFSVKQDVVAITDWSGYSGSFVQHPELTGLDCIRPCFWVELVRGLPRENTTIWTSGSSISFCGVNSDTANWSWPDGAELPFTIDK

SEQ ID NO: 20555 - protein, 470 aa, Artificial Sequence; identical to SEQ ID NO: 20205
  derived and/or modified protein sequence (wt) from neuraminidase__InfluenzaA__AEA73708

SEQ ID NO: 20556 - protein, 470 aa, Artificial Sequence; identical to SEQ ID NO: 17461
  derived and/or modified protein sequence (wt) from neuraminidase__InfluenzaA__AEA73719

SEQ ID NO: 20557 - protein, 470 aa, Artificial Sequence; identical to SEQ ID NO: 17461
  derived and/or modified protein sequence (wt) from neuraminidase__InfluenzaA__AEA73730

SEQ ID NO: 20558 - protein, 470 aa, Artificial Sequence; identical to SEQ ID NO: 17461
  derived and/or modified protein sequence (wt) from neuraminidase__InfluenzaA__AEA73741

SEQ ID NO: 20559 - protein, 470 aa, Artificial Sequence; identical to SEQ ID NO: 17461
  derived and/or modified protein sequence (wt) from neuraminidase__InfluenzaA__AEA73752

SEQ ID NO: 20560 - protein, 470 aa, Artificial Sequence; identical to SEQ ID NO: 20204
  derived and/or modified protein sequence (wt) from neuraminidase__InfluenzaA__AEA73763

SEQ ID NO: 20561 - protein, 469 aa, Artificial Sequence; identical to SEQ ID NO: 16738
  derived and/or modified protein sequence (wt) from neuraminidase__InfluenzaA__AEA73774

SEQ ID NO: 20562 - protein, 469 aa, Artificial Sequence; identical to SEQ ID NO: 16738
  derived and/or modified protein sequence (wt) from neuraminidase__InfluenzaA__AEA73784

SEQ ID NO: 20563 - protein, 469 aa, Artificial Sequence; identical to SEQ ID NO: 16738
  derived and/or modified protein sequence (wt) from neuraminidase__InfluenzaA__AEA73794

SEQ ID NO: 20564 - protein, 469 aa, Artificial Sequence; identical to SEQ ID NO: 16738
  derived and/or modified protein sequence (wt) from neuraminidase__InfluenzaA__AEA73804

SEQ ID NO: 20565 - protein, 469 aa, Artificial Sequence; identical to SEQ ID NO: 16738
  derived and/or modified protein sequence (wt) from neuraminidase__InfluenzaA__AEA73814

SEQ ID NO: 20566 - protein, 469 aa, Artificial Sequence; identical to SEQ ID NO: 16738
  derived and/or modified protein sequence (wt) from neuraminidase__InfluenzaA__AEA73824

SEQ ID NO: 20567 - protein, 469 aa, Artificial Sequence
  derived and/or modified protein sequence (wt) from neuraminidase__InfluenzaA__AEA73834
MNPNQKIITIGSICMTIGMANLILQIGNIISIWISHSIQLGNQNQIETCNQSVITYENNTWVNQTYVNISNTNFAAGQSVVSVKLAGNSSLCPVSGWAIYSKDNSIRIGSKGDVFVIREPFISCSPLECRTFFLTQGALLNDKHSNGTIKDRSPYRTLMSCPIGEVPSPYNSRFESVAWSASACHDGINWLTIGISGPDNGAVAVLKYNGIITDTIKSWKNNILRTQESECACVNGSCFTVMTDGPSDGQASYKIFRIEKGKIVKSVEMNAPNYHYEECSCYPDSSEITCVCRDNWHGSNRPWVSFNQNLEYQIGYICSGIFGDNPRPNDKTGSCGPVSSNGANGVKGFSFKYGNGVWIGRTKSISSRNGFEMIWDPNGWTGTDNNFSIKQDIVGINEWSGYSGSFVQHPELTGLDCIRPCFWVELIRGRPKENTIWTSGSSISFCGVNSDTVGWSWPDGAELPFTIDK

SEQ ID NO: 20568 - protein, 469 aa, Artificial Sequence; identical to SEQ ID NO: 20100
  derived and/or modified protein sequence (wt) from neuraminidase__InfluenzaA__AEA73844

SEQ ID NO: 20569 - protein, 469 aa, Artificial Sequence; identical to SEQ ID NO: 16738
  derived and/or modified protein sequence (wt) from neuraminidase__InfluenzaA__AEA73854

SEQ ID NO: 20570 - protein, 469 aa, Artificial Sequence; identical to SEQ ID NO: 16738
  derived and/or modified protein sequence (wt) from neuraminidase__InfluenzaA__AEA73864

SEQ ID NO: 20571 - protein, 469 aa, Artificial Sequence; identical to SEQ ID NO: 18519
  derived and/or modified protein sequence (wt) from neuraminidase__InfluenzaA__AEA73874

SEQ ID NO: 20572 - protein, 469 aa, Artificial Sequence; identical to SEQ ID NO: 18519
  derived and/or modified protein sequence (wt) from neuraminidase__InfluenzaA__AEA73884

SEQ ID NO: 20573 - protein, 469 aa, Artificial Sequence; identical to SEQ ID NO: 20100
  derived and/or modified protein sequence (wt) from neuraminidase__InfluenzaA__AEA73894

SEQ ID NO: 20574 - protein, 469 aa, Artificial Sequence
  derived and/or modified protein sequence (wt) from neuraminidase__InfluenzaA__AEA73904
MNPNQKIITIGSVCMTIGMANLVLQIGNIISIWISHSIQLGNQNQIETCNQSVITYENNTWVNQTYVNISNTNFAAGQSVVSVKLAGNSSLCPVSGWAIYSKDNSIRIGSKGDVFVIREPFISCSPLECRTFFLTQGALLNDKHSNGTIKDRSPYRTLMSCPIGEVPSPYNSRFESVAWSASACHDGINWLTIGISGPDNGAVAVLKYNGIITDTIKSWRNNILRTQESECACVNGSCFTVMTDGPSDGQASYKIFRIEKGKIVKSVEMNAPNYHYEECSCYPDSSEITCVCRDNWHGSNRPWVSFNQNLEYQIGYICSGIFGDNPRPNDKTGSCGPVSSNGANGVKGFSFKYGNGVWIGRTKSISSRNGFEMIWDPNGWTGTDNNFSIKQDIIGINEWSGYSGSFVQHPELTGLDCIRPCFWVELIRGRPKEKTIWTSGSSISFCGVNSDTVGWSWPDGAELPFTIDK

SEQ ID NO: 20575 - protein, 469 aa, Artificial Sequence; identical to SEQ ID NO: 16738
  derived and/or modified protein sequence (wt) from neuraminidase__InfluenzaA__AEA73914

SEQ ID NO: 20576 - protein, 469 aa, Artificial Sequence; identical to SEQ ID NO: 18519
  derived and/or modified protein sequence (wt) from neuraminidase__InfluenzaA__AEA73924

SEQ ID NO: 20577 - protein, 469 aa, Artificial Sequence; identical to SEQ ID NO: 20177
  derived and/or modified protein sequence (wt) from neuraminidase__InfluenzaA__AEA73934

SEQ ID NO: 20578 - protein, 469 aa, Artificial Sequence
  derived and/or modified protein sequence (wt) from neuraminidase__InfluenzaA__AEA73944
MNPNQKIITIGSVCMTIGMANLILQVGNIISIWISHSIQLGNQNQIETCNQSVITYENNTWVNQTYVNISNTNFAAGQSVVSVKLAGNSSLCPVSGWAIYSKDNSIRIGSKGDVFVIREPFISCSPLECRTFFLTQGALLNDKHSNGTIKDRSPYRTLMSCPIGEVPSPYNSRFESVAWSASACHDGINWLTIGISGPDNGAVAVLKYNGIITDTIKSWRNNILRTQESECACVNGSCFTVMTDGPSDGQASYKIFRIEKGKIVKSVEMNAPNYYYEECSCYPDSSEITCVCRDNWHGSNRPWVSFNQNLEYQIGYICSGIFGDNPRPNDKTGSCGPVSSNGANGVKGFSFKYGNGVWIGRTKSISSRNGFEMIWDPNGWTGTDNNFSIKQDIVGINEWSGYSGSFVQHPELTGLDCIRPCFWVELIRGRPKENTIWTSGSSISFCGVNSDTVGWSWPDGAELPFTIDK

SEQ ID NO: 20579 - protein, 469 aa, Artificial Sequence; identical to SEQ ID NO: 16738
  derived and/or modified protein sequence (wt) from neuraminidase__InfluenzaA__AEA73954

SEQ ID NO: 20580 - protein, 469 aa, Artificial Sequence; identical to SEQ ID NO: 16738
  derived and/or modified protein sequence (wt) from neuraminidase__InfluenzaA__AEA73964

SEQ ID NO: 20581 - protein, 469 aa, Artificial Sequence
  derived and/or modified protein sequence (wt) from neuraminidase__InfluenzaA__AEA73974
MNPNQKIITIGSVCMTIGMANLILQIGNIISIWISHSIQHGNQNQIETCNQSVITYENNTWVNQTYVNISNTNFAAGQSVVSVKLAGNSSLCPVSGWAIYSKDNSIRIGSKGDVFVIREPFISCSPLECRTFFLTQGALLNDKHSNGTIKDRSPYRTLMSCPIGEVPSPYNSRFESVAWSASACHDGINWLTIGISGPDNGAVAVLKYNGIITDTIKSWRNNILRTQESECACVNGSCFTVMTDGPSDGQASYKIFRIEKGKIVKSVEMNAPNYHYEECSCYPDSSEITCVCRDNWHGSNRPWVSFNQNLEYQIGYICSGIFGDNPRPNDKTGSCGPVSSNGANGVKGFSFKYGNGVWIGRTKSISSRNGFEMIWDPNGWTGTDNNFSIKQDIVGINEWSGYSGSFVQHPELTGLDCIRPCFWVELIRGRPKENTIWTSGSSISFCGVNSDTVGWSWPDGAELPFTIDK

SEQ ID NO: 20582 - protein, 469 aa, Artificial Sequence; identical to SEQ ID NO: 16738
  derived and/or modified protein sequence (wt) from neuraminidase__InfluenzaA__AEA73984

SEQ ID NO: 20583 - protein, 469 aa, Artificial Sequence; identical to SEQ ID NO: 18089
  derived and/or modified protein sequence (wt) from neuraminidase__InfluenzaA__AEA73994

SEQ ID NO: 20584 - protein, 469 aa, Artificial Sequence
  derived and/or modified protein sequence (wt) from neuraminidase__InfluenzaA__AEA74004
MNPNKKIIIIGSVCMTIGMANLILQIGNIISIWISHSIQLGNQNQIETCNQSVITYENNTWVNQTYVNISNTNFAAGQSVVSVKLAGNSSLCPVSGWAIYSKDNSIRIGSKGDVFVIREPFISCSPLECRTFFLTQGALLNDKHSNGTIKDRSPYRTLMSCPIGEVPSPYNSRFESVAWSASACHDGINWLTIGISGPDNGAVAVLKYNGIITDTIKSWRNNILRTQESECACVNGSCFTVMTDGPSDGQASYKIFRIEKGKIVKSVEMNAPNYHYEECSCYPDSSEITCVCRDNWHGSNRPWVSFNQNLEYQIGYICSGIFGDNPRPNDKTGSCGPVSSNGANGVKGFSFKYGNGVWIGRTKSISSRNGFEMIWDPNGWTGTDNNFSIKQDIVGINEWSGYSGSFVQHPELTGLDCIRPCFWVELIRGRPKENTIWTSGSSISFCGVNSDTVGWSWPDGAELPFTIDK

SEQ ID NO: 20585 - protein, 469 aa, Artificial Sequence; identical to SEQ ID NO: 17915
  derived and/or modified protein sequence (wt) from neuraminidase__InfluenzaA__AEA74014

SEQ ID NO: 20586 - protein, 469 aa, Artificial Sequence; identical to SEQ ID NO: 17915
  derived and/or modified protein sequence (wt) from neuraminidase__InfluenzaA__AEA74024

SEQ ID NO: 20587 - protein, 469 aa, Artificial Sequence; identical to SEQ ID NO: 16738
  derived and/or modified protein sequence (wt) from neuraminidase__InfluenzaA__AEA74032

SEQ ID NO: 20588 - protein, 469 aa, Artificial Sequence; identical to SEQ ID NO: 16738
  derived and/or modified protein sequence (wt) from neuraminidase__InfluenzaA__AEA74034

SEQ ID NO: 20589 - protein, 469 aa, Artificial Sequence
  derived and/or modified protein sequence (wt) from neuraminidase__InfluenzaA__AEA77302
MNPNQKIITIGSVSLTISTICFFMQIAILITTVTLHFKQYEFNSPPNNQVMLCEPTIIERNITEIVYLTNTTIEKEKCPKLAEYRNWSKPQCDITGFAPFSKDNSIRLSAGGDIWVTREPYVSCDPDKCYQFALGQGTTLNNVHSNNTVRDRTPYRTLLMNELGVPFHLGTKQVCIAWSSSSCHDGKAWLHVCITGDDKNATASFIYNGRLVDSVVSWSKEILRTQESECVCINGTCTVVMTDGSASGKADTKILFIEEGKIVHTSTLSGSAQHVEECSCYPRYPGVRCVCRDNWKGSNRPIVDINIKDHSIVSSYVCSGLVGDTPKKNDSSSSSHCLDPNNEEGGHGVKGWAFDDGNDVWMGRTISEKSRLGYETFKVIEGWSNPKSKLQINRQVIVDRGNRSGYSGIFSVEGKSCINRCFYVELIRGRKEETEVLWTSNSIVVFCGTSGTYGTGSWPDGADINLMPI

SEQ ID NO: 20590 - protein, 469 aa, Artificial Sequence; identical to SEQ ID NO: 20257
  derived and/or modified protein sequence (wt) from neuraminidase__InfluenzaA__AEB21318

SEQ ID NO: 20591 - protein, 469 aa, Artificial Sequence
  derived and/or modified protein sequence (wt) from neuraminidase__InfluenzaA__AEB21328
MNPNQKIITIGSVCMTIGMANLILQIGNIISIWISHSIQLGNQSQIETCNQSVITYENNTWVNQTYVNISNTNFAAGQSVVSVKLAGNSSLCPVSGWAIYSKDNSIRIGSKGDVFVIREPFISCSPLECRTFFLTQGALLNDKHSNGTIKDRSPYRTLMSCPIGEVPSPYNSRFESVAWSASACHDGFNWLTIGISGPDNGAVAVLKYNGIITDTIKSWRNNILRTQESECACVNGSCFTIMTDGPSDGQASYKIFRIEKGKIVKSVEMNAPNYHYEECSCYPDSSEITCVCRDNWHGSNRPWVSFNQNLEYQIGYICSGIFGDNPRPNDKTGSCGPVSSNGANGVKGFSFKYGNGVWIGRTKSISSRKGFEMIWDPNGWTGTDNNFSIKQDIVGINEWSGYSGSFVQHPELTGLDCIRPCFWVELIRGRPKENTIWTSGSSMSFCGVNSDTVGWSWPDGAELPFTIDK

SEQ ID NO: 20592 - protein, 469 aa, Artificial Sequence; identical to SEQ ID NO: 20257
  derived and/or modified protein sequence (wt) from neuraminidase__InfluenzaA__AEB21340

SEQ ID NO: 20593 - protein, 469 aa, Artificial Sequence
  derived and/or modified protein sequence (wt) from neuraminidase__InfluenzaA__AEB21350
MNPNQKIITIGSVCMTIGMANLILQIGNIISIWISHSIQLGNQSQIETCNQSVITYENNTWVNQTYVNISNTNFAAGQSVVSVKLAGNSSLCPVSGWAIYSKDNSIRIGSKGDVFVIREPFISCSPSECRTFFLTQGALLNDKHSNGTIKDRSPYRTLMSCPIGEVPSPYNSRFESVAWSASACHDGINWLTIGISGPDNGAVAVLKYNGIITDTIKSWRNNILRTQESECACVNGSCFTIMTDGPSDGQASYKIFRIEKGKIVKSVEMNAPNYHYEECSCYPDSSEITCVCRDNWHGSNRPWVSFNQNLEYQIGYICSGIFGDNPRPNDKTGSCGPVSSNGANGVKGFSFKYGNGVWIGRTKSIISRKGFEMIWDPNGWTGTDNNFSIKQDIVGINEWSGYSGSFVQHPELTGLDCIRPCFWVELIRGRPKENTIWTSGSSISFCGVNSDTVGWSWPDGAELPFTIDK

SEQ ID NO: 20594 - protein, 469 aa, Artificial Sequence; identical to SEQ ID NO: 20257
  derived and/or modified protein sequence (wt) from neuraminidase__InfluenzaA__AEB21360

SEQ ID NO: 20595 - protein, 469 aa, Artificial Sequence; identical to SEQ ID NO: 17605
  derived and/or modified protein sequence (wt) from neuraminidase__InfluenzaA__AEB40209

SEQ ID NO: 20596 - protein, 469 aa, Artificial Sequence; identical to SEQ ID NO: 16599
  derived and/or modified protein sequence (wt) from neuraminidase__InfluenzaA__AEB66898

SEQ ID NO: 20597 - protein, 470 aa, Artificial Sequence
  derived and/or modified protein sequence (wt) from neuraminidase__InfluenzaA__AEB71103
MNPNQKIITIGSVSLGLVVFNVLLHVVSIIVTVVVLGNDGGNGICNGTVVKEYNETVRIERVIQWHNTSVVEYIPYLNGGTYTNNTESVCDVKGFAPFSKDNGVRIGSRGHVFVIREPFVSCSPRECRTFFLTQGSLLNDKHSNGTVKDRSPFKTLMSVEVGQSPNVYQARFEAVAWSATACHDGKKWMTIGVTGPDSKAVAVVHYGGVPTDIINSWAGDILRTQESSCTCIQGDCYWVMTDGPANRQAQYRIYKSNQGKIIGQMDINFNGGHIEECSCYPNDGKVECVCRDNWTGTNRPVLVISPDLSYKVGYLCAGLPSDTPRGEDAQFSGSCTSPVGGQGYGVKGFGFRQGNDVWMGRTISRTSRSGFEVIRVKNGWTQTSKEQIRKQVVVDNLNWSGYSGSFTLPIELSGKSCLVPCFWVETIRGKPEEKTIWTSSSSIVMCGVDYEVADWSWHDGAILPFDIDKM

SEQ ID NO: 20598 - protein, 470 aa, Artificial Sequence; identical to SEQ ID NO: 18930
  derived and/or modified protein sequence (wt) from neuraminidase__InfluenzaA__AEB71899

SEQ ID NO: 20599 - protein, 469 aa, Artificial Sequence
  derived and/or modified protein sequence (wt) from neuraminidase__InfluenzaA__AEB71910
MNPNQKIITIGSVCMTIGMANLILQIGNIISIWISHSIQLGNQNQIETCNQSVITYENNTWVNQTYVNISNTYFAAGQSVVSVKLAGNSSLCPVSGWAIYSKDNSIRIGSKGDVFVIREPFISCSPLECRTFFLTQGALLNDKHSNGTIKDRSPYRTLMSCPIGEVPSPYNSRFESVAWSASACHDGINWLTIGISGPDNGAVAVLKYNGIITDTIKSWRNNILRTQESECACVNGSCFTVMTDGPSDGQASYKIFRIEKGKIVKSVEMNAPNYHYEECSCYPDSSEITCVCRDNWHGSNRPWVSFNQNLEYQIGYICSGIFGDNPRPNDKTGSCGPVSSNGANGVKGFSFKYGNGVWIGRTKSISSRNGFEMIWDPNGWTGTDNNFSIKQDIVGINEWSGYSGSFVQHPELTGLDCIRPCFWVELIRGRPKENTIWTSGSSISFCGVNSDTVGWSWPDGAELPFTIDK

SEQ ID NO: 20600 - protein, 469 aa, Artificial Sequence; identical to SEQ ID NO: 16738
  derived and/or modified protein sequence (wt) from neuraminidase__InfluenzaA__AEB71919

SEQ ID NO: 20601 - protein, 469 aa, Artificial Sequence; identical to SEQ ID NO: 18484
  derived and/or modified protein sequence (wt) from neuraminidase__InfluenzaA__AEB71928

SEQ ID NO: 20602 - protein, 469 aa, Artificial Sequence
  derived and/or modified protein sequence (wt) from neuraminidase__InfluenzaA__AEB71939
MNPNQKIITIGSVSLTISAICFFMQIAILITTVTLHFKQYEFNSPPNNQVMLCEPTIIERNITEIVYLTNTTIEKEICPKLAEYRNWSKPQCDITGFAPFSKDNSIRLSAGGDIWVTREPYVSCDPDKCYQFALGQGTTLNNVHSNNTVRDRTPYRTLLMNELGVPFHLGTKQVCIAWSSSSCHDGKAWLHVCITGDDKNATASFIYNGRLVDSVVSWSKEILRTQESECVCINGTCTVVMTDGSASGKADTKILFIEEGKIVHTSTLSGSAQHVEECSCYPRYPGVRCVCRDNWKGSNRPIVDINIKDHSIVSSYVCSGLVGDTPRKNDSSSSSHCLDPNNEEGGHGVKGWAFDDGNDVWMGRTISEKSRLGYETFKVIEGWSNHKSKLQINRQVIVDRGNRSGYSGIFSVEGKSCINRCFYVELIRGRKEETEVLWTSNSIVVFCGTSGTYGTGSWPDGADLNLMPI

SEQ ID NO: 20603 - protein, 469 aa, Artificial Sequence
  derived and/or modified protein sequence (wt) from neuraminidase__InfluenzaA__AEB71950
MNPNQKIITIGSVSLTISTICFFMQIAILITTVTLHFKQYEFNSPPNNQVMLCEPTIIERNITEIVYLTNTTIEKEICPKLAEYRNWSKPQCDITGFAPFSKDNSIRLSAGGDIWVTREPYVSCDPDKCYQFALGQGTTLNNVHSNNTVRDRTPYRTLLMNELGVPFHLGTKQVCIAWSSSSCHDGKAWLHVCITGDDKNATASFIYNGRLVDSVVSWSKEILRTQESECVCINGTCTVVMTDGSASGKADTKILFIEEGKIVHTSTLSGSAQHVEECSCYPRYPGVRCVCRDNWKGSNRPIVDINIKDHSIVSSYVCSGLVGDTPRKNDSSSSSHCLDPNNEEGDHGVKGWAFDDGNDVWMGRTISEKSRLGYETFKVIEGWSNHKSKLQINRQVIVDRGNRSGYSGIFSVEGKSCINRCFYVELIRGRKEETEVLWTSNSIVVFCGTSGTYGTGSWPDGADLNLMPI

SEQ ID NO: 20604 - protein, 470 aa, Artificial Sequence; identical to SEQ ID NO: 19937
  derived and/or modified protein sequence (wt) from neuraminidase__InfluenzaA__AEB71961

SEQ ID NO: 20605 - protein, 469 aa, Artificial Sequence
  derived and/or modified protein sequence (wt) from neuraminidase__InfluenzaA__AEB71972
MNPNQKIITIGSVSLTISTICFFMQIAILITTVTLHFKQYEFNSPPNNQVMLCEPTIIERNITEIVYLTNTTIVKEICPKLAEYRNWSKPQCDITGFAPFSKDNSIRLSAGGDIWVTREPYVSCDPDKCYQFALGQGTTLNNVHSNNTVRDRTPYRTLLMNELGVPFHLGTKQVCIAWSSSSCHDGKAWLHVCITGDDKNATASFIYNGRLVDSVVSWSKEILRTQESECVCINGTCTVVMTDGSASGKADTKILFIEEGKIVHTSTLSGSAQHVEECSCYPRYPGVRCVCRDNWKGSNRPIVDINIKDHSIVSSYVCSGLVGDTPRKNDSSSSSHCLDPNNEEGGHGVKGWAFDDGNDVWMGRTISEKSRLGYETFKVIEGWSNPKSKLQINRQVIVDRGNRSGYSGIFSVEGKSCINRCFYVELIRGRKEETEVLWTSNSIVVFCGTSGTYGTGSWPDGADINLMPI

SEQ ID NO: 20606 - protein, 469 aa, Artificial Sequence
  derived and/or modified protein sequence (wt) from neuraminidase__InfluenzaA__AEB71983
MNPNQKIITIGSVSLTISTICFFMQIAILITTVTLHFKQYEFNSPPNNQVMLCEPTIIERNITEIVYLTNTTIEKEICPKLAEYRNWSKPQCDITGFAPFSKDNSIRLSAGGDIWVTREPYVSCDPDKCYQFALGQGTTLNNVHSNNTVRDRTPYRTLLMNELGVPFHLGTKQVCIAWSSSSCHDGKAWLHVCITGDDKNATASFIYNGRLVDSVVSWSKEILRTQESECVCINGTCTVVMTDGSASGKADTKILFIEEGKIVHTSTLSGSAQHVEECSCYPRYPGVRCVCRDNWKGSNRPIVDINMKDHSIVSSYVCSGLVGDTPRRNDSSSSSHCLDPNNEEGGHGVKGWAFDDGNDVWMGRTISEKSRLGYETFKVIEGWSNPKSKLQINRQVIVDRGNRSGYSGIFSVEGKSCINRCFYVELIRGRKEETEVLWTSNSIVVFCGTSGTYGTGSWPDGADINLMPI

SEQ ID NO: 20607 - protein, 470 aa, Artificial Sequence
  derived and/or modified protein sequence (wt) from neuraminidase__InfluenzaA__AEB71995
MNPNQKIITIGSISIAIGIISLMLQIGNIISIWASHSIQTGSQNNTGICNQRIITYENSTWVNHTYININNTNVVAGEDKTSVTLAGNSSLCSISGWAIYTKDNSIRIGSKGDVFVIREPFISCSHLECRTFFLTQGALLNDKHSNGTVKDRSPYRALMSCPLGEAPSPYNSKFESVAWSASACHDGMGWLTIGISGPDNGAVAVLKYNGIITGTIKSWKKQILRTQESECVCMNGSCFTIMTDGPSNKAASYKIFKIEKGKVTKSIELNAPNFYYEECSCYPDTGIVMCVCRDNWHGSNRPWVSFNQNLDYQIGYICSGVFGDNPRPEDGEGSCNPVTVNGADGVKGFSYKYGNGVWIGRTKSNRLRKGFEMIWDPNGWTNTDSDFSVKQDVVAITDWSGYSGSFVQHPELTGLECIRPCFWVELVRGLPRENTTIWTSGSSISFCGVNSDTANWSWPDGAELPFTIDK

SEQ ID NO: 20608 - protein, 470 aa, Artificial Sequence; identical to SEQ ID NO: 20205
  derived and/or modified protein sequence (wt) from neuraminidase__InfluenzaA__AEC13316

SEQ ID NO: 20609 - protein, 469 aa, Artificial Sequence; identical to SEQ ID NO: 16738
  derived and/or modified protein sequence (wt) from neuraminidase__InfluenzaA__AEC53262

SEQ ID NO: 20610 - protein, 469 aa, Artificial Sequence; identical to SEQ ID NO: 16738
  derived and/or modified protein sequence (wt) from neuraminidase__InfluenzaA__AEC53272

SEQ ID NO: 20611 - protein, 469 aa, Artificial Sequence; identical to SEQ ID NO: 16738
  derived and/or modified protein sequence (wt) from neuraminidase__InfluenzaA__AEC53282

SEQ ID NO: 20612 - protein, 469 aa, Artificial Sequence; identical to SEQ ID NO: 16738
  derived and/or modified protein sequence (wt) from neuraminidase__InfluenzaA__AEC53292

SEQ ID NO: 20613 - protein, 469 aa, Artificial Sequence
  derived and/or modified protein sequence (wt) from neuraminidase__InfluenzaA__AEC53302
MNPNQKIITIGSVCMTIGMANLILQIGNIISIWISHSIQLGNQNQIETCNQSVITYENNTWVNQTYVNISNTNFAAGQSVVSVKLAGNSSLCPVSGWAIYSKDNSIRIGSKGDVFVIREPFISCSPLECRTFFLTQGALLNDKHSNGTIKDRSPYRTLMSCPIGEVPSPYNSRFESVAWSASACHDGINWLTIGISGPDNGAVAVLKYNGIITDIIKSWRNNILRTQESECACVNGSCFTVMTDGPSDGQASYKIFRIEKGKIVKSVEMNAPNYHYEECSCYPDSSEITCVCRDNWHGSNRPWVSFNQNLEYQIGYICSGIFGDNPRPNDKTGSCGPVSSNGANGVKGFSFKYGNGVWIGRTKSISSRNGFEMIWDPNGWTGTDNNFSIKQDIVGINEWSGYSGSFVQHPELTGLDCIRPCFWVELIRGRPKENTIWTSGSSISFCGVNSDTVGWSWPDGAELPFTIDK

SEQ ID NO: 20614 - protein, 469 aa, Artificial Sequence; identical to SEQ ID NO: 16738
  derived and/or modified protein sequence (wt) from neuraminidase__InfluenzaA__AEC53350

SEQ ID NO: 20615 - protein, 469 aa, Artificial Sequence; identical to SEQ ID NO: 17446
  derived and/or modified protein sequence (wt) from neuraminidase__InfluenzaA__AEC53407

SEQ ID NO: 20616 - protein, 469 aa, Artificial Sequence; identical to SEQ ID NO: 16738
  derived and/or modified protein sequence (wt) from neuraminidase__InfluenzaA__AEC53427

SEQ ID NO: 20617 - protein, 469 aa, Artificial Sequence; identical to SEQ ID NO: 17564
  derived and/or modified protein sequence (wt) from neuraminidase__InfluenzaA__AED99967

SEQ ID NO: 20618 - protein, 469 aa, Artificial Sequence; identical to SEQ ID NO: 16728
  derived and/or modified protein sequence (wt) from neuraminidase__InfluenzaA__AEE27161

SEQ ID NO: 20619 - protein, 469 aa, Artificial Sequence; identical to SEQ ID NO: 16738
  derived and/or modified protein sequence (wt) from neuraminidase__InfluenzaA__AEE27170

SEQ ID NO: 20620 - protein, 469 aa, Artificial Sequence; identical to SEQ ID NO: 16728
  derived and/or modified protein sequence (wt) from neuraminidase__InfluenzaA__AEE27180

SEQ ID NO: 20621 - protein, 469 aa, Artificial Sequence
  derived and/or modified protein sequence (wt) from neuraminidase__InfluenzaA__AEE27190
MNPNQKIITIGSVCMTIGMANLILQIGNIISIWISHSIQLGNQNQIETCNQSVITYENNTWVNQTYVNISNTNFAAGQSVVSVKLAGNSSLCPVSGWAIYSKDNSVRIGSKGDVFVIREPFISCSPLECRTFFLTQGALLNDKHSNGTIKDRSPYRTLMSCPIGEVPSPYNSRFESVAWSASACHDGINWLTIGISGPDNGAVAVLKYNGVITDTIKSWRNNILRTQESECACVNGSCFTVMTDGPSNGQASYKIFKIEKGKIVKSVEMNAPNYHYEECSCYPDSSEITCVCRDNWHGSNRPWVSFNQNLEYQIGYICSGIFGDNPRPNDKTGSCGPVSSNGANGVKGFSFKYGNGVWIGRTKSISSRNGFEMIWDPNGWTGTDNNFSIKQDIVGINEWSGYSGSFVQHPELTGLDCIRPCFWVELIRGRPKENTIWTSGSSISFCGVNSDTVGWSWPDGAELPFTIDK

SEQ ID NO: 20622 - protein, 469 aa, Artificial Sequence; identical to SEQ ID NO: 17961
  derived and/or modified protein sequence (wt) from neuraminidase__InfluenzaA__AEE27200

SEQ ID NO: 20623 - protein, 469 aa, Artificial Sequence; identical to SEQ ID NO: 19797
  derived and/or modified protein sequence (wt) from neuraminidase__InfluenzaA__AEG64755

SEQ ID NO: 20624 - protein, 453 aa, Artificial Sequence
  derived and/or modified protein sequence (wt) from neuraminidase__InfluenzaA__AEG64765
MNPNQKIITIGSICMVVGIISLILQIGNIISIWISHSIQTGNQNHTGICNQGIITYNVVAGQDSTSVILTGNSSLCPIRGWAIHSKDNGIRIGSKGDVFVIREPFISCSHLECRTFFLTQGALLNDKHSNGTVKDRSPYRALMSCPVGEAPSPYNSRFESVAWSASACHDGMGWLTIGISGPDNGAVAVLKYNGIITETIKSWRKKILRTQESECTCVNGSCFTIMTDGPSDGLASYKIFKIEKGKVTKSIELNAPNSHYEECSCYPDTGKVMCVCRDNWHGSNRPWVSFDQNLDYQIGYICSGVFGDNPRPKDGTGSCGPVSADGANGVKGFSYRYGNGVWIGRTKSDSSRHGFEMIWDPNGWTETDSRFSVRQDVVAMTDRSGYSGSFVQHPELTGLDCMRPCFWVELIRGRPEEKTIWTSGSIISFCGVNSDTVDWSWPDGAELPFTIDK

SEQ ID NO: 20625 - protein, 469 aa, Artificial Sequence
  derived and/or modified protein sequence (wt) from neuraminidase__InfluenzaA__AEG64787
MNPNQKIITIGSVCMTIGMANLILQIGNIISIWISHSIQLGNQNQIETCNQSVITYENNTWVNQTYVNISNTNFAAGQSVVSVKLAGNSSLCPVSGWAIYSKDNSIRIGSKGDVFVIREPFISCSPLECRTFFLTQGALLNDKHSNGTIKDRSPYRTLMSCPIGEVPSPYNSRFESVAWSASACHDGINWLTIGISGPDNGAVAVLKYNGIITDTIKSWRNNRLRTQESECACVNGSCFTVMTDGPSDGQASYKIFRIEKGKIVKSVEMNAPNYHYEECSCYPDSSEITCVCRDNWHGSNRPWVSFNQNLEYQIGYICSGIFGDNPRPNDKTGSCGPVSSNGANGVKGFSFKYGNGVWIGRTKSISSRNGFEMIWDPNGWTGTDNDFSIKQDIVGINEWSGYSGSFVQHPELTGLDCIRPCFWVELIRGRPKENTIWTSGSSISFCGVNSDTVGWSWPDGAELPFTIDK

SEQ ID NO: 20626 - protein, 469 aa, Artificial Sequence
  derived and/or modified protein sequence (wt) from neuraminidase__InfluenzaA__AEG64837
MNPNQKIITIGSVSLTISTICFFMQIAILITTVTLHFKQYEFNSPPNNQVMLCEPTIIERNITEIVYLTNTTIEKEICPKLAEYRNWSKPQCDITGFAPFSKDNSIRLSAGGDIWVTREPYVSCDPDKCYQFALGQGTTLNNVHSNNTVRDRTPYRTLLMNELGVPFHLGTKQVCIAWSSSSCHDGKAWLHVCITGDDKNATASLIYNGRLVDSVVSWSKEILRTQESECVCINGTCTVVMTDGSASGKADTKILFIEEGKIVHTSTLSGSAQHVEECSCYPRYPGVRCVCRDNWKGSNRPIVDINIKDHSIVSSYVCSGLVGDTPRKNDSSSSSHCLDPNNEEGGHGVKGWAFDDGNDVWMGRTINETSRLGYETFKVIEGWSNPKSKLQINRQVIVDRGNRSGYSGIFSVEGKSCINRCFYVELIRGRKEETEVLWTSNSIVVFCGTSGTYGTGSWPDGADLNLMPI

SEQ ID NO: 20627 - protein, 469 aa, Artificial Sequence
  derived and/or modified protein sequence (wt) from neuraminidase__InfluenzaA__AEG64848
MNPNQKIITIGSVSLTISTICFFMQIAILITTVTLHFKQYEFYSPPNNQVMLCEPTIIERNITEIVYLTNTTIEKEICPKLAEYRNWLKPQCDITGFAPFSKDNSIRLSAGGDIWVTREPYVSCDPDKCYQFALGQGTTLNNVHSNNTVRDRTPYRTLLMNELGVPFHLGTKQVCIAWSSSSCHDGKAWLHVCITGDDKNATASFIYNGRLVDSVVSWSKEILRTQESECVCINGTCTVVMTDGSASGKADTKILFIEEGKIVHTSTLSGSAQHVEECSCYPRYPGVRCVCRDNWKGSNRPIVDINIKDHSIVSSYVCSGLVGDTPRKNDSSSSSHCLDPNNEEGGHGVKGWAFDDGNDVWMGRTINETSRLGYETFKVIEGWSNPKSKLQINKQVIVDRGNRSGYSGIFSVEGKSCINRCFYVELIRGRKEETEVLWTSNSIVVFCGTSGTYGTGSWPDGADLNLMPI

SEQ ID NO: 20628 - protein, 469 aa, Artificial Sequence; identical to SEQ ID NO: 14233
  derived and/or modified protein sequence (wt) from neuraminidase__InfluenzaA__AEG64859

SEQ ID NO: 20629 - protein, 469 aa, Artificial Sequence; identical to SEQ ID NO: 14061
  derived and/or modified protein sequence (wt) from neuraminidase__InfluenzaA__AEG64870

SEQ ID NO: 20630 - protein, 469 aa, Artificial Sequence; identical to SEQ ID NO: 14253
  derived and/or modified protein sequence (wt) from neuraminidase__InfluenzaA__AEG64881

SEQ ID NO: 20631 - protein, 469 aa, Artificial Sequence; identical to SEQ ID NO: 14061
  derived and/or modified protein sequence (wt) from neuraminidase__InfluenzaA__AEG64892

SEQ ID NO: 20632 - protein, 469 aa, Artificial Sequence; identical to SEQ ID NO: 14137
  derived and/or modified protein sequence (wt) from neuraminidase__InfluenzaA__AEG64914

SEQ ID NO: 20633 - protein, 469 aa, Artificial Sequence; identical to SEQ ID NO: 14137
  derived and/or modified protein sequence (wt) from neuraminidase__InfluenzaA__AEG64925

SEQ ID NO: 20634 - protein, 469 aa, Artificial Sequence
  derived and/or modified protein sequence (wt) from neuraminidase__InfluenzaA__AEG64936
MNPNQKIITIGSVSLTIATICFLMQIAILVTTVTLHFKQHECNSPPNNQVMLCEPTIIERNITEIVYLTNTTIEKEICPKLAEYRNWSKPQCNITGFAPFSKDNSIRLSAGGDIWVTREPYVSCDPDKCYQFALGQGTTLNNGHSNDTVHDRTPYRTLLMNELGVPFHLGTRQVCIAWSSSSCHDGKAWLHVCVTGEDKNATASFIYNGRLVDSIGSWSKKILRTQESECVCINGTCTVVMTDGSASGKADTKILFIEEGKIVHISTLSGSAQHVEECSCYPRYPGVRCVCRDNWKGSNRPIVDINVKDYSIVSSYVCSGLVGDTPRKNDSSSSSHCLDPNNEEGGHGVKGWAFDDGNDVWMGRTISEKLRSGYETFKVIEGWSKPNSKLQINRQVIVERGNRSGYSGIFSVEGKSCINRCFYVELIRGRKEETEVWWTSNSIVVFCGTSGTYGTGSWPDGADINLMPI

SEQ ID NO: 20635 - protein, 469 aa, Artificial Sequence; identical to SEQ ID NO: 14150
  derived and/or modified protein sequence (wt) from neuraminidase__InfluenzaA__AEG64947

SEQ ID NO: 20636 - protein, 469 aa, Artificial Sequence; identical to SEQ ID NO: 14137
  derived and/or modified protein sequence (wt) from neuraminidase__InfluenzaA__AEG64958

SEQ ID NO: 20637 - protein, 469 aa, Artificial Sequence; identical to SEQ ID NO: 14137
  derived and/or modified protein sequence (wt) from neuraminidase__InfluenzaA__AEG64969

SEQ ID NO: 20638 - protein, 469 aa, Artificial Sequence; identical to SEQ ID NO: 14137
  derived and/or modified protein sequence (wt) from neuraminidase__InfluenzaA__AEG64980

SEQ ID NO: 20639 - protein, 469 aa, Artificial Sequence
  derived and/or modified protein sequence (wt) from neuraminidase__InfluenzaA__AEG64991
MNPNQKIITIGSVSLTISTICFFMQIAILITTVTLHFKQYESNSPPNNQVMLCEPTIIERNITEIVYLTNTTIEKEICPKLAEYRNWSKPQCNITGFAPFSKDNSIRLSAGGDIWVTREPYVSCDPDKCYQFALGQGTTLNNVHSNDTVHDRTPYRTLLMNELGVPFHLGTKQVCIAWSSSSCHDGKAWLHVCVTGDDKNATASFIYNGRLVDSIVSWSKEILRTQESECVCINGTCTVVMTDGSASGKADTKILFIEEGKIVHTSTLSGSAQHVEECSCYPRYPGVRCVCRDNWKGSNRPIVDINIKDYSIVSSYVCSGLVGDTPRKNDSSSSSHCLDPNNEEGGHGVKGWAFDDGNDVWMGRTISEKLRSGYETFKVIEGWSNPNSKLQTNRQVIVDRGNRSGYSGIFSVEGKSCINRCFYVELIRGRKEETEVLWTSNSIVVFCGTSGTYGTGSWPDGADINLMPI

SEQ ID NO: 20640 - protein, 469 aa, Artificial Sequence; identical to SEQ ID NO: 14327
  derived and/or modified protein sequence (wt) from neuraminidase__InfluenzaA__AEG65002

SEQ ID NO: 20641 - protein, 469 aa, Artificial Sequence
  derived and/or modified protein sequence (wt) from neuraminidase__InfluenzaA__AEG65013
MNPNQKIITIGSVSLTISTICFFMQIAILITTVTLHFKQYEFNSPPNNQVMLCEPTIIERNITEIVYLTNTTIEKEICPKLAEYRNWSKPQCDITGFAPFSKDNSIRLSAGGDIWVTREPYVSCDPDKCYQFALGQGTTLNNVHSNDTVHDRTPYRTLLMNELGVPFHLGTKQVCIAWSSSSCHDGKAWLHVCVTGDDKNATASFIYNGRLVDSIVSWSKDILRTQESECVCINGTCTVVMTDGSASGKADTKILFIEEGKIVHTSTLSGSAQHVEECSCYPRYPGVRCVCRDNWKGSNRPIVDINIKDYSIVSSYVCSGLVGDTPRKNDSSSSSHCLDPNNEEGGHGVKGWAFDDGNDVWMGRTISEKLRLGYETFKVIEGWSNPNSKLQTNRQVIVERGNRSGYSGIFSVEGKSCINRCFYVELIRGRKEETEVLWTSNSIVVFCGTSGTYGTGSWPDGADINLMPI

SEQ ID NO: 20642 - protein, 469 aa, Artificial Sequence
  derived and/or modified protein sequence (wt) from neuraminidase__InfluenzaA__AEG65024
MNPNQKIITIGSVSLTISTICFFMQIAILITTVTLHFKQYEFNSPPNNHVMLCEPTIIERNITEIVYLTNTTIEKEICPKLAEYRNWSKPQCDITGFAPFSKDNSIRLSAGGDIWVTREPYVSCDPDKCYQFALGQGTTLNNVHSNDTVHDRTPYRTLLMNELGVPFHLGTKQVCIAWSSSSCHDGKAWLHVCVTGDDKNATASFIYNGRLVDSIVSWSKEILRTQESECVCINGTCTVVMTDGSASGKADTKILFIEEGKIVHTSTLSGSAQHVEECSCYPRYPGVRCVCRDNWKGSNRPIVDINIKDYSIVSSYVCSGLVGDTPRKNDSSSSSHCLDPNNEEGGHGVKGWAFDDGNDVWMGRTISEKLRLGYETFKVIEGWSNPNSKLQINRQVIVDRGNRSGYSGIFSVEGKSCINRCFYVELIRGRKEETEVLWTSNSIVVFCGTSGTYGTGSWPDGADINLMPI

SEQ ID NO: 20643 - protein, 469 aa, Artificial Sequence
  derived and/or modified protein sequence (wt) from neuraminidase__InfluenzaA__AEG65035
MNPNQKIITIGSVSLTISTICFFMQIAILITTVTLHFKQYEFNSPPNNQVMLCEPTIIERNITEIVYLTNTTIEKEVCPKLAEYRNWSKPQCNITGFAPFSKDNSIRLSAGGDIWVTREPYVSCDLDKCYQFALGQGTTLNNVHSNDTVHDRTPYRTLLMNELGVPFHLGTKQVCIAWSSSSCHDGKAWLHVCVTGDDKNATASFIYNGRLVDSIVSWSKEILRTQESECVCINGTCTVVMTDGSASGKADTKILFIEEGKIVHTSTLSGSAQHVEECSCYPRYPGVRCVCRDNWKGSNRPIVDINIKDYSIVSSYVCSGLVGDTPRKNDSSSSSHCLDPNNEEGGHGVKGWAFDDGNDVWMGRTISEKLRSGYETFKVIEGWSNPNSKLQINRQVIVDRGNRSGYSGIFSVEGKSCINRCFYVELIRGRKEENEVLWTSNSIVVFCGTSGTYGTGSWPDGADINLMPI

SEQ ID NO: 20644 - protein, 469 aa, Artificial Sequence; identical to SEQ ID NO: 14712
  derived and/or modified protein sequence (wt) from neuraminidase__InfluenzaA__AEG65057

SEQ ID NO: 20645 - protein, 469 aa, Artificial Sequence; identical to SEQ ID NO: 15707
  derived and/or modified protein sequence (wt) from neuraminidase__InfluenzaA__AEG65068

SEQ ID NO: 20646 - protein, 469 aa, Artificial Sequence
  derived and/or modified protein sequence (wt) from neuraminidase__InfluenzaA__AEG65079
MNPNQKIITIGSVSLTISTICFFMQIAILITTVTLHFKQYEFNSPPNNQVMLCEPTIIERNITEIVYLTNTTIEKEICPKLAEYRNWSKPQCNITGFAPFSKDNSIRLSAGGDIWVTREPYVSCDPDKCYQFALGQGTTLNNVHSNDTVHDRTPYRTLLMNELGVPFHLGTKQVCIAWSSSSCHDGKAWLHVCVTGDDKNATASFIYNGRLVDSIVSWSKEILRTQESECVCINGTCTVVMTDGSASGKADTKILFIEEGKIVHTSTLSGSAKHVEECSCYPRYPGVRCVCRDNWKGSNRPIVDINIKDYSIVSSYVCSGLVGDTPRKNDSSSSGHCLDPNNEEGGHGVKGWAFDDGNDVWMGRTISEKLRSGYETFKVIEGWSNPNSKLQINRQVIVDRGNRSGYSGIFSVEGKSCINRCFYVELIRGRKEETEVLWTSNSIVVFCGTSGTYGTGSWPDGADINLMPI

SEQ ID NO: 20647 - protein, 469 aa, Artificial Sequence
  derived and/or modified protein sequence (wt) from neuraminidase__InfluenzaA__AEG65090
MNPNQKIITIGSVSLTISTICFFMQIAILITTVTLHFKQYEFNSPPNNQVMLCEPTIIERNITEIVYLTNTTIEKEICPKLAEYRNWSKPQCNITGFAPFSKDNSIRLSAGGDIWVTREPYVSCDPDKCYQFALGQGTTLNNVHSNDTVHDRTPYRTLLMNELGVPFHLGTKQVCIAWSSSSCHDGKAWLHVCVTGDDKNATASFIYNGRLVDSIVSWSKEILRTQESECVCINGTCTVVMTDGSASGKADTKILFIEEGKIIHTSTLSGSAQHVEECSCYPRYPGVRCVCRDNWKGSNRPIVDINIKDYSIVSSYVCSGLVGDTPRKNDSSSSSHCLDPNNEEGGHGVKGWAFDDGNDVWMGRTISEKLRSGYETFKVIEGWSNPNSKLQINRQVIVDRGNRSGYSGIFSVEGKSCINRCFYVELIRGRKEETEVLWTSNSIVVFCGTSGTYGTGSWPDGADISLMPI

SEQ ID NO: 20648 - protein, 469 aa, Artificial Sequence
  derived and/or modified protein sequence (wt) from neuraminidase__InfluenzaA__AEG65101
MNPNQKIITIGSVSLTISTICFFMQIAILITTVTLHFKQYEFNSPPDNQVMLCEPTIIERNITEIVYLTNTTIEKEICPKLAEYRNWSKPQCDITGFAPFSKDNSIRLSAGGDIWVTREPYVSCDPDKCYQFALGQGTTLNNVHSNDTVHDRTPYRTLLMNELGVPFHLGTKQVCIAWSSSSCHDGKAWLHVCVTGDDKNATASFIYNGRLVDSVVSWSKDILRTQESECVCINGTCTVVMTDGSASGKADTKILFIEEGKIVHTSTLSGSAQHVEECSCYPRYPGVRCVCRDNWKGSNRPIVDINIKNYSIVSSYVCSGLVGDTPRKTDSSSSSHCLDPNNEEGGHGVKGWAFDDGNDVWMGRTISEKLRLGYETFKVIEGWSNPNSKLQINRQVIVDRGNRSGYSGIFSVEGKSCINRCFYVELIRGRKEETEVLWTSNSIVVFCGTSGTYGTGSWPDGADINLMPI

SEQ ID NO: 20649 - protein, 469 aa, Artificial Sequence
  derived and/or modified protein sequence (wt) from neuraminidase__InfluenzaA__AEG65123
MNPNQKIITIGSVSLTISTICFFMQIAILITTVTLHFKQYEFNSPPNNQVMLCEPTTIERNITEIVYLTNTTIEKEICPKLAEYRNWSKPQCDITGFAPFSKDNSIRLSAGGDIWVTREPYVSCDPDKCYQFALGQGTTLNNVHSNDTVHDRTPYRTLLMNELGVPFHLGTKQVCIAWSSSSCHDGKAWLHVCVTGDDKNATASFIYNGRLVDSVVSWSKDILRTQESECVCINGTCTVVMTDGSASGKADTKILFIEEGKIVHTSTLSGSAQHVEECSCYPRYPGVRCVCRDNWKGSNRPIVDINIKNYSIVSSYVCSGLVGDTPRKTDSSSSSHCLDPNNEEGGHGVKGWAFDDGNDVWMGRTISEKLRLGYETFKVIEGWSNPNSKLQINRQVIVDRGNRSGYSGIFSVEGKSCINRCFYVELIRGRKEENEVLWTSNSIVVFCGTSGTYGTGSWPDGADINLMPI

SEQ ID NO: 20650 - protein, 469 aa, Artificial Sequence; identical to SEQ ID NO: 15707
  derived and/or modified protein sequence (wt) from neuraminidase__InfluenzaA__AEG65134

SEQ ID NO: 20651 - protein, 469 aa, Artificial Sequence
  derived and/or modified protein sequence (wt) from neuraminidase__InfluenzaA__AEG65145
MNPNQKIITIGSVSLTIATICFLMQIAILVTTVTLHFKQYECNSPPNNQVMLCEPTIIERNITEIVYLTNTTIEKEICPKLAEYRNWSKPQCNITGFAPFSKDNSIRLSAGGDIWVTREPYVSCDPDKCYQFALGQGTTLNNGHSNDTVHDRTPYRTLLMNELGVPFHLGTRQVCIAWSSSSCHDGKAWLHVCVTGDDENATASFIYNGRLVDSIGSWSKKILRTQESECVCINGTCTVVMTDGSASGKADTKILFIEEGKIVHISTLSGSAQHVEECSCYPRYPGVRCVCRDNWKGSNRPIVDINVKDYSIVSSYVCSGLVGDTPRKNDSFSNSHCLDPNNEEGGHGVKGWAFDDGNDVWMGRTISEKLRSGYETFKVIEGWSKPNSKLQINRQVIVERGNRSGYSGIFSVEGKSCINRCFYVELIRGRKEETEVWWTSNSIVVFCGTSGTYGTGSWPDGADINLMPI

SEQ ID NO: 20652 - protein, 469 aa, Artificial Sequence
  derived and/or modified protein sequence (wt) from neuraminidase__InfluenzaA__AEG65156
MNPNQKIITIGSVSLTIATICFLMQIAILVTTVTLHFKQYECNSPPNNQVMLCEPTIIERNITEIVYLTNTTIEKEICPKLAEYRNWSKPQCNITGFAPFSKDNSIRLSAGGDIWVTREPYVSCDPDKCYQFALGQGTTLNNGHSNDTVHDRTPYRTLLMNELGVPFHLGTRQVCIAWSSSSCHDGKAWLHVCVTGDDENATASFIYNGRLVDSIGSWSKKILRTQESECVCINGTCTVVMTDGSASGKADTKILFIEEGKIVHTSTLSGSAQHVEECSCYPRYPGVRCVCRDNWKGSNRPIVDINVKDYSIVSSYVCSGLVGDTPRKNDSFSSSHCLDPNNEEGGHGVKGWAFDDGNDVWMGRTISEKLRSGYETFKVIEGWSKPNSKLQINRQVIVERGNRSGYSGIFSVEGKSCINRCFYVELIRGRKEETEVWWTSNSIVVFCGTSGTYGTGSWPDGADINLMPI

SEQ ID NO: 20653 - protein, 469 aa, Artificial Sequence
  derived and/or modified protein sequence (wt) from neuraminidase__InfluenzaA__AEG65167
MNPNQKIITIGSVSLTIATICFLMQIAILVTTVTLHFKQYECNSPPNNQVMLCEPTIIERNITEIVYLTNTTIEKEICPKLAEYRNWSKPQCNITGFAPFSKDNSIRLSAGGDIWVTREPYVSCDPDKCYQFALGQGTTLNNGHSNDTVHDRTPYRTLLMNELGVPFHLGTRQVCIAWSSSSCHDGKAWLHVCVTGDDENATASFIYNGRLVDSIGSWSKKILRTQESECVCINGTCTVVMTDGSASGKADTKILFIEEGKIVHISTLSGSARHVEECSCYPRYPGVRCVCRDNWKGSNRPIVDINVKDYSIVSSYVCSGLVGDTPRKNDSFSSSHCLDPNNEEGGHGVKGWAFDDGNDVWMGRTISEKLRSGYETFKVIEGWSKPNSKLQINRQVIVERGNRSGYSGIFSVEGKSCINRCFYVELIRGRKEETEVWWTSNSIVVFCGTSGTYGTGSWPDGADINLMPI

SEQ ID NO: 20654 - protein, 469 aa, Artificial Sequence
  derived and/or modified protein sequence (wt) from neuraminidase__InfluenzaA__AEG65178
MNPNQKIITIGSVSLTIATICFLMQIAILVTTVTLHFKQHECNSPPNNQVMLCEPTIIERNITEIVYLTNTTIEKEICPKLAEYRNWSKPQCNITGFAPFSKDNSIRLSAGGDIWVTREPYVSCDPDKCYQFALGQGTTLNNGHSNNTVHDRTPYRTLLMNELGVPFHLGTRQVCIAWSSSSCHDGKAWLHVCVTGDDKNATASFIYNGRLVDSIGSWSKNILRTQESECVCINGTCTVVMTDGSASGKADTKILFIEEGKIVHISTLSGSAQHVEECSCYPRYPGVRCVCRDNWKGSNRPIVDINVKDYSIVSSYVCSGLVGDTPRKNDSFSSSHCLDPNNEEGGHGVKGWAFDDGNDVWMGRTISEKLRSGYETFKVIEGWSKPNSKLQINRQVIVERGNRSGYSGIFSVEGKSCINRCFYVELIRGRKEETEVWWTSNSIVVFCGTSGTYGTGSWPDGADINLMPI

SEQ ID NO: 20655 - protein, 469 aa, Artificial Sequence
  derived and/or modified protein sequence (wt) from neuraminidase__InfluenzaA__AEG65189
MNPNQKIITIGSVSLTISTICFFMQIAILITTVTLHFKQYEFNSPPNNQVMLCEPTIIERNITEIVYLTNTTIEKEICPKLAEYRNWSKPQCDITGFAPFSKDNSIRLSAGGDIWVTREPYVSCDPDKCYQFALGQGTTLNNVHSNDTVHDRTPYRTLLMNELGVPFHLGTKQVCIAWSSSSCHDGKAWLHVCVTGDDKNATASFIYNGRLVDSIVSWSKEILRTQESECVCINGTCTVVMTDGSASGKADTKILFIEEGKIVHTSTLSGSAQHVEECSCYPRYPGVRCVCRDNWKGSNRPIVDININDYSIVSSYVCSGLVGDTPRKNDSSSSSHCLDPNNEEGGHGVKGWAFDDGNDVWMGRTISEKLRSGYETFKVIEGWSNPNSKLQINRQVIVDRGNRSGYSGIFSVEGKSCINRCFYVELIRGRKEETEVLWTSNSIVVFCGTSGTYGTGSWPDGADINLMPI

SEQ ID NO: 20656 - protein, 469 aa, Artificial Sequence
  derived and/or modified protein sequence (wt) from neuraminidase__InfluenzaA__AEG65200
MNPNQKIITIGSVSLTISTICFFMQIAILITTVTLHFKQYEFNSPPNNQVMLCEPTIIERNITEIVYLTNTTIEKEICPKLAEYRNWSKPQCDITGFAPFSKDNSIRLSAGGDIWVTREPYVSCDPDKCYQFALGQGTTLNNVHSNDTVHDRTPYRTLLMNELGVPFHLGTKQVCIAWSSSSCHDGKAWLHVCVTGDDKNATASFIYNGRLVDSIVSWSKEVLRTQESECVCINGTCTVVMTDGSASGKADTKILFIEEGKIVHTSTLSGSAQHVEECSCYPRYPGVRCVCRDNWKGSNRPIVDINIKDYSIVSSYVCSGLVGDTPRKNDSSSSSHCLDPNNEEGGHGVKGWAFDDGNDVWMGRTISEKLRSGYETFKVIEGWSNPNSKLQTNRQVIVDRGNRSGYSGIFSVEGKSCINRCFYVELIRGRKEETEVLWTSNSIVVFCGTSGTYGTGSWPDGADINLMPI

SEQ ID NO: 20657 - protein, 469 aa, Artificial Sequence; identical to SEQ ID NO: 14712
  derived and/or modified protein sequence (wt) from neuraminidase__InfluenzaA__AEG65211

SEQ ID NO: 20658 - protein, 469 aa, Artificial Sequence; identical to SEQ ID NO: 14714
  derived and/or modified protein sequence (wt) from neuraminidase__InfluenzaA__AEG65222

SEQ ID NO: 20659 - protein, 469 aa, Artificial Sequence
  derived and/or modified protein sequence (wt) from neuraminidase__InfluenzaA__AEG65233
MNPNQKIITIGSVSLTISTICFFMQIAILITTVTLHFKQYEFNSPPNNQVMLCEPTIIERNITEIVYLTNTTIEKEICPKLAEYRNWSKPQCDITGFAPFSKDNSIRLSAGGDIWVTREPYVSCDPDKCYQFALGQGTTLNNVHSNDTVHDRTPYRTLLMNELGVPFHLGTKQVCIAWSSSSCHDGKAWLHVCVTGDDKNATASFIYNGRLVDSIVSWSKKILRTQESECVCINGTCTVVMTDGSASGKADTKILFIEEGKIVHTSTLSGSAQHVEECSCYPRYPGVRCVCRDNWKGSNRPIIDINIKDYSIVSSYVCSGLVGDTPRKNDSSSSSHCLDPNNEEGGHGVKGWAFDDGNDVWMGRTISEKLRSGYETFKVIEGWSNPNSKLQINRQVIVDRGNRSGYSGIFSVEGKSCINRCFYVELIRGRKEETEVLWTSNSIVVFCGTSGTYGTGSWPDGADINLMPI

SEQ ID NO: 20660 - protein, 469 aa, Artificial Sequence
  derived and/or modified protein sequence (wt) from neuraminidase__InfluenzaA__AEG65244
MNPNQKIITIGSVSLTISTICFFMQIAILITTVTLHFKQYEFNSPPNNQVMLCEPTIIERNITEIVYLTNTTIEKEICPKLAEYRNWSKPQCNITGFAPFSKDNSIRLSAGGDIWVTREPYVSCDPDKCYQFALGQGTTLNNVHSNDTVHDRTPYRTLLMNELGVPFHLGTQQVCIAWSSSSCHDGKAWLHVCVTGDDENATASFIYNGRLVDSIVSWSKKILRTQESECVCINGTCTVVMTDGSASGKADTKILFIEEGKIVHTSTLSGSAQHVEECSCYPRYPGVRCVCRDNWKGSNRPIVDINIKDYSIASSYVCSGLVGDTPRKNDSSSSSHCLDPNNEEGGHGVKGWAFDDGNDVWMGRTISEKLRSGYETFKVIEGWSNPNSKLQINRQVIVDRGNRSGYSGIFSVEGKSCINRCFYVELIRGRNQETEVLWTSNSIVVFCGTSGTYGTGSWPDGADINLMPI

SEQ ID NO: 20661 - protein, 469 aa, Artificial Sequence; identical to SEQ ID NO: 14714
  derived and/or modified protein sequence (wt) from neuraminidase__InfluenzaA__AEG65255

SEQ ID NO: 20662 - protein, 469 aa, Artificial Sequence; identical to SEQ ID NO: 14591
  derived and/or modified protein sequence (wt) from neuraminidase__InfluenzaA__AEG65266

SEQ ID NO: 20663 - protein, 469 aa, Artificial Sequence; identical to SEQ ID NO: 14591
  derived and/or modified protein sequence (wt) from neuraminidase__InfluenzaA__AEG65277

SEQ ID NO: 20664 - protein, 469 aa, Artificial Sequence
  derived and/or modified protein sequence (wt) from neuraminidase__InfluenzaA__AEG65288
MNPNQKIITIGSVSLTIATICFLMQIAILVTTVTLHFKQHECNSPPNNQVMLCEPTIIERNITEIVYLTNTTIEKEICPKLVEYRNWSKPQCNITGFAPFSKDNSIRLSAGGDIWVTREPYVSCDPDKCYQFALGQGTTLNNGHSNDTVHDRTPYRTLLMNELGVPFHLGTRQVCIAWSSSSCHDGKAWLHVCVTGDDKNATASFIYNGRLVDSIGSWSKKILRTQESECVCINGTCTVVMTDGSASGKADTKILFIEEGKIVHISTLSGSAQHVEECSCYPRYPGVRCVCRDNWKGSNRPIVDINVKDYSIVSSYVCSGLVGDTPRKNNSFSSSHCLDPNNEEGGHGVKGWAFDDGNDVWMGRTISEKLRSGYETFKVIEGWSKPNSKLQINRQVIVERGNRSGYSGIFSVEGKSCINRCFYVELIRGRKEETEVWWTSNSIVVFCGTSGTYGTGSWPDGADINLMPI

SEQ ID NO: 20665 - protein, 469 aa, Artificial Sequence; identical to SEQ ID NO: 14591
  derived and/or modified protein sequence (wt) from neuraminidase__InfluenzaA__AEG65299

SEQ ID NO: 20666 - protein, 469 aa, Artificial Sequence; identical to SEQ ID NO: 14714
  derived and/or modified protein sequence (wt) from neuraminidase__InfluenzaA__AEG65310

SEQ ID NO: 20667 - protein, 469 aa, Artificial Sequence; identical to SEQ ID NO: 14714
  derived and/or modified protein sequence (wt) from neuraminidase__InfluenzaA__AEG65321

SEQ ID NO: 20668 - protein, 469 aa, Artificial Sequence; identical to SEQ ID NO: 14714
  derived and/or modified protein sequence (wt) from neuraminidase__InfluenzaA__AEG65332

SEQ ID NO: 20669 - protein, 469 aa, Artificial Sequence; identical to SEQ ID NO: 14714
  derived and/or modified protein sequence (wt) from neuraminidase__InfluenzaA__AEG65354

SEQ ID NO: 20670 - protein, 469 aa, Artificial Sequence; identical to SEQ ID NO: 14714
  derived and/or modified protein sequence (wt) from neuraminidase__InfluenzaA__AEG65365

SEQ ID NO: 20671 - protein, 469 aa, Artificial Sequence
  derived and/or modified protein sequence (wt) from neuraminidase__InfluenzaA__AEG65376
MNPNQKIITIGSVSLTISTICFFMQIAILITTVTLHFKQYEFNSPPNNQVMLCEPTIIERNITEIVYLTNTTIEKEICPKLAEYRNWSKPQCNITGFAPFSKDNSIRLSAGGDIWVTREPYVSCDPDKCYQFALGQGTTLNNVHSNDTVHDRTPYRTLLMNELGVPFHLGTQQVCIAWSSSSCHDGKAWLHVCVTGDDENATASFIYNGRLVDSIVSWSKKILRTQESECVCINGTCTVVMTDGSASGKADTKILFIEEGKIVHTSTLSGSAQHVEECSCYPRYPGVRCVCRDNWKGSNRPIVDINIKDYSIVSSYVCSGLVGDTPRKNDSSSSSHCLDPNNEEGGHGVKGWAFDDGNDVWMGRTISEKLRSGYETFKVIEGWSNPNSKLQINRQVIVDRGNRSGYSGIFSVEGKSCINRCFYVELIRGRNQETEVLWTSNSIVVFCGTSGTYGTGSWPDGADINLMPI

SEQ ID NO: 20672 - protein, 469 aa, Artificial Sequence; identical to SEQ ID NO: 14591
  derived and/or modified protein sequence (wt) from neuraminidase__InfluenzaA__AEG65387

SEQ ID NO: 20673 - protein, 469 aa, Artificial Sequence; identical to SEQ ID NO: 14591
  derived and/or modified protein sequence (wt) from neuraminidase__InfluenzaA__AEG65398

SEQ ID NO: 20674 - protein, 469 aa, Artificial Sequence; identical to SEQ ID NO: 14591
  derived and/or modified protein sequence (wt) from neuraminidase__InfluenzaA__AEG65409

SEQ ID NO: 20675 - protein, 469 aa, Artificial Sequence; identical to SEQ ID NO: 14591
  derived and/or modified protein sequence (wt) from neuraminidase__InfluenzaA__AEG65420

SEQ ID NO: 20676 - protein, 469 aa, Artificial Sequence; identical to SEQ ID NO: 14591
  derived and/or modified protein sequence (wt) from neuraminidase__InfluenzaA__AEG65431

SEQ ID NO: 20677 - protein, 469 aa, Artificial Sequence; identical to SEQ ID NO: 14712
  derived and/or modified protein sequence (wt) from neuraminidase__InfluenzaA__AEG65442

SEQ ID NO: 20678 - protein, 469 aa, Artificial Sequence; identical to SEQ ID NO: 14714
  derived and/or modified protein sequence (wt) from neuraminidase__InfluenzaA__AEG65453

SEQ ID NO: 20679 - protein, 469 aa, Artificial Sequence; identical to SEQ ID NO: 14714
  derived and/or modified protein sequence (wt) from neuraminidase__InfluenzaA__AEG65464

SEQ ID NO: 20680 - protein, 469 aa, Artificial Sequence; identical to SEQ ID NO: 14714
  derived and/or modified protein sequence (wt) from neuraminidase__InfluenzaA__AEG65475

SEQ ID NO: 20681 - protein, 469 aa, Artificial Sequence
  derived and/or modified protein sequence (wt) from neuraminidase__InfluenzaA__AEG65486
MNPNQKIITIGSVSLTISTICFFMQIAILITTVTLHFKQYEFNSPPNNQVMLCEPTIIERNITEIVYLTNTTIEKEICPKLAEHRNWSKPQCDITGFAPFSKDNSIRLSAGGDIWVTREPYVSCDPDKCYQFALGQGTTLNNVHSNDTVHDRTPYRTLLMNELGVPFHLGTKQVCIAWSSSSCHDGKAWLHVCVTGDDKNATASFIYNGRLVDSIVSWSKKILRTQESECVCINGTCTVVMTDGSASGKADTKILFIEEGKIVHTSTLSGSAQHVEECSCYPRYPGVRCVCRDNWKGSNRPIVDINIKDYSIVSSYVCSGLVGDTPRKNDSSSSSHCLDPNNEEGGHGVKGWAFDDGNDVWMGRTISEKLRSGYETFKVIEGWSNPNSKLQINRQVIVDRGNRSGYSGIFSVEGKSCINRCFYVELIRGRKEETEVLWTSNSIVVFCGTSGTYGTGSWPDGADINLMPI

SEQ ID NO: 20682 - protein, 469 aa, Artificial Sequence; identical to SEQ ID NO: 14714
  derived and/or modified protein sequence (wt) from neuraminidase__InfluenzaA__AEG65497

SEQ ID NO: 20683 - protein, 469 aa, Artificial Sequence; identical to SEQ ID NO: 14714
  derived and/or modified protein sequence (wt) from neuraminidase__InfluenzaA__AEG65508

SEQ ID NO: 20684 - protein, 469 aa, Artificial Sequence; identical to SEQ ID NO: 14714
  derived and/or modified protein sequence (wt) from neuraminidase__InfluenzaA__AEG65519

SEQ ID NO: 20685 - protein, 469 aa, Artificial Sequence; identical to SEQ ID NO: 14714
  derived and/or modified protein sequence (wt) from neuraminidase__InfluenzaA__AEG65530

SEQ ID NO: 20686 - protein, 469 aa, Artificial Sequence; identical to SEQ ID NO: 14714
  derived and/or modified protein sequence (wt) from neuraminidase__InfluenzaA__AEG65541

SEQ ID NO: 20687 - protein, 469 aa, Artificial Sequence
  derived and/or modified protein sequence (wt) from neuraminidase__InfluenzaA__AEG65563
MNPNQKIITIGSVSLTISTICFFMQIAILITTVTLHFKQYEFNSPPNNQVMLCEPTIIERNITEIVYLTNTTIEKEICPKLAEYRNWSKPQCDITGFAPFSKDNSIRLSAGGDIWVTREPYVSCDPDRCYQFALGQGTTLNNVHSNDTVHDRTPYRTLLMNELGVPFHLGTKQVCIAWSSSSCHDGKAWLHVCVTGDDKNATASFIYNGRLVDSIVSWSKKILRTQESECVCINGTCTVVMTDGSASGKADTKILFIEEGKIVHTSTLSGSAQHVEECSCYPRYPGVRCVCRDNWKGSNRPIVDINIKDYSIVSSYVCSGLVGDTPRKNDSSSSSHCLDPNNEEGGHGVKGWAFDDGNDVWMGRTISEKLRSGYETFKVIEGWSNPNSKLQINRQVIVDRGNRSGYSGIFSVEGKSCINRCFYVELIRGRKEETEVLWTSNSIVVFCGTSGTYGTGSWPDGADINLMPI

SEQ ID NO: 20688 - protein, 469 aa, Artificial Sequence
  derived and/or modified protein sequence (wt) from neuraminidase__InfluenzaA__AEG65574
MNPNQKIITIGSVSLTISTICFFMQIAILITTVTLHFKQYEFNSPPNNQVMLCEPTIIERNITEIVYLTNTTIEKEICPKLAEYRSWSKPQCDITGFAPFSKDNSIRLSAGGDIWVTREPYVSCDPDRCYQFALGQGTTLNNVHSNDTVHDRTPYRTLLMNELGVPFHLGTKQVCIAWSSSSCHDGKAWLHVCVTGDDKNATASFIYNGRLVDSIVSWSKKILRTQESECVCINGTCTVVMTDGSASGKADTKILFIEEGKIVHTSTLSGSAQHVEECSCYPRYPGVRCVCRDNWKGSNRPIVDINIKDYSIVSSYVCSGLVGDTPRKNDSSSSSHCLDPNNEEGGHGVKGWAFDDGNDVWMGRTISEKLRSGYETFKVIEGWSNPNSKLQINRQVIVDRGNRSGYSGIFSVEGKSCINRCFYVELIRGRKEETEVLWTSNSIVVFCGTSGTYGTGSWPDGADINLMPI

SEQ ID NO: 20689 - protein, 469 aa, Artificial Sequence; identical to SEQ ID NO: 20687
  derived and/or modified protein sequence (wt) from neuraminidase__InfluenzaA__AEG65585

SEQ ID NO: 20690 - protein, 469 aa, Artificial Sequence; identical to SEQ ID NO: 20687
  derived and/or modified protein sequence (wt) from neuraminidase__InfluenzaA__AEG65596

SEQ ID NO: 20691 - protein, 469 aa, Artificial Sequence
  derived and/or modified protein sequence (wt) from neuraminidase__InfluenzaA__AEG65607
MNPNQKIITIGSVSLTISTICFFMQIAILITTVTLHFKQYEFNSPPNNQVMLCEPTIIERNITEIVYLTNTTIEKEICPKLAEYRNWSKPQCDITGFAPFSKDNSIRLSAGGDIWVTREPYVSCDPDKCYQFALGQGTTLNNVHSNDTVHDRTPYRTLLMNELGVPFHLGTKQVCIAWSSSSCHDGKAWLHVCVTGDDKNATASFIYNGRLVDSIVSWSKKILRTQESECVCINGTCTVVMTDGSASGKADTKILFIEEGKIVHTSTLSGSAQHVEECSCYPRYPGVRCVCRDNWKGSNRPIVDINIKDYSIASSYVCSGLVGDTPRKNDSSSSSHCLDPNNEEGGHGVKGWAFDDGNDVWMGRTISEKLRSGYETFKVIEGWSNPNSKLQINRQVIVDRGNRSGYSGIFSVEGKSCINRCFYVELIRGRKEETEVLWTSNSIVVFCGTSGTYGTGSWPDGADINLMPI

SEQ ID NO: 20692 - protein, 469 aa, Artificial Sequence
  derived and/or modified protein sequence (wt) from neuraminidase__InfluenzaA__AEG65629
MNPNQKIITIGSVSLTISTICFFMQIAILITTVTLHFKQYEFNSPPNNQVMLCEPTIIERNITEIVYLTNTTIEKEICPKLAEYRNWSKPQCDITGFAPFSKDNSIRLSAGGDIWVTREPYVSCDPDKCYQFALGQGTTLNNVHSNDTVHDRTPYRTLLMNELGVPFHLGTKQVCIAWSSSSCHDGKAWLHVCVTGDDKNATASFIYNGRLVDSIVSWSKEILRTQESECVCINGTCTVVMTDGSASGKADTKILFIEEGKIVHTSTLSGSAQHVEECSCYPRYPGVRCVCRDNWKGSNRPIVDINIKDYSIVSSYVCSGLVGDTPRKNDSSSSSHCLDPNDEEGGHGVKGWAFDDGNDVWMGRTISEKLRSGYETFKVIEGWSNPNSKLQINRQVIVDRGNRSGYSGIFSVEGKSCINRCFYVELIRGRKEEIEVLWTSNSIVVFCGTSGTYGTGSWPDGADINLMPI

SEQ ID NO: 20693 - protein, 469 aa, Artificial Sequence; identical to SEQ ID NO: 20692
  derived and/or modified protein sequence (wt) from neuraminidase__InfluenzaA__AEG65640

SEQ ID NO: 20694 - protein, 469 aa, Artificial Sequence; identical to SEQ ID NO: 14135
  derived and/or modified protein sequence (wt) from neuraminidase__InfluenzaA__AEG65651

SEQ ID NO: 20695 - protein, 469 aa, Artificial Sequence; identical to SEQ ID NO: 14714
  derived and/or modified protein sequence (wt) from neuraminidase__InfluenzaA__AEG65662

SEQ ID NO: 20696 - protein, 469 aa, Artificial Sequence; identical to SEQ ID NO: 14714
  derived and/or modified protein sequence (wt) from neuraminidase__InfluenzaA__AEG65673

SEQ ID NO: 20697 - protein, 469 aa, Artificial Sequence; identical to SEQ ID NO: 14714
  derived and/or modified protein sequence (wt) from neuraminidase__InfluenzaA__AEG65684

SEQ ID NO: 20698 - protein, 469 aa, Artificial Sequence; identical to SEQ ID NO: 20671
  derived and/or modified protein sequence (wt) from neuraminidase__InfluenzaA__AEG65695

SEQ ID NO: 20699 - protein, 469 aa, Artificial Sequence
  derived and/or modified protein sequence (wt) from neuraminidase__InfluenzaA__AEG65706
MNPNQKIITIGSVSLTISTICFFMQIAILITTVTLHFKQYEFNSPPNNQVMLCEPTIIERNITEIVYLTNTTIEKEICPKLAEYRNWSKPQCNITGFAPFSKDNSIRLSAGGDIWVTREPYVSCDPDKCYQFALGQGTTLNNVHSNDTVHDRTPYRTLLMNELGVPFHLGTKQVCIAWSSSSCHDGKAWLHVCVTGDDKNATASFIYNGRLVDSIVSWSKEILRTQESECVCINGTCTVVMTDGSASGKADTKILFIEEGKIVHTSTLSGSAQHVEECSCYPRYPGVRCVCRDNWKGSNRPIVDINIKDYSIVSSYVCSGLVGDTPRKNDSSSSSHCLDPNNEEGGHGVKGWAFDDGNDVWMGRTISEKLRSGYETFKVIEGWSNPNSKLQINRQVIVDRGNRSGYSGIFSVEGKSCINRCFYVELIRGRKEENEVLWTSNSIVVFCGTSGTYGTGSWPDGADINLMPI

SEQ ID NO: 20700 - protein, 469 aa, Artificial Sequence
  derived and/or modified protein sequence (wt) from neuraminidase__InfluenzaA__AEG65728
MNPNQKIITIGSVSLTISTICFFMQIAILITTVTLHFKQYEFNSPPNNQVMLCEPTIIERNITEIVYLTNTTIEKEICPKLAEYRNWSKPQCNITGFAPFSKDNSIRLSAGGDIWVTREPYVSCDPDKCYQFALGQGTTLNNVHSNDTVHDRTPYRTLLMNELGVPFHLGTKQVCIAWSSSSCHDGKAWLHVCVTGDDKNATASFIYNGRLVDSIVSWSKEILRTQESECVCINGTCTVVMTDGSASGKADTKILFIEEGKIVHTSTLSGSAQHVEECSCYPRYPGVRCVCRDNWKGSNRPIVDINIKDYSIVSSYVCSGLVGDTPRKNDSSSSSHCLDPNNEEGGHGVKGWAFDDGNDVWMGRTISEKLRSGYETFKVIEGWSNPNSKLQINRQVIVDRGNRSGYSGIFSVEGKSCINRCFYVELIRGRKEETEVLWTSNSIVVFCGTSGTYGTGSWPDGAEINLMPI

SEQ ID NO: 20701 - protein, 469 aa, Artificial Sequence
  derived and/or modified protein sequence (wt) from neuraminidase__InfluenzaA__AEG65739
MNPNQKIITIGSVSLTISTICFFMQIAILITTVTLHFKQYEFSSPPNNQVMPCEPTIIERNITEIVYLTNTTIEKEICPKLAEYRNWSKPQCDITGFAPFSKDNSIRLSAGGDIWVTREPYVSCDPDKCYQFALGQGTTLNNVHSNDTVHDRTPYRTLLMNELGVPFHLGTKQVCIAWSSSSCHDGKAWLHVCVTGDDKNATASFIYNGRLVDSIVSWSKEILRTQESECVCINGTCTVVMTDGSASGKADTKILFIEEGKIVHTSTLSGSAQHVEECSCYPRYPGVRCVCRDNWKGSNRPIVDINMKDYSIVSSYVCSGLVGDTPRKNDSSSSSHCLDPNNEEGGHGVKGWAFDDGNDVWMGRTISEKLRSGYETFKVIEGWSNPNSKLQINRQVIVDRGNRSGYSGIFSVEGKSCINRCFYVELIRGRKEETEVLWTSNSIVVFCGTSGTYGTGSWPDGADINLMPI

SEQ ID NO: 20702 - protein, 469 aa, Artificial Sequence; identical to SEQ ID NO: 16564
  derived and/or modified protein sequence (wt) from neuraminidase__InfluenzaA__AEG65750

SEQ ID NO: 20703 - protein, 469 aa, Artificial Sequence; identical to SEQ ID NO: 20700
  derived and/or modified protein sequence (wt) from neuraminidase__InfluenzaA__AEG65761

SEQ ID NO: 20704 - protein, 469 aa, Artificial Sequence
  derived and/or modified protein sequence (wt) from neuraminidase__InfluenzaA__AEG65772
MNPNQKIITIGSVSLTISTICFFMQTAILITTVTLHFKQYEFNSPPNNQVMLCEPTIIERNITEIVYLTNTTIEKEMCPKLAEYRNWSKPQCDITGFAPFSKDNSIRLSAGGDIWVTREPYVSCDPDKCYQFALGQGTTLNNVHSNDTVHDRTPYRTLLMNELGVPFHLGTKQVCIAWSSSSCHDGKAWLHVCVTGDDKNATASFIYNGRLVDSIVSWSKKILRTQESECVCINGTCTVVMTDGSASGKADTKILFIEEGKIIHTSTLSGSAQHVEECSCYPRYPGVRCVCRDNWKGSNRPIVDINIKDYSIVSSYVCSGLVGDTPRKNDSSSSSHCLDPNNEEGGHGVKGWAFDDGNDVWMGRTISEKLRSGYETFKVIEGWSKPNSKLQINRQVIVDRGNRSGYSGIFSVEGKSCINRCFYVELIRGRKEETEVLWTSNSIVVFCGTSGTYGTGSWPDGADINLMPI

SEQ ID NO: 20705 - protein, 469 aa, Artificial Sequence; identical to SEQ ID NO: 19518
  derived and/or modified protein sequence (wt) from neuraminidase__InfluenzaA__AEG65783

SEQ ID NO: 20706 - protein, 469 aa, Artificial Sequence
  derived and/or modified protein sequence (wt) from neuraminidase__InfluenzaA__AEG65794
MNPNQKIITIGSVSLTISTICFFMQIAILITTITLHFKQYEFNSPPNNQVMLCEPTIIERNITEIVYLTNTTIEKEICPKLAEYRNWSKPQCDITGFAPFSKDNSIRLSAGGDIWVTREPYVSCDPDKCYQFALGQGTTLNNVHSNNTVRDRTPYRTLLMNELGVPFHLGTKQVCIAWSSSSCHDGKAWLHVCITGDDKNATASFIYNGRLVDSVVSWSKEILRTQESECVCINGTCTVVMTDGSASGKADTKILFIEEGKIVHTSTLSGSAQHVEECSCYPRYPGVRCVCRDNWKGSNRPIVDINIKDHSIVSSYVCSGLVGDTPRKNDSSSSSHCLDPNNEEGGHGVKGWAFDDGNDVWMGRTINETSRLGYETFKVIEGWSNPKSKLQINRQVIVDKGNRSGYSGIFSVEGKSCINRCFYVELIRGRKEETEVLWTSNSIVVFCGTSGTYGTGSWPDGADLNLMPI

SEQ ID NO: 20707 - protein, 469 aa, Artificial Sequence; identical to SEQ ID NO: 19518
  derived and/or modified protein sequence (wt) from neuraminidase__InfluenzaA__AEG65805

SEQ ID NO: 20708 - protein, 469 aa, Artificial Sequence
  derived and/or modified protein sequence (wt) from neuraminidase__InfluenzaA__AEG65816
MNPNQKIITIGSVSLTISTICFFMQIAILITTVTLHFKQYEFNSPPNNQVMLCEPTIIERNITEIVYLTNTTIEKEICPKLAEYRNWSKPQCDITGFAPFSKDNSIRLSAGGDIWVTREPYVSCDPDKCYQFALGQGTTLNNVHSNNTVRDRTPYRTLLMNELGVPFHLGTKQVCIAWSSSSCHDGKAWLHVCITGDDKNATASFIYNGRLVDSVVSWSKEILRTQESECVCINGTCTVVMTDGSASGEADTKILFIEEGKIVHTSTLSGSAQHVEECSCYPRYPGVRCVCRDNWKGSNRPIVDINIKDHSIVSSYVCSGLVGDTPRKNDSSSSSHCLDPNNEEGGHGVKGWAFDDGNDVWMGRTINETSRLGYETFKVIEGWSNPKSKLQINRQVIVDRGNRSGYSGIFSVEGKSCINRCFYVELIRGRKEETEVLWTSNSIVVFCGTSGTYGTGSWPDGADLNLMPI

SEQ ID NO: 20709 - protein, 469 aa, Artificial Sequence
  derived and/or modified protein sequence (wt) from neuraminidase__InfluenzaA__AEG79808
MNPNQKIITIGSVCMTIGMANLILQIGNIISIWISHSIQLGNQNQIETCNQSVITYENNTWVNQTYVNISNTNFAAGQSVVSVKLAGNSSLCPVSGWAIYSKDNSIRIGSKGDVFVIREPFISCSPLECRTFFLTQGALLNDKHSNGTIKDRSPYRTLMSCPIGEVPSPYNSRFESVAWSASACHDGINWLTIGISGPDNGAVAVLKYNGIITDTIKSWRNNILRTQESECACVNGSCFTIMTDGPSDGQASYKIFRIEKGKIVKSVEMNAPNYHYEECSCYPDSSEITCVCRDNWHGSNRPWVSFNQNLEYQIGYICSGIFGDNPRPNDKTGSCGPVSSNGANGVKGFSFKYGNGVWIGRTKSISSRKGFEMIWDPNGWTGTDNNFSIKQDIVGINEWSGYSGSFVQHPELTGLDCIRPCFWVELIRGRPKENTIWTSGSSISFCGVNSDTVGWSWPDGAELPFTIDK

SEQ ID NO: 20710 - protein, 469 aa, Artificial Sequence; identical to SEQ ID NO: 20709
  derived and/or modified protein sequence (wt) from neuraminidase__InfluenzaA__AEG79814

SEQ ID NO: 20711 - protein, 469 aa, Artificial Sequence
  derived and/or modified protein sequence (wt) from neuraminidase__InfluenzaA__AEG79826
MNPNQKIITISSVCMTIGMANLILQIGNIISIWISHSIQLGNQNQIETCNQSVITYENNTWVNQTYVNISNTNFAAGQSVVSVKLAGNSSLCPVSGWAIYSKDNSIRIGSKGDVFVIREPFISCSPLECRTFFLTQGALLNDKHSNGTIKDRSPYRTLMSCPIGEVPSPYNSRFESVAWSASACHDGINWLTIGISGPDNGAVAVLKYNGIITDTIKSWRNNILRTQESECACVNGSCFTIMTDGPSDGQASYKIFRIEKGKIVKSVEMNAPNYHYEECSCYPDSSEITCVCRDNWHGSNRPWVSFNQNLEYQIGYICSGIFGDNPRPNDKTGSCGPVSSNGANGVKGFSFKYGNGVWIGRTKSISSRKGFEMIWDPNGWTGTDNNFSIKQDIVGINEWSGYSGSFVQHPELTGLDCIRPCFWVELIRGRPKENTIWTSGSSISFCGVNSDTMGWSWPDGAELPFTIDK

SEQ ID NO: 20712 - protein, 469 aa, Artificial Sequence
  derived and/or modified protein sequence (wt) from neuraminidase__InfluenzaA__AEG79830
MNPNQKIITISSVCMTIGMANLILQIGNIISIWISHSIQLGNQNQIETCNQSVITYENNTWVNQTYVNISNTNFAAGQSVVSVKLAGNSSLCPVSGWAIYSKDNSIRIGSKGDVFVIREPFISCSPLECRTFFLTQGALLNDKHSNGTIKDRSPYRTLMSCPIGEVPSPYNSRFESVAWSASACHDGINWLTIGISGPDNGAVAVLKYNGIITDTIKSWRNNILRTQESECACVNGSCFTVMTDGPSDGQASYKIFRIEKGKIVKSVEMNAPNYHYEECSCYPDSSEITCVCRDNWHGSNRPWVSFNQNLEYQIGYICSGIFGDNPRPNDKTGSCGPVSSNGANGVKGFSFKYGNGVWIGRTKSISSRKGFEMIWDPNGWTGTDNNFSIKQDIVGINEWSGYSGSFVQHPELTGLDCIRPCFWVELIRGRPKENTIWTSGSSISFCGVNSDTVGWSWPDGAELPFTIDK

SEQ ID NO: 20713 - protein, 469 aa, Artificial Sequence; identical to SEQ ID NO: 20257
  derived and/or modified protein sequence (wt) from neuraminidase__InfluenzaA__AEG79836

SEQ ID NO: 20714 - protein, 469 aa, Artificial Sequence
  derived and/or modified protein sequence (wt) from neuraminidase__InfluenzaA__AEH59356
MNPNQKIITIGSVCMTIGMANLILQIGNIISIWISHSIQLGNQNQIETCNQSVITYENNTWVNQTYVNISNTNFAAGQSVVSVKLAGNSSLCPVSGWAIYSKDNSIRIGSKGDVFVIREPFISCSPLECRTFFLTQGTLLNDKHSNGTIKDRSPYRTLMSCPIGEVPSPYNSRFESVAWSASACHDGINWLTIGISGPDNGAVAVLKYNGIITDTIKSWRNNILRTQESECACVNGSCFTIMTDGPSDGQASYKIFRIEKGKIVKSVEMNAPNYYYEECSCYPDSSEITCVCRDNWHGSNRPWVSFNQNLEYQIGYICSGIFGDNPRPNDKTGSCGPVSSNGANGVKGFSFKYGNGVWIGRTKSISSRKGFEMIWDPNGWTGTDNNFSIKQDIVGINEWSGYSGSFVQHPELTGLDCIRPCFWVELIRGRPKENTVWTSGSSISFCGVNSDTVGWSWPDGAELPFTIDK

SEQ ID NO: 20715 - protein, 469 aa, Artificial Sequence; identical to SEQ ID NO: 20709
  derived and/or modified protein sequence (wt) from neuraminidase__InfluenzaA__AEH59360

SEQ ID NO: 20716 - protein, 469 aa, Artificial Sequence
  derived and/or modified protein sequence (wt) from neuraminidase__InfluenzaA__AEH59364
MNPNQKIITIGSVCMTIGMANLILQIGNIISIWISHSIQLGNQNQIETCNQSVITYENNTWVNQTYVNISNTNFAAGQSVVSVKLAGNSSLCPVSGWAIYSKDNSIRIGSKGDVFVIREPFISCSPLECRTFFLTQGALLNDKHSNGTIKDRSPYRTLMSCPIGEVPSPYNSRFESVAWSASACHDGINWLTIGISGPDNGAVAVLKYNGIITDTIKSWRNNILRTQESECACVNGSCFTVMTDGPNDGQASYKIFRIEKGKIVKSVEMNAPNYHYEECSCYPDSSEITCVCRDNWHGANRPWVSFNQNLEYQIGYICSGIFGDNPRPNDKTGSCGPVSSNGANGVKGFSFKYGNGVWIGRTKSISSRNGFEMIWDPNGWTGTDNNFSIKQDIVGINEWSGYSGSFVQHPELTGLDCIRPCFWVELIRGRPKENTIWTSGSSISFCGVNSDTVGWSWPDGAELPFTIDK

SEQ ID NO: 20717 - protein, 469 aa, Artificial Sequence
  derived and/or modified protein sequence (wt) from neuraminidase__InfluenzaA__AEH59366
MNPNQKIITIGSVCMTIGMANLILQIGNIISIWISHSIQLGNQNQIETCNQSVITYENNTWVNQTYVNISNTNFAAGQSVVSVKLAGNSSLCPVSGWAIYSKDNSIRIGSKGDVFVIREPFISCSPLECRTFFLTQGALLNDKHSNGTIKDRSPYRTLMSCPIGGVPSPYNSRFESVAWSASACHDGINWLTIGISGPDNGAVAVLKYNGIITDTIKSWRNNILRTQESECACVNGSCFTIMTDGPSDGQASYKIFRIEKGKIVKSVEMNAPNYHYEECSCYPDSSEITCVCRDNWHGSNRPWVSFNQNLEYQIGYICSGIFGDNPRPNDKTGSCGPVSSNGANGVKGFSFKYGNGVWIGRTKSISSRKGFEMIWDPNGWTGTDNNFSIKQDIVGINEWSGYSGSFVQHPELTGLDCIRPCFWVELIRGRPKENTIWTSGSSISFCGVNSDTVGWSWPDGAELPFTIDK

SEQ ID NO: 20718 - protein, 469 aa, Artificial Sequence; identical to SEQ ID NO: 20709
  derived and/or modified protein sequence (wt) from neuraminidase__InfluenzaA__AEH59368

SEQ ID NO: 20719 - protein, 469 aa, Artificial Sequence; identical to SEQ ID NO: 20257
  derived and/or modified protein sequence (wt) from neuraminidase__InfluenzaA__AEH59370

SEQ ID NO: 20720 - protein, 469 aa, Artificial Sequence; identical to SEQ ID NO: 20716
  derived and/or modified protein sequence (wt) from neuraminidase__InfluenzaA__AEH59372

SEQ ID NO: 20721 - protein, 469 aa, Artificial Sequence; identical to SEQ ID NO: 20716
  derived and/or modified protein sequence (wt) from neuraminidase__InfluenzaA__AEH59376

SEQ ID NO: 20722 - protein, 469 aa, Artificial Sequence; identical to SEQ ID NO: 20257
  derived and/or modified protein sequence (wt) from neuraminidase__InfluenzaA__AEH59378

SEQ ID NO: 20723 - protein, 469 aa, Artificial Sequence; identical to SEQ ID NO: 20716
  derived and/or modified protein sequence (wt) from neuraminidase__InfluenzaA__AEH59382

SEQ ID NO: 20724 - protein, 469 aa, Artificial Sequence
  derived and/or modified protein sequence (wt) from neuraminidase__InfluenzaA__AEH59384
MNPNQKIITIGSVCMTIGMANLILQIGNIISIWISHSIQLGNQSQIETCNQSVITYENNTWVNQTYVNISNTNFAAGQSVVSVKLAGNSSLCPVSGWAIYSKDNSIRIGSKGDVFVIREPFISCSPLECRTFFLTQGALLNDKHSNGTIKDRSPYRTLMSCPIGEVPSPYNSRFESVAWSASACHDGINWLTIGISGPDNGAVAVLKYNGIITDTIKSWRNNILRTQESECACVNGSCFTIMTDGPSDGQASYKIFRIEKGRIVKSVEMNAPNYHYEECSCYPDSSEITCVCRDNWHGSNRPWVSFNQNLEYQIGYICSGIFGDNPRPNDKTGSCGPVSSNGANGVKGFSFKYGNGVWIGRTKSISSRKGFEMIWDPNGWTGTDNNFSIKQDIVGINEWSGYSGSFVQHPELTGLDCIRPCFWVELIRGRPKENTIWTSGSSISFCGVNSDTVGWSWPDGAELPFTIDK

SEQ ID NO: 20725 - protein, 469 aa, Artificial Sequence
  derived and/or modified protein sequence (wt) from neuraminidase__InfluenzaA__AEH59386
MNPNQKIITIGSVCMTIGMANLILQIGNIISIWISHSIQIGNQNQIETCNQSVITYENNTWVNQTYVNISNTNFAAGQSVVSVKLAGNSSLCPVSGWAIYSKDNSIRIGSKGDVFVIREPFISCSPLECRTFFLTQGALLNDKHSNGTIKDRSPYRTLMSCPIGEVPSPYNSRFESVAWSASACHDGINWLTIGISGPDNGAVAVLKYNGIITDTIKSWRNNILRTQESECACVNGSCFTIMTDGPSDGQASYKIFRIEKGKIVKSVEMNAPNYHYEECSCYPDSSEITCVCRDNWHGSNRPWVSFNQNLEYQIGYICSGIFGDNPRPNDKTGSCGPVSSNGANGVKGFSFKYGNGVWIGRTKSISSRKGFEMIWDPNGWTGTDNNFSIKQDIVGINEWSGYSGSFVQHPELTGLDCIRPCFWVELIRGRPKENTIWTSGSSISFCGVNSDTVGWSWPDGAELPFTIDK

SEQ ID NO: 20726 - protein, 469 aa, Artificial Sequence; identical to SEQ ID NO: 20716
  derived and/or modified protein sequence (wt) from neuraminidase__InfluenzaA__AEH59388

SEQ ID NO: 20727 - protein, 469 aa, Artificial Sequence
  derived and/or modified protein sequence (wt) from neuraminidase__InfluenzaA__AEH59390
MNPNQKIITIGSVCMTIGMANLILQIGNIISIWISHSIQLGNQSQIETCNQSVITYENNTWVNQTYVNISNTNFAAGQSVVSVKLAGNSSLCPVSGWAIYSKDNSIRIGSKGDVFVIREPFISCSPLECRTFFLTQGALLNDKHSNGTIKDRSPYRTLMSCPIGEVPSPYNSRFESVAWSASACHDGINWLTIGISGPDNGAVAVLKYNGIITDTIKSWRNNILRTQESECACVNGSCFTIMTDGPSDGQASYKIFRIEKGKIVKSVEMNAPNYHYEECSCYPDSSEITCVCRDNWHGSNRPWVSFNQNLEYQIGYICSGIFGDNPRPNDKTGSCGPVSSNGANGVKGFSFKYGNGVWIGRTKSISSRKGFEMIWDPNGWTGTDNNFSIKQDIVGLNEWSGYSGSFVQHPELTGLDCIRPCFWVELIRGLPKENTIWTSGSSISFCGVNSDTVGWSWPDGAELPFTIDK

SEQ ID NO: 20728 - protein, 469 aa, Artificial Sequence; identical to SEQ ID NO: 20716
  derived and/or modified protein sequence (wt) from neuraminidase__InfluenzaA__AEH59392

SEQ ID NO: 20729 - protein, 469 aa, Artificial Sequence; identical to SEQ ID NO: 20716
  derived and/or modified protein sequence (wt) from neuraminidase__InfluenzaA__AEH59396

SEQ ID NO: 20730 - protein, 469 aa, Artificial Sequence
  derived and/or modified protein sequence (wt) from neuraminidase__InfluenzaA__AEH59398
MNPNQKIITIGSVCMTIGVANLILQIGNIISIWISHSIQLGNQNQIETCNQSVITYENNTWVNQTYVNISNTNFAAGQSVVSVKLAGNSSLCPVSGWAIYSKDNSIRIGSKGDVFVIREPFISCSPLECRTFFLTQGALLNDKHSNGTIKDRSPYRTLMSCPIGEVPSPYNSRFESVAWSASACHDGINWLTIGISGPDNGAVAVLKYNGIITDTIKSWRNYILRTQESECACVNGSCFTIMTDGPSDGQASYKIFRIEKGKVVKSVEMNAPNYHYEECSCYPDSSEITCVCRDNWHGSNRPWVSFNQNLEYQIGYICSGIFGDNPRPNDKTGSCGPVSSNGANGVKGFSFKYGNGVWIGRTKSISSRKGFEMIWDPNGWTGTDNNFSIKQDIIGINEWSGYSGSFVQHPELTGLDCIRPCFWVELIRGRPKENTIWTSGSSISFCGVNSDTVGWSWPDGAELPFTIDK

SEQ ID NO: 20731 - protein, 469 aa, Artificial Sequence
  derived and/or modified protein sequence (wt) from neuraminidase__InfluenzaA__AEH59400
MNPNQKIITIGSVCMTIGMANLILQIGNIISIWISHSIQLGNQSQIETCNQSVITYENNTWVNQTYVNISNTNFAAGQSVVSVKLAGNSSLCPVSGWAIYSKDNSIRIGSKGDVFVIREPFISCSPLECRTFFLTQGALLNDKHSNGTIKDRSPYRTLMSCPIGEVPSPYNSRFESVAWSASACHDGINWLTIGISGPDNGAVAVLKYNGIITDTIKSWRNNILRTQESECACVNGSCFTVMTDGPNDGQASYKIFRIEKGKIVKSVEMNAPNYHYEECSCYPDSSEITCVCRDNWHGANRPWVSFNQNLEYQIGYICSGIFGDNPRPNDKTGSCGPVSSNGANGVKGFSFKYGNGVWIGRTKSISSRNGFEMIWDPNGWTGTDNNFSIKQDIVGINEWSGYSGSFVQHPELTGLDCIRPCFWVELIRGRPKENTIWTSGSSISFCGVNSDTVGWSWPDGAELPFTIDK

SEQ ID NO: 20732 - protein, 469 aa, Artificial Sequence
  derived and/or modified protein sequence (wt) from neuraminidase__InfluenzaA__AEH59402
MNPNQKIITIGSVCMTIGMANLILQIGNIISIWISHSIQLGNQNQIETCNQSVITYENNTWVNQTYVNISNTNFAAGQSVVSVKLAGNSSLCPVSGWAIYSKDNSIRIGSKGDVFVIREPFISCSPLECRTFFLTQGALLNDKHSNGTIKDRSPYRTLMSCPIGEVPSPYNSRFESVAWSASACHDGINWLTIGISGPDNGAVAVLKYNGIITDTIKSWRNNILRTQESECACVNGSCFTVMTDGPNDGQASYKIFRIEKGKIVKSVEMNAPNYHYEECSCYPDSSEITCVCRDNWHGANRPWVSFNQNLEYQIGYICSGIFGDNPRPNDKTGSCGPVSSNGANGVKGFSFKYGNGVWIGRTKSISSRNGFEMIWDPNGWTETDNNFSIKQDIVGINEWSGYSGSFVQHPELTGLDCIRPCFWVELIRGRPKENTIWTSGSSISFCGVNSDTVGWSWPDGAELPFTIDK

SEQ ID NO: 20733 - protein, 469 aa, Artificial Sequence
  derived and/or modified protein sequence (wt) from neuraminidase__InfluenzaA__AEH59404
MNPNQKIITIGSACMTIGMANLILQIGNIISIWISHSIQLGNQSQIETCNQSVITYENNTWVNQTYVNISNTNFAAGQPVVSVKLAGNSSLCPVSGWAIYSKDNSIRIGSKGDVFVIREPFISCSPLECRTFFLTQGALLNDKHSNGTIKDRSPYRTLMSCPIGEVPSPYNSRFESVAWSASACHDGINWLTIGISGPDNGAVAVLKYNGIITDTIKSWRNNILRTQESECACVNGSCFTIMTDGPSDGQASYKIFRIEKGKIVKSVEMNAPNYHYEECSCYPDSSEITCVCRDNWHGSNRPWVSFNQNLEYQIGYICSGIFGDNPRPNDKTGSCGPVSSNGANGVKGFSFKYGNGVWIGRTKSISSRKGFEMIWDPNGWTGTDNNFSIKQDIVGINEWSGYSGSFVQHPELTGLDCIRPCFWVELIRGRPKENTIWTSGSSISFCGVNSDTVGWSWPDGAELPFTIDK

SEQ ID NO: 20734 - protein, 469 aa, Artificial Sequence
  derived and/or modified protein sequence (wt) from neuraminidase__InfluenzaA__AEH59406
MNPNQKIITIGSVCMTIGMANLILQIGNIISIWISHSIQLGNQSQIETCNQSVITYENNTWVNQTYVNISNTNFAAGQSVVSVKLAGNSSLCPVSGWAIYSKDNSIRIGSKGDVFVIREPFISCSPLECRTFFLTQGALLNDKHSNGTIKDRSPYRTLMSCPIGEVPSPYNSRFESVAWSASACHDGINWLTIGISGPDNGAVAVLKYNGIITDTIKSWRNNILRTQESECACVNGSCFTIMTDGPSDGQASYKIFRIEKGKIVKSVEMNAPTYHYEECSCYPDSSEITCVCRDNWHGSNRPWVSFNQNLEYQIGYICSGIFGDNPRPNDKTGSCGPVSFNGANGVKGFSFKYGNGVWIGRTKSISSRKGFEMIWDPNGWTGTDNNFSIKQDIVGIDEWSGYSGSFVQHPELTGLDCIRPCFWVELIRGRPKENTIWTSGSSISFCGVNSDTVGWSWPDGAELPFTIDK

SEQ ID NO: 20735 - protein, 469 aa, Artificial Sequence; identical to SEQ ID NO: 20257
  derived and/or modified protein sequence (wt) from neuraminidase__InfluenzaA__AEH59408

SEQ ID NO: 20736 - protein, 469 aa, Artificial Sequence
  derived and/or modified protein sequence (wt) from neuraminidase__InfluenzaA__AEH59412
MNPNQKIITIGSVCMTIGMANLILQIGNIISIWISHSIQLGNQSQIETCNQSVITYENNTWVNQTYVNISNTNFAAGQSVVSVKLAGNSSLCPVSGWAIYSKDNSIRIGSKGDVFVIREPFISCSPLECRTFFLTQGALLNDKHSNGTIKDRSPYRTLMSCPIGEVPSPYNSRFESVAWSASACHDGINWLTIGISGPDNGAVAVLKYNGIITDTIRSWRNNILRTQESECACVNGSCFTIMTDGPSDGQASYKIFRIEKGKIIKSVEMNAPNYHYEECSCYPDSSEITCVCRDNWHGSNRPWVSFNQNLEYQIGYICSGIFGDNPRPNDKTGSCGPVLSNGANGVKGFSFKYGNGVWIGRTKSISSRKGFEMIWDPNGWTGTDNNFSIKQDIVGINEWSGYSGSFVQHPELTGLDCIRPCFWVELIRGRPKENTIWTSGSSISFCGVNSDTVGWSWPDGAELPFTIDK

SEQ ID NO: 20737 - protein, 469 aa, Artificial Sequence; identical to SEQ ID NO: 20709
  derived and/or modified protein sequence (wt) from neuraminidase__InfluenzaA__AEH59416

SEQ ID NO: 20738 - protein, 469 aa, Artificial Sequence; identical to SEQ ID NO: 16738
  derived and/or modified protein sequence (wt) from neuraminidase__InfluenzaA__AEH59584

SEQ ID NO: 20739 - protein, 469 aa, Artificial Sequence; identical to SEQ ID NO: 16738
  derived and/or modified protein sequence (wt) from neuraminidase__InfluenzaA__AEH59586

SEQ ID NO: 20740 - protein, 469 aa, Artificial Sequence; identical to SEQ ID NO: 16738
  derived and/or modified protein sequence (wt) from neuraminidase__InfluenzaA__AEH59588

SEQ ID NO: 20741 - protein, 469 aa, Artificial Sequence; identical to SEQ ID NO: 16738
  derived and/or modified protein sequence (wt) from neuraminidase__InfluenzaA__AEH59592

SEQ ID NO: 20742 - protein, 469 aa, Artificial Sequence; identical to SEQ ID NO: 16738
  derived and/or modified protein sequence (wt) from neuraminidase__InfluenzaA__AEH59594

SEQ ID NO: 20743 - protein, 469 aa, Artificial Sequence; identical to SEQ ID NO: 16738
  derived and/or modified protein sequence (wt) from neuraminidase__InfluenzaA__AEH59596

SEQ ID NO: 20744 - protein, 469 aa, Artificial Sequence; identical to SEQ ID NO: 16738
  derived and/or modified protein sequence (wt) from neuraminidase__InfluenzaA__AEH59598

SEQ ID NO: 20745 - protein, 469 aa, Artificial Sequence; identical to SEQ ID NO: 16738
  derived and/or modified protein sequence (wt) from neuraminidase__InfluenzaA__AEH59600

SEQ ID NO: 20746 - protein, 469 aa, Artificial Sequence
  derived and/or modified protein sequence (wt) from neuraminidase__InfluenzaA__AEH59602
MNPNQKIITIGSVCMTIGMANLILQIGNIISIWISHSIQLGSQNQIETCNQSVITYENNTWVNQTYVNISNTNFAAGQSVVSVKLAGNSSLCPVSGWAIYSKDNSIRIGSKGDVFVIREPFISCSPLECRTFFLTQGALLNDKHSNGTIKDRSPYRTLMSCPIGEVPSPYNSRFESVAWSASACHDGINWLTIGISGPDNGAVAVLKYNGIITDTIKSWRNNILRTQESECACVNGSCFTVMTDGPSDGQASYKIFRIEKGKIVKSVEMNAPNYHYEECSCYPDSSEITCVCRDNWHGSNRPWVSFNQNLEYQIGYICSGIFGDNPRPNDKTGSCGPVSSNGANGVKGFSFKYGNGVWIGRTKSISSRNGFEMIWDPNGWTGTDNNFSIKQDIVGINEWSGYSGSFVQHPELTGLDCIRPCFWVELIRGRPKENTIWTSGSSISFCGVNSDTVGWSWPDGAELPFTIDK

SEQ ID NO: 20747 - protein, 469 aa, Artificial Sequence; identical to SEQ ID NO: 16738
  derived and/or modified protein sequence (wt) from neuraminidase__InfluenzaA__AEH59606

SEQ ID NO: 20748 - protein, 469 aa, Artificial Sequence; identical to SEQ ID NO: 16738
  derived and/or modified protein sequence (wt) from neuraminidase__InfluenzaA__AEH59616

SEQ ID NO: 20749 - protein, 469 aa, Artificial Sequence; identical to SEQ ID NO: 16738
  derived and/or modified protein sequence (wt) from neuraminidase__InfluenzaA__AEH59626

SEQ ID NO: 20750 - protein, 470 aa, Artificial Sequence; identical to SEQ ID NO: 17461
  derived and/or modified protein sequence (wt) from neuraminidase__InfluenzaA__AEH77262

SEQ ID NO: 20751 - protein, 469 aa, Artificial Sequence
  derived and/or modified protein sequence (wt) from neuraminidase__InfluenzaA__AEH77273
MNPNQKIITIGSVCMTIGMANLILQIGNITSIWISHSIQLGNQNQIETCNQSVITYENNTWVNQTYVNISNTNFAAGQSVVSVKLAGNSSLCPVSGWAIYSKDNSIRIGSKGDVFVIREPFISCSPLECRTFFLTQGALLNDKHSNGTIKDRSPYRTLMSCPIGEVPSPYNSRFESVAWSASACHDGINWLTIGISGPDNGAVAVLKYNGIITDTIKSWRNNILRTQESECACVNGSCFTVMTDGPSDGQASYKIFRIEKGKIVKSVEMNAPNYHYEECSCYPDSSEITCVCRDNWHGSNRPWVSFNQNLEYQIGYICSGIFGDNPRPNDKTGSCGPVSSNGANGVKGFSFKYGNGVWIGRTKSISSRNGFEMIWDPNGWTGTDNNFSIKQDIVGINEWSGYSGSFVQHPELTGLDCIRPCFWVELIRGRPKENTIWTSGSSISFCGVNSDTVGWSWPDGAELPFTIDK

SEQ ID NO: 20752 - protein, 469 aa, Artificial Sequence
  derived and/or modified protein sequence (wt) from neuraminidase__InfluenzaA__AEH77282
MNPNQKIITIGSVSLTIATICFLMQIAILVTTVTLHFKQHECNSPPNNQVMLCEPTIIERNITEIVYLTNTTIEKEICPKLAEYRNWSKPQCNITGFAPFSKDNSIRLSAGGDIWVTREPYVSCDPDKCYQFALGQGTTLNNGHSNDTVHDRTPYRTLLMNELGVPFHLGTRQVCIAWSSSSCHDGKAWLHVCVTGDDKNATASFIYNGRLVDSIGSWSKKILRTQESECVCINGTCTVVMTDGSASGKADTKILFVEEGKIVHISTLSGSAQHVEECSCYPRYPGVRCVCRDNWKGSNRPIVDINVKDYSIVSSYVCSGLVGDTPRKNDSSSSSHCLDPNNEEGGHGVKGWAFDDGNDVWMGRTISEKLRSGYETFKVIEGWSKPNSKLQINRQVIVERGNRSGYSGIFSVEGKSCINRCFYVELIRGRKEETEVWWTSNSIVVFCGTSGTYGTGSWPDGADINLMPI

SEQ ID NO: 20753 - protein, 469 aa, Artificial Sequence; identical to SEQ ID NO: 16738
  derived and/or modified protein sequence (wt) from neuraminidase__InfluenzaA__AEI29218

SEQ ID NO: 20754 - protein, 469 aa, Artificial Sequence; identical to SEQ ID NO: 18105
  derived and/or modified protein sequence (wt) from neuraminidase__InfluenzaA__AEI29228

SEQ ID NO: 20755 - protein, 469 aa, Artificial Sequence; identical to SEQ ID NO: 14137
  derived and/or modified protein sequence (wt) from neuraminidase__InfluenzaA__AEI54350

SEQ ID NO: 20756 - protein, 469 aa, Artificial Sequence; identical to SEQ ID NO: 14150
  derived and/or modified protein sequence (wt) from neuraminidase__InfluenzaA__AEI54361

SEQ ID NO: 20757 - protein, 469 aa, Artificial Sequence; identical to SEQ ID NO: 14714
  derived and/or modified protein sequence (wt) from neuraminidase__InfluenzaA__AEI54372

SEQ ID NO: 20758 - protein, 469 aa, Artificial Sequence; identical to SEQ ID NO: 14591
  derived and/or modified protein sequence (wt) from neuraminidase__InfluenzaA__AEI54383

SEQ ID NO: 20759 - protein, 469 aa, Artificial Sequence; identical to SEQ ID NO: 14714
  derived and/or modified protein sequence (wt) from neuraminidase__InfluenzaA__AEI54394

SEQ ID NO: 20760 - protein, 469 aa, Artificial Sequence; identical to SEQ ID NO: 15884
  derived and/or modified protein sequence (wt) from neuraminidase__InfluenzaA__AEI54416

SEQ ID NO: 20761 - protein, 469 aa, Artificial Sequence; identical to SEQ ID NO: 20704
  derived and/or modified protein sequence (wt) from neuraminidase__InfluenzaA__AEI54427

SEQ ID NO: 20762 - protein, 469 aa, Artificial Sequence; identical to SEQ ID NO: 19518
  derived and/or modified protein sequence (wt) from neuraminidase__InfluenzaA__AEI54438

SEQ ID NO: 20763 - protein, 469 aa, Artificial Sequence; identical to SEQ ID NO: 19518
  derived and/or modified protein sequence (wt) from neuraminidase__InfluenzaA__AEI54449

SEQ ID NO: 20764 - protein, 469 aa, Artificial Sequence; identical to SEQ ID NO: 19518
  derived and/or modified protein sequence (wt) from neuraminidase__InfluenzaA__AEI54460

SEQ ID NO: 20765 - protein, 469 aa, Artificial Sequence
  derived and/or modified protein sequence (wt) from neuraminidase__InfluenzaA__AEI54471
MNPNQKIITIGSVSLTISTICFFMQIAVLITTVTLHFKQYKFNSPPNNQVMLCEPTIIERNITEIVYLTNTTIEKEICPKLAEYRNWSKPQCDITGFAPFSKDNSIRLSAGGDIWVTREPYVSCDPDKCYQFALGQGTTLNNVHSNNTVRDRTPYRTLLMNELGVPFHLGTKQVCIAWSSSSCHDGKAWLHVCITGDDKNATASFIYNGRLVDSVVSWSKEILRTQESECVCINGTCTVVMTDGSASGKADTKILFIEEGKIVHTSTLSGSAQHVEECSCYPRYPGVRCVCRDNWKGSNRPIVDINIKDHSIVSSYVCSGLVGDTPRKNDSSSSSHCLDPNNEEGGHGVKGWAFDDGNDVWMGRTINETSRLGYETFKVIEGWSNPKSKLQINRQVIVDRGNRSGYSGIFSVEGKSCINRCFYVELIRGRKEETEVLWTSNSIVVFCGTSGTYGTGSWPDGADLNLMPI

SEQ ID NO: 20766 - protein, 469 aa, Artificial Sequence; identical to SEQ ID NO: 19410
  derived and/or modified protein sequence (wt) from neuraminidase__InfluenzaA__AEI54482

SEQ ID NO: 20767 - protein, 469 aa, Artificial Sequence
  derived and/or modified protein sequence (wt) from neuraminidase__InfluenzaA__AEI54493
MNPNQKIITIGSVSLTISTICFFMQIAILITTVTLHFKQYEFNSPPNNQVMLCEPTIIERNITEIVYLTNTTIEKEICPKLAEYRNWSKPQCDITGFAPFSKDNSIRLSAGGDIWVTREPYVSCDPDKCYQFALGQGTTLNNVHSNNTVRDRTPYRTLLMNELGVPFHLGTKQVCIAWSSSSCHDGKAWLHVCITGDDKNATASFIYNGRLVDSVVSWSKEILRTQESECVCINGTCTVVMTDGSASGKADTKILFIEEGKIVHTSTLSGSAQHVEECSCYPRYPGVRCVCRDNWKGSNRPIVDINIKDHSIVSSYVCSGLVGDTPRKNDSSSSSHCLDPNNEEGGHGVKGWAFDDGNDVWMGRTINETSRLGYETFKVIEGWSNPKSKLQINRQVIVDRGNRSGYSGIFSVEGKSCINRCFYVELIRGRKEETEVLWTSNSIVVFCGTSGTYGTGSWPDGADLNLMSI

SEQ ID NO: 20768 - protein, 469 aa, Artificial Sequence; identical to SEQ ID NO: 19518
  derived and/or modified protein sequence (wt) from neuraminidase__InfluenzaA__AEI54504

SEQ ID NO: 20769 - protein, 469 aa, Artificial Sequence; identical to SEQ ID NO: 19038
  derived and/or modified protein sequence (wt) from neuraminidase__InfluenzaA__AEI59982

SEQ ID NO: 20770 - protein, 470 aa, Artificial Sequence; identical to SEQ ID NO: 19936
  derived and/or modified protein sequence (wt) from neuraminidase__InfluenzaA__AEI59993

SEQ ID NO: 20771 - protein, 470 aa, Artificial Sequence; identical to SEQ ID NO: 19932
  derived and/or modified protein sequence (wt) from neuraminidase__InfluenzaA__AEI60004

SEQ ID NO: 20772 - protein, 469 aa, Artificial Sequence
  derived and/or modified protein sequence (wt) from neuraminidase__InfluenzaA__AEI60015
MNPNQKIITIGSVSLTISTICFFMQIAILITTVTLHFKQYEFNSPPNNQVMLCEPTIIERNITEIVYLTNTTIEKEICPKLAEYRNWSKPQCDITGFAPFSKDNSIRLSAGGDIWVTREPYVSCDPDKCYQFALGQGTTLNNVHSNNTVRDRTPYRTLLMNELGVPFHLGTKQVCIAWSSSSCHDGKAWLHVCITGDDKNATASFIYNGRLVDSVVSWSKEILRTQESECVCINGTCTVVMTDGSASGKADTKILFIEEGKIVHTSTLSGSAQHVEECSCYPRYPGVRCVCRDNWKGSNRPIVDINIKDHSIVSSYVCSGLVGDTPRKNDSSSSGHCLDPNNEEGGNGVKGWAFDDGNDVWMGRTISEKSRLGYETFKVIEGWSNHKSKLQINRQVIVDRGNRSGYSGIFSVEGKSCINRCFYVELIRGRKEETEVLWTSNSIVVFCGTSGTYGTGSWPDGADLNLMPI

SEQ ID NO: 20773 - protein, 469 aa, Artificial Sequence; identical to SEQ ID NO: 18484
  derived and/or modified protein sequence (wt) from neuraminidase__InfluenzaA__AEI60026

SEQ ID NO: 20774 - protein, 469 aa, Artificial Sequence
  derived and/or modified protein sequence (wt) from neuraminidase__InfluenzaA__AEI60037
MNPNQKIITIGSVSLTISTICFFMQIAILITTVTLHFKQYEFNSPPNNQVMLCEPTIIERNITEIVYLTNTTIEKEICPKLAEYRNWSKPQCDITGFAPFSKDNSIRLSAGGDIWVTREPYVSCDPDKCYQFALGQGTTLNNVHSNNTVRDRTPYRTLLMNELGVPFHLGTKQVCIAWSSSSCHDGKAWLHVCITGDDKNATASFIYNGRLVDSVVSWSKEILRTQESECVCINGTCTVVMTDGSASGKADTKILFIEEGKIVHTSTLSGSAQHVEECSCYPRYPGVRCVCRDNWKGSNRPIVDINIKDHSIVSSYVCSGLVGDTPRRNDSSSSSHCLDPNNEEGGHGVKGWAFDDGNDVWMGRTISEKSRLGYETFKVIEGWSNHKSKLQINRQVIVDRGNRSGYSGIFSVEGKSCINRCFYVELIRGRKEETEVLWTSNSIVVFCGTSGTYGTGSWPDGADLNLMPI

SEQ ID NO: 20775 - protein, 469 aa, Artificial Sequence
  derived and/or modified protein sequence (wt) from neuraminidase__InfluenzaA__AEI60048
MNPNQKIITIGSVSLTISTICFFMQIAILITTVTLHFKQYEFNSPPNNQVMLCAPTIIERNITEIVYLTNTTIEKEICPKLAEYRNWSKPQCDITGFAPFSKDNSIRLSAGGDIWVTREPYVSCDPDKCYQFALGQGTTLNNVHSNNTVRDRTPYRTLLMNELGVPFHLGTKQVCIAWSSSSCHDGKAWLHVCITGDDKNATASFIYNGRLVDSVVSWSKEILRTQESECVCINGTCTVVMTDGSASGKADTKILFIEEGKIVHTSTLSGSAQHVEECSCYPRYPGVRCVCRDNWKGSNRPIVDINIKDHSIVSSYVCSGLVGDTPRKNDSSSSSHCLDPNNEEGGHGVKGWAFDDGNDVWMGRTISEKSRLGYETFKVIEGWSNPKSKLQINRQVIVDRGNRSGYSGIFSVEGKSCINRCFYVELIRGRKEETEVLWTSNSIVVFCGTSGTYGTGSWPDGADINLMPI

SEQ ID NO: 20776 - protein, 469 aa, Artificial Sequence
  derived and/or modified protein sequence (wt) from neuraminidase__InfluenzaA__AEI60089
MNPNQKIITIGSVCMTIGMANLILQIGNIISIWISHSIQLGNQNQIETCNQSVITYENNTWVNQTYVNISNTNFAAGQSVVSVKLAGNSSLCPVSGWAIYSKDNSIRIGSKGDVFVIREPFISCSPLECRTFFLTQGALLNDKHSNGTIKDRSPYRTLMSCPIGEVPSPYNSRFESVAWSASACHDGINWLTIGISGPDNGAVAVLKYNGIITDTIKSWRNNILRTQESECACVNGSCFTIMTDGPSDGQASYKIFRIEKGKIVKSVEMNAPNYYYEECSCYPDSSEITCVCRDNWHGSNRPWVSFNQNLEYQIGYICSGIFGDNPRPNDKTGSCGPVSSNGANGVKGFSFKYGNGVWIGRTKSISSRKGFEMIWDPNGWTGTDNNFSIKQDIVGINEWSGYSGSFVQHPELTGLDCIRPCFWVELIRGRPKENTIWTSGSSISFCGVNSDTVGWSWPDGAELPFTIDK

SEQ ID NO: 20777 - protein, 469 aa, Artificial Sequence; identical to SEQ ID NO: 20709
  derived and/or modified protein sequence (wt) from neuraminidase__InfluenzaA__AEI60099

SEQ ID NO: 20778 - protein, 469 aa, Artificial Sequence
  derived and/or modified protein sequence (wt) from neuraminidase__InfluenzaA__AEI60111
MNPNQKIITIGSISLTIATICFLMQIAILVTTVTLHFKQYKCNSPPNNRVMLCEPTIIERNITEIVYLTNTTIEKEICPKLAEYRNWSKPQCNIKGFAPFSKDNSIRLSAGGDIWVTREPYVSCDPDKCYQFALGQGTTLNNGHSNDTVHDRTPYRTLLMNELGVPFHLGTRQVCIAWSSSSCHDGKAWLHVCITGDDENATASFIYNGRLVDSIGSWSKKILRTQESECVCINGTCTVVMTDGSASGKADTKILFIEEGKIVHISTLSGSAQHVEECSCYPRYPGVRCVCRDNWKGSNRPIVDINVRDYSIVSSYVCSGLVGDTPRKNDSFSSSHCLDPNNEEGGHGVKGWAFDDGNDVWMGRTISEKLRSGYETFKVIEGWSKPNSKLQVNRQVIVERGNRSGYSGIFSVEGKSCINRCFYVELIRGRKEETKVWWTSNSIVVFCGTSGTYGTGSWPDGADINIMPI

SEQ ID NO: 20779 - protein, 469 aa, Artificial Sequence; identical to SEQ ID NO: 16738
  derived and/or modified protein sequence (wt) from neuraminidase__InfluenzaA__AEI73669

SEQ ID NO: 20780 - protein, 469 aa, Artificial Sequence
  derived and/or modified protein sequence (wt) from neuraminidase__InfluenzaA__AEI86727
MNPNQKIITIGSVCITIGMANLILQIGNIISIWISHSIQLGNQNQIETCNQSVITYENNTWVNQTYVNISNTNFAAGQSVVSVKLAGNSSLCPVSGWAIYSKDNSIRIGSKGDVFVIREPFISCSPLECRTFFLTQGALLNDKHSNGTIKDRSPYRTLMSCPIGEVPSPYNSKFESVAWSASACHDGISWLTIGISGPDNGAVAVLKYNGIITDTIKSWRNNILRTQESECACVNGSCFTVMTDGPSDGQASYKIFRIEKGKIVKSVEMNAPNYHYEECSCYPDSSEITCVCRDNWHGSNRPWVSFNQNLEYQIGYICSGIFGDNPRPNDKTGSCGPVSSNGANGVKGFSFKYGNGVWIGRTKSISSRNGFEMIWDPNGWTGTDNNFSIKQDIVGINEWSGYSGSFVQHPELTGLDCIRPCFWVELIRGRPKENTIWTSGSSISFCGVNSDTVGWSWPDGAELPFTIDK

SEQ ID NO: 20781 - protein, 469 aa, Artificial Sequence
  derived and/or modified protein sequence (wt) from neuraminidase__InfluenzaA__AEI86737
MNPNQKIITIGSVCMTIGMANLILQIGNIISIWISHSIQLGNQNQIETCNQSVITYENKTWVNQTYVNISNTNFAAGQSVVSVKLAGNSSLCPVSGWAIYSKDNSIRIGSKGDVFVIREPFISCSPLECRTFFLTQGALLNDKHSNGTIKDRSPYRTLMSCPIGEVPSPYNSRFESVAWSASACHDGINWLTIGISGPDNGAVAVLKYNGIITDTIKSWRNNILRTQESECACVNGSCFTVMTDGPSDGQASYKIFRIEKGKVVKSVEMNAPNYHYEECSCYPDSSEITCVCRDNWHGSNRPWVSFNQNLEYQIGYICSGIFGDNPRPNDKTGSCGPVSSNGANGVKGFSFKYGNGVWIGRTKSISSRNGFEMIWDPNGWTGTDNNFSIKQDIVGINEWSGYSGSFVQHPELTGLDCIRPCFWVELIRGRPKENTIWTSGSSISFCGVNSDTVGWSWPDGAELPFTIDK

SEQ ID NO: 20782 - protein, 469 aa, Artificial Sequence
  derived and/or modified protein sequence (wt) from neuraminidase__InfluenzaA__AEI86757
MNPNQKIITIGSVCITIGMANLILQIGNIISIWISHSIQLGNQNQIETCNQSVITYENNTWVNQTYVNISNTNFAAGQSVVSVKLAGNSSLCPVSGWAIYSKDNSIRIGSKGDVFVIREPFISCSPLECRTFFLTQGALLNDKHSNGTIKDRSPYRTLMSCPIGEVPSPYNSRFESVAWSASACHDGISWLTIGISGPDNGAVAVLKYNGIITDTIKSWRNNILRTQESECACVNGSCFTVMTDGPSDGQASYKIFRIEKGKIVKSVEMNAPNYHYEECSCYPDSSEITCVCRDNWHGSNRPWVSFNQNLEYQIGYICSGIFGDNPRPNDKTGSCGPVSSNGANGVKGFSFKYGNGVWIGRTKSIISRNGFEMIWDPNGWTGTDNNFSIKQDIVGINEWSGYSGSFVQHPELTGLDCIRPCFWVELIRGRPKENTIWTSGSSISFCGVNSDTVGWSWPDGAELPFTIDK

SEQ ID NO: 20783 - protein, 469 aa, Artificial Sequence
  derived and/or modified protein sequence (wt) from neuraminidase__InfluenzaA__AEI86767
MNPNQKIITIGSVCITIGMANLILQIGNIISIWISHSIQLGNQNQIETCNQSVITYENNTWVNQTYVNISNTNFAAGQSVVSVKLAGNSSLCPVSGWAIYSKDNSIRIGSKGDVFVIREPFISCSPLECRTFFLTQGALLNDKHSNGTIKDRSPYRTLMSCPIGEVPSPYNSRFESVAWSASACHDGISWLTIGISGPDNGAVAVLKYNGIITDTIKSWRNNILRTQESECACVNGSCFTVMTDGPSDGQASYKIFRIEKGKIVKSVEMNAPNYHYEECSCYPDSSEITCVCRDNWHGSNRPWVSFNHNLEYQIGYICSGIFGDNPRPNDKTGSCGPVSSNGANGVKGFSFKYGNGVWIGRTKSISSRNGFEMIWDPNGWTGTDNNFSIKQDIVGINEWSGYSGSFVQHPELTGLDCIRPCFWVELIRGRPKENTIWTSGSSISFCGVNSDTVGWSWPDGAELPFTIDK

SEQ ID NO: 20784 - protein, 469 aa, Artificial Sequence; identical to SEQ ID NO: 20783
  derived and/or modified protein sequence (wt) from neuraminidase__InfluenzaA__AEI86777

SEQ ID NO: 20785 - protein, 469 aa, Artificial Sequence
  derived and/or modified protein sequence (wt) from neuraminidase__InfluenzaA__AEI86787
MNPNQKIITIGSVCMTIGMANLMLQIGNIISIWISHSIQLGNQNQIETCNQSVITYENNTWVNQTYVNISNTNFAAGQSVVSVKLAGNSSLCPVSGWAIYSKDNSIRIGSKGDVFVIREPFISCSPLECRTFFLTQGALLNDKHSNGTIKDRSPYRTLMSCPIGEVPSPYNSRFESVAWSASACHDGINWLTIGISGPDNGAVAVLKYNGIITDTIKSWRNNILRTQESECACVNGSCFTVMTDGPSDGQASYKIFRIEKGKIVKSVEMNAPNYHYEECSCYPDSSEITCVCRDNWHGSNRPWVSFNQNLEYQIGYICSGIFGDNPRPNDKTGSCGPVSSNGANGVKGFSFKYGNGVWIGRTKSISSRNGFEMIWDPNGWTGTDNNFSIKQDIVGINEWSGYSGSFVQHPELTGLDCIRPCFWVELIRGRPKENTIWTSGSSISFCGVNSDTVGWSWPDGAELPFTIDK

SEQ ID NO: 20786 - protein, 469 aa, Artificial Sequence
  derived and/or modified protein sequence (wt) from neuraminidase__InfluenzaA__AEI86797
MNPNQKIITIGSVCITIGMANLILQIGNIISIWISHSIQLGNQNQIETCNQSVITYENNTWVNQTYVNISNTNFAAGQSVVSVKLAGNSSLCPVSGWAIYSKDNSIRIGSKGDVFVIREPFISCSPLECRTFFLTQGALLNDKHSNGTIKDRSPYRTLMSCPIGEVPSPYNSRFESVAWSASACHDGISWLTIGISGPDNGAVAVLKYNGIITDTIKSWRNNILRTQESECACVNGSCFTVMTDGPSDGQASYKIFRIEKGKIVKSVEMNAPNYHYEECSCYPDSSEITCVCRDNWHGSNRPWVSFNQNLEYQIGYICSGIFGDNPRPNDKTGSCGPVSSNGANGVKGFSFKYGNGVWIGRTKSISSRNGFEMIWDPNGWTGTDNNFSIKQDIVGINEWSGYSGSFVQHPELTGLDCIRPCFWVELIRGRPKENTIWTSGSSISFCGVNSDTVGWSWPDGAELPFTIDK

SEQ ID NO: 20787 - protein, 469 aa, Artificial Sequence
  derived and/or modified protein sequence (wt) from neuraminidase__InfluenzaA__AEI86807
MNPNQKIITIGSVCMTIGMANLILQIGNIISIWISHSIQLGNQNQIETCNQSVITYENNTWVNQTYVNISNTNFAAGQSVVSVKLAGNSSLCPVSGWAIYSKDNSIRIGSKGDVFVIREPFISCSPLECRTFFLTQGALLNDKHSNGTIKDRSPYRTLMSCPIGEVPSPYNSRFESVAWSASACHDGINWLTIGISGPDNGAVAVLKYNGIITDTIKSWRNNILRTQESECACVNGSCFTVMTDGPSDGQASYKIFRIEKGKIVKSVEMNAPNYHYEECSCYPDSSKITCVCRDNWHGSNRPWVSFNQNLEYQIGYICSGIFGDNPRPNDKTGSCGPVSSNGANGVKGFSFKYGNGVWIGRTKSISSRNGFEMIWDPNGWTGTDNNFSIKQDIVGINEWSGYSGSFVQHPELTGLDCIRPCFWVELIRGRPKENTIWTSGSSISFCGVNSDTVGWSWPDGAELPFIIDK

SEQ ID NO: 20788 - protein, 469 aa, Artificial Sequence; identical to SEQ ID NO: 20783
  derived and/or modified protein sequence (wt) from neuraminidase__InfluenzaA__AEI86817

SEQ ID NO: 20789 - protein, 469 aa, Artificial Sequence
  derived and/or modified protein sequence (wt) from neuraminidase__InfluenzaA__AEI86827
MNPNQKIITIGSVCITIGMANLILQIGNIISIWISHSIQLGNQNQIETCNQSVITYENNTWVNQTYVNISNTNFAAGQSVVSVKLAGNSSLCPVSGWAIYSKDNSIRIGSKGDVFVIREPFISCSPLECRTFFLTQGALLNDKHSNGTIKDRSPYRTLMSCPIGEVPSPYNSRFESVAWSASACHDGISWLTIGISGPDNGAVAVLKYNGIITDTIKSWRNNILRTQESECACVNGSCFTVMTDGPSDGQASYKIFRIEKGKIVKSVEMNAPNYHYEECSCYPDSSEITCVCRDNWHGSNRPWVSFNHNLEYQIGYICSGIFGDNPRPNDKTGSCGPVSSNGANGVKGFSFKYGNGVWIGRTKSTSSRNGFEMIWDPNGWTGTDNNFSIKQDIVGINEWSGYSGSFVQHPELTGLNCIRPCFWVELIRGRPKENTIWTSGSSISFCGVNSDTVGWSWPDGAELPFTIDK

SEQ ID NO: 20790 - protein, 469 aa, Artificial Sequence; identical to SEQ ID NO: 20786
  derived and/or modified protein sequence (wt) from neuraminidase__InfluenzaA__AEI86837

SEQ ID NO: 20791 - protein, 469 aa, Artificial Sequence; identical to SEQ ID NO: 20257
  derived and/or modified protein sequence (wt) from neuraminidase__InfluenzaA__AEI86847

SEQ ID NO: 20792 - protein, 469 aa, Artificial Sequence
  derived and/or modified protein sequence (wt) from neuraminidase__InfluenzaA__AEI86867
MNPNQKIITIGSVCMTIGMANLILQIGNIISIWISHSIQLGNQNQIETCNQSVITYENNTWVNQTYVNISNTNLAAGQSVVSVKLAGNSSLCPVSGWAIYSKDNSIRIGSKGDVFVIREPFISCSPLECRTFFLTQGALLNDKHSNGTIKDRSPYRTLMSCPIGEVPSPYNSKFESVAWSASACHDGINWLTIGISGPDNGAVAVLKYNGIITDTIKSWRNNILRTQESECACVNGSCFTIMTDGPSDGQASYKIFRIEKGKIVKSVEMNAPNYHYEECSCYPDSSEITCVCRDNWHGSNRPWVSFNQNLEYQIGYICSGIFGDNPRPNDKTGSCGPVSSNGANGVKGFSFKYGNGVWIGRTKSISSRKGFEMIWDPNGWTGTDNNFSIKQDIVGINEWSGYSGSFVQHPELTGLDCIRPCFWVELIRGRPKENTIWTSGSSISFCGVNSDTVGWSWPDGAELPFTIDK

SEQ ID NO: 20793 - protein, 469 aa, Artificial Sequence; identical to SEQ ID NO: 20786
  derived and/or modified protein sequence (wt) from neuraminidase__InfluenzaA__AEI86887

SEQ ID NO: 20794 - protein, 469 aa, Artificial Sequence; identical to SEQ ID NO: 20786
  derived and/or modified protein sequence (wt) from neuraminidase__InfluenzaA__AEI86897

SEQ ID NO: 20795 - protein, 469 aa, Artificial Sequence
  derived and/or modified protein sequence (wt) from neuraminidase__InfluenzaA__AEI86907
MNPNQKIITIGSVCMTIGMANLILQIGNIISIWISHSIQLGNQNQIETCNQSVITYENNTWVNQTYVNISNTNFAAGQSVVSVKLAGNSSLCPVSGWAIYSKDNSIRIGSKGDVFVIREPFISCSPLECRTFFLTQGALLNDIHSNGTIKDRSPYRTLMSCPIGEVPSPYNSRFESVAWSASACHDGINWLTIGISGPDNGAVAVLKYNGIITDTIKSWRNNILRTQESECACVNGSCFTIMTDGPSDGQASYKIFRIEKGKIVKSVEMNAPNYHYEECSCYPDSSEITCVCRDNWHGSNRPWVSFNQNLEYQIGYICSGIFGDNPRPNDKTGSCGPVSSNGANGVKGFSFKYGNGVWIGRTKSISSRKGFEMIWDPNGWTGTDNNFSIKQDIVGINEWSGYSGSFVQHPELTGLDCIRPCFWVELIRGRPKENTIWTSGSSISFCGVNSDTVGWSWPDGAELPFTIDK

SEQ ID NO: 20796 - protein, 469 aa, Artificial Sequence
  derived and/or modified protein sequence (wt) from neuraminidase__InfluenzaA__AEI86917
MNPNQKIITIGSICMTIGMANLILQIGNIISIWISHSIQLGNQNQIETCNQSVITYENNTWVNQTYVNISNTNFAAGQSVVSVKLAGNSSLCPVSGWAIYSKDNSIRIGSKGDVFVIREPFISCSPLECRTFFLTQGALLNDKHSNGTIKDRSPYRTLMSCPIGEVPSPYNSRFESVAWSASACHDGINWLTIGISGPDNGAVAVLKYNGIITDTIKSWRNNILRTQESECACVNGSCFTIMTDGPSDGQASYKIFRIEKGKIVKSVEMNAPNYHYEECSCYPDSSEITCVCRDNWHGSNRPWVSFNQNLEYQIGYICSGIFGDNPRPNDKTGSCGPVSSNGANGVKGFSFKYGNGVWIGRTKSISSRKGFEMIWDPNGWTGTDNNFSIKQDIVGINEWSGYSGSFVQHPELTGLDCIRPCFWVELIRGRPKENTIWTSGSSISFCGVNSDTVGWSWPDGAELPFTIDK

SEQ ID NO: 20797 - protein, 469 aa, Artificial Sequence; identical to SEQ ID NO: 20709
  derived and/or modified protein sequence (wt) from neuraminidase__InfluenzaA__AEI86927

SEQ ID NO: 20798 - protein, 469 aa, Artificial Sequence; identical to SEQ ID NO: 20783
  derived and/or modified protein sequence (wt) from neuraminidase__InfluenzaA__AEI86937

SEQ ID NO: 20799 - protein, 469 aa, Artificial Sequence
  derived and/or modified protein sequence (wt) from neuraminidase__InfluenzaA__AEI86947
MNPNQKIITIGSVCMTIGMANLILQIGNIISIWISHSIQLGNKNQIETCNQSVITYENNTWVNQTYVNISNTNFAAGQSVVSVKLAGNSSLCPVSGWAIYSKDNSIRIGSKGDVFVIREPFISCSPLECRTFFLTQGALLNDKHSNGTIKDRSPYRTLMSCPIGEVPSPYNSRFESVAWSASACHDGINWLTIGISGPDNGAVAVLKYNGIITDTIKSWRNNILRTQESECACVNGSCFTVMTDGPSDGQASYKIFRIEKGKIVKSVEMNAPNYHYEECSCYPDSSEITCVCRDNWHGSNRPWVSFNQNLEYQIGYICSGIFGDNPRPNDKTGSCGPVSSNGANGVKGFSFKYGNGVWIGRTKSISSRNGFEMIWDPNGWTGTDNNFSIKQDIVGIKEWSGYSGSFVQHPELTGLDCIRPCFWVELIRGRPKENTIWTSGSSISFCGVNSDTVGWSWPDGAELPFTIDK

SEQ ID NO: 20800 - protein, 469 aa, Artificial Sequence
  derived and/or modified protein sequence (wt) from neuraminidase__InfluenzaA__AEI86967
MNPNQKIITIGSVCMTIGMANLILQIGNIISIWISHSIQLGNQNQIETCNQSVITYENNTWVNQTYVNISNTNFAAGQSVVSVKLAGNSSLCPVSGWAIYSKDNSIRIGSKGDAFVIREPFISCSPLECRTFFLTQGALLNDKHSNGTIKDRSPYRTLMSCPIGEVPSPYNSRFESVAWSASACHDGINWLTIGISGPDNGAVAVLKYNGIITDTIKSWRNNILRTQESECACVNGSCFTIMTDGPSDGQASYKIFRIEKGKIVKSVEMNAPNYHYEECSCYPDSSEITCVCRDNWHGSNRPWVSFNQNLEYQIGYICSGIFGDNPRPNDKTGSCGPVSSNGANGVKGFSFKYGNGVWIGRTKSISSRKGFEMIWDPNGWTGTDNNFSIKQDIVGINEWSGYSGSFVQHPELTGLDCIRPCFWVELIRGRPKENTIWTSGSSISFCGVNSDTVGWSWPDGAELPFTIDK

SEQ ID NO: 20801 - protein, 469 aa, Artificial Sequence
  derived and/or modified protein sequence (wt) from neuraminidase__InfluenzaA__AEI86977
MNPNQKIITIGSVCMTIGMANLILQIGNIISIWISHSIQLGNQNQIGTCNQSVITYENNTWVNQTYVNISNTNFAAGQSVVSVKLAGNSSLCPVSGWAIYSKDNSIRIGSKGDVFVIREPFISCSPLECRTFFLTQGALLNDKHSNGTIKDRSPYRTLMSCPIGEVPSPYNSRFESVAWSASACHDGINWLTIGISGPDNGAVAVLKYNGIITDTIKSWRNNILRTQESECTCVNGSCFTVMTDGPSDGQASYKIFKIEKGKIVKSVEMNAPNYHYEECSCYPDSSEITCVCRDNWHGSNRPWVSFNQNLEYQIGYICSGIFGDNPRPNDKTGSCGPVSSNGANGVKGFSFKYGNGVWIGRTKSISSRNGFEMIWDPNGWTGTDNNFSIKQDIVGINEWSGYSGSFVQHPELTGLDCIRPCFWVELIRGRPKENTIWTSGSSISFCGVNSDTVGWSWPDGAELPFTIDK

SEQ ID NO: 20802 - protein, 469 aa, Artificial Sequence
  derived and/or modified protein sequence (wt) from neuraminidase__InfluenzaA__AEI86997
MNPNQKIITIGSVCMTIGMANLILQIGNIISIWISHSIQLGNQNQIETCNQSVITYENNTWVNQTYVNISNTNFAAGQSVVSVKLAGNSSLCPVSGWAIYSKDNSIRIGSKGDVFVIREPFISCSPLECRTFFLTQGALLNDKHSNGTIKDRSPYRTLMSCPIGEVPSPYNSRFESVAWSASACHDGINWLTIGISGPDNGAVAVLKYNGIITDTIKSWRNNILRTQESECACVNGSCFTVMTDGPSDGQASYKIFRIEKGKIVKSVEMNAPNYHYEECSCYPDSSEITCVCRDNWHGSNRPWVSFNQNLEYQIGYICSGIFGDNPRPNDKTGSCGPVSSNGANGVKGFSFKYGNGVWIGRTKSISSRNGFEMIWDPNGWTGTDNNFSIKQDIVGIKEWSGYSGSFVQHPELTGLDCIRPCFWVELIRGRPKENTIWTSGSIISFCGVNSDTVGWSWPDGAELPFTIDK

SEQ ID NO: 20803 - protein, 469 aa, Artificial Sequence
  derived and/or modified protein sequence (wt) from neuraminidase__InfluenzaA__AEI87007
MNPNQKIITIGSVCITIGMANLILQIGNIISIWISHSIQLGNQNQIETCNQSVITYENNTWVNQTYVNISNTNFAAGQSVVSVKLAGNSSLCPVSGWAIYSKDNSIRIGSKGDVFVIREPFISCSSLECRTFFLTQGALLNDKHSNGTIKDRSPYRTLMSCPIGEVPSPYNSRFESVAWSASACHDGISWLTIGISGPDNGAVAVLKYNGIITDTIKSWRNNILRTQESECACVNGSCFTVMTDGPSDGQASYKIFRIEKGKIVKSVEMNAPNYHYEECSCYPDSSEITCVCRDNWHGSNRPWVSFNQNLEYQIGYICSGIFGDNPRPNDKTGSCGPVSSNGANGVKGFSFKYGNGVWIGRTKSISSRNGFEMIWDPNGWTGTDNNFSIKQDIVGINEWSGYSGSFVQHPELTGLDCIRPCFWVELIRGRPKENTIWTSGSSISFCGVNSDTVGWSWPDGAELPFTIDK

SEQ ID NO: 20804 - protein, 469 aa, Artificial Sequence
  derived and/or modified protein sequence (wt) from neuraminidase__InfluenzaA__AEI87017
MNPNQKIITIGSVCMTIGMANLILQIGNIISIWISHSIQLGNQNQIETCNQSVITYENNTWVNQTYVNISNTNFAAGQSVVSVKLAGNSSLCPVSGWAIYSKDNSIRIGSKGDVFVIREPFISCSPLECRTFFLTQGALLNDKHSNGTIKDRSPYRTLMSCPIGEVPSPYNSRFESVAWSASACHDGINWLTIGISGPDNGAVAVLKYNGIITDTIKSWRNNILRTQESECACVNGSCFTVMTDGPSDGQASYKIFRIEKGKIVKSVEMNAPNYHYEECSCYPDSSEITCVCRDNWHGSNRPWVSFNQNLEYQIGYICSGIFGDNPRPNDKTGSCGPVSSNGANGVKGFSFKYGNGVWIGRTKSISSRNGFEMIWDPNGWTGTDNNFSIKQDIVGINEWSGYSGSFVQHPELTGLDCIRPCFWVELIRGRPKENTIWTSGSSISFCGVNGDTGGWSWPDGAELPFTIDK

SEQ ID NO: 20805 - protein, 469 aa, Artificial Sequence; identical to SEQ ID NO: 20709
  derived and/or modified protein sequence (wt) from neuraminidase__InfluenzaA__AEI87027

SEQ ID NO: 20806 - protein, 469 aa, Artificial Sequence; identical to SEQ ID NO: 20802
  derived and/or modified protein sequence (wt) from neuraminidase__InfluenzaA__AEI87037

SEQ ID NO: 20807 - protein, 469 aa, Artificial Sequence; identical to SEQ ID NO: 20786
  derived and/or modified protein sequence (wt) from neuraminidase__InfluenzaA__AEI87047

SEQ ID NO: 20808 - protein, 469 aa, Artificial Sequence
  derived and/or modified protein sequence (wt) from neuraminidase__InfluenzaA__AEI87057
MNPNQKIITIGSVCMTIGMANLILQIGNIISIWISHSIQLGNQNQIETCNQSVITYENNTWVNQTYVNISNTNFAAGQSVVSVKLAGNSSLCPVSGWAIYSKDNSIRIGSKGDVFVIREPFISCSPLECRTFFLTQGALLNDKHSNGTIKDRSPYRTLMSCPIGEVPSPYNSRFESVAWSASACHDGINWLTIGISGPDNGAVAVLKYNGIITDTIKSWRNNILRTQESECACVNGSCFTVMTDGPSDGQASYKIFRIEKGKIVKSVEMNAPNYHYEECSCYPDSSEITCVCRDNWHGSNRPWVSFNQNLEYQIGYICSGIFGDNPRPNDKTGSCGPVSSNGANGVKGFSFKYGNGVWIGRTKSISSRNGFEMIWDPNGWTGTDNNFSIKQDIVGIKEWSGYSGSFVQHPELTGLDCIRPCFWVELIRGRPKENTIWTSGSSISFCGVNSDTVGWSWPDGAELPFTIDK

SEQ ID NO: 20809 - protein, 469 aa, Artificial Sequence; identical to SEQ ID NO: 20257
  derived and/or modified protein sequence (wt) from neuraminidase__InfluenzaA__AEI87067

SEQ ID NO: 20810 - protein, 469 aa, Artificial Sequence
  derived and/or modified protein sequence (wt) from neuraminidase__InfluenzaA__AEI87077
MNPNQKIITIGSICMTIGMANLILQIGNIISIWISHSIQFGNQNQIGTCNQSVITYENNTWVNQTYVNISNTNFAAGQSVVSVKLAGNSSLCPVSGWAIYSKDNSIRIGSKGDVFVIREPFISCSPLECRTFFLTQGALLNDKHSNGTIKDRSPYRTLMSCPIGEVPSPYNSRFESVAWSASACHDGINWLTIGISGPDNGAVAVLKYNGIITDTIKSWRNNILRTQESECACVNGSCFTIMTDGPSDGQASYKIFRIEKGKIVKSVEMNAPNYHYEECSCYPDSSEITCVCRDNWHGSNRPWVSFNQNLEYQIGYICSGIFGDNPRPNDKTGSCGPVSSNGANGVKGFSFKYGNGVWIGRTKSISSRKGFEMIWDPNGWTGTDNNFSIKQDIVGINEWSGYSGSFVQHPELTGLDCIRPCFWVELIRGRPKENTIWTSGSSISFCGVNSDTVGWSWPDGAELPFTIDK

SEQ ID NO: 20811 - protein, 469 aa, Artificial Sequence
  derived and/or modified protein sequence (wt) from neuraminidase__InfluenzaA__AEI87087
MNPNQKIITIGSVCMTIGMANLILQIGNIISIWISHSIQLGNQNQIETCNQSVITYENNTWVNQTYVNISNTNFAAGQSVVSVKLAGNSSLCPISGWAIYSKDNSIRIGSKGDVFVIREPFISCSPLECRTFFLTQGALLNDKHSNGTIKDRSPYRTLMSCPIGEVPSPYNSRFESVAWSASACHDGINWLTIGISGPDNGAVAVLKYNGIITDTIKSWRNNILRTQESECACVNGSCFTVMTDGPSDGQASYKIFRIEKGKIVKSVEMNAPNYHYEECSCYPDSSEITCVCRDNWHGSNRPWVSFNQNLEYQIGYICSGIFGDNPRPNDKTGSCGPVSSNGANGVKGFSFKYGNGVWIGRTKSISSRNGFEMIWDPNGWTGTDNNFSIKQDIVGIKEWSGYSGSFVQHPELTGLDCIRPCFWVELIRGRPKENTIWTSGSIISFCSVNSDTVGWSWPDGAELPFTIDK

SEQ ID NO: 20812 - protein, 469 aa, Artificial Sequence; identical to SEQ ID NO: 20783
  derived and/or modified protein sequence (wt) from neuraminidase__InfluenzaA__AEI87097

SEQ ID NO: 20813 - protein, 469 aa, Artificial Sequence; identical to SEQ ID NO: 20783
  derived and/or modified protein sequence (wt) from neuraminidase__InfluenzaA__AEI87107

SEQ ID NO: 20814 - protein, 470 aa, Artificial Sequence
  derived and/or modified protein sequence (wt) from neuraminidase__InfluenzaA__AEI91968
MNPNQKIITIGSISIAIGIISLMLQIGNIISIWASHSIQTGSQNNTGICNQRIITYENSTWVNHTYVNINNTNVVAGEDKTSVTLAGNSSLCSISGWAIYTKDNSIRIGSKGDVFVIREPFISCSHLECRTFFLTQGALLNDKHSNGTVKDRSPYRALMSCPLGEAPSPYNSKFESVAWSASACHDGMGWLTIGISGPDNGAVAVLKYNGIITGTIKSWKKQILRTQESECVCMNGSCFTIMTDGPSNKAASYKIFKIEKGKVTKSIELNAPNFYYEECSCYPDTGIVMCVCRDNWHGSNRPWVSFNQNLDYQIGYICSGVFGDNPRPEDGEGSCNPVTVDGANGVKGFSYKYGNGVWIGRTKSNRLRKGFEMIWDPNGWTNTDSDFSVKQDVVAITDWSGYSGSFVQHPELTGLDCIKPCFWVELVRGLPRENTTIWTSGSSISFCGVNSDTANWSWPDGAELPFTIDK

SEQ ID NO: 20815 - protein, 469 aa, Artificial Sequence; identical to SEQ ID NO: 16738
  derived and/or modified protein sequence (wt) from neuraminidase__InfluenzaA__AEI91983

SEQ ID NO: 20816 - protein, 469 aa, Artificial Sequence; identical to SEQ ID NO: 19224
  derived and/or modified protein sequence (wt) from neuraminidase__InfluenzaA__AEI91984

SEQ ID NO: 20817 - protein, 469 aa, Artificial Sequence
  derived and/or modified protein sequence (wt) from neuraminidase__InfluenzaA__AEI92004
MNPNQKIITIGSVCMTIGMANLILQIGNIISIWISHSIQLGNQNQIETCNQSVITYENNTWVNQTYVNISNTNFAAGQSVVSVKLAGNSSLCPVSGWAIYSKDNSIRIGSKGDVFVIREPFISCSPLECRTFFLTQGALLNDKHSNGTIKDRSPYRTLMSCPIGEVPSPYNSRFESVAWSASACHDGINWLTIGISGPDNGAVAVLKYNGIITDTIKSWRNNILRTQESECACVNGSCFTVMTDGPSDGQASYKIFRIEKGKIVKSVEMNAPNYHYEECSCYPDSSEITCVCRDNWHGSNRPWVSFNQNLEYQIGYICSGIFGDNPRPNDKTGSCGPVSSNGAYGVKGFSFKYGNGVWIGRTKSISSRNGFEMIWDPNGWTGTDNNFSIKQDIVGINEWSGYSGSFVQHPELTGLDCIRPCFWVELIRGRPKENTIWTSGSSISFCGVNSDTVGWSWPDGAELPFTIDK

SEQ ID NO: 20818 - protein, 470 aa, Artificial Sequence
  derived and/or modified protein sequence (wt) from neuraminidase__InfluenzaA__AEI92023
MNPNQKIITIGSISIAIGIISLMLQIGNIISIWASHSIQTGSQNNTGICNQKIITYENSTWVNHTYVNINNTNVVAGEDKTSVTLAGNSSLCSISGWAIYTKDNSIRIGSKGDVFVIREPFISCSHLECRTFFLTQGALLNDKHSNGTVKDRSPYRALMSCPLGEAPSPYNSKFESVAWSASACHDGMGWLTIGISGPDNGAVAVLKYNGIITGTIKSWKKQILRTQESECVCMNGSCFTIMTDGPSNKAASYKIFKIEKGKVTKSIELNAPNFYYEECSCYPDTGIVMCVCRDNWHGSNRPWVSFNQNLDYQIGYICSGVFGDNPRPEDGEGSCNPVTVDGTNGVKGFSYKYGNGVWIGRTKSNRLRKGFEMIWDPNGWTNTDSDFSVKQDVVAITDWSGYSGSFVQHPELTGLDCIRPCFWVELVRGLPRENTTIWTSGSSISFCGVNSDTANWSWPDGAELPFTIDK

SEQ ID NO: 20819 - protein, 469 aa, Artificial Sequence
  derived and/or modified protein sequence (wt) from neuraminidase__InfluenzaA__AEJ10403
MNPNQKIITIGSVCITIGMANLILQIGNIISIWISHSIQLGNQNQIETCNQSVITYENNTWVNQTYVNISNTNFAAGQSVVSVKLAGNSSLCPVSGWAIYSKDNSIRIGSKGDVFVIREPFISCSPLECRTFFLTQGALLNDKHSNGTIKDRSPYRTLMSCPIGEVPSPYNSRFESVAWSASACHDGISWLTIGISGPDNGAVAVLKYNGIITDTIKSWRNNILRTQESECACVNGSCFTVMTDGPSDGQASYKIFRIEKGKIVKSVEMNAPNYHYEECSCYPDSSEITCVCRDNWHGSNRPWVSFNQNLEYQIGYICSGIFGDNPRPNDKTGSCGPVSANGANGVKGFSFKYGNGVWIGRTKSISSRNGFEMIWDPNGWTGTDNNFSIKQDIVGINEWSGYSGSFVQHPELTGLDCIRPCFWVELIRGRPKENTIWTSGSSISFCGVNSDTVGWSWPDGAELPFTIDK

SEQ ID NO: 20820 - protein, 469 aa, Artificial Sequence; identical to SEQ ID NO: 20786
  derived and/or modified protein sequence (wt) from neuraminidase__InfluenzaA__AEJ10413

SEQ ID NO: 20821 - protein, 469 aa, Artificial Sequence; identical to SEQ ID NO: 20808
  derived and/or modified protein sequence (wt) from neuraminidase__InfluenzaA__AEJ10423

SEQ ID NO: 20822 - protein, 469 aa, Artificial Sequence
  derived and/or modified protein sequence (wt) from neuraminidase__InfluenzaA__AEJ10433
MNPNQKIITIGSVCMTIGMANLILQIGNIISIWISHSIQLGNQNQIETCNQSVITYENNTWVNQTYVNISNTNFAAGQSVVSVKLAGNSSLCPVSGWAIYSKDNSIRIGSKGDVFVIREPFISCSPLECRTFFLTQGALLNDKHSNGTIKDRSPYRTLMSCPIGEVPSPYNSRFESVAWSASACHDGINWLTIGISGPDNGAVAVLKYNGIITDTIKSWRNNILRTQESECACVNGSCFTVMTDGPSDGQASYKIFRIEKGKIVKSVEMNAPNYHYEECSCYPDSSEITCVCRDNWHGSNRPWVSFNQNLEYRIGYICSGIFGDNPRPNDKTGSCGPVSSNGANGVKGFSFKYGNGVWIGRTKSISSRNGFEMIWDPNGWTGTDNNFSIKQDIIGINEWSGYSGSFVQHPELTGLDCIRPCFWVELIRGRPKENTIWTSGSSISFCGVNSGTVGWSWPDGAELPFTIDK

SEQ ID NO: 20823 - protein, 469 aa, Artificial Sequence; identical to SEQ ID NO: 20257
  derived and/or modified protein sequence (wt) from neuraminidase__InfluenzaA__AEJ10443

SEQ ID NO: 20824 - protein, 469 aa, Artificial Sequence; identical to SEQ ID NO: 20257
  derived and/or modified protein sequence (wt) from neuraminidase__InfluenzaA__AEJ10453

SEQ ID NO: 20825 - protein, 469 aa, Artificial Sequence; identical to SEQ ID NO: 20709
  derived and/or modified protein sequence (wt) from neuraminidase__InfluenzaA__AEJ10463

SEQ ID NO: 20826 - protein, 469 aa, Artificial Sequence
  derived and/or modified protein sequence (wt) from neuraminidase__InfluenzaA__AEJ10473
MNPNQKIITIGSVCMTIGMANLILQIGNIISIWISHSIQLGNQNQIETCNQSVITYENKTWVNQTYVNISNTNFAAGQSVVSVKLAGNSSLCPVSGWAIYSKDNSIRIGSKGDVFVIREPFISCSPLECRTFFLTQGALLNDKHSNGTIKDRSPYRTLMSCPIGEVPSPYNSRFESVAWSASACHDGINWLTIGISGPDNGAVAVLKYNGIITDTIKSWRNNILRTQESECACVNGSCFTVMTDGPSDGQASYKIFRIEKGKIVKSVEMNAPNYHYEECSCYPDSSEITCVCRDNWHGSNRPWVSFNQNLEYQIGYICSGIFGDNPRPNDKTGSCGPVSSNGANGVKGFSFKYGNGVWIGRTKSISSRNGFEMIWDPNGWTGTDNKFSIKQDIVGINEWSGYSGSFVQHPELTGLNCIRPCFWVELIRGRPKENTIWTSGSSISFCGVNSDTVGWSWPDGAELPFTIDK

SEQ ID NO: 20827 - protein, 469 aa, Artificial Sequence; identical to SEQ ID NO: 20257
  derived and/or modified protein sequence (wt) from neuraminidase__InfluenzaA__AEJ10503

SEQ ID NO: 20828 - protein, 469 aa, Artificial Sequence; identical to SEQ ID NO: 16738
  derived and/or modified protein sequence (wt) from neuraminidase__InfluenzaA__AEJ10523

SEQ ID NO: 20829 - protein, 469 aa, Artificial Sequence; identical to SEQ ID NO: 16738
  derived and/or modified protein sequence (wt) from neuraminidase__InfluenzaA__AEJ10533

SEQ ID NO: 20830 - protein, 469 aa, Artificial Sequence; identical to SEQ ID NO: 16738
  derived and/or modified protein sequence (wt) from neuraminidase__InfluenzaA__AEJ10543

SEQ ID NO: 20831 - protein, 469 aa, Artificial Sequence; identical to SEQ ID NO: 16738
  derived and/or modified protein sequence (wt) from neuraminidase__InfluenzaA__AEJ10553

SEQ ID NO: 20832 - protein, 469 aa, Artificial Sequence; identical to SEQ ID NO: 19013
  derived and/or modified protein sequence (wt) from neuraminidase__InfluenzaA__AEJ10563

SEQ ID NO: 20833 - protein, 469 aa, Artificial Sequence; identical to SEQ ID NO: 19013
  derived and/or modified protein sequence (wt) from neuraminidase__InfluenzaA__AEJ10573

SEQ ID NO: 20834 - protein, 469 aa, Artificial Sequence; identical to SEQ ID NO: 19013
  derived and/or modified protein sequence (wt) from neuraminidase__InfluenzaA__AEJ10583

SEQ ID NO: 20835 - protein, 469 aa, Artificial Sequence
  derived and/or modified protein sequence (wt) from neuraminidase__InfluenzaA__AEJ36305
MNPNQKIITIGSVCMTIGMANLILQIGNIISIWISHSIQLGNQNQIETCNQSVITYENNTWVNQTYVNISNTNFAAGQSVVSVKLAGNSSLCPVSGWAIYSKDNSIRIGSKGDVFVIREPFISCSPLECRTFFLTQGALLNDKHSNGTIKDRSPYRTLMSCPIGEVPSPYNSRFESVAWSASACHDGINWLTIGISGPDNGAVAVLKYNGIITDTIKSWRNNILRTQESECACVNGSCFTVMTDGPSDGQASYKIFRIEKGKIVKSVEMNAPNYHYEECSCYPDSSEITCVCRDNWHGSNRPWVSFNQNLEYQIGYICSGIFGDNPRPNDKTGSCGPVSSNGANGVKGFSFKYGNGVWIGRTKSTSSRNGFEMIWDPNGWTGTDNSFSIKQDIVGINEWSGYSGSFVQHPELTGLDCIRPCFWVELIRGRPKENTIWTSGSSISFCGVNSDTVGWSWPDGAELPFTIDK

SEQ ID NO: 20836 - protein, 469 aa, Artificial Sequence; identical to SEQ ID NO: 16738
  derived and/or modified protein sequence (wt) from neuraminidase__InfluenzaA__AEJ37856

SEQ ID NO: 20837 - protein, 469 aa, Artificial Sequence; identical to SEQ ID NO: 16738
  derived and/or modified protein sequence (wt) from neuraminidase__InfluenzaA__AEJ37866

SEQ ID NO: 20838 - protein, 469 aa, Artificial Sequence; identical to SEQ ID NO: 16738
  derived and/or modified protein sequence (wt) from neuraminidase__InfluenzaA__AEJ37876

SEQ ID NO: 20839 - protein, 469 aa, Artificial Sequence; identical to SEQ ID NO: 20786
  derived and/or modified protein sequence (wt) from neuraminidase__InfluenzaA__AEJ37886

SEQ ID NO: 20840 - protein, 469 aa, Artificial Sequence
  derived and/or modified protein sequence (wt) from neuraminidase__InfluenzaA__AEJ37896
MNPNQKIITIGSVCITIGMANLILQIGNIISIWISHSIQLGNQNQIETCNQSVITYENNTWVNQTYVNISNTNFAAGQSVVSVKLAGNSSLCPVSGWAIYSKDNSIRIGSKGDVFVIREPFISCSPLECRTFFLTQGALLNDKHSNGTIKDRSPYRTLMSCPIGEVPSPYNSRFESVAWSASACHDGISWLTIGISGPDNGAVAVLKYNGIITDTIKSWRNNILRTQESECACVNGSCFTVMTDGPSDGQASYKIFRIEKGRIVKSVEMNAPNYHYEECSCYPDSSEITCVCRDNWHGSNRPWVSFNQNLEYQIGYICSGIFGDNPRPNDKTGSCGPVSSNGANGVKGFSFKYGNGVWIGRTKSISSRNGFEMIWDPNGWTGTDNNFSIKQDIVGINEWSGYSGSFVQHPELTGLDCIRPCFWVELIRGRPKENTIWTSGSSISFCGVNSDTVGWSWPDGAELPFTIDK

SEQ ID NO: 20841 - protein, 469 aa, Artificial Sequence; identical to SEQ ID NO: 20786
  derived and/or modified protein sequence (wt) from neuraminidase__InfluenzaA__AEJ37906

SEQ ID NO: 20842 - protein, 469 aa, Artificial Sequence; identical to SEQ ID NO: 20786
  derived and/or modified protein sequence (wt) from neuraminidase__InfluenzaA__AEJ37916

SEQ ID NO: 20843 - protein, 469 aa, Artificial Sequence; identical to SEQ ID NO: 20786
  derived and/or modified protein sequence (wt) from neuraminidase__InfluenzaA__AEJ37926

SEQ ID NO: 20844 - protein, 469 aa, Artificial Sequence; identical to SEQ ID NO: 18640
  derived and/or modified protein sequence (wt) from neuraminidase__InfluenzaA__AEJ37936

SEQ ID NO: 20845 - protein, 469 aa, Artificial Sequence; identical to SEQ ID NO: 16738
  derived and/or modified protein sequence (wt) from neuraminidase__InfluenzaA__AEJ37946

SEQ ID NO: 20846 - protein, 469 aa, Artificial Sequence; identical to SEQ ID NO: 20786
  derived and/or modified protein sequence (wt) from neuraminidase__InfluenzaA__AEJ37956

SEQ ID NO: 20847 - protein, 469 aa, Artificial Sequence; identical to SEQ ID NO: 20786
  derived and/or modified protein sequence (wt) from neuraminidase__InfluenzaA__AEJ37966

SEQ ID NO: 20848 - protein, 469 aa, Artificial Sequence; identical to SEQ ID NO: 16738
  derived and/or modified protein sequence (wt) from neuraminidase__InfluenzaA__AEJ37976

SEQ ID NO: 20849 - protein, 469 aa, Artificial Sequence; identical to SEQ ID NO: 20786
  derived and/or modified protein sequence (wt) from neuraminidase__InfluenzaA__AEJ37986

SEQ ID NO: 20850 - protein, 469 aa, Artificial Sequence; identical to SEQ ID NO: 19410
  derived and/or modified protein sequence (wt) from neuraminidase__InfluenzaA__AEK21372

SEQ ID NO: 20851 - protein, 470 aa, Artificial Sequence; identical to SEQ ID NO: 20204
  derived and/or modified protein sequence (wt) from neuraminidase__InfluenzaA__AEK21383

SEQ ID NO: 20852 - protein, 469 aa, Artificial Sequence; identical to SEQ ID NO: 18640
  derived and/or modified protein sequence (wt) from neuraminidase__InfluenzaA__AEK21399

SEQ ID NO: 20853 - protein, 469 aa, Artificial Sequence; identical to SEQ ID NO: 16738
  derived and/or modified protein sequence (wt) from neuraminidase__InfluenzaA__AEK21409

SEQ ID NO: 20854 - protein, 469 aa, Artificial Sequence; identical to SEQ ID NO: 20709
  derived and/or modified protein sequence (wt) from neuraminidase__InfluenzaA__AEK21419

SEQ ID NO: 20855 - protein, 469 aa, Artificial Sequence; identical to SEQ ID NO: 20786
  derived and/or modified protein sequence (wt) from neuraminidase__InfluenzaA__AEK21429

SEQ ID NO: 20856 - protein, 469 aa, Artificial Sequence
  derived and/or modified protein sequence (wt) from neuraminidase__InfluenzaA__AEK21439
MNPNQKIITIGSVCMTIGMANLILQIGNIISIWISHSIQLGNQNQIETCNQSVITYENNTWVNQTYVNISNTNFAAGQSVVSVKLAGNSSLCPVSGWAIYSKDNSIRIGSKGDVFVIREPFISCSPLECRTFFLTQGALLNDKHSNGTIKDRSPYRTLMSCPIGEVPSPYNSRFESVAWSASACHDGINWLTIGISGPDNGAVAVLKYNGIITDTIKSWRNNILRTQESECACVNGSCFTVMTDGPSDGQASYKIFRIEKGKIVKSVEMNAPNYHYEECSCYPDSSEITCVCRDNWHGSNRPWVSFNQNLEYQIGYICSGIFGDNPRPNDKTGSCGPVSSNGANGVKGFSFKYGNGVWIGRTKSISSRNGFEMIWDPNGWTGTDNNFSKKQDIVGINEWSGYSGSFVQHPELTGLDCIRPCFWVELIRGRPKENTIWTSGSSISFCGVNSDTVGWSWPDGAELPFTIDK

SEQ ID NO: 20857 - protein, 469 aa, Artificial Sequence; identical to SEQ ID NO: 20786
  derived and/or modified protein sequence (wt) from neuraminidase__InfluenzaA__AEK21449

SEQ ID NO: 20858 - protein, 469 aa, Artificial Sequence; identical to SEQ ID NO: 18640
  derived and/or modified protein sequence (wt) from neuraminidase__InfluenzaA__AEK21459

SEQ ID NO: 20859 - protein, 469 aa, Artificial Sequence; identical to SEQ ID NO: 20786
  derived and/or modified protein sequence (wt) from neuraminidase__InfluenzaA__AEK21469

SEQ ID NO: 20860 - protein, 469 aa, Artificial Sequence; identical to SEQ ID NO: 20786
  derived and/or modified protein sequence (wt) from neuraminidase__InfluenzaA__AEK21479

SEQ ID NO: 20861 - protein, 469 aa, Artificial Sequence; identical to SEQ ID NO: 16738
  derived and/or modified protein sequence (wt) from neuraminidase__InfluenzaA__AEK21489

SEQ ID NO: 20862 - protein, 469 aa, Artificial Sequence; identical to SEQ ID NO: 20454
  derived and/or modified protein sequence (wt) from neuraminidase__InfluenzaA__AEK28776

SEQ ID NO: 20863 - protein, 469 aa, Artificial Sequence
  derived and/or modified protein sequence (wt) from neuraminidase__InfluenzaA__AEK28787
MNPNQKIITIGSVSLTISTICFFMQIAILITTVTLHFKQYEFYSPPNNQVMLCEPTIIERNITEIVYLTNTTIEKEICPKLAEYRNWSKPQCDITGFAPFSKDNSIRLSAGGDIWVTREPYVSCDPDKCYQFALGQGTTLNNVHSNNTVRDRTPYRTLLMNELGVPFHLGTKQVCIAWSSSSCHDGKAWLHVCITGDDKNATASFIYNGRLVDSVVSWSKEILRTQESECVCINGTCTVVMTDGSASGKADTKILFIEEGKIVHTSTLSGSAQHVEECSCYPRYPGVRCVCRDNWKGSNRPIVDINIKDHSIVSSYVCSGLVGDTPRKNDSSSSSHCLDPNNEEGGHGVKGWAFDDGNDVWMGRTINETSRLGYETFKVIEGWSNPKSKLQINRQVIVDRGNRSGYSGIFSVEGRSCINRCFYVELIRGRKEETEVLWTSNSIVVFCGTSGTYGTGSWPDGADLNLMPI

SEQ ID NO: 20864 - protein, 469 aa, Artificial Sequence
  derived and/or modified protein sequence (wt) from neuraminidase__InfluenzaA__AEK28798
MNPNQKIITIGSVSLTISTICFFMQIAILITTVTLHFKQYEFNSPPNNQVMLCEPTIIERNITEIVYLTNTTIEKEICPKLAEYRNWSKPQCDITGFAPFSKDNSIRLSAGGDIWVTREPYVSCDPDKCYQFALGQGTTLNNVHSNNTVRDRTPYRTLLMNELGVPFHLGTKQVCIAWSSSSCHDGKAWLHVCITGDDKNATASFIYNGRLVDSVVSWSKEILRTQESECVCINGTCTVVMTDGNASGKADTKILFIEEGKIVHTSTLSGSAQHVEECSCYPRYPGVRCVCRDNWKGSNRPIVDINIKDHSIVSSYVCSGLVGDTPRKNDSSSSSHCSDPNNEEGGHGVKGWAFDDGNDVWMGRTISEKSRLGYETFKVIEGWSNPKSKLQINRQVIVDRGNRSGYSGIFSVEGKSCINRCFYVELIRGRKEETEVLWTSNSIVVFCGTSGTYGTGSWPDGADINLMPI

SEQ ID NO: 20865 - protein, 469 aa, Artificial Sequence
  derived and/or modified protein sequence (wt) from neuraminidase__InfluenzaA__AEK28809
MNPNQKIITIGSVSLTISTICFFMQIAILITTVTVHFKQYEFNSPPNNQVMLCEPTIIERNITEIVYLTNTTIEKEICPKLAEYRNWSKPQCDITGFAPFSKDNSIRLSAGGDIWVTREPYVSCDPDKCYQFALGQGTTLNNVHSNNKVRDRTPYRTLLMNELGVPFHLGTKQVCIAWSSSSCHDGKAWLHVCITGDDKNATASFIYNGRLVDSVVSWSKEILRTQESECVCINGTCTVVMTDGSASGKADTKILFIEEGKIVHTSTLSGSAQHVEECSCYPRYPGVRCVCRDNWKGSNRPIVDINIKDHSIVSSYVCSGLVGDTPRKNDSSSSSHCLDPNNEEGGHGVKGWAFDDGNDVWMGRTISEKSRLGYETFKVIEGWSNPKSKLQINRQVIVDRGNRSGYSGIFSVEGKSCINRCFYVELIRGRKEETEVLWTSNSIVVFCGTSGTYGTGSWPDGADINLMPI

SEQ ID NO: 20866 - protein, 469 aa, Artificial Sequence
  derived and/or modified protein sequence (wt) from neuraminidase__InfluenzaA__AEK28819
MNPNQKIITIGSVSLTISTICFFMQIAILITTVTLHFKQYEFNYPPNNQVMLCEPTIIERNITEIVYLTNTTIEKEICPKLAEYRNWSKPQCDITGFAPFSKDNSIRLSAGGDIWVTREPYVSCDPDKCYQFALGQGTTLNNVHSNNTVRERTPYRTLLMNELGVPFHLGTKQVCIAWSSSSCHDGKAWLHVCITGDDKNATASFIYNGRLVDSVVSWSKEILRTQESECVCINGTCTVVMTDGSASGKADTKILFIEEGKIVHTSTLSGSAQHVEECSCYPRYPGVRCVCRDNWKGSNRPIVDINIKDHSIVSSYVCSGLVGDTPRKNDSSSSSHCLDPNNEEGGHGVKGWAFDDGNDVWMGRTISEKSRLGYETFKVIEGWSNPKSKLQINRQVIVDRGNRSGYSGIFSVEGKSCINRCFYVELIRGRKEETEVLWTSNSIVVFCGTSGTYGTGSWPDGADINLMPI

SEQ ID NO: 20867 - protein, 469 aa, Artificial Sequence
  derived and/or modified protein sequence (wt) from neuraminidase__InfluenzaA__AEK28830
MNPNQKIITIGSVSLTISTICFFMQIAILITTVTLHFKQYEFNSPPNNQVMLCEPTIIERNITEIVYLTNTTIEKEICPNLAEYRNWSKPQCDITGFAPFSKDNSIRLSAGGDIWVTREPYVSCDPDKCYQFALGQGTTLNNVHSNNTVRGRTPYRTLLMNELGVPFHLGTKQVCIAWSSSSCHDGKAWLHVCITGDDKNATASFIYNGRLVDSVVSWSKEILRTQESECVCINGTCTVVMTDGSASGKADTKILFIEEGKIVHTSTLSGSAQHVEECSCYPRYPGVRCVCRDNWKGSNRPIVDINIKDHSIVSSYVCSGLVGDTPRKNDSSSSSHCLDPNNEEGGHGVKGWAFDDGNDVWMGRTISEKSRLGYETFKVIEGWSNPKSKLQINRQVIVDRGNRSGYSGIFSVEGKSCINRCFYVELIRGRKEETEVLWTSNSIVVFCGTSGTYGTGSWPDGADINLMPI

SEQ ID NO: 20868 - protein, 469 aa, Artificial Sequence
  derived and/or modified protein sequence (wt) from neuraminidase__InfluenzaA__AEK28841
MNPNQKIITIGSVSLTISTICFFMQIAILITTVTLHFKQYEFNSPPNNQVMLCEPTIIERNITEIVYLTNTTIEKEICPKLAEYRNWSKPQCDITGFAPFSKDNSIRLSAGGDIWVTREPYVSCDPDKCYQFALGQGTTVNNVHSNNTVRGRTPYRTLLMNELGVPFHLGTKQVCIAWSSSSCHDGKAWLHVCITGDDKNATASFIYNGRLVDSVVSWSKEILRTQESECVCINGTCTVVMTDGSASGKADTKILFIEEGKIVHTSTLSGSAQHVEECSCYPRYPGVRCVCRDNWKGSNRPIVDINIKDHSIVSSYVCSGLVGDTPRKNDSSSSSHCLDPNNEEGGHGVKGWAFDDGNDVWMGRTISEKSRLGYETFKVIEGWSNHKSKLQINRQVIVDRGNRSGYSGIFSVEGKSCINRCFYVELIRGRKEETEVLWTSNSIVVFCGTSGTYGTGSWPDGADLNLMPI

SEQ ID NO: 20869 - protein, 469 aa, Artificial Sequence
  derived and/or modified protein sequence (wt) from neuraminidase__InfluenzaA__AEK28852
MNPNQKIITIGSVSLTISTICFFMQIAILITTVTLHFKQYEFNSPPNNQVMLCEPTIIEKNITEIVYLTNTTIEKEICPKLAEYRNWSKPQCDITGFAPFSKDNSIRLSAGGDIWVTREPYVSCDPDKCYQFALGQGTTLNNVHSNNRVRDRTPYRTLLMNELGVPFHLGTKQVCIAWSSSSCHDGKAWLHVCITGDDKNATASFIYNGRLVDSVVSWSKEILRTQESECVCINGTCTVVMTDGSASGKADTKILFIEEGKIVHTSTLSGSAQHVEECSCYPRYPGVRCVCRDNWKGSNRPIVDINIKDHSIVSSYVCSGLVGDTPRKNDSSSSSHCLDPNNEEGGHGVKGWAFDDGNDVWMGRTISEKSRLGYETFKVIEGWSNPKSKLQINRQVIVDRGNRSGYSGIFSVEGKSCINRCFYVELIRGRKEETEVLWTSNSIVVFCGTSGTYGTGSWPDGADINLMPI

SEQ ID NO: 20870 - protein, 469 aa, Artificial Sequence; identical to SEQ ID NO: 18484
  derived and/or modified protein sequence (wt) from neuraminidase__InfluenzaA__AEK28863

SEQ ID NO: 20871 - protein, 469 aa, Artificial Sequence
  derived and/or modified protein sequence (wt) from neuraminidase__InfluenzaA__AEK28874
MNPNQKIITIGSVSLTISTICFFMQIAILITTVTLHFKQYEFNSPPNNQVMLCEPTIIERNITEIVYLTNTTIEKEICPKLAEYRNWSKPQCDITGFAPFSKDNSIRLSAGGDIWVTREPYVSCDPDKCYQFALGQGTTLNNVHSNNKVRDRTPYRTLLMNELGVPFHLGTKQVCIAWSSSSCHDGKAWLHVCITGDDKNATASFIYNGRLVDSVVSWSKEILRTQESECVCINGTCTVVMTDGSASGKADTKILFIEEGKIVHTSTLSGSAQHVEECSCYPRYPGVRCVCRDNWKGSNRPIVDINIKDHSIVSSYVCSGLVGDTPRKNDSSSSSHCLDPNNEEGGHGVKGWAFDDGNDVWMGRTISEKSRLGYETFKVIEGWSNHKSKLQINRQVIVDRGNRSGYSGIFSVEGKSCINRCFYVELIRGRKEETEVLWTSNSIVVFCGTSGTYGTGSWPDGADLNLMPI

SEQ ID NO: 20872 - protein, 469 aa, Artificial Sequence
  derived and/or modified protein sequence (wt) from neuraminidase__InfluenzaA__AEK28885
MNPNQKIITIGSVSLTISTICFFMQIAILITTVTLHFKQYEFNLPPNNQVMLCEPTIIERNITEIVYLTNTTIEKEICPKLAEYRNWSKPQCDITGFAPFSKDNSIRLSAGGDIWVTREPYVSCDPDKCYQFALGQGTTLNNVHSNNTVRDRTPYRTLLMNELGVPFHLGTKQVCIAWSSSSCHDGKAWLHVCITGDDKNATASFIYNGRLVDSVVSWSKEILRTQESECVCINGTCTVVMTDGSASGKADTKILFIEEGKIVHTSTLSGSAQHVEECSCYPRYPGVRCVCRDNWKGSNRPIVDINIKDHSIVSSYVCSGLVGDTPRKNDSSSSSHCLDPNNEEGGHGVKGWAFDDGNDVWMGRTISEKSRLGYETFKVIEGWSNPKSKLQINRQVIVDRGNRSGYSGIFSVEGKSCINRCFYVELIRGRKEETEVLWTSNSIVVFCGTSGTYGTGSWPDGADINLMPI

SEQ ID NO: 20873 - protein, 469 aa, Artificial Sequence; identical to SEQ ID NO: 18609
  derived and/or modified protein sequence (wt) from neuraminidase__InfluenzaA__AEK28896

SEQ ID NO: 20874 - protein, 469 aa, Artificial Sequence
  derived and/or modified protein sequence (wt) from neuraminidase__InfluenzaA__AEK28907
MNPNQKIITIGSVSLTISTICFFMQIAILITTVTLHFKQYEFNSPPNNQVMLCEPTIIEKNITEIVYLTNTTIEKEICPRLAEYRNWSKPQCDITGFAPFSKDNSIRLSAGGDIWVTREPYVSCDPDKCYQFALGQGTTLNNVHSNNTVRDRTPYRTLLMNELGVPFHLGTKQVCIAWSSSSCHDGKAWLHVCITGDDKNATASFIYNGRLVDSVVSWSKEILRTQESECVCINGTCTVVMTDGSASGKADTKILFIEEGKIVHTSTLSGSAQHVEECSCYPRYPGVRCVCRDNWKGSNRPIVDINIKDHSIVSSYVCSGLVGDTPRKNDSSSSSHCLDPNNEEGGHGVKGWAFDDGNDVWMGRTISEKSRLGYETFKVIEGWSNPKSKLQINRQVIVDRGNRSGYSGIFSVEGKSCINRCFYVELIRGRKEETEVLWTSNSIVVFCGTSGTYGTGSWPDGADINLMPI

SEQ ID NO: 20875 - protein, 469 aa, Artificial Sequence; identical to SEQ ID NO: 16599
  derived and/or modified protein sequence (wt) from neuraminidase__InfluenzaA__AEK28918

SEQ ID NO: 20876 - protein, 469 aa, Artificial Sequence; identical to SEQ ID NO: 17905
  derived and/or modified protein sequence (wt) from neuraminidase__InfluenzaA__AEK28929

SEQ ID NO: 20877 - protein, 469 aa, Artificial Sequence
  derived and/or modified protein sequence (wt) from neuraminidase__InfluenzaA__AEK28951
MNPNQKIITIGSVSLTISTICFFMQIAILITTVTLHFKQYEFNSPPNNQVMLCEPTIIERNITEIVYLTNTTIEKEICPKLAEYRNWSKPQCDITGFAPFSKDNSIRLSAGGDIWVTREPYVSCDPDKCYQFALGQGTTLNNVHSNNTVRDRTPYRTLLMNELGVPFHLGTKQVCIAWSSSSCHDGKAWLHVCITGDDKNATASFIYNGRLVDSVVSWSKEILRTQESECVCINGTCTVVMTDGSASGKADTKILFIEEGKIVHTSTLSGSAQHVEECSCYPRYPGVRCVCRDNWKGSNRPIVDINIKDHSIVSSYVCSGLVGDTPRKNDSSSSSHCLDPNNEEGGHGVKGWAFDDGNDVWMGRTISEKSRSGYETFKVIEGWSNHKSKLQINRQVIVDRGNRSGYSGIFSVEGKSCINRCFYVELIRGRKEETEALWTSNSIVVFCGTSGTYGTGSWPDGADLNLMPI

SEQ ID NO: 20878 - protein, 469 aa, Artificial Sequence
  derived and/or modified protein sequence (wt) from neuraminidase__InfluenzaA__AEK28962
MNPNQKIITIGSVSLTISTICFFMQIAILITTVTLHFKQYEFNSPPNNQVMLCEPTIIERNITEIVYPTNTTIEKEICPKLAEYRNWSKPQCDITGFAPFSKDNSIRLSAGGDIWVTREPYVSCDPDKCYQFALGQGTTLNNVHSNNTVRDRTPYRTLLMNELGVPFHLGTKQVCIAWSSSSCHDGKAWLHVCITGDDKNATASFIYNGRLVDSVVSWSKEILRTQESECVCINGTCTVVMTDGSASGKADTKILFIEEGKIVHTSTLSGSAQHVEECSCYPRYPGVRCVCRDNWKGSNRPIVDINIKDHSIVSSYVCSGLVGDTPRKNDSSSSSHCLDPNNEEGGHGVKGWAFDDGNDVWMGRTISEKSRLGYETFKVIEGWSNPKSKLQINRQVIVDRGNRSGYSGIFSVEGKSCINRCFYVELIRGRKEETEVLWTSNSIVVFCGTSGTYGTGSWPDGADINLMPI

SEQ ID NO: 20879 - protein, 469 aa, Artificial Sequence
  derived and/or modified protein sequence (wt) from neuraminidase__InfluenzaA__AEK28973
MNPNQKIITIGSVSLTISTICFFMQIAILITTVTLHFKQYEFNSPPNNQVMLCEPTIIERNITEIVYLTNTTIEKEICPKLAEYRNWSKPQCDITGFAPFSKDNSIRLSAGGDIWVTREPYVSCDPDKCYQFALGQGTTLNNVHSNNTVRDRTPYRTLLMNELGVPFHLGTKQVCIAWSSSSCHDGKAWLHVCITGDDKNATASFIYNGRLVDSVVSWSKEILRTQESECVCINGTCTVVMTDGSASGKADTKILFIEEGKIVHTSTLSGSAQHVEECSCYPRYPGVRCVCRDNWKGSNRPIVDINIKDHSIVSSYVCSGLVGDTPRKNDSSSSSHCLDPNNEEGGHGVKGWAFDDGNDVWMGRTISEKSRLGYETFKVIEGWSNHKSKLQINRQVIVDRGNRSGYSGIFSVEGKSCINRCFYVELIRGRKEETEVLWTSNSIVVFCGTSGTYGTGSWPDGADLNFMPI

SEQ ID NO: 20880 - protein, 469 aa, Artificial Sequence
  derived and/or modified protein sequence (wt) from neuraminidase__InfluenzaA__AEK28984
MNPNQKIITIGSVSLTISTICFFMQIAILITTVTLHFKQYEFNSPPNNQVMLCEPTIIERNITEIVYLTNTTIEKEICPKLAEYRNWSKPQCDITGFAPFSKDNSVRLSAGGDIWVTREPYVSCDPDKCYQFALGQGTTLNNVHSNNTVRDRTPYRTLLMNELGVPFHLGTKQVCIAWSSSSCHDGKAWLHVCITGDDKNATASFIYNGRLVDSVVSWSKEILRTQESECVCINGTCTVVMTDGSASGKADTKILFIEEGKIVHTSTLSGSAQHVEECSCYPRYPGVRCVCRDNWKGSNRPIVDINIKDHSIVSSYVCSGLVGDTPRKNDSSSSSHCLDPNNEEGGHGVKGWAFDDGNDVWMGRTISEKSRLGYETFKVIEGWSNPKSKLQINRQVIVDRGNRSGYSGIFSVEGKSCINRCFYVELIRGRKEETEVLWTSNSIVVFCGTSGTYGTGSWPDGADINLMPI

SEQ ID NO: 20881 - protein, 469 aa, Artificial Sequence; identical to SEQ ID NO: 20880
  derived and/or modified protein sequence (wt) from neuraminidase__InfluenzaA__AEK28995

SEQ ID NO: 20882 - protein, 469 aa, Artificial Sequence; identical to SEQ ID NO: 19518
  derived and/or modified protein sequence (wt) from neuraminidase__InfluenzaA__AEK29006

SEQ ID NO: 20883 - protein, 469 aa, Artificial Sequence
  derived and/or modified protein sequence (wt) from neuraminidase__InfluenzaA__AEK29028
MNPNQKIITIGSVSLTISTICFFMQIAILITTVTLHFKQYEFNSPPNNQVMLCEPTIIERNITEIVYLTNTTIEKEICPKLAEYRNWSKPQCDITGFAPFSKDNSIRLSAGGDIWVTREPYVSCDPNKCYQFALGQGTTLNNVHSNNTVRDRTPYRTLLMNELGVPFHLGTKQVCIAWSSSSCHDGKAWLHVCITGDDKNATASFIYNGRLVDSVVSWSKEILRTQESECVCINGTCTVVMTDGSASGKADTKILFIEEGKIVHTSTLSGSAQHVEECSCYPRYPGVRCVCRDNWKGSNRPIVDINMKDHSIVSSYVCSGLVGDTPRKNDSSSSSHCFDPNDEEGGHGVKGWAFDDGNDVWMGRTISEKSRLGYETFKVIEGWSNPKSKLQINRQVIVDRGNRSGYSGIFSVEGKSCINRCFYVELIRGRKEETEVLWTSNSIVVFCGTSGTYGTGSWPDGADINLMPI

SEQ ID NO: 20884 - protein, 469 aa, Artificial Sequence
  derived and/or modified protein sequence (wt) from neuraminidase__InfluenzaA__AEK29050
MNPNQKIITIGSVSLTISTICFFMQIAILITTVTLHFKQYEFNPPPNNQVMLCEPTIIERNITEIVYLTNTTIEKEICPKLAEYRNWSKPQCDITGFAPFSKDNSIRLSAGGDIWVTREPYVSCDPDKCYQFALGQGTTLNNVHSNNTVRDRTPYRTLLMNELGVPFHLGTKQVCIAWSSSSCHDGKAWLHVCITGDDKNATASFIYNGRLVDSVVSWSKEILRTQESECVCINGTCTVVMTDGSASGKADTKILFIEEGKIVHTSTLSGSAQHVEECSCYPRYPGVRCVCRDNWKGSNRPIVDINIKDHSIVSSYVCSGLVGDTPRKNDSSSSSHCLDPNNEEGGHGVKGWAFDDGNDVWMGRTINETSRLGYETFKVIEGWSNPKSKLQINRQVIVDRGNRSGYSGIFSVEGKSCINRCFYVELIRGRKEETEVLWTSNSIVVFCGTSGTYGTGSWPDGADLNLMPI

SEQ ID NO: 20885 - protein, 469 aa, Artificial Sequence
  derived and/or modified protein sequence (wt) from neuraminidase__InfluenzaA__AEK29061
MNPNQKIITIGSVSLTISTICFFIQIAILITTVTLHFKQYEFNSPPNNQVMLCEPTIIEKNITEIVYLTNTTIEKEICPKLAEYRNWSKPQCDITGFAPFSKDNSIRLSAGGDIWVTREPYVSCDPDKCYQFALGQGTTLNNVHSNNIVRDRTPYRTLLMNELGVPFHLGTKQVCIAWSSSSCHDGKAWLHVCITGDDKNATASFIYNGRLVDSVVSWSKEILRTQESECVCINGTCTVVMTDGSASGKADTKILFIEEGKIVHTSTLSGSAQHVEECSCYPRYPGVRCVCRDNWKGSNRPIVDINIKDHSIVSSYVCSGLVGDTPRKNDSSSSSHCLDPNNEEGGHGVKGWAFDDGNDVWMGRTINETSRLGYETFKVIEGWSNPKSKLQINRQVIVDRGNRSGYSGIFSVEGKSCINRCFYVELIRGRKEETEVLWTSNSIVVFCGTSGTYGTGSWPDGADLNLMPI

SEQ ID NO: 20886 - protein, 469 aa, Artificial Sequence
  derived and/or modified protein sequence (wt) from neuraminidase__InfluenzaA__AEK29083
MNPNQKIITIGSVSLTISTICFFIQIAILITTVTLHFKQYEFNSPPNNQVMLCEPTIIEKNITEIVYLTNTTIEKEICPKLAEYRNWSKPQCDITGFAPFSKDNSIRLSAGGDIWVTREPYVSCDPDKCYQFALGQGTTLNNVHSNNTVRDRTPYRTLLMNELGVPFHLGTKQVCIAWSSSSCHDGKAWLHVCITGDDKNATASFIYNGRLVDSVVSWSKEILRTQESECVCINGTCTVVMTDGSASGKADTKILFIEEGKIVHTSTLSGSAQHVEECSCYPRYPGVRCVCRDNWKGSNRPIVDINIKDHSIVSSYVCSGLVGDTPRKNDSSSSSHCLDPNNEEGGHGVKGWAFDDGNDVWMGRTINETSRLGYETFKVIEGWSNPKSKLQINRQVIVDRGNRSGYSGIFSVEGKSCINRCFYVELIRGRKEETEVLWTSNSIVVFCGTSGTYGTGSWPDGADLNLMPI

SEQ ID NO: 20887 - protein, 469 aa, Artificial Sequence; identical to SEQ ID NO: 19410
  derived and/or modified protein sequence (wt) from neuraminidase__InfluenzaA__AEK29094

SEQ ID NO: 20888 - protein, 469 aa, Artificial Sequence; identical to SEQ ID NO: 19518
  derived and/or modified protein sequence (wt) from neuraminidase__InfluenzaA__AEK29127

SEQ ID NO: 20889 - protein, 469 aa, Artificial Sequence; identical to SEQ ID NO: 19518
  derived and/or modified protein sequence (wt) from neuraminidase__InfluenzaA__AEK29138

SEQ ID NO: 20890 - protein, 469 aa, Artificial Sequence
  derived and/or modified protein sequence (wt) from neuraminidase__InfluenzaA__AEK29182
MNPNQKIITIGSVSLTISTICFFMQIAILITTVTLHFKQYEFNSPPNNQVMLCEPTIIERNITEIVYLTNTTIEKEICPKLAEYRNWSKPQCDITGFAPFSKDNSIRLSAGGDIWVTREPYVSCDPDKCYQFALGQGTTLNNVHSNNTVRDRTPYRTLLMNELGVPFHLGTKQVCIAWSSSSCHDGKAWLHVCITGDDKNATASFIYNGRLVDSVVSWSKEILRTQESECVCINGTCTVVMTDGSASGKADTKILFIEEGKIVHTSTLSGSAQHVEECSCYPRYPGVRCVCRDNWKGSNRPIVDINIKDHSIVSSYVCSGLVGDTPRKNDSSSSSHCLDPNNEEGGHGVKGWAFDDGNDVWMGRTINETSRLGYETFKVIEGWSNPKSKLQVNRQVIVDRGNRSGYSGIFSVEGKSCINRCFYVELIRGRKEETEVLWTSNSIVVFCGTSGTYGTGSWPDGADLNLMPI

SEQ ID NO: 20891 - protein, 469 aa, Artificial Sequence
  derived and/or modified protein sequence (wt) from neuraminidase__InfluenzaA__AEK29204
MNPNQKIITIGSVSLTISTICFFMQIAILITTVTLHFKQYEFNSPPNNQVMLCEPTIIERNITEIVYLTNTTIEKEICPKLAEYRNWSKPQCDITGFAPFSKDNSIRLSAGGDIWVTREPYVSCDPDKCYQFALGQGTTLNNVHSNNTVRDRTPYRTLLMNELGVPFHLGTKQVCIAWSSSSCHDGKAWLHVCITGDDKNATASFIYNGRLVDSVVSWSKEILRTQESECVCINGTCTVVMTDGSASGKANTKVLFIEEGKIVHTSTLSGSAQHVEECSCYPRYPGVRCVCRDNWKGSNRPIVDINIKDHSIVSSYVCSGLVGDTPRKNDSSSSSHCLDPNNEEGGHGVKGWAFDDGNDVWMGRTINETSRLGYETFKVIEGWSNPKSKLQINRQVIVDRGNRSGYSGIFSVEGKSCINRCFYVELIRGRKEETEVLWTSNSIVVFCGTSGTYGTGSWPDGADLNLMPI

SEQ ID NO: 20892 - protein, 469 aa, Artificial Sequence
  derived and/or modified protein sequence (wt) from neuraminidase__InfluenzaA__AEK29215
MNPNQKIITIGSVSLTISTICFFMQIAILITTVTLHFKQYEFNSPPNNQVMLCEPTIIERNITEIVYLTNTTIEKEICPKLAEYRNWSKPQCDITGFAPFSKDNSIRLSAGGDIWVTREPYVSCDPDKCYQFALGQGTTLNNVHSNNTVRNRTPYRTLLMNELGVPFHLGTKQVCIAWSSSSCHDGKAWLHVCITGDDKNATASFIYNGRLVDSVVSWSKEILRTQESECVCINGTCTVVMTDGSASGKADTKILFIEEGKIVHTSTLSGSAQHVEECSCYPRYPGVRCVCRDNWKGSNRPIVDINIKDHSIVSSYVCSGLVGDTPRKNDSSSSSHCLDPNNEEGGHGVKGWAFDDGNDVWMGRTINETSRLGYETFKVIEGWSNPKSKLQINRQVIVDRGDRSGYSGIFSVEGKSCINRCFYVELIRGRKEETEVLWTSNSIVVFCGTSGTYGTGSWPDGADLNLMPI

SEQ ID NO: 20893 - protein, 469 aa, Artificial Sequence; identical to SEQ ID NO: 20891
  derived and/or modified protein sequence (wt) from neuraminidase__InfluenzaA__AEK29237

SEQ ID NO: 20894 - protein, 469 aa, Artificial Sequence; identical to SEQ ID NO: 19518
  derived and/or modified protein sequence (wt) from neuraminidase__InfluenzaA__AEK29248

SEQ ID NO: 20895 - protein, 469 aa, Artificial Sequence; identical to SEQ ID NO: 19518
  derived and/or modified protein sequence (wt) from neuraminidase__InfluenzaA__AEK29259

SEQ ID NO: 20896 - protein, 469 aa, Artificial Sequence; identical to SEQ ID NO: 19518
  derived and/or modified protein sequence (wt) from neuraminidase__InfluenzaA__AEK29270

SEQ ID NO: 20897 - protein, 470 aa, Artificial Sequence
  derived and/or modified protein sequence (wt) from neuraminidase__InfluenzaA__AEK59839
MNPNQKIITIGSISIAIGIISLMLQIGNIISIWASHSIQTGSQNHTGICNQRIITYENSTWVNHTYVNINNTNVVAGKDKTSVTLAGNSSLCSISGWAIYTKDNSIRIGSKGDVFVIREPFISCSHLECRTFFLTQGALLNDKHSNGTVKDRSPYRALMSCPLGEAPSPYNSKFESVAWSASACHDGLGWLTIGISGPDNGAVAVLKYNGIITGTIKSWKKQILRTQESECVCMNGSCFTIMTDGPSNGAASYKIFKIEKGKVTKSIELNAPNFHYEECSCYPDTGIVMCVCRDNWHGSNRPWVSFNQNLDYQIGYICSGVFGDNPRPKDGEGSCNPVTVDGADGVKGFSYKYDNGVWIGRTKSNRLRKGFEMIWDPNGWTNTDSDFSVKQDVVAITDWSGYSGSFVQHPELTGLDCIRPCFWVELVRGLPRENTTIWTSGSSISFCGVNSDTANWSWPDGAELPFTIDK

SEQ ID NO: 20898 - protein, 469 aa, Artificial Sequence
  derived and/or modified protein sequence (wt) from neuraminidase__InfluenzaA__AEK98375
MNPNQKIITIGSVSLTISTICFFMQIAILITTVTLHFKQYEFNSPPNNQVMLCEPTIIERNITEIVYLTNTTIEKEICPKLAEYRNWSKPQCDITGFAPFSKDNSIRLSAGGDIWVTREPYVSCDPDKCYQFALGQGTTLNNVHSNDTVRDRTPYRTLLMNELGVPFHLGTKQVCIAWSSSSCHDGKAWLHVCITGDDKNATASFIYNGRLVDSIVSWSKEILRTQESECVCINGTCTVVMTDGSASGEADTKILFIEEGKIVHTSTLSGSAQHVEECSCYPRYPGVRCVCRDNWKGSNRPIVDINIKDHSIVSSYVCSGLVGDTPRKNDSSSSSHCLDPNNEEGGHGVKGWAFDDGNDVWMGRTISEKSRLGYETFKVIEGWSNPKSKLQTNRQVIVDRGNRSGYSGIFSVEGKSCINRCFYVELIRGRKEETEVLWTSNSIVVFCGTSGTYGTGSWPDGADINLMPI

SEQ ID NO: 20899 - protein, 469 aa, Artificial Sequence; identical to SEQ ID NO: 16599
  derived and/or modified protein sequence (wt) from neuraminidase__InfluenzaA__AEK98377

SEQ ID NO: 20900 - protein, 469 aa, Artificial Sequence; identical to SEQ ID NO: 16041
  derived and/or modified protein sequence (wt) from neuraminidase__InfluenzaA__AEK98379

SEQ ID NO: 20901 - protein, 469 aa, Artificial Sequence
  derived and/or modified protein sequence (wt) from neuraminidase__InfluenzaA__AEK98381
MNPNQKIITIGSVSLTISTICFFMQIAILITTVTLHFKQYEFNSPPNNQVMLCEPTIIERNITEIVYLTNTTIEKEICPKLAEYRNWSKPQCDITGFAPFSKDNSIRLSAGGDIWVTREPYVSCDPDKCYQFALGQGTTLNNVHSNDTVRDRTPYRTLLMNELGVPFHLGTKQVCIAWSSSSCHDGEAWLHVCITGDDKNATASFIYNGRLVDSIVSWSKEILRTQESECVCINGTCTVVMTDGSASGEADTKILFIEEGKIVHTSTLSGSAQHVEECSCYPRYPGVRCVCRDNWKGSNRPIVDINIKDHSIVSSYVCSGLVGDTPRKNDSSSSSHCLDPNNEEGGHGVKGWAFDDGNDVWMGRTISEKSRLGYETFKVIEGWSNPKSKLQINRQVIVDRGNRSGYSGIFSVEGKSCINRCFYVELIRGRKEETEVLWTSNSIVVFCGTSGTYGTGSWPDGADINLMPI

SEQ ID NO: 20902 - protein, 469 aa, Artificial Sequence; identical to SEQ ID NO: 16041
  derived and/or modified protein sequence (wt) from neuraminidase__InfluenzaA__AEK98383

SEQ ID NO: 20903 - protein, 469 aa, Artificial Sequence; identical to SEQ ID NO: 16599
  derived and/or modified protein sequence (wt) from neuraminidase__InfluenzaA__AEK98385

SEQ ID NO: 20904 - protein, 469 aa, Artificial Sequence
  derived and/or modified protein sequence (wt) from neuraminidase__InfluenzaA__AEK98387
MNPNQKIITIGSVSLTISTICFFMQIAILITTVTLHFKQYEFNSPPNNQVMLCEPTIIERNITEIVYLTNTTIEKEICPKLAEYRNWSKPQCDITGFAPFSKDNSIRLSAGGDIWVTREPYVSCDPDKCYQFALGQGTTLNNVHSNNTVRDRTPYRTLLMNELGVPFHLGTKQVCIAWSSSSCHDGKAWLHVCITGDDKNATASFIYNGRLIDSVVSWSKEILRTQESECVCINGTCTVVMTDGSASGKADTKILFIEEGKIVHTSTLSGSAQHVEECSCYPRYPGVRCVCRDNWKGSNRPIVDINIKDHSIVSSYVCSGLVGDTPRKNDSSSSSHCLDPNNEEGGHGVKGWAFDDGNDVWMGRTINETSRLGYETFKVIEGWSNPKSKLQINRQVIVDRGNRSGYSGIFSVEGKSCINRCFYVELIRGRKEETEVLWTSNSIVVFCGTSGTYGTGSWPDGADLNLMPI

SEQ ID NO: 20905 - protein, 469 aa, Artificial Sequence; identical to SEQ ID NO: 16599
  derived and/or modified protein sequence (wt) from neuraminidase__InfluenzaA__AEK98389

SEQ ID NO: 20906 - protein, 469 aa, Artificial Sequence
  derived and/or modified protein sequence (wt) from neuraminidase__InfluenzaA__AEK98393
MNPNQKIITIGSVSLTISTICFFMQIAILITTVTLHFKQYEFNSPPNNQVMLCEPTIIERNITEIVYLTNTTIEKEICPKLAEYRNWSKPQCDITGFAPFSKDNSIRLSAGGDIWVTREPYVSCDPDKCYQFALGQGTTLNNVHSNNTVRDRTPYRTLLMNELGVPFHLGTKQVCIAWSSSSCHDGKAWLHVCITGDDKNATASFIYNGRLVDSVVSWSKEILRTQESECVCINGTCTVVMTDGSASGKADTKILFIEEGKIVHTSTLSGSAQHVEECSCYPRYPGVRCVCRDNWKGSNRPIVDINIKDHSIASSYVCSGLVGDTPRKNDSSSSSHCLDPNNEEGGHGVKGWAFDDGNDVWMGRTINETSRLGYETFKVIEGWSNPKSKLQINRQVIVDRGNRSGYSGIFSVEGKSCINRCFYVELIRGRKEETEVLWTSNSIVVFCGTSGTYGTGSWPDGADLNLMPI

SEQ ID NO: 20907 - protein, 469 aa, Artificial Sequence; identical to SEQ ID NO: 19518
  derived and/or modified protein sequence (wt) from neuraminidase__InfluenzaA__AEK98395

SEQ ID NO: 20908 - protein, 469 aa, Artificial Sequence
  derived and/or modified protein sequence (wt) from neuraminidase__InfluenzaA__AEK98397
MNPNQKIITIGSVSLTISTICFFMQIAILITTVTLHFKQYEFNSPPNNQVMLCEPTIIERNITEIVYLTNTTIEKEICPKLAEYRNWSKPQCDITGFAPFSKDNSIRLSAGGDIWVTREPYVSCDPNKCYQFALGQGTTLNNVHSNNTVRDRTPYRTLLMNELGVPFHLGTKQVCIAWSSSSCHDGKAWLHVCITGDDKNATASFIYNGRLVDSVVSWSKEILRTQESECVCINGTCTVVMTDGSASGKADTKILFIEEGKIVHTSTLSGSAQHVEECSCYPRYPGVRCVCRDNWKGSNRPIVDINMKDHSIVSSYVCSGLVGDTPRKNDSSSSSHCLDPNNEEGGHGVKGWAFDDGNDVWMGRTISEKSRLGYETFKVIEGWSNPKSKLQINRQVIVDRGNRSGYSGIFSVEGKSCINRCFYVELIRGRKEETEVLWTSNSIVVFCGTSGTYGTGSWPDGADINFMPI

SEQ ID NO: 20909 - protein, 469 aa, Artificial Sequence; identical to SEQ ID NO: 16599
  derived and/or modified protein sequence (wt) from neuraminidase__InfluenzaA__AEK98399

SEQ ID NO: 20910 - protein, 469 aa, Artificial Sequence; identical to SEQ ID NO: 16512
  derived and/or modified protein sequence (wt) from neuraminidase__InfluenzaA__AEK98403

SEQ ID NO: 20911 - protein, 469 aa, Artificial Sequence
  derived and/or modified protein sequence (wt) from neuraminidase__InfluenzaA__AEK98405
MNPNQKIITIGSVSLTISTICFFMQIAILITTVTLHFKQYEFNSPPNNQVMLCEPTIIERNITEIVYLTNTTIEKEICPKLAEYRNWSKPQCDITGFAPFSKDNSIRLSAGGDIWVTREPYVSCDPDKCYQFALGQGTTLNNVHSNNTVRDRTPYRTLLMNELGVPFHLGTKQVCIAWSSSSCHDGKAWLHVCITGDDKNATASFIYNGRLVDSIVSWSKEILRTQESECVCINGTCTVVMTDGSASGKADTKILFIEEGKIVHTSTLSGSAQHVEECSCYPRYPGVRCVCRDNWKGSNRPIVDINIKDHSIVSSYVCSGLVGDTPRKNDSSSSSHCLDPNNEEGGHGVKGWAFDDGNDVWMGRTISEKSRLGYETFKVIEGWSNPKSKLQINRQVIVDRDNRSGYSGIFSVEGKSCINRCFYVELIRGRKEETEVLWTSNSIVVFCGTSGTYGTGSWPDGADINLMPI

SEQ ID NO: 20912 - protein, 469 aa, Artificial Sequence
  derived and/or modified protein sequence (wt) from neuraminidase__InfluenzaA__AEK98407
MNPNQKIITIGSVSLTISTICFFMQIAILITTVTLHFKQYEFNSPPNNQVMLCEPTIIERNITEIVYLTNTTIEKEICPKLAEYRNWSKPQCDITGFAPFSKDNSIRLSAGGDIWVTREPYVSCDPDKCYQFALGQGTTLNNVHSNNTVRVRTPYRTLLMNELGVPFHLGTKQVCIAWSSSSCHDGKAWLHVCITGDDKNATASFIYNGRLVDSIVSWSKEILRTQESECVCINGTCTVVMTDGSASGKADTKILFIEEGKIVHTSTLSGSAQHVEECSCYPRYPGVRCVCRDNWKGSNRPIVDINIKDHSIVSSYVCSGLVGDTPRKNDSSSSSHCLDPNNEEGGHGVKGWAFDDGNDVWMGRTISEKSRLGYETFKVIEGWSNPKSKLQINRQVIVDRDNRSGYSGIFSVEGKSCINRCFYVELIRGRKEETEVLWTSNSIVVFCGTSGTYGTGSWPDGADINLMPI

SEQ ID NO: 20913 - protein, 469 aa, Artificial Sequence; identical to SEQ ID NO: 14327
  derived and/or modified protein sequence (wt) from neuraminidase__InfluenzaA__AEL11690

SEQ ID NO: 20914 - protein, 469 aa, Artificial Sequence; identical to SEQ ID NO: 19013
  derived and/or modified protein sequence (wt) from neuraminidase__InfluenzaA__AEL89300

SEQ ID NO: 20915 - protein, 469 aa, Artificial Sequence; identical to SEQ ID NO: 19013
  derived and/or modified protein sequence (wt) from neuraminidase__InfluenzaA__AEL89310

SEQ ID NO: 20916 - protein, 469 aa, Artificial Sequence; identical to SEQ ID NO: 19013
  derived and/or modified protein sequence (wt) from neuraminidase__InfluenzaA__AEL89320

SEQ ID NO: 20917 - protein, 469 aa, Artificial Sequence; identical to SEQ ID NO: 19013
  derived and/or modified protein sequence (wt) from neuraminidase__InfluenzaA__AEL89330

SEQ ID NO: 20918 - protein, 469 aa, Artificial Sequence; identical to SEQ ID NO: 19013
  derived and/or modified protein sequence (wt) from neuraminidase__InfluenzaA__AEL89340

SEQ ID NO: 20919 - protein, 469 aa, Artificial Sequence; identical to SEQ ID NO: 19013
  derived and/or modified protein sequence (wt) from neuraminidase__InfluenzaA__AEL89350

SEQ ID NO: 20920 - protein, 469 aa, Artificial Sequence; identical to SEQ ID NO: 19013
  derived and/or modified protein sequence (wt) from neuraminidase__InfluenzaA__AEL89360

SEQ ID NO: 20921 - protein, 469 aa, Artificial Sequence; identical to SEQ ID NO: 19013
  derived and/or modified protein sequence (wt) from neuraminidase__InfluenzaA__AEL89370

SEQ ID NO: 20922 - protein, 469 aa, Artificial Sequence; identical to SEQ ID NO: 19013
  derived and/or modified protein sequence (wt) from neuraminidase__InfluenzaA__AEL89394

SEQ ID NO: 20923 - protein, 469 aa, Artificial Sequence; identical to SEQ ID NO: 19013
  derived and/or modified protein sequence (wt) from neuraminidase__InfluenzaA__AEL89404

SEQ ID NO: 20924 - protein, 469 aa, Artificial Sequence; identical to SEQ ID NO: 19013
  derived and/or modified protein sequence (wt) from neuraminidase__InfluenzaA__AEL89414

SEQ ID NO: 20925 - protein, 469 aa, Artificial Sequence; identical to SEQ ID NO: 19013
  derived and/or modified protein sequence (wt) from neuraminidase__InfluenzaA__AEL89424

SEQ ID NO: 20926 - protein, 469 aa, Artificial Sequence; identical to SEQ ID NO: 19013
  derived and/or modified protein sequence (wt) from neuraminidase__InfluenzaA__AEL89434

SEQ ID NO: 20927 - protein, 469 aa, Artificial Sequence; identical to SEQ ID NO: 19013
  derived and/or modified protein sequence (wt) from neuraminidase__InfluenzaA__AEL89444

SEQ ID NO: 20928 - protein, 469 aa, Artificial Sequence; identical to SEQ ID NO: 19013
  derived and/or modified protein sequence (wt) from neuraminidase__InfluenzaA__AEL89454

SEQ ID NO: 20929 - protein, 469 aa, Artificial Sequence; identical to SEQ ID NO: 19013
  derived and/or modified protein sequence (wt) from neuraminidase__InfluenzaA__AEL89464

SEQ ID NO: 20930 - protein, 469 aa, Artificial Sequence; identical to SEQ ID NO: 19013
  derived and/or modified protein sequence (wt) from neuraminidase__InfluenzaA__AEL89474

SEQ ID NO: 20931 - protein, 469 aa, Artificial Sequence
  derived and/or modified protein sequence (wt) from neuraminidase__InfluenzaA__AEL89484
MNPNQKIITIGSVCMTIGMANLMLQIGNIISIWISHSIQLGNQNQIETCNQSVITYENNTWVNQTYVNISNTNFAAGQSVVSVKLAGNSSLCPVSGWAIYSKDNSIRIGSKGDVFVIREPFISCSPLECRTFFLTQGALLNDKHSNGTIKDRSPYRTLMSCPIGEVPSPYNSRFESVAWSASACHDGINWLTIGISGPDNGAVAVLKYNGIITDTIKSWRNNILRTQESECACVNGSCFTVMTDGPSDGQASYKIFRIEKGKIVKSVEINAPNYHYEECSCYPDSSEITCVCRDNWHGSNRPWVSFNQNLEYQIGYICSGIFGDNPRPNDKTGSCGPVSSNGANGVKGFSFKYGNGVWIGRTKSISSRNGFEMIWDPNGWTGTDNNFSIKQDIVGINEWSGYSGSFVQHPELTGLDCIRPCFWVELIRGRPKENTIWTSGSSISFCGVNSDTVGWSWPDGAELPFTIDK

SEQ ID NO: 20932 - protein, 469 aa, Artificial Sequence; identical to SEQ ID NO: 20802
  derived and/or modified protein sequence (wt) from neuraminidase__InfluenzaA__AEL89494

SEQ ID NO: 20933 - protein, 469 aa, Artificial Sequence; identical to SEQ ID NO: 20808
  derived and/or modified protein sequence (wt) from neuraminidase__InfluenzaA__AEL89514

SEQ ID NO: 20934 - protein, 469 aa, Artificial Sequence; identical to SEQ ID NO: 20786
  derived and/or modified protein sequence (wt) from neuraminidase__InfluenzaA__AEL89524

SEQ ID NO: 20935 - protein, 469 aa, Artificial Sequence
  derived and/or modified protein sequence (wt) from neuraminidase__InfluenzaA__AEL89534
MNPNQKIITIGSVCMTIGMANLILQIGNIISIWISHSIQLGNQNQIGTCNQSVITYENNTWVNQTYVNISNTNFAAGQSVVSVKLAGNSSLCPVSGWAIYSKDNSIRIGSKGDVFVIREPFISCSPLECRTFFLTQGALLNDKHSNGTIKDRSPYRTLMSCPIGEVPSPYNSRFESVAWSASACHDGINWLTIGISGPDNGAVAVLKYNGIITDTIKSWRNNILRTQESECACVNGSCFTVMTDGPSDGQASYKIFRIEKGKIVKSVEINAPNYHYEECSCYPDSSEITCVCRDNWHGSNRPWVSFNQNLEYQIGYICSGIFGDNPRPNDKTGSCGPVSSNGANGVKGFSFKYGNGVWIGRTKSISSRNGFEMIWDPNGWTGTDNNFSKKQDIVGINEWSGYSGSFVQHPELTGLDCIRPCFWVELIRGRPKENTIWTSGSSISFCGVNSDTVGWSWPDGAELPFTIDK

SEQ ID NO: 20936 - protein, 469 aa, Artificial Sequence; identical to SEQ ID NO: 20808
  derived and/or modified protein sequence (wt) from neuraminidase__InfluenzaA__AEL89544

SEQ ID NO: 20937 - protein, 469 aa, Artificial Sequence; identical to SEQ ID NO: 20808
  derived and/or modified protein sequence (wt) from neuraminidase__InfluenzaA__AEL89554

SEQ ID NO: 20938 - protein, 469 aa, Artificial Sequence
  derived and/or modified protein sequence (wt) from neuraminidase__InfluenzaA__AEL89564
MNPNQKIITIGSVCITIGMANLILQIGNIISIWISHSIQLGNQNQIETCNQSVVTYENNTWVNQTYVNISNTNFAAGQSVVSVKLAGNSSLCPVSGWAIYSKDNSIRIGSKGDVFVIREPFISCSPLECRTFFLTQGALLNDKHSNGTIKDRSPYRTLMSCPIGEVPSPYNSRFESVAWSASACHDGISWLTIGISGPDNGAVAVLKYNGIITDTIKSWRNNILRTQESECACVNGSCFTVMTDGPSDGQASYKIFRIEKGKIVKSVEMNAPNYHYEECSCYPDSSEITCVCRDNWHGSNRPWVSFNQNLEYQIGYICSGIFGDNPRPNDKTGSCGPVSSNGANGVKGFSFKYGNGVWIGRTKSISSRNGFEMIWDPNGWTGTDNNFSIKQDIVGINEWSGYSGSFVQHPELTGLDCIRPCFWVELIRGRPKENTIWTSGSSISFCGVNSDTVGWSWPDGAELPFTIDK

SEQ ID NO: 20939 - protein, 469 aa, Artificial Sequence; identical to SEQ ID NO: 20808
  derived and/or modified protein sequence (wt) from neuraminidase__InfluenzaA__AEL89574

SEQ ID NO: 20940 - protein, 469 aa, Artificial Sequence; identical to SEQ ID NO: 20808
  derived and/or modified protein sequence (wt) from neuraminidase__InfluenzaA__AEL89584

SEQ ID NO: 20941 - protein, 469 aa, Artificial Sequence; identical to SEQ ID NO: 17755
  derived and/or modified protein sequence (wt) from neuraminidase__InfluenzaA__AEL89604

SEQ ID NO: 20942 - protein, 469 aa, Artificial Sequence; identical to SEQ ID NO: 20257
  derived and/or modified protein sequence (wt) from neuraminidase__InfluenzaA__AEL89624

SEQ ID NO: 20943 - protein, 469 aa, Artificial Sequence
  derived and/or modified protein sequence (wt) from neuraminidase__InfluenzaA__AEL89634
MNPNQKIITIGSVCITIGMANLILQIGNIISIWISHSIQLGNQNQIETCNQSVITYENNTWVNQTYVNISNTNFAAGQSVVSVKLAGNSSLCPVSGWAIYSKDNSIRIGSKGDVFVIREPFISCSPLECRTFFLTQGALLNDKHSNGTIKDRSPYRTLMSCPIGEVPSPYNSRFESVAWSASACHDGISWLTIGISGPDNGAVAVLKYNGIITDTIKSWRNNILRTQESECACVNGSCFTVMTDGPSDGQASYKIFRIEKGKIVKSVEMNAPNYHYEECSCYPDSSEITCVCRDNWHGSNRPWVSFNQNLEYQIGYICSGIFGDNPRPNDKTGSCGPVSSNGANGVKGFSYKYGNGVWIGRTKSISSRNGFEMIWDPNGWTGTDNNFSIKQDIVGINEWSGYSGSFVQHPELTGLDCIRPCFWVELIRGRPKENTIWTSGSSISFCGVNSDTVGWSWPDGAELPFTIDK

SEQ ID NO: 20944 - protein, 469 aa, Artificial Sequence; identical to SEQ ID NO: 19013
  derived and/or modified protein sequence (wt) from neuraminidase__InfluenzaA__AEL89644

SEQ ID NO: 20945 - protein, 469 aa, Artificial Sequence; identical to SEQ ID NO: 20709
  derived and/or modified protein sequence (wt) from neuraminidase__InfluenzaA__AEL89654

SEQ ID NO: 20946 - protein, 469 aa, Artificial Sequence; identical to SEQ ID NO: 20257
  derived and/or modified protein sequence (wt) from neuraminidase__InfluenzaA__AEL89664

SEQ ID NO: 20947 - protein, 469 aa, Artificial Sequence; identical to SEQ ID NO: 20257
  derived and/or modified protein sequence (wt) from neuraminidase__InfluenzaA__AEL89674

SEQ ID NO: 20948 - protein, 469 aa, Artificial Sequence; identical to SEQ ID NO: 20257
  derived and/or modified protein sequence (wt) from neuraminidase__InfluenzaA__AEL89694

SEQ ID NO: 20949 - protein, 469 aa, Artificial Sequence
  derived and/or modified protein sequence (wt) from neuraminidase__InfluenzaA__AEL89704
MNPNQKIITIGSVCMTIGMANLILQIGNIILIWISHSIQLGNQNQIETCNQSVITYENNTWVNQTYVNISNTNFAAGQSVVSVKLAGNSSLCPVSGWAIYSKDNSIRIGSKGDVFVIREPFISCSPLECRTFFLTQGALLNDKHSNGTIKDRSPYRTLMSCPIGEVPSPYNSRFESVAWSASACHDGINWLTIGISGPDNGAVAVLKYNGIITDTIKSWRNNILRTQESECACVNGSCFTVMTDGPNDGQASYKIFRIEKGKIVKSVEMNAPNYHYEECSCYPDSSEITCVCRDNWHGSNRPWVSFNQNLEYQIGYICSGIFGDNPRPNDKTGSCGPVSSNGANGVKGFSFKYGNGVWIGRTKSISSRNGFEMIWDPNGWTGTDNNFSVKQDIIGINEWSGYSGSFVQHPELTGLDCIRPCFWVELIRGRPKENTIWTSGSSISFCGVNSDTVGWSWPDGAELPFTIDK

SEQ ID NO: 20950 - protein, 469 aa, Artificial Sequence; identical to SEQ ID NO: 20949
  derived and/or modified protein sequence (wt) from neuraminidase__InfluenzaA__AEL89714

SEQ ID NO: 20951 - protein, 469 aa, Artificial Sequence; identical to SEQ ID NO: 20257
  derived and/or modified protein sequence (wt) from neuraminidase__InfluenzaA__AEL89744

SEQ ID NO: 20952 - protein, 469 aa, Artificial Sequence
  derived and/or modified protein sequence (wt) from neuraminidase__InfluenzaA__AEL89754
MNPNQKIITIGSVCITIGMANLILQIGNIISIWISHSIQLGNQNQIETCNQSVITYENNTWVNQTYVNISNTNFAAGQSVVSVKLAGNSSLCPVSGWAIYSKDNSIRIGSKGDVFVIREPFISCSPLECRTFFLTQGALLNDKHSNGTIKDRSPYRTLMSCPIGEVPSPYNSRFESVAWSASACHDGISWLTIGISGPDNGAVAVLKYNGIITDTIKSWRNNILRTQESECACVNGSCFTVMTDGPSDGQASYKIFRIEKGKIVKSVEMNAPNYHYEECSCYPDSSEITCVCRDNWHGSNRPWVSFNQNLEYQIGYICSGIFGDNPRPNDKTGSCGPVSSNGANGVKGFSFKYGNGVWIGRTKSISSRNGFEMIWDPNGWTGTDNNFSIKQDIVGINEWSGYSGSFVQHPELTGLDCIRPCFWVELIRGRPKENTIWTSGSSISFCGVNSDTVGWSWPDGAELPFIIDK

SEQ ID NO: 20953 - protein, 469 aa, Artificial Sequence; identical to SEQ ID NO: 19013
  derived and/or modified protein sequence (wt) from neuraminidase__InfluenzaA__AEL89774

SEQ ID NO: 20954 - protein, 469 aa, Artificial Sequence
  derived and/or modified protein sequence (wt) from neuraminidase__InfluenzaA__AEL89784
MNPNQKIITIGSVCMTIGMANLILQIGNIISIWISHSIQLGNQNQIETCNQSVITYENNTWVNQTYVNISNTNFAAGQSVVSVKLAGNSSLCPVSGWAIYSKDNSIRIGSKGDVFVIREPFISCSPLECRTFFLTQGALLNDKHSNGTIKDRSPYRTLMSCPIGEVPSPYNSRFESVAWSASACHDGINWLTIGISGPDNGAVAVLKYNGIITDTIKSWRNNILRTQESECACVNGSCFTVMTDGPSDGQASYKIFRIEKGKIVKSVEMNAPNYHYEECSCYPDSSEITCVCRDNWHGSNRPWVSFNQNLEYQIGYICSGIFGDNPRPNDKTGSCGPVSSNGANGVKGFSFKYGNGVWIGRTKSISLRNGFEMIWDPNGWTGTDNNFSVKQDIIGINEWSGYSGSFVQHPELTGLDCIRPCFWVELIRGRPKENTIWTSGSSISFCGVNSDTVGWSWPDGAELPFTIDK

SEQ ID NO: 20955 - protein, 469 aa, Artificial Sequence
  derived and/or modified protein sequence (wt) from neuraminidase__InfluenzaA__AEL89794
MNPNQKIITIGSVCMTIGMANLILQIGNIISIWISHSIQLGNQSQIETCNQSVITYENNTWVNQTYVNISNTNFAAGQSVVSVKLAGNSSLCPVSGWAIYSKDNSIRIGSKGDVFVIREPFISCSPLECRTFFLTQGALLNDKHSNGTIKDRSPYRTLMSCPIGEVPSPYNSRFESVAWSASACHDGINWLTIGISGPDNGAVAVLKYNGIITDTIKSWRNNILRTQESECACVNGSCFTIMTDGPSDGQASYKIFRIEKGKIVKSVEMNAPNYHYEECSCYPDSSEITCVCRDNWHGSNRPWVSFNQNLEYQIGYICSGIFGDNPRPNDKTGSCGPVSSNGANGVKGFSFKYGNGVWIGRTKSISSRKGFEMIWDPNGWTGTDNNFSIKQDIVGINEWSGYSGSFVQHPELTGLDCIRPCFWVELIRGRPKENTIWTSGSSISFCGVNSDAVGWSWPDGAELPFTIDK

SEQ ID NO: 20956 - protein, 469 aa, Artificial Sequence; identical to SEQ ID NO: 20709
  derived and/or modified protein sequence (wt) from neuraminidase__InfluenzaA__AEL89804

SEQ ID NO: 20957 - protein, 469 aa, Artificial Sequence
  derived and/or modified protein sequence (wt) from neuraminidase__InfluenzaA__AEL89815
MNPNQKIITIGSVCMTIGMANLILQIGNIISIWISHSIQLGNQNQIETCNQSVITYENNTWVNQTYVNISNTNFAAGQSVVSVKLAGNSSLCPVSGWAIYSKDNSIRIGSKGDVFVIREPFISCSPLECRTFFLTQGALLNDKHSNGTIKDRSPYRTLMSCPIGEVPSPYNSRFESVAWSASACHDGINWLTIGISGPDNGAVAVLKYNGIITDTIKSWRNNILRTQESECACVNGSCFTVMTDGPSDGQASYKIFRIEKGKIVKSVEMNAPNYHYEECSCYPDSSEITCVCRDNWHGSNRPWVSFNQNLEYQIGYICSGIFGDNPRPNDKTGSCGPVSSNGANGVKGFSFKYGNGVWIGRTKSISSRNGFEMIWDPNGWTGTDNNFSVKQDIIGINEWSGYSGSFVQHPELTGLDCIRPCFWVELIRGRPKENTIWTSGSSISFCGVNSDTVGWSWPDGAELPFTIDK

SEQ ID NO: 20958 - protein, 469 aa, Artificial Sequence
  derived and/or modified protein sequence (wt) from neuraminidase__InfluenzaA__AEL89825
MNPNQKIITIGSVCMTIGMANLILQIGNIISIWISHSIQLGNQNQIETCNQSVITYENNTWVNQTYVNISNTNFAAGQSVVSVKLAGNSSLCPVSGWAIYSKDNSIRIGSKGDVFVIREPFISCSPLECRTFFLTQGALLNDKHSNGTIKDRSPYRTLMSCPIGEVPSPYNSRFESVAWSASACHDGINWLTIGISGPDNGAVAVLKYNGIITDTIKSWRNNILRTQESECACVNGSCFTVMTDGPSDGQASYKIFRIEKGKIVKSVEMNAPNYHYEECSCYPDSSEITCVCRDNWHGANRPWVSFNQNLEYQIGYICSGIFGDNPRPNDKTGSCGPVSSNGANGVKGFSFKYGNGVWIGRTKSISSRNGFEMIWDPNGWTGTDNNFSIKQDIVGINEWSGYSGSFVQHPELTGLDCIRPCFWVELIRGRPKENTIWTSGSSISFCGVNSDTVGWSWPDGAELPFTIDK

SEQ ID NO: 20959 - protein, 469 aa, Artificial Sequence
  derived and/or modified protein sequence (wt) from neuraminidase__InfluenzaA__AEL89835
MNPNQKIITIGSVCMTIGMANLILQIGNIISIWISHSIQLGNQSQIETCNQSVITYENNTWVNQTYVNISNTNFAAGQSVVSVKLAGNSSLCPVSGWAIYSKDNSIRIGSKGDVFVIREPFISCSPLECRTFFLTQGALLNDKHSNGTIKDRSPYRTLMSCPIGEVPSPYNSRFESVAWSASACHDGINWLTIGISGPDNGAVAVLKYNGIITDTIKSWRNNILRTQESECVCVNGSCFTIMTDGPSDGQASYKIFRIEKGKIVKSVEMNAPNYHYEECSCYPDSSEITCVCRDNWHGSNRPWVSFNQNLEYQIGYICSGIFGDNPRPNDKTGSCGPVSSNGANGVKGFSFKYGNGVWIGRTKSISSRKGFEMIWDPNGWTGTDNNFSIKQDIVGINEWSGYSGSFVQHPELTGLDCIRPCFWVELIRGRPKENTIWTSGSSISFCGVNSDTVGWSWPDGAELPFTIDK

SEQ ID NO: 20960 - protein, 469 aa, Artificial Sequence
  derived and/or modified protein sequence (wt) from neuraminidase__InfluenzaA__AEL89845
MNPNQKIITIGSVCMTIGMANLILQIGNIISIWISHSIQLGNKNQIETCNQSVITYENNTWVNQTYVNISNTNFATGQSVVSVKLAGNSSLCPVSGWAIYSKDNSIRIGSKGDVFVIREPFISCSPLECRTFFLTQGALLNDKHSNGTIKDRSPYRTLMSCPIGEAPSPYNSRFESVAWSASACHDGINWLTIGISGPDNGAVAVLKYNGIITDTIKSWRNNILRTQESECACVNGSCFTVMTDGPSDGQASYKIFRIEKGKIVKSVEMNAPNYHYEECSCYPDSSEITCVCRDNWHGSNRPWVSFNQNLEYQIGYICSGIFGDNPRPNDKKGSCGPVSSNGANGVKGFSFKYGNGVWIGRTKSISSRNGFEMIWDPNGWTGTDNNFSIKQDIVGINEWSGYSGSFVQHPELTGLDCIRPCFWVELIRGRPKENTIWTSGSSISFCGVNSDTVGWSWPDGAELPFTIDK

SEQ ID NO: 20961 - protein, 469 aa, Artificial Sequence; identical to SEQ ID NO: 20958
  derived and/or modified protein sequence (wt) from neuraminidase__InfluenzaA__AEL89855

SEQ ID NO: 20962 - protein, 469 aa, Artificial Sequence; identical to SEQ ID NO: 20257
  derived and/or modified protein sequence (wt) from neuraminidase__InfluenzaA__AEL93581

SEQ ID NO: 20963 - protein, 469 aa, Artificial Sequence
  derived and/or modified protein sequence (wt) from neuraminidase__InfluenzaA__AEL93591
MNPNQKIITIGSVCMTIGMANLILQIGNIISIWISHSIQLGNQNQIETCNQSVITYENNTWVNQTYVNISNTNFAAGQSVVSVNLAGNSSLCPVSGWAIYSKDNSIRIGSKGDVFVIREPFISCSPLECRTFFLTQGALLNDKHSNGTIKDRSPYRTLMSCPIGEVPSPYNSRFESVAWSASACHDGINWLTIGISGPDNGAVAVLKYNGIITDTIKSWRNNILRTQESECACVNGSCFTIMTDGPSDGQASYKIFRIEKGKIVKSVEMNAPNYHYEECSCYPDSSEITCVCRDNWHGSNRPWVSFNQNLEYQIGYICSGIFGDNPRPNDKTGSCGPVSSNGANGVKGFSFKYGNGVWIGRTKSISSRKGFEMIWDPNGWTGTDNNFSIKQDIVGINEWSGYSGSFVQHPELTGLDCIRPCFWVELIRGRPKENTIWTSGSSISFCGVNSDTVGWSWPDGAELPFTIDK

SEQ ID NO: 20964 - protein, 469 aa, Artificial Sequence; identical to SEQ ID NO: 20709
  derived and/or modified protein sequence (wt) from neuraminidase__InfluenzaA__AEL93601

SEQ ID NO: 20965 - protein, 469 aa, Artificial Sequence; identical to SEQ ID NO: 20257
  derived and/or modified protein sequence (wt) from neuraminidase__InfluenzaA__AEL93611

SEQ ID NO: 20966 - protein, 469 aa, Artificial Sequence; identical to SEQ ID NO: 20257
  derived and/or modified protein sequence (wt) from neuraminidase__InfluenzaA__AEL93621

SEQ ID NO: 20967 - protein, 469 aa, Artificial Sequence; identical to SEQ ID NO: 20257
  derived and/or modified protein sequence (wt) from neuraminidase__InfluenzaA__AEL93631

SEQ ID NO: 20968 - protein, 469 aa, Artificial Sequence
  derived and/or modified protein sequence (wt) from neuraminidase__InfluenzaA__AEL93641
MNPNQKIITIGSVCITIGMANLILQIGNIISIWISHSIQLGNQNQIETCNQSVITYENNTWVNQTYVNISNTNFAAGQSVVSVKLAGNSSLCPVSGWAIYSKDNSIRIGSKGDVFVIREPFISCSPLECRTFFLTQGALLNDKHSNGTIKDRSPYRTLMSCPIGEVPSPYNSRFESVAWSASACHDGISWLTIGISGPDNGAVAVLKYNGIITDTIKSWRNNILRTQESECACVNGSCFTVMTDGPSDGQASYKIFRIEKGKIVKSVEMNAPNYHYEECSCYPDSSEITCVCRDNWHGSNRPWVSFNHNLEYQIGYICSGIFGDNPRPNDKTGSCGPVSSNGANGVKGFSFKYGNGVWIGRTKSISSRNGFEMIWDPNGWTGTDNNFSIKQDIVGINEWSGYSGSFVQHPELTGLDCIRPCFWVELIRGQPKENTIWTSGSSISFCGVNSDTVGWSWPDGAELPFTIDK

SEQ ID NO: 20969 - protein, 469 aa, Artificial Sequence; identical to SEQ ID NO: 20808
  derived and/or modified protein sequence (wt) from neuraminidase__InfluenzaA__AEL94890

SEQ ID NO: 20970 - protein, 469 aa, Artificial Sequence
  derived and/or modified protein sequence (wt) from neuraminidase__InfluenzaA__AEL95429
MNPNQKIITIGSVCMTIGMANLILQIGNIISIWISHSIQLGNQSQIETCNQSVITYENNTWVNQTYVNISNTNFAAGQSVVSVKLAGNSSLCPVSGWAIYSKDNSIRIGSKGDVFVIREPFISCSPLECRTFFLTQGALLNDKHSNGTIKDRSPHRTLMSCPIGEVPSPYNSRFESVAWSASACHDGINWLTIGISGPDNGAVAVLKYNGIITDTIKSWRNNILRTQESECACVNGSCFTIMTDGPSDGQASYKIFRIEKGKIVKSVEMNAPNYHYEECSCYPDSSEITCVCRDNWHGSNRPWVSFNQNLEYQIGYICSGIFGDNPRPNDKTGSCGPVSSNGANGVKGFSFKYGNGVWIGRTKSISSRKGFEMIWDPNGWTGTDNNFSIKQDIVGINEWSGYSGSFVQHPELTGLDCIRPCFWVELIRGRPKENTIWTSGSSISFCGVNSDTVGWSWPDGAELPFTIDK

SEQ ID NO: 20971 - protein, 469 aa, Artificial Sequence
  derived and/or modified protein sequence (wt) from neuraminidase__InfluenzaA__AEL97634
MNPNQKIITIGSVCMTIGMANLILQIGNIISIWVSHSIQLGNQNQIETCNQSVITYENNTWVNQTYVNISNTNFAAGQSVVSVKLAGNSSLCPVSGWAIYSKDNSIRIGSKGDVFVIREPFISCSPLECRTFFLTQGALLNDKHSNGTIKDRSPYRTLMSCPIGEVPSPYNSRFESVAWSASACHDGINWLTIGISGPDNGAVAVLKYNGIITDTIKSWRNNILRTQESECACVNGSCFTVMTDGPSDGQASYKIFRIEKGKIVKSVEMNAPNYHYEECSCYPDSSEITCVCRDNWHGSNRPWVSFNQNLEYQIGYICSGIFGDNPRPNDKTGSCGPVSSNGANGVKGFSFKYGNGVWIGRTKSISSRNGFEMIWDPNGWTGTDNNFSIKQDIVGVNEWSGYSGSFVQHPELTGLDCIRPCFWVELIRGRPKENTIWTSGSSISFCGVNSDTVGWSWPDGAELPFTIDK

SEQ ID NO: 20972 - protein, 469 aa, Artificial Sequence; identical to SEQ ID NO: 16738
  derived and/or modified protein sequence (wt) from neuraminidase__InfluenzaA__AEL99667

SEQ ID NO: 20973 - protein, 469 aa, Artificial Sequence; identical to SEQ ID NO: 16738
  derived and/or modified protein sequence (wt) from neuraminidase__InfluenzaA__AEL99677

SEQ ID NO: 20974 - protein, 469 aa, Artificial Sequence; identical to SEQ ID NO: 15776
  derived and/or modified protein sequence (wt) from neuraminidase__InfluenzaA__AEM53471

SEQ ID NO: 20975 - protein, 470 aa, Artificial Sequence; identical to SEQ ID NO: 16453
  derived and/or modified protein sequence (wt) from neuraminidase__InfluenzaA__AEM60040

SEQ ID NO: 20976 - protein, 470 aa, Artificial Sequence; identical to SEQ ID NO: 16043
  derived and/or modified protein sequence (wt) from neuraminidase__InfluenzaA__AEM60061

SEQ ID NO: 20977 - protein, 469 aa, Artificial Sequence
  derived and/or modified protein sequence (wt) from neuraminidase__InfluenzaA__AEM60072
MNPNQKIITIGSVSLTIATICFLMQIAILVTTVTLHFKQYECSSPPNNQVMPCEPTIIERNITEIVYLTNTTIEKEICPKLVEYRNWSKPQCKITGFAPFSKDNSIRLSAGGDIWVTREPYVSCDPGKCYQFALGQGTTLNNRHSNDTVHDRTPYRTLLMNELGVPFHLGTKQVCIAWSSSSCHDGKAWLHVCVTGHDENATASFIYDGRLVDSIGSWSKNILRTQESECVCINGTCTVVMTDGSASERADTKILFIEEGKIVHISPLSGSAQHVEECSCYPRYPGVRCVCRDNWKGSNRPIVDINVKDYSIVSSYVCSGLVGDTPRKNDRSSSSYCRNPNNEKGSHGVKGWAFDDGNDVWMGRTIGEELRSGYETFKVIGGWSTPNSKLQINRQVIVDSGNRSGYSGIFSVEGKSCINRCFYVELIRGREQETRVWWTSNSIVVFCGTSGTYGTGSWPDGADINLMPI

SEQ ID NO: 20978 - protein, 469 aa, Artificial Sequence; identical to SEQ ID NO: 16738
  derived and/or modified protein sequence (wt) from neuraminidase__InfluenzaA__AEM62774

SEQ ID NO: 20979 - protein, 469 aa, Artificial Sequence; identical to SEQ ID NO: 16738
  derived and/or modified protein sequence (wt) from neuraminidase__InfluenzaA__AEM62783

SEQ ID NO: 20980 - protein, 469 aa, Artificial Sequence
  derived and/or modified protein sequence (wt) from neuraminidase__InfluenzaA__AEM62792
MNPNQKIITIGSVCMTIGMANLILQIGNIISIWISHSIQLGSQNQIETCNQSVITYENNTWVNQTYVNISNTNFAAGQSVISVRLAGNSSLCPVSGWAIYSKDNSIRIGSKGDVFVIREPFISCSPLECRTFFLTQGALLNDKHSNGTIKDRSPYRTLMSCPIGEVPSPYNSRFESVAWSASACHDGINWLTIGISGPDNGAVAVLKYNGIITDTIKSWRNNILRTQESECACVNGSCFTVMTDGPSDGQASYKIFRIEKGKIVKSVEMNAPNYHYEECSCYPDSSEITCVCRDNWHGSNRPWVSFNQNLEYQIGYICSGIFGDNPRPNDKTGSCGPVSSNGANGVKGFSFKYGNGVWIGRTKSISSRNGFEMIWDPNGWTGTDNNFSIKQDIIGINEWSGYSGSFVQHPELTGLDCIRPCFWVELIRGRPKENTIWTSGSSISFCGVNSDTVGWSWPDGAELPFTIDK

SEQ ID NO: 20981 - protein, 469 aa, Artificial Sequence; identical to SEQ ID NO: 16738
  derived and/or modified protein sequence (wt) from neuraminidase__InfluenzaA__AEM62801

SEQ ID NO: 20982 - protein, 469 aa, Artificial Sequence
  derived and/or modified protein sequence (wt) from neuraminidase__InfluenzaA__AEM62810
MNPNQKIITIGSVCMTIGMGNLILQIGNIISIWISHSIQLGNQNQIETCNQSVITYENNTWVNQTYVNISNTNFAAGQSVVSVKLAGNSSLCPVSGWAIYSKDNSIRIGSKGDVFVIREPFISCSPLECRTFFLTQGALLNDKHSNGTIKDRSPYRTLMSCPIGEVPSPYNSRFESVAWSASACHDGINWLTIGISGPDNGAVAVLKYNGIITDTIKSWRNNILRTQESECACVNGSCFTVMTDGPSDGQASYKIFRIEKGKIVKSVEMNAPNYHYEECSCYPDSSEITCVCRDNWHGSNRPWVSFNQNLEYQIGYICSGIFGDNPRPNDKTGSCGPVSSNGANGVKGFSFKYGNGVWIGRTKSISSRNGFEMIWDPNGWTGTDNNFSIKQDIVGINEWSGYSGSFVQHPELTGLDCIRPCFWVELIRGRPKENTIWTSGSSISFCGVNSDTVGWSWPDGAELPFTIDK

SEQ ID NO: 20983 - protein, 469 aa, Artificial Sequence
  derived and/or modified protein sequence (wt) from neuraminidase__InfluenzaA__AEM62819
MNPNQKIITIGSVCMTIGMANLILQIGNIISIWISHSIQLGNQNQIETCNQSVITYENDTWVNQTYVNISNTNFAAGQSVVSVKLAGNSSLCPVSGWAIYSKDNSIRIGSKGDVFVIREPFISCSPLECRTFFLTQGALLNDKHSNGTIKDRSPYRTLMSCPIGEVPSPYNSRFESVAWSASACHDGINWLTIGISGPDNGAVAVLKYNGIITDTIKSWRNNILRTQESECACVNGSCFTVMTDGPSDGQASYKIFRIEKGKIVKSVEMNAPNYHYEECSCYPDSSEITCVCRDNWHGSNRPWVSFNQNLEYQIGYICSGIFGDNPRPNDKTGSCGPVSSNGANGVKGFSFKYGNGVWIGRTKSISSRNGFEMIWDPNGWTGTDNNFSIKQDIVGINEWSGYSGSFVQHPELTGLDCIRPCFWVELIRGRPKENTIWTSGSSISFCGVNSDTVGWSWPDGAELPFTIDK

SEQ ID NO: 20984 - protein, 469 aa, Artificial Sequence; identical to SEQ ID NO: 16738
  derived and/or modified protein sequence (wt) from neuraminidase__InfluenzaA__AEM62828

SEQ ID NO: 20985 - protein, 469 aa, Artificial Sequence; identical to SEQ ID NO: 17321
  derived and/or modified protein sequence (wt) from neuraminidase__InfluenzaA__AEM62837

SEQ ID NO: 20986 - protein, 469 aa, Artificial Sequence; identical to SEQ ID NO: 16738
  derived and/or modified protein sequence (wt) from neuraminidase__InfluenzaA__AEM62846

SEQ ID NO: 20987 - protein, 469 aa, Artificial Sequence
  derived and/or modified protein sequence (wt) from neuraminidase__InfluenzaA__AEM62855
MNPNQKIITIGSVCITIGMANLILQIGNIISIWISHSIQLGNQNQIETCNQSVITYENNTWVNQTYVNISNTNFAAGQSVVSVKLAGNSSLCPVSGWAIYSKDNSVRIGSKGDVFVIREPFISCSPLECRTFFLTQGALLNDKHSNGTIKDRSPYRTLMSCPIGEVPSPYNSRFESVAWSASACHDGINWLTIGISGPDNGAVAVLKYNGIITDTIKSWRNNILRTQESECACVNGSCFTVMTDGPSNGQASYKIFRIEKGKIVKSVEMNAPNYHYEECSCYPDSGEITCVCRDNWHGSNRPWVSFNQNLEYQIGYICSGIFGDNPRPNDKTGSCGPVSSNGANGVKGFSFKYGNGVWIGRTKSISSRNGFEMIWDPNGWTGTDNNFSIKQDIVGINEWSGYSGSFVQHPELTGLDCIRPCFWVELIRGRPKENTIWTSGSSISFCGVNSDTVGWSWPDGAELPFTIDK

SEQ ID NO: 20988 - protein, 469 aa, Artificial Sequence
  derived and/or modified protein sequence (wt) from neuraminidase__InfluenzaA__AEM62864
MNPNQKIITIGSVCMTIGMANLILQIGNIISIWISHSIQLGNQNQIETCNQSVITYENNTWVNQTYVNISNTNFAAGQSVVSVKLAGNSSLCPVSGWAIYSKDNSIRIGSKGDVFVIREPFISCSPLECRTFFLTQGALLNDKHSNGTIKDRSPYRTLMSCPIGEVPSPYNSRFESVAWSASACHDGINWLTIGIFGPDNGAVAVLKYNGIITDTIKSWRNNILRTQESECACVNGSCFTVMTDGPSDGQASYKIFRIEKGKIVKSVEMNAPNYHYEECSCYPDSSEITCVCRDNWHGSNRPWVSFNQNLEYQIGYICSGIFGDNPRPNDKTGSCGPVSSNGANGVKGFSFKYGNGVWIGRTKSISSRNGFEMIWDPNGWTGTDNNFSIKQDIVGINEWSGYSGSFVQHPELTGLDCIRPCFWVELIRGRPKENTIWTSGSSISFCGVNSDTVGWSWPDGAELPFTIDK

SEQ ID NO: 20989 - protein, 469 aa, Artificial Sequence
  derived and/or modified protein sequence (wt) from neuraminidase__InfluenzaA__AEM62872
MNPNQKIITIGSVCMTIGMANLILQIGNIISIWISHSIQLGNQNQIETCNQSVITYENNTWVNQTYVNISNTNFAAGQSVVSVKLAGNSSLCPVSGWAIYSKDNSIRIGSKGDVFVIREPFISCSPLECRTFFLTQGALLNDKHSNGTIKDRSPYRTLMSCPIGEVPSPYNSRFESVAWSASACHDGINWLTIGISGPDNGAVAVLKYNGIITDTIKSWRNNILRTQESECACVNGSCFTVMTDGPSDGQASYKIFRIEKGKIVKSVEMNAPNYHYEECSCYPDSSEITCVCRDNWHGSNRPWVSFNQNLEYQIGYICSGIFGDNPRPNDKTGSCGPVSFNGANGVKGFSFKYGNGVWIGRTKSISSRNGFEMIWDPNGWTGTDNNFSIKQDIVGINEWSGYSGSFVQHPELTGLDCIRPCFWVELIRGRPKENTIWTSGSSISFCGVNSDTVGWSWPDGAELPFTIDK

SEQ ID NO: 20990 - protein, 469 aa, Artificial Sequence; identical to SEQ ID NO: 16738
  derived and/or modified protein sequence (wt) from neuraminidase__InfluenzaA__AEM92310

SEQ ID NO: 20991 - protein, 469 aa, Artificial Sequence; identical to SEQ ID NO: 18200
  derived and/or modified protein sequence (wt) from neuraminidase__InfluenzaA__AEM92320

SEQ ID NO: 20992 - protein, 469 aa, Artificial Sequence
  derived and/or modified protein sequence (wt) from neuraminidase__InfluenzaA__AEM92340
MNPNQKIITIGSVCMTIGMANLILQIGNIISIWISHSIQLGNQNQIETCNQSVITYENNTWVNQTYVNISNTNFAAGQSVVSVKLAGNSSLCPVSGWAIYSKDNSIRIGSKGDVFVIREPFISCSPLECRTFFLTQGALLNDKHSNGTIKDRSPYRTLMSCPIGEVPSPYNSRFESVAWSASACHDGINWLTIGISGPDNGAVAVLKYNGIITDTIKSWRNNILRTQESECACVNGSCFTIMTDGPSDGQASYKIFRIEKGKIVKSVEMNAPNYHYEECSCYPDSSEITCVCRDNWHGSNRPWVSFNQNLEYQIGYICSGIFGDNPRPNDKTGSCGPVSSNGANGVKGFSFKYGNGVWIGRTKSISSRKGFEMIWDPNGWTRTDNNFSIKQDIVGINEWSGYSGSFVQHPELTGLDCIRPCFWVELIRGRPKENTIWTSGSSISFCGVNSDTVGWSWPDGAELPFTIDK

SEQ ID NO: 20993 - protein, 469 aa, Artificial Sequence; identical to SEQ ID NO: 18200
  derived and/or modified protein sequence (wt) from neuraminidase__InfluenzaA__AEM92350

SEQ ID NO: 20994 - protein, 469 aa, Artificial Sequence
  derived and/or modified protein sequence (wt) from neuraminidase__InfluenzaA__AEM92360
MNPNQKIITIGSVCMTIGMANLILQIGNIISIWISHSIQLGNQNQIETCNQSVITYENNTWVNQTYVNISNTNFAAEQSVVSVKLAGNSSLCPVSGWAIYSKDNSIRIGSKGDVFVIREPFISCSPLECRTFFLTQGALLNDKHSNGTIKDRSPYRTLMSCPIGEVPSPYNSRFESVAWSASACHDGINWLTIGISGPDNGAVAVLKYNGIITDTIKSWRNNILRTQESECACVNGSCFTIMTDGPSDGQASYKIFRIEKGKIVKSVEMNAPNYHYEECSCYPDSSEITCVCRDNWHGSNRPWVSFNQNLEYQIGYICSGIFGDNPRPNDKTGSCGPVSSNGANGVKGFSFKYGNGVWIGRTKSISSRKGFEMIWDPNGWTGTDNNFSIKQDIVGINEWSGYSGSFVQHPELTGLDCIRPCFWVELIRGRPKENTIWTSGSSISFCGVNSDTVGWSWPDGAELPFTIDK

SEQ ID NO: 20995 - protein, 469 aa, Artificial Sequence; identical to SEQ ID NO: 20992
  derived and/or modified protein sequence (wt) from neuraminidase__InfluenzaA__AEM92370

SEQ ID NO: 20996 - protein, 469 aa, Artificial Sequence; identical to SEQ ID NO: 20992
  derived and/or modified protein sequence (wt) from neuraminidase__InfluenzaA__AEM92380

SEQ ID NO: 20997 - protein, 469 aa, Artificial Sequence
  derived and/or modified protein sequence (wt) from neuraminidase__InfluenzaA__AEM92399
MNPNQKIITIGSVCMTIGMANLILQIGNIISIWISHSIQLGNQNQIETCNQSVITYENNTWVNQTYVNISNTNFAAGQSVVSVKLAGNSSLCPVSGWAIYSKDNSIRIGSKGDVFVIREPFISCSPLECRTFFLTQGALLNDKHSNGTIKDRSPYRTLMSCPIGEVPSPYNSRFESVAWSASACHDGTNWLTIGISGPDNGAVAVLKYNGIITDTIKSWRNNILRTQESECACVNGSCFTVMTDGPSDGQASYKIFRIEKGKIVKSVEMNAPNYHYEECSCYPDSSEITCVCRDNWHGSNRPWVSFNQNLEYQIGYICSGIFGDNPRPNDKTGSCGPVLSNGANGVKGFSFKYGNGVWIGRTKSISSRNGFEMIWDPNGWTGTDNNFSIKQDIVGINEWSGYSGSFVQHPELTGLDCIRPCFWVELIRGRPKENTIWTSGSSISFCGVNSDTVGWSWPDGAELPFTIDK

SEQ ID NO: 20998 - protein, 469 aa, Artificial Sequence; identical to SEQ ID NO: 20997
  derived and/or modified protein sequence (wt) from neuraminidase__InfluenzaA__AEM92409

SEQ ID NO: 20999 - protein, 469 aa, Artificial Sequence; identical to SEQ ID NO: 17162
  derived and/or modified protein sequence (wt) from neuraminidase__InfluenzaA__AEM92419

SEQ ID NO: 21000 - protein, 469 aa, Artificial Sequence
  derived and/or modified protein sequence (wt) from neuraminidase__InfluenzaA__AEM92430
MNPNQKIMTIGSVCMTIGMANLILQIGNIISIWISHSIQLGNQNQIETCNQSVITYENNTWVNQTYVNISNTNFAAGQSVVSVKLAGNSSLCPVSGWAIYSKDNSIRIGSKGDVFVIREPFISCSPLECRTFFLTQGALLNDKHSNGTIKDRSPYRTLMSCPIGEVPSPYNSRFESVAWSASACHDGINWLTIGISGPDNGAVAVLKYNGIITDTIKSWRNNILRTQESECACVNGSCFTVMTDGPSDGQASYKIFRIEKGKIVKSVEMNAPNYHYEECSCYPDSSEITCVCRDNWHGSNRPWVSFNQNLEYQIGYICSGIFGDNPRPNDKTGSCGPVSSNGANGVKGFSFKYGNGVWIGRTKSISSRNGFEMIWDPNGWTGTDNNFSIKQDIVGINEWSGYSGSFVQHPELTGLDCIRPCFWVELIRGRPKENTIWTSGSSISFCGVNSDTVGWSWPDGAELPFTIDK

SEQ ID NO: 21001 - protein, 469 aa, Artificial Sequence
  derived and/or modified protein sequence (wt) from neuraminidase__InfluenzaA__AEM92440
MNPNQKIITIGSVCITIGMANLILQIGNIISIWISHSIQLGNQSQIETCNQSVITYENNTWVNQTYVNISNTNFAAGQSVVSVKLAGNSSLCPVSGWAIYSKDNSIRIGSKGDVFVIREPFISCSPLECRTFFLTQGALLNDKHSNGTIKDRSPYRTLMSCPIGEVPSPYNSRFESVAWSASACHDGINWLTIGISGPDNGAVAVLKYNGIITDTIKSWRNNILRTQESECACVNGSCFTIMTDGPSDGQASYKIFRIEKGKIVKSVEMIAPNYHYEECSCYPDSSEITCVCRDNWHGSNRPWVSFNQNLEYQIGYICSGIFGDNPRPNDKTGSCGPVSSNGANGVKGFSFKYGNGVWIGRTKSISSRKGFEMIWDPNGWTGTDNNFSIKQDIVGINEWSGYSGSFVQHPELTGLDCIRPCFWVELIRGRPKENTIWTSGSSISFCGVNSDTVGWSWPDGAELPFTIDK

SEQ ID NO: 21002 - protein, 469 aa, Artificial Sequence; identical to SEQ ID NO: 20958
  derived and/or modified protein sequence (wt) from neuraminidase__InfluenzaA__AEM92450

SEQ ID NO: 21003 - protein, 469 aa, Artificial Sequence; identical to SEQ ID NO: 20958
  derived and/or modified protein sequence (wt) from neuraminidase__InfluenzaA__AEM92460

SEQ ID NO: 21004 - protein, 469 aa, Artificial Sequence; identical to SEQ ID NO: 20709
  derived and/or modified protein sequence (wt) from neuraminidase__InfluenzaA__AEM92470

SEQ ID NO: 21005 - protein, 469 aa, Artificial Sequence; identical to SEQ ID NO: 20709
  derived and/or modified protein sequence (wt) from neuraminidase__InfluenzaA__AEM92480

SEQ ID NO: 21006 - protein, 469 aa, Artificial Sequence
  derived and/or modified protein sequence (wt) from neuraminidase__InfluenzaA__AEM92490
MNPNQKIITIGSVCMIIGMANLMLQIGNIISIWISHSIQLGNQNQIETCNQSVITYENNTWVNQTYVNISNTNFAAGQSVVSVKLAGNSSLCPVSGWAIYSKDNSIRIGSKGDVFVIREPFISCSPLECRTFFLTQGALLNDKHSNGTIKDRSPYRTLMSCPIGEVPSPYNSRFESVAWSASACHDGINWLTIGISGPDNGAVAVLKYNGIITDTIKSWRNNILRTQESECACVNGSCFTIMTDGPSDGQASYKIFRIEKGKIVKSVEMNAPNYHYEECSCYPDSSEITCVCRDNWHGSNRPWVSFNQNLEYQIGYICSGIFGDNPRPNDKTGSCGPVSSNGANGVKGFSFKYGNGVWIGRTKSISSRNGFEMIWDPNGWTGTDNNFSIKQDIVGINEWSGYSGSFVQHPELTGLDCIRPCFWVELIRGRPKENTIWTSGSSISFCGVNSDTVGWSWPDGAELPFTIDK

SEQ ID NO: 21007 - protein, 469 aa, Artificial Sequence
  derived and/or modified protein sequence (wt) from neuraminidase__InfluenzaA__AEM92500
MNPNQKIITIGSVCMIIGMANLMLQIGNIISIWISHSIQLGNQNQIETCNQSVITYENNTWVNQTYVNISNTNFAAGQSVVSVKLAGNSSLCPVSGWAIYSKDNSIRIGSKGDVFVIREPFISCSPLECRTFFLTQGALLNDKHSNGTIKDRSPYRTLMSCPIGEVPSPYNSRFESVAWSASACHDGINWLTIGISGPDNGAVAVLKYNGIITDTIKSWRNNILRTQESECACVNGSCFTIMTDGPSDGQASYKIFRIEKGKIVKSVEMNAPNYHYEECSCYPDSSEITCVCRDNWHGSNRPWVSFNQNLEYQMGYICSGIFGDNPRPNDKTGSCGPVSSNGANGVKGFSFKYGNGVWIGRTKSISSRNGFEMIWDPNGWTGTDNKFSIKQDIVGINEWSGYSGSFVQHPELTGLDCIRPCFWVELIRGRPKENTIWTSGSSISFCGVNSDTVGWSWPDGAELPFTIDK

SEQ ID NO: 21008 - protein, 469 aa, Artificial Sequence
  derived and/or modified protein sequence (wt) from neuraminidase__InfluenzaA__AEM92520
MNPNQKIITIGSVCMTIGMANLMLQIGNIISIWISHSIQLGNQNQIETCNQSVITYENNTWVNQTYVNISNTNFAAGQSVVSVKLAGNSSLCPVSGWAIYSKDNSIRIGSKGDVFVIREPFISCSPLECRTFFLTQGALLNDKHSNGTIKDRSPYRTLMSCPIGEVPSPYNSRFESVAWSASACHDGINWLTIGISGPDNGAVAVLKYNGIITDTIKSWRNNILRTQESECACVNGSCFTVMTDGPSDGQASYKIFRIEKGKIVKSVEMNAPNYHYEECSCYPDSSEITCVCRDNWHGSNRPWVSFNQNLEYQIGYICSGIFGDNPRPNDKTGSCGPVSSNGANGVKGFSFKYGNGVWIGRTKSISSRNGFEMIWDPNGWTGTDNNFSIKQDIIGINEWSGYSGSFVQHPELTGLDCIRPCFWVELIRGRPKENTIWTSGSSISFCGVNSDTVGWSWPDGAELPFTIDK

SEQ ID NO: 21009 - protein, 469 aa, Artificial Sequence; identical to SEQ ID NO: 20709
  derived and/or modified protein sequence (wt) from neuraminidase__InfluenzaA__AEM92550

SEQ ID NO: 21010 - protein, 469 aa, Artificial Sequence
  derived and/or modified protein sequence (wt) from neuraminidase__InfluenzaA__AEM92570
MNPNQKIITIGSVCMTIGMANLILQIGNIISIWISHSIQLGNQNQIETCNQSVITYENNTWVNQTYVNISNTNFAAGQSVVSVKLAGNSSLCPVSGWAIYSKDNSIRIGSKGNVFVIREPFISCSPLECRTFFLTQGALLNDKHSNGTIKDRSPYRTLMSCPIGEVPSPYNSRFESVAWSASACHDGINWLTIGISGPDNGAVAVLKYNGIITDTIKSWRNNILRTQESECACVNGSCFTIMTDGPSDGQASYKIFRIEKGKIVKSVEMNAPNYHYEECSCYPDSSEITCVCRDNWHGSNRPWVSFNQNLEYQIGYICSGIFGDNPRPNDKTGSCGPVSSNGANGVKGFSFKYGNGVWIGRTKSISSRKGFEMIWDPNGWTGTDNNFSIKQDIVGINEWSGYSGSFVQHPELTGLDCIRPCFWVELIRGRPKENTIWTSGSSISFCGVNSDTVGWSWPDGAELPFTIDK

SEQ ID NO: 21011 - protein, 469 aa, Artificial Sequence
  derived and/or modified protein sequence (wt) from neuraminidase__InfluenzaA__AEM92580
MNPNQKIITIGSVCMTIGMANLILQIGNIISIWISHSIQLGNQNQIETCNQSVITYENNTWVNQTYVNISNTNFAAGQSVVSVKLAGNSSLCPVSGWAIYSKDNSIRIGSKGDVFVIREPFISCSPLECRTFFLTQGALLNDKHSNGTIKDRSPYRTLMSCPIGEVPSPYNSRFESVAWSASACHDGINWLTIGISGPDNGAVAVLKYNGIITDTIKSWRNNILRTQESECACVNGSCFTIMTDGPSNGQASYKIFRIEKGKIVKSVEMNAPNYHYEECSCYPDSSEITCVCRDNWHGSNRPWVSFNQNLEYQIGYICSGIFGDNPRPNDKTGSCGPVSSNGANGVKGFSFKYGNGVWIGRTKSISSRKGFEMIWDPNGWTGTDNNFSIKQDIVGINEWSGYSGSFVQHPELTGLDCIRPCFWVELIRGRPKENTIWTSGSSISFCGVNSDTVGWSWPDGAELPFTIDK

SEQ ID NO: 21012 - protein, 469 aa, Artificial Sequence; identical to SEQ ID NO: 20709
  derived and/or modified protein sequence (wt) from neuraminidase__InfluenzaA__AEM92590

SEQ ID NO: 21013 - protein, 469 aa, Artificial Sequence; identical to SEQ ID NO: 20709
  derived and/or modified protein sequence (wt) from neuraminidase__InfluenzaA__AEM92600

SEQ ID NO: 21014 - protein, 469 aa, Artificial Sequence
  derived and/or modified protein sequence (wt) from neuraminidase__InfluenzaA__AEM92610
MNPNQKIITIGSVCMTIGMANLMLQIGNIISIWISHSIQLGNQNQIETCNQSVITYENNTWVNQTYVNISNTNFAAGQSVVSVKLAGNSSLCPVSGWAIYSKDNSIRIGSKGDVFVIREPFISCSPLECRTFFLTQGALLNDKHSNGTIKDRSPYRTLMSCPIGEVPSPYNSRFESVAWSASACHDGINWLTIGISGPDNGAVAVLKYNGIITDTIKSWRNNILRTQESECACVNGSCFTVMTDGPSDGQASYKIFRIEKGKIVKSVEMNAPNYHYEECSCYPDSSEITCVCRDNWHGSNRPWVSFNQNLEYQIGYICSGIFGDNPRPNDKTGSCGPVSSNGANGVKGFSFKYGNGVWIGRTKSISSRNGFEMIWDPNGWTGTDNNFSIKQDIVGINEWSGYSGSFVQHPELTGLDCIRPCFWVELIRGRPKENTIWTSGSSISFCGVNSDTVSWSWPDGAELPFTIDK

SEQ ID NO: 21015 - protein, 469 aa, Artificial Sequence
  derived and/or modified protein sequence (wt) from neuraminidase__InfluenzaA__AEM92620
MNPNQKIITIGSVCMIIGMANLMLQIGNIISIWISHSIQLGNQNQIETCNQSVITYENNTWVNQTYVNISNTNFAAGQSVVSVKLAGNSSLCPVSGWAIYSKDNSIRIGSKGDVFVIREPFISCSPLECRTFFLTQGALLDDKHSNGTIKDRSPYRTLMSCPIGEVPSPYNSRFESVAWSASACHDGINWLTIGISGPDNGAVAVLKYNGIITDTIKSWRNNILRTQESECACVNGSCFTIMTDGPSDGQASYKIFRIEKGKIVKSVEMNAPNYHYEECSCYPDSSEITCVCRDNWHGSNRPWVSFNQNLEYQMGYICSGIFGDNPRPNDKTGSCGPVSSNGANGVKGFSFKYGNGVWIGRTKSISSRNGFEMIWDPNGWTGTDNKFSIKQDIVGINEWSGYSGSFVQHPELTGLDCIRPCFWVELIRGRPKENTIWTSGSSISFCGVNSDTVGWSWPDGAELPFTIDK

SEQ ID NO: 21016 - protein, 469 aa, Artificial Sequence
  derived and/or modified protein sequence (wt) from neuraminidase__InfluenzaA__AEM92650
MNPNQKIITIGSVCMTIGMANLILQIGNIISIWISHSIQLGNQNQIETCNQSVITYENNTWVNQTYVNISNTNFAAGQSVVSVKLAGNSSLCPVSGWAIYSKDNSVRIGSKGDVFVIREPFISCSPLECRTFFLTQGALLNDKHSNGTIKDRSPYRTLMSCPIGEVPSPYNSRFESVAWSASACHDGINWLTIGISGPDNGAVAVLKYNGIITDTIKSWRNNILRTQESECACVNGSCFTVMTDGPSDGQASYKIFRIEKGKIVKSVEMNAPNYHYEECSCYPDSSEITCVCRDNWHGSNRPWVSFNQNLEYQIGYICSGIFGDNPRPNDKTGSCGPVSSNGANGVKGFSFKYGNGVWIGRTKSISSRNGFEMIWDPNGWTGTDTKFSIKQDIVGINEWSGYSGSFVQHPELTGLDCIRPCFWVELIRGRPKENTIWTSGSSISFCGVNSDTVGWSWPDGAELPFTIDK

SEQ ID NO: 21017 - protein, 469 aa, Artificial Sequence; identical to SEQ ID NO: 19410
  derived and/or modified protein sequence (wt) from neuraminidase__InfluenzaA__AEM98410

SEQ ID NO: 21018 - protein, 469 aa, Artificial Sequence; identical to SEQ ID NO: 19410
  derived and/or modified protein sequence (wt) from neuraminidase__InfluenzaA__AEM98421

SEQ ID NO: 21019 - protein, 469 aa, Artificial Sequence; identical to SEQ ID NO: 19410
  derived and/or modified protein sequence (wt) from neuraminidase__InfluenzaA__AEM98432

SEQ ID NO: 21020 - protein, 469 aa, Artificial Sequence; identical to SEQ ID NO: 20786
  derived and/or modified protein sequence (wt) from neuraminidase__InfluenzaA__AEN55401

SEQ ID NO: 21021 - protein, 469 aa, Artificial Sequence; identical to SEQ ID NO: 19013
  derived and/or modified protein sequence (wt) from neuraminidase__InfluenzaA__AEN55411

SEQ ID NO: 21022 - protein, 469 aa, Artificial Sequence
  derived and/or modified protein sequence (wt) from neuraminidase__InfluenzaA__AEN55421
MNPNQKIITIGSVCMTIGMANLILQIGNIISIWISHSIQLGNQSQIETCNQSVITYENNTWVNQTYVNISNTNFAARQSVVSVKLAGNSSLCPVSGWAIYSKDNSIRIGSKGDVFVIREPFISCSPLECRTFFLTQGALLNDKHSNGTIKDRSPYRTLMSCPIGEVPSPYNSRFESVAWSASACHDGINWLTIGISGPDNGAVAVLKYNGIITDTIKSWRNNILRTQESECVCVNGSCFTIMTDGPSDGQASYKIFRIEKGKIVKSVEMNAPNYHYEECSCYPDSSEITCVCRDNWHGSNRPWVSFNQNLEYQIGYICSGIFGDNPRPNDKTGSCGPVSSNGANGVKGFSFKYGNGVWIGRTKSISSRKGFEMIWDPNGWTGTDNNFSIKQDIVGINEWSGYSGSFVQHPELTGLDCIRPCFWVELIRGRPKENTIWTSGSSISFCGVNSDTVGWSWPDGAELPFTIDK

SEQ ID NO: 21023 - protein, 469 aa, Artificial Sequence
  derived and/or modified protein sequence (wt) from neuraminidase__InfluenzaA__AEN55466
MNPNQKIITIGSVCITIGMANLILQIGNTISIWISHSIQLGNQNQIETCNQSVITYENNTWVNQTYVNISNTNFAAGQSVVSVKLAGNSSLCPVSGWAIYSKDNSIRIGSKGDVFVIREPFISCSPLECRTFFLTQGALLNDKHSNGTIKDRSPYRTLMSCPIGEVPSPYNSRFESVAWSASACHDGISWLTIGISGPDNGAVAVLKYNGIITDTIKSWRNNILRTQESECACVNGSCFTVMTDGPSDGQASYKIFRIEKGKIVKSVEMNAPNYHYEECSCYPDSSEITCVCRDNWHGSNRPWVSFNQNLEYQIGYICSGIFGDNPRPNDKTGSCGPVSSNGANGVKGFSFKYGNGVWIGRTKSISSRNGFEMIWDPNGWTGTDNNFSIKQDIVGINEWSGYSGSFVQHPELTGLDCIRPCFWVELIRGRPKENTIWTSGSSISFCGVNSDTVGWSWPDGAELPFTIDK

SEQ ID NO: 21024 - protein, 469 aa, Artificial Sequence
  derived and/or modified protein sequence (wt) from neuraminidase__InfluenzaA__AEN55476
MNPNQKIITIGSVCMTIGMANLILQIGNIISIWISHSIQLGNQSQIETCNQSVITYENNTWVNQTYVNISNTNFAAGQSVVSVKLAGNSSLCPVSGWAIYSKDNSIRIGSKGDVFVIREPFISCSPLECRTFFLTQGALLNDKHSNGTIKDRSPYRTLMSCPIGEVPSPYNSRFESVAWSASACHDGINWLTIGISGPDNGAVAVLKYNGIITDTIKSWRNNILRTQESECACVNGSCFTIMTDGPSDGQASYKIFRIEKGKIVKSVEMNAPNYHYEECSCYPDSSEITCVCRDNWHGSNRPWVSFNQNLEYQIGYICSGIFGDNPRPNDKTGSCGPVSSNGANGVKGFSFKYGNGVWIGRTKSISSRKGFEMIWDPNGWTGTDNNFSIKQDIVGINEWSGYSGSFVQHPELTGLDCIRPCFWVELIRGRPKENTIWTSGSSISFCGVNSDTVSWSWPDGAELPFTIDK

SEQ ID NO: 21025 - protein, 469 aa, Artificial Sequence; identical to SEQ ID NO: 20257
  derived and/or modified protein sequence (wt) from neuraminidase__InfluenzaA__AEN55486

SEQ ID NO: 21026 - protein, 469 aa, Artificial Sequence; identical to SEQ ID NO: 20257
  derived and/or modified protein sequence (wt) from neuraminidase__InfluenzaA__AEN55506

SEQ ID NO: 21027 - protein, 469 aa, Artificial Sequence
  derived and/or modified protein sequence (wt) from neuraminidase__InfluenzaA__AEN55516
MNPNQKIITIGSVCMTIGMANLILQIGNIISIWISHSIQLGNQSQIETCNQSVITYENNTWVNQTYVNISNTNFAAGQSVVSVKLAGNSSLCPVSGWAIYSKDNSIRIGSRGDVFVIREPFISCSPLECRTFFLTQGALLNDKHSNGTIKDRSPYRTLMSCPIGEVPSPYNSRFESVAWSASACHDGINWLTIGISGPDNGAVAVLKYNGIITDTIKSWRNNILRTQESECACVNGSCFTIMTDGPSDGQASYKIFRIEKGKIVKSVEMNAPNYHYEECSCYPDSSEITCVCRDNWHGSNRPWVSFNQNLEYQIGYICSGIFGDNPRPNDKTGSCGPVSSNGANGVKGFSFKYGNGVWIGRTKSISSRKGFEMIWDPNGWTGTDNNFSIKQDIVGINEWSGYSGSFVQHPELTGLDCIRPCFWVELIRGRPKENTIWTSGSSISFCGVNSDTVGWSWPDGAELPFTIDK

SEQ ID NO: 21028 - protein, 469 aa, Artificial Sequence; identical to SEQ ID NO: 20257
  derived and/or modified protein sequence (wt) from neuraminidase__InfluenzaA__AEN55526

SEQ ID NO: 21029 - protein, 469 aa, Artificial Sequence; identical to SEQ ID NO: 20786
  derived and/or modified protein sequence (wt) from neuraminidase__InfluenzaA__AEN69429

SEQ ID NO: 21030 - protein, 469 aa, Artificial Sequence; identical to SEQ ID NO: 20783
  derived and/or modified protein sequence (wt) from neuraminidase__InfluenzaA__AEN69438

SEQ ID NO: 21031 - protein, 469 aa, Artificial Sequence; identical to SEQ ID NO: 19013
  derived and/or modified protein sequence (wt) from neuraminidase__InfluenzaA__AEN69484

SEQ ID NO: 21032 - protein, 469 aa, Artificial Sequence; identical to SEQ ID NO: 16685
  derived and/or modified protein sequence (wt) from neuraminidase__InfluenzaA__AEO01627

SEQ ID NO: 21033 - protein, 469 aa, Artificial Sequence; identical to SEQ ID NO: 16685
  derived and/or modified protein sequence (wt) from neuraminidase__InfluenzaA__AEO01638

SEQ ID NO: 21034 - protein, 469 aa, Artificial Sequence
  derived and/or modified protein sequence (wt) from neuraminidase__InfluenzaA__AEO01644
MNPNQKIITIGSVSLTISTICFFMQIAILITTVTLHFKQYEFNSPPNNQVMLCEPTIIERNITEIVYLTNTTIEKEICPKLAEYRNWSKPQCDITGFAPFSKDNSIRLSAGGDIWVTREPYVSCDPDKCYQFALGQGTTLNNVHSNDTVRDRTPYRTLLMNELGVPFHLGTKQVCIAWSSSSCHDGKAWLHVCITGDDKNATASFIYNGRLVDSIVSWSKEILRTQESECVCINGTCTVVMTDGSASGKADTKILFIEEGKIVHTSTLSGSAQHVEECSCYPRYPGVRCVCRDNWKGSNRPIVDINIKDHSIVSSYVCSGLVGDTPRKTDSSSSGHCLDPNNEEGGHGVKGWAFDDGNDVWMGRTISEKSRLGYETFKVIEGWSNPKSKLQINRQVIVDRGNRSGYSGIFSVEGKSCINRCFYVELIRGRKEETEVLWTSNSIVVFCGTSGTYGTGSWPDGADINLMPI

SEQ ID NO: 21035 - protein, 469 aa, Artificial Sequence
  derived and/or modified protein sequence (wt) from neuraminidase__InfluenzaA__AEO01654
MNPNQKIITIGSVSLTISTICFFMQIAILITTVTLHFKQYEFNSPPNNQVMLCEPTIIERNITEIVYLTNTTIEKEICPKLAEYRNWSKPQCDITGFAPFSKDNSIRLSAGGDIWVTREPYVSCDPDKCYQFALGQGTTLNNVHSNDTVRDRTPYRTLLMNELGVPFHLGTKQVCIAWSSSSCHDGKAWLHVCITGDDKNATASFIYNGRLVDSIVSWSKDILRTQESECVCINGTCTVVMTDGSASGKADTKILFIEEGKIVHTSTLSGSAQHVEECSCYPRYPGVRCVCRDNWKGSNRPIVDINIKDHSIVSSYVCSGLVGDTPRKNDSSSSGHCLDPNNEEGGHGVKGWAFDDGNDVWMGRTISEKSRLGYETFKVIEGWSNPKSKLQINRQVIVDRGNRSGYSGIFSVEGKSCINRCFYVELIRGRKEETKVLWTSNSIVVFCGTSGTYGTGSWPDGAEINLMPI

SEQ ID NO: 21036 - protein, 470 aa, Artificial Sequence; identical to SEQ ID NO: 16632
  derived and/or modified protein sequence (wt) from neuraminidase__InfluenzaA__AEO01665

SEQ ID NO: 21037 - protein, 470 aa, Artificial Sequence
  derived and/or modified protein sequence (wt) from neuraminidase__InfluenzaA__AEO01676
MNPNQKIITIGSISIAIGIISLMLQIGNIISIWASHSIQTGSQNNTGICNQRIITYENSTWVNHTYVNINNTNVVAGEDKTSVTLAGNSSLCSISGWAIYTKDNSIRIGSKGDVFVIREPFISCSHLECRTFFLTQGALLNDKHSNGTVKDRSPYRALMSCPLGEAPSPYNSKFESVAWSASACHDGMGWLTIGISGPDNGAVAVLKYNGIITGTIKSWKKQILRTQESECVCMNGSCFTIMTDGPSNKAASYKIFKIEKGKVTKSIELNAPNFHYEECSCYPDTGIVMCVCRDNWHGSNRPWVSFNQNLDYQIGYICSGVFGDNPRPEDGEGSCNPVTVDGANGVKGFSYKYDNGVWIGRTKSNRLRKGFEMIWDPNGWTNTDSDFSVKQDVVAITDWSGYSGSFVQHPELTGLDCIRPCFWVELVRGLPRENTTIWTSGSSIFFRGDNSDTANWSWPDGAEMTFTIDK

SEQ ID NO: 21038 - protein, 469 aa, Artificial Sequence; identical to SEQ ID NO: 16685
  derived and/or modified protein sequence (wt) from neuraminidase__InfluenzaA__AEO01693

SEQ ID NO: 21039 - protein, 470 aa, Artificial Sequence; identical to SEQ ID NO: 16632
  derived and/or modified protein sequence (wt) from neuraminidase__InfluenzaA__AEO01711

SEQ ID NO: 21040 - protein, 469 aa, Artificial Sequence; identical to SEQ ID NO: 20808
  derived and/or modified protein sequence (wt) from neuraminidase__InfluenzaA__AEO37533

SEQ ID NO: 21041 - protein, 469 aa, Artificial Sequence
  derived and/or modified protein sequence (wt) from neuraminidase__InfluenzaA__AEO37543
MNPNQKIITIGSVCMTIGMANLILQIGNIISIWISHSIQLGNQNQIEPCNQSVITYENNTWVNQTYVNISNTNFAAGQSVVSVKLAGNSSLCPVSGWAIYSKDNSIRIGSKGDVFVIREPFISCSPLECRTFFLTQGALLNDKHSNGTIKDRSPYRTLMSCPIGEVPSPYNSRFESVAWSASACHDGINWLTIGISGPDNGAVAVLKYNGIITDTIKSWRNNILRTQESECACVNGSCFTVMTDGPSDGQASYKIFRIEKGKIVKSVEMNAPNYHYEECSCYPDSSEITCVCRDNWHGSNRPWVSFNQNLEYQIGYICSGIFGDNPRPNDKTGSCGPVSSNGANGVKGFSFKYGNGVWIGRTKSISSRNGFEMIWDPNGWTGTDNNFSVKQDIIGINEWSGYSGSFVQHPELTGLDCIRPCFWVELIRGRPKENTIWTSGSSISFCGVNSDTVGWSWPDGAELPFTIDK

SEQ ID NO: 21042 - protein, 469 aa, Artificial Sequence; identical to SEQ ID NO: 20257
  derived and/or modified protein sequence (wt) from neuraminidase__InfluenzaA__AEO72179

SEQ ID NO: 21043 - protein, 449 aa, Artificial Sequence
  derived and/or modified protein sequence (wt) from neuraminidase__InfluenzaA__AEO88957
MNPNQKIITIGSICMVIGIVSLMLQIGNMISIWVSHSTQTGNQHQAEPIRNTNFLTENAVASVTLAGNSSLCPIRGWAVHSKDNSIRIGSKGDVFVIREPFISCSHLECRTFFLTQGALLNDKHSNGTVKDRSPHRTLMSCPVGEAPSPYNSRFESVAWSASACHDGTSWLTIGISGPDNGAVAVLKYNGIITDTIKSWRNNILRTQESECACVNGSCFTVMTDGPSNGQASYKIFKMEKGKVVKSVELNAPNYHYEECSCYPDAGEIICVCRDNWHGSNRPWVSFNQNLEYQIGYICSGVFGDNPRPNDGTGSCGPVSPNGAYGIKGFSFKYGNGVWIGRTKSTNSRSGFEMIWDPNGWTGTDSNFSVKQDIVAITDWSGYSGSFVQHPELTGLDCIRPCFWVELIRGRPKESTIWTSGSSISFCGVNSDTVSWSWPDGAELPFTIDK

SEQ ID NO: 21044 - protein, 449 aa, Artificial Sequence
  derived and/or modified protein sequence (wt) from neuraminidase__InfluenzaA__AEO88965
MNPNQKIITIGSICMVIEIVSLMLQIGNMISIWVSHSIQTKNQRQAEPISNTKFLTEKAVASVTLAGNSSLCPISGWAVHSKDNSIRIGSKGDVFVIREPFISCSHLECRTFFLTQGALLNDKHSNGTVKDRSPHRTLMSCPVGEAPSPYNSRFESVAWSASACHDGTSWLTIGISGPDNGAVAVLKYNGIITDTIKSWRNNILRTQESECACVNGSCFTVMTDGPSNGQASYKIFKMEKGKVVKSVELDAPNYHYEECSCYPDAGEITCVCRDNWHGSNRPWVSFNQNLEYQIGYICSGVFGDNPRPNDGTGSCGPVSPNGAYGVKGFSFKYGNGVWIGRTKSTNSRSGFEMIWDPNGWTGTDSSFSVKQDIVAITDWSGYSGSFVQHPELTGLNCIRPCFWVELVRGRPKESTIWTSGSSISFCGVNSDTVGWSWPDGAELPFTIDK

SEQ ID NO: 21045 - protein, 449 aa, Artificial Sequence
  derived and/or modified protein sequence (wt) from neuraminidase__InfluenzaA__AEO88973
MNPNQKIITIGSICMVIGIVSLMLQIGNMISLWVSHSIQTGNQHQVEPISNTNFLTEKAVASVTLAGNSSLCPIRGWAVHSKDNSIRIGSKGDVFVIREPFISCSHLECRTFFLTQGALLNDKHSNGTVKDRSPHRTLMSCPVGEAPSPYNSRFESVAWSASACHDGTSWLTIGISGPDNGAVAVLKYNGMITDTIKSWRNNILRTQESECACVNGSCFTVMTDGPSNGQASYKIFKMEKGRVVKSVELDAPNYHYEECSCYPDAGEITCVCRDNWHGSNRPWVSFNQNLEYQIGYICSGVFGDNPRPNDGTGSCGPVSPNGAYGVKGFSFKYGNGVWIGRTKSPNSRSGFEMIWDPNGWIETDSSFSVKQDIVAITDWSGYSGSFVQHPELTGLDCIRPCFWVELIRGRPKESTIWTSGSSISFCGVNSDTVSWSWPDGAELPFTIDK

SEQ ID NO: 21046 - protein, 449 aa, Artificial Sequence
  derived and/or modified protein sequence (wt) from neuraminidase__InfluenzaA__AEO88982
MNPNQKIITIGSICMVIGIVSLMLQIGNMISIWVSHSIQTGNQHQAEPIRNTNFLTENAVASVTLAGNSSLCPVRGWAVHSKDNSIRIGSKGDVFVIREPFISCSHLECRTFFLTQGALLNDKHSNGTVKDRSPHRTLMSCPVGEAPSPYNSRFESVAWSASACHDGTSWLTIGISGPDNGAVAVLKYNGIITDTIKSWRNNILRTQESECACVNGSCFTVMTDGPSNGQASYKIFKMEKGKVVKSVELNAPNYHYEECSCYPDAGEITCVCRDNWHGSNRPWVSFNQNLEYQIGYICSGIFGDNPRPHDGTGSCGPVSPNGAYGIKGFSFKYGNGVWIGRTKSTNSRSGFEMIWDPNGWTGTDSNFSVKQDIVAITDWSGYSGSFVQHPELTGLDCIRPCFWVELIRGRPKESTIWTSGSSISFCGVNSDTVSWSWPDDAELPFTIDK

SEQ ID NO: 21047 - protein, 449 aa, Artificial Sequence
  derived and/or modified protein sequence (wt) from neuraminidase__InfluenzaA__AEO88990
MNPNQKIITIGSICMVIGIVSLMLQIGNMISIWVSHSIQTGNQHQAEPIRNTNFLTENAVASVTLAGNSSLCPVRGWAVHSKDNSIRIGSKGDVFVIREPFISCSHLECRTFFLTQGALLNDKHSNGTVKDRSPHRTLMSCPVGEAPSPYNSRFESVAWSASACHDGTSWLTIGISGPDNGAVAVLKYNGIITDTIKSWRNNILRTQESECACVNGSCFTVMTDGPSNGQASYKIFKMEKGKVVKSVELNAPNYHYEECSCYPDAGEITCVCRDNWHGSNRPWVSFNQNLEYQIGYICSGVFGDNPRPNDGTGSCGPVSPNGAYGIKGFSFKYGNGVWIGRTKSTNSRSGFEMIWDPNGWTGTDSNFSVKQDIVAITDWSGYSGSFVQHPELTGLDCIRPCFWVELIRGRPKESTIWTSGSSISFCGVNSDTVSWSWPDDAELPFTIDK

SEQ ID NO: 21048 - protein, 449 aa, Artificial Sequence
  derived and/or modified protein sequence (wt) from neuraminidase__InfluenzaA__AEO88998
MNPNQKIITIGSICMVIGIVSLMLQIGNMISIWVSHSIQTGNQHQAEPIRNTNFLTENAVASVTLAGNSSLCPIRGWAVHSKDNSIRIGSKGDVFVIREPFISCSHLECRTFFLTQGALLNDKHSNGTVKDRSPHRTLMSCPVGEAPSPYNSRFESVAWSASACHDGTSWLTIGISGPDNGAVAVLKYNGIITDTIKSWRNNILRTQESECACVNGSCFTVMTDGPSNEQASYKIFKMEKGKVVKSVELNAPNYHYEECSCYPDAGEIICVCRDNWHGSNRPWVSFNQNLEYQIGYICSGVFGDNPRPNDGTGSCGPVSPNGAYGIKGFSFKYGNGVWIGRTKSTNSRSGFEMIWDPNGWTGTDSNFSVKQDIVAITDWSGYSGSFVQHPELTGLDCIRPCFWVELIRGRPKESTIWTSGSSISFCGVNSDTVSWSWPDGAELPFTIDK

SEQ ID NO: 21049 - protein, 449 aa, Artificial Sequence
  derived and/or modified protein sequence (wt) from neuraminidase__InfluenzaA__AEO89006
MNPNQKIITIGSICMVIGIVSLMLQIGNMISIWVSHSIQTGNQHQAEPIRNTNFLTENAVASVTLAGNSSLCPVRGWAVHSKDNSIRIGSKGDVFVIREPFISCSHLECRTFFLTQGALLNDKHSNGTVKDRSPHRTLMSCPVGEAPSPYNSRFESVAWSASACHDGTSWLTIGISGPDNGAVAVLKYNGIITDTIKSWRNNILRTQESECACVNGSCFTVMTDGPSNGQASYKIFKMEKGKVVKSVELNAPNYHYEECSCYPDAGEITCVCRDNWHGSNRPWVSFNQNLEYQIGYICSGVFGDNPRPNDGTGSCGPVSPNGAYGIKGFSFKYGNGVWIGRTKSTNSRSGFEMIWDPNGWTGTDSDFSVKQDIIAITDWSGYSGSFVQHPELTGLDCIRPCFWVELIRGRPKESTIWTSGSSISFCGVNSDTVSWSWPDGAELPFTIDK

SEQ ID NO: 21050 - protein, 449 aa, Artificial Sequence
  derived and/or modified protein sequence (wt) from neuraminidase__InfluenzaA__AEO89023
MNPNQKIITIGSICMVIGIVSLMLQIGNMVSLWVSHSIQTGNQHQVEPISNTNFLTEKAVASVTLAGNSSLCPIRGWAVHSKDNSIRIGSKGDVFVIREPFISCSHLECRTFFLTQGALLNDKHSNGTVKDRSPHRTLMSCPVGEAPSPYNSRFESVAWSASACHDGTSWLTIGISGPDNGAVAVLKYNGMITDTIKSWRNNILRTQESECACVNGSCFTVMTDGPSNGQASYKIFKMEKGKVVKSVELDAPNYHYEECSCYPDAGEITCVCRDNWHGSNRPWVSFNQNLEYQIGYICSGVFGDNPRPNDGTGSCGPVSPNGAYGVKGFSFKYGNGVWIGRTKSPSSRSGFEMIWDPNGWTETDSSFSVKQDIVAITDWSGYSGSFVQHPELTGLDCIRPCFWVELIRGRPKESTIWTSGSSISFCGVNSDTVSWSWPDGAELPFTIDK

SEQ ID NO: 21051 - protein, 449 aa, Artificial Sequence
  derived and/or modified protein sequence (wt) from neuraminidase__InfluenzaA__AEO89032
MNPNQKIITIGSICMVIGIVSLMLQIGNMISIWVSHSIQTGNQHQAEPIRNTNFLTENAVASVTLAGNSSLCPVRGWAVHSKDNSIRIGSKGDVFVIREPFISCSHLECRTFFLTQGALLNDKHSNGTVKDRSPHRTLMSCPVGEAPSPYNSRFESVAWSASACHDGTSWLTIGISGPDNGAVAVLKYNGIITDTIKSWRNNILRTQESECACVNGSCFTVMTDGPSNGQASYKIFKMEKGKVVKSVELNAPNYHYEECSCYPDAGEITCVCRDNWHGSNRPWVSFNQNLEYQIGYICSGVFGDNPRPNDGTGSCGPVSPNGAYGIKGFSFKYGNGVWIGRTKSTNSRSGFEMIWDPNGWTGTDSNFSVKQDIVAITDWSGYSGSFVQHPELTGLDCIRPCFWVELIRGRPKESTIWTSGSSISFCGVNSDTVSWSWPDGAELPFTIDK

SEQ ID NO: 21052 - protein, 449 aa, Artificial Sequence
  derived and/or modified protein sequence (wt) from neuraminidase__InfluenzaA__AEO89041
MNPNQKIITIGSICMVIGLVSLMLQIGNMISIWVSHSIQTGNQHQAEPIRNTNFLTENAVASVTLAGNSSLCPVRGWAVHSKDNSIRIGSKGDVFVIREPFISCSHLECRTFFLTQGALLNDKHSNGTVKDRSPHRTLMSCPVGEAPSPYNSRFESVAWSASACHDGTSWLTIGISGPDNGAVAVLKYNGIITDTIKSWRNNILRTQESECACVNGSCFTVMTDGPSNGQASYKIFKMEKGKVVKSVELNAPNYHYEECSCYPDAGEITCVCRDNWHGSNRPWVSFNQNLEYQIGYICSGVFGDNPRPNDGTGSCGPVSPNGAYGIKGFSFKYGNGVWIGRTKSTNSRSGFEMIWDPNGWTGTDSNFSVKQDIVAITDWSGYSGSFVQHPELTGLDCIRPCFWIELIRGRPKESTIWTSGSSISFCGVNSDTVSWSWPDGAELPFTIDK

SEQ ID NO: 21053 - protein, 449 aa, Artificial Sequence
  derived and/or modified protein sequence (wt) from neuraminidase__InfluenzaA__AEO89050
MNPNQKIITIGSICMVIGIVSLMLQIGNMISIWVSHSIQTGNQHQAEPIRNTNFLTENAVASVTLAGNSSLCPIRGWAVHSKDNSIRIGSKGDVFVIREPFISCSHLECRTFFLTQGALLNDKHSNGTVKDRSPHRTLMSCPMGEAPSPYNSRFESVAWSASACHDGTSWLTIGISGPDNGAVAVLKYNGIITDTIKSWRNNILRTQESECACVNGSCFTVMTDGPSNGQASYKIFKMEKGKVVKSVELNAPNYHYEECSCYPDAGEIICVCRDNWHGSNRPWVSFNQNLEYQIGYICSGVFGDNPRPNDGTGSCGPVSPNGAYGIKGFSFKYGNGVWIGRTKSTNSRSGFEMIWDPNGWTGTDSDFSVKQDIVAITDWSGYSGSFVQHPELTGLDCIRPCFWVELIRGRPKESTIWTSGSSISFCGVNSDTVSWSWPDGAELPFTIDK

SEQ ID NO: 21054 - protein, 449 aa, Artificial Sequence
  derived and/or modified protein sequence (wt) from neuraminidase__InfluenzaA__AEO89058
MNPNQKIITIGSICMVIGIVSLMLQIGNMISIWVSHSIQTGNQRQAEPISNTKFLTEKAVASVTLAGNSSLCPISGWAVYSKDNSIRIGSRGDVFVIREPFISCSHLECRTFFLTQGALLNDKHSNGTVKDRSPHRTLMSCPVGEAPSPYNSRFESVAWSASACHDGTSWLTIGISGPDNGAVAVLKYNGIITDTIKSWRNNILRTQESECACVNGSCFTVMTDGPSNGQASYKIFKMEKGKVVKSVELDAPNYHYEECSCYPDAGEITCVCRDNWHGSNRPWVSFNQNLDYQIGYICSGVFGDNPRPNDGTGSCGPVSPNGAYGVKGFSFKYGNGVWIGRTKSTNSRSGFEMIWDPNGWTGTDSSFSVKQDIVAITDWSGYSGSFVQHPELTGLDCIRPCFWVELIRGRPKESTIWTSGSSISFCGVNSDTVSWSWPDGAELPFTIDK

SEQ ID NO: 21055 - protein, 449 aa, Artificial Sequence
  derived and/or modified protein sequence (wt) from neuraminidase__InfluenzaA__AEO89075
MNPNQKIITIGSICMVIGIVSLMLQIGNMISIWVSHSIQRGNLNQVEPISNTNFLTEKAVASVTLAGNSSLCPIRGWAIHSKDNSIRIGSKGDVFVIREPFISCSHLECRTFFLTQGALLNDKHSNGTVKDRSPHRTLMSCPVGEVPSPYNSRFESVAWSASACHDGTSWLTIGISGPDNGAVAVVKYNGIITDTIKSWRNNILRTQESECACVNGSCFTVMTDGPSNGQASYKIFKMEKGKVIKSVELDAPNYHYEECSCYPDAGEITCVCRDNWHGSNRPWVSFNQNLEYQIGYICSGVFGDNPRPNDGTGSCGPVSPNGAYGVKGFSFKYGNGVWIGRTKSPNSRSGFEMIWDPNGWSETDSSFSVKQDIVAITDWSGYSGSFVQHPELTGLDCIRPCFWVELIRGRPKESTIWTSGSSISFCGVNSDTVSWSWPDGAELPFTIDK

SEQ ID NO: 21056 - protein, 449 aa, Artificial Sequence
  derived and/or modified protein sequence (wt) from neuraminidase__InfluenzaA__AEO89084
MNPNQKIITIGSICMVIGIVSLMLQIGNMISIWISYSIQTGNQHQAEPTRNATFLTENAVASVTLAGNSSLCPVRGWAVHSKDNSIRIGSKGDVFVIREPFISCSHLECRTFFLTQGALLNDKHSNGTVKDRSPHRTLMSCPVGEAPSPYNSRFESVAWSASACHDGTSWLTIGISGPDNGAVAVLKYNGIITDTIKSWRNNILRTQESECACVNGSCFTVMTDGPSDGQASYKIFKMEKGKVVKSVELIAPNYHYEECSCYPDAGEITCVCRDNWHGSNRPWVSFNQNLEYQIGYICSGVFGDNPRPNDGTGSCGPVSPNGAYGIKGFSFKYGNGVWIGRTKSTNSRSGFEMIWDPNGWTETDSNFSVKQDIVAITDWSGYSGSFVQHPELTGLDCIRPCFWVELIRGRPKESTIWTSGSSISFCGVNSDTVSWSWPDGAELPFTIDK

SEQ ID NO: 21057 - protein, 449 aa, Artificial Sequence
  derived and/or modified protein sequence (wt) from neuraminidase__InfluenzaA__AEO89093
MNPNQKIITIGSICMVIGIVSLMLQIGNMISLWVSHSIQTGNQHQVEPISNTNFLVEKAVASVTLAGNSSLCPIRGWAVHSKDNSIRIGSKGDVFVIREPFISCSHLECRTFFLTQGALLNDKHSNGTVKDRSPHRTLMSCPVGEAPSPYNSRFESVAWSASACHDGTSWLTIGISGPDNGAVAVLKYNGMITDTIKSWRNNILRTQESECACVNGSCFTVMTDGPSNGQASYKIFKMEKGRVVKSVELDAPNYHYEECSCYPDAGEITCVCRDNWHGSNRPWVSFNQNLEYQIGYICSGVFGDNPRPNDGTGSCGPVSSNGAYGVKGFSFKYGNGVWIGRTKSPNSRSGFEMIWDPNGWTETDSSFSVKQDIVAITDWSGYSGSFVQHPELTGLDCIRPCFWVELIRGRPKESTIWTSGSSISFCGVNSDTVSWSWPDGAELPFTIDK

SEQ ID NO: 21058 - protein, 449 aa, Artificial Sequence
  derived and/or modified protein sequence (wt) from neuraminidase__InfluenzaA__AEO89102
MNPNQKIITIGSICMVIGIVSLMLQIGNMISIWISHSIQTGNQNQVEPISNTNFLTEKAVASVILAGNSSLCPIRGWAIHSKDNSIRIGSKGDVFVIREPFISCSHLECRTFFLTQGALLNDKHSNGTVKDRSPHRTLMSCPVGEAPSPYNSRFESVAWSASACHDGTSWLTIGISGPDSGAVAVLKYNGIITDTIKSWRNNILRTQESECACVNGSCFTVMTDGPSNGQASYKIFKMEKGKVIKSVELDAPNYHYEECSCYPDAGEITCVCRDNWHGSNRPWVSFNQNLEYQIGYICSGVFGDNPRPNDGTGSCGPVSHNGAYGVKGFSFKYGNGVWIGRTKSPNSRSGFEMIWDPNGWSETDSSFSVKQDIVAITDWSGYSGSFVQHPELTGLDCIRPCFWVELIRGRPKESTVWTSGSSISFCGVNSDTVSWSWPDGAELPFTIDK

SEQ ID NO: 21059 - protein, 449 aa, Artificial Sequence
  derived and/or modified protein sequence (wt) from neuraminidase__InfluenzaA__AEO89111
MNPNQKIITIGSICMVIGIVSLMLQIGNIISIWVSHSIQTGNQHQDEPIRNANVLTENAVASVTLAGNSSLCPVRGWAVHSKDNSIRIGSKGDVFVIREPFISCSHLECRTFFLTQGALLNDKHSNGTVKDRSPHRTLMSCPVGEAPSPYNSRFESVAWSASACHDGTSWLTIGISGPDNGAVAVLKYNGIITDTIKSWRNNILRTQESECACVNGSCFTVMTDGPSNGQASYKIFKMEKGKVVKSVELNAPNYHYEECSCYPDAGEITCVCRDNWHGSNRPWVSFNQNLEYQIGYICSGVFGDNPRPNDGTGSCDPVSPNGAYGIKGFSFKYGNGVWIGRTKSTNSRSGFEMIWDPNGWTETDSNFSVKQDIVAITDWSGYSGSFVQHPELTGLDCIRPCFWVELIRGRPKESTIWTSGSSISFCGVNSDTVSWSWPDGAELPFTIDK

SEQ ID NO: 21060 - protein, 449 aa, Artificial Sequence
  derived and/or modified protein sequence (wt) from neuraminidase__InfluenzaA__AEO89120
MNPNQKIITIGSICMVIGIVSLMLQIGNMISIWVSHSIQTGNQHQAEPIRNASFLTENAVASVTLAGNSSLCPVRGWAVHSKDNSIRIGSKGDVFVIREPFISCSHLECRTFFLTQGALLNDKHSNGTVKDRSPHRTLMSCPVGEAPSPYNSRFESVAWSASACHDGISWLTIGISGPDNGAVAVLKYNGIITDTIKSWRNNILRTQESECACVNGSCFTVMTDGPSNGQASYKIFKMEKGKVVKSVELNAPNYHYEECSCYPDAGEITCVCRDNWHGSNRPWVSFNQNLEYQIGYICSGVFGDNPRPNDGTGSCGPVSPNGAYGIKGFSFKYGNGVWIGRTKSTNSRSGFEMIWDPNGWAETDSNFSVKQDIVAITDWSGYSGSFVQHPELTGLDCIRPCFWVELIRGRPKEGTIWTSGSSISFCGVNSDTVSWSWPDGAELPFTIDK

SEQ ID NO: 21061 - protein, 449 aa, Artificial Sequence
  derived and/or modified protein sequence (wt) from neuraminidase__InfluenzaA__AEO89129
MNPNQKIITIGSICMVIGIVSLMLQIGNIISIWVSHSTQTGNQHQDEPIRNANFLTENAVASVTLAGNSSLCPVRGWAVHSKDNSIRVGSKGDVFVIREPFISCSHLECRTFFLTQGALLNDKHSNGTVKDRSPHRTLMSCPVGEAPSPYNSRFESVAWSASACHDGTSWLTIGISGPDNGAVAVLKYNGIITDTIKSWRNNILRTQESECACVNGSCFTVMTDGPSNGQASYKIFKMEKGKVVKSVELNAPNYHYEECSCYPDAGEITCVCRDNWHGSNRPWVSFNQNLEYQIGYICSGVFGDNPRPNDGTGSCDPVSPNGAYGIKGFSFKYGNGVWIGRTKSTNSRSGFEMIWDPNGWTETDSNFSVKQDIVAITDWSGYSGSFVQHPELTGLDCIRPCFWVELIRGRPKESTIWTSGSSISFCGVNSDTVSWSWPDGAELPFTIDK

SEQ ID NO: 21062 - protein, 449 aa, Artificial Sequence
  derived and/or modified protein sequence (wt) from neuraminidase__InfluenzaA__AEO89138
MNPNQKIITIGSICMVTGIVSLMLQIGNIISMWVSHSIQTRNQHQAEPIRNTNFLTENAVASVTLTGNSSLCPIRGWAVHSKDNSIRIGSKGDVFVIREPFISCSHLECRTFFLTQGALLNDKHSNGTVKDRSPHRTLMSCPVGEAPSPYNSRFESVAWSASACHDGTSWLTIGISGPDNGAVAVLKYNGIITDTIKSWRNNILRTQESECACVNGSCFTVMTDGPSNGQASYKIFKMEKGKVVKSVELNAPNYHYEECSCYPDAGEIICVCRDNWHGSNRPWVSFNQNLEYQIGYICSGVFGDNPRPNDGTGSCGPVSPNGAYGIKGFSFKYGNGVWIGRTKSTNSRSGFEMIWDPNGWTGTDNDFSVKQDIVAITDWSGYSGSFVQHPELTGLDCIRPCFWVELIRGRPKESTVWTSGSSISFCGVNSDTVSWSWPDGAELPFTIDK

SEQ ID NO: 21063 - protein, 449 aa, Artificial Sequence
  derived and/or modified protein sequence (wt) from neuraminidase__InfluenzaA__AEO89156
MNPNQKIITIGSICMVTGIVSLMLQIGNITSMWVSHSIQTRNQHQAEPIRNTNFLTENAVASVTLAGNSSLCPIRGWAVHSKDNSIRIGSKGDVFVIREPFISCSHLECRTFFLTQGALLNDKHSNGTVKDRSPHRTLMSCPVGEAPSPYNSRFESVAWSASACHDGTSWLTIGISGPDNGAVAVLKYNGIITDTIKSWRNNILRTQESECACVNGSCFTVMTDGPSNGQASYKIFKMEKGKVVKSVELNAPNYHYEECSCYPDAGEIICVCRDNWHGSNRPWVSFNQNLEYQIGYICSGVFGDNPRPNDGTGSCGPVSPNGAYGIKGFSFKYGNGVWIGRTKSTNSRSGFEMIWDPNGWTGTDSDFSVKQDIVAITDWSGYSGSFVQHPELTGLDCIRPCFWVELIRGRPKESTIWTSGSSISFCGVNSDTVSWSWPDGAELPFTIDK

SEQ ID NO: 21064 - protein, 449 aa, Artificial Sequence
  derived and/or modified protein sequence (wt) from neuraminidase__InfluenzaA__AEO89174
MNPNQKIITIGSICMVTGIVSLMLQIGNIISMWVSHSIQTRNQHQAEPIRNTNFLTENAVASVTLAGNSSLCPIRGWAVHSKDNSIRIGSKGDVFVIREPFISCSHLECRTFFLTQGALLNDKHSNGTVKDRSPHRTLMSCPVGEAPSPYNSRFESVAWSASACHDGTSWLTIGISGPDNGAVAVLKYNGIITDTIKSWRNNILRTQESECACVNGSCFTVMTDGPSNGQASYKIFKMEKGKVVKSVELNAPNYHYEECSCYPDAGEIICVCRDNWHGSNRPWVSFNQNLEYQIGYICSGVFGDNPRPNDGTGSCGPVSPNGAYGIKGFSFKYGNGVWIGRTKSTNSRSGFEMIWDPNGWTGTDSDFSVKQDIVAITDWSGYSGSFVQHPELTGLDCIRPCFWVELIRGRPKESTIWTSGSSISFCGVNSDTVSWSWPDGAELPFTIDK

SEQ ID NO: 21065 - protein, 449 aa, Artificial Sequence
  derived and/or modified protein sequence (wt) from neuraminidase__InfluenzaA__AEO89183
MNPNQKIVTIGSICMVIGIVSLMLQIGNMISIWVSHSIQTGNQHQTEPIRNTNFLTENTVASVTLAGNSSLCPIRGWAVHSKDNSIRIGSKGDVFVIREPFISCSHLECRTFFLTQGALLNDKHSNGTVKDRSPHRTLMSCPIGEAPSPYNSRFESVAWSASACHDGTSWLTIGISGPDNGAVAVLKYNGIITDTIKSWRNNILRTQESECACVNGSCFTVMTDGPSNGQASYKIFKMEKGKVVKSVELNAPNYHYEECSCYPDAGEIICVCRDNWHGSNRPWVSFNQNLEYQIGYICSGVFGDNPRPNDGKGSCGPVSPNGAYGVKGFSFKYGNGVWIGRTKSTHSRSGFEMIWDPNGWTGTDSEFSMKQDIVAITDWSGYSGSFVQHPELTGLDCIRPCFWVELIRGRPKESTIWTSGSSISFCGVNSDTVSWSWPDGAELPFTIDK

SEQ ID NO: 21066 - protein, 449 aa, Artificial Sequence
  derived and/or modified protein sequence (wt) from neuraminidase__InfluenzaA__AEO89205
MNPTQKIITIGSICMVIGIVSLMLQIGNMISIWVSHSIQTGNQHQAEPIRNASFLTENAVASVTLAGNSSLCPVRGWAVHSKDNSIRIGSKGDVFVIREPFISCSHLECRTFFLTQGALLNDKHSNGTVKDRSPHRTLMSCPVGEAPSPYNSRFESVAWSASACHDGISWLTIGISGPDNGAVAVLKYNGIITDTIKSWRNNILRTQESECACVNGSCFTVMTDGPSNGQASYKIFKMEKGKVVKSVELNAPNYHYEECSCYPDAGEITCVCRDNWHGSNRPWVSFNQNLEYQIGYICSGVFGDNPRPNDGTGSCGPVSPNGAYGIKGFSFKYGNGVWIGRTKSTNSRSGFEMIWDPNGWAETDSNFSVKQDIVAITDWSGYSGSFVQHPELTGLDCIRPCFWVELIRGRPKEGTIWTSGSSISFCGVNSDTVSWSWPDGAELPFTIDK

SEQ ID NO: 21067 - protein, 449 aa, Artificial Sequence
  derived and/or modified protein sequence (wt) from neuraminidase__InfluenzaA__AEO89215
MNPNQKIITIGSICMAIGIVSLMLQIGNMISIWVSHSIQTGNQHQAEPIRNASFLTENAVASVTLAGNSSLCPVRGWAVHSKDNSIRIGSKGDVFVIREPFISCSHLECRTFFLTQGALLNDKHSNGTVKDRSPHRTLMSCPVGEAPSPYNSRFESVAWSASACHDGISWLTIGISGPDNGAVAVLKYNGIITDTIKSWRNNILRTQESECACVNGSCFTVMTDGPSNGQASYKIFKMEKGKVVKSVELNAPNYHYEECSCYPDAGEITCVCRDNWHGSNRPWVSFNQNLEYQIGYICSGVFGDNPRPNDGTGSCGPVSPNGAYGIKGFSFKYGNGVWIGRTKSTNSRSGFEMIWDPNGWAETDSNFSVKQDIVAITDWSGYSGSFVQHPELTGLDCIRPCFWVELIRGRPKEGTIWTSGSSISFCGVNSDTVSWSWPDGAELPFTIDK

SEQ ID NO: 21068 - protein, 449 aa, Artificial Sequence
  derived and/or modified protein sequence (wt) from neuraminidase__InfluenzaA__AEO89226
MNPTQKIITIGSICMAIGIVSLMLQIGNMISIWVSHSIQTGNQHQAEPIRNASFLTENAVASVTLAGNSSLCPVRGWAVHSKDNSIRIGSKGDVFVIREPFISCSHLECRTFFLTQGALLNDKHSNGTVKDRSPHRTLMSCPVGEAPSPYNSRFESVAWSASACHDGISWLTIGISGPDNGAVAVLKYNGIITDTIKSWRNNILRTQESECACVNGSCFTVMTDGPSNGQASYKIFKMEKGKVVKSVELNAPNYHYEECSCYPDAGEITCVCRDNWHGSNRPWVSFNQNLEYQIGYICSGVFGDNPRPNDGTGSCGPVSPNGAYGIKGFSFKYGNGVWIGRTKSTNSRSGFEMIWDPNGWAETDSNFSVKQDIVAITDWSGYSGSFVQHPELTGLDCIRPCFWVELIRGRPKEGTIWTSGSSISFCGVNSDTVSWSWPDGAELPFTIDK

SEQ ID NO: 21069 - protein, 449 aa, Artificial Sequence
  derived and/or modified protein sequence (wt) from neuraminidase__InfluenzaA__AEO89237
MNPNQKIITIGSICMVIGIVSLMLQIGNIISMWVSHSIQTRNQHQAEPIRNTNFLTENAVASVTLAGNSSLCPIRGWAVHSKDNSIRIGSKGDVFVIREPFISCSHLECRTFFLTQGALLNDKHSNGTVKDRSPHRTLMSCPVGEAPSPYNSRFESVAWSASACHDGTSWLTIGISGPDNGAVAVLKYNGIITDTIKSWRNNILRTQESECACVNGSCFTVMTDGPSNGQASYKIFKMEKGKVVKSVELNAPNYHYEECSCYPDAGEIICVCRDNWHGSNRPWVSFNQNLEYQIGYICSGVFGDNPRPNDGTGSCGPVSPNGAYGIKGFSFKYGNGVWIGRTKSTNSRSGFEMIWDPNGWTGTDSDFSVKQDIVAITDWSGYSGSFVQHPELTGLDCIRPCFWVELIRGRPKESTIWTSGSSISFCGVNSDTVSWSWPDGAELPFTIDK

SEQ ID NO: 21070 - protein, 449 aa, Artificial Sequence
  derived and/or modified protein sequence (wt) from neuraminidase__InfluenzaA__AEO89248
MNPNQKIITIGSICMVIGIVSLMLQIGNIISIWVSHSFQTRVQHQAEPIRNTNFLTENAVASVTLAGNSSLCPIRGWAVHSKDNSIRIGSKGDVFVIREPFISCSHLECRTFFLTQGALLNDKHSNGTVKDRSPHRTLMSCPVGEAPSPYNSRFESVAWSASACHDGTSWLTIGISGPDNGAVAVLKYNGIITDTIKSWRNNILRTQESECACVNGSCFTVMTDGPSNGQASYKIFKMKKGKVVKSVELNAPNYHYEECSCYPDAGEIICVCRDNWHGSNRPWVSFNQNLEYQIGYICSGVFGDNPRPNDGTGSCGPVSPNGAYGIKGFSFKYGNGVWIGRTKSTNSRSGFEMIWDPNGWTGTDSDFSMKQDIVAITDWSGYSGSFVQHPELTGLDCIRPCFWVELIRGRPKESTIWTSGSSISFCGVNSDTVSWSWPDGAELPFTIDK

SEQ ID NO: 21071 - protein, 449 aa, Artificial Sequence
  derived and/or modified protein sequence (wt) from neuraminidase__InfluenzaA__AEO89270
MNPNQKIITIGSICMVTGIVSLMLQIGNITSMWVSHSIQTRNQHQAEPIRNTNFLTENAVASVTLAGNSSLCPIRGWAVHSKDNSIRIGSKGDVFVIREPFISCSHLECRTFFLTQGALLNDKHSNGTVKDRSPHRTLMSCPVGEAPSPYNSRFESVAWSASACHDGTSWLTIGISGPDNGAVAVLKYNGIITDTIKSWRNNILRTQESECACVNGSCFTVMTDGPSNGQASYKIFKMEKGKVVKSVELNAPNYHYEECSCYPDAGEIICVCRDNWHGSNRPWVSFNQNLEYQIGYICSGVFGDNPRPNDGTGSCGPVSPNGAYGIKGFSFKYGNGVWIGRTKSTNSRSGFEMIWDPNGWTGTDSDFSVKQDIVAITDWSGYSGSFVQHPELTGLDCIRPCFWVELIRGRPKESTIWTSGSSISFCGVNSDTVGWSWPDGAELPFTIDK

SEQ ID NO: 21072 - protein, 449 aa, Artificial Sequence
  derived and/or modified protein sequence (wt) from neuraminidase__InfluenzaA__AEO89281
MNPNQKIITIGSICMVVGIVSLMLQIGNIVSIWVSHSIQTGHQQQAEPIKNTNFLTKNAVASVTLAGNSSLCPIRGWAVHSKDNSIRIGSKGDVFVIREPFISCSHLECRTFFLTQGALLNDKHSNGTVKDRSPHRTLMSCPVGEAPSPYNSRFESVAWSASACHDGTSWLTIGISGPDNGAVAVLKYNGIITDTIKSWRNNTLRTQESECACVNGSCFTVMTDGPSNGQASYKIFKMEKGKVVKSAELNAPNYHYEECSCYPDAGEIICVCRDNWHGSNRPWVSFNQNLEYQIGYICSGVFGDNPRPNDGTGSCGPVSPNGAYGIKGFSFKYGNGVWIGRTKSTNSRSGFEMIWDPNGWTGTDSNFSMKQDIVAITEWSGYSGSFVQHPELTGLDCIRPCFWVELIRGRPKESTIWTSGSSISFCGVNSDTVSWSWPDGAELPFTIDK

SEQ ID NO: 21073 - protein, 449 aa, Artificial Sequence
  derived and/or modified protein sequence (wt) from neuraminidase__InfluenzaA__AEO89291
MNPNQKIITIGSICMVVGIVSLMLQIGNIVSIWVSHSIQTGHQQQAEPIKNTNFLTENAVASVTLAGNSSLCPIRGWAVHSKDNSIRIGSKGDVFVIREPFISCSHLECRTFFLTQGALLNDKHSNGTVKDRSPHRTLMSCPVGEAPSPYNSRFESVAWSASACHDGTSWLTIGISGPDNGAVAVLKYNGIITDTIKSWRNNILRTQESECACVNGSCFTVMTDGPSNGQASYKIFKMEKGKVVKSAELNAPNYHYEECSCYPDAGEIICVCRDNWHGSNRPWVSFNQNLEYQIGYICSGVFGDNPRPNDGTGSCGPVSPNGAYGIKGFSFKYGNGVWIGRTKSTNSRSGFEMIWDPNGWTGTDSNFSMKQDIVAITEWSGYSGSFVQHPELTGLDCIRPCFWVELIRGRPKESTIWTSGSSISFCGVNSDTVSWSWPDGAELPFTIDK

SEQ ID NO: 21074 - protein, 449 aa, Artificial Sequence
  derived and/or modified protein sequence (wt) from neuraminidase__InfluenzaA__AEO89302
MNPNQKIITIGSICMVIGIVSLMLQIGNIISIWVSHSIQTGNQHQDEPIRNANFLTENAVASVTLAGNSSLCPVRGWAVHSKDNSIRIGSKGDVFVIREPFISCSHLECRTFFLTQGALLNDKHSNGTVKDRSPHRTLMSCPVGEAPSPYNSRFESVAWSASACHDGTSWLTIGISGPDNGAVAVLKYNGIITDTIKSWRNNILRTQESECACVNGSCFTVMTDGPSNGQASYKIFKMEKGKVVRSVELNAPNYHYEECSCYPDAGEITCVCRDNWHGSNRPWVSFNQNLEYQIGYICSGVFGDNPRPNDGTGSCDPVSPNGAYGIKGFSFKYGNGVWIGRTKSTNSRSGFEMIWDPNGWTETDSDFSVKQDIVAITDWSGYSGSFVQHPELTGLDCIRPCFWVELIRGRPKESTIWTSGSSISFCGVSSDTVSWSWPDGAELPFTIDK

SEQ ID NO: 21075 - protein, 469 aa, Artificial Sequence; identical to SEQ ID NO: 16057
  derived and/or modified protein sequence (wt) from neuraminidase__InfluenzaA__AEO99218

SEQ ID NO: 21076 - protein, 469 aa, Artificial Sequence
  derived and/or modified protein sequence (wt) from neuraminidase__InfluenzaA__AEQ49739
MNPNQKIITIGSVCMTIGMANLILQIGNIISIWISHSIQLGNQSQIETCNQSVITYENNTWVNQTYVNISNTNFAAGQSVVSVKLAGNSSLCPVSGWAIYSKDNSIRIGSKGDVFVIREPFISCSPLECRTFFLTQGALLNDKHSNGTIKDRSPYRTLMSCPIGEVPSPYNSRFESVAWSASACHDGINWLTIGISGPDNGAVAVLKYNGIITDTIKSWRNNILRTQESECACVNGSCFTIMTDGPSDGQASYKIFRIEKGKIVKSVEMNAPNYHYEECSCYPDSSEVTCVCRDNWHGSNRPWVSFNQNLEYQIGYICSGIFGDNPRPNDKTGSCGPVSSNGANGVKGFSFKYGNGVWIGRTKSISSRKGFEMIWDPNGWTGTDNNFSIKQDIVGINEWSGYSGSFVQHPELTGMDCIRPCFWVELIRGRPKENTIWTSGSSISFCGVNSDTVGWSWPDGAELPFTIDK

SEQ ID NO: 21077 - protein, 469 aa, Artificial Sequence; identical to SEQ ID NO: 20257
  derived and/or modified protein sequence (wt) from neuraminidase__InfluenzaA__AEQ49740

SEQ ID NO: 21078 - protein, 469 aa, Artificial Sequence
  derived and/or modified protein sequence (wt) from neuraminidase__InfluenzaA__AEQ49741
MNPNQKIITIGSVCMTIGMANLILQIGNIISIWISHSIQLGNQSQIETCNQSVITYENNTWVNQTYVNISNTNFAAGQSVVSVKLAGNSSLCPVSGWAIYSKDNSIRIGSKGDVFVIREPFISCSPLECRTFFLTQGALLNDKHSNGTIKDRSPYRTLMSCPIGEVPSPYNSRFESVAWSASACHDGINWLTIGISGPDNGAVAVLKYNGIITDTIKSWRNNILRTQESECACVNGSCFTIMTDGPSDGQASYKIFRIEKGKIVKSVEMNAPNYHYEECSCYPDSSEITCVCRDNWHGSNRPWVSFNQNLEYQIGYICSGIFGDNPRPNDKTGSCGPVSSNGANGVKGFSFKYGNGVWIGRTKSISSRKGFEMIWDPNGWTGTDNNFSIKQDIVGINEWSGYSGSFVQHPELTGMDCIRPCFWVELIRGRPKENTIWTSGSSISFCGVNSDTVGWSWPDGAELPFTIDK

SEQ ID NO: 21079 - protein, 469 aa, Artificial Sequence
  derived and/or modified protein sequence (wt) from neuraminidase__InfluenzaA__AEQ49742
MNPNQKIITIGSVCMTIGMANLILQIGNIISIWISHSIQLGNQSQIETCNQSVITYENNTWVNQTYVNISNTNFAAGQSVVSVKLAGNSSLCPVSGWAIHSKDNSIRIGSKGDVFVIREPFISCSPLECRTFFLTQGALLNDKHSNGTIKDRSPYRTLMSCPIGEVPSPYNSRFESVAWSASACHDGINWLTIGISGPDNGAVAVLKYNGIITDTIKSWRNNILRTQESECACVNGSCFTIMTDGPSDGQASYKIFRIEKGKIVKSVEMNAPNYHYEECSCYPDSSEITCVCRDNWHGSNRPWVSFNQNLEYQIGYICSGIFGDNPRPNDKTGSCGPVSSNGANGVKGFSFKYGNGVWIGRTKSISSRKGFEMIWDPNGWTGTDNNFSIKQDIVGINEWSGYSGSFVQHPELTGMDCIRPCFWVELIRGRPKENTIWTSGSSISFCGVNSDTVGWSWPDGAELPFTIDK

SEQ ID NO: 21080 - protein, 469 aa, Artificial Sequence
  derived and/or modified protein sequence (wt) from neuraminidase__InfluenzaA__AEQ49743
MNPNQKIITIGSVCMTIGMANLILQIGNIISIWISHSIQLGNQSQIETCNQSVITYENNTWVNQTYVNISNTNFAAGQSVVSVKLAGNSSLCPVSGWAIYSKDNSIRIGSKGDVFVIREPFISCSPLECRTFFLTQGALLNDKHSNGTIKDRSPYRTLMSCPIGEVPSPYNSRFESVAWSASACHDGINWLTIGISGPDNGAVAVLKYNGIITDTIKSWRNNILRTQESECACVNGSCFTIMTDGPSDGQASYKIFRIEKGKIVKSVEMNAPNYHYEECSCYPDSSEITCVCRDNWHGSNRPWVSFNQNLEYQIGYICSGIFGDNPRPNDKTGSCGPVSSNGANGVKGFSFKYGNGVWIGRTKSISSRKGFEMIWDPNGWTGTDNNFSIKQDIVGTNEWSGYSGSFVQHPELTGLDCIRPCFWVELIRGRPKENTIWTSGSSISFCGVNSDTVGWSWPDGAELPFTIDN

SEQ ID NO: 21081 - protein, 469 aa, Artificial Sequence
  derived and/or modified protein sequence (wt) from neuraminidase__InfluenzaA__AEQ49744
MNPNQKIITIGSVCMTIGMANLILQIGNIISIWISHSIQLGNQSQIETCNQSVITYENNTWVNQTYVNISNTNFAAGQSVVSVKLAGNSSLCPVSGWAIYSKDNSIRIGSKGDVFVIREPFISCSPLECRTFFLTQGALVNDKHSNGTIKDRSPYRTLMSCPIGEVPSPYNSRFESVAWSASACHDGINWLTIGISGPDNGAVAVLKYNGIITDTIKSWRNNIFRTQESECACVNGSCFTIMTDGPSDGQASYKIFRIEKGKIVKSVEMNAPNYHYEECSCYPDSSEITCVCRDNWHGSNRPWVSFNQDLEYQIGYICSGIFGDNPRPNDKTGSCGPVSSNGANGVKGFSFKYGNGVWIGRTKSISSRKGFEMIWDPNGWTGTDNNFSIKQNIVGINEWSGYSGSFVQHPELTGLDCIRPCFWVELIRGRPKENTIWTSGSSISFCGVNSDTVGWSWPDGAELPFTIDK

SEQ ID NO: 21082 - protein, 469 aa, Artificial Sequence; identical to SEQ ID NO: 21078
  derived and/or modified protein sequence (wt) from neuraminidase__InfluenzaA__AEQ49745

SEQ ID NO: 21083 - protein, 469 aa, Artificial Sequence; identical to SEQ ID NO: 21078
  derived and/or modified protein sequence (wt) from neuraminidase__InfluenzaA__AEQ49746

SEQ ID NO: 21084 - protein, 469 aa, Artificial Sequence; identical to SEQ ID NO: 21078
  derived and/or modified protein sequence (wt) from neuraminidase__InfluenzaA__AEQ49747

SEQ ID NO: 21085 - protein, 469 aa, Artificial Sequence; identical to SEQ ID NO: 20257
  derived and/or modified protein sequence (wt) from neuraminidase__InfluenzaA__AEQ49748

SEQ ID NO: 21086 - protein, 469 aa, Artificial Sequence; identical to SEQ ID NO: 21078
  derived and/or modified protein sequence (wt) from neuraminidase__InfluenzaA__AEQ49749

SEQ ID NO: 21087 - protein, 469 aa, Artificial Sequence
  derived and/or modified protein sequence (wt) from neuraminidase__InfluenzaA__AEQ49750
MNPNQKIITIGSVCMTIGMANLILQIGNIISIWISHSIQLGNQSQIETCNQSVITYENNTWVNQTYVNISNTNFAAGQSVVSVKLAGNSSLCPVSGWAIYSKDNSIRIGSKGDVFVIREPFISCSPLECRTFFLTQGALLNDNHSNGTIKDRSPYRTLMSCPIGEVPSPYNSRFESVAWSASACHDGINWLTIGISGPDNGAVAVLKYNGIITDTIKSWRNNILRTQESECACVNGSCFTIMTDGPSDGQASYKIFRIEKGKIVKSVEMNAPNYHYEECSCYPDSSEITCVCRDNWHGSNRPWVSFNQNLEYQIGYICSGIFGDNPRPNDKTGSCGPVSSNGANGVKGFSFKYGNGVWIGRTKNISSRKGFEMIWDPNGWTGTDNNFSIKQDIVGINEWSGYSGSFVQHPELTGLDCIRPCFWVELIRGRPKENTIWTSGSSISFCGVNSDTVGWSWPDGAELPFTIDK

SEQ ID NO: 21088 - protein, 469 aa, Artificial Sequence
  derived and/or modified protein sequence (wt) from neuraminidase__InfluenzaA__AEQ49751
MNPNQKIITIGSVCMTIGMANLILQIGNIISIWISHSFQLGNQSQIETCNQSVITYENNTWVNQTYVNISNTNFAAGQSVVSVKLAGNSSLCPVSGWAIYSKDNSIRIGSKGDVFVIREPFISCSPLECRTFFLTQGALLNDNHSNGTIKDRSPYRTLMSCPIGEVPSPYNSRFESVAWSASACHDGINWLTIGISGPDNGAVAVLKYNGIITDTIKSWRNNILRTQESECACVNGSCFTIMTDGPSDGQASYKIFRIEKGKIVKSVEMNAPNYHYEECSCYPDSSEITCVCRDNWHGSNRPWVSFNQNLEYQIGYICSGIFGDNPRPNDKTGSCGPVSSNGANGVKGFSFKYGNGVWIGRTKSISSRKGFEMIWDPNGWTGTDNNFSIKQDIVGINEWSGYSGSFVQHPELTGMDCIRPCFWVELIRGRPKENTIWTSGSSISFCGVNSDTVGWSWPDGAELPFTIDK

SEQ ID NO: 21089 - protein, 469 aa, Artificial Sequence
  derived and/or modified protein sequence (wt) from neuraminidase__InfluenzaA__AEQ49752
MNPNQKIITIGSVCMTIGMANLILQIGNIISIWISHSIQLGNQSQIGTCNQSVITYENNTWVNQTYVNISNTNFAAGQSVVSVKLAGNSSLCPVSGWAIYSKDNSIRIGSKGDVFVIREPFISCSPLECRTFFLTQGALLNDKHSNGTIKDRSPYRTLMSCPIGEVPSPYNSRFESVAWSASACHDGINWLTIGISGPDNGAVAVLKYNGIITDTIKSWRNNILRTQESECACVNGSCFTIMTDGPSDGQASYKIFRIEKGKIVKSVEMNAPNYYYEECSCYPDSSEITCVCRDNWHGSNRPWVSFNQNLEYQIGYICSGIFGDNPRPNDKTGSCGPVSSNGANGVKGFSFKYGNGVWIGRTKSISSRKGFEMIWDPNGWTGTDNNFSIKQDIVGINEWSGYSGSFVQHPELTGMDCIRPCFWVELIRGRPKENTIWTSGSSISFCGVNSDTVGWSWPDGAELPFTIDK

SEQ ID NO: 21090 - protein, 469 aa, Artificial Sequence
  derived and/or modified protein sequence (wt) from neuraminidase__InfluenzaA__AEQ49753
MNPNQKIITIGSVCMTIGMANLILQIGNIISIWISHSIQLGNQSQIETCNQSVITYENNTWVNQTYVNISNTNFAAGQSVVSVKLAGNSSLCPVSGWAIYSKDNSIRIGSKGDVFVIREPFISCSPLECRTFFLTQGALLNDKHSNGTIKDRSPYRTLMSCPIGEVPSPYNSRFESVAWSASACHDGINWLTIGISGPDNGAVAVLKYNGIITDTIKSWRNNILRTQESECACVNGSCFTIMTDGPSDGQASYKIFRIEKGKIVKSVEMNAPNYHYEECSCYPDSSEITCVCRDNWHGSNRPWVSFNQNLEYQIGYICSGIFGDNPRPNDKTGSCGPVSSNGANGVKGFSFKYGNGVWIGRTKSISSRKGFEMIWDPNGWTGTDNNFSIKQDIVGINEWSGYSGSFVQHPELTGMDCIRPCFWVELIRGRPKENTIWTSGSSISFCGVNSDTVDWSWPDGAELPFTIDK

SEQ ID NO: 21091 - protein, 469 aa, Artificial Sequence
  derived and/or modified protein sequence (wt) from neuraminidase__InfluenzaA__AEQ49754
MNPNQKIITIGSVCMTIGMANLILQIGNIISIWISHSIQLGNQSQIETCNQSVITYENNTWVNQTYVNISNTNFAAGQSVVSVKLAGNSSLCPVSGWAIYSKDNSIRIGSKGDVFVIREPFISCSPLECRTFFLTQGALLNDKHSNGTIKDRSPYRTLMSCPIGEVPSPYNSRFESVAWSASACHDGINWLTIGISGPDNGAVAVLKYNGIITDTIKSWRNNILRTQESECACVNGSCFTIMTDGPSDGQASYKIFRIEKGKIVKSVEMNAPNYHYEECSCYPDSSEITCVCRDNWHGSNRPWVSFNQNLEYQIGYICSGIFGDNPRPNDKTGSCGPVSSNGANGVKGFSFKYGNGVWIGRTKSISSRKGFEMIWDPNGWTGTDNNFSIKQDIVGINEWSGYSGSFVQHPELTGLDCIRPCFWVELIRGRPKENTIWTSGSSISFCGVNSNTVGWSWPDGAELPFTIDK

SEQ ID NO: 21092 - protein, 469 aa, Artificial Sequence; identical to SEQ ID NO: 21078
  derived and/or modified protein sequence (wt) from neuraminidase__InfluenzaA__AEQ49755

SEQ ID NO: 21093 - protein, 469 aa, Artificial Sequence
  derived and/or modified protein sequence (wt) from neuraminidase__InfluenzaA__AEQ49756
MNPNQKIITIGSVCMTIGMANLILQIGNIISIWISHSIQLGNQSQVETCNQSVITYENNTWVNQTYVNISNTNFAAGQSVVSVKLAGNSSLCPVSGWAIYSKDNSIRIGSKGDVFVIREPFISCSPLECRTFFLTQGALLNDKHSNGTIKDRSPYRTLMSCPIGEVPSPYNSRFESVAWSASACHDGINWLTIGISGPDNGAVAVLKYNGIITDTIKSWRNNILRTQESECACVNGSCFTIMTDGPSDGQASYKIFRIEKGKIVKSVEMNAPNYHYEECSCYPDSSEITCVCRDNWHGSNRPWVSFNQNLEYQIGYICSGIFGDNPRPNDKTGSCGPVSSNGANGVKGFSFKYGNGVWIGRTKSISSRKGFEMIWDPNGWTGTDNNFSIKQDIVGINEWSGYSGSFVQHPELTGLDCIRPCFWVELIRGRPKENTIWTSGSSISFCGVNSDTVGWSWPDGAELPFTIDK

SEQ ID NO: 21094 - protein, 469 aa, Artificial Sequence; identical to SEQ ID NO: 21078
  derived and/or modified protein sequence (wt) from neuraminidase__InfluenzaA__AEQ49757

SEQ ID NO: 21095 - protein, 469 aa, Artificial Sequence
  derived and/or modified protein sequence (wt) from neuraminidase__InfluenzaA__AEQ49758
MNPNQKIITIGSVCMTIGMANLILQIGNIISIWISHSIQLGNHSQIETCNQSVITYENNTWVNQTYVNISNTNFAAGQSVVSVKLAGNSSLCPVSGWAIYSKDNSIRIGSKGDVFVIREPFISCSPLECRTFFLTQGALLNDKHSNGTIKDRSPYRTLMSCPIGEVPSPYNSRFESVAWSASACHDGINWLTIGISGPDNGAVAVLKYNGIITDTIKSWRNNILRTQESECACVNGSCFTIMTDGPSDGQASYKIFRIEKGKIVKSVEMNAPNYYYEECSCYPDSSEITCVCRDNWHGSNRPWVSFNQNLEYQIGYICSGIFGDNPRPNDKTGSCGPVSSNGANGVKGFSFKYGNGVWIGRTKSISSRKGFEMIWDPNGWAGTDNNFSIKQDIVGINEWSGYSGSFVQHPELTGLDCIRPCFWVELIRGRPKENTIWTSGSSISFCGVNSDTVGWSWPDGAELPFTIDK

SEQ ID NO: 21096 - protein, 469 aa, Artificial Sequence; identical to SEQ ID NO: 21078
  derived and/or modified protein sequence (wt) from neuraminidase__InfluenzaA__AEQ49759

SEQ ID NO: 21097 - protein, 469 aa, Artificial Sequence; identical to SEQ ID NO: 21078
  derived and/or modified protein sequence (wt) from neuraminidase__InfluenzaA__AEQ49760

SEQ ID NO: 21098 - protein, 469 aa, Artificial Sequence
  derived and/or modified protein sequence (wt) from neuraminidase__InfluenzaA__AEQ49761
MNPNQKIITIGSVCMTIGMANLILQIGNIISIWISHSIQLGNQSQIETCNQSVITYENNTWLNQTYVNISNTNFAAGQSVVSVKLAGNSSLCPVSGWAIYSKDNSIRIGSKGDVFVIREPFISCSPSECRTFFLTQGALLNDKHSNGTIKDRSPYRTLMSCPIGEVPSPYNSRFESVAWSASACHDGINWLTIGISGPDNGAVAVLKYNGIITDTIKSWRNNILRTQESECACVNGSCFTIMTDGPSDGQASYKIFRIEKGKIVKSVEMNAPNYHYEECSCYPDSSEITCVCRDNWHGSNRPWVSFNQNLEYQIGYICSGIFGDNPRPNDKTGSCGPVSSNGANGVKGFSFKYGNGVWIGRTKSISSRKGFEMIWDPNGWTGTDNNFSIKQDIVGINEWSGYSGSFVQHPELTGLDCIRPCFWVELIRGRSKENTIWTSGSSISFCGVNSDTVGWSWPDGAELPFTIDK

SEQ ID NO: 21099 - protein, 469 aa, Artificial Sequence
  derived and/or modified protein sequence (wt) from neuraminidase__InfluenzaA__AEQ49762
MNPNQKIITIGSVCMTIGMANLILQIGNIISIWISHSIQLGNQSQIETCNQSVITYENNTWINQTYVNISNTNFAAGQSVVSVKLAGNSSLCPVSGWAIYSKDNSIRIGSKGDVFVIREPFISCSPLECRTFFLTQGALLNDKHSNGTIKDRSPYRTLMSCPIGEVPSPYNSRFESVAWSASACHDGINWLTIGISGPDNGAVAVLKYNGIITDTIKSWRNNILRTQESECACVNGSCFIIMTDGPSDGQASYKIFRIEKGKIVKSVEMNAPNYHYEECSCYPDSSEITCVCRDNWHGSNRPWVSFNQNLEYQIGYICSGIFGDNPRPNDKTGSCGPVSSNGANGVKGFSFKYGNGVWIGRTKSISSRKGFEMIWDPNGWTGTDNNFSIKQDIVGINEWSGYSGSFVQHPELTGLDCIRPCFWVELIRGRPKENTIWTSGSSISFCGVNSDTVGWSWPDGAELPFTIDK

SEQ ID NO: 21100 - protein, 469 aa, Artificial Sequence; identical to SEQ ID NO: 21078
  derived and/or modified protein sequence (wt) from neuraminidase__InfluenzaA__AEQ49763

SEQ ID NO: 21101 - protein, 469 aa, Artificial Sequence; identical to SEQ ID NO: 21078
  derived and/or modified protein sequence (wt) from neuraminidase__InfluenzaA__AEQ49764

SEQ ID NO: 21102 - protein, 469 aa, Artificial Sequence; identical to SEQ ID NO: 21078
  derived and/or modified protein sequence (wt) from neuraminidase__InfluenzaA__AEQ49765

SEQ ID NO: 21103 - protein, 469 aa, Artificial Sequence
  derived and/or modified protein sequence (wt) from neuraminidase__InfluenzaA__AEQ49766
MNPNQKIITIGSVCMTIGMANLILQIGNIISIWISHSIQLGNQSQIETCNQSVITYENNTWVNQTYVNISNTNFAAGQSVVSVKLTGNSSLCPVSGWAIYSKDNSIRIGSKGDVFVIREPFISCSPLECRTFFLTQGALLNDKHSNGTIKDRSPYRTLMSCPIGEVPSPYNSRFESVAWSASACHDGINWLTIGISGPDNGAVAVLKYNGIITDTIKSWRNNILRTQESECACVNGSCFTIMTDGPSDGQASYKIFRIEKGKIVKSVEMNAPNYHYEECSCYPDSSEITCVCRDNWHGSNRPWVSFNQNLEYQIGYICSGIFGDNPRPNDKTGSCGPVSSNGANGVKGFSFKYGNGVWIGRTKSISSRKGFEMIWDPNGWTGTDNNFSIKQDIVGINEWSGYSGSFVQHPELTGLDCIRPCFWVELIRGRPKENTIWTSGSSISFCGVNSDTVGWSWPDGAELPFTIDK

SEQ ID NO: 21104 - protein, 469 aa, Artificial Sequence
  derived and/or modified protein sequence (wt) from neuraminidase__InfluenzaA__AEQ49767
MNPNQKIITIGSVCMTIGMANLILQIGNIISIWISHSIQLGNQSQIETCNQSVITYENNTWVNQTYVNISNTNFAAGQSVVSVKLAGNSSLCPVSGWAIYSKDNSIRIGSKGDVFVIREPFISCSPLECRTFFLTQGALLNDKHSNGTIKDRSPYRTLMSCPIGEVPSPYNSRFESVAWSASACHDGINWLTIGISGPDNGAVAVLKYNGIITDTIKSWRNNILRTQESECACVNGSCFTIMTDGPSDGQASYKIFKIEKGKIVKSVEMNAPNYHYEECSCYPDSSEITCVCRDNWHGSNRPWVSFNQNLEYQIGYICSGIFGDNPRPNDKTGSCGPVSSNGANGVKGFSYKYGNGVWIGRTKSISSRKGFEMIWDPNGWTGTDNNFSIKQDIVGINEWSGYSGSFVQHPELTGMGCIRPCFWVELIRGRPKENTIWTSGSSISFCGVNSDTVGWSWPDGAELPFTIDK

SEQ ID NO: 21105 - protein, 469 aa, Artificial Sequence; identical to SEQ ID NO: 20257
  derived and/or modified protein sequence (wt) from neuraminidase__InfluenzaA__AEQ49768

SEQ ID NO: 21106 - protein, 469 aa, Artificial Sequence; identical to SEQ ID NO: 21078
  derived and/or modified protein sequence (wt) from neuraminidase__InfluenzaA__AEQ49769

SEQ ID NO: 21107 - protein, 469 aa, Artificial Sequence
  derived and/or modified protein sequence (wt) from neuraminidase__InfluenzaA__AEQ49770
MNPNQKIITIGSVCMTIGMANLILQIGNIISVWISHSIQLGNQNQTETCNQSVITYENNTWVNQTYVNISNTNFAAGQSVVSVKLAGNSSLCPVSGWAIYSKDNSIRIGSKGDVFVIREPFISCSPLECRTFFLTQGALLNDKHSNGTIKDRSPYRTLMSCPIGEVPSPYNSRFESVAWSASACHDGINWLTIGISGPDNGAVAVLKYNGIITDTIKSWRNNILRTQESECACVNGSCFTVMTDGPSDGQASYKIFRIEKGKIVKSVEMNAPNYHYEECSCYPDSSEITCVCRDNWHGSNRPWVSFNQNLEYRIGYICSGIFGDNPRPNDKTGSCGPVSSNGANGVKGFSFKYGNGVWIGRTKSISSRNGFEMIWDPNGWTGTDNNFSIKQDIIGINEWSGYSGSFVQHPELTGLDCIRPCFWVELIRGRPKENTIWTSGSSISFCGVNSDTVGWSWPDGAELPFTVDK

SEQ ID NO: 21108 - protein, 469 aa, Artificial Sequence; identical to SEQ ID NO: 21091
  derived and/or modified protein sequence (wt) from neuraminidase__InfluenzaA__AEQ49771

SEQ ID NO: 21109 - protein, 469 aa, Artificial Sequence; identical to SEQ ID NO: 20257
  derived and/or modified protein sequence (wt) from neuraminidase__InfluenzaA__AEQ49772

SEQ ID NO: 21110 - protein, 469 aa, Artificial Sequence
  derived and/or modified protein sequence (wt) from neuraminidase__InfluenzaA__AEQ49773
MNPNQKIITIGSICMTIGMANLILQIGNIISIWISHSIQLGNQSQIETCNQSVITYENNTWVNQTYVNISNTNFAAGQSVVSVKLAGNSSLCPVSGWAIYSKDNSIRIGSKGDVFVIREPFISCSPLECRTFFLTQGALLNDKHSNGTIKDRSPYRTLMSCPIGEVPSPYNSRFESVAWSASACHDGINWLTIGISGPDNGAVAVLKYNGIITDTIKSWRNNILRTQESECACVNGSCFTIMTDGPSDGQASYKIFRIEKGKIVKSVEMNAPNYHYEECSCYPDSSEITCVCRDNWHGSNRPWVSFNQNLEYQIGYICSGIFGDNPRPNDKTGSCGPVSSNGANGVKGFSFKYGNGVWIGRTKSISSRKGFEMIWDPNGWTGTDNNFSIKQDIVGINEWSGYSGSFVQHPELTGLDCIRPCFWVELIRGRPKENTIWTSGSSISFCGVNSNTVGWSWPDGAELPFTIDK

SEQ ID NO: 21111 - protein, 469 aa, Artificial Sequence
  derived and/or modified protein sequence (wt) from neuraminidase__InfluenzaA__AEQ49774
MNPNQKIITIGSVCMTIGMANLILQIGNIISIWISHSIQLGNQSQIETCNQSVITYEYNTWVNQTYINISNTNFAAGQSVVSVKLVGNSSLCPVSGWAIYSKDNSIRIGSKGDVFVIREPFISCSPLECRTFFLTQGALLNDKHSNGTIKDRSPYRTLMSCPIGEVPSPYNSRFESVAWSASACHDGINWLTIGISGPDNGAVAVLKYNGIITDTIKSWRNNILRTQESECACVNGSCFTIMTDGPSDGQASYKIFRIEKGKIVKSVEMNAPNYHYEECSCYPDSSEITCVCRDNWHGSNRPWVSFNQNLEYQIGYICSGIFGDNPRPNDKTGSCGPVSSNGANGVKGFSFKYGNGVWIGRTKSISSRKGYEMIWDPNGWTGTDNNFSIKQDIVGINEWSGYSGSFVQHPELTGMDCIRPCFWVELIRGRPKENTIWTSGSSISFCGVNSDTVGWSWPDGAELPFTIDK

SEQ ID NO: 21112 - protein, 469 aa, Artificial Sequence; identical to SEQ ID NO: 20257
  derived and/or modified protein sequence (wt) from neuraminidase__InfluenzaA__AEQ49775

SEQ ID NO: 21113 - protein, 469 aa, Artificial Sequence
  derived and/or modified protein sequence (wt) from neuraminidase__InfluenzaA__AEQ49776
MNPNQKIITIGSVCMTIGMANLILQIGNIISIWISHSIQLGNQSQIETCNQSVITYENNTWVNQTYVNISNTNFAAGQSVVSVKLAGNSSLCPVSGWAIYSKDNSIRIGSKGDVFVIREPFISCSPSECRTFFLTQGALLNDKHSNGTIKDRSPYRTLMSCPIGEVPSPYNSRFESVAWSASACHDGINWLTIGISGPDNGAVAVLKYNGIITDTIKSWRNNILRTQESECACVNGSCFTIMTDGPSDGQASYKIFRIEKGKIVKSVEMNAPNYHYEECSCYPDSSEITCVCRDNWHGSNRPWVSFNQNLEYQIGYICSGIFGDNPRPNDKTGSCGPVSSNGANGVKGFSFKYGNGVWIGRTKSISSRKGFEMIWDPNGWTGTDNNFSIKQDIVGINEWSGYSGSFVQHPELTGLDCIRPCFWVELIRGRPTENTIWTSGSSISFCGVNSDTVGWSWPDGAELPFTIDK

SEQ ID NO: 21114 - protein, 469 aa, Artificial Sequence; identical to SEQ ID NO: 21078
  derived and/or modified protein sequence (wt) from neuraminidase__InfluenzaA__AEQ49777

SEQ ID NO: 21115 - protein, 469 aa, Artificial Sequence
  derived and/or modified protein sequence (wt) from neuraminidase__InfluenzaA__AEQ49778
MNPNQKIITIGSVCMTIGMANLILQIGNIISIWISHSIQLGNQSQIETCNQSVITYENNTWINQTYVNISNTNFAAVQSVVSVKLAGNSTLCPVSGWAIYSKDNSIRIGSKGDVFVIREPFISCSPLECRTFFLTQGALLNDKHSNGTIKDRSPYRTLMSCPIGEVPSPYNSRFESVAWSASACHDGINWLTIGISGPDNGAVAVLKYNGIITDTIKSWRNNILRTQESECACVNGSCFTIMTDGPSDGQASYKIFRIEKGKIVKSVEMNAPNYHYEECSCYPDSSEITCVCRDNWHGSNRPWVSFNQNLEYQIGYICSGIFGDNPRPNDKTGSCGPVSSNGANGVKGFSFKYGNGVWIGRTKSISSRKGFEMIWDPNGWTGTDNNFSIKQDIVGINEWSGYSGSFVQHPELTGLDCIRPCFWVELIRGRPKENTIWTSGSSISFCGVNSDTVGWSWPDGAELPFTIDK

SEQ ID NO: 21116 - protein, 469 aa, Artificial Sequence
  derived and/or modified protein sequence (wt) from neuraminidase__InfluenzaA__AEQ49779
MNPNQKIITIGSVCMTIGMANLILQIGNIISIWISHSIQLGNQNQTETCNQSVITYENNTWVNQTYVNISNTNFAAGQSVVSVKLAGNSSLCPVSGWAIYSKDNSIRIGSKGDVFVIREPFISCSPLECRTFFLTQGALLNDKHSNGTIKDRSPYRTLMSCPIGEVPSPYNSRFESVAWSASACHDGINWLTIGISGPDNGAVAVLKYNGIITDTIKSWRNNILRTQESECACVNGSCFTVMTDGPSDGQASYKIFRIEKGKIVKSVEMNAPNYHYEECSCYPDSSEITCVCRDNWHGSNRPWVSFNQNLEYRIGYICSGIFGDNPRPNDKTGSCGPVSSNGANGVKGFSFKYGNGVWIGRTKSISSRNGFEMIWDPNGWTGTDNNFSIKQDIIGINEWSGYSGSFVQHPELTGLDCIRPCFWVELIRGRPKENTIWTSGSSISFCGVNSDTVGWSWPDGAELPFTVDK

SEQ ID NO: 21117 - protein, 469 aa, Artificial Sequence; identical to SEQ ID NO: 20257
  derived and/or modified protein sequence (wt) from neuraminidase__InfluenzaA__AEQ49780

SEQ ID NO: 21118 - protein, 469 aa, Artificial Sequence; identical to SEQ ID NO: 20257
  derived and/or modified protein sequence (wt) from neuraminidase__InfluenzaA__AEQ49781

SEQ ID NO: 21119 - protein, 469 aa, Artificial Sequence; identical to SEQ ID NO: 21078
  derived and/or modified protein sequence (wt) from neuraminidase__InfluenzaA__AEQ49782

SEQ ID NO: 21120 - protein, 469 aa, Artificial Sequence
  derived and/or modified protein sequence (wt) from neuraminidase__InfluenzaA__AEQ49783
MNPNQKIITIGSACMTIGMANLILQIGNIISIWISHSIQLGNQSQIETCNQSVITYENNTWVNQTYVNISNTNFAAGQSVVSVKLAGNSSLCPVSGWAIYSKDNSIRIGSKGDVFVIREPFISCSPLECRTFFLTQGALLNDKHSNGTIKDRSPYRTLMSCPIGEVPSPYNSRFESVAWSASACHDGINWLTIGISGPDNGAVAVLKYNGIITDTIKSWRNNILRTQESECACVNGSCFTIMTDGPSDGQASYKIFRIEKGKIVKSVEMNAPNYHYEECSCYPDSSEITCVCRDNWHGSNRPWVSFNQNLEYQIGYICSGIFGDNPRPNDKTGSCGPVSSNGANGVKGFSFKYGNGVWIGRTKSISSRKGFEMIWDPNGWTGTDNNFSIKQDIVGINEWSGYSGSFVQHPELTGLDCIRPCFWVELIRGRPKENTIWTSGSSISFCGVNSDTVGWSWPDGAELPFTIDK

SEQ ID NO: 21121 - protein, 469 aa, Artificial Sequence
  derived and/or modified protein sequence (wt) from neuraminidase__InfluenzaA__AEQ49785
MNPNQKIITIGSVSLTISTICFFMQIAILITTVTLHFKQYEFNSPPNNQVMLCEPTIIERNITEIVYLTNTTIEKEICPKLAEYRNWSKPQCDITGFAPFSKDNSIRLSAGGDIWVTREPYVSCDPNKCYQFALGQGTTLNNVHSNNTVRDRTPYRTLLMNELGVPFHLGTKQVCIAWSSSSCHDGKAWLHVCITGDDKNATASFIYNGRLVDSVVSWSKEILRTQESECVCINGTCTVVMTDGSASGKADTKILFIEEGKIVHTSTLSGSAQHVEECSCYPRYPGVRCVCRDNWKGSNRPIVDINMKDHSIVSSYVCSGLVGDTPRKNDSSSSSHCFDPNDEEGGHGVKGWAFDDGNDVWMGRTISEKSRLGYETFKVIEGWSNPKSKLQINRQVIVDRGDRSGYSGIFSVEGKSCINRCFYVELIRGSKEETEVLWTSNSIVVFCGTSGTYGTGSWPDGADINLMPI

SEQ ID NO: 21122 - protein, 469 aa, Artificial Sequence; identical to SEQ ID NO: 21121
  derived and/or modified protein sequence (wt) from neuraminidase__InfluenzaA__AEQ49786

SEQ ID NO: 21123 - protein, 469 aa, Artificial Sequence; identical to SEQ ID NO: 21121
  derived and/or modified protein sequence (wt) from neuraminidase__InfluenzaA__AEQ49788

SEQ ID NO: 21124 - protein, 469 aa, Artificial Sequence; identical to SEQ ID NO: 21121
  derived and/or modified protein sequence (wt) from neuraminidase__InfluenzaA__AEQ49789

SEQ ID NO: 21125 - protein, 469 aa, Artificial Sequence
  derived and/or modified protein sequence (wt) from neuraminidase__InfluenzaA__AEQ49790
MNPNQKIITIGSVSLTISTICFFMQIAILITTVTLHFKQYEFYSPPNNQVMLCEPTIIERNITEIVYLTNTTIEKEICPKLAEYRNWSKPQCDITGFAPFSKDNSIRLSAGGDIWVTREPYVSCDPDKCYQFALGQGTTLNNVHSNNTVRGRTPYRTLLMNELGVPFHLGTKQVCIAWSSSSCHDGKAWLHVCITGDDKNATASFIYNGRLVDSVVSWSKEILRTQESECVCINGTCTVVMTDGSASGKADTKILFIEEGKIVHTSTLSGSAQHVEECSCYPRYPGVRCVCRDNWKGSNRPIVDINIKDHSIVSSYVCSGLVGDTPRKNDSSSSSHCLDPNNEEGGHGVKGWAFDDGNDVWMGRTINETSRLGYETFKVIEGWSNPKSKLQINRQVIVDRGNRSGYSGIFSVEGKSCINRCFYVELIRGRKEETEVLWTSNSIVVFCGTSGTYGTGSWPDGADLNLMPI

SEQ ID NO: 21126 - protein, 469 aa, Artificial Sequence
  derived and/or modified protein sequence (wt) from neuraminidase__InfluenzaA__AEQ49791
MNPNQKIITIGSVSLTISTICFFMQIAILITTVTLHFKQYEFYPPPNNQVMLCEPTIIERNITEIVYLTNTTIEKEICPKLAEYRNWSKPQCDITGFAPFSKDNSIRLSAGGDIWVTREPYVSCDPDKCYQFALGQGTTLNNVHSNNTVRNRTPYRTLLMNELGVPFHLGTKQVCIAWSSSSCHDGKAWLHVCITGDDKNATASFIYNGRLVDSVVSWSKEILRTQESECVCINGTCTVVMTDGSASGKADTKILFIEEGKIVHTSTLSGSAQHVEECSCYPRYPGVRCVCRDNWKGSNRPIVDINIKDHSIVSSYVCSGLVGDTPRKNDSSSSSHCLDPNNEEGGHGVKGWAFDDGNDVWMGRTINETSRLGYETFKVIEGWSNPKSKLQINRQVIVDRGNRSGYSGIFSVEGKSCINRCFYVELIRGRKEETEVLWTSNSIVVFCGTSGTYGTGSWPDGADLNLMPI

SEQ ID NO: 21127 - protein, 469 aa, Artificial Sequence; identical to SEQ ID NO: 21121
  derived and/or modified protein sequence (wt) from neuraminidase__InfluenzaA__AEQ49792

SEQ ID NO: 21128 - protein, 469 aa, Artificial Sequence; identical to SEQ ID NO: 21121
  derived and/or modified protein sequence (wt) from neuraminidase__InfluenzaA__AEQ49793

SEQ ID NO: 21129 - protein, 469 aa, Artificial Sequence; identical to SEQ ID NO: 21121
  derived and/or modified protein sequence (wt) from neuraminidase__InfluenzaA__AEQ49794

SEQ ID NO: 21130 - protein, 469 aa, Artificial Sequence; identical to SEQ ID NO: 21121
  derived and/or modified protein sequence (wt) from neuraminidase__InfluenzaA__AEQ49795

SEQ ID NO: 21131 - protein, 469 aa, Artificial Sequence
  derived and/or modified protein sequence (wt) from neuraminidase__InfluenzaA__AEQ49796
MNPNQKIITIGSVSLTISTICFFMQIAILITTVTLHFKQYEFNSPPNNQVMLCEPTIIERNITEIVYLTNTTIEKEICPKLAEYRNWSKPQCDITGFAPFSKDNSIRLSAGGDIWVTREPYVSCDPDKCYQFALGQGTTLNNVHSNNTVRGRTPYRTLLMNELGVPFHLGTKQVCIAWSSSSCHDGKAWLHVCITGDDKNATASFIYNGRLVDSVVSWSKEILRTQESECVCINGTCTVVMTDGSASGKADTKILFIEEGKIVHTSTLSGSAQHVEECSCYPRYPGVRCVCRDNWKGSNRPIVDINIKDHSIVSSYVCSGLVGDTPRKNDSSSSSHCLDPNNEEGGHGVKGWAFDDGNDVWMGRTINETSRLGYETFKVIEGWSNPKSKLQINRQVIVDKGNRSGYSGIFSVEGKSCINRCFYVELIRGRKEETEVLWTSNSIVVFCGTSGTYGTGSWPDGADLNLMPI

SEQ ID NO: 21132 - protein, 469 aa, Artificial Sequence; identical to SEQ ID NO: 21121
  derived and/or modified protein sequence (wt) from neuraminidase__InfluenzaA__AEQ49797

SEQ ID NO: 21133 - protein, 469 aa, Artificial Sequence; identical to SEQ ID NO: 21121
  derived and/or modified protein sequence (wt) from neuraminidase__InfluenzaA__AEQ49798

SEQ ID NO: 21134 - protein, 469 aa, Artificial Sequence; identical to SEQ ID NO: 21121
  derived and/or modified protein sequence (wt) from neuraminidase__InfluenzaA__AEQ49799

SEQ ID NO: 21135 - protein, 469 aa, Artificial Sequence; identical to SEQ ID NO: 21121
  derived and/or modified protein sequence (wt) from neuraminidase__InfluenzaA__AEQ49800

SEQ ID NO: 21136 - protein, 469 aa, Artificial Sequence; identical to SEQ ID NO: 21121
  derived and/or modified protein sequence (wt) from neuraminidase__InfluenzaA__AEQ49801

SEQ ID NO: 21137 - protein, 469 aa, Artificial Sequence; identical to SEQ ID NO: 21121
  derived and/or modified protein sequence (wt) from neuraminidase__InfluenzaA__AEQ49802

SEQ ID NO: 21138 - protein, 469 aa, Artificial Sequence
  derived and/or modified protein sequence (wt) from neuraminidase__InfluenzaA__AEQ49803
MNPNQKIITIGSVSLTISTICFFMQIAILITTVTLHFKQYEFNSPPNNQVMLCEPTIIERNITEIVYLTNTTIEKEICPKLAEYRNWSKPQCDITGFAPFSKDNSIRLSAGGDIWVTREPYVSCDPNKCYQFALGQGTTLNNVHSNNTVRDRTPYRTLLMNELGVPFHLGTKQVCIAWSSSSCHDGKAWLHVCITGDDKNATASFIYNGRLVDSVVSWSKEILRTQESECVCINGTCTVVMTDGSASGKADTKILFIEEGKIVHTSTLSGSAQHVEECSCYPRYPGVRCVCRDNWKGSNRPIVDINIKDHSIVSSYVCSGLVGDTPRKNDSTSSSHCLDPNNEEGGHGVKGWAFDDGNDVWMGRTISETSRLGYETFKVIEGWSNPKSKLQINRQVIVDKGNRSGYSGIFSVEGKSCINRCFYVELIRGRKEETEVLWTSNSIVVFCGTSGTYGTGSWPDGADLNLMTI

SEQ ID NO: 21139 - protein, 469 aa, Artificial Sequence
  derived and/or modified protein sequence (wt) from neuraminidase__InfluenzaA__AEQ49804
MNPNQKIITIGSVSLTISTICFFMQIAILITTVTLHFKQYEFNSPPNNQVMLCEPTIIERNITEIVYLTNTTIEKEICPKPAEYRNWSKPQCDITGFAPFSKDNSIRLSAGGDIWVTREPYVSCDPDKCYQFALGQGTTLNNVHSNNTVRDRTPYRTLLMNELGVPFHLGTKQVCIAWSSSSCHDGKAWLHVCITGDDKNATASFIYNGRLVDSVVSWSKDILRTQESECVCINGTCTVVMTDGSASGKADTKILFIEEGKIVHTSTLSGSAQHVEECSCYPRYPGVRCVCRDNWKGSNRPIVDINIKDHSIVSSYVCSGLVGDTPRKNDSSSSSHCLDPNNEEGGHGVKGWAFDDGNDVWMGRTINETSRLGYETFKVIEGWSNPKSKLQINRQVIVDRGNRSGYSGIFSVEGKSCINRCFYVELIRGRKEETEVLWTSNSIVVFCGTSGTYGTGSWPDGADLNLMPI

SEQ ID NO: 21140 - protein, 469 aa, Artificial Sequence
  derived and/or modified protein sequence (wt) from neuraminidase__InfluenzaA__AEQ49805
MNPNQKIITIGSVSLTISTICFFMQIAILITTVTLHFKQYEFNSPPNNQVMLCEPTIIERNITEIVYLTNTTIEKEICPKPAEYRNWSKPQCDITGFAPFSKDNSIRLSAGGDIWVTREPYVSCDPDKCYQFALGQGTTLNNVHSNNTVRNRTPYRTLLMNELGVPFHLGTKQVCIAWSSSSCHDGKAWLHVCITGDDKNATASFIYNGRLVDSVVSWSKDILRTQESECVCINGTCTVVMTDGSASGKADTKILFIEEGKIVHTSTLSGSAQHVEECSCYPRYPGVRCVCRDNWKGSNRPIVDINIKDHSIVSSYVCSGLVGDTPRKNDSSSSSHCLDPNNEEGGHGVKGWAFDDGNDVWMGRTINETSRLGYETFKVIEGWSNPKSKLQINRQVIVDRGNRSGYSGIFSVEGKSCINRCFYVELIRGRKEETEVLWTSNSIVVFCGTSGTYGTGSWPDGADLNLMPI

SEQ ID NO: 21141 - protein, 469 aa, Artificial Sequence
  derived and/or modified protein sequence (wt) from neuraminidase__InfluenzaA__AEQ49806
MNPNQKIITIGSVSLTISTICFFMQIAILITTVTLHFKQYEFNSPPNNQVMLCEPTIIERNITEIVYLTNTTIEKEICPKLAEYRNWSKPQCDITGFAPFSKDNSIRLSAGGDIWVTREPYVSCDPDKCYQFALGQGTTLNNVHSNNTVRDRTPYRTLLMNELGVPFHLGTKQVCIAWSSSSCHDGKAWLHVCITGDDKNATASFIYNGRLVDSVVSWSKEILRTQESECVCINGTCTVVMTDGSASGKADTKILFIEEGKIVHTSTLSGSAQHVEECSCYPRYPGVRCVCRDNWKGSNRPIVDINIKDHSIVSSYVCSGLVGDTPRKNDSFSSSHCLDPNNEEGGHGVKGWAFDDGNDVWMGRTINETSRLGYETFKVIEGWSNPKSKLQINRQVIVDRGNRSGYSGIFSVEGKSCINRCFYVELIRGRKEETEVLWTSNSIVVFCGTSGTYGTGSWPDGADLNLMPI

SEQ ID NO: 21142 - protein, 469 aa, Artificial Sequence; identical to SEQ ID NO: 19518
  derived and/or modified protein sequence (wt) from neuraminidase__InfluenzaA__AEQ49807

SEQ ID NO: 21143 - protein, 469 aa, Artificial Sequence
  derived and/or modified protein sequence (wt) from neuraminidase__InfluenzaA__AEQ49809
MNPNQKIITIGSVSLTISTICFFMQIAILITTVTLHFKQYEFNSPPNNQVMLCEPTIIERNITEIVYLTNTTIEKEICPKLAEYRNWSKPQCDITGFAPFSKDNSIRLSAGGDIWVTREPYVSCDPDKCYQFALGQGTTLNNVHSNNTVRDRTPYRTLLMNELGVPFHLGTKQVCIAWSSSSCHDGKAWLHVCITGDDKNATASFIYNGKLVDSVVSWSKEILRTQESECVCINGTCTVVMTDGSASGKADTKILFIEEGKIVHTSTLSGSAQHVEECSCYPRYPGVRCVCRDNWKGSNRPIVDINIKDHSIVSSYVCSGLVGDTPRKNDSSSSSHCLDPNNEEGGHGVKGWAFDDGNDVWMGRTINETSRLGYETFKVIEGWSNPKSKLQINRQVIVDRGNRSGYSGIFSVEGKSCINRCFYVELIRGRKEETEVLWTSNSIVVFCGTSGTYGTGSWPDGADLNLMPI

SEQ ID NO: 21144 - protein, 469 aa, Artificial Sequence; identical to SEQ ID NO: 21143
  derived and/or modified protein sequence (wt) from neuraminidase__InfluenzaA__AEQ49811

SEQ ID NO: 21145 - protein, 469 aa, Artificial Sequence; identical to SEQ ID NO: 19518
  derived and/or modified protein sequence (wt) from neuraminidase__InfluenzaA__AEQ49812

SEQ ID NO: 21146 - protein, 469 aa, Artificial Sequence; identical to SEQ ID NO: 19518
  derived and/or modified protein sequence (wt) from neuraminidase__InfluenzaA__AEQ49813

SEQ ID NO: 21147 - protein, 469 aa, Artificial Sequence; identical to SEQ ID NO: 19518
  derived and/or modified protein sequence (wt) from neuraminidase__InfluenzaA__AEQ49815

SEQ ID NO: 21148 - protein, 469 aa, Artificial Sequence
  derived and/or modified protein sequence (wt) from neuraminidase__InfluenzaA__AEQ49816
MNPNQKIITIGSVSLTISTICFFMQIAILITTVTLHFKQYEFNSPPNNQVMLCEPTIIERNITEIVYLTNTTIEKEICPKLAEYRNWSKPQCDITGFAPFSKDNSIRLSAGGDIWVTREPYVSCDPNKCYQFALGQGTTLNNVHSNNTVRDRTPYRTLLMNELGVPFHLGTKQVCIAWSSSSCHDGKAWLHVCITGDDKNATASFIYNGRLVDSVVSWSKEILRTQESECVCINGTCTVVMTDGSASGKADTKILFVEEGKIVHTSTLSGSAQHVEECSCYPRYPGVRCVCRDNWKGSNRPIVDINMKDHSIVSSYVCSGLVGDTPRKNDSSSSSHCFDPNDEEGGHGVKGWAFDDGNDVWMGRTISEKSRLGYETFKVIEGWSNPKSKLQINRQVIVDRGNRSGYSGIFSVEGKSCINRCFYVELIRGRKEETEVLWTSNSIVVFCGTSGTYGTGSWPDGADINLMPI

SEQ ID NO: 21149 - protein, 469 aa, Artificial Sequence; identical to SEQ ID NO: 20883
  derived and/or modified protein sequence (wt) from neuraminidase__InfluenzaA__AEQ49820

SEQ ID NO: 21150 - protein, 469 aa, Artificial Sequence; identical to SEQ ID NO: 20883
  derived and/or modified protein sequence (wt) from neuraminidase__InfluenzaA__AEQ49821

SEQ ID NO: 21151 - protein, 469 aa, Artificial Sequence; identical to SEQ ID NO: 21121
  derived and/or modified protein sequence (wt) from neuraminidase__InfluenzaA__AEQ49822

SEQ ID NO: 21152 - protein, 469 aa, Artificial Sequence; identical to SEQ ID NO: 21121
  derived and/or modified protein sequence (wt) from neuraminidase__InfluenzaA__AEQ49823

SEQ ID NO: 21153 - protein, 469 aa, Artificial Sequence; identical to SEQ ID NO: 21121
  derived and/or modified protein sequence (wt) from neuraminidase__InfluenzaA__AEQ49824

SEQ ID NO: 21154 - protein, 469 aa, Artificial Sequence; identical to SEQ ID NO: 21121
  derived and/or modified protein sequence (wt) from neuraminidase__InfluenzaA__AEQ49825

SEQ ID NO: 21155 - protein, 469 aa, Artificial Sequence; identical to SEQ ID NO: 21121
  derived and/or modified protein sequence (wt) from neuraminidase__InfluenzaA__AEQ49826

SEQ ID NO: 21156 - protein, 469 aa, Artificial Sequence; identical to SEQ ID NO: 21121
  derived and/or modified protein sequence (wt) from neuraminidase__InfluenzaA__AEQ49827

SEQ ID NO: 21157 - protein, 469 aa, Artificial Sequence; identical to SEQ ID NO: 21121
  derived and/or modified protein sequence (wt) from neuraminidase__InfluenzaA__AEQ49828

SEQ ID NO: 21158 - protein, 469 aa, Artificial Sequence
  derived and/or modified protein sequence (wt) from neuraminidase__InfluenzaA__AEQ49829
MNPNQKIITIGSVSLTISTICFFMQIAILITTVTLHFKQYEFNSPPNNQVMLCEPTIIERNITEIVYLTNTTIEKEICPKLAEYRNWSKPQCDITGFAPFSKDNSIRLSAGGDIWVTREPYVSCDPNKCYQFALGQGTTLNNVHSNNTVRDRTPYRTLLMNELGVPFHLGTKQVCIAWSSSSCHDGKAWLHVCITGDDKNATASFIYNGRLVDSVVSWSKEILRTQESECVCINGTCTVVMTDGSALGKADTKILFIEEGKIVHTSTLSGSAQHVEECSCYPRYPGVRCVCRDNWKGSNRPIVDINMKDHSIVSSYVCSGLVGDTPRKNDSSSSSHCFDPNDEEGGHGVKGWAFDDGNDVWMGRTISEKSRLGYETFKVIEGWSNPKSKLQINRQVIVDRGDRSGYSGIFSVEGKSCINRCFYVELIRGSKEETEVLWTSNSIVVFCGTSGTYGTGSWPDGADINLMPI

SEQ ID NO: 21159 - protein, 469 aa, Artificial Sequence; identical to SEQ ID NO: 21121
  derived and/or modified protein sequence (wt) from neuraminidase__InfluenzaA__AEQ49830

SEQ ID NO: 21160 - protein, 469 aa, Artificial Sequence; identical to SEQ ID NO: 21121
  derived and/or modified protein sequence (wt) from neuraminidase__InfluenzaA__AEQ49831

SEQ ID NO: 21161 - protein, 469 aa, Artificial Sequence
  derived and/or modified protein sequence (wt) from neuraminidase__InfluenzaA__AEQ49832
MNPNQKIITIGSVSLTISTICFFMQIAILITTVTLHFKQYEFNSPPNNQVMLCEPTIIERNITEIVYLTNTTIEKEICPKLAEYRNWSKPQCDITGFAPFSKDNSIRLSAGGDIWVTREPYVSCDPNKCYQFALGQGTTLNNVHSNNTVRDRTPYRTLLMNELGVPFHLGTKQVCIAWSSSSCHDGKAWLHVCITGDDKNATASFIYNGRLVDSVVSWSKEILRTQESECVCINGTCTVVMTDGSASGKADTKILFIEEGKIVHTSTLSGSAQHVEECSCYPRYPGVRCVCRDNWKGSNRPIVDINMKDHSIVSSYVCSGLVGDTPRKNDSSSSSHCFDPNDEEGGHGVKGWAFDDGNDVWMGRTISEKSRLGYETFKVVEGWSNPKSKLQINRQVIVDRGDRSGYSGIFSVEGKSCINRCFYVELIRGSKEETEVLWTSNSIVVFCGTSGTYGTGSWPDGADINLMPI

SEQ ID NO: 21162 - protein, 469 aa, Artificial Sequence
  derived and/or modified protein sequence (wt) from neuraminidase__InfluenzaA__AEQ49833
MNPNQKIITIGSVSLTISTICFFMQIAILITTVTLHFKQYEFNSPPNNQVMLCEPTIIERNITEIVYLTNTTIEKEICPKLAEYRNWSKPQCDITGFAPFSKDNSIRLSAGGDIWVTREPYVSCDPDKCYQFALGQGTTLNNVHSNNTVRDRTPYRTLLMNELGVPFHLGTKQVCIAWSSSSCHDGKAWLHVCITGDDKNATASFIYNGKLVDSVVSWSKEILRTQESECVCINGTCTVVMTDGSASGKADTKILFIEEGKIVHTSTLSGSAQHVEECSCYPRYPGVRCVCRDNWKGSNRPIVDINIKDHSIVSSYVCSGLVGDTPRKNDSSSSSHCLDPNNEEGGHGVKGWAFDDGNDVWMGRTINETSRLGYETFKVIEGWSNPKSKLQISRQVIVDRGNRSGYSGIFSVEGKSCINRCFYVELIRGRKEETEVLWTSNSIVVFCGTSGTYGTGSWPDGADLNLMPI

SEQ ID NO: 21163 - protein, 469 aa, Artificial Sequence
  derived and/or modified protein sequence (wt) from neuraminidase__InfluenzaA__AEQ49835
MNPNQKIITIGSVSLTISTICFFMQIAILITTVTLHFKQYEFNSPPNNQVMLCEPTIIERNITEIVYLTNTTIEKEICPKLAEYRNWSKPQCDITGFAPFSKDNSIRLSAGGDIWVTREPYVSCDPNKCYQFALGQGTTLNNVHSNNTVRDRTPYRTLLMNELGVPFHLGTKQVCMAWSSSSCHDGKAWLHVCITGDDKNATASFIYNGRLVDSVVSWSKEILRTQESECVCINGTCTVVMTDGSASGKADTKILFIEEGKIVHTSTLSGSAQHVEECSCYPRYPGVRCVCRDNWKGSNRPIVDINMKDHSIVSSYVCSGLVGDTPRKNDSSSSSHCFDPNDEEGGHGVKGWAFDDGNDVWMGRTISEKSRLGYETFKVIEGWSNPKSKLQINRQVIVDRGNRSGYSGIFSVEGKSCINRCFYVELIRGRKEETEVLWTSNSIVVFCGTSGTYGTGSWPDGADINLMPI

SEQ ID NO: 21164 - protein, 469 aa, Artificial Sequence; identical to SEQ ID NO: 21163
  derived and/or modified protein sequence (wt) from neuraminidase__InfluenzaA__AEQ49836

SEQ ID NO: 21165 - protein, 469 aa, Artificial Sequence; identical to SEQ ID NO: 21163
  derived and/or modified protein sequence (wt) from neuraminidase__InfluenzaA__AEQ49838

SEQ ID NO: 21166 - protein, 469 aa, Artificial Sequence; identical to SEQ ID NO: 21163
  derived and/or modified protein sequence (wt) from neuraminidase__InfluenzaA__AEQ49839

SEQ ID NO: 21167 - protein, 469 aa, Artificial Sequence
  derived and/or modified protein sequence (wt) from neuraminidase__InfluenzaA__AEQ49840
MNPNQKIITIGSVSLTISTICFFMQIAILITTVTLHFKQYEFNSPPNNQVMLCEPTIIERNITEIVYLTNTTIEKEICPKLAEYRNWSKPQCDITGFAPFSKDNSIRLSAGGDIWVTREPYVSCDPNKCYQFALGQGTTLNNVHSNNTVRDRTPYRTLLMNELGVPFHLGTKQVCMAWSSSSCHDGKAWLHVCITGDDKNATASFIYNGRLVDSVVSWSKEILRTQESECVCINGTCTVVMTDGSASGKADTKILFIEEGKIVHTSTLSGSAQHVEECSCYPRYPGVRCVCRDNWKGSNRPIVDINMKDHSIVSSYVCSGLVGDTPRKNDSSSSSHCFDPNDEEGGHGVKGWAFDDGNDVWMGRTISEKSRLGYETFKVIEGWSNHKSKLQINRQVIVDRGNRSGYSGIFSVEGKSCINRCFYVELIRGRKEETEVLWTSNSIVVFCGTSGTYGTGSWPDGADINLMPI

SEQ ID NO: 21168 - protein, 469 aa, Artificial Sequence; identical to SEQ ID NO: 21163
  derived and/or modified protein sequence (wt) from neuraminidase__InfluenzaA__AEQ49841

SEQ ID NO: 21169 - protein, 469 aa, Artificial Sequence; identical to SEQ ID NO: 21163
  derived and/or modified protein sequence (wt) from neuraminidase__InfluenzaA__AEQ49842

SEQ ID NO: 21170 - protein, 469 aa, Artificial Sequence; identical to SEQ ID NO: 21163
  derived and/or modified protein sequence (wt) from neuraminidase__InfluenzaA__AEQ49843

SEQ ID NO: 21171 - protein, 469 aa, Artificial Sequence; identical to SEQ ID NO: 21121
  derived and/or modified protein sequence (wt) from neuraminidase__InfluenzaA__AEQ49844

SEQ ID NO: 21172 - protein, 469 aa, Artificial Sequence
  derived and/or modified protein sequence (wt) from neuraminidase__InfluenzaA__AEQ49845
MNPNQKIITIGSVSLTISTICFFMQIAILITTVTLHFKQYEFNSPPNNQVMLCEPTIIERNITEIVYLTNTTIEREICPKLAEYRNWSKPQCDITGFAPFSKDNSIRLSAGGDIWVTREPYVSCDPNKCYQFALGQGTTLNNVHSNNTVRDRTPYRTLLMNELGVPFHLGTKQVCMAWSSSSCHDGKAWLHVCITGDDKNATASFIYNGRLVDSVVSWSKEILRTQESECVCINGTCTVVMTDGSASGKADTKILFIEEGKIVHTSTLSGSAQHVEECSCYPRYPGVRCVCRDNWKGSNRPIVDINMKDHSIVSSYVCSGLVGDTPRKNDSSSSSHCFDPNDEEGGHGVKGWAFDDGNDVWMGRTISEKSRLGYETFKVIEGWSNPKSKLQINRQVIVDRGNRSGYSGIFSVEGKSCINRCFYVELIRGRKEETEVLWTSNSIVVFCGTSGTYGTGSWPDGADINLMPI

SEQ ID NO: 21173 - protein, 469 aa, Artificial Sequence
  derived and/or modified protein sequence (wt) from neuraminidase__InfluenzaA__AEQ49846
MNPNQKIITIGSVSLTISTICFFMQIAILITTVTLHFKQYEFNSPPNNQVMLCEPTIIERNITEIVYLTNTTIEKEICPKLAEYRNWSKPQCDITGFAPFSKDNSIRLSAGGDIWVTREPYVSCDPNKCYQFALGQGTTLNNVHSNNTVRDRTPYRTLLMNELGVPFHLGTKQVCMAWSSSSCHDGKAWLHVCITGDDKNATASFIYNGRLVDSVVSWSKEILRTQESECVCINGTCTVVMTDGSASGKADTKILFIEEGKIVHTSTLSGSAQHVEECSCYPRYPGVRCVCRDNWKGSNRPIVDINLKDHSIVSSYVCSGLVGDTPRKNDSSSSSHCFDPNDEEGGHGVKGWAFDDGNDVWMGRTISEKSRLGYETFKVIEGWSNPKSKLQINRQVIVDRGNRSGYSGIFSVEGKSCINRCFYVELIRGRKEETEVLWTSNSIVVFCGTSGTYGTGSWPDGADINLMPI

SEQ ID NO: 21174 - protein, 469 aa, Artificial Sequence
  derived and/or modified protein sequence (wt) from neuraminidase__InfluenzaA__AEQ49850
MNPNQKIITIGSVSLTISTICFFMQIAILITTVTLHFKQYEFNSPPNNQVMLCEPTIIERNITEIVYLTNTTIEKEICPKLAEYRNWSKPQCDITGFAPFSKDNSIRLSAGGDIWVTREPYVSCDPNKCYQFALGQGTTLNNVHSNNTVRDRTPYRTLLMNELGVPFHLGTKQVCIAWSSSSCHDGKAWLHVCITGDDKNATASFIYNGRLVDSVVSWSKEILRTQESECVCINGTCTVVMTDGSASGKADTKILFIEEGKIVHTSTLSGSAQHVEECSCYPRYPGVRCVCRDNWKGSNRPIVDINMKDHSIVSSYVCSGLVGDTPRKNDSSSSSHCFDPNDEEGGHGVKGWAFDDGNDVWMGRTISEKSRLGYETFKVIEGWSNPKSKLQINRQVIVDRGDRSGYSGIFSVEGKSCINRCFYVELIRGSKEETEVLWTSNSIVVFCGTSGTYGTGSWPDGADIKIMPI

SEQ ID NO: 21175 - protein, 469 aa, Artificial Sequence
  derived and/or modified protein sequence (wt) from neuraminidase__InfluenzaA__AEQ49851
MNPNQKIITIGSVSLTISTICFFMQIAILITTVTLHFKQYEFNSPPNNQVMLCEPTIMERNITEIVYLTNTTIEKEICPKLAEYRNWSKPQCDITGFAPFSKDNSIRLSAGGDIWVTREPYVSCDPDKCYQFALGQGTTLNNVHSNNTVRDRTPYRTLLMNELGVPFHLGTKQVCIAWSSSSCHDGKAWLHVCITGDDKNATASFIYNGKLVDSVVSWSKEILRTQESECVCINGTCTVVMTDGSASGKADTKILFIEEGKIVHTSTLSGSAQHVEECSCYPRYPGVRCVCRDNWKGSNRPIVDINIKDHSIVSSYVCSGLVGDTPRKNDSSSSSHCLDPNNEEGGHGVKGWAFDDGNDVWMGRTINETSRLGYETFKVIEGWSNPKSKLQINRQVIVDRGNRSGYSGIFSVEGKSCINRCFYVELIRGRKEETEVLWTSNSIVVFCGTSGTYGTGSWPDGADLNLMPI

SEQ ID NO: 21176 - protein, 469 aa, Artificial Sequence; identical to SEQ ID NO: 21143
  derived and/or modified protein sequence (wt) from neuraminidase__InfluenzaA__AEQ49852

SEQ ID NO: 21177 - protein, 469 aa, Artificial Sequence; identical to SEQ ID NO: 21121
  derived and/or modified protein sequence (wt) from neuraminidase__InfluenzaA__AEQ49969

SEQ ID NO: 21178 - protein, 469 aa, Artificial Sequence; identical to SEQ ID NO: 21143
  derived and/or modified protein sequence (wt) from neuraminidase__InfluenzaA__AEQ49970

SEQ ID NO: 21179 - protein, 469 aa, Artificial Sequence
  derived and/or modified protein sequence (wt) from neuraminidase__InfluenzaA__AEQ54954
MNPNQKIITIGSVSLTISTICFFMQIAILITTVTLHFKQYEFNSPPNNQVMLCEPTIIERNITEIVYLTNTTIEKEICPKLAEYRNWSKPQCDITGFAPFSKDNSIRLSAGGDIWVTREPYVSCDPDKCYQFALGQGTTLNNVHSNNTVRDRTPYRTLLMNELGVPFHLGTKQVCIAWSSSSCHDGKAWLHVCITGDDKNATASFIYNGKLVDSVVSWSKEILRTQESECVCINGTCTVVMTDGSASGKADTKILFIEEGKIVHTSTLSGSAQHVEECSCYPRYPGVRCVCRDNWKGSNRPIVDINIKDHSIVSSYVCSGLVGDTPRKNDSSSSSHCLDPNNEEGGHGVKGWAFDDGNDVWMGRTISETSRLGYETFKVIEGWSNPKSKLQINRQVIVDRGNRSGYSGIFSVEGKSCINRCFYVELIRGRKEETEVLWTSNSIVVFCGTSGTYGTGSWPDGADLNLMPI

SEQ ID NO: 21180 - protein, 469 aa, Artificial Sequence; identical to SEQ ID NO: 16599
  derived and/or modified protein sequence (wt) from neuraminidase__InfluenzaA__AER08645

SEQ ID NO: 21181 - protein, 469 aa, Artificial Sequence
  derived and/or modified protein sequence (wt) from neuraminidase__InfluenzaA__AER08649
MNPNQKIITIGSVSLTISTICFFMQIAILITTVTLHFKQYEFNSPPNNQVMLCEPTIIERNITEIVYLTNTTIEKEICPKLAEYRNWSKPQCDITGFAPFSKDNSIRLSAGGDIWVTREPYVSCDPDKCYQFALGQGTTLNNVHSNNTVRDRTPYRTLLMNELGVPFHLGTKQVCIAWSSSSCHDGKAWLHVCITGDDKNATASFIYNGRLVDSVVSWSKEILRTQESECVCINGTCTVVMTDGSASGKADTKILFIEEGKLVHTSTLSGSAQHVEECSCYPRYPGVRCVCRDNWKGSNRPIVDINIKDHSIVSSYVCSGLVGDTPRKNDSSSSSHCLDPNNEEGGHGVKGWAFDDGNDVWMGRTISEKSRLGYETFKVIEGWSNPKSKLQINRQVIVDRGNRSGYSGIFSVEGKSCINRCFYVELIRGRKEETEVLWTSNSIVVFCGTSGTYGTGSWPDGADINLMPI

SEQ ID NO: 21182 - protein, 469 aa, Artificial Sequence
  derived and/or modified protein sequence (wt) from neuraminidase__InfluenzaA__AER08657
MNPNQKIITIGSVSLTISTVCFFMQIAILITTVTLHFKQYEFNSPPNNQVMLCEPTIIERNITEIVYLTNTTIEKEMCPKLAEYRNWSKPQCDITGFAPFSKDNSIRLSAGGDIWVTREPYVSCDPDKCYQFALGQGTTLNNVHSNNTVRDRTPYRTLLMNELGVPFHLGTKQVCIAWSSSSCHDGKAWLHVCITGDDKNATASFIYNGRLVDSVVSWSKEILRTQESECVCINGTCTVVMTDGSASGKADTKILFIEEGKIVHTSTLSGSAQHVEECSCYPRYPGVRCVCRDNWKGSNRPIVDINIKDHSIVSSYVCSGLVGDTPRKNDSSSSSHCLDPNNEEGGHGVKGWAFDDGNDVWMGRTISEKSRLGYETFKVIEGWSNPKSKLQINRQVIVDRGNRSGYSGIFSVEGKSCINRCFYVELIRGRKEETEVLWTSNSIVVFCGTSGTYGTGSWPDGADINLMPI

SEQ ID NO: 21183 - protein, 469 aa, Artificial Sequence; identical to SEQ ID NO: 16599
  derived and/or modified protein sequence (wt) from neuraminidase__InfluenzaA__AER08659

SEQ ID NO: 21184 - protein, 469 aa, Artificial Sequence
  derived and/or modified protein sequence (wt) from neuraminidase__InfluenzaA__AER08661
MNPNQKIITIGSVSLTISTICFFMQIAILITTVTLHFKQYEFNSPPNNQVMLCEPTIIERNITEIVYLTNTTIEKEICPKLAEYRNWSKPQCDITGFAPFSKDNSIRLSAGGDIWVTREPYVSCDPDKCYQFALGQGTTLNNVHSNNTVRDRTPYRTLLMNELGVPFHLGTKQVCIAWSSSSCHDGKAWLHVCITGDDKNATASFIYNGRLVDSVVSWSKEILRTQESECVCINGTCTVVMTDGSASGKADTKILFIEEGKIVHTSTLSGSAQHVEECSCYPRYPGVRCVCRDNWKGSNRPIVDINIKDHSIVSSYVCSGLVGDTPRKNDSSSSSHCLDPNNEEGDHGVKGWAFDDGNDVWMGRTINETSRLGYETFKVIEGWSNPKSKLQINRQVIVDRGNRSGYSGIFSVEGKSCINRCFYVELIRGRKEETEVLWTSNSIVVFCGTSGTYGTGSWPDGADLNLMPI

SEQ ID NO: 21185 - protein, 469 aa, Artificial Sequence; identical to SEQ ID NO: 19518
  derived and/or modified protein sequence (wt) from neuraminidase__InfluenzaA__AER08663

SEQ ID NO: 21186 - protein, 469 aa, Artificial Sequence; identical to SEQ ID NO: 19518
  derived and/or modified protein sequence (wt) from neuraminidase__InfluenzaA__AER08665

SEQ ID NO: 21187 - protein, 469 aa, Artificial Sequence
  derived and/or modified protein sequence (wt) from neuraminidase__InfluenzaA__AER08669
MNPNQKIITIGSVSLTISTICFFMQIAILITTVTLHFKQYEFNSPPNNQVMLCEPTIIERNITEIVYLTNTTIEKEICPTLAEYRNWSKPQCDITGFAPFSKDNSIRLSAGGDIWVTREPYVSCDPDKCYQFALGQGTTLNNVHSNNTVRDRTPYRTLLMNELGVPFHLGTKQVCIAWSSSSCHDGKAWLHVCITGDDKNATASFIYNGRLVDSVVSWSKEILRTQESECVCINGTCTVVMTDGSASGKADTKILFIEEGKIVHTSTLSGSAQHVEECSCYPRYPGVRCVCRDNWKGSNRPIVDINIKDHSIVSSYVCSGLVGDTPRKNDSSSSSHCLDPNNEEGGHGVKGWAFDDGNDVWMGRTISETSRLGYETFKVIEGWSNPKSKLQINRQVIVDRGNRSGYSGIFSVEGKSCINRCFYVELIRGRKEETEVLWTSNSIVVFCGTSGTYGTGSWPDGADLNLMPI

SEQ ID NO: 21188 - protein, 469 aa, Artificial Sequence
  derived and/or modified protein sequence (wt) from neuraminidase__InfluenzaA__AER08671
MNPNQKIITIGSVSLTISTICFFMQIAILITTVTLHFKQYGFNSPPNNQVMLCEPTIIERNITEIVYLTNTTIEKEICPTLAEYRNWSKPQCDITGFAPFSKDNSIRLSAGGDIWVTREPYVSCDPDKCYQFALGQGTTLNNVHSNNTVRDRTPYRTLLMNELGVPFHLGTKQVCIAWSSSSCHDGKAWLHVCITGDDKNATASFIYNGRLVDSVVSWSKEILRTQESECVCINGTCTVVMTDGSASGKADTKILFIEEGKIVHTSTLSGSAQHVEECSCYPRYPGVRCVCRDNWKGSNRPIVDINIKDHSIVSSYVCSGLVGDTPRKNDSSSSSHCLDPNNEEGGHGVKGWAFDDGNDVWMGRTINETSRLGYETFKVIEGWSNPKSKLQINRQVIVDRGNRSGYSGIFSVEGKSCINRCFYVELIRGRKEETEVLWTSNSIVVFCGTSGTYGTGSWPDGADLNLMPI

SEQ ID NO: 21189 - protein, 469 aa, Artificial Sequence; identical to SEQ ID NO: 19518
  derived and/or modified protein sequence (wt) from neuraminidase__InfluenzaA__AER08673

SEQ ID NO: 21190 - protein, 469 aa, Artificial Sequence; identical to SEQ ID NO: 19518
  derived and/or modified protein sequence (wt) from neuraminidase__InfluenzaA__AER08675

SEQ ID NO: 21191 - protein, 469 aa, Artificial Sequence; identical to SEQ ID NO: 19518
  derived and/or modified protein sequence (wt) from neuraminidase__InfluenzaA__AER08677

SEQ ID NO: 21192 - protein, 469 aa, Artificial Sequence; identical to SEQ ID NO: 19518
  derived and/or modified protein sequence (wt) from neuraminidase__InfluenzaA__AER08679

SEQ ID NO: 21193 - protein, 469 aa, Artificial Sequence
  derived and/or modified protein sequence (wt) from neuraminidase__InfluenzaA__AER08681
MNPNQKIITIGSVSLTISTICFFMQIAILITTVTLHFKQYEFNSPPNNQVMLCEPTIIERNITEIVYLTNTTIEKEICPKLAEYRNWSKPQCDITGFAPFSKDNSIRLSAGGDIWVTREPYVSCDPDKCYQFALGQGTTLNNVHSNNTVRDRTPYRTLLMNELGVPFHLGTKQVCIAWSSSSCHDGKAWLHVCITGDDKNATASFIYNGRLVDSVVSWSKEILRTQESECVCINGTCTVVMTDGSASGKADTKILFIEEGKIVHTSTLSGSAQHVEECSCYPRYPGVRCVCRDNWKGSNRPIVDINIKDHSIVSSYVCSGLVGDTPRKNDSSSSSHCLDPNDEEGGHGVKGWAFDDGNDVWMGRTINETSRLGYETFKVIEGWSNPKSKLQINRQVIVDKGNRSGYSGIFSVEGKSCINRCFYVELIRGRKEETEVLWTSNSIVVFCGTSGTYGTGSWPDGADLNLMPI

SEQ ID NO: 21194 - protein, 469 aa, Artificial Sequence; identical to SEQ ID NO: 19518
  derived and/or modified protein sequence (wt) from neuraminidase__InfluenzaA__AER08683

SEQ ID NO: 21195 - protein, 469 aa, Artificial Sequence; identical to SEQ ID NO: 21143
  derived and/or modified protein sequence (wt) from neuraminidase__InfluenzaA__AER08685

SEQ ID NO: 21196 - protein, 469 aa, Artificial Sequence; identical to SEQ ID NO: 21143
  derived and/or modified protein sequence (wt) from neuraminidase__InfluenzaA__AER08687

SEQ ID NO: 21197 - protein, 469 aa, Artificial Sequence
  derived and/or modified protein sequence (wt) from neuraminidase__InfluenzaA__AER08689
MNPNQKIITIGSVSLTISTICFFMQIAILITTVTLHFKQYEFNSPPNNQVTLCEPTIIERNITEIVYLTNTTIEKEICPKLAEYRNWSKPQCDITGFAPFSKDNSIRLSAGGDIWVTREPYVSCDPDKCYQFALGQGTTLNNVHSNNTVRDRTPYRTLLMNELGVPFHLGTKQVCIAWSSSSCHDGKAWLHVCITGDDKNATASFIYNGRLVDSVVSWSKEILRTQESECVCINGTCTVVMTDGSASGKADTKILFIEEGKIVHTSTLSGSAQHVEECSCYPRYPGVRCVCRDNWKGSNRPIVDINIKDHSIVSSYVCSGLVGDTPRKDDSSSSSHCLDPNNEEGGHGVKGWAFDDGNDVWMGRTINETSRLGYETFKVIEGWSNPKSKLQINRQVIVDRGNRSGYSGIFSVEGKSCINRCFYVELIRGRKEETEVLWTSNSIVVFCGTSGTYGTGSWPDGADLNLMPI

SEQ ID NO: 21198 - protein, 469 aa, Artificial Sequence; identical to SEQ ID NO: 21143
  derived and/or modified protein sequence (wt) from neuraminidase__InfluenzaA__AER08691

SEQ ID NO: 21199 - protein, 469 aa, Artificial Sequence
  derived and/or modified protein sequence (wt) from neuraminidase__InfluenzaA__AER08693
MNPNQKIITIGSVSLTISTICFFMQIAILITTVTLHFKQYEFNSPPKNQVMLCEPTIIERNITEIVYLTNTTIEKEICPKLAEYRNWSKPQCDITGFAPFSKDNSIRLSAGGDIWVTREPYVSCDPDKCYQFALGQGTTLNNVHSNNTVRDRTPYRTLLMNELGVPFHLGTKQVCIAWSSSSCHDGKAWLHVCITGDDKNATASFIYNGKLVDSVVSWSKEILRTQESECVCINGTCTVVMTDGSASGKADTKILFIEEGKIVHTSTLSGSAQHVEECSCYPRYPGVRCVCRDNWKGSNRPIVDINIKDHSIVSSYVCSGLVGDTPRKNDSSSSSHCLDPNNEEGGHGVKGWAFDDGNDVWMGRTINETSRLGYETFKVIEGWSNPKSKLQINRQVIVDRGNRSGYSGIFSVEGKSCINRCFYVELIRGRKEETEVLWTSNSIVVFCGTSGTYGTGSWPDGADLNLMPI

SEQ ID NO: 21200 - protein, 469 aa, Artificial Sequence
  derived and/or modified protein sequence (wt) from neuraminidase__InfluenzaA__AER08697
MNPNQKIITIGSVSLTISTICFFMQIAILITTVTLHFKQYEFNSPPNNQVMLCEPTIIERNITEIVYLTNTTIEKETCPTLAEYRNWSKPQCDITGFAPFSKDNSIRLSAGGDIWVTREPYVSCDPDKCYQFALGQGTTLNNVHSNNTVRDRTPYRTLLMNELGVPFHLGTKQVCIAWSSSSCHDGKAWLHVCITGDDKNATASFIYNGRLVDSVVSWSKEILRTQESECVCINGTCTVVMTDGSASGKADTKILFIEEGKIVHTSTLSGSAQHVEECSCYPRYPGVRCVCRDNWKGSNRPIVDINIKDHSIVSSYVCSGLVGDTPRKNDSSSSSHCLDPNNEEGGHGVKGWAFDDGNDVWMGRTINVTSRLGYETFKVIEGWSNPKSKLQINRQVIVDRGNRSGYSGIFSVEGKSCINRCFYVELIRGRKEETEVLWTSNSIVVFCGTSGTYGTGSWPDGADLNLMPI

SEQ ID NO: 21201 - protein, 469 aa, Artificial Sequence; identical to SEQ ID NO: 20997
  derived and/or modified protein sequence (wt) from neuraminidase__InfluenzaA__AER92714

SEQ ID NO: 21202 - protein, 469 aa, Artificial Sequence; identical to SEQ ID NO: 16738
  derived and/or modified protein sequence (wt) from neuraminidase__InfluenzaA__AER92721

SEQ ID NO: 21203 - protein, 469 aa, Artificial Sequence; identical to SEQ ID NO: 16738
  derived and/or modified protein sequence (wt) from neuraminidase__InfluenzaA__AER92724

SEQ ID NO: 21204 - protein, 470 aa, Artificial Sequence
  derived and/or modified protein sequence (wt) from neuraminidase__InfluenzaA__AET84165
MNPNQKIITIGSISIAIGIISLMLQIGNIISIWASHSIQTGSQNNTGICNQRIITYENSTWVNHTYVNINNTNVVAGEDKTSVTLAGNSSLCSISGWAIYTKDNSIRIGSKGDVFVIREPFISCSHLECRTFFLTQGALLNDKHSNGTVKDRSPYRALMSCPLGEAPSPYNSKFESVAWSASACHDGMGWLTIGISGPDNGAVAVLKYNGIITGTIKSWKKQILRTQESECVCMNGSCFTIMTDGPSNKAASYKIFKIEKGKVTKSIELSAPNFYYEECSCYPDTGIVMCVCRDNWHGSNRPWVSFNQNLDYQIGYICSGVFGDNPRPEDGEGSCNPVTIDGANGVKGFSYKYGNGVWIGRTKSNRLRKGFEMIWDPNGWTNTDSDFSVKQDVVAITDWSGYSGSFVQHPELTGLDCIRPCFWVELVRGLPRENTTIWTSGSSISFCGVNSDTANWSWPDGAELPFTIDK

SEQ ID NO: 21205 - protein, 470 aa, Artificial Sequence; identical to SEQ ID NO: 18930
  derived and/or modified protein sequence (wt) from neuraminidase__InfluenzaA__AET84176

SEQ ID NO: 21206 - protein, 470 aa, Artificial Sequence
  derived and/or modified protein sequence (wt) from neuraminidase__InfluenzaA__AET84187
MNPNQKIITIGSISIAIGIISLMLQIGNIISIWASHSIQTGSQNNTGICNQRIITYENSTWVNHTYVNINNTNVVAGEDKTSVTLAGNSSLCSISGWAIYTKDNSIRIGSKGDVFVIREPFISCSHLECRTFFLTQGALLNDKHSNGTVKDRSPYRALMSCPLGEAPSPYNSKFESVAWSASACHDGMDWLTIGISGPDNGAVAVLKYNGIITGTIKSWKKQILRTQESECVCMNGSCFTIMTDGPSNKAASYKIFKIEKGKVTKSIELNAPNFYYEECSCYPDTGIVMCVCRDNWHGSNRPWVSFNQNLDYQIGYICSGVFGDNPRPKDGEGSCNPVTIDGANGVKGFSYKYGNGVWIGRTKSNRLRKGFEMIWDPNGWTNTDSDFSVKQDVVAITDWSGYSGSFVQHPELTGLDCIRPCFWVELVRGLPRENTTIWTSGSSISFCGVNSDTANWSWPDGAELPFTIDK

SEQ ID NO: 21207 - protein, 470 aa, Artificial Sequence
  derived and/or modified protein sequence (wt) from neuraminidase__InfluenzaA__AET84198
MNPNQKIITIGSISIAIGIISLMLQIGNIISIWASHSIQTGSQNNTGICNQRIITYENSTWVNHTYVNINNTNVVAGEDKTSMTLAGNSSLCSISGWAIYTKDNSIRIGSKGDVFVIREPFISCSHLECRTFFLTQGALLNDKHSNGTVKDRSPYRALMSCPLGEAPSPYNSKFESVAWSASACHDGMGWLTIGISGPDNGAVAVLKYNGIITGTIKSWKKQILRTQESECVCMNGSCFTIMTDGPSNKAASYKIFKIEKGKVTKSIELNAPNFYYEECSCYPDTGIVMCVCRDNWHGSNRPWVSFNQNLDYQIGYICSGVFGDNPRPKDGEGSCNPVTVDGANGVKGFSYKYGNGVWIGRTKSNRLRKGFEMIWDPNGWTNTDSDFSVKQDVVAITDWSGYSGSFVQHPELTGLDCIRPCFWVELVRGLPRENTTIWTSGSSISFCGVNSDTANWSWPDGAELPFTIDK

SEQ ID NO: 21208 - protein, 470 aa, Artificial Sequence
  derived and/or modified protein sequence (wt) from neuraminidase__InfluenzaA__AET84209
MNPNQKIITIGSISIAIGIISLMLQIGNIISIWASHSIQTGSQNNTGICNQRIITYENSTWVNHTYVNINNTKVVAGEDKTSVTLAGNSSLCSISGWAINTKDNSIRIGSKGDVFVIREPFISCSHLECRTFFLTQGALLNDKHSNGTVKDRSPYRALMSCPLGEAPSPYNSKFESVAWSASACHDGMGWLTIGISGPDNGAVAVLKYNGIITGTIKSWKKQILRTQESECVCMNGSCFTIMTDGPSNKAASYKIFKIEKGKVTKSIELNAPNFYYEECSCYPDTGIVMCVCRDNWHGSNRPWVSFNQNLDYQIGYICSGVFGDNPRPKDGEGSCNPVTVDGANGVKGFSYKYGNGVWIGRTKSNRLRKGFEMIWDPNGWTNTDSDFSVKQDVVAITDWSGYSGSFVQHPELTGLDCIRPCFWVELVRGLPRENTTIWTSGSSISFCGVNSDTANWSWPDGAELPFTIDK

SEQ ID NO: 21209 - protein, 470 aa, Artificial Sequence
  derived and/or modified protein sequence (wt) from neuraminidase__InfluenzaA__AET84231
MNPNQKIITIGSISIAIGIISLMLQIGSIISIWASHSIHTGSQNNTGICNQRIITYENSTWVNHTYVNINNTNVVAGEDKTSVTLAGNSSLCSISGWAIYTKDNSIRIGSKGDVFVIREPFISCSHLECRTFFLTQGALLNDKHSNGTVKDRSPYRALMSCPLGEAPSPYNSKFESVAWSASACHDGMGWLTIGISGPDNGAVAVLKYNGIITGTIKSWKKQILRTQESECVCMNGSCFTIMTDGPSNKASSYKIFKIEKGKVTKSIELNAPNFYYEECSCYPDTGIVMCVCRDNWHGSNRPWVSFNQNLDYQIGYICSGVFGDNPRPEDGEGSCNPVTVDGANGVKGFSYKYGNGVWIGRTKSNRLRKGFEMIWDPNGWTNTDSDFSVKQDVVAITDWSGYSGSFVQHPELTGLDCIRPCFWVELVRGLPRENTTIWTSGSSISFCGVNSDTANWSWPDGAELPFTIDK

SEQ ID NO: 21210 - protein, 470 aa, Artificial Sequence; identical to SEQ ID NO: 17461
  derived and/or modified protein sequence (wt) from neuraminidase__InfluenzaA__AET84242

SEQ ID NO: 21211 - protein, 470 aa, Artificial Sequence
  derived and/or modified protein sequence (wt) from neuraminidase__InfluenzaA__AET84253
MNPNQKIITIGSISIAIGIISLMLQIGSIISIWASHSIQTGSQNNTGICNQRIITYENSTWVNHTYVNINNTNVVAGEDKTSVTLAGNSSLCSISGWAIYTKDNSIRIGSKGDVFVIREPFISCSHLECRTFFLTQGALLNDKHSNGTVKDRSPYRALMSCPLGEAPSPYNSKFESVAWSASACHDGMGWLTIGISGPDNGAVAVLKYNGIITETIKSWKKQILRTQESECVCMNGSCFTIMTDGPSNKAASYKIFKIEKGKVTKSIELNAPNFYYEECSCYPDTGIVMCVCRDNWHGSNRPWVSFNQNLDYQIGYICSGVFGDNPRPEDGEGSCNPVTVDGANGVKGFSYKYGNGVWIGRTKSNRLRKGFEMIWDPNGWTNTDSDFSVKQDVVAITDWSGYSGSFVQHPELTGLDCIRPCFWVELVRGLPRENTTIWTSGSSISFCGVNSDTANWSWPDGAELPFTIDK

SEQ ID NO: 21212 - protein, 470 aa, Artificial Sequence
  derived and/or modified protein sequence (wt) from neuraminidase__InfluenzaA__AET84264
MNPNQKIITIGSISIAIGIISLMFQIGSIISIWASHSIQTGSQNNTGICNQRIITYENSTWVNHTYVNINNTNVVAGEDKTSVTLAGNSSLCSISGWAIYTKDNSIRIGSKGDVFVIREPFISCSHLECRTFFLTQGALLNDKHSNGTVKDRSPYRALMSCPLGEAPSPYNSKFESVAWSASACHDGMGWLTIGISGPDNGAVAVLKYNGIITETIKSWKKQILRTQESECVCMNGSCFTIMTDGPSNKAASYKIFKIEKGKVTKSIELNAPNFYYEECSCYPDTGIVMCVCRDNWHGSNRPWVSFNQNLDYQIGYICSGVFGDNPRPEDGEGSCNPVTVDGANGVKGFSYKYGNGVWIGRTKSNRLRKGFEMIWDPNGWTNTDSDFSVKQDVVAITDWSGYSGSFVQHPELTGLDCIRPCFWVELVRGLPRENTTIWTSGSSISFCGVNSDTANWSWPDGAELPFTIDK

SEQ ID NO: 21213 - protein, 470 aa, Artificial Sequence
  derived and/or modified protein sequence (wt) from neuraminidase__InfluenzaA__AET84275
MNPNQKIITIGSISIAIGIISLMLQIGNIISIWASHSIQTGSQNNTGICNQRIITYENSTWVNHTYVNINNTNVVAGEDKTSVTLAGNSSLCSISGWAIYTKDNSIRIGSKGDVFVIREPFISCSHLECRTFFLTQGALLNDKHSNGTVKDRSPYRALMSCPLGEAPSPYNSKFESVAWSASACHDGMGWLTIGISGPDNGAVAVLKYNGIITGTIKSWKKQILRTQESECVCMNGSCFTIMTDGPSNKAASYKIFKIEKGKVTKSIELNAPNFYYEECSCYPDTGIVMCVCRDNWHGSNRPWVSFNQNLDYQIGYICSGVFGDNPRPKDGEGSCNPVTVDGANGVKGFSYKYGNGVWIGRTKSNRLRKGFEMIWDPNGWTNTDSDFSVKQDVVAITDWSGYSGSFVQHPELTGLDCIRPCFWVELVRGLPRENTTIWTSGSSISFCGVNSDTANWSWPDGAELPFTIDK

SEQ ID NO: 21214 - protein, 470 aa, Artificial Sequence; identical to SEQ ID NO: 17461
  derived and/or modified protein sequence (wt) from neuraminidase__InfluenzaA__AET84286

SEQ ID NO: 21215 - protein, 470 aa, Artificial Sequence
  derived and/or modified protein sequence (wt) from neuraminidase__InfluenzaA__AET84297
MNPNQKIITIGSISIAIGIISLMLQIGNIISIWASHSIQTGSQNNTGICNQRIITYENSTWVNHTYVNINNTNVVAGEDKTSVTLAGNSSLCSISGWAIYTKDNSIRIGSKGDVFVIREPFISCSHLECRTFFLTQGALLNDKHSNGTVKDRSPYRALMSCPLGEAPSPYNSKFESVAWSASACHDGMGWLTIGISGPDNGAVAVLKYNGIITGTIKSWKKQILRTQESECVCMNGSCFTIMTDGPSNKAASYKIFKIEKGKVTKSIELNAPNFYYEECSCYPDTGIVMCVCRDNWHGSNRPWVSFNQNLDYQIGYICSGVFGDNPRPEDGEGSCNPVTVDGANGVKGFSYKYDNGVWIGRTKSNRLRKGFEMIWDPNGWTNTDSDFSVKQDVVAITDWSGYSGSFVQHPELTGLDCIRPCFWVELVRGLPRENTTIWTSGSSISFCGVNSDTTNWSWPDGAELPFTIDK

SEQ ID NO: 21216 - protein, 470 aa, Artificial Sequence
  derived and/or modified protein sequence (wt) from neuraminidase__InfluenzaA__AET84308
MNPNQKIITIGSISIAIGIISLMLQIGNIISIWASHSIQTGSQNNTGICNQRIITYENSTWVNHTYVNINNTNVVAGEDKTSVTLAGNSSLCSISGWAIYTKDNSIRIGSKGDVFVIREPFISCSHLECRTFFLTQGALLNDKHSNGTVKDRSPYRALMSCPLGEAPSPYNSKFESVAWSASACHDGMGWLTIGISGPDNGAVAVLKYNGIITETIKSWKKQILRTQESECVCMNGSCFTIMTDGPSNKAASYKIFKIEKGKVTKSIELNAPNFHYEECSCYPDTGIVMCVCRDNWHGSNRPWVSFNQNLDYQIGYICSGVFGDNPRPEDGEGSCNPVTVDGANGVKGFSYKYDNGVWIGRTKSNRLRKGFEMIWDPNGWTNTDSDFSVKQDVVAITDWSGYSGSFVQHPELTGLDCIRPCFWVELVRGLPRENTTIWTSGSSISFCGVNSDTTNWSWPDGAELPFTIDK

SEQ ID NO: 21217 - protein, 470 aa, Artificial Sequence
  derived and/or modified protein sequence (wt) from neuraminidase__InfluenzaA__AET84319
MNPNQKIITIGSISIAIGIISLMLQIGNIISIWASHSIQTGSQNNTGICNQRIITYENSTWVNHTYVNINNTNVVAGEDKTSMTLAGNSSLCSISGWAIYTKDNSIRIGSKGDVFVIREPFISCSHLECRTFFLTQGALLNDKHSNRTVKDRSPYRALMSCPLGEAPSPYNSKFESVAWSASACHDGMGWLTIGISGPDNGAVAVLKYNGIITETIKSWKKQILRTQESECVCMNGSCFTIMTDGPSNKAASYKIFKIEKGKVTKSIELNAPNFYYEECSCYPDTGIVMCVCRDNWHGSNRPWVSFNQNLDYQIGYICSGVFGDNPRPEDGEGSCNPVTVDGANGVKGFSYKYGNGVWIGRTKSNRLRKGFEMIWDPNGWTNTDSDFSVKQDVVAITDWSGYSGSFVQHPELTGLDCIRPCFWVELVRGLPRENTTIWTSGSSISFCGVNSDTANWSWPDGAELPFTIDK

SEQ ID NO: 21218 - protein, 470 aa, Artificial Sequence
  derived and/or modified protein sequence (wt) from neuraminidase__InfluenzaA__AET84330
MNPNQRIITIGSISIAIGIISLMLQIGNIISIWASHSIQIGSQNNTGICNQRIITYENSTWVNHTYVNINNTNVVAGEDKTSVTLAGNSSLCSISGWAIYTKDNSIRIGSKGDVFVIREPFISCSHLECRTFFLTQGALLNDKHSNGTAKDRSPYRALMSCPLGEAPSPYNSKFESVAWSASACHDGMGWLTIGISGPDNGAVAVLKYNGIITGTIKSWKKQILRTQESECVCMNGSCFTIMTDGPSNKAASYKIFKIEKGKVTKSIELNAPNFYYEECSCYPDTGIVMCVCRDNWHGSNRPWVSFNQNLDYQIGYICSGVFGDNPRPKDGEGSCNPVTVDGANGVKGFSYKYGNGVWIGRTKSNRLRKGFEMIWDPNGWTNTDSDFSVKQDVVAITDWSGYSGSFVQHPELTGLDCIRPCFWVELVRGLPRENTTIWTSGSSISFCGVNSDTANWSWPDGAELPFTIDK

SEQ ID NO: 21219 - protein, 470 aa, Artificial Sequence
  derived and/or modified protein sequence (wt) from neuraminidase__InfluenzaA__AET84341
MNPNQRIITIGSISIAIGIISLMLQIGNIISIWASHSIQIGSQNNTGICNQRIITYENSTWVNHTYVNINNTNVVAGEDKTSVTLAGNSSLCSISGWAIYTKDNSIRIGSKGDVFVIREPFISCSHLECRTFFLTQGALLNDKHSNGTAKDRSPYRALMSCPLGEAPSPYNSKFESVAWSASACHDGMGWLTIGISGPDNGAVAVLKYNGIITGTIKSWKKQILRTQESECVCMNGSCFTIMTDGPSNKAASYKIFKIEKGKVTKSIELNAPNFYYEECSCYPDTGIVMCVCRDNWHGSNRPWVSFNQNLDYQIGYICSGVFGDNPRPKDGEGSCNPVTVDGANGVKGFSYKYGNGVWIGRTKSNRLRKGFEMIWDPNGWTNTDSDFSVKQDVVAITDWSGYSGSFVQHPELTGLDCIRPCFWVELVRGLPKENTTIWTSGSSISFCGVNSDTANWSWPDGAELPFTIDK

SEQ ID NO: 21220 - protein, 470 aa, Artificial Sequence
  derived and/or modified protein sequence (wt) from neuraminidase__InfluenzaA__AET84363
MNPNQRIITIGSISIAIGIISLMLQIGNIISIWASHSIQTGSQNNTGICNQRIITYENSTWVNHTYVNINNTNVVAGEDKTSMTLAGNSSLCSISGWAIYTKDNSIRIGSKGDVFVIREPFISCSHLECRTFFLTQGALLNDKHSNGTAKDRSPYRALMSCPLGEAPSPYNSKFESVAWSASACHDGMGWLTIGISGPDNGAVAVLKYNGIITGTIKSWKKQILRTQESECVCMNGSCFTIMTDGPSNKAASYKIFKIEKGKVTKSIELNAPNFYYEECSCYPDTGIVMCVCRDNWHGSNRPWVSFNQNLDYQIGYICSGVFGDNPRPKDGEGSCNPVTVDGANGVKGFSYKYGNGVWIGRTKSNRLRKGFEMIWDPNGWTNTDSDFSVKQDVVAITDWSGYSGSFVQHPELTGLDCIRPCFWVELVRGLPRENTTIWTSGSSISFCGVNSDTANWSWPDGAELPFTIDK

SEQ ID NO: 21221 - protein, 470 aa, Artificial Sequence
  derived and/or modified protein sequence (wt) from neuraminidase__InfluenzaA__AET84374
MNPNQRIITIGSISIAIGIISLMLQIGNIISIWASHSIQIGSQNNTGICNQRIITYENSTWVNHTYVNINNTNVVAGEDKTSVTLAGNSSLCSISGWAIYTKDNSIRIGSKGDVFVIREPFISCSHLECRTFFLTQGALLNDKHSNGTAKDRSPYRALMSCPLGEAPSPYNSKFESVAWSASACHDGMGWLTIGISGPDNGAVAVLKYNGIITETIKSWKKQILRTQESECVCMNGSCFTIMTDGPSNKAASYKIFKIEKGKVTKSIELNAPNFYYEECSCYPDTGIVMCVCRDNWHGSNRPWVSFNQNLDYQIGYICSGVFGDNPRPKDGEGSCNPVTVDGANGVKGFSYKYGNGVWIGRTKSNRLRKGFEMIWDPNGWTNTDSDFSVKQDVVAITDWSGYSGSFVQHPELTGLDCIRPCFWVELVRGLPRENTTIWTSGSSISFCGVNSDTANWSWPDGAELPFTIDK

SEQ ID NO: 21222 - protein, 470 aa, Artificial Sequence
  derived and/or modified protein sequence (wt) from neuraminidase__InfluenzaA__AET84396
MNPNQRIITIGSISIAIGIISLMLQIGNIISIWASHSIQTGSQNNTGICNQRIITYENSTWVNHTYVNINNTNVVAGEDKTSMTLAGNSSLCSISGWAIYTKDNSIRIGSKGDVFVIREPFISCSHLECRTFFLTQGALLNDKHSNGTAKDRSPYRALMSCPLGEAPSPYNSKFESVAWSASACHDGMGWLTIGISGPDNGAVAVLKYNGIITETIKSWKKQILRTQESECVCMNGSCFTIMTDGPSNKAASYKIFKIEKGKVTKSIELNAPNFYYEECSCYPDTGIVMCVCRDNWHGSNRPWVSFNQNLDYQIGYICSGVFGDNPRPKDGEGSCNPVTVDGANGVKGFSYKYGNGVWIGRTKSNRLRKGFEMIWDPNGWTNTDSDFSVKQDVVAITDWSGYSGSFVQHPELTGLDCIRPCFWVELVRGLPRENTTIWTSGSSISFCGVNSDTANWSWPDGAELPFTIDK

SEQ ID NO: 21223 - protein, 470 aa, Artificial Sequence
  derived and/or modified protein sequence (wt) from neuraminidase__InfluenzaA__AET84407
MNPNQRIITIGSISIAIGIISLMLQIGNIISIWASHSIQIGSQNNTGICNQRIITYENSTWVNHTYVNINNTNVVAGEDKTSVTLAGNSSLCSISGWAIYTKDNSIRIGSKGDVFVIREPFISCSHLECRTFFLTQGALLNDKHSNGTAKDRSPYRALMSCPLGEAPSPYNSKFESVAWSASACHDGMGWLTIGISGPDNGAVAVLKYNGIITGTIKSWKKQILRTQESECVCMNGSCFTIMTDGPSNKAASYKIFKIEKGKVTKSIELNAPNFYYEECSCYPDTGIVMCVCRDNWHGSNRPWVSFNQNLDYQIGYICSGVFGDNPRPEDGEGSCNPVTVDGANGVKGFSYKYGNGVWIGRTKSNRLRKGFEMIWDPNGWTNTDSDFSVKQDVVAITDWSGYSGSFVQHPELTGLDCIRPCFWVELVRGLPRENTTIWTSGSSISFCGVNSDTANWSWPDGAELPFTIDK

SEQ ID NO: 21224 - protein, 470 aa, Artificial Sequence
  derived and/or modified protein sequence (wt) from neuraminidase__InfluenzaA__AET84418
MNPNQRIIAIGSISIAIGIISLMLQIGNIISIWASHSIQIGSQNNTGICNQRIITYENSTWVNHTYVNINNTNVVAGEDKTSVTLAGNSSLCSISGWAIYTKDNSIRIGSKGDVFVIREPFISCSHLECRTFFLTQGALLNDKHSNGTAKDRSPYRALMSCPLGEAPSPYNSKFESVAWSASACHDGMGWLTIGISGPDNGAVAVLKYNGIITETIKSWKKQILRTQESECVCMNGSCFTIMTDGPSNKAASYKIFKIEKGKVTKSIELNAPNFYYEECSCYPDTGIVMCVCRDNWHGSNRPWVSFNQNLDYQIGYICSGVFGDNPRPEDGEGSCNPVTVDGANGVKGFSYKYGNGVWIGRTKSNRLRKGFEMIWDPNGWTNTDSDFSVKQDVVAITDWSGYSGSFVQHPELTGLDCIRPCFWVELVRGLPRENTTIWTSGSSISFCGVNSDTANWSWPDGAELPFTIDK

SEQ ID NO: 21225 - protein, 470 aa, Artificial Sequence
  derived and/or modified protein sequence (wt) from neuraminidase__InfluenzaA__AET84429
MNPNQKIITIGSISIAIGIISLMLQIGNIISIWASHSIQTGSQNNTGICNQRIITYENSTWVNHTYVSINNTNVVAGKDKTSVTLAGNSSLCSISGWAIYTKDNSIRIGSKGDVFVIREPFISCSHLECRTFFLTQGALLNDKHSNGTVKDRSPYRALMSCPLGEAPSPYNSKFESVAWSASACHDGMGWLTIGISGPDNGAVAVLKYNGIITGTIKSWKKQILRTQESECVCMNGSCFTIMTDGPSNKAASYKIFKIEKGKVTKSIELNAPNFYYEECSCYPDTGIVMCVCRDNWHGSNRPWVSFNQDLDYQIGYICSGVFGDNPRPKDGEGSCNPVTVDGANGVKGFSYKYGNGVWIGRTKSNRLRKGFEMIWDPNGWTNTDSDFSVKQDVVAITDWSGYSGSFVQHPELTGLDCIRPCFWVELVRGLPRENTTIWTSGSSISFCGVNSDTANWSWPDGAELPFTIDK

SEQ ID NO: 21226 - protein, 470 aa, Artificial Sequence
  derived and/or modified protein sequence (wt) from neuraminidase__InfluenzaA__AET84440
MNPNQKIITIGSISIAIGIISLMLQIGNIISIWASHSIQTGSQNNTGICNQRIITYENSTWVNHTYVNINNTNVVAGEDKTSVTLAGNSSLCSISGWAIYTKDNSIRIGSKGDVFVIREPFISCSHLECRTFFLTQGALLNDKHSNGTVKDRSPYRALMSCPLGEAPSPYNSKFESVAWSASACHDGMGWLTIGISGPDNGAVAVLKYNGIITETIKSWKKQILRTQESECVCMNGSCFTIMTDGPSNKAASYKIFKIEKGKVTKSIELNAPNFYYEECSCYPDTGIVMCVCRDNWHGSNRPWVSFNQNLDYQIGYICSGVFGDNPRPKDGEGSCNPVTVDGANGVKGFSYKYGNGVWIGRTKSNRLRKGFEMIWDPNGWTNTDSDFSVKQDVVAITDWSGYSGSFVQHPELTGLDCIRPCFWVELVRGLPRENTTIWTSGSSISFCGVNSDTANWSWPDGAELPFTIDK

SEQ ID NO: 21227 - protein, 470 aa, Artificial Sequence
  derived and/or modified protein sequence (wt) from neuraminidase__InfluenzaA__AET84451
MNPNQKIITIGSISIAIGIISLILQIGNIISIWASHSIQTGSQNHTGICNQRIITYENSTWVNNTYVNINNTNVVAEKDKTSVTLAGNSSLCSISGWAIYTKDNSIRIGSKGDVFVIREPFISCSHLECRTFFLTKGALLNDKHSNGTVTDRSPYRALMSCPLGEAPSPYNSRFESVAWSASACHDGMGWLTIGISGPDNGAVAVLKYNGIITETIKSWKKRILRTQESECVCMNGSCFTIMTDGPSNGAASYKIFKIEKGKVTKTIELNAPNFHYEECSCYPDTGTVMCVCRDNWHGSNRPWVSFNQNLDYQIGYICSGVFGDNPRPKDGEGSCNPVTVDGADGVKGFSYKYGNGVWIGRTKSNRLRKGFEMIWDPNGWTNTDSDFSVKQDVVAITDWSGYSGSFVQHPELTGLDCIRPCFWVELVRGLPRENTTIWTSGSSISFCGVNSGTANWSWPDGAELPFTIDK

SEQ ID NO: 21228 - protein, 469 aa, Artificial Sequence; identical to SEQ ID NO: 16738
  derived and/or modified protein sequence (wt) from neuraminidase__InfluenzaA__AEV53421

SEQ ID NO: 21229 - protein, 469 aa, Artificial Sequence; identical to SEQ ID NO: 16738
  derived and/or modified protein sequence (wt) from neuraminidase__InfluenzaA__AEV53423

SEQ ID NO: 21230 - protein, 469 aa, Artificial Sequence; identical to SEQ ID NO: 18200
  derived and/or modified protein sequence (wt) from neuraminidase__InfluenzaA__AEV53425

SEQ ID NO: 21231 - protein, 469 aa, Artificial Sequence; identical to SEQ ID NO: 16738
  derived and/or modified protein sequence (wt) from neuraminidase__InfluenzaA__AEV53427

SEQ ID NO: 21232 - protein, 469 aa, Artificial Sequence; identical to SEQ ID NO: 18200
  derived and/or modified protein sequence (wt) from neuraminidase__InfluenzaA__AEV53429

SEQ ID NO: 21233 - protein, 469 aa, Artificial Sequence
  derived and/or modified protein sequence (wt) from neuraminidase__InfluenzaA__AEV53431
MNPNQKIITIGSVCMTIGMANLILQIGNIISIWISHSIQLGNQNQIETCNQSVITYENNTWVNQTYVNISNTNFAAGQSVVPVKLAGNSSLCPVSGWAIYSKDNSIRIGSKGDVFVIREPFISCSPLECRTFFLTQGALLNDKHSNGTIKDRSPYRTLMSCPIGEVPSPYNSRFESVAWSASACHDGINWLTIGISGPDNGAVAVLKYNGIITDTIKSWRNNILRTQESECACVNGSCFTVMTDGPSDGQASYKIFRIEKGKIVKSVEMNAPNYHYEECSCYPDSSEITCVCRDNWHGSNRPWVSFNQNLEYQIGYICSGIFGDNPRPNDKTGSCGPVSSNGANGVKGFSFKYGNGVWIGRTKSISSRNGFEMIWDPNGWTGTDNNFSIKQDIVGINEWSGYSGSFVQHPELTGLDCIRPCFWVELIRGRPKENTIWTSGSSISFCGVNSGTVGWSWPDGAELPFTIDK

SEQ ID NO: 21234 - protein, 469 aa, Artificial Sequence; identical to SEQ ID NO: 16738
  derived and/or modified protein sequence (wt) from neuraminidase__InfluenzaA__AEV53435

SEQ ID NO: 21235 - protein, 469 aa, Artificial Sequence
  derived and/or modified protein sequence (wt) from neuraminidase__InfluenzaA__AEV53437
MNPNQKIITIGSVCMTIGMANLILQIGNIISIWISHSIQLGNQNQIETCNQSVITYENNTWVNQTYVNISNTNFAAGQSVVSVKLAGNSSLCPVSGWAIYSKDNSIRIGSKGDVFVIREPFISCSPLECRTFFLTQGALLNDKHSNGTIKDRSPYRTLMSCPIGEVPSPYNSRFESVAWSASACHDGINWLTIGISGPDNGAVAVLKYNGIITDTIKSWRNNTLRTQESECACVNGSCFTVMTDGPSDGQASYKIFRIEKGKIVKSVEMNAPNYHYEECSCYPDSSEITCVCRDNWHGSNRPWVSFNQNLEYQIGYICSGIFGDNPRPNDKTGSCGPVSSNGANGVKGFSFKYGNGVWIGRTKSISSRNGFEMIWDPNGWTGTDNNFSIKQDIVGINEWSGYSGSFVQHPELTGLDCIRPCFWVELIRGRPKENTIWTSGSSISFCGVNSDTVGWSWPDGAELPFTIDK

SEQ ID NO: 21236 - protein, 469 aa, Artificial Sequence; identical to SEQ ID NO: 16738
  derived and/or modified protein sequence (wt) from neuraminidase__InfluenzaA__AEV53439

SEQ ID NO: 21237 - protein, 469 aa, Artificial Sequence; identical to SEQ ID NO: 16738
  derived and/or modified protein sequence (wt) from neuraminidase__InfluenzaA__AEV53441

SEQ ID NO: 21238 - protein, 469 aa, Artificial Sequence; identical to SEQ ID NO: 16738
  derived and/or modified protein sequence (wt) from neuraminidase__InfluenzaA__AEV53443

SEQ ID NO: 21239 - protein, 469 aa, Artificial Sequence
  derived and/or modified protein sequence (wt) from neuraminidase__InfluenzaA__AEV53445
MNPNQKIITIGSVCMTIGMANLILQIGNIISIWISHSIQLGNQNQIETCNQSVITYENNTWVNQTYVNISNTNFAAGQSVVSVKLAGNSSLCPVSGWAIYSKDNSIRIGSKGDVFVIREPFISCSPLECRTFFLTQGALLNDKHSNGTIKDRSPYRTLMSCPIGEVPSPYNSRFESVAWSASACHDGINWLTIGISGPDNGAVAVLKYNGIITDTIKSWRNNILRTQESECACVNGSCFTVMTDGPSDGQASYKIFRIEKGKIVKSVEMNAPNYHYEECSCYPDSSEITCVCRDNWHGSNRPWVSFNQNLEYQIGYICSGIFGDNPRPNDKTGSCGPVSSNGANGVKGFSFKYGNGVWIGRTKSISSRNGFEMIWDPNGWTGTDHNFSIKQDIVGINEWSGYSGSFVQHPELTGLDCIRPCFWVELIRGRPKENTIWTSGSSISFCGVNSDTVGWSWPDGAELPFTIDK

SEQ ID NO: 21240 - protein, 469 aa, Artificial Sequence; identical to SEQ ID NO: 16738
  derived and/or modified protein sequence (wt) from neuraminidase__InfluenzaA__AEV53447

SEQ ID NO: 21241 - protein, 469 aa, Artificial Sequence; identical to SEQ ID NO: 18640
  derived and/or modified protein sequence (wt) from neuraminidase__InfluenzaA__AEV53449

SEQ ID NO: 21242 - protein, 469 aa, Artificial Sequence
  derived and/or modified protein sequence (wt) from neuraminidase__InfluenzaA__AEV53451
MNPNQKIITIGSVCMTIGMANLILQIGNIISIWISHSIQLGNQNQIETCNQSVITYENNTWVNQTYVNISNTNFAAGQSVVSVKLAGNSSLCPVSGWAIYSKDNSIRIGSKGDVFVIREPFISCSPLECRTFFLTQGALLNDKHSNGTIKDRSPYRTLMSCPIGEVPSPYNSRFESVAWSASACHDGINWLTIGISGPDNGAVAVLKYNGIITDTIKSWRNNILRTQESECACVNGSCFTVMTDGPSDGQASYKIFKIEKGKIVKSVEMNAPDYHYEECSCYPDSSEITCVCRDNWHGSNRPWVSFNQNLEYQIGYICSGIFGDNPRPNDKTGSCGPVSSNGANGVKGFSFKYGNGVWIGRTKSISSRNGFEMIWDPNGWTGTDNNFSIKQDIVGINEWSGYSGSFVQHPELTGLDCIRPCFWVELIRGRPKENTIWTSGSSISFCGVNSDTVGWSWPDGAELPFTIDK

SEQ ID NO: 21243 - protein, 469 aa, Artificial Sequence; identical to SEQ ID NO: 16738
  derived and/or modified protein sequence (wt) from neuraminidase__InfluenzaA__AEV53453

SEQ ID NO: 21244 - protein, 469 aa, Artificial Sequence
  derived and/or modified protein sequence (wt) from neuraminidase__InfluenzaA__AEV53455
MNPNQKIITIGSVCMTIGMANLILQIGNIISIWISHSIQLGNQNQIETCNQSVITYENNTWVNQTYVNISNTNFAAGQSVVSVKLAGNSSLCPVSGWAIYSKDNSIRIGSKGDVFVIREPFISCSPLECRTFFLTQGALLNDKHSNGTIKDRSPYRTLMSCPIGEVPSPYNSRFESVAWSASACHDGINWLTIGISGPDNGAVAVLKYNGIITDTIKSWRNNILRTQESECACVNGSCFTVMTDGPSDGQASYKIFRIEKGKIVKSVEMNAPNYHYEECSCYPDSSEITCVCRDNWHGSNRPWVSFNQNLEYQIGYICSGIFGDNPRPNDKTGSCGPVSSNGANGVKGFSFKYGNGVWIGRTKSISSRNGFEMIWDPNGWTETDNNFSIKQDIVGINEWSGYSGSFVQHPELTGLNCIRPCFWVELIRGRPKENTIWTSGSSISFCGVNSDTVGWSWPDGAELPFTIDK

SEQ ID NO: 21245 - protein, 469 aa, Artificial Sequence
  derived and/or modified protein sequence (wt) from neuraminidase__InfluenzaA__AEV53457
MNPNQKIITIGSVCMTIGMANLILQIGNIISIWISHSIQLGNQNQIETCNQSVITYENNTWVNQTYVNISNTNFAAGQSVVSVKLAGNSSLCPVSGWAIYSKDNSIRIGSKGDVFVIREPFISCSPLECRTFFLTQGALLNDKHSNGTIKDRSPYRTLMSCPIGEVPSPYNSRFESVAWSASACHDGINWLTIGISGPDNGAVAVLKYNGIITDTIKSWRNNILRTQESECACVNGSCFTVMTDGPSDGQASYKIFRVEKGKIVKSVEMNAPNYHYEECSCYPDSSEITCVCRDNWHGSNRPWVSFNQNLEYQIGYICSGIFGDNPRPNDKTGSCGPVSSNGANGVKGFSFKYGNGVWIGRTKSISSRNGFEMIWDPNGWTGTDNNFSIKQDIVGINEWSGYSGSFVQHPELTGLDCIRPCFWVELIRGRPKENTIWTSGSSISFCGVNSDTVGWSWPDGAELPFTIDK

SEQ ID NO: 21246 - protein, 469 aa, Artificial Sequence
  derived and/or modified protein sequence (wt) from neuraminidase__InfluenzaA__AEV53459
MNPNQKIITIGSVCMTIGMANLILQIGNIISIWISHSIQLGNQNQIETCNQSVITYENNTWVNQTYVNISNTNFAAGQSVVSVKLAGNSSLCPVSGWAIYSKDNSIRIGSKGDVFVIREPFISCSPLECRTFFLTQGALLNDKHSNGTIKDRSPYRTLMSCPIGEVPSPYNSRFESVAWSASACHDGINWLTIGISGPDNGAVAVLKYNGIITDTIKSWRNNILRTQESECACVNGSCFTVITDGPSDGQASYKIFRIEKGKIVKSVEMNAPNYHYEECSCYPDSSEITCVCRDNWHGSNRPWVSFNQNLEYQIGYICSGIFGDNPRPNDKTGSCGPVSSNGANGVKGFSFKYGNGVWIGRTKSISSRNGFEMIWDPNGWTETDNNFSIKQDIVGINEWSGYSGSFVQHPELTGLNCIRPCFWVELIRGRPKENTIWTSGSSISFCGVNSDTVGWSWPDGAELPFTIDK

SEQ ID NO: 21247 - protein, 469 aa, Artificial Sequence; identical to SEQ ID NO: 16738
  derived and/or modified protein sequence (wt) from neuraminidase__InfluenzaA__AEV53461

SEQ ID NO: 21248 - protein, 469 aa, Artificial Sequence
  derived and/or modified protein sequence (wt) from neuraminidase__InfluenzaA__AEV53463
MNPNQKIITIGSVCMTIGMANLILQIGNIISIWISHSIQLENQNQIETCNQSVITYENNTWVNQTYVNISNTNFAAGQSVVSVKLAGNSSLCPVSGWAIYSKDNSIRIGSKGDVFVIREPFISCSPLECRTFFLTQGALLNDKHSNGTIKDRSPYRTLMSCPIGEVPSPYNSRFESVAWSASACHDGINWLTIGISGPDNGAVAVLKYNGIITDTIKSWRNNILRTQESECACINGSCFTVMTDGPSDGQASYKIFRIEKGKIVKSVEMNAPNYHYEECSCYPDSSEITCVCRDNWHGSNRPWVSFNQNLEYQIGYICSGIFGDNPRPNDKTGSCGPVSSNGANGVKGFSFKYGNGVWIGRTKSISSRNGFEMIWDPNGWTGTDNNFSIKQDIVGINEWSGYSGSFVQHPELTGLDCIRPCFWVELIRGRPKENTIWTSGSSISFCGVNSDTVGWSWPDGAELPFTIDK

SEQ ID NO: 21249 - protein, 469 aa, Artificial Sequence
  derived and/or modified protein sequence (wt) from neuraminidase__InfluenzaA__AEV53465
MNPNQKIITIGSVCMTIGMANLILQIGNIISIWISHSIQLGNQNQIETCNQSVITYENNTWVNQTYVNISNTNFAAGQSVVSVKLAGNSSLCPVSGWAIYSKDNSIRIGSKGDVFVIREPFISCSPLECRTFFLTQGALLNDKHSNGTIKDRSPYRTLMSCPIGEVPSPYNSRFESVAWSASACHDGINWLTIGISGPDNGAVAVLKYNGIITDTIKSWRNNILRTQESECACVNGSCFTVMTDGPSDRQASYKIFRIEKGKIVKSVEMNAPNYHYEECSCYPDSSEITCVCRDNWHGSNRPWVSFNQNLEYQIGYICSGIFGDNPRPNDKTGSCGPVSSNGANGVKGFSYKYGNGVWIGRTKSISSRNGFEMIWDPNGWTGTDNNFSIKQDIVGINEWSGYSGSFVQHPELTGLDCIRPCFWVELIRGRPKENTIWTSGSSISFCGVNSDTVGWSWPDGAELPFTIDK

SEQ ID NO: 21250 - protein, 469 aa, Artificial Sequence; identical to SEQ ID NO: 18539
  derived and/or modified protein sequence (wt) from neuraminidase__InfluenzaA__AEV53467

SEQ ID NO: 21251 - protein, 469 aa, Artificial Sequence; identical to SEQ ID NO: 18539
  derived and/or modified protein sequence (wt) from neuraminidase__InfluenzaA__AEV53469

SEQ ID NO: 21252 - protein, 469 aa, Artificial Sequence; identical to SEQ ID NO: 16738
  derived and/or modified protein sequence (wt) from neuraminidase__InfluenzaA__AEV53471

SEQ ID NO: 21253 - protein, 469 aa, Artificial Sequence; identical to SEQ ID NO: 16738
  derived and/or modified protein sequence (wt) from neuraminidase__InfluenzaA__AEV53473

SEQ ID NO: 21254 - protein, 469 aa, Artificial Sequence; identical to SEQ ID NO: 16738
  derived and/or modified protein sequence (wt) from neuraminidase__InfluenzaA__AEV53475

SEQ ID NO: 21255 - protein, 469 aa, Artificial Sequence; identical to SEQ ID NO: 16738
  derived and/or modified protein sequence (wt) from neuraminidase__InfluenzaA__AEV53477

SEQ ID NO: 21256 - protein, 469 aa, Artificial Sequence; identical to SEQ ID NO: 16738
  derived and/or modified protein sequence (wt) from neuraminidase__InfluenzaA__AEV53479

SEQ ID NO: 21257 - protein, 469 aa, Artificial Sequence; identical to SEQ ID NO: 16738
  derived and/or modified protein sequence (wt) from neuraminidase__InfluenzaA__AEV53481

SEQ ID NO: 21258 - protein, 469 aa, Artificial Sequence; identical to SEQ ID NO: 16738
  derived and/or modified protein sequence (wt) from neuraminidase__InfluenzaA__AEV53483

SEQ ID NO: 21259 - protein, 469 aa, Artificial Sequence
  derived and/or modified protein sequence (wt) from neuraminidase__InfluenzaA__AEV53485
MNPNQKIITIGSVCMTIGMANLILQIGNIISIWVSHSIQLGNQNQIETCNQSVITYENNTWVNQTYVNISNTNFAAGQSVVSVKLAGNSSLCPVSGWAIYSKDNSIRIGSKGDVFVIREPFISCSPLECRTFFLTQGALLNDKHSNGTIKDRSPYRTLMSCPIGEVPSPYNSRFESVAWSASACHDGINWLTIGISGPDNGAVAVLKYNGIITDTIKSWRNNILRTQESECACVNGSCFTVMTDGPSDGQASYKIFRIEKGKIVKSVEMNAPNYHYEECSCYPDSSEITCVCRDNWHGSNRPWVSFNQNLEYQIGYICSGIFGDNPRPNDKTGSCGPVSSNGANGVKGFSFKYGNGVWIGRTKSISSRNGFEMIWDPNGWTGTDNNFSIKQDIVGINEWSGYSGSFVQHPELTGLDCIRPCFWVELIRGRPKENTIWTSGSSISFCGVNSDTVGWSWPDGAELPFTIDK

SEQ ID NO: 21260 - protein, 469 aa, Artificial Sequence; identical to SEQ ID NO: 18539
  derived and/or modified protein sequence (wt) from neuraminidase__InfluenzaA__AEV53487

SEQ ID NO: 21261 - protein, 469 aa, Artificial Sequence; identical to SEQ ID NO: 17756
  derived and/or modified protein sequence (wt) from neuraminidase__InfluenzaA__AEV53489

SEQ ID NO: 21262 - protein, 469 aa, Artificial Sequence
  derived and/or modified protein sequence (wt) from neuraminidase__InfluenzaA__AEV53491
MNPNQKIITIGLVCMTIGMANLILQIGNIISIWISHSIQLGNQNQIETCNQSVITYENNTWVNQTYVNISNTNFAAGQSVVSVKLAGNSSLCPVSGWAIYSKDNSIRIGSKGDVFVIREPFISCSPLECRTFFLTQGALLNDKHSNGTIKDRSPYRTLMSCPIGEVPSPYNSRFESVAWSASACHDGINWLTIGISGPDNGAVAVLKYNGIITDTIKSWRNNILRTQESECACVNGSCFTVMTDGPSDGQASYKIFRIEKGKIVKSVEMNAPNYHYEECSCYPDSSEITCVCRDNWHGSNRPWVSFNQNLEYQIGYICSGIFGDNPRPNDKTGSCGPVSSNGANGVKGFSFKYGNGVWIGRTKSISSRNGFEMIWDPNGWTGTDNNFSIKQDIVGINEWSGYSGSFVQHPELTGLDCIRPCFWVELIRGRPKENTIWTSGSSISFCGVNSDTVGWSWPDGAELPFTIDK

SEQ ID NO: 21263 - protein, 469 aa, Artificial Sequence; identical to SEQ ID NO: 16738
  derived and/or modified protein sequence (wt) from neuraminidase__InfluenzaA__AEV53493

SEQ ID NO: 21264 - protein, 469 aa, Artificial Sequence; identical to SEQ ID NO: 18200
  derived and/or modified protein sequence (wt) from neuraminidase__InfluenzaA__AEV53495

SEQ ID NO: 21265 - protein, 469 aa, Artificial Sequence
  derived and/or modified protein sequence (wt) from neuraminidase__InfluenzaA__AEV53497
MNPNQKIITIGSVCMTIGMANLILQIGNIISIWISHSIQLENQNQIETCNQSVITYENNTWVNQTYVNISNTNFAAGQSVVSVNLAGNSSLCPVSGWAIYSKDNSIRIGSKGDVFVIREPFISCSPLECRTFFLTQGALLNDKHSNGTIKDRSPYRTLMSCPIGEVPSPYNSRFESVAWSASACHDGINWLTIGISGPDNGAVAVLKYNGIITDTIKSWRNNILRTQESECACVNGSCFTVMTDGPSDGQASYKIFRIEKGKIVKSVEMNAPNYHYEECSCYPDSSEITCVCRDNWHGSNRPWVSFNQNLEYQIGYICSGIFGDNPRPNDKTGSCGPVSSNGANGVKGFSFKYGNGVWIGRTKSISSRNGFEMIWDPNGWTGTDNNFSIKQDIVGINEWSGYSGSFVQHPELTGLDCIRPCFWVELIRGRPKENTIWTSGSSISFCGVNSDTVGWSWPDGAELPFTIDK

SEQ ID NO: 21266 - protein, 469 aa, Artificial Sequence; identical to SEQ ID NO: 17756
  derived and/or modified protein sequence (wt) from neuraminidase__InfluenzaA__AEV53499

SEQ ID NO: 21267 - protein, 469 aa, Artificial Sequence; identical to SEQ ID NO: 16738
  derived and/or modified protein sequence (wt) from neuraminidase__InfluenzaA__AEV53501

SEQ ID NO: 21268 - protein, 469 aa, Artificial Sequence; identical to SEQ ID NO: 16738
  derived and/or modified protein sequence (wt) from neuraminidase__InfluenzaA__AEV53503

SEQ ID NO: 21269 - protein, 469 aa, Artificial Sequence; identical to SEQ ID NO: 16738
  derived and/or modified protein sequence (wt) from neuraminidase__InfluenzaA__AEV53505

SEQ ID NO: 21270 - protein, 469 aa, Artificial Sequence; identical to SEQ ID NO: 16738
  derived and/or modified protein sequence (wt) from neuraminidase__InfluenzaA__AEV53507

SEQ ID NO: 21271 - protein, 469 aa, Artificial Sequence; identical to SEQ ID NO: 16738
  derived and/or modified protein sequence (wt) from neuraminidase__InfluenzaA__AEV53509

SEQ ID NO: 21272 - protein, 469 aa, Artificial Sequence; identical to SEQ ID NO: 18200
  derived and/or modified protein sequence (wt) from neuraminidase__InfluenzaA__AEV53511

SEQ ID NO: 21273 - protein, 469 aa, Artificial Sequence; identical to SEQ ID NO: 18200
  derived and/or modified protein sequence (wt) from neuraminidase__InfluenzaA__AEV53513

SEQ ID NO: 21274 - protein, 469 aa, Artificial Sequence; identical to SEQ ID NO: 18200
  derived and/or modified protein sequence (wt) from neuraminidase__InfluenzaA__AEV53515

SEQ ID NO: 21275 - protein, 469 aa, Artificial Sequence
  derived and/or modified protein sequence (wt) from neuraminidase__InfluenzaA__AEV53517
MNPNQRIITIGSVCMTIGMANLILQIGNIISIWVSHSIQLGNQNQIETCNQSVITYENNTWVNQTYVNISNTNFAAGQSVVSVKLAGNSSLCPVSGWAIYSKDNSIRIGSKGDVFVIREPFISCSPLECRTFFLTQGALLNDKHSNGTIKDRSPYRTLMSCPIGEVPSPYNSRFESVAWSASACHDGINWLTIGISGPDNGAVAVLKYNGIITDTIKSWRNNILRTQESECACVNGSCFTVMTDGPSDGQASYKIFRIEKGKIVKSVEMNAPNYHYEECSCYPDSSEITCVCRDNWHGSNRPWVSFNQNLEYQIGYICSGIFGDNPRPNDKTGSCGPVSSNGANGVKGFSFKYGNGVWIGRTKSISSRNGFEMIWDPNGWTGTDNNFSIKQDIVGINEWSGYSGSFVQHPELTGLDCIRPCFWVELIRGRPKENTIWTSGSSISFCGVNSDTVGWSWPDGAELPFTIDK

SEQ ID NO: 21276 - protein, 469 aa, Artificial Sequence; identical to SEQ ID NO: 16738
  derived and/or modified protein sequence (wt) from neuraminidase__InfluenzaA__AEV53519

SEQ ID NO: 21277 - protein, 469 aa, Artificial Sequence; identical to SEQ ID NO: 18200
  derived and/or modified protein sequence (wt) from neuraminidase__InfluenzaA__AEV53521

SEQ ID NO: 21278 - protein, 469 aa, Artificial Sequence; identical to SEQ ID NO: 18026
  derived and/or modified protein sequence (wt) from neuraminidase__InfluenzaA__AEV53523

SEQ ID NO: 21279 - protein, 469 aa, Artificial Sequence; identical to SEQ ID NO: 17092
  derived and/or modified protein sequence (wt) from neuraminidase__InfluenzaA__AEV53525

SEQ ID NO: 21280 - protein, 469 aa, Artificial Sequence; identical to SEQ ID NO: 16738
  derived and/or modified protein sequence (wt) from neuraminidase__InfluenzaA__AEV53527

SEQ ID NO: 21281 - protein, 469 aa, Artificial Sequence
  derived and/or modified protein sequence (wt) from neuraminidase__InfluenzaA__AEV53529
MNPNQKIITIGSVCMTIGMANLILQIGNIISIWISHSIQLENQNQIETCNQSVITYENNTWVNQTYVNISNTNFAAGQSVVSVKLAGNSSLCPVSGWAIYSKDNSIRIGSKGDVFVIREPFISCSPLECRTFFLTQGALLNDKHSNGTIKDRSPYRTLMSCPIGEVPSPYNSRFESVAWSASACHDGINWLTIGISGPDNGAVAVLKYNGIITDTIKSWRNNILRTQESECACVNGSCFTVMTDGPSDGQASYKIFRIEKGKIVKSVEMNAPNYHYEECSCYPDSSEITCVCRDNWHGSNRPWVSFNQNLEYQIGYICSGIFGDNPRPNDKTGSCGPVSSNGANGVKGFSFKYGNGVWIGRTKSISSRNGFEMIWDPNGWTGTDNNFSIKQDIVGIKEWSGYSGSFVQHPELTGLDCIRPCFWVELIRGRPKENTIWTSGSSISFCGVNSDTVGWSWPDGAELPFTIDK

SEQ ID NO: 21282 - protein, 469 aa, Artificial Sequence; identical to SEQ ID NO: 18200
  derived and/or modified protein sequence (wt) from neuraminidase__InfluenzaA__AEV53531

SEQ ID NO: 21283 - protein, 469 aa, Artificial Sequence
  derived and/or modified protein sequence (wt) from neuraminidase__InfluenzaA__AEV53533
MNPNQKIITIGSVCMTIGMANLILQIGNIISIWISHSIQLGNQNQIETCNQSVITYENNTWVNQTYVNISNTNFAAGQSVVSVKLAGNSSLCPVSGWAIYSKDNSIRIGSKGDVFVIREPFISCSPLECRTFFLTQGALLNDKHSNGTIKDRSPYRTLMSCPIGEVPSPYNSRFESVAWSASACHDGINWLTIGISGPDNGAVAVLKYNGIITDTIKSWRNNILRTQESECACVNGSCFTVMTDGPSDGQASYKIFRIEKGKIVKSVEMNAPNYYYEECSCYPDSSEITCVCRDNWHGSNRPWVSFNQNLEYQIGYICSGIFGDNPRPNDKTGSCGPVSSNGANGVKGFSFKYGNGVWIGRTKSISSRNGFEMIWDPNGWTGTDNNFSIKQDIVGINEWSGYSGSFVQHPELTGLNCIRPCFWVELIRGRPKENTIWTSGSSISFCGVNSDTVGWSWPDGAELPFTIDK

SEQ ID NO: 21284 - protein, 469 aa, Artificial Sequence; identical to SEQ ID NO: 16738
  derived and/or modified protein sequence (wt) from neuraminidase__InfluenzaA__AEV53535

SEQ ID NO: 21285 - protein, 469 aa, Artificial Sequence; identical to SEQ ID NO: 21259
  derived and/or modified protein sequence (wt) from neuraminidase__InfluenzaA__AEV53537

SEQ ID NO: 21286 - protein, 469 aa, Artificial Sequence; identical to SEQ ID NO: 16738
  derived and/or modified protein sequence (wt) from neuraminidase__InfluenzaA__AEV53539

SEQ ID NO: 21287 - protein, 469 aa, Artificial Sequence; identical to SEQ ID NO: 20177
  derived and/or modified protein sequence (wt) from neuraminidase__InfluenzaA__AEV53541

SEQ ID NO: 21288 - protein, 469 aa, Artificial Sequence; identical to SEQ ID NO: 20177
  derived and/or modified protein sequence (wt) from neuraminidase__InfluenzaA__AEV53543

SEQ ID NO: 21289 - protein, 469 aa, Artificial Sequence; identical to SEQ ID NO: 18386
  derived and/or modified protein sequence (wt) from neuraminidase__InfluenzaA__AEV53545

SEQ ID NO: 21290 - protein, 469 aa, Artificial Sequence; identical to SEQ ID NO: 20177
  derived and/or modified protein sequence (wt) from neuraminidase__InfluenzaA__AEV53547

SEQ ID NO: 21291 - protein, 469 aa, Artificial Sequence; identical to SEQ ID NO: 20177
  derived and/or modified protein sequence (wt) from neuraminidase__InfluenzaA__AEV53549

SEQ ID NO: 21292 - protein, 469 aa, Artificial Sequence; identical to SEQ ID NO: 20177
  derived and/or modified protein sequence (wt) from neuraminidase__InfluenzaA__AEV53551

SEQ ID NO: 21293 - protein, 469 aa, Artificial Sequence; identical to SEQ ID NO: 20177
  derived and/or modified protein sequence (wt) from neuraminidase__InfluenzaA__AEV53553

SEQ ID NO: 21294 - protein, 469 aa, Artificial Sequence; identical to SEQ ID NO: 21259
  derived and/or modified protein sequence (wt) from neuraminidase__InfluenzaA__AEV53555

SEQ ID NO: 21295 - protein, 469 aa, Artificial Sequence; identical to SEQ ID NO: 17756
  derived and/or modified protein sequence (wt) from neuraminidase__InfluenzaA__AEV53557

SEQ ID NO: 21296 - protein, 469 aa, Artificial Sequence; identical to SEQ ID NO: 16738
  derived and/or modified protein sequence (wt) from neuraminidase__InfluenzaA__AEV53559

SEQ ID NO: 21297 - protein, 469 aa, Artificial Sequence; identical to SEQ ID NO: 16738
  derived and/or modified protein sequence (wt) from neuraminidase__InfluenzaA__AEV53561

SEQ ID NO: 21298 - protein, 469 aa, Artificial Sequence; identical to SEQ ID NO: 18330
  derived and/or modified protein sequence (wt) from neuraminidase__InfluenzaA__AEV53563

SEQ ID NO: 21299 - protein, 469 aa, Artificial Sequence
  derived and/or modified protein sequence (wt) from neuraminidase__InfluenzaA__AEV53565
MNPNQKIITIGSVCMTIGMANLILQIGNIISIWISHSIQLGNQNQIETCNQSVITYENNTWVNQTYVNISNTNFAAGQSVVSVKLAGNSSLCPVNGWAIYSKDNSIRIGSKGDVFVIREPFISCSPLECRTFFLTQGALLNDKHSNGTIKDRSPYRTLMSCPIGEVPSPYNSRFESVAWSASACHDGINWLTIGISGPDNGAVAVLKYNGIITDTIKSWRNNILRTQESECACVNGSCFTVMTDGPSDGQASYKIFRIEKGKIVKSVEMNAPNYHYEECSCYPDSSEITCVCRDNWHGSNRPWVSFNQNLEYQIGYICSGIFGDNPRPNDKTGSCGPVSSNGANGVKGFSFKYGNGVWIGRTKSISSRNGFEMIWDPNGWTGTDNNFSIKQDIVGINEWSGYSGSFVQHPELTGLDCIRPCFWVELIRGRPKENTIWTSGSSISFCGVNSDTVGWSWPDGAELPLTIDK

SEQ ID NO: 21300 - protein, 469 aa, Artificial Sequence
  derived and/or modified protein sequence (wt) from neuraminidase__InfluenzaA__AEV53567
MNPNQKIITIGSVCMTIGMANLILQIGNIISIWISHSIQLGNQNQIETCNQSVITYENNTWVNQTYVNISNTNFAAGQSVVSVKLAGNSSLCPVSGWAIYSKDNSIRIGSKGDVFVIREPFISCSPLECRTFFLTQGALLNDKHSNGTIKDRSPYRTLMSCPIGEVPSPYNSRFESVAWSASACHDGINWLTIGISGPDNGAVAVLKYNGIITDTIKSWRNNILRTQESECACVNGSCFTVMTDGPSDGQASYKIFRIEKGKIVKSVEMNAPNYHYEECSCYPDSSEITCVCRDNWHGSNRPWVSFNQNLEYQIGYICSGIFGDNPRPNDKTGSCGPVSSNGANGVKGFSFKYGNGAWIGRTKSISSRNGFEMIWDPNGWTETDNNFSIKQDIVGINEWSGYSGSFVQHPELTGLNCIRPCFWVELIRGRPKENTIWTSGSSISFCGVNSDTVGWSWPDGAELPFTIDK

SEQ ID NO: 21301 - protein, 469 aa, Artificial Sequence; identical to SEQ ID NO: 16738
  derived and/or modified protein sequence (wt) from neuraminidase__InfluenzaA__AEV53569

SEQ ID NO: 21302 - protein, 469 aa, Artificial Sequence; identical to SEQ ID NO: 20177
  derived and/or modified protein sequence (wt) from neuraminidase__InfluenzaA__AEV53571

SEQ ID NO: 21303 - protein, 469 aa, Artificial Sequence; identical to SEQ ID NO: 20177
  derived and/or modified protein sequence (wt) from neuraminidase__InfluenzaA__AEV53573

SEQ ID NO: 21304 - protein, 469 aa, Artificial Sequence; identical to SEQ ID NO: 18539
  derived and/or modified protein sequence (wt) from neuraminidase__InfluenzaA__AEV53575

SEQ ID NO: 21305 - protein, 469 aa, Artificial Sequence
  derived and/or modified protein sequence (wt) from neuraminidase__InfluenzaA__AEV53577
MNPNQKIITIGSVCMTIGMANLILQIGNIISIWISHSIQLGNQNQIETCNQSVITYENNTWVNQTYVNISNTNFAAGQSVVSVKLAGNSSLCPVSGWAIYSKDNSIRIGSKGDVFVIREPFISCSPLECRTFFLTQGALLNDKHSNGTIKDRSPYRTLMSCPIGEVPSPYNSRFESVAWSASACHDGINWLTIGISGPDNGAVAVLKYNGIITDTIKSWRNNILRTQESECACVNGSCFTVMTDGPSDGQASYKIFRIEKGKIVKSVEMNAPNYHYEECSCYPDSSEITCVCRDNWHGSNRPWVSFNQNLEYQIGYICSGIFGDNPRPNDKTGSCGPVSSNGANGVKGFSFKYGNGVWIGRTKSISSRNGFEMIWDPNGWTGTDNNFSIKQDIVGINEWSGYSGSFVQQPELTGLDCIRPCFWVELIRGRPKENTIWTSGSSISFCGVNSDTVGWSWPDGAELPFTIDK

SEQ ID NO: 21306 - protein, 469 aa, Artificial Sequence; identical to SEQ ID NO: 21244
  derived and/or modified protein sequence (wt) from neuraminidase__InfluenzaA__AEV53579

SEQ ID NO: 21307 - protein, 469 aa, Artificial Sequence; identical to SEQ ID NO: 18539
  derived and/or modified protein sequence (wt) from neuraminidase__InfluenzaA__AEV53581

SEQ ID NO: 21308 - protein, 469 aa, Artificial Sequence; identical to SEQ ID NO: 18200
  derived and/or modified protein sequence (wt) from neuraminidase__InfluenzaA__AEV53583

SEQ ID NO: 21309 - protein, 469 aa, Artificial Sequence; identical to SEQ ID NO: 18200
  derived and/or modified protein sequence (wt) from neuraminidase__InfluenzaA__AEV53585

SEQ ID NO: 21310 - protein, 469 aa, Artificial Sequence
  derived and/or modified protein sequence (wt) from neuraminidase__InfluenzaA__AEV76877
MNPNQKIITIGSVCMTIGMANLILQIGNIISIWISHSIQLGNQSQIETCNQSVITYENNTWVNQTYVNISTTNFAAGQSVVSVKLAGNSSLCPVSGWAIYSKDNSIRIGSKGDVFVIREPFISCSPLECRTFFLTQGALLNDKHSNGTIKDRSPYRTLMSCPIGEVPSPYNSRFESVAWSASACHDGINWLTIGISGPDNGAVAVLKYNGIITDTIKSWRNNILRTQESECACVNGSCFTIMTDGPSDGQASYKIFRIEKGKIVKSVEMNAPNYHYEECSCYPDSSEITCVCRDNWHGSNRPWVSFNQNLEYQIGYICSGIFGDNPRPNDKTGSCGPVSSNGANGVKGFSFKYGNGVWIGRTKSISSRKGFEMIWDPNGWTGTDNNFSIKQDIVGINEWSGYSGSFVQHPELTGLDCIRPCFWVELIRGRPKENTIWTSGSSISFCGVNSDTVGWSWPDGAELPFTIDK

SEQ ID NO: 21311 - protein, 469 aa, Artificial Sequence; identical to SEQ ID NO: 16738
  derived and/or modified protein sequence (wt) from neuraminidase__InfluenzaA__AEW10576

SEQ ID NO: 21312 - protein, 469 aa, Artificial Sequence; identical to SEQ ID NO: 16738
  derived and/or modified protein sequence (wt) from neuraminidase__InfluenzaA__AEW10586

SEQ ID NO: 21313 - protein, 469 aa, Artificial Sequence; identical to SEQ ID NO: 16738
  derived and/or modified protein sequence (wt) from neuraminidase__InfluenzaA__AEW10596

SEQ ID NO: 21314 - protein, 469 aa, Artificial Sequence; identical to SEQ ID NO: 16738
  derived and/or modified protein sequence (wt) from neuraminidase__InfluenzaA__AEW10606

SEQ ID NO: 21315 - protein, 469 aa, Artificial Sequence; identical to SEQ ID NO: 17625
  derived and/or modified protein sequence (wt) from neuraminidase__InfluenzaA__AEW10616

SEQ ID NO: 21316 - protein, 469 aa, Artificial Sequence
  derived and/or modified protein sequence (wt) from neuraminidase__InfluenzaA__AEW10626
MNPNQKIITIGSVCMTIGMANLILQIGNIISIWISHSIQLGNQNQIETCNQSVITYENNTWVNQTYVNISNTNFAAGQSVVSVKLAGNSSLCPVSGWAIYSKDNSIRIGSKGDVFVIREPFISCSPLECRTFFLTQGALLNDKHSNGTIKDRSPYRTLMSCPIGEVPSPYNSRFESVAWSASACHDGINWLTIGISGPDNGAMAVLKYNGIITDTIKSWRNNILRTQESECACVNGSCFTVMTDGPSDGQASYKIFRIEKGKIVKSVEMNAPNYHYEECSCYPDSSEITCVCRDNWHGSNRPWVSFNQNLEYQIGYICSGIFGDNPRPNDKTGSCGPVSSNGANGVKGFSFKYGNGVWIGRTKSISSRNGFEMIWDPNGWTGTDNNFSIKQDIVGINEWSGYSGSFVQHPELTGLDCIRPCFWVELIRGRPKENTIWTSGSSISFCGVNSDTVGWSWPDGAELPFTIDK

SEQ ID NO: 21317 - protein, 469 aa, Artificial Sequence; identical to SEQ ID NO: 16738
  derived and/or modified protein sequence (wt) from neuraminidase__InfluenzaA__AEW10636

SEQ ID NO: 21318 - protein, 469 aa, Artificial Sequence; identical to SEQ ID NO: 16728
  derived and/or modified protein sequence (wt) from neuraminidase__InfluenzaA__AEW10646

SEQ ID NO: 21319 - protein, 469 aa, Artificial Sequence; identical to SEQ ID NO: 16738
  derived and/or modified protein sequence (wt) from neuraminidase__InfluenzaA__AEW10656

SEQ ID NO: 21320 - protein, 469 aa, Artificial Sequence; identical to SEQ ID NO: 16738
  derived and/or modified protein sequence (wt) from neuraminidase__InfluenzaA__AEW10666

SEQ ID NO: 21321 - protein, 469 aa, Artificial Sequence; identical to SEQ ID NO: 16738
  derived and/or modified protein sequence (wt) from neuraminidase__InfluenzaA__AEW10676

SEQ ID NO: 21322 - protein, 469 aa, Artificial Sequence; identical to SEQ ID NO: 16738
  derived and/or modified protein sequence (wt) from neuraminidase__InfluenzaA__AEW10686

SEQ ID NO: 21323 - protein, 469 aa, Artificial Sequence; identical to SEQ ID NO: 16738
  derived and/or modified protein sequence (wt) from neuraminidase__InfluenzaA__AEW10696

SEQ ID NO: 21324 - protein, 469 aa, Artificial Sequence; identical to SEQ ID NO: 16738
  derived and/or modified protein sequence (wt) from neuraminidase__InfluenzaA__AEW10706

SEQ ID NO: 21325 - protein, 469 aa, Artificial Sequence; identical to SEQ ID NO: 16728
  derived and/or modified protein sequence (wt) from neuraminidase__InfluenzaA__AEW10716

SEQ ID NO: 21326 - protein, 469 aa, Artificial Sequence; identical to SEQ ID NO: 16738
  derived and/or modified protein sequence (wt) from neuraminidase__InfluenzaA__AEW10726

SEQ ID NO: 21327 - protein, 469 aa, Artificial Sequence; identical to SEQ ID NO: 16738
  derived and/or modified protein sequence (wt) from neuraminidase__InfluenzaA__AEW10736

SEQ ID NO: 21328 - protein, 469 aa, Artificial Sequence; identical to SEQ ID NO: 16728
  derived and/or modified protein sequence (wt) from neuraminidase__InfluenzaA__AEW10746

SEQ ID NO: 21329 - protein, 469 aa, Artificial Sequence; identical to SEQ ID NO: 16728
  derived and/or modified protein sequence (wt) from neuraminidase__InfluenzaA__AEW10756

SEQ ID NO: 21330 - protein, 469 aa, Artificial Sequence; identical to SEQ ID NO: 16728
  derived and/or modified protein sequence (wt) from neuraminidase__InfluenzaA__AEW10766

SEQ ID NO: 21331 - protein, 469 aa, Artificial Sequence; identical to SEQ ID NO: 16728
  derived and/or modified protein sequence (wt) from neuraminidase__InfluenzaA__AEW10776

SEQ ID NO: 21332 - protein, 469 aa, Artificial Sequence; identical to SEQ ID NO: 16728
  derived and/or modified protein sequence (wt) from neuraminidase__InfluenzaA__AEW10786

SEQ ID NO: 21333 - protein, 469 aa, Artificial Sequence; identical to SEQ ID NO: 16728
  derived and/or modified protein sequence (wt) from neuraminidase__InfluenzaA__AEW10796

SEQ ID NO: 21334 - protein, 469 aa, Artificial Sequence; identical to SEQ ID NO: 16728
  derived and/or modified protein sequence (wt) from neuraminidase__InfluenzaA__AEW10806

SEQ ID NO: 21335 - protein, 469 aa, Artificial Sequence; identical to SEQ ID NO: 16728
  derived and/or modified protein sequence (wt) from neuraminidase__InfluenzaA__AEW10816

SEQ ID NO: 21336 - protein, 469 aa, Artificial Sequence; identical to SEQ ID NO: 16738
  derived and/or modified protein sequence (wt) from neuraminidase__InfluenzaA__AEW10826

SEQ ID NO: 21337 - protein, 469 aa, Artificial Sequence; identical to SEQ ID NO: 16728
  derived and/or modified protein sequence (wt) from neuraminidase__InfluenzaA__AEW10836

SEQ ID NO: 21338 - protein, 469 aa, Artificial Sequence; identical to SEQ ID NO: 16728
  derived and/or modified protein sequence (wt) from neuraminidase__InfluenzaA__AEW10846

SEQ ID NO: 21339 - protein, 469 aa, Artificial Sequence; identical to SEQ ID NO: 16728
  derived and/or modified protein sequence (wt) from neuraminidase__InfluenzaA__AEW10856

SEQ ID NO: 21340 - protein, 469 aa, Artificial Sequence; identical to SEQ ID NO: 16728
  derived and/or modified protein sequence (wt) from neuraminidase__InfluenzaA__AEW10866

SEQ ID NO: 21341 - protein, 469 aa, Artificial Sequence; identical to SEQ ID NO: 16728
  derived and/or modified protein sequence (wt) from neuraminidase__InfluenzaA__AEW10876

SEQ ID NO: 21342 - protein, 469 aa, Artificial Sequence; identical to SEQ ID NO: 16728
  derived and/or modified protein sequence (wt) from neuraminidase__InfluenzaA__AEW10886

SEQ ID NO: 21343 - protein, 469 aa, Artificial Sequence; identical to SEQ ID NO: 16728
  derived and/or modified protein sequence (wt) from neuraminidase__InfluenzaA__AEW10896

SEQ ID NO: 21344 - protein, 469 aa, Artificial Sequence; identical to SEQ ID NO: 16728
  derived and/or modified protein sequence (wt) from neuraminidase__InfluenzaA__AEW10906

SEQ ID NO: 21345 - protein, 469 aa, Artificial Sequence; identical to SEQ ID NO: 16728
  derived and/or modified protein sequence (wt) from neuraminidase__InfluenzaA__AEW10916

SEQ ID NO: 21346 - protein, 469 aa, Artificial Sequence
  derived and/or modified protein sequence (wt) from neuraminidase__InfluenzaA__AEW10926
MNPNQKIITIGSVCMTIGMANLILQIGNIISIWISHSIQLGNQNQIETCNQSVITYENNTWVNQTYVNISNTNFAAGQSVVSVKLAGNSSLCPVSGWAIYSKDNSIRIGSKGDVFIIREPFISCSPLECRTFFLTQGALLNDKHSNGTIKDRSPYRTLMSCPIGEVPSPYNSRFESVAWSASACHDGINWLTIGISGPDNGAVAVLKYNGIITDTIKSWRNNILRTQESECACVNGSCFTVMTDGPSDGQASYKIFRIEKGKIVKSVEMNAPNYHYEECSCYPDSSEITCVCRDNWHGSNRPWVSFNQNLEYQIGYICSGIFGDNPRPNDKTGSCGPVSSNGANGVKGFSFKYGNGVWIGRTKSISSRNGFEMIWDPNGWTGTDNNFSIKQDIVGINEWSGYSGSFVQHPELTGLDCIRPCFWVELIRGRPKENTIWTSGSSISFCGVNSDTVGWSWPDGAELPFTIDK

SEQ ID NO: 21347 - protein, 469 aa, Artificial Sequence; identical to SEQ ID NO: 16728
  derived and/or modified protein sequence (wt) from neuraminidase__InfluenzaA__AEW10936

SEQ ID NO: 21348 - protein, 469 aa, Artificial Sequence; identical to SEQ ID NO: 16728
  derived and/or modified protein sequence (wt) from neuraminidase__InfluenzaA__AEW10946

SEQ ID NO: 21349 - protein, 469 aa, Artificial Sequence; identical to SEQ ID NO: 16738
  derived and/or modified protein sequence (wt) from neuraminidase__InfluenzaA__AEW10956

SEQ ID NO: 21350 - protein, 469 aa, Artificial Sequence; identical to SEQ ID NO: 16738
  derived and/or modified protein sequence (wt) from neuraminidase__InfluenzaA__AEW10966

SEQ ID NO: 21351 - protein, 469 aa, Artificial Sequence; identical to SEQ ID NO: 16728
  derived and/or modified protein sequence (wt) from neuraminidase__InfluenzaA__AEW10976

SEQ ID NO: 21352 - protein, 469 aa, Artificial Sequence; identical to SEQ ID NO: 16738
  derived and/or modified protein sequence (wt) from neuraminidase__InfluenzaA__AEW10986

SEQ ID NO: 21353 - protein, 469 aa, Artificial Sequence; identical to SEQ ID NO: 16738
  derived and/or modified protein sequence (wt) from neuraminidase__InfluenzaA__AEW10996

SEQ ID NO: 21354 - protein, 469 aa, Artificial Sequence; identical to SEQ ID NO: 16738
  derived and/or modified protein sequence (wt) from neuraminidase__InfluenzaA__AEW11006

SEQ ID NO: 21355 - protein, 469 aa, Artificial Sequence; identical to SEQ ID NO: 16738
  derived and/or modified protein sequence (wt) from neuraminidase__InfluenzaA__AEW11016

SEQ ID NO: 21356 - protein, 469 aa, Artificial Sequence; identical to SEQ ID NO: 16738
  derived and/or modified protein sequence (wt) from neuraminidase__InfluenzaA__AEW11026

SEQ ID NO: 21357 - protein, 469 aa, Artificial Sequence; identical to SEQ ID NO: 16738
  derived and/or modified protein sequence (wt) from neuraminidase__InfluenzaA__AEW11036

SEQ ID NO: 21358 - protein, 469 aa, Artificial Sequence; identical to SEQ ID NO: 16728
  derived and/or modified protein sequence (wt) from neuraminidase__InfluenzaA__AEW11046

SEQ ID NO: 21359 - protein, 469 aa, Artificial Sequence; identical to SEQ ID NO: 16738
  derived and/or modified protein sequence (wt) from neuraminidase__InfluenzaA__AEW11056

SEQ ID NO: 21360 - protein, 469 aa, Artificial Sequence; identical to SEQ ID NO: 17542
  derived and/or modified protein sequence (wt) from neuraminidase__InfluenzaA__AEW11066

SEQ ID NO: 21361 - protein, 469 aa, Artificial Sequence; identical to SEQ ID NO: 17542
  derived and/or modified protein sequence (wt) from neuraminidase__InfluenzaA__AEW11076

SEQ ID NO: 21362 - protein, 469 aa, Artificial Sequence; identical to SEQ ID NO: 17542
  derived and/or modified protein sequence (wt) from neuraminidase__InfluenzaA__AEW11086

SEQ ID NO: 21363 - protein, 469 aa, Artificial Sequence; identical to SEQ ID NO: 17542
  derived and/or modified protein sequence (wt) from neuraminidase__InfluenzaA__AEW11096

SEQ ID NO: 21364 - protein, 469 aa, Artificial Sequence; identical to SEQ ID NO: 17542
  derived and/or modified protein sequence (wt) from neuraminidase__InfluenzaA__AEW11106

SEQ ID NO: 21365 - protein, 469 aa, Artificial Sequence; identical to SEQ ID NO: 16738
  derived and/or modified protein sequence (wt) from neuraminidase__InfluenzaA__AEW11116

SEQ ID NO: 21366 - protein, 469 aa, Artificial Sequence; identical to SEQ ID NO: 17542
  derived and/or modified protein sequence (wt) from neuraminidase__InfluenzaA__AEW11126

SEQ ID NO: 21367 - protein, 469 aa, Artificial Sequence; identical to SEQ ID NO: 17446
  derived and/or modified protein sequence (wt) from neuraminidase__InfluenzaA__AEW11136

SEQ ID NO: 21368 - protein, 469 aa, Artificial Sequence; identical to SEQ ID NO: 16738
  derived and/or modified protein sequence (wt) from neuraminidase__InfluenzaA__AEW11146

SEQ ID NO: 21369 - protein, 469 aa, Artificial Sequence; identical to SEQ ID NO: 16738
  derived and/or modified protein sequence (wt) from neuraminidase__InfluenzaA__AEW11156

SEQ ID NO: 21370 - protein, 469 aa, Artificial Sequence; identical to SEQ ID NO: 17542
  derived and/or modified protein sequence (wt) from neuraminidase__InfluenzaA__AEW11166

SEQ ID NO: 21371 - protein, 469 aa, Artificial Sequence; identical to SEQ ID NO: 17542
  derived and/or modified protein sequence (wt) from neuraminidase__InfluenzaA__AEW11176

SEQ ID NO: 21372 - protein, 469 aa, Artificial Sequence; identical to SEQ ID NO: 16738
  derived and/or modified protein sequence (wt) from neuraminidase__InfluenzaA__AEW11186

SEQ ID NO: 21373 - protein, 469 aa, Artificial Sequence; identical to SEQ ID NO: 17542
  derived and/or modified protein sequence (wt) from neuraminidase__InfluenzaA__AEW11196

SEQ ID NO: 21374 - protein, 469 aa, Artificial Sequence; identical to SEQ ID NO: 16738
  derived and/or modified protein sequence (wt) from neuraminidase__InfluenzaA__AEW11206

SEQ ID NO: 21375 - protein, 469 aa, Artificial Sequence; identical to SEQ ID NO: 16738
  derived and/or modified protein sequence (wt) from neuraminidase__InfluenzaA__AEW11216

SEQ ID NO: 21376 - protein, 469 aa, Artificial Sequence; identical to SEQ ID NO: 17446
  derived and/or modified protein sequence (wt) from neuraminidase__InfluenzaA__AEW11226

SEQ ID NO: 21377 - protein, 469 aa, Artificial Sequence; identical to SEQ ID NO: 16738
  derived and/or modified protein sequence (wt) from neuraminidase__InfluenzaA__AEW11236

SEQ ID NO: 21378 - protein, 469 aa, Artificial Sequence; identical to SEQ ID NO: 16738
  derived and/or modified protein sequence (wt) from neuraminidase__InfluenzaA__AEW11246

SEQ ID NO: 21379 - protein, 469 aa, Artificial Sequence; identical to SEQ ID NO: 17542
  derived and/or modified protein sequence (wt) from neuraminidase__InfluenzaA__AEW11255

SEQ ID NO: 21380 - protein, 469 aa, Artificial Sequence; identical to SEQ ID NO: 17542
  derived and/or modified protein sequence (wt) from neuraminidase__InfluenzaA__AEW11265

SEQ ID NO: 21381 - protein, 469 aa, Artificial Sequence; identical to SEQ ID NO: 16738
  derived and/or modified protein sequence (wt) from neuraminidase__InfluenzaA__AEW11275

SEQ ID NO: 21382 - protein, 469 aa, Artificial Sequence
  derived and/or modified protein sequence (wt) from neuraminidase__InfluenzaA__AEW11285
MNPNQKIITIGSVCMTIGMANLILQIGNIISIWISHSIQLGNQNQIETCNQSVITYENNTWVNQTYVNISNTNFAAGQSVVSVKLAGNSSLCPVSGWAIYSKDNSVRIGSKGDVFVIREPFISCSPLECRTFFLTQGALLNDKHSNGTIKDRSPYRTLMSCPIGEVPSPYNSRFESVAWSASACHDGINWLTIGISGPDNGAVAVLKYNGIITDTIKSWRNNILRTQESECACVNGSCFTVMTDGPSNGQASYKIFRIEKGKIVKSVEMNAPNYHYEECSCYPDSSEITCVCRDNWHGSNRPWVSFNQNLEYQIGYICSGIFGDNPRPNDKTGSCGPVSSNGANGVKGFSFKYGNGVWIGRTKSISSRNGFEMIWDPNGWTGTDNNFSIKQDIVGINEWSGYSGSFVQNPELTGLDCIRPCFWVELIRGRPKENTIWTSGSSISFCGVNSDTVGWSWPDGAELPFTIDK

SEQ ID NO: 21383 - protein, 469 aa, Artificial Sequence; identical to SEQ ID NO: 17542
  derived and/or modified protein sequence (wt) from neuraminidase__InfluenzaA__AEW11295

SEQ ID NO: 21384 - protein, 469 aa, Artificial Sequence; identical to SEQ ID NO: 16738
  derived and/or modified protein sequence (wt) from neuraminidase__InfluenzaA__AEW11305

SEQ ID NO: 21385 - protein, 469 aa, Artificial Sequence; identical to SEQ ID NO: 17542
  derived and/or modified protein sequence (wt) from neuraminidase__InfluenzaA__AEW11315

SEQ ID NO: 21386 - protein, 469 aa, Artificial Sequence; identical to SEQ ID NO: 16738
  derived and/or modified protein sequence (wt) from neuraminidase__InfluenzaA__AEW11325

SEQ ID NO: 21387 - protein, 469 aa, Artificial Sequence; identical to SEQ ID NO: 16738
  derived and/or modified protein sequence (wt) from neuraminidase__InfluenzaA__AEW25299

SEQ ID NO: 21388 - protein, 469 aa, Artificial Sequence; identical to SEQ ID NO: 16738
  derived and/or modified protein sequence (wt) from neuraminidase__InfluenzaA__AEW25308

SEQ ID NO: 21389 - protein, 469 aa, Artificial Sequence; identical to SEQ ID NO: 17811
  derived and/or modified protein sequence (wt) from neuraminidase__InfluenzaA__AEW25317

SEQ ID NO: 21390 - protein, 469 aa, Artificial Sequence; identical to SEQ ID NO: 16738
  derived and/or modified protein sequence (wt) from neuraminidase__InfluenzaA__AEW25324

SEQ ID NO: 21391 - protein, 469 aa, Artificial Sequence
  derived and/or modified protein sequence (wt) from neuraminidase__InfluenzaA__AEW25327
MNPNQKIITIGSVCMTIGMANLILQIGNIISIWISHSIQLGNQNQIETCNQSVITYENNTWVNQTYVNISNTNFAAGQSVVSVKLAGNSSLCPVSGWAIYSKDNSIRIGSKGDVFVIREPFISCSPLECRTFFLTQGALLNDKHSNGTIKDRSPYRTLMSCPIGEVPPPYNSRFESVAWSASACHDGINWLTIGISGPDNGAVAVLKYNGIITDTIKSWRNNILRTQESECACVNGSCFTVMTDGPSDGQASYKIFRIEKGKIVKSVEMNAPNYHCEECSCYPDSSEITCVCRDNWHGSNRPWVSFNQNLEYQIGYICSGIFGDNPRPNDKTGSCGPVSSNGANGVKGFSFKYGNGVWIGRTKSISSRNGFEMIWDPNGWTGTDNNFSIKQDIVGINEWSGYSGSFVQHPELTGLDCIRPCFWVELIRGRPKENTIWTSGSSISFCGVNSDTVGWSWPDGAELPFTIDK

SEQ ID NO: 21392 - protein, 469 aa, Artificial Sequence
  derived and/or modified protein sequence (wt) from neuraminidase__InfluenzaA__AEW25333
MNPNQKIITIGSVCMTIGMANLILQIGNIISIWISHSIQLGNQNQIETCNQSVITYENNTWVNHTYVNISNTNFAAGQSVVSVKLAGNSSLCPVSGWAIYSKDNSIRIGSKGDVFVIREPFISCSPLECRTFFLTQGALLNDKHSNGTIKDRSPYRTLMSCPIGEVPSPYNSRFESVAWSASACHDGINWLTIGISGPDNGAVAVLKYNGIITDTIKSWRNNILRTQESECACVNGSCFTVMTDGPSDGQASYKIFRIEKGKIVKSVEMNAPNYHYEECSCYPDSSEITCVCRDNWHGSNRPWVSFNQNLEYQIGYICSGIFGDNPRPNDKTGSCGPVSSNGANGVKGFSFKYGNGVWVGRTKSISSRNGFEMIWDPNGWTGTDNNFSIKQDIVGINEWSGYSGSFVQHPELTGLDCIRHCFWVELIRGRPKENTIWTSGSSISFCGVNSDTVGWSWPDGAELPFTIDK

SEQ ID NO: 21393 - protein, 469 aa, Artificial Sequence
  derived and/or modified protein sequence (wt) from neuraminidase__InfluenzaA__AEW25338
MNPNQKIITIGSVCMAIGMANLILQIGNIISIWISHSIQLGNQNQIETCNQSVITYENNTWVNQTYVNISNTNFAAGQSVVSVKLAGNSSLCPVSGWAIYSKDNSIRIGSKGDVFVIREPFISCSPLECRTFFLTQGALLNDKHSNGTIKDRSPYRTLMSCPIGEVPSPYNSRFESVAWSASACHDGINWLTIGISGPDNGAVAVLKYNGIITDTIKSWRNNILRTQESECACVNGSCFTVMTDGPSDGQASYKIFRIEKGKIVKSVEMNAPNYHYEECSCYPDSSEITCVCRDNWHGSNRPWVSFNQNLEYQIGYIRSGIFGDNPRPNDKTGSCGPVSSNGANGVKGFSFKYGNGVWIGRTKSISSRNGFEMIWDPNGWTGTDNNFSIKQDIVGINEWSGYSGSFVQHPELTGLDCIRPCFWVELIRGRPKENTIWTSGSSISFCGVNSDTVGWSWPDGAELPFTIDK

SEQ ID NO: 21394 - protein, 469 aa, Artificial Sequence
  derived and/or modified protein sequence (wt) from neuraminidase__InfluenzaA__AEW25343
MNPNQKIITIGSVCMTIGMANLILQIGNIISIWISHSIQLGNQNQIETCNQSVITYENNTWVNQTYVNISNTNFAAGQSVVSVKLAGNSSLCPVSGWAIYSKDNSIRIGSKGDVFVIREPFISCSPLECRTFFLTQGALLNDKHSNGTIKDRSPYRTLMSCPIGEVPSPYNSRSESVAWSASACHDGINWLTIGISGPDNGAVAVLKYNGIITDTIKSWRNNILRTQESVCACVNGSCFTVMTDGPSDGQASYKIFRIEKGKIVKSVEMNAPNYHYEECSCYPDSSEITCVCRDNWHGSNRPWVSFNQNLEYQIGYICSGIFGDSPRPNDKTGSCGPVSSNGANGVKGFSFKYGNGVWIGRTKSISSRNGFEMIWDPNGWTGTDNNFSIKQDIVGINEWSGYSGSFVQHPELTGLDCIRPCFWVELIRGRPKENTIWTSGSSISFCGVNSDTVGWSWPDGAELPFTIDK

SEQ ID NO: 21395 - protein, 469 aa, Artificial Sequence
  derived and/or modified protein sequence (wt) from neuraminidase__InfluenzaA__AEW25351
MNPNQKIITIGSVCMTIGMANLILQIGNIISIWISHSIQLGNQNQIETCNQSVITYENNTWVNHTYVNISNTNFAAGQSVVSVKLAGNSSLCPVSGWAIYSKDNSIRIGSKGDVFVIREPFISCSPLECRTFFLTQGALLNDKHSNGTINDRSPYRTLMSCPIGEVPSPYNSRFESVAWSASACHDGINWLTIGISGPDNGAVAVLKYNGIITDTIKSWRNNILRTQESECACVNGSCFTVMTDGPSDGQASYKIFRIEKGKIVKSVEMNAPNYHYEECSCYPDSSEITCVCRDNWHGSNRPWVSFNQNLEYQIGYICSGTFGDNPRPNDKTGSCGPVSSNGANGVKGFSFKYGNGVWIGRTKSISSRNGFEMIWDPNGWTGTDNNFSIKQDIVGINEWSGYSGSFVQHPELTGLDCIRPCFWVELIRGRPKENTIWTSGSSISFCGVNSDTVGWSWPDGAELPFTIDK

SEQ ID NO: 21396 - protein, 469 aa, Artificial Sequence
  derived and/or modified protein sequence (wt) from neuraminidase__InfluenzaA__AEW25358
MNPNQKIITIGSVCMTIGMANLILQIGNIISIWVSHSIQLGNQNQIETCNQSVITYENNTWVNQTYVNISNTNFAAGQSVVSVKLAGNSSLCPVSGWAIYSKDNSIRIGSKGDVFVIREPFTSCSPLECRTFFLTQGALLNDKHSNGTIKDRSPYRTLMSCPIGEVPSPYNSRFESVAWSASACHDGINWLTIGISGPDNGAVAVLKYNGIITDTIKSWRNNILRTQESECACVNGSCFTVMTDGPSDGQASYKIFRIEKGKIVKSVEMNAPNYHYEECSCYPDSSEITCVCRDNWHGSNRPWVSFNQNLEYQIGYICSGIFGDNPRPNDKTGSCGPVSSNGANGVKGFSFKYGNGVWIGRTKSISSRNGFEMIWDPNGWTGTDNNFSIKQDIVGINEWSGYSGSFVQHPELTGLDCIRPCFWVELIRGRPKENTIWTSGSSISFCGVNSDTVGWSWPDGAELPFTIVK

SEQ ID NO: 21397 - protein, 469 aa, Artificial Sequence; identical to SEQ ID NO: 16738
  derived and/or modified protein sequence (wt) from neuraminidase__InfluenzaA__AEW25361

SEQ ID NO: 21398 - protein, 469 aa, Artificial Sequence
  derived and/or modified protein sequence (wt) from neuraminidase__InfluenzaA__AEW25379
MNPNQKIITIGSVCMTIGMANLILQIGNIISIWTSHSIQLGNQNQIETCNQSVITYENNTWVNQTYVNISNTNFAAGQSVVSVKLAGNSSLCPVSGWAIYSKDNSIRIGSKGDVFVIREPFISCSPLECRTFFLTQGALLNDKHSNGTIKDRSPYRTLMSCPIGEVPSPYNSRFESVAWSASACHDGINWLTIGISGPDNGAVAVLKYNGIITDTIKSWRNNILRTQESECACVNGSCFTVMTDGPSDGQASYKIFRIEKGKIVKSVEMNAPNYHYEECSCYPDSSEVTCVCRDNWHGSNRPWVSFNQNLEYQIGYICSGIFGDNPRPNDKTGSCGPVSSDGANGVKGFSFKYGNGVWIGRTKSISSRNGFEMIWDPNGWTGTDNNFSIKQDIVGINEWSGYSGSFVQHPELTGLDCIRPCFWVELIRGRPKENTIWTSGSSISFCGVNSDTVGWSWPDGAELPFTIDK

SEQ ID NO: 21399 - protein, 469 aa, Artificial Sequence
  derived and/or modified protein sequence (wt) from neuraminidase__InfluenzaA__AEW25387
MNPNQKIITIGSVCMTIGMANLILQIGNIISIWISHSIQLGNQNQIETCNQSVITYENNTWVNQTYVNISNTNFAAGQSVVSVKLAGNSSLCPVSGWAIYSKDNSIRIGSKGDVFVIREPFISCSPLECRTFFLTQGALLNDKHSNGTIKDRSPYRTLMSCPIGEVPSPYNSRFESVAWSASACHDGINWLTIGISGPDNGAVAVLKYNGIITDTIKSWRNNILRTQESECACVDGSCFTVMTDGPSDGQASYKIFRIEKGKIVKSVEMNAPNYHYEECSCYPDSSEITCVCRDNWHGSNRPWVSFNQNLEYQIGYICSGIFEDNPRPNDKTGSCGPVSSNGANGVKGFSFKYGNGVWIGRTKSISSRNGFEMIWDPNGWTGTDNNFSIKQDIVGINEWSGYSGSFVQHPELTGLDCIRPCFWVELIRGRPKENTIWTSGSSISFCGVNSDTVGWSWPDGAELPFTIDK

SEQ ID NO: 21400 - protein, 469 aa, Artificial Sequence
  derived and/or modified protein sequence (wt) from neuraminidase__InfluenzaA__AEW25392
MNPNQKIITIGSVCMTIGMANLILQIGNIISIWISHSIQLGNQNQIETCNQSVITYENNTWVNQTYVNISNTNFAAGQSVVSVKLAGNSSLCPVSGWAIYSKDNSIRIGSKGDVFVIREPFISCSPLECRTFFLTQGALLNDKHSNGTIKDRSPYRTLMSCPIGEVPSPYNSRFESVAWSASACHDGINWLTIGISGPDNGAVAVLKYNGIITDTIKSWRNNILRTQESECACVNGSCFTVMTDGPSDGQASYKIFRIEKGKIVKSVEMNAPNYHYEECSCYPDSSEITCVCRDNWHGSNRPWVSFNQNLEYQIGYICSGIFGDNPRPNDKTGSCGPVSSNGANGVKGFSFKYGNGVWIGRTKSISSRNGFEMIWDPNGWTGTDNNFSIKHDIVGINEWSGYSGSFVQHPELTGLDCIRPCFWVELIRGRPKENTIWTSGSSISFCGVNSDTVGWSWPDGAELPFTIDK

SEQ ID NO: 21401 - protein, 469 aa, Artificial Sequence
  derived and/or modified protein sequence (wt) from neuraminidase__InfluenzaA__AEW25397
MNPNQKIITIGSVCMTIGMANLILQIGNIISIWISHSIQLGNQNQIETCNQSVITYENNTWVNQTYVNISNTNFAAGQSVVSVKLAGNSSLCPVSGWAIYSKDNSIRIGSKGDVFVIREPFISCSPLECRTFFLTQGALLNDKHSNGTIKDRSPYRTLMSCPIGEVPSPYNSRFEPVAWSASACHDGINWLTIGISGPDNGAVAVLKYNGIITDTIKSWRNNILRTQESECACVNGSCFTVMTDGPSDGQASYKIFRIEKGKIVKSVEMNAPNYHYEECSCYPDSSEITCVCRDNWHGSNRPWVSFNQNLEYQIGYICSGIFGDSPRPNDKTGSCGPVSSNGANGVKGFSFKYGNGVWIGRTKSISSRNGFEMIWDPNGWTGTDNNFSIKQDIVGINEWSGYSGSFVQHPELTGLDCIRPCFWVELIRGRPKENTIWTSGSSISFCGVNSDNVGWSWPDGAELPFTIDK

SEQ ID NO: 21402 - protein, 469 aa, Artificial Sequence; identical to SEQ ID NO: 16738
  derived and/or modified protein sequence (wt) from neuraminidase__InfluenzaA__AEW25402

SEQ ID NO: 21403 - protein, 469 aa, Artificial Sequence; identical to SEQ ID NO: 16738
  derived and/or modified protein sequence (wt) from neuraminidase__InfluenzaA__AEW25407

SEQ ID NO: 21404 - protein, 469 aa, Artificial Sequence
  derived and/or modified protein sequence (wt) from neuraminidase__InfluenzaA__AEW25418
MNPNQKIITIGSVCMTIGMANLILQIGNIISIWISHSIQLGNQNQIETCNQSVITYENNTWVNHTYVNISNTNFAAGQSVVSVKLAGNSSLCPVSGWAIYSKDNSIRIGSKGDVFVIREPFISCSPLECRTFFLTQGALLNDKHSNGTIKDRSPYRTLMSCPIGEVPSPYNSRFESVAWSASACHDGINWLTIGISGPDNGAVAVLKYNGIITDTIKSWRNNILRTQESECACVNGSCFTVMTDGPSDGQASYKIFRIGKGKIVKSVEMNAPNYHYEECSCYPDSSEITCVCRDNWHGSNRPWVSFNQNLEYQIGYICSGIFGDNPRPNDKTGSCGPVSSNGENGVKGFSFKYGNGVWIGRTKSISSRNGFEMIWDPNGWTGTDNNFSIKQDIVGINEWSGYSGSFVQHPELTGLDCIRPCFWVELIRGRPKENTIWTSGSSISFCGVNSDTVGWFWPDGAELPFTIDK

SEQ ID NO: 21405 - protein, 469 aa, Artificial Sequence
  derived and/or modified protein sequence (wt) from neuraminidase__InfluenzaA__AEW25423
MNPNQKIITIGSVCMTIGMANLILQIGNIISIWISNSIQLGNQNQIETCNQSVITYENNTWVNQTYVNISNTNFAAGQSVVSVKLAGNSSLCPVSGWAIYSKDNSIRIGSKGDVFVIREPFISCSPLECRTFFLTQGALLNDKHSNGTIKDRSPYRTLMSCPIGEVPSPYNSRFESVAWSASACHDGINWLTIGISGPDNGAVAVLKYNGIITDTIKSWRNNILRTQESECACVNGSCFTVMTDGPSDGQASYKIFRIEKGKIVKSVEMNAPNYHYEECSCYPDSSEITCVCRDNWHGSNRPWVSFNQNLEYQIGYICSGIFGDNPRPNDKTGSCGPVSSNGANGVKGFSFKYGNGVWIGRTKSISSRNGFEMIWDPNGWTGTDNNFSIKQDIVGINEWSGYSGSFVQHPELTGLDCIRPCFWVELIRGRPKENTIWTSGSSISFCGVNSDTVGWSWPDGAELPFTIDK

SEQ ID NO: 21406 - protein, 469 aa, Artificial Sequence; identical to SEQ ID NO: 16738
  derived and/or modified protein sequence (wt) from neuraminidase__InfluenzaA__AEW25426

SEQ ID NO: 21407 - protein, 469 aa, Artificial Sequence
  derived and/or modified protein sequence (wt) from neuraminidase__InfluenzaA__AEW25432
MNPNQKIITIGSVCMTIGMANLILQIGNIISIWTSHSIQLGNQNQIETCNQSVITYENNTWVNQTYVNISNTNFAAGQSVVSVKLAGNSSLCPVSGWAIYSKDNSIRIGSKGDVFVIREPFISCSPLECRTFFLTQGALLNDKHSNGTIKDRSPYRTLMSCPIGEVPSPYNSRFESVAWSASACHDGINWLTIGISGPDNGAVAVLKYNGIITDTIKSWRNNILRTQESECACVNGSCFTVMTDGPSDGQASYKIFRIEKGKIVKSVEMNAPNYHYEECSCYPDSSEITCVCRDNWHGSNRPWVSFNQNLEYQIGYICSGIFGDNPRPNDKTGSCGPVSSNGANGVKGFSFKYGNGVWIGRTKSISSRNGFEMIWDPNGWTGTDNNSSIKQDIVGINEWSGYSGSFVQHPELTGLDCIRPCFWVELIRGRPKENTIWTSGSSISFCGINSDAVGWSWPDGAELPFTIDK

SEQ ID NO: 21408 - protein, 469 aa, Artificial Sequence
  derived and/or modified protein sequence (wt) from neuraminidase__InfluenzaA__AEW25436
MNPNQKIITIGSVCMTIGMANLILQIGNIISIWISHSIQLGNQNQIETCNQSIITYENNTWVNQTYVNISNTNFAAGQSVVSVKLAGNSSLCPVSGWAIYSKDNSIRIGSKGDVFVIREPFISCSPLECRTFFLTQGALLNDKHSNGTIKDRSPYRTLMSCPIGEVPSPYNSRFESVAWSASACHDGINWLTIGISGPDNGAVAVLKYNGIITDTIKSWRNNILRTQESECACVNGSCFTVMTDGPSDGQASYKIFRIEKGKIVKSVEMNAPNYHYEECSCYPDSSEITCVCRDNWHGSNRPWVSFNQNLEYRIGYICSGIFGDNPRPNDKTGSCGPVSSNGANGVKGFSFKYGNGVWIGRTKSISSRNGFEMIWDPNGWTGTDNNFSIKQDIVGTNEWSGYSGSFVQHPELTGLDCIRPCFWVELIRGRPKENTIWTSGSSISFCGVNSDTMGWSWPDGAELPFTIDK

SEQ ID NO: 21409 - protein, 469 aa, Artificial Sequence; identical to SEQ ID NO: 16738
  derived and/or modified protein sequence (wt) from neuraminidase__InfluenzaA__AEW25440

SEQ ID NO: 21410 - protein, 469 aa, Artificial Sequence
  derived and/or modified protein sequence (wt) from neuraminidase__InfluenzaA__AEW25448
MNPNQKIITIGSVCMTIGMANLILQIGNIISIWISHSIQLGNQNQIETCNQSVITYENNTWVNQTYVNISNTNFAAGQSVVSVKLAGNSSLCPVSGWAIYSKDNSIRIGSKGDVFVIREPFISCSPLECRTFFLTQGALLNDKHSNGTIKDRSPYRTLMSCPIGEVPSPYNSRFESVAWSASACHDGINWLTIGISGPDNGAVAVLKYNGIITDTIKSWRNNILRTQESECACVNGSCFTVMTDGPSDGQASYKIFRIEKGKIVKSVEMNAPNYHYEECSCYPDSSEITCVCRDNWHGSNRPWVSFNQNLEYQIGYICSGIFGDNPRPNDKTGSCGPVSSNGANGVKGFSFKYGNGVWIGRTKSISSRNGFEMIWDPNGWTGTDNNFSIKQDIVGINEWSGYSGSFVQHPELTGLDCIRPCFWVELIRGRPKENTIWTSGSSISFCGVNSDTVGWSWPDGAELPFTTDK

SEQ ID NO: 21411 - protein, 469 aa, Artificial Sequence; identical to SEQ ID NO: 16738
  derived and/or modified protein sequence (wt) from neuraminidase__InfluenzaA__AEW25456

SEQ ID NO: 21412 - protein, 469 aa, Artificial Sequence
  derived and/or modified protein sequence (wt) from neuraminidase__InfluenzaA__AEW25464
MNPNQKIITIGSVCMTIGMANLILQIGNIISIWISHSIQLGNQNQIETCNQSVITYENNTWVNQTYVNISNTNFAAGQSVVSVKLAGNSSLCPVSGWAIYSKDNSIRIGSKGDVFVIREPFISCSPLECRTFFLTQGALLNDKHSNGTIKDRSPYRTLMSCPIGEVPSPYNSRFESVAWSASACHDGINWLTIGISGPDNGAVAVLKYNGIITDTIKSWRNNILRTQESECACVNGSCFTVMTDGPSDGQASYKIFRIEKGKIVKSVELNAPNYHYEECSCYPDSSEITCVCRDNWHGSNRPWVSFNQNLEYQIGYICSGIFGDNPRPNDKTGSCGPVSSNGANGVKGFSFKYGNGVWIGRTKSISSRNGFEMIWDPNGWTGTDNNFSIKQDIVGINEWSGYSGSFVQHPELTGLDCIRPCFWVELIRGRPKENTIWTSGSSISFCGVNSDTVGWSWPDGAELPFTIDK

SEQ ID NO: 21413 - protein, 469 aa, Artificial Sequence
  derived and/or modified protein sequence (wt) from neuraminidase__InfluenzaA__AEW25474
MNPNQKIITIGSVCMTIGMANLILQIGNIISIWISHSIQLGNQNQIETCNQSVITYENNTWVNQTYVNISNTNFAAGQSVVSVKLAGNSSLCPVSGWAIYSKDNSIRIGSKGDVFVIREPFISCSPLECRTFFLTQGALLNDKHSNGTIKDRSPYRTLMSCPIGEVPSPYNSRFESVAWSASACHDGINWLTIGISGPDNGAVAVLKYNGIITDTIKSWRNNILRTQESECACVNGSCFTVMTDGPSDGQASYKIFRIEKGKIVKSVEMNAPNYHYEECSCYPDSSEITCVCRDNWHGSNRPWVSFNQNLEYQIGYICSGIFGDNPRPNDKTGSCGPVSSNGANGVKGFSFKYGNGVWIGRTKSISSRNGFEMIWDPNGWTGTDNNFSIKQDIVGINEWSGYSGSFVQHPELTGLDCIRPCFWVELIRGRPKENTIWTSGSSISFCGVNSDTVGWSWPDGAELPSTIDK

SEQ ID NO: 21414 - protein, 469 aa, Artificial Sequence
  derived and/or modified protein sequence (wt) from neuraminidase__InfluenzaA__AEW25484
MNPNQKIITIGSVCMTIGMANLILQIGNIISIWISHSIQLGNQNQIETCNQSVITYENNTWINQTYVNISNTNFAAGQSVVSVKLAGNSSLCPVSGWAIYSKDNSIRIGSKGDVFVIREPFISCSHLECRTFFLTQGALLNDKHSNGTIKDRSPYRTLMSCPIGEVPSPYNSRFESVAWSASACHDGINWLTIGISGPDHGAVAVLKYNGIITDTIKSWRNNILRTQESECACVNGSCFTVMTDGPSDGQASYKIFRIEKGKIVKSVEMNAPNYHYEECSCYPDSSEITCVCRDNWHGSNRPWVSFNQNLEYQIGYICSGIFGDNPRPNDKTGSCGPVSSNGANGVKGFSFKYGNGVWIGRTKSISSRNGFEMIWDPNGWTGTDNNFSIKQDIVGINEWSGYSGSFVQHPELTGLDCIRPCFWVELIRGRPKENTIWTSGSSISFCGVNSDTVGWSWPDGAELPFTIDK

SEQ ID NO: 21415 - protein, 469 aa, Artificial Sequence
  derived and/or modified protein sequence (wt) from neuraminidase__InfluenzaA__AEW25494
MNPNQKIITIGSVCMTIGMANLILQIGNIISIWISHSIQLGNQNQIETCNQSVITYENNTWVNQTYVNISNTNFAAGQSVVSVKLAGNSSLCPVSGWAIYSKDNSIRIGSKGDVFVIREPFISCSPLECRTFFLTQGALLNDKHSNGTIKDRSPYRTLMSCPIGEVPSPYNSRFESVAWSASACHDGINWLTIGISGPDNGAVAVLKYNGIITDSIKSWRNNILRTQESECACVNGSCFTVMTDGPSDGQASYKIFRIEKGKIVKSVEMNAPNYHYEECSCYPDSSEITCVCRDNWHGSNRPWVSFNQNLEYQIGYICSGTFGDNPRPNDKTGSCGPVSSNGANGVKGFSFKYGNGVWIGRTKSISSRNGFEMIWDPNGWTGTDNNFSIKQDIVGINEWSGYSGSFVQHPELTGLDCIRPCFWVELIRGRPKENTIWTSGSSISFCGVNSDTVGWSWPDGAELPFTIDK

SEQ ID NO: 21416 - protein, 469 aa, Artificial Sequence
  derived and/or modified protein sequence (wt) from neuraminidase__InfluenzaA__AEW25503
MNPNQKIITIGSVCMTIGMANLILQIGNIISIWISHSIQLGNQNQIETCNQSVITYENNTWVNQTYVNISNTNFAAGQSVVSVKLAGNSSLCPVSGWAIYSKDNSIRIGSKGDVFVIREPFISCSPLECRTFFLTQGALLNDKHSNGTIKDRSPYRTLMSCPIGEVPSPYNSRFESVAWSASACHDGINWLTIGISGPDNGAVAVLKYNGIITDTIKSWRNNILRTQESECACVNGSCFTVMTDGPSDGQASYKIFRIEKGKIVKSVEMNAPNYHYEECSCYPDSSEITCVCRDNWHGSNRPWVSFNQNLEYQIGYICSGIFGDNPRPNDKTGSCGPVSSNGANGVKGFSFKYGNGAWIGRTKSISSRNGFEMIWDPNGWTGTDNNFSIKQDIVGINEWSGYSGSFVQHPELTGLDCIRPCFWVELIRGRPKENTIWTSGSSISFCGVNSDTVGWSWPDGAELPFTIDK

SEQ ID NO: 21417 - protein, 469 aa, Artificial Sequence
  derived and/or modified protein sequence (wt) from neuraminidase__InfluenzaA__AEW25511
MNPNQKIITIGSVCMTIGMANLILQIGNIISIWISHSIQLGNQNQIETCNQSVITYENNTWVNHTYVNISNTNFAAGQSVVSVKLAGNSSLCPVSGWAIYSKDNSIRIGSKGVVFVIREPFISCSPLECRTFFLTQGALLNDKHSNGTIKDRSPYRTLMSCPIGEVPSPYNSRFESVAWSASACHDGINWLTIGISGPDNGAVAVLKYNGIITDTIKSWRNNILRTQESECACVNGSCFTVMTDGPSDGQASYKIFRIEKGKIVKSVEMNAPNYHYEECSCYPDSSEITCVCRDNWHGSNRPWVSFNQNLEYQIGYICSGIFGDNPRPNDKTGSCGPVSSNGANGVKGFSFKYGNGVWIGRTKSISSRNGFEMIWDPNGWTGTDNNFSIKQDIVGINEWSGYSGSFVQHPELTGLDCIRPCFWVELIRGRPKENTIWTSGSSISFCGVNSDTVGWSWPDGAELPFTIDK

SEQ ID NO: 21418 - protein, 469 aa, Artificial Sequence
  derived and/or modified protein sequence (wt) from neuraminidase__InfluenzaA__AEW25530
MNPNQKIITIGSVCMTIGMANLILQIGNIISIWISHSIQLGNQNQIETCNQSVITYENNTWVNHTYVNISNTNFAAGQSVVSVKLAGNSSLCPVSGWAIYSKDNSIRIGSKGDVFVIREPFISCSPLECRTFFLTQGALLNDKHSNGTIKDRSPYRTLMSCPIGEVPSPYNSRFESVAWSASACHDGINWLTIGISGPDNGAVAVLKYNGIITDTIKSWRYNILRTQESECACVNGSCFTVMTDGPSDGQASYKIFRIEKGKIVKSVEMNAPNYHYEECSCYPDSSEITCVCRDNWHGSNRPWVSFNQNLEYQIGYICSGIFGDNPRPNDKTGSCGPVSSNGENGVKGFSFKYGNGVWIGRTKSISSRNGFEMIWDPNGWTGTDNNFSIKQDIVGINEWSGYSGSFVQHPELTGLDCIRPCFWVELIRGRPKENTIWTSGSSISFCGVNSDTVGWSWPDGAELPFTIDK

SEQ ID NO: 21419 - protein, 469 aa, Artificial Sequence
  derived and/or modified protein sequence (wt) from neuraminidase__InfluenzaA__AEW25537
MNPNQKIITIGSVCMTIGMANLILQIGNIISIWISHSIQLGNQNQIETCNQSVITYENNTWVNQTYVNISNTNFAAGQSVVSVKLAGNSSLCPVSGWAIYSKDNSIRIGSKGDVFVIREPFISCSPLECRTFFLTQGALLNDKHSNGTIKDRSPYRTLMSCPIGEVPSPYNSRFESVAWSASACHDGINWLTIGISGPDNGAVAVLKYNGIITDTIKSWRNNILRTQESECACVNGSCFTVMTDGPSDGQASYKIFRIEKGKIVKSVEMNAPNHHYEECSCYPDSSEITCVCRDNWHGSNRPWVSFNQNLEYQIGYICSGIFGDNPRPNDKTGSCGPVSSNGANGVKGFSFKYGNGVWIGRTKSISSRNGFEMIWDPNGWTGTDNNFSIKQDIVGINEWSGYSGSFVQHPELTGLDCIRPCFWVELIRGRPKENTIWTSGSSISFCGVNSDTVGWSWPDGAELPFTIDK

SEQ ID NO: 21420 - protein, 469 aa, Artificial Sequence; identical to SEQ ID NO: 16738
  derived and/or modified protein sequence (wt) from neuraminidase__InfluenzaA__AEW25547

SEQ ID NO: 21421 - protein, 469 aa, Artificial Sequence; identical to SEQ ID NO: 16738
  derived and/or modified protein sequence (wt) from neuraminidase__InfluenzaA__AEW25556

SEQ ID NO: 21422 - protein, 469 aa, Artificial Sequence; identical to SEQ ID NO: 16738
  derived and/or modified protein sequence (wt) from neuraminidase__InfluenzaA__AEW25566

SEQ ID NO: 21423 - protein, 469 aa, Artificial Sequence
  derived and/or modified protein sequence (wt) from neuraminidase__InfluenzaA__AEW25584
MNPNQKIITIGSVCMTIGMANLILQIGNIISIWISHSIQLGNQNQIETCNQSVITYENNTWVNQTYVNISNTNFAAGQSVVSVKLAGNSSLCPVSGWAIYSKDNSIRIGSKGDVFVIREPFISCSPLECRTFFLTQGALLNDKHSNGTIKDRSPYRTLMSCPIGEVPSPYNSRFESVAWSASACHDGINWLTIGISGPDNGAVAVLKYNGIITDTIKSWRNNILRTQESECACVNGSCFTVMTDGPSDGQASYKIFRIEKGKIVKSVEMNAPNYHYEECSCYPDSSEITCVCRDNWHGSNRPWVSFNQNLEYQIGYICSGIFGDNPRPNDKTGSCGPVSSNGANGVKGFSFKYGNGVWIGRTKSISSRNGFEMIWDPNGWTGTDNNFSIKQGIVGINEWSGYGGSFVQHPELTGLDCIRPCFWVELIRGRPKENTIWTSGSSISFCGVNSDTVGWSWPDGAELPFTIDK

SEQ ID NO: 21424 - protein, 469 aa, Artificial Sequence; identical to SEQ ID NO: 16738
  derived and/or modified protein sequence (wt) from neuraminidase__InfluenzaA__AEW25592

SEQ ID NO: 21425 - protein, 469 aa, Artificial Sequence
  derived and/or modified protein sequence (wt) from neuraminidase__InfluenzaA__AEW25602
MNPNQKIITIGSVCMTIGMANLILQIGNIISIWISHSIQLGNQNQIETCNQSVITYENNTWVNQTYVNISNTNFAAGQSVVSVKLAGNSSLCPVSGWAIYSKDNSIRIGSKGDVFVIREPFISCSPLECRTFFLTQGALLNDKHSNGTIKDRSPYRTLMSCPIGEVPSPYNSRFESVAWSASACHDGINWLTIGISGPDNGAVAVLKYNGIITDTIKSWRNNILRTQESECACVNGSCFTVMTDGPSDGQASYKIFRIEKGKIVKSVEMNAPNYHYEECSCYPDSSEITCVCRDNWHGSNRPWVSFNQNLEYQIGYICSGIFGDNPRPNDKTGSCGPVSSNGANGVKGFSFKYGNGVWIGRTKSISSRNGFEMIWDPNGWTGTDKNFSIKQDIVGINEWSGYSGSFVQHPELTGLDCIRPCFWVELIRGRPKENTIWTSGSSISFCGVNSDTVGWSWPDGAELPFTIDK

SEQ ID NO: 21426 - protein, 469 aa, Artificial Sequence
  derived and/or modified protein sequence (wt) from neuraminidase__InfluenzaA__AEW25612
MNPNQKIITIGSVCMTIGMANLILQIGNIISIWISHSIQLGNQNQIETCNQSVITYENNTWVNQTYVNISNTNFAAGQSVVSVKLAGNSSLCPVSGWAIYSKDNSIRIGSKGDVFVIREPFISCSPLECRTFFLTQGALLNDKHSNGTIKDRSPYRTLMSCPIGEVPSPYNSRFESVAWSASACHDGINWLTIGISGPDNGAVAVLKYNGIITDTIKSWRNNILRTQESECACVNGSCFTVMTDGPSDRQASYKIFRIEKGKIVKSVEMNAPNYHYEECSCYPDSSEITCVCRDNWHGSNRPWVSFNQNLEYQIGYICSGIFGDNPRPNDKTGSCGPVSSNGANGVKGFSFKYGNGVWIGRTKSISSRNGFEMIWDPNGWTGTDNNFSIKQDIVGINEWSGYSGSFVQHPELTGLDCIRPCFWVELIRGRPKENTIWTSGSSISFCGVNSDTVGWSWPDGAELPFTIDK

SEQ ID NO: 21427 - protein, 469 aa, Artificial Sequence
  derived and/or modified protein sequence (wt) from neuraminidase__InfluenzaA__AEW25622
MNPNQKIITIGSVCMTIGMANLILQIGNIISIWISHSIQLGNQNQIETCNQSVITYENNTWVNQTYVNISNTNFAAGQSVVSVKLAGNSSLCPVSGWAIYSKDNSIRIGSKGDVFVIREPFISCSPLECRTFFLTQGALLNDKHSNGTIKDRSPYRTLMSCPIGEVPSPYNSRFESVAWSASACHDGINWLTIGISGPDNGAVAVLKYNGIITDTIKSWRNNILRTQESECACVNGSCFTVMTDGPSDGQASYKIFRIEKGKIVKSVEMNAPNYHYEECSCYPDSSEITCVCRDNWHGSNRPWVSFNQNLEYQIGYICSGIFGDNPRPNDKTGSCGPVSSNGANGVKGFSFKYGNGVWIGRTKSISSRNGFEMIWDPNGWTGTDNNFSIKQDIVGINEWSGYSGSFVQHPELTGLDCIRPCFWVELIRGRPKENSIWTSGSSISFCGVNSDTVGWSWPDGAELPFTIDK

SEQ ID NO: 21428 - protein, 469 aa, Artificial Sequence
  derived and/or modified protein sequence (wt) from neuraminidase__InfluenzaA__AEW25631
MNPNQKIITIGSVCMTIGMANLILQIGNIISIWISHSIQLGNQNQIETCNQSVITYENNTWVNQTYVNISNTNFAAGQSVVSVKLAGNSSLCPVSGWAIYSKDNSIRIGSKGDVFVIREPFISCSPLECRTFFLTQGALLNDKHSNGTIKDRSPYRTLMSCPIGEVPSPYNSRFESVAWSASACHDGINWLTIGISGPDNGAVAVLKYNGIITDTIKSWRNNILRTQESECACVNGSCFTVMTDGPSDGQASYKIFRIEKGKIVKSVEMNAPNYHYEECSCYPDSSEITCVCRDNWHGSNRPWVSFNQNLEYQIGYICSGIFGDNPRPNDKTGSCGPVSSNGASGVKGFSFKYGNGVWIGRTKSISSRNGFEMIWDPNGWTGTDNNFSIKQDIVGINEWSGYSGSFVQHPELTGLDCIRPCFWVELIRGRPKENTIWTSGSSISFCGVNSDTVGWSWPDGAELPFTIDK

SEQ ID NO: 21429 - protein, 469 aa, Artificial Sequence; identical to SEQ ID NO: 16738
  derived and/or modified protein sequence (wt) from neuraminidase__InfluenzaA__AEW25639

SEQ ID NO: 21430 - protein, 469 aa, Artificial Sequence
  derived and/or modified protein sequence (wt) from neuraminidase__InfluenzaA__AEW25648
MNPNQKIITIGSVCMTIGMANLILQIGNIISIWISHSIQLGNQNQIETCNQSVITYENNTWVNHTYVNISNTNFAAGQSVVSVKLAGNSSLCPVSGWAIYSKDNSIRIGSKGDVFVIREPFISCSPLECRTFFLTQGALLNDKHSNGTIKDRSPYRTLMSCPIGEVPSPYNSRFESVAWSASACHDGINWLTIGISGPDNGAVAVLKYNGIITDTIKSWRNNILRTQESECACVNGSCFTVMTDGPSDGQASYKIFRIEKGKIVKSVEMNAPNYHYEECSCYPDSSEITCVCRDNWHGSNRPWVSFNQNLEYQIGYICSGIFGDNPRPNDKTGSCGPVSSNGANGVKGFSFKYGNGVWIGRTKSISSRNGFEMIWDPNGWTGTDNNFSIKQDIVGINEWSGYSGSFVQHPELTGLDCIRPCFWVELIRGRPKENTIWTSGSSISFCGVNSDTVGWSWPDGAELPFTIDK

SEQ ID NO: 21431 - protein, 469 aa, Artificial Sequence
  derived and/or modified protein sequence (wt) from neuraminidase__InfluenzaA__AEW25656
MNPNQKIITIGSVCMTIGMANLILQIGNIISIWISHSIQLGNQNQIETCNQSVITYENNTWVNQTYVNISNTNFAAGQSVVSVKLAGNSSLCPVSGWAIYSKDNSIRIGSKGDVFVIREPFISCSPLECRTFFLTQGALLNDKHSNGTIKDRSPYRTLMSCPIGEVPSPYNSRFESVAWSASACHDGINWLTIGISGPDNGAVAVLKYNGIITDTIKSWRNNILRTQESECACVNGSCFTVMTDGPSDGQASYKIFRIEKGKIVKSVEMNAPNYHYEECSCYPDSSEITCVCRDNWHGSNRPWVSFNQNLEYQIGYICSGIFGDNPRPNDKTGSCGPVSSNGANGVKGFSFKYGNGVWIGRTKSISSRNGFEMIWDPNGWTGTDNNFPIKQDIVGINEWSGYSGSFVQHPELTGLDCIRPCFWVELIRGRPKENTIWTSGSSISFCGVNSDTVGWSWPDGAELPFTIDK

SEQ ID NO: 21432 - protein, 469 aa, Artificial Sequence
  derived and/or modified protein sequence (wt) from neuraminidase__InfluenzaA__AEW25664
MNPNQKIITIGSVCMTIGMANLILQIGNIISIWISHSIQLGNQNQIETCNQSVITYENNTWVNQTYVNISNTNFTAGQSVVSVKLAGNSSLCPVSGWAIYSKDNSIRIGSKGDVFVIREPFISCSPLECRTFFLTQGALLNDKHSNGTIKDRSPYRTLMSCPIGEVPSPYNSRFESVAWSASACHDGINWLTIGISGPDNGAVAVLKYNGIITDTIKSWRNNILRTQESECACVNGSCFTVMTDGPSDGQASYKIFRIEKGKIVKSVEMNAPNYHYEECSCYPDSSEITCVCRDNWHGSNRPWVSFNQNLEYQIGYICSGIFGDNPRPNDKTGSCGPVSSNGANGVKGFSFKYGNGVWIGRTKSISSRNGFEMIWDPNGWTGTDNNFSIKQDIVGINEWSGYSGSFVQHPELTGLDCIRPCFWVELIRGRPKENTIWTSGSSISFCGVNSDTGGWSWPDGAELPFTIDK

SEQ ID NO: 21433 - protein, 469 aa, Artificial Sequence; identical to SEQ ID NO: 21427
  derived and/or modified protein sequence (wt) from neuraminidase__InfluenzaA__AEW25671

SEQ ID NO: 21434 - protein, 469 aa, Artificial Sequence; identical to SEQ ID NO: 17915
  derived and/or modified protein sequence (wt) from neuraminidase__InfluenzaA__AEW25680

SEQ ID NO: 21435 - protein, 469 aa, Artificial Sequence
  derived and/or modified protein sequence (wt) from neuraminidase__InfluenzaA__AEW25689
MNPNQKIITIGSVCMTIGMANLILQIGNIISIWISHSIQLGNQNQIETCNQSVITYENNTWVNQTYVNISNTNFAAGQSVVSVKLAGNSSLCPVSGWAIYSKDNSIRVGSKGDVFVIREPFISCSPLECRTFFLTQGALLNDKHSNGTIKDRSPYRTLMSCPIGEVPSPYNSRFESVAWSASACHDGINWLTIGISGPDNGAVAVLKYNGIITDTIKSWRNNILRTQESECACVNGSCFTVMTDGPSDGQASYKIFRIEKGKIVKSVEMNAPNYHYEECSCYPDSSEITCVCRDNWHGSNRPWVSFNQNLEYQIGYICSGIFGDNPRPNDKTGSCGPVSSNGANGVKGFSFKYGNGVWIGRTKSISSRNGFEMIWDPNGWTGTDNNFSIKQDIVGINEWSGYSGSFVQHPELTGLDCIRPCFWVELIRGRPKENTIWTSGSSISFCGVNSDTVGWSWPDGAELPFTIDK

SEQ ID NO: 21436 - protein, 469 aa, Artificial Sequence; identical to SEQ ID NO: 21430
  derived and/or modified protein sequence (wt) from neuraminidase__InfluenzaA__AEW25698

SEQ ID NO: 21437 - protein, 469 aa, Artificial Sequence; identical to SEQ ID NO: 16738
  derived and/or modified protein sequence (wt) from neuraminidase__InfluenzaA__AEW25708

SEQ ID NO: 21438 - protein, 469 aa, Artificial Sequence; identical to SEQ ID NO: 16738
  derived and/or modified protein sequence (wt) from neuraminidase__InfluenzaA__AEX09177

SEQ ID NO: 21439 - protein, 470 aa, Artificial Sequence
  derived and/or modified protein sequence (wt) from neuraminidase__InfluenzaA__AEX33324
MNPNQKIITIGSISIAIGIISLMLQIGNIISIWASHSIQTGSQNHTGICNQRIITYENSTWVNHTYVTINNTNVVAGKDKTSVTLAGNSSLCSISGWAIYTKDNSIRIGSKGDVFVIREPFISCSHLECRTFFLTQGALLNDKHSNGTVKDRSPYRALMSCPLGEAPSPYNSKFESVAWSASACHDGMGWLTIGISGPDNGAVAVLKYNGIITETIKSWKKRILRTQESECVCVNGSCFTIMTDGPSNGAASYKIFKIEKGKVTKSIELNAPNFHYEECSCYPDTGTVMCVCRDNWHGSNRPWVSFNQNLDYQIGYICSGVFGDNPRPKDGEGSCNPVTVDGADGVKGFSYKYGNGVWIGRTKSNRLRKGFEMIWDPNGWTDTDSDFSVKQDVVAITDWSGYSGSFVQHPELTGLDCIRPCFWVELVRGLPRENTTIWTSGSSISFCGVNSDTANWSWPDGAELPFTIDK

SEQ ID NO: 21440 - protein, 470 aa, Artificial Sequence
  derived and/or modified protein sequence (wt) from neuraminidase__InfluenzaA__AEX33368
MNPNQKIITIGSISIAIGIISLMLQIGNIISIWASHSIQTGSQNHTGICNQRIITYENSTWVNHTYVNINNTNVVAGKDKTSVTLAGNSSLCAISGWAIYTKDNSIRIGSKGDVFVIREPFISCSHLECRTFFLTQGALLNDKHSNGTVKDRSPYRALMSCPLGEAPSPYNSKFESVAWSASACHDGMGWLTIGISGPDNGAVAVLKYNGIITETIKSWKKRILRTQESECVCVNGSCFTIMTDGPSNGAASYKIFKIEKGKVTKSIELNAPNFHYEECSCYPDTGTVMCVCRDNWHGSNRPWVSFNQNLDYQIGYICSGVFGDNPRPKDGEGSCNPVTVDGADGVKGFSYKYGNGVWIGRTKSNRLRKGFEMIWDPNGWTDTDSDFSVKQDVVAITDWSGYSGSFVQHPELTGLDCIRPCFWVELVRGLPRENTTIWTSGSSISFCGVNSDTANWSWPDGAELPFTIDK

SEQ ID NO: 21441 - protein, 470 aa, Artificial Sequence
  derived and/or modified protein sequence (wt) from neuraminidase__InfluenzaA__AEX33379
MNPNQKIITIGSISIAIGIISLMLQIGNIISIWASHSIQTGIQNHTGICNQRIITYENSTWVNHTYVTINNTNVVAGKDKTSVTLAGNSSLCSISGWAIYTKDNSIRIGSKGDVFVIREPFISCSHLECRTFFLTQGALLNDKHSNGTVKDRSPYRALMSCPLGEAPSPYNSKFESVAWSASACHDGMGWLTIGISGPDNGAVAVLKYNGIITETIKSWKKRILRTQESECVCVNGSCFTIMTDGPSNGAASYKIFKIEKGKVTKSIELNAPNFHYEECSCYPDTGTVMCVCRDNWHGSNRPWVSFNQNLDYQIGYICSGVFGDNPRPRDGEGSCNPVTVDGADGVKGFSYKYGNGVWIGRTKSNRLRKGFEMIWDPNGWTDTDSDFSVKQDVVAITDWSGYSGSFVQHPELTGLDCIRPCFWVELVRGLPRENTTIWTSGSSISFCGVNSDTANWSWPDGAELPFTIDK

SEQ ID NO: 21442 - protein, 470 aa, Artificial Sequence; identical to SEQ ID NO: 21441
  derived and/or modified protein sequence (wt) from neuraminidase__InfluenzaA__AEX33390

SEQ ID NO: 21443 - protein, 470 aa, Artificial Sequence; identical to SEQ ID NO: 21441
  derived and/or modified protein sequence (wt) from neuraminidase__InfluenzaA__AEX33401

SEQ ID NO: 21444 - protein, 470 aa, Artificial Sequence; identical to SEQ ID NO: 21441
  derived and/or modified protein sequence (wt) from neuraminidase__InfluenzaA__AEX33412

SEQ ID NO: 21445 - protein, 470 aa, Artificial Sequence; identical to SEQ ID NO: 21441
  derived and/or modified protein sequence (wt) from neuraminidase__InfluenzaA__AEX33423

SEQ ID NO: 21446 - protein, 470 aa, Artificial Sequence; identical to SEQ ID NO: 21441
  derived and/or modified protein sequence (wt) from neuraminidase__InfluenzaA__AEX33434

SEQ ID NO: 21447 - protein, 470 aa, Artificial Sequence; identical to SEQ ID NO: 21441
  derived and/or modified protein sequence (wt) from neuraminidase__InfluenzaA__AEX33445

SEQ ID NO: 21448 - protein, 469 aa, Artificial Sequence
  derived and/or modified protein sequence (wt) from neuraminidase__InfluenzaA__AEX33544
MNPNQKIITIGSFSLTIAAICFLMQIAILVTTVTLHFKQHECNSPPNNQVMLCEPTIIERNITEIVYLTNTTIEKEICPKLAEYRNWSKPQCNITGFAPFSKDNSIRLSAGGDIWVTREPYVSCDPDKCYQFALGQGTTLNNGHSNDTVHDRTPYRTLLMNELGVPFHLGTRQVCIAWSSSSCHDGKAWLHVCVTGDDKNATASFIYNGRLVDSIGSWSKKILRTQESECVCINGTCTVVMTDGSASGKADTKILFIEEGKIVHISTLSGSAQHVEECSCYPRYPGVRCVCRDNWKGSNRPIVDINVKDYSIVSSYVCSGLVGDTPRKNDSFSSSHCLDPNNEEGGHGVKGWAFDDGNDVWMGRTISEKLRSGYETFKVIEGWSKPNSKLQINRQVIVERGNRSGYSGIFSVEGKSCINRCFYVELIRGRKEKTEVWWTSNSIVVFCGTSGTYGTGSWPDGADINLMPI

SEQ ID NO: 21449 - protein, 469 aa, Artificial Sequence; identical to SEQ ID NO: 14714
  derived and/or modified protein sequence (wt) from neuraminidase__InfluenzaA__AEX33555

SEQ ID NO: 21450 - protein, 469 aa, Artificial Sequence
  derived and/or modified protein sequence (wt) from neuraminidase__InfluenzaA__AEX33610
MNPNQKIITIGSVSLTISTICFFMQIAILITTVTLHFKQYEFNPPPNNQVMLCEPTIIERNITEIVYLTNTTIEKEICPKLAEYRNWSKPQCDITGFAPFSKDNSIRLSAGGDIWVTREPYVSCDPDKCYQFALGQGTTLNNVHSNDTVHDRTPYRTLLMNELGVPFHLGTKQVCIAWSSSSCHDGKAWLHVCVTGDDKNATASFIYNGRLVDSIVSWSKKILRTQESECVCINGTCTVVMTDGSASGKADTKILFIEEGKIVHTSTLSGSAQHVEECSCYPRYPGVRCVCRDNWKGSNRPIVDINIKDYNIVSSYVCSGLVGDTPRKNDSSSSSHCLDPNNEEGGHGVKGWAFDDGNDVWMGRTISEKLRSGYETFKVIGGWSNPNSKLQINRQVIVDRGNRSGYSGIFSVEGKSCINRCFYVELIRGRKEETEVLWTSNSIVVFCGTSGTYGTGSWPDGADINLMPI

SEQ ID NO: 21451 - protein, 469 aa, Artificial Sequence
  derived and/or modified protein sequence (wt) from neuraminidase__InfluenzaA__AEX33828
MNPNQKIITIGSVSLTISTICFFMQIAILITTVTLHFKQYEFNPPPNNQVMLCEPTIIERNITEIVYLTNTTIEKEICPKLAEYRNWSKPQCDITGFAPFSKDNSIRLSAGGDIWVTREPYVSCDPDKCYQFALGQGTTLNNVHSNDTVHDRTPYRTLLMNELGVPFHLGTKQVCIAWSSSSCHDGKAWLHVCVTGDDKNATASFIYNGRLVDSIVSWSKEILRTQESECVCINGTCTVVMTDGSASGKADTKILFIEEGKIVHTSTLSGSAQHVEECSCYPRYPGVRCVCRDNWKGSNRPIVDINIKDYSIVSSYVCSGLVGDTPRKNDSSSSSHCLDPNNEEGGHGVKGWAFDDGNDVWMGRTISEKLRSGYETFKVIEGWSNPNSKLQINRQVIVDRGNRSGYSGIFSVEGKSCINRCFYVELIRGRKEETEVLWTSNSIVVFCGTSGTYGTGSWPDGADINLMPI

SEQ ID NO: 21452 - protein, 469 aa, Artificial Sequence; identical to SEQ ID NO: 14712
  derived and/or modified protein sequence (wt) from neuraminidase__InfluenzaA__AEX33839

SEQ ID NO: 21453 - protein, 470 aa, Artificial Sequence
  derived and/or modified protein sequence (wt) from neuraminidase__InfluenzaA__AEX33861
MNPNQKIITIGSISIAIGTISLMLQVGNIISIWASHSIQTGSQNHTGICNQRIITYENSTWVNHTYVNINNTNVVAGKDKTSVALAGNSSLCSISGWAIYTKDNSIRIGSKGDVFVIREPFISCSHLECRTFFLTQGALLNDKHSNGTVKDRSPYRALMSCPLGEAPSPYNSKFESVAWSASACHDGMGWLTIGISGPDNGAVAVLKYNGIITETIKSWKKRILRTQESECVCVNGSCFTIMTDGPSNGAASYKIFKIEKGQVTKSVELNAPNFHYEECSCYPDTGTVMCVCRDNWHGSNRPWVSFNQNLDYQIGYICSGVFGDNPRPKDGKGSCNPVTVDGADGVKGFSYKYGNGVWIGRTKSNRLRKGFEMIWDPNGWTDTDSDFSVKQDVVAITDWSGYSGSFVQHPELTGLDCIRPCFWVELVRGLPRENTTIWTSGSSISFCGVDSDTANWSWPDGAELPFTIDK

SEQ ID NO: 21454 - protein, 469 aa, Artificial Sequence
  derived and/or modified protein sequence (wt) from neuraminidase__InfluenzaA__AEX33872
MNPNQKIITIGSVSLTISTICFFMQIAILITTVTLHFKQYEFNSPPNNQVMQCEPTIIERNITEIVYLTNTTIEKEICPKLAEYRNWSKPQCDITGFAPFSKDNSIRLSAGGDIWVTREPYVSCDPDKCYQFALGQGTTLNNVHSNDTVHDRTPYRTLLMNELGVPFHLGTKQVCIAWSSSSCHDGKAWLHVCVTGDDKNATASFIYNGRLVDSIVSWSKEILRTQESECVCINGTCTVVMTDGSASGKADTKILFIEEGKIVHTSTLSGSAQHVEECSCYPRYPGVRCVCRDNWKGSNRPIVDINIKDYSIVSSYVCSGLVGDTPRKNDSSSSSHCLNPNNEEGGHGVKGWAFDDGNDVWMGRTISEKLRLGYETFKVIEGWSNPNSKLQINRQVIVDRGNRSGYSGIFSVEGKSCINRCFYVELIRGRKEETEVLWTSNSIVVFCGTSGTYGTGSWPDGADINLMPI

SEQ ID NO: 21455 - protein, 469 aa, Artificial Sequence; identical to SEQ ID NO: 14712
  derived and/or modified protein sequence (wt) from neuraminidase__InfluenzaA__AEX33883

SEQ ID NO: 21456 - protein, 469 aa, Artificial Sequence
  derived and/or modified protein sequence (wt) from neuraminidase__InfluenzaA__AEX33894
MNPNQKIITIGSVSLTISTICFFMQIAILITTVTLHFKQYEFNSPPNNQVMLCEPTIIERNITEIVYLTNTTIEKEICPKLAEYRNWSKPQCNITGFAPFSKDNSIRLSAGGDIWVTREPYVSCDPDKCYQFALGQGTTLNNVHSNDTVHDRTPYRTLLMNELGVPFHLGTKQVCIAWSSSSCHDGKAWLHVCVTGDDKNATASFIYNGRLVDSIVSWSKEILRTQESECVCIDGTCTVVMTDGSASGKADTKILFIEEGKIVHTSTLSGSAQHVEECSCYPRYPGVRCVCRDNWKGSNRPIVDINIKDYSIVSSYVCSGLVGDTPRKNDSSSSSHCLDPNNEEGGHGVKGWAFDDGNDVWMGRTISEKLRSGYETFKVIEGWSNPNSKLQINRQVIVDRGNRSGYSGIFSVEGKSCINRCFYVELIRGRKEETEVLWTSNSIVVFCGTSGTYGTGSWPDGADINLMPI

SEQ ID NO: 21457 - protein, 470 aa, Artificial Sequence
  derived and/or modified protein sequence (wt) from neuraminidase__InfluenzaA__AEX33916
MNPNQKIITIGSISIAIGIISLILQIGNIISIWASHSIQTGSQNHTGICNQRIITYENSTWVNNTYVNINNTNVVAEKDKTSVTLAGNSSLCSISGWAIYTKDNSIRIGSKGDVFVIREPFISCSHLECRTFFLTQGALLNDKHSNGTVKDRSPYRALMSCPLGEAPSPYNSRFESVAWSASACHDGMGWLTIGISGPDNGAVAVLKYNGIITETIKSWKKRILRTQESECVCMNGSCFTIMTDGPSNGAASYKIFKIEKGKVTKTIELNAPNFHYEECSCYPDTGTVMCVCRDNWHGSNRPWVSFNQNLDYQTGYICSGVFGDNPRPKDGEGSCNPMTVDGADGVKGFSYKYGNGVWIGRTKSNRLRKGFEMIWDPNGWTNTDSDFSVKQDVVAITDWSGYSGSFVQHPELTGLDCIRPCFWVELVRGLPRENTTIWTSGSSISFCGVNSGTANWSWPDGAELPFTIDK

SEQ ID NO: 21458 - protein, 470 aa, Artificial Sequence; identical to SEQ ID NO: 15869
  derived and/or modified protein sequence (wt) from neuraminidase__InfluenzaA__AEX33927

SEQ ID NO: 21459 - protein, 470 aa, Artificial Sequence
  derived and/or modified protein sequence (wt) from neuraminidase__InfluenzaA__AEX33938
MNPNQKIITIGSISIAIGIISLILQIGNIISIWASHSIQTGSQNHTGICNQRIITYENSTWVNNTYVNINNTNVVVEKDKTSVTLAGNSSLCSISGWAIYTKDNSIRIGSKGDVFVIREPFISCSHLECRTFFLTQGALLNDKHSNGTVKDRSPYRALMSCPLGEAPSPYNSRFESVAWSASACHDGMGWLTIGISGPDNGAVAVLKYNGIITETIKSWKKRILRTQESECVCMNGSCFTIMTDGPSNGAASYKIFKIEKGKVTKTIELNAPNFHYEECSCYPDTGTVMCVCRDNWHGSNRPWVSFNQNLDYQIGYICSGVFGDNPRPKDGEGSCNPVTVDGADGVKGFSYKYGNGVWIGRTKSNRLRKGFEMIWDPNGWTNTDSDFSVKQDVVAITDWSGYSGSFVQHPELTGLDCIRPCFWVELVRGLPRENTTIWTSGSSISFCGVNSGTTNWSWPDGAELPFTIDK

SEQ ID NO: 21460 - protein, 470 aa, Artificial Sequence
  derived and/or modified protein sequence (wt) from neuraminidase__InfluenzaA__AEX33949
MNPNQKIITIGSISIAIGIISLILQIGNIISIWASHSIQTGSQNHTGICNQRIITYENSTWVNNTYVNINNTNVVVEKDKTSVTLAGNSSLCSISGWAIYTKDNSIRIGSKGDVFVIREPFISCSHLECRTFFLTQGALLNDKHSNGTVKDRSPYRALMSCPLGEAPSPYNSRFESVAWSASACHDGMGWLTIGISGPDNGAVAVLKYNGIITETVKSWKKRILRTQESECVCMNGSCFTIMTDGPSNGAASYKIFKIEKGKVTKTIELNAPNFHYEECSCYPDTGTVMCVCRDNWHGSNRPWVSFNQNLDYQIGYICSGVFGDNPRPKDGEGSCNPVTVDGADGVKGFSYKYGNGVWIGRTKSNRLRKGFEMIWDPNGWTNTDSDFSVKQDVVAITDWSGYSGSFVQHPELTGLDCIRPCFWVELVRGLPRENTTIWTSGSSISFCGVNSGTANWSWPDGAELPFTIDK

SEQ ID NO: 21461 - protein, 469 aa, Artificial Sequence
  derived and/or modified protein sequence (wt) from neuraminidase__InfluenzaA__AEX33971
MNPNQKIITIGSVSLTISTICFFMQIAILITTVTLHFKQYEFSSPPNNQVMLCEPAIIERNITETVYLTNTTTEKEICPKLAEYRNWSKPQCDITGFAPFSKDNSIRLSAGGDIWVTREPYVSCDPDKCYQFALGQGTTLNNVHSNDTVHDRTPYRTLLMNELGVPFHLGTKQVCIAWSSSSCHDGKAWLHVCVTGDDKNATASFIYNGRLVDSIVSWSKEILRTQESECVCINGTCTVVMTDGSASGKADTKILFIEEGKIVHTSTLSGSAQHVEECSCYPRYPGVRCVCRDNWKGSNRPIVDINIKDYSIVSRYVCSGIVGDTPRKNDSSSSSHCLDPNNEEGGHGVKGWAFDDGNDVWMGRTISEKSRSGYETFKVIEGWSNPNSKLQINRQVIVDRGNRSGYSGIFSVEGKSCINRCFYVELIRGRKEETEVLWTSNSIVVFCGTSGTYGTGSWPDGADINLMPI

SEQ ID NO: 21462 - protein, 469 aa, Artificial Sequence
  derived and/or modified protein sequence (wt) from neuraminidase__InfluenzaA__AEX33993
MNPNQKIITIGSVSLTISTICFFMQIAILITTVTLHFKQYEFNSPPNNQVMLCEPTIIERNITEIVYLTNTTIEKEICPKLAEYRNWSKPQCDITGFAPFSKDNSIRLSAGGDIWVTREPYVSCDPDKCYQFALGQGTTLNNVHSNDTVRDRTPYRTLLMNELGVPFHLGTKQVCIAWSSSSCHDGKAWLHVCITGDDKNATASFIYNGRLVDSIVSWSKEILRTQESECVCINGTCTVVMTDGSASGEADTKILFIEEGKIVHTSTLSGSAQHVEECSCYPRYPGVRCVCRDNWKGSNRPIVDINIKDHSIVSSYVCSGLVGDTPRKNDSSSSSHCLDPNNEEGGHGVKGWAFDDGNDVWMGRTISEKSRLGYETFKVIEGWSNPKSKLQINRQVIVDRGNRSGYSGIFSVEGKSCINRCFYVELIRGRKEETEVLWTSNSIVVFCGTSGTYGTGSWPDGADINLMPV

SEQ ID NO: 21463 - protein, 469 aa, Artificial Sequence; identical to SEQ ID NO: 16512
  derived and/or modified protein sequence (wt) from neuraminidase__InfluenzaA__AEX34026

SEQ ID NO: 21464 - protein, 469 aa, Artificial Sequence
  derived and/or modified protein sequence (wt) from neuraminidase__InfluenzaA__AEX34036
MNPNQKIITIGSVSLTISTICFFMQIAILITTVTLHFKQYEFSSPPNNQVMLCEPTIIERNITEIVYLTNTTIEKEICPKLAEYRNWSKPQCDITGFAPFSKDNSIRLSAGGDIWVTREPYVSCDPDKCYQFALGQGTTLNNVHSNDTVHGRTPYRTLLMNELGVPFHLGTKQVCIAWSSSSCHDGKAWLHVCVTGDDKNATASFIYNGRLVDSIVSWSKEILRTQESECVCINGTCAVVMTDGSASGKADTKILFIEEGKIVHTSTLSGSAQHVEECSCYPRYPGVRCVCRDNWKGSNRPIVDINIKDYSIVSRYVCSGLVGDTPRKNDSSSSSHCLDPNNEEGGHGVKGWAFDDGDDVWMGRTISEKSRSGYETFKVIEGWSNPNSKLQINRQVIVDRGNRSGYSGIFSVEGKSCINRCFYVELIRGRKEETEVLWTSNSIVVFCGTSGTYGTGSWPDGADINLMPI

SEQ ID NO: 21465 - protein, 469 aa, Artificial Sequence
  derived and/or modified protein sequence (wt) from neuraminidase__InfluenzaA__AEX34058
MNPNQKIITIGSVSLTISTICFFMQIAILITTVTLHFKQYEFSSPPNNQVMLCEPAIIERNITEIVYLTNTTIEKEICPKLTEYRNWSKPQCDITGFAPFSKDNSIRLSAGGDIWVTREPYVSCDPDKCYQFALGQGTTLNNVHSNDTVHDRTPYRTLLMNELGVPFHLGTKQVCIAWSSSSCHDGKAWLHVCVTGDDKNATASFIYNGRLVDSIVSWSKEILRTQESECVCINGTCTVVMTDGSASGKADTKILFIEEGKIVHTSTLSGSAQHVEECSCYPRYPGVRCVCRDNWKGSNRPIVDINIKDYSIVSRYVCSGLVGDTPRKNDSSSSSHCLDPNNEEGGHGVKGWAFDDGNDVWMGRTISEKSRSGYETFKVIEGWSNPNSKLQINRQVIVDRGNRSGYSGIFSVEGKSCINRCFYVELIRGRKEETEVLWTSNSIVVFCGTSGTYGTGSWPDGADINLMPI

SEQ ID NO: 21466 - protein, 469 aa, Artificial Sequence
  derived and/or modified protein sequence (wt) from neuraminidase__InfluenzaA__AEX34103
MNPNQKIITIGSVSLTISTICFFMQIAILITTVTLHFKQYEFSSPPNNQVMLCEPTIIERNITEIVYLTNTTIEKEVCPKLAEYRNWSKPQCDITGFAPFSKDNSIRLSAGGDIWVTREPYVSCDPDKCYQFALGQGTTLNNVHSNDTVHDRTPYRTLLMNELGVPFHLGTKQVCIAWSSSSCHDGKAWLHVCVTGDDKNATASFIYNGRLVDSIVSWSKEILRTQESECVCINGTCTVVMTDGSASGKADTKILFIEEGKIVHTSTLSGNAQHVEECSCYPRYPGVRCVCRDNWKGSNRPIVDINIKDYSIVSRYVCSGLVGDTPRKNDSSSSSHCLDPNNEEGGHGVKGWAFDDGNDVWMGRTISEKSRSGYETFKVIEGWSNPNSKLQINRQVIVDRGNRSGYSGIFSVEGKSCINRCFYVELIRGRKEETKVLWTSNSIVVFCGTSGTYGTGSWPDGADINLMPI

SEQ ID NO: 21467 - protein, 469 aa, Artificial Sequence
  derived and/or modified protein sequence (wt) from neuraminidase__InfluenzaA__AEX34114
MNPNQKIITIGSVSLTISTICFFMQIAILITTVTLHFKQYEFSSPPNNQVMLCEPAIIERNITEIVYPTNTTIEKEICPKLAEYRNWSKPQCDITGFAPFSKDNSIRLSAGGDIWVTREPYVSCDPDKCYQFALGQGTTLNNVHSNDTVHDRTPYRTLLMNELGVPFHLGTKQVCIAWSSSSCHDGKAWLHVCVTGDDKNATASFIYNGRLVDSIVSWSKEILRTQESECVCINGTCTVVMTDGSASGKADTKILFIEEGKIVHTSTLSGSAQHVEECSCYPRYPGVRCVCRDNWKGSNRPIVDINIKDYSIVSRYVCSGLVGDTPRKNDSSSSSHCLDPNNEEGGHGVKGWAFDDGNDVWMGRTISEKSRSGYETFKVIEGWSNPNSKLQINRQVIVDRGNRSGYSGIFSVEGKSCINRCFYVELIRGRKEETEVLWTSNSIVVFCGTSGTYGTGSWPDGADINLMPI

SEQ ID NO: 21468 - protein, 469 aa, Artificial Sequence
  derived and/or modified protein sequence (wt) from neuraminidase__InfluenzaA__AEX34137
MNPNQKIITIGSVSLTISTICFFMQIAILITTVTLHFKQYEFNSPPNNQVMLCEPTIIERNITEIVYLTNTTIEKEICPKLAEYRNWSKPQCDITGFAPFSKDNSIRLSAGGDIWVTREPYVSCDPDKCYQFALGQGTTLNNVHSNDTVRGRTPYRTLLMNELGVPFHLGTKQVCIAWSSSSCHDGKAWLHVCITGDDKNATASFIYNGRLVDSIVSWSKEILRTQESECVCINGTCTVVMTDGSASGKADTKILFIEEGKIVHTSTLSGSAQHVEECSCYPRYPGVRCVCRDNWKGSNRPIVDINIKDHSIVSSYVCSGLVGDTPRKNDSSSSSHCLDPNNEEGGHGVKGWAFDDGNDVWMGRTISEKSRLGYETFKVIEGWSNPKSKLQINRQVIVDRGNRSGYSGIFSVEGKSCINRCFYVELIRGRKEETEVLWTSNSIVVFCGTSGTYGTGSWPDGADINLMPI

SEQ ID NO: 21469 - protein, 469 aa, Artificial Sequence
  derived and/or modified protein sequence (wt) from neuraminidase__InfluenzaA__AEX34191
MNPNQKIITIGSVSLSISTICFFMQIAILITTVTLHFKQYEFNSSPNNQVMLCEPTIIERNITEIVYLTNTTIEKEICPKLAEYRNWSKPQCDITGFAPFSKDNSIRLSAGGDIWVTREPYVSCDPDKCYQFALGQGTTLNNVHSNNTVRDRTPYRTLLMNELGVPFHLGTKQVCIAWSSSSCHDGKAWLHVCITGDDKNATASFIYNGRLVDSIVSWSKEILRTQESECVCINGTCTVVMTDGSASGKADTKILFIEEGKIVHTSTLSGSAQHVEECSCYPRYPGVRCVCRDNWKGSNRPIVDINIKDHSIVSSYVCSGLVGDTPRKNDSSSSSHCLDPNNEEGGHGVKGWAFDDGNDVWMGRTISEKSRLGYETFKVIEGWSNPKSKLQINRQVIVDRGNRSGYSGIFSVEGKSCINRCFYVELIRGRKEETEVLWTSNSIVVFCGTSGTYGTGSWPDGADINLMPI

SEQ ID NO: 21470 - protein, 469 aa, Artificial Sequence
  derived and/or modified protein sequence (wt) from neuraminidase__InfluenzaA__AEX34224
MNPNQKIITIGSVSLTISTICFFMQIAILITTVTLHFKQYEFSSPPNNQVMLCEPTIIERNITEIVYLTNTTIEKEICPKLAEYRNWSKPQCDITGFAPFSKDNSIRLSAGGDIWVTREPYVSCDPDKCYQFALGQGTTLNNVHSNDTVHGRTPYRTLLMNELGVPFHLGTKQVCIAWSSSSCHDGKAWLHVCVTGDDKNATASFIYNGRLVDSIVSWSKEILRTQESECVCINGTCTVVMTDGSASGKADTKILFIEEGKIVHTSTLSGSAQHVEECSCYPRYPGVRCVCRDNWKGSNRPIVDINIKDYSIVSRYVCSGLVGDTPRKNDSSSSSHCLDPNNEEGGHGVKGWAFDDGNDVWMGRTISEKLRSGYETFKVIEGWSNPNSKLQINRQVIVDRGNRSGYSGIFSVEGKSCINRCFYVELIRGRKEETEVLWTSNSIVVFCGTSGTYGTGSWPDGADINLMPI

SEQ ID NO: 21471 - protein, 469 aa, Artificial Sequence
  derived and/or modified protein sequence (wt) from neuraminidase__InfluenzaA__AEX34235
MNPNQKIITIGSVSLTISTICFFMQIAILITTVTLHFKQYEFSSPPNNQVMLCEPAIIERNITEIVYLTNTTIEKEICPKLAEYRNWSKPQCDITGFAPFSKDNSIRLSAGGDIWVTREPYVSCDPDKCYQFALGQGTTLNNVHSNDTVHDRTPYRTLLMNELGVPFHLGTKQVCIAWSSSSCHDGKAWLHVCVTGDDKNATASFIYNGRLVDSIVSWSKEILRTQESECVCINGTCTVVMTDGSASGKADTKILFIEEGKIVHTSTLSGSAQHVEECSCYPRYPGVRCVCRDNWKGSNRPIVDINIKDYSIVSRYVCSGLVGDTPRKSDSSSSSHCLDPNNEEGGHGVKGWAFDDGNDVWMGRTISEKSRSGYETFKVIEGWSNPNSKLQINRQVIVDRGNRSGYSGIFSVEGKSCINRCFYVELIRGRKEETEVLWTSNSIVVFCGTSGTYGTGSWPDGADINLMPI

SEQ ID NO: 21472 - protein, 469 aa, Artificial Sequence
  derived and/or modified protein sequence (wt) from neuraminidase__InfluenzaA__AEX34246
MNPNQKIITIGSVSLTISTICFFMQIAILITTVTLHFKQYEFNSPPNNQVMLCEPTIIERNITEIVYLTNTTIEKEICPKLAEYRNWSKPQCDITGFAPFSKDNSIRLSAGGDIWVTREPYVSCDPDKCYQFALGQGTTLNNVHSNDTVRGRTPYRTLLMNELGVPFHLGTKQVCIAWSSSSCHDGKAWLHVCITGDDKNATASFIYNGRLVDSIVSWSKEILRTQESECVCINGTCTVVMTDGSASGKADTKILFIEEGKIVHTSTLSGSAQHVEECSCYPRYPGVRCVCRDNWKGSNRPIVDINIKDHSIVSSYVCSGLVGDTPRKNDSSSSSHCLDPNNEEGGHGVKGWAFDDGNDVWMGRTISEKSRLGYETFKVIEGWSNPKSKLQVNRQVIVDRGNRSGYSGIFSVEGKSCINRCFYVELIRGRKEETEVLWTSNSIVVFCGTSGTYGTGSWPDGADINLMPI

SEQ ID NO: 21473 - protein, 469 aa, Artificial Sequence
  derived and/or modified protein sequence (wt) from neuraminidase__InfluenzaA__AEX34257
MNPNQKIITIGSVSLTISTICFFMQIAILITTVTLHFKQYEFNSSPNNQVMLCEPTIIERNITEIVYLTNTTIEKEICPKLAEYRNWSKPQCDITGFAPFSKDNSIRLSAGGDIWVTREPYVSCDPDKCYQFALGQGTTLNNVHSNNTVRNRTPYRTLLMNELGVPFHLGTKQVCIAWSSSSCHDGKAWLHVCITGDDKNATASFIYNGRLVDSIVSWSKEILRTQESECVCINGTCTVVMTDGSASGKADTKILFIEEGKIVHTSTLSGSAQHVEECSCYPRYPGVRCVCRDNWKGSNRPIVDINIKDHSIVSSYVCSGLVGDTPRKNDSSSSSHCLDPNNEEGGHGVKGWAFDDGNDVWMGRTISEKSRLGYETFKVIEGWSNPKSKLQINRQVIVDRGNRSGYSGIFSVEGKSCINRCFYVELIRGRKEETEVLWTSNSIVVFCGTSGTYGTGSWPDGADINLMPI

SEQ ID NO: 21474 - protein, 469 aa, Artificial Sequence
  derived and/or modified protein sequence (wt) from neuraminidase__InfluenzaA__AEX34268
MNPNKKIITIGSVSLTISTICFFMQIAILITTVTLHFKQYEFNSPPNNQVMLCEPTIIERNITEIVYLTNTTIEKEICPKLAEYRNWSKPQCDITGFAPFSKDNSIRLSAGGDIWVTREPYVSCDPDKCYQFALGQGTTLNNVHSNDTVRNRTPYRTLLMNELGVPFHLGTKQVCIAWSSSSCHDGKAWLHVCITGDDKNATASFIYNGRLVDSIVSWSKEILRTQESECVCINGTCTVVMTDGSASGKADTKILFIEEGKIVHTSKLSGSAQHVEECSCYPRYPGVRCVCRDNWKGSNRPIVDINIKDHSIVSSYVCSGLVGDTPRKNDSSSSSHCLDPNNEEGGHGVKGWAFDDGNDVWMGRTISEKSRLGYETFKVIEGWSNPKSKLQINRQVIVDRGNRSGYSGIFSVEGKSCINRCFYVELIRGRKEETEVLWTSNSIVVFCGTSGTYGTGSWPDGADINLMPI

SEQ ID NO: 21475 - protein, 469 aa, Artificial Sequence
  derived and/or modified protein sequence (wt) from neuraminidase__InfluenzaA__AEX34278
MNPNQKIITIGSVSLTISTICFFMQIAILITTVTLHFKQYEFSSPPNNQVMLCEPAIIERNITEIVYLTNTTIEKEICPKLAEYRNWSKPQCDITGFAPFSKDNSIRLSAGGDIWVTREPYVSCDPDKCYQFALGQGTTLNNVHSNDTVHDRTPYRTLLMNELGVPFHLGTKQVCIAWSSSSCHDGKAWLHVCVTGDDKNATASFIYNGRLVDSIVSWSKEILRTQESECVCINGTCTVVMTDGSASGKADTKILFIEEGKIVHTSTLSGSAQHVEECSCYPRYPGVRCVCRDNWKGSNRPIVDINIKDYSIVSRYVCSGLVGDTPRKNDSSSSSHCLDPNNEKGGHGVKGWAFDDGNDVWMGRTISEKSRSGYETFKVIEGWSNPNSKLQINRQVIVDRGNRSGYSGIFSVEGKSCINRCFYVELIRGRKEETEVLWTSNSIVVFCGTSGTYGTGSWPDGADINLMPI

SEQ ID NO: 21476 - protein, 470 aa, Artificial Sequence
  derived and/or modified protein sequence (wt) from neuraminidase__InfluenzaA__AEX34310
MNPNQKIITIGSISIAIGIISLMLQIGNIISIWASHSIQTGTQNHTGICNQRIITYENSTWVNHTYVNINNTNVVAGKDKTPVTLVGNSSLCSISGWAIYTKDNSIRIGSKGDVFVIREPFISCSHLECKTFFLTQGALLNDKHSNGTVKDRSPYRALMSCPLGEAPSPYNSKFESVAWSASACHDGIGWLTIGISGPDNGAVAVLKYKGIITGTIKSWKKQILRTQESECVCMNGSCFTIMTDGPSNGAASYKIFKIEKGKVTKSMELNAPNFHYEECSCYPDTGTVMCVCRDNWHGSNRPWVSFNQNLDYQIGYICSGVFGDNPRPKDREGSCNPVTVDGANGVKGFSYKYGNGVWIGRTKSNRIRKGFEMIWDPNGWTNTDSDFSVKQDIVAITDWSGYSGSFVQHPELTGLDCIRPCFWVELVRGLPGENTTIWTSGSSISFCGVNGDIANWSWPDGAELPFTIDK

SEQ ID NO: 21477 - protein, 470 aa, Artificial Sequence
  derived and/or modified protein sequence (wt) from neuraminidase__InfluenzaA__AEX34321
MNPNQKIITIGSISIAIGIISLMLQIGNIISIWVSHSIQTGSQNNTGICNQRIITYENSTWVNHTYVNINNTNVVAGEDKTSVTLAGNSSLCSISGWAIYTKDNSIRIGSKGDVFVIREPFISCSHLECRTFFLTQGALLNDKHSNGTVKDRSPYRALMSCPLGEAPSPYNSKFESVAWSASACHDGMGWLTIGISGPDNGAVAVLKYNGIITGTIKSWKKQILRTQESECVCMNGSCFTIMTDGPSNKAASYKIFKIEKGKVTKSIELNAPNFYYEECSCYPDTGIVMCVCRDNWHGSNRPWVSFNQNLDYQIGYICSGVFGDNPRPEDGEGSCNPVTVDGANGVKGFSYKYGNGVWIGRTKSNRLRKGFEMIWDPNGWTNTDSDFSVKQDVVAITDWSGYSGSFVQHPELTGLDCIRPCFWVELVRGLPRENTTIWTSGSSISFCGVNSDTANWSWPDGAELPFTIDK

SEQ ID NO: 21478 - protein, 469 aa, Artificial Sequence; identical to SEQ ID NO: 16057
  derived and/or modified protein sequence (wt) from neuraminidase__InfluenzaA__AEX34356

SEQ ID NO: 21479 - protein, 469 aa, Artificial Sequence
  derived and/or modified protein sequence (wt) from neuraminidase__InfluenzaA__AEX34367
MNPNQKIITIGSVSLTISTICFFMQIAILITTVTLHFKQYEFNSPPNNQVMLCEPTIIERNITEIVYLTNTTIEKEICPKLAEYRNWSKPQCDITGFAPFSKDNSIRLSAGGDIWVTREPYVSCDPDKCYQFALGQGTTLNNVHSNDTVRDRTPYRTLLMNELGVPFHLGTKQVCIAWSSSSCHDGKAWLHVCITGDDKNATASFIYNGRLVDSIVSWSKEILRTQESECVCINGTCTVVMTDGSASGKADTKILFIEEGKIVHTSTLSGSAKHVEECSCYPRHPGVRCVCRDNWKGSNRPIVDINIKDHSIVSSYVCSGLVGDTPRKNDSSSSSHCLDPNNEEGGHGVKGWAFDDGNDVWMGRTISEKSRLGYETFKVIEGWSNPKSKLQINRQVIVDRGNRSGYSGIFSVEGKSCINRCFYVELIRGRKEETEVLWTSNSIVVFCGTSGTYGTGSWPDGADINLMPI

SEQ ID NO: 21480 - protein, 469 aa, Artificial Sequence
  derived and/or modified protein sequence (wt) from neuraminidase__InfluenzaA__AEX34378
MNPNQKIITIGSVSLTISTICFFMQIAILITTVTLHFKQYEFNSPPNNQVMLCEPTIIERNITEIVYLTNTTIEKEICPNLAEYRNWSKPQCDITGFAPFSKDNSIRLSAGGDIWVTREPYVSCDPDKCYQFALGQGTTLNNVHSNDTVRDRTPYRTLLMNELGVPFHLGTKQVCIAWSSSSCHDGKAWLHVCITGDDKNATASFIYNGRLVDSIVSWSKEILRTQESECVCINGTCTVVMTDGSASGKADTKILFIEEGKIVHTSTLSGSAKHVEECSCYPRHPGVRCVCRDNWKGSNRPIVDINIKDHSIVSSYVCSGLVGDTPRKNDSSSSSHCLDPNNEEGGHGVKGWAFDDGNDVWMGRTISEKSRLGYETFKVIEGWSNPKSKLQINRQVIVDRGNRSGYSGIFSVEGKSCINRCFYVELIRGRKEETEVLWTSNSIVVFCGTSGTYGTGSWPDGADINLMPI

SEQ ID NO: 21481 - protein, 469 aa, Artificial Sequence
  derived and/or modified protein sequence (wt) from neuraminidase__InfluenzaA__AEX34400
MNPNQKIITIGSVSLTISTICFFMQIAILITTVTLHFKQYEFNSPPNNQVMLCEPTIIERNITEIVYLTNTTIEKEICPKLAEYRNWSKPQCDITGFAPFSKDNSIRLSAGGDIWVTREPYVSCDPDKCYQFALGQGTTLNNVHSNDTVRGRTPYRTLLMNELGVPFHLGTKQVCIAWSSSSCHDGKAWLHVCITGDDKNATASFIYNGRLVDSVVSWSKEILRTQESECVCINGTCTVVMTDGSASGKADTKILFIKEGKIVHTSTLSGSAQHVEECSCYPRYPGVRCVCRDNWKGSNRPIVDINIKDHSIVSSYVCSGLVGDTPRKNDSSSSSHCLDPNNEEGGHGVKGWAFDDGNDVWMGRTISEKSRLGYETFKVIEGWSNPKSKLQINRQVIVDRGNRSGYSGIFSVEGKSCINRCFYVELIRGRKEETEVLWTSNSIVVFCGTSGTYGTGSWPDGADINLMPI

SEQ ID NO: 21482 - protein, 470 aa, Artificial Sequence
  derived and/or modified protein sequence (wt) from neuraminidase__InfluenzaA__AEX34432
MNPNQKIITIGSISIAIGIISLILQIGNIISIWASHSIQTGSQNHTGICNQRIITYENSTWVNNTYVNINNTNVVVEKDKTSVTLAGNSSLCSISGWAIYTKDNSIRIGSKGDVFVIREPFISCSHLECRTFFLTQGALLNDKHSNGTVKDRSPYRALMSCPLGEAPSPYNSRFESVAWSASACHDGMGWLTIGISGPDNGAVAVLKYNGIITETIKSWKKRILRTQESECVCMNGSCFTIMTDGPSNGTASYKIFKIEKGKVTKTIELNAPNFHYEECSCYPDTGTVMCVCRDNWHGSNRPWVSFNQNLDYQIGYICSGVFGDNPRPKDGEGSCNPVTVDGADGVKGFSYKYGNGVWIGRTKSNRLRKGFEMIWDPNGWTNTDSDFSVKQDVVAITDWSGYSGSFVQHPELTGLDCIRPCFWVELVRGLPRENTTIWTSGSSISFCGVNSGTANWSWPDGAELPFTIDK

SEQ ID NO: 21483 - protein, 470 aa, Artificial Sequence; identical to SEQ ID NO: 21482
  derived and/or modified protein sequence (wt) from neuraminidase__InfluenzaA__AEX34443

SEQ ID NO: 21484 - protein, 469 aa, Artificial Sequence; identical to SEQ ID NO: 16603
  derived and/or modified protein sequence (wt) from neuraminidase__InfluenzaA__AEX34454

SEQ ID NO: 21485 - protein, 470 aa, Artificial Sequence
  derived and/or modified protein sequence (wt) from neuraminidase__InfluenzaA__AEX34465
MNPNQKIITIGSISIAIGIISLMLQIGNIISIWASHSIQTGSQNHTGICNQRIITYENSTWVNHTYVNINNTNVVAGKDKTSVTLAGNSSLCSISGWAIYTKDNSIRIGSKGDVFVIREPFISCSHLECRTFFLTQGALLNDKHSNGTVKDRSPYRALMSCPLGEAPSPYNSKFESVAWSASACHDGMGWLTIGISGPDNGAVAVLKYNGIITETIKSWKKRILRTQESECVCVNGSCFTIMTDGPSNGAASYKIFKIEKGKVTKSIELNAPNFHYEECSCYPDTGTVMCVCRDNWHGSNRPWVSFNQNLDYQIGYICSGVFGDNPRPKDGEGSCNPVTVDGADGIKGFSYKYGNGVWIGRTKSNRLRKGFEMIWDPNGWTDTDSDFSVKQDVVAITDWSGYSGSFVQHPELTGLDCMRPCFWVELVRGLPRENTTIWTSGSSISFCGVNSDTANWSWPDGAELPFTIDK

SEQ ID NO: 21486 - protein, 470 aa, Artificial Sequence; identical to SEQ ID NO: 21439
  derived and/or modified protein sequence (wt) from neuraminidase__InfluenzaA__AEX34476

SEQ ID NO: 21487 - protein, 470 aa, Artificial Sequence; identical to SEQ ID NO: 21441
  derived and/or modified protein sequence (wt) from neuraminidase__InfluenzaA__AEX34487

SEQ ID NO: 21488 - protein, 470 aa, Artificial Sequence; identical to SEQ ID NO: 21441
  derived and/or modified protein sequence (wt) from neuraminidase__InfluenzaA__AEX34498

SEQ ID NO: 21489 - protein, 470 aa, Artificial Sequence; identical to SEQ ID NO: 21441
  derived and/or modified protein sequence (wt) from neuraminidase__InfluenzaA__AEX34509

SEQ ID NO: 21490 - protein, 470 aa, Artificial Sequence; identical to SEQ ID NO: 21441
  derived and/or modified protein sequence (wt) from neuraminidase__InfluenzaA__AEX34520

SEQ ID NO: 21491 - protein, 470 aa, Artificial Sequence; identical to SEQ ID NO: 21441
  derived and/or modified protein sequence (wt) from neuraminidase__InfluenzaA__AEX34531

SEQ ID NO: 21492 - protein, 470 aa, Artificial Sequence; identical to SEQ ID NO: 21441
  derived and/or modified protein sequence (wt) from neuraminidase__InfluenzaA__AEX34542

SEQ ID NO: 21493 - protein, 470 aa, Artificial Sequence; identical to SEQ ID NO: 21441
  derived and/or modified protein sequence (wt) from neuraminidase__InfluenzaA__AEX34553

SEQ ID NO: 21494 - protein, 470 aa, Artificial Sequence; identical to SEQ ID NO: 21441
  derived and/or modified protein sequence (wt) from neuraminidase__InfluenzaA__AEX34564

SEQ ID NO: 21495 - protein, 470 aa, Artificial Sequence; identical to SEQ ID NO: 21441
  derived and/or modified protein sequence (wt) from neuraminidase__InfluenzaA__AEX34575

SEQ ID NO: 21496 - protein, 470 aa, Artificial Sequence; identical to SEQ ID NO: 21441
  derived and/or modified protein sequence (wt) from neuraminidase__InfluenzaA__AEX34586

SEQ ID NO: 21497 - protein, 470 aa, Artificial Sequence; identical to SEQ ID NO: 21441
  derived and/or modified protein sequence (wt) from neuraminidase__InfluenzaA__AEX34597

SEQ ID NO: 21498 - protein, 470 aa, Artificial Sequence; identical to SEQ ID NO: 21441
  derived and/or modified protein sequence (wt) from neuraminidase__InfluenzaA__AEX34608

SEQ ID NO: 21499 - protein, 470 aa, Artificial Sequence; identical to SEQ ID NO: 21441
  derived and/or modified protein sequence (wt) from neuraminidase__InfluenzaA__AEX34619

SEQ ID NO: 21500 - protein, 470 aa, Artificial Sequence; identical to SEQ ID NO: 21441
  derived and/or modified protein sequence (wt) from neuraminidase__InfluenzaA__AEX34630

SEQ ID NO: 21501 - protein, 470 aa, Artificial Sequence; identical to SEQ ID NO: 21441
  derived and/or modified protein sequence (wt) from neuraminidase__InfluenzaA__AEX34641

SEQ ID NO: 21502 - protein, 470 aa, Artificial Sequence
  derived and/or modified protein sequence (wt) from neuraminidase__InfluenzaA__AEX34653
MNPNQKIITIGSISIAIGIISLMLQVGNIISIWASHSIQTGSQNHTGICNQRIITYENSTWVNHTYVNINNTNVVAGKDKTSVALAGNSSLCSISGWAIYTKDNSIRIGSKGDVFVIREPFISCSHLECRTFFLTQGALLNDKHSNGTVKDRSPYRALMSCPLGEAPSPYNSKFESVAWSASACHDGLGWLTIGISGPDNGAVAVLKYNGIITETIKSWKKRILRTQESECVCVNGSCFTIMTDGPSNGAASYKIFKIEKGQVTKSVELNAPNFHYEECSCYPDTGTVMCVCRDNWHGSNRPWVSFNQDLDYQIGYICSGVFGDNPRPKDGKGSCNPVTVDGADGVKGFSYKYGNGVWIGRTKSNRLRKGFEMIWDPNGWTDTDSDFSVKQDVVAITDWSGYSGSFVQHPELTGLDCIRPCFWVELVRGLPRENTTIWTSGSSISFCGVDSDTANWSWPDGAELPFTIDK

SEQ ID NO: 21503 - protein, 470 aa, Artificial Sequence
  derived and/or modified protein sequence (wt) from neuraminidase__InfluenzaA__AEX34664
MNPNQKIITIGSISIAIGIISLMLQIGNIISIWASHSIQTGSQNHTGICNQRIITYENSTWVNHTYVNINNTNVVAGKDKTSVTLAGNSSLCSISGWAIYTKDNSIRIGSKGDVFVIREPFISCSHLECRTFFLTQGALLNDKHSNGTVKDRSPYRALMSCPLGEAPSPYNSKFESVAWSASACHDGMGWLTIGISGPDNGAVAVLKYNGIITETIKSWKKRILRTQESECVCVNGSCFTIMTDGPSNGAASYKIFKIEKGKVTKSRELNAPNFHYEECSCYPDTGTVMCVCRDNWHGSNRPWVSFNQNLDYQIGYICSGVFGDNPRPKDGKGSCNPVTADGADGVKGFSYKYGNGVWIGRTKSNRLRKGFEMIWDPNGWTDTDSDFSVKQDVVAITDWSGYSGSFVQHPELTGLDCIRPCFWVELVRGLPRENTTIWTSGSSISFCGVDSDTANWSWPDGAELPFTIDK

SEQ ID NO: 21504 - protein, 470 aa, Artificial Sequence; identical to SEQ ID NO: 21482
  derived and/or modified protein sequence (wt) from neuraminidase__InfluenzaA__AEX34686

SEQ ID NO: 21505 - protein, 470 aa, Artificial Sequence
  derived and/or modified protein sequence (wt) from neuraminidase__InfluenzaA__AEX34760
MNPNQKIITIGSISIAIGIISLILQIGNIISIWASHSIQTGSQNHTGICNQRIITYENSTWVNNTYVNINNTNVVVEKDKTSVTLAGNSSLCSISGWAIYTKDNSIRIGSKGDVFVIREPFISCSHLECRTFFLTQGALLNDKHSNGTVKDRSPYRALMSCPLGEAPSPYNSRFESVAWSASACHDGMGWLTIGISGPDNGAVAVLKYNGIITETIKSWKKRILRTQESECVCMNGSCFTIMTDGPSNGAASYKIFKIEKGKVTKTIELNAPNFHYEECSCYPDTGTVMCVCRDNWHGSNRPWVSFNQNLDYQIGYICSGVFGDNPRPKDGEGSCNPVTVDGADGVKGFSYKYGNGVWIGRTKSNRLRKGFEMIWDPNGWTNTDSDFSVKQDVVAITDWSGYSGSFVQHPELTGLDCIRPCFWVELVRGLPRENTTIWTSGSSISFCGVNSGTVNWSWPDGAELPFTIDK

SEQ ID NO: 21506 - protein, 470 aa, Artificial Sequence
  derived and/or modified protein sequence (wt) from neuraminidase__InfluenzaA__AEX34771
MNPNQKIITIGSISIAIGIISLILQIGNIISIWASHSIQTGSQNHTGICNQRIITYENSTWVNNTYVNINNTNVVVEKDKTSVTLAGNSSLCSISGWAIYTKDNSIRIGSKGDVFVIREPFISCSHLECRTFFLTQGALLNDKHSNGTVKDRSPYRALMSCPLGEAPSPYNSRFESVAWSASACHDGMGWLTIGISGPDNGAVAVLKYNGIITETIKSWKKRILRTQESECVCMNGSCFTIMTDGPSNGAASYKIFKIEKGKVTKTIELNAPNFHYEECSCYPDTGTVMCVCRDNWHGSNRPWVSFNQNLDYQIGYICSGVFGDNPRPKDGEGSCNPVTVDGADGVKGFSYKYGNGVWIGRTKSNRLRKGFEMIWDPNGWTNTDSDFSVKQDVVAITDWSGYSGSFVQHPELTGLDCIRPCFWVELVRGLPRENTTIWTSGSSISFCGVNSGTANWSWPDGAELPFTIDK

SEQ ID NO: 21507 - protein, 470 aa, Artificial Sequence; identical to SEQ ID NO: 17461
  derived and/or modified protein sequence (wt) from neuraminidase__InfluenzaA__AEX34782

SEQ ID NO: 21508 - protein, 470 aa, Artificial Sequence
  derived and/or modified protein sequence (wt) from neuraminidase__InfluenzaA__AEX34793
MNPNQKIITIGSISIAIGIISLMLQIGNIISIWASHSIQTGSQNHTGICNQRIITYENSTWVNHTYVNINNTNVVAGKDKTPVTLVGNSSLCSISGWAIYTKDNSIRIGSKGDVFVIREPFISCSHLECKTFFLTQGALLNDKHSNGTVKDRSPYRALMSCPLGEAPSPYNSKFESVAWSASACHDGIGWLTIGISGPDNGAVAVLKYKGIITGTIKSWKKQILRTQESECVCMNGSCFTIMTDGPSNGAASYKIFKIEKGKVTKSMELNAPNFHYEECSCYPDTGTVMCVCRDNWHGSNRPWVSFNQNLDYQIGYICSGVFGDNPRPKDREGSCNPVTVDGANGVKGFSYKYGNGVWIGRTKSNRIRKGFEMIWDPNGWTNTDSDFSVKQDIVAITDWSGYSGSFVQHPELTGLDCIRPCFWVELVRGLPRENTTIWTSGSSISFCGVNGDIANWSWPDGAELPFTIDK

SEQ ID NO: 21509 - protein, 470 aa, Artificial Sequence; identical to SEQ ID NO: 21508
  derived and/or modified protein sequence (wt) from neuraminidase__InfluenzaA__AEX34804

SEQ ID NO: 21510 - protein, 470 aa, Artificial Sequence
  derived and/or modified protein sequence (wt) from neuraminidase__InfluenzaA__AEX34815
MNPNQKIITIGSISIAIGIISLMLQIGNIISIWASHSIQTGSQNNTGICNQRIITYENSTWVNHTYVNINNTNVVAGEDKTSVTLTGNSSLCSISGWAIYTKDNSIRIGSKGDVFVIREPFISCSHLECRTFFLTQGALLNDKHSNGTVKDRSPYRALMSCPLGEAPSPYNSKFESVAWSASACHDGMGWLTIGISGPDNGAVAVLKYNGIITGTIKSWKKQILRTQESECVCMNGSCFTIMTDGPSNKAASYKIFKIEKGKVTKSIELNAPNFYYEECSCYPDTGIVMCVCRDNWHGSNRPWVSFNQNLDYQIGYICSGVFGDNPRPEDGEGSCNPVTVDGANGVKGFSYKYGNGVWIGRTKSNRLRKGFEMIWDPNGWTNTDSDFSVKQDVVAITDWSGYSGSFVQHPELTGLDCIRPCFWVELVRGLPRENTTIWTSGSSISFCGVNSDTANWSWPDGAELPFTIDK

SEQ ID NO: 21511 - protein, 470 aa, Artificial Sequence; identical to SEQ ID NO: 21508
  derived and/or modified protein sequence (wt) from neuraminidase__InfluenzaA__AEX34826

SEQ ID NO: 21512 - protein, 470 aa, Artificial Sequence; identical to SEQ ID NO: 21508
  derived and/or modified protein sequence (wt) from neuraminidase__InfluenzaA__AEX34837

SEQ ID NO: 21513 - protein, 470 aa, Artificial Sequence
  derived and/or modified protein sequence (wt) from neuraminidase__InfluenzaA__AEX34859
MNPNQKIITIGSTSIAIGIISLMLQIGNIISIWASHSIQTGSQNHTGICNQRIITYENSTWVNHTYVNINNTNVVAGKDKTPVTLIGNSSLCSISGWAIYTKDNSIRIGSKGDVFVIREPFISCSHLECKTFFLTQGALLNDKHSNGTVKDRSPYRALMSCPLGEAPSPYNSKFESVAWSASACHDGIGWLTIGISGPDNGAVAVLKYKGIITGTIKSWKKQILRTQESECVCMNGSCFTIMTDGPSNGAASYKIFKIEKGKVTKSMELNAPNFHYEECSCYPDTGTVMCVCRDNWHGSNRPWVSFNQNLDYQIGYICSGVFGDNPRPKDREGSCNPVTVDGANGVKGFSYKYGNGVWIGRTKSNRIRKGFEMIWDPNGWTNTDSDFSVKQDIVAITDWSGYSGSFVQHPELTGLDCIRPCFWVELVRGLPRENTTIWTSGSSISFCGVNGDIANWSWPDGAELPFTIDK

SEQ ID NO: 21514 - protein, 470 aa, Artificial Sequence
  derived and/or modified protein sequence (wt) from neuraminidase__InfluenzaA__AEX34870
MNPNQKIITIGSISIAIGIISLMLQIGNIISIWASHSIQTGSQNNTGICNQRIITYENSTWVNHTYVNINNTNVVAGEDKISVTLAGNSSLCSISGWAIYTKDNSIRIGSKGDVFVIREPFISCSHLECRTFFLTQGALLNDKHSNGTVKDRSPYRALMSCPLGEAPSPYNSKFESVAWSASACHDGIGWLTIGISGPDNGAVAVLKYNGIITGTIKSWKKQILRTQESECVCMNGSCFTIMTDGPSNKAASYKIFKIEKGKVTKSIELNAPNFYYEECSCYPDTGIVMCVCRDNWHGSNRPWVSFNQNLDYQIGYICSGVFGDNPRPEDGEGSCNPVTVDGANGVKGFSYKYGNGVWIGRTKSNRLRKGFEMIWDPNGWTNTDSDFSVKQDVVAITDWSGYSGSFVQHPELTGLDCIRPCFWVELVRGLPRENTTIWTSGSSISFCGVNSDTANWSWPDGAELPFTIDK

SEQ ID NO: 21515 - protein, 470 aa, Artificial Sequence
  derived and/or modified protein sequence (wt) from neuraminidase__InfluenzaA__AEX34881
MNPNQKIITIGSISIAIGIISLMLQIGNIISIWASHSIQTGSQNHTGICNQRIITYENSTWVNHTYVNINNTNVVAGKDKAPVTLIGNSSLCSISGWAIYTKDNSIRIGSKGDVFVIREPFISCSHLECKTFFLTQGALLNDKHSNGTVKDRSPYRALMSCPLGEAPSPYNSKFESVAWSASACHDGIGWLTIGISGPDNGAVAVLKYKGIITGTIKSWKKQILRTQESECVCMNGSCFTIMTDGPSNGAASYKIFKIEKGKVTKSMELNAPNFHYEECSCYPDTGTVMCVCRDNWHGSNRPWVSFNQNLDYQIGYICSGVFGDNPRPKDREGSCNPVTVDGANGVKGFSYKYGNGVWIGRTKSNRIRKGFEMIWDPNGWTNTDSDFSVKQDIVAITDWSGYSGSFVQHPELTGLDCIRPCFWVELVRGLPRENTTIWTSGSSISFCGVNGDIANWSWPDGAELPFTIDK

SEQ ID NO: 21516 - protein, 470 aa, Artificial Sequence
  derived and/or modified protein sequence (wt) from neuraminidase__InfluenzaA__AEX34892
MNPNQKIITIGSISIAIGIISLMLQIGNIISIWASHSIQTGSQNNTGICNQRIITYENSTWVNHTYVNINNTNVVAGEDKTSVTLAGNSSLCSISGWAIYTKDNSIRIGSKGDVFVIREPFISCSHLECRTFFLTQGALLNDKHSNGTVKDRSPYRALMSCPLGEAPSPYNSKFESVAWSASACHDGMGWLTIGISGPDNGAVAVLKYNGIITGTIKSWKKQILRTQESECVCMNGSCFTIMTDGPSNKAASYKIFKIEKGKVTKSIELNAPNFYYEECSCYPDTGIVMCVCRDNWHGSNRPWVSFNQNLDYQIGYICSGVFGDNPRPEDGEGSCNPVTVDGANGVKGFSYKYGNGVWIGRTKSNRLRKGFEMIWDPNGWTNTDSDFSVKQNVVAITDWSGYSGSFVQHPELTGLDCIRPCFWVELVRGLPRENTTIWTSGSSISFCGVNSDTANWSWPDGAELPFTIDK

SEQ ID NO: 21517 - protein, 470 aa, Artificial Sequence
  derived and/or modified protein sequence (wt) from neuraminidase__InfluenzaA__AEX34903
MNPNQKIITIGSISIAIGIISLMLQIGNIISIWASRSIQTGSQNHTGICNQRIITYENSTWVNHTYVNINNTNVVAGKDKTPVTLVGNSSLCSISGWAIYTKDNSIRIGSKGDVFVIREPFISCSHLECKTFFLTQGALLNDKHSNGTVKDRSPYRALMSCPLGEAPSPYNSKFESVAWSASACHDGIGWLTIGISGPDNGAVAVLKYKGIITGTIKSWKKQILRTQESECVCMNGSCFTIMTDGPSNGAASYKIFKIEKGKVTKSMELNAPNFHYEECSCYPDTGTVMCVCRDNWHGSNRPWVSFNQNLDYQIGYICSGVFGDNPRPKDREGSCNPVTVDGANGVKGFSYKYGNGVWIGRTKSNRIRKGFEMIWDPNGWTNTDSDFSVRQDIVAITDWSGYSGSFVQHPELTGLDCIRPCFWVELVRGLPRENTTIWTSGSSISFCGVNGDIANWSWPDGAELPFTIDK

SEQ ID NO: 21518 - protein, 470 aa, Artificial Sequence; identical to SEQ ID NO: 17461
  derived and/or modified protein sequence (wt) from neuraminidase__InfluenzaA__AEX34914

SEQ ID NO: 21519 - protein, 470 aa, Artificial Sequence; identical to SEQ ID NO: 17461
  derived and/or modified protein sequence (wt) from neuraminidase__InfluenzaA__AEX34925

SEQ ID NO: 21520 - protein, 470 aa, Artificial Sequence; identical to SEQ ID NO: 17461
  derived and/or modified protein sequence (wt) from neuraminidase__InfluenzaA__AEX34936

SEQ ID NO: 21521 - protein, 470 aa, Artificial Sequence; identical to SEQ ID NO: 17461
  derived and/or modified protein sequence (wt) from neuraminidase__InfluenzaA__AEX34947

SEQ ID NO: 21522 - protein, 470 aa, Artificial Sequence; identical to SEQ ID NO: 17461
  derived and/or modified protein sequence (wt) from neuraminidase__InfluenzaA__AEX34958

SEQ ID NO: 21523 - protein, 470 aa, Artificial Sequence; identical to SEQ ID NO: 17461
  derived and/or modified protein sequence (wt) from neuraminidase__InfluenzaA__AEX34969

SEQ ID NO: 21524 - protein, 470 aa, Artificial Sequence; identical to SEQ ID NO: 17461
  derived and/or modified protein sequence (wt) from neuraminidase__InfluenzaA__AEX34980

SEQ ID NO: 21525 - protein, 470 aa, Artificial Sequence; identical to SEQ ID NO: 17461
  derived and/or modified protein sequence (wt) from neuraminidase__InfluenzaA__AEX34991

SEQ ID NO: 21526 - protein, 470 aa, Artificial Sequence
  derived and/or modified protein sequence (wt) from neuraminidase__InfluenzaA__AEX35002
MNPNQKIITIGSISIAIGIISLMLQIGNIISIWASHSIQTGSQNHTGICNQRIITYENSTWVNHTYVNINNTNVVAGKDKTPVTLIGNSSLCSISGWAIYTKDNSIRIGSKGDVFVIREPFISCSHLECKTFFLTQGALLNDKHSNGTVKDRSPYRALMSCPLGEAPSPYNSKFESVAWSASACHDGIGWLTIGISGPDNGAVAVLKYKGIITGTIKSWKKQILRTQESECVCMNGSCFTIMTDGPSNGAASYKIFKIEKGKVTKSMELNAPNFHYEECSCYPDTGTVMCVCRDNWHGSNRPWVSFNQNLDYQIGYICSGVFGDNPRPKDREGSCNPVTVDGANGVKGFSYKYGNGVWIGRTKSNRIRKGFEMIWDPNGWTNTDSDFSVKQDIVAITDWSGYSGSFVQHPELTGLDCIRPCFWVELVRGLPRENTTIWTSGSSISFCGVNGDIANWSWPDGAELPFTIDK

SEQ ID NO: 21527 - protein, 470 aa, Artificial Sequence; identical to SEQ ID NO: 17461
  derived and/or modified protein sequence (wt) from neuraminidase__InfluenzaA__AEX35013

SEQ ID NO: 21528 - protein, 470 aa, Artificial Sequence; identical to SEQ ID NO: 17461
  derived and/or modified protein sequence (wt) from neuraminidase__InfluenzaA__AEX35024

SEQ ID NO: 21529 - protein, 470 aa, Artificial Sequence; identical to SEQ ID NO: 17461
  derived and/or modified protein sequence (wt) from neuraminidase__InfluenzaA__AEX35035

SEQ ID NO: 21530 - protein, 470 aa, Artificial Sequence; identical to SEQ ID NO: 17461
  derived and/or modified protein sequence (wt) from neuraminidase__InfluenzaA__AEX35046

SEQ ID NO: 21531 - protein, 470 aa, Artificial Sequence; identical to SEQ ID NO: 17461
  derived and/or modified protein sequence (wt) from neuraminidase__InfluenzaA__AEX35057

SEQ ID NO: 21532 - protein, 470 aa, Artificial Sequence; identical to SEQ ID NO: 17461
  derived and/or modified protein sequence (wt) from neuraminidase__InfluenzaA__AEX35068

SEQ ID NO: 21533 - protein, 470 aa, Artificial Sequence
  derived and/or modified protein sequence (wt) from neuraminidase__InfluenzaA__AEX35079
MNPNQKIITIGSISIAIGIISLMLQIGNIISMWASHSIQTGSQNNTGICNQRIITYENSTWVNHTYVNINNTNVVAGEDKTSVTLAGNSSLCSISGWAIYTKDNSIRIGSKGDVFVIREPFISCSHLECRTFFLTQGALLNDKHSNGTVKDRSPYRALMSCPLGEAPSPYNSKFESVAWSASACHDGMGWLTIGISGPDNGAVAVLKYNGIITGTIKSWKKQILRTQESECVCMNGSCFTIMTDGPSNKAASYKIFKIEKGKVTKSIELNAPNFYYEECSCYPDTGIVMCVCRDNWHGSNRPWVSFNQDLDYQIGYICSGVFGDNPRPEDGEGSCNPVTVDGANGVKGFSYKYGNGVWIGRTKSNRLRKGFEMIWDPNGWTNTDSDFSVKQDVVAITDWSGYSGSFVQHPELTGLDCIRPCFWVELVRGLPRENTTIWTSGSSISFCGVNSDTANWSWPDGAELPFTIDK

SEQ ID NO: 21534 - protein, 470 aa, Artificial Sequence; identical to SEQ ID NO: 21508
  derived and/or modified protein sequence (wt) from neuraminidase__InfluenzaA__AEX35090

SEQ ID NO: 21535 - protein, 470 aa, Artificial Sequence
  derived and/or modified protein sequence (wt) from neuraminidase__InfluenzaA__AEX35101
MNPNQKIITIGSISIAIGIISLMLQIGNIISIWASHSIQTGSQNNTGICNQRIITYENSTWVNHTYVNINNTNVVAGEDKTSVTLAGNSSLCSISGWAIYTKDNSIRIGSKGDVFVIREPFISCSHLECRTFFLTQGALLNDKHSNGTVKDRSPYRALMSCPLGEAPSPYNSKFESVAWSASACHDGMGWLTIGISGPDNGAVAVLKYNGIITGTIKSWKKQILRTQESECVCMNGSCFTIMTDGPSNKAASYKIFKIEKGKVTKSIELNAPNFHYEECSCYPDTGIVMCVCRDNWHGSNRPWVSFNQNLDYQIGYICSGVFGDNPRPEDGEGSCNPVTVDGANGVKGFSYKYDNGVWIGRTKSNRLRKGFEMIWDPNGWTNTDSVFSVKQDVVAITDWSGYSGSFVQHPELTGLDCIRPCFWVELVRGLPRENTTIWTSGSSISFCGVNSDTANWSWPDGAELPFTIDK

SEQ ID NO: 21536 - protein, 470 aa, Artificial Sequence
  derived and/or modified protein sequence (wt) from neuraminidase__InfluenzaA__AEX35112
MNPNQKIITIGSISIAIGIISLMLQIGNIISIWASHSIQTGSQNNTGICNQRIITYENSTWVNHTYVNINNTNVVAGEDKTSVTLAGNSSLCSISGWAIYTKDNSIRIGSKGDVFVIREPFISCSHLECRTFFLTQGALLNDKHSNGTVKDRSPYRALMSCPLGEAPSPYNSKFESVAWSASACHDGMGWLTIGISGPDNGAVAVLKYNGIITGTIKSWKKQILRTQESECVCMNGSCFTIMTDGPSNKAASYKIFKIEKGKVTKSIELNASNFYYEECSCYPDTGIVMCVCRDNWHGSNRPWVSFNQNLDYQIGYICSGVFGDNPRPEDGEGSCNPVTVDGANGVKGFSYKYGNGVWIGRTKSNRLRKGFEMIWDPNGWTNTDSDFSVKQDVVAITDWSGYSGSFVQHPELTGLDCIRPCFWVELVRGLPRENTTIWTSGSSISFCGVNSDTANWSWPDGAELPFTIDK

SEQ ID NO: 21537 - protein, 470 aa, Artificial Sequence; identical to SEQ ID NO: 17461
  derived and/or modified protein sequence (wt) from neuraminidase__InfluenzaA__AEX35123

SEQ ID NO: 21538 - protein, 470 aa, Artificial Sequence
  derived and/or modified protein sequence (wt) from neuraminidase__InfluenzaA__AEX35145
MNPNQKIITIGSISIAIGIISLMLQIGNIISIWASHSIQTGSQNNTGICNQRIITYENSTWVNHTYVNINNTNVVAGEDKTSVTLAGNSSLCSISGWAIYTKDNSIRIGSKGDVFVIREPFISCSHLECRTFFLTQGALLNDKHSNGTVKDRSPYRALMSCPLGEAPSPYNSKFESVAWSASACHDGMGWLTIGISGPDNGAVAVLKYNGIITGTIKSWKKQILRTQESECVCMNGSCFTIMTDGPSNKAASYKIFKIEKGKVTKSIELNAPNFYYEECSCYPDTGIVMCVCRDNWHGSNRPWVSFNQNLDYQIGYICSGVFGDNPRPEDGEGSCNPVTVDGANGVKGFSYKYGNGVWIGRTKSNRLRKGFEMIWDPNGWTNTDSDFSVKQDIVAITDWSGYSGSFVQHPELTGLDCIRPCFWVELVRGLPRENTTIWTSGSSISFCGVNSDTANWSWPDGAELPFTIDK

SEQ ID NO: 21539 - protein, 470 aa, Artificial Sequence; identical to SEQ ID NO: 21508
  derived and/or modified protein sequence (wt) from neuraminidase__InfluenzaA__AEX35156

SEQ ID NO: 21540 - protein, 470 aa, Artificial Sequence; identical to SEQ ID NO: 17461
  derived and/or modified protein sequence (wt) from neuraminidase__InfluenzaA__AEX35167

SEQ ID NO: 21541 - protein, 470 aa, Artificial Sequence
  derived and/or modified protein sequence (wt) from neuraminidase__InfluenzaA__AEX35178
MNPNQKIITIGSISIAIGIISLMLQIGNIISIWASHSIQTGSQNHTGICNQRIITYENSTWVNHTYVNINNTNVVAGKDKTSVTLAGNSSLCSISGWAIYTKDNSIRIGSKGDVFVIREPFISCSHLECRTFFLTQGALLNDKHSNGTVKDRSPYRALMSCPLGEAPSPYNSKFESVAWSASACHDGMGWLTIGISGPDNGAVAVLKYNGIITETIKSWKERILRTQESECVCVNGSCFTIMTDGPSNGAASYKIFKIEKGKVTKSRELNAPNFHYEECSCYPDTGTVMCVCRDNWHGSNRPWVSFNQNLDYQIGYICSGVFGDNPRPKDGKGSCNPVTADGADGVKGFSYKYGNGVWIGRTKSNRLRKGFEMIWDPNGWTDTDSDFSVKQDVVAITDWSGYSGSFVQHPELTGLDCIRPCFWVELVRGLPRENTTIWTSGSSISFCGVDSDTANWSWPDGAELPFTIDK

SEQ ID NO: 21542 - protein, 470 aa, Artificial Sequence; identical to SEQ ID NO: 21482
  derived and/or modified protein sequence (wt) from neuraminidase__InfluenzaA__AEX35189

SEQ ID NO: 21543 - protein, 470 aa, Artificial Sequence; identical to SEQ ID NO: 21482
  derived and/or modified protein sequence (wt) from neuraminidase__InfluenzaA__AEX35200

SEQ ID NO: 21544 - protein, 470 aa, Artificial Sequence; identical to SEQ ID NO: 17461
  derived and/or modified protein sequence (wt) from neuraminidase__InfluenzaA__AEX35211

SEQ ID NO: 21545 - protein, 469 aa, Artificial Sequence
  derived and/or modified protein sequence (wt) from neuraminidase__InfluenzaA__AEX35222
MNPNQKIITIGSVSLTISTICFFMQIAILVTTVTLHFKQYECNSPPNNQVMLCEPTIIERNITEIVYLTNTTIEKEICPKLAEYRNWSKPQCNITGFAPFSKDNSIRLSAGGDIWVTREPYVSCDPDKCYQFALGQGTTLNNGHSNDTVHDRTPYRTLLMNELGVPFHLGTKQVCIAWSSSSCHDGKAWLHVCVTGDDENATASFIYNGRLVDSIGSWSKKILRTQESECVCINGTCTVVMTDGSASGKADTKILFIEEGKIVHTSTLSGSAQHVEECSCYPRYPGVRCVCRDNWKGSNRPIVDINIKDYSIVSSYVCSGLVGDTPRKNDSSSSSHCLDPNNEEGGHGVKGWAFDDGNDVWMGRTISEKLRSGYETFKVIEGWSKPNSKLQINRQVIVDRGNRSGYSGIFSVEGKSCINRCFYVELIRGRKQETEVLWTSNSIVVFCGTSGTYGTGSWPDGADINLMPI

SEQ ID NO: 21546 - protein, 470 aa, Artificial Sequence; identical to SEQ ID NO: 21441
  derived and/or modified protein sequence (wt) from neuraminidase__InfluenzaA__AEX35233

SEQ ID NO: 21547 - protein, 469 aa, Artificial Sequence
  derived and/or modified protein sequence (wt) from neuraminidase__InfluenzaA__AEX35244
MNPNQKIITIGSVSLTISTICFFMQIAILINTVTLHFKQYEFNSPPNNQVMLCEPTIIERNITEIVYLTNTTIEKEICPKLAEYRNWSKPQCNITGFAPFSKDNSIRLSAGGDIWVTREPYVSCDPDKCYQFALGQGTTLNNVHSNDTVHDRTPYRTLLMNELGVPFHLGTKQVCIAWSSSSCHDGKAWLHVCVTGDDKNATASFIYNGRLVDSIVSWSKKILRTQESECVCINGTCTVVMTDGSASGKADTKILFIEEGKIVHTSTLSGSAQHVEECSCYPRYPGVRCVCRDNWKGSNRPIVDINIKDYSIVSSYVCSGLVGDTPRKNDSSSSSHCLDPNNEEGGNGVKGWAFDDGNDVWMGRTISEKLRSGYETFKVIEGWSNPNSKLQINRQVIVDRGNRSGYSGIFSVEGKSCINRCFYVELIRGRKQENEVLWTSNSIVVFCGTSGTYGTGSWPDGADINLMPV

SEQ ID NO: 21548 - protein, 469 aa, Artificial Sequence; identical to SEQ ID NO: 15929
  derived and/or modified protein sequence (wt) from neuraminidase__InfluenzaA__AEX35255

SEQ ID NO: 21549 - protein, 470 aa, Artificial Sequence; identical to SEQ ID NO: 21441
  derived and/or modified protein sequence (wt) from neuraminidase__InfluenzaA__AEX35266

SEQ ID NO: 21550 - protein, 470 aa, Artificial Sequence; identical to SEQ ID NO: 21441
  derived and/or modified protein sequence (wt) from neuraminidase__InfluenzaA__AEX35277

SEQ ID NO: 21551 - protein, 469 aa, Artificial Sequence
  derived and/or modified protein sequence (wt) from neuraminidase__InfluenzaA__AEX35288
MNPNQKIITIGSVSLTISTICFFMQIAILITTVTLHFKQYEFNSPPNNQVMLCEPTIIERNITEIVYLTNTTIEKEICPKLAEYRNWSKPQCDITGFAPFSKDNSIRLSAGGDIWVTREPYVSCDPDKCYQFALGQGTTLNNVHSNDTVHNRTPYRTLLMNELGVPFHLGTKQVCIAWSSSSCHDGKAWLHVCVTGDDKNATASFIYNGRLVDSIVSWSKKILRTQESECVCINGTCTVVMTDGSASGKADTKILFIEEGKIVHTSTLSGSAQHVEECSCYPRYPGVRCVCRDNWKGSNRPIVDINIKDYSIVSSYVCSGLVGDTPRKNDSSSSSHCLDPNNEEGGHGVKGWAFDDGNDVWMGRTISEKLRSGYETFKVIEGWSNPNSKLQINRQVIVDRGNRSGYSGIFSVEGKSCINRCFYVELIRGRKEETEVLWTSNSIVVFCGTSGTYGTGSWPDGADINLMPI

SEQ ID NO: 21552 - protein, 469 aa, Artificial Sequence; identical to SEQ ID NO: 14714
  derived and/or modified protein sequence (wt) from neuraminidase__InfluenzaA__AEX35299

SEQ ID NO: 21553 - protein, 469 aa, Artificial Sequence
  derived and/or modified protein sequence (wt) from neuraminidase__InfluenzaA__AEX35310
MNPNQKIITIGSVSLTISTICFFMQIAILITTVTLHFKQYEFNSPPNNQVMLCEPTIIERNITEIVYLTNTTIEKEICPKLAEYRNWSKPQCNITGFAPFSKDNSIRLSAGGDIWVTREPYVSCDPDKCYQFALGQGTTLNNVHSNDTVHDRTPYRTLLMNELGVPFHLGTKQVCIAWSSSSCHDGKAWLHVCVTGDDENATASFIYNGRLVDSIVSWSKKILRTQESECVCINGTCTVVMTDGSASGKADTKILFIEEGKIVHTSTLSGSAQHVEECSCYPRYPGVRCVCRDNWKGSNRPIVDINIKDYSIVSSYVCSGLVGDTPRKNDSSSSSHCLDPNNEEGGHGVKGWAFDDGDDVWMGRTISEKLRSGYETFKVIEGWSNPNSKLQINRQVIVDRGNRSGYSGIFSVEGKSCINRCFYVELIRGRNQETEVLWTSNSIVVFCGTSGTYGTGSWPDGADINLMPI

SEQ ID NO: 21554 - protein, 469 aa, Artificial Sequence; identical to SEQ ID NO: 14714
  derived and/or modified protein sequence (wt) from neuraminidase__InfluenzaA__AEX35321

SEQ ID NO: 21555 - protein, 469 aa, Artificial Sequence; identical to SEQ ID NO: 15929
  derived and/or modified protein sequence (wt) from neuraminidase__InfluenzaA__AEX35332

SEQ ID NO: 21556 - protein, 469 aa, Artificial Sequence; identical to SEQ ID NO: 15929
  derived and/or modified protein sequence (wt) from neuraminidase__InfluenzaA__AEX35343

SEQ ID NO: 21557 - protein, 469 aa, Artificial Sequence
  derived and/or modified protein sequence (wt) from neuraminidase__InfluenzaA__AEX35354
MNPNQKIITIGSVSLTISTICFFMQIAILITTVTLHFKQYEFNSPPNNQVMLCEPTIIERNITEIVYLTNTTIEKEICPKLAEYRNWSKPQCDITGFAPFSKDNSIRLSAGGDIWVTREPYVSCDPDKCYQFALGQGTTLNNVHSNDTVHDRTPYRTLLMNELGVPFHLGTKQVCIAWSSSSCHDGKAWLHVCVTGDDKNATASFIYNGRLVDSIVSWSKKILRTQESECVCINGTCTVVMTDGSTSGKADTKILFIEEGKIVHTSTLSGSAQHVEECSCYPRYPGVRCVCRDNWKGSNRPIVDINIKDYSIVSSYVCSGLVGDTPRKNDSSSSSHCLDPNNEEGGHGVKGWAFDDGNDVWMGRTISEKLRSGYETFKVIEGWSNPNSKLQINRQVIVDRGNRSGYSGIFSVEGKSCINRCFYVELIRGRKEETEVLWTSNSIVVFCGTSGTYGTGSWPDGADINLMPI

SEQ ID NO: 21558 - protein, 469 aa, Artificial Sequence; identical to SEQ ID NO: 14714
  derived and/or modified protein sequence (wt) from neuraminidase__InfluenzaA__AEX35365

SEQ ID NO: 21559 - protein, 469 aa, Artificial Sequence
  derived and/or modified protein sequence (wt) from neuraminidase__InfluenzaA__AEX35376
MNPNQKIITIGSVSLTISTICFFMQIAILITTVTLHFKQYEFNSPPNNQVMLCEPTIIERNITEIVYLTNTTIEKEICPKLAEYRNWSKPQCDITGFAPFSKDNSIRLSAGGDIWVTREPYVSCDPDKCYQFALGQGTTLNNVHSNDTVHERTPYRTLLMNELGVPFHLGTKQVCIAWSSSSCHDGKAWLHVCVTGDDKNATASFIYNGRLVDSIVSWSKKILRTQESECVCINGTCTVVMTDGSASGKADTKILFIEEGKIVHTSTLSGSAQHVEECSCYPRYPGVRCVCRDNWKGSNRPIVDINIKDYSIVSSYVCSGLVGDTPRKNDSSSSSHCLDPNNEEGGHGVKGWAFDDGNDVWMGRTISEKLRSGYETFKVIEGWSNPNSKLQINRQVIVDRGNRSGYSGIFSVEGKSCINRCFYVELIRGRKEETEVLWTSNSIVVFCGTSGTYGTGSWPDGADINLMPI

SEQ ID NO: 21560 - protein, 469 aa, Artificial Sequence; identical to SEQ ID NO: 14714
  derived and/or modified protein sequence (wt) from neuraminidase__InfluenzaA__AEX35387

SEQ ID NO: 21561 - protein, 469 aa, Artificial Sequence
  derived and/or modified protein sequence (wt) from neuraminidase__InfluenzaA__AEX35398
MNPNQKIITIGSVSLTISTICFFMQIAILITTVTLHFKQYEFNSPPNNQVMLCEPTIIERNITEIVYLTNTTIEKEICPKLAEYRNWSKPQCDITGFAPFSKDNSIRLSAGGDIWVTREPYVSCDPDKCYQFALGQGTTLNNVHSNDTVHDRTPYRTLLMNELGVPFHLGTKQVCIAWSSSSCHDGKAWLHVCVTGDDKNATASFIYNGRLVDSIVSWSKKILRTQESECVCINGTCAVVMTDGSASGKADTKILFIEEGKIVHTSTLSGSAQHVEECSCYPRYPGVRCVCRDNWKGSNRPIVDINIKDYSIVSSYVCSGLVGDTPRKNDSSSSSHCLDPNNEEGGHGVKGWAFDDGNDVWMGRTISEKLRSGYETFKVIEGWSNPNSKLQINRQVIVDRGNRSGYSGIFSVEGKSCINRCFYVELIRGRKEETEVLWTSNSIVVFCGTSGTYGTGSWPDGADINLMPI

SEQ ID NO: 21562 - protein, 469 aa, Artificial Sequence; identical to SEQ ID NO: 14714
  derived and/or modified protein sequence (wt) from neuraminidase__InfluenzaA__AEX35409

SEQ ID NO: 21563 - protein, 469 aa, Artificial Sequence; identical to SEQ ID NO: 21551
  derived and/or modified protein sequence (wt) from neuraminidase__InfluenzaA__AEX35420

SEQ ID NO: 21564 - protein, 469 aa, Artificial Sequence
  derived and/or modified protein sequence (wt) from neuraminidase__InfluenzaA__AEX35431
MNPNQKIITIGSVSLTISTICFFMQIAILITTVTLHFKQYEFNSPPNNQVMLCEPTIIERNITEIVYLTNTTIEKEICPKLAEYRNWSKPQCNITGFAPFSKDNSIRLSAGGDIWVTREPYVSCDPDKCYQFALGQGTTLNNVHSNDTVHDRTPYRTLLMNELGVPFHLGTKQVCIAWSSSSCHDGKAWLHVCVTGDDENATASFIYNGRLVDSIVSWSKKILRTQESECVCINGTCTVVMTDGSASGKADTKILFIEEGKIVHTSTLSGSAQHVEECSCYPRYPGVRCVCRDNWKGSNRPIVDINIKDYSIVSSYVCSGLVGDTPRKNDSSSSSHCLDPNNEEGGHGVKGWAFDDGNDVWMGRTISEKLRSGYETFKVIEGWSNPNSKLQINRQVIVDRGNRSGYSGIFSVEGKSCINRCFYVELIRGRKKETEVLWTSNSIVVFCGTSGTYGTGSWPDGADINLMPI

SEQ ID NO: 21565 - protein, 469 aa, Artificial Sequence; identical to SEQ ID NO: 14712
  derived and/or modified protein sequence (wt) from neuraminidase__InfluenzaA__AEX35453

SEQ ID NO: 21566 - protein, 469 aa, Artificial Sequence; identical to SEQ ID NO: 14712
  derived and/or modified protein sequence (wt) from neuraminidase__InfluenzaA__AEX35464

SEQ ID NO: 21567 - protein, 469 aa, Artificial Sequence; identical to SEQ ID NO: 14712
  derived and/or modified protein sequence (wt) from neuraminidase__InfluenzaA__AEX35475

SEQ ID NO: 21568 - protein, 469 aa, Artificial Sequence; identical to SEQ ID NO: 14712
  derived and/or modified protein sequence (wt) from neuraminidase__InfluenzaA__AEX35486

SEQ ID NO: 21569 - protein, 469 aa, Artificial Sequence
  derived and/or modified protein sequence (wt) from neuraminidase__InfluenzaA__AEX35497
MNPNQKIITIGSVSLTISTICFFMQIAILITTVTLHFKQYEFNSPPNNQVMLCEPTIIERNITEIVYLTNTTIEKEKCPKLAEYRNWSKPQCNITGFAPFSKDNSIRLSAGGDIWVTREPYVSCDPDKCYQFALGQGTTLNNVHSNDTVHDRTPYRTLLMNELGVPFHLGTKQVCIAWSSSSCHDGKAWLHVCVTGDDKNATASFIYNGRLVDSIVSWSKEILRTQESECVCINGTCTVVMTDGSASGKADTKILFIEEGKIVHTSTLSGSAQHVEECSCYPRYPGVRCVCRDNWKGSNRPIVDINIKDYSIVSSYVCSGLVGDTPRKNDSSSSSHCLDPNNEEGGHGVKGWAFDDGNDVWMGRTISEKLRSGYETFKVIEGWSNPNSKLQINRQVIVDRGNRSGYSGIFSVEGKSCINRCFYVELIRGRKEETEVLWTSNSIVVFCGTSGTYGTGSWPDGADINLMPI

SEQ ID NO: 21570 - protein, 469 aa, Artificial Sequence; identical to SEQ ID NO: 14712
  derived and/or modified protein sequence (wt) from neuraminidase__InfluenzaA__AEX35508

SEQ ID NO: 21571 - protein, 469 aa, Artificial Sequence; identical to SEQ ID NO: 21569
  derived and/or modified protein sequence (wt) from neuraminidase__InfluenzaA__AEX35519

SEQ ID NO: 21572 - protein, 469 aa, Artificial Sequence
  derived and/or modified protein sequence (wt) from neuraminidase__InfluenzaA__AEX35530
MNPNQKIITIGSVSLTISTICFFMQIAILITTVTLHFKQYEFNSPPNNQVMQCEPTIIERNITEIVYLTNTTIEKEICPKLAEYRNWSKPQCDITGFAPFSKDNSIRLSAGGDIWVTREPYVSCDPDKCYQFALGQGTTLNNVHSNDTVHDRTPYRTLLMNELGVPFHLGTKQVCIAWSSSSCHDGKAWLHVCVTGDDKNATASFIYNGRLVDSIVSWSKEILRTQESECVCINGTCTVVMTDGSASGKADTKILFIEEGKIVHTSTLSGSAQHVEECSCYPRYPGVRCVCRDNWKGSNRPIVDINTKDYSIVSSYVCSGLVGDTPRKNDSSSSSHCLNPNNEEGGHGVKGWAFDDGNDVWMGRTISEKLRLGYETFKVIEGWSNPNSKLQINRQVIVDRGNRSGYSGIFSVEGKSCINRCFYVELIRGRKEETEVLWTSNSIVVFCGTSGTYGTGSWPDGADINLMPI

SEQ ID NO: 21573 - protein, 469 aa, Artificial Sequence; identical to SEQ ID NO: 14712
  derived and/or modified protein sequence (wt) from neuraminidase__InfluenzaA__AEX35541

SEQ ID NO: 21574 - protein, 469 aa, Artificial Sequence
  derived and/or modified protein sequence (wt) from neuraminidase__InfluenzaA__AEX35552
MNPNQKIITIGSASLTISTICFFMQIAILITTVTLHFKQYEFNPPPNNQAMLCEPTIIERNITEIVYLTNTTIEKEICPKLAEYRNWSKPQCDITGFAPFSKDNSIRLSAGGDIWVTREPYVSCDPDKCYQFALGQGTTLNNVHSNDTVHDRTPYRTLLMNELGVPFHLGTKQVCIAWSSSSCHDGKAWLHVCVTGDDKNATASFIYNGRLVDSIVSWSKEILRTQESECVCINGTCTVVMTDGSASGKADTKILFIEEGKIVHTSTLSGSAQHVEECSCYPRYPGVRCVCRDNWKGSNRPIVDINIKDYSIASSYVCSGLVGDTPRKNDSSSSSHCLDPNNEEGGHGVKGWAFDDGNDVWMGRTISEKLRSGYETFKVIEGWSNPNSKLQINRQVIVDRGNRSGYSGIFSVEGKSCINRCFYVELIRGRKEETEVLWTSNSIVVFCGTSGTYGTGSWPDGADINLMPI

SEQ ID NO: 21575 - protein, 469 aa, Artificial Sequence
  derived and/or modified protein sequence (wt) from neuraminidase__InfluenzaA__AEX35563
MNPNQKIITIGSVSLTISTICFFMQIAILITTVTLHFKQYEFNSPPNNQVMLCEPTIIERNITEIVYLTNTTIEKEICPKLAEYRNWSKPQCDITGFAPFSKDNSIRLSAGGDIWVTREPYVSCDPDKCYQFALGQGTTLNNVHSNDTVHDRTPYRTLLMNELGVPFHLGTKQVCIAWSSSSCHDGKAWLHVCVTGDDKNATASFIYNGRLVDSIVSWSKEILRTQESECVCINGTCTVVMTDGSASGKADTKILFIEEGKIVHTSTLSGSAQHVEECSCYPRYPGVRCVCRDNWKGSNRPIVDINIKDYSIVSSYVCSGLVGDTPRKNDSSSSSHCLNPNNEEGGHGVKGWAFDDGNDVWMGRTISEKLRLGYETFKVIEGWSNPNSKLQINRQVIVDRGNRSGYSGIFSVEGKSCINRCFYVELIRGRKEETEVLWTSNSIVVFCGTSGTYGTGSWPDGADINLMPI

SEQ ID NO: 21576 - protein, 469 aa, Artificial Sequence; identical to SEQ ID NO: 21456
  derived and/or modified protein sequence (wt) from neuraminidase__InfluenzaA__AEX35585

SEQ ID NO: 21577 - protein, 469 aa, Artificial Sequence
  derived and/or modified protein sequence (wt) from neuraminidase__InfluenzaA__AEX35596
MNPNQKIITIGSVSLTISTICFFMQIAILITTVTLHFKQYEFNSPPNNQVMLCEPTIIERNITEIVYLTNTTIEKEICPKLAEYRNWSKPQCNITGFAPFSKDNSIRLSAGGDIWVTREPYVSCDPDKCYQFALGQGTTLNNVHSNDTVHDRTPYRTLLMNELGVPFHLGTKQVCIAWSSSSCHDGKAWLHVCVTGDDKNATASFIYNGRLVDSIVSWSKEILRTQESECVCINGTCTVVMTDGSASGKADTKILFIEEGKIVHTSTLSGSAQHVEECSCYPRYPGVRCVCRDNWKGSNRPIVDINIKDYSIVSSYVCSGLVGDTPRKNDSSSSSHCLDPNNEEGGHGVKGWAFDDGNDVWMGRTISEKLRSGYETFKVIEGWSNPDSKLQINRQVIVDRGNRSGYSGIFSVEGKSCINRCFYVELIRGRKEETEVLWTSNSIVVFCGTSGTYGTGSWPDGADINLMPI

SEQ ID NO: 21578 - protein, 469 aa, Artificial Sequence; identical to SEQ ID NO: 14712
  derived and/or modified protein sequence (wt) from neuraminidase__InfluenzaA__AEX35607

SEQ ID NO: 21579 - protein, 469 aa, Artificial Sequence
  derived and/or modified protein sequence (wt) from neuraminidase__InfluenzaA__AEX35618
MNPNQKIITIGSVSLTISTICFFMQIAILITTVTLHFKQYELNSPPNNQVMLCEPTIIERNITEIVYLTNTTIEKETCPKLAEYRNWSKPQCYITGFAPFSKDNSIRLSAGGDIWVTREPYVSCDPDKCYQFALGQGTTLNNVHSNDTVRDRTPYRTLLMNELGVPFHLGTKQVCIAWSSSSCHDGKAWLHVCITGDDKNATASFIYNGRLVDSIVSWSKEILRTQESECVCINGTCTVVMTDGSASGKADTKILFIEEGKIVHTSTLSGSAQHVEECSCYPRYPGVRCVCRDNWKGSNRPIVDINIKDHSIVSSYVCSGLVGDTPRKNDSSSSSHCLDPNNEEGGHGVKGWAFDDGNDVWMGRTISEKSRLGYETFKVIEGWSNPKSKLQINRQVIVDRDNRSGYSGIFSVEGKSCINRCFYVELIRGRKEETEVLWTSNSIVVFCGTSGTYGTGSWPDGADINLMPI

SEQ ID NO: 21580 - protein, 469 aa, Artificial Sequence
  derived and/or modified protein sequence (wt) from neuraminidase__InfluenzaA__AEX35640
MNPNQKIITIGSVSLTISTICFFMQIAILITTVTLHFKQYEFNSPPNNQVMLCEPTIIERNITEIVYLTNTTIEKEICPKLAEYRKWSKPQCNITGFAPFSKDNSIRLSAGGDIWVTREPYVSCDPDKCYQFALGQGTTLNNVHSNDTVRDRTPYRTLLMNELGVPFHLGTKQVCIAWSSSSCHDGKAWLHVCVTGDNKNATASFIYNGRLVDSIVSWSKEILRTQESECVCINGTCTVVMTDGSASGKADTKILFIEEGKIVHTSTLSGSAQHVEECSCYPRYPGVRCVCRDNWRGSNRPIVDINMKDYSIVSSYVCSGLVGDTPRKNDSSSSGHCLDPNDEEGGHGVKGWAFDDGNDVWMGRTISEKSRSGYETFKVIEGWSNPNSKLQINRQVIVDRGNRSGYSGIFSVEGKSCINRCFYVELIRGRKEETEVLWTSNSIVVFCGTSGTYGTGSWPDGADINLMPI

SEQ ID NO: 21581 - protein, 469 aa, Artificial Sequence
  derived and/or modified protein sequence (wt) from neuraminidase__InfluenzaA__AEX35651
MNPNQKIITIGSVSLTISTICFFMQIAILITTVTLHFKQYEFNSPPNNQVMLCEPTIIERNITEIVYLTNTTIEKEICPKLAEYRNWSKPQCDITGFAPFSKDNSIRLSAGGDIWVTREPYVSCDPDKCYQFALGQGTTLNNVHSNDTVRDRTPYRTLLMNELGVPFHLGTKQVCIAWSSSSCHDGKAWLHVCITGDDKNATASFIYNGRLVDSVVSWSKEILRTQESECVCINGTCTVVMTDGSASGKADTKILFIEEGKIVHTSTLSGSAQHVEECSCYPRYPGVRCVCRDNWKGSNRPIVDINIKDHSIVSSYVCSGLVGDTPRKNDSSSSSHCLDPNNEEGGHGVKGWAFDDGNDVWMGRTISEKSRLGYETFKVIEGWSNPKSKLQINRQVIVDRGNRSGYSGIFSVEDKSCINRCFYVELIRGRKEETEVLWTSNSIVVFCGTSGTYGTGSWPDGADINLMPI

SEQ ID NO: 21582 - protein, 469 aa, Artificial Sequence; identical to SEQ ID NO: 15884
  derived and/or modified protein sequence (wt) from neuraminidase__InfluenzaA__AEX36105

SEQ ID NO: 21583 - protein, 469 aa, Artificial Sequence
  derived and/or modified protein sequence (wt) from neuraminidase__InfluenzaA__AEX36116
MNPNQKIITIGSVSLTISTICFFMQIAILITTVTLHFKQYEFNSPPNNQVMLCEPTIIERNITEIVYLTNTTIEKEICPKLAEYRNWSKPQCDITGFAPFSKDNSIRLSAGGDIWVTREPYVSCDPDKCYQFALGQGTTLNNVHSNDTVRNRTPYRTLLMNELGVPFHLGTKQVCIAWSSSSCHDGKAWLHVCITGDDKNATASFIYNGRLVDSIVSWSKEILRTQESECVCINGTCTVVMTDGSASGEADTKILFIEEGKIVHTSTLSGSAQHVEECSCYPRYPGVRCVCRDNWKGSNRPIVDINIKDHSIVSSYVCSGLVGDTPRKNDSSSSSHCLDPNNEEGGHGVKGWAFDDGNDVWMGRTISEKSRLGYETFKVIEGWSNPKSKLQINRQVIVDRGNRSGYSGIFSVEGKSCINRCFYVELIRGRKEETEVLWTSNSIVVFCGTSGTYGTGSWPDGADINLMPI

SEQ ID NO: 21584 - protein, 469 aa, Artificial Sequence
  derived and/or modified protein sequence (wt) from neuraminidase__InfluenzaA__AEX36127
MNPNQKIITIGSVSLTISTICFFMQIAILITTVTLHFKQYEFNSPPNNQVMLCEPTIIERNITEIVYLTNTTIEKEICPKLAEYRNWLKPQCDITGFAPFSKDNSIRLSAGGDIWVTREPYVSCDPDKCYQFALGQGTTLNNVHSNDTVRDRTPYRTLLMNELGVPFHLGTKQVCIAWSSSSCHDGKAWLHVCITGDDKNATASFIYNGRLVDSVVSWSKEILRTQESECVCINGTCTVVMTDGSASGKADTKILFIEEGKIVHTSTLSGSAQHVEECSCYPRYPGVRCVCRDNWKGSNRPIVDINIKDHSIVSSYVCSGLVGDTPRKNDSSSSSHCLDPNNEEGGHGVKGWAFDDGDDVWMGRTISEKSRLGYETFKVIEGWSNPKSKLQINRQVIVDRGNRSGYSGIFSVEGKSCINRCFYVELIRGRKEETEVLWTSNSIVVFCGTSGTYGTGSWPDGADINLMPI

SEQ ID NO: 21585 - protein, 469 aa, Artificial Sequence
  derived and/or modified protein sequence (wt) from neuraminidase__InfluenzaA__AEX36149
MNPNQKIITIGSVSLTISTICFFMQIAILITTVTLHFKQYEFNSPPNNQVMLCEPTIIERNITEIVYLTNTTIEKEICPKLAEYRNWSKPQCDITGFAPFSKDNSIRLSAGGDIWVTREPYVSCDPDKCYQFALGQGTTLNNVHSNDTVRDRTPYRTLLMNELGVPFHLGTKQVCIAWSSSSCHDGKAWLHVCITGDDKNATASFIYNGRLVDSVVSWSKEILRTQESECVCINGTCTVVMTDGSASGKADTKILFIEEGKIVHTSTLSGSAQHVEECSCYPRYPGVRCVCRDNWKGSNRPIVDINIKDHSIVSSYVCSGLVGDTPRKNDSSSSSHCLDPNNEEGGHGVKGWAFDDGNDVWMGRTISEKSRLGYETFKVIEGWSNPKSKLQINRQVIVDRGNRSGYSGIFSVEDKSCINRCFYVELIRGRKEETEVLWTTNSIVVFCGTSGTYGTGSWPDGADINLMPI

SEQ ID NO: 21586 - protein, 469 aa, Artificial Sequence; identical to SEQ ID NO: 16512
  derived and/or modified protein sequence (wt) from neuraminidase__InfluenzaA__AEX36160

SEQ ID NO: 21587 - protein, 469 aa, Artificial Sequence
  derived and/or modified protein sequence (wt) from neuraminidase__InfluenzaA__AEX36171
MNPNQKIITIGSVSLTISTICFFMQIAILITTVTLHFKQYEFSSPPNNQVMLCEPTIIERNITEIVYLTNTTIEKEICPKLAEYRNWSKPQCDITGFAPFSKDNSIRLSAGGDIWVTREPYVSCDPDKCYQFALGQGTTLNNVHSNDTVHNRTPYRTLLMNELGVPFHLGTKQVCIAWSSSSCHDGKAWLHVCVTGDDKNATASFIYNGRLVDSIVSWSKEILRTQESECVCINGTCAVVMTDGSASGKADTKILFIEEGKIVHTSTLSGSAQHVEECSCYPRYPGVRCVCRDNWKGSNRPIVDINIKDYSIVSRYVCSGLVGDTPRKNDSSSSSHCLDPNNEEGGHGVKGWAFDDGDDVWMGRTISEKSRSGYETFKVIEGWSNPNSKLQINRQVIVDRGNRSGYSGIFSVEGKSCINRCFYVELIRGRKEETEVLWTSNSIVVFCGTSGTYGTGSWPDGADINLMPI

SEQ ID NO: 21588 - protein, 469 aa, Artificial Sequence
  derived and/or modified protein sequence (wt) from neuraminidase__InfluenzaA__AEX36193
MNPNQKIITIGSVSLTISTICFFMQIAILITTVTLHFKQYEFNSSPNNQVMLCEPTIIERNITEIVYLTNTTIEKEICPKLAEYRNWSKPQCDITGFAPFSKDNSIRLSAGGDIWVTREPYVSCDPDKCYQFALGQGTTLNNVHSNNTVRDRTPYRTLLMNELGVPFHLGTKQVCIAWSSSSCHDGKAWLHVCITGDDKNATASFIYNGMLVDSIVSWSKEILRTQESECVCINGTCTVVMTDGSASGKADTKILFIEEGKIVHTSTLSGSAQHVEECSCYPRYPGVRCVCRDNWKGSNRPIVDINIKDHSIVSSYVCSGLVGDTPRKNDSSSSSHCLDPNNEEGGHGVKGWAFDDGNDVWMGRTISEKSRLGYETFKVIEGWSNPKSKLQINRQVIVDRGNRSGYSGIFSVEGKSCINRCFYVELIRGRKEETEVLWTSNSIVVFCGTSGTYGTGSWPDGADINLMPI

SEQ ID NO: 21589 - protein, 469 aa, Artificial Sequence
  derived and/or modified protein sequence (wt) from neuraminidase__InfluenzaA__AEX36204
MNPNQKIITIGSVSLTISTICFFMQIAILITTVTLHFKQYEFNSPPNNQVMLCEPAIIERNITEIVYLTNTTIEKEICPKLAEYRNWSKPQCDITGFAPFSKDNSIRLSAGGDIWVTREPYVSCDPDKCYQFALGQGTTLNNVHSNDTVHERTPYRTLLMNELGVPFHLGTKQVCIAWSSSSCHDGKAWLHVCVTGDDKNATASFIYNGRLVDSIVSWSKEILRTQESECVCINGTCTVVMTDGSASGKADTKILFIEEGKIVHTSTLSGSAQHVEECSCYPRYPGVRCVCRDNWKGSNRPIVDINIKDYSIVSRYVCSGLVGDTPRKNDSSSSSHCLDPNNEEGGHGVKGWAFDDGNDVWMGRTISEKSRSGYETFKVIEGWSNPNSKLQINRQVIVDRGNRSGYSGIFSVEGKSCINRCFYVELIRGRKEETEVLWTSNSIVVFCGTSGTYGTGSWPDGADINLMPI

SEQ ID NO: 21590 - protein, 469 aa, Artificial Sequence
  derived and/or modified protein sequence (wt) from neuraminidase__InfluenzaA__AEX36215
MNPNQKIITIGSVSLTISTICFFMQIAILITTVTLHFKQYEFSSPPNNQVMLCEPAIIEKNITEIVYLTNTTIEKEICPKLAEYRNWSKPQCDITGFAPFSKDNSIRLSAGGDIWVTREPYVSCDPDKCYQFALGQGTTLNNVHSNDTVHERTPYRTLLMNELGVPFHLGTKQVCIAWSSSSCHDGKAWLHVCVTGDDKNATASFIYNGRLVDSIVSWSKEILRTQESECVCINGTCTVVMTDGSASGKADTKILFIEEGKIVHTSTLSGSAQHVEECSCYPRYPGVRCVCRDNWKGSNRPIVDINIKDYSIVSRYVCSGLVGDTPRKNDSSSSSHCLDPNNEEGGHGVKGWAFDDGNDVWMGRTISEKSRSGYETFKVIEGWSNPNSKLQINRQVIVDRGNRSGYSGIFSVEGKSCINRCFYVELIRGRKEETEVLWTSNSIVVFCGTSGTYGTGSWPDGADINLMPI

SEQ ID NO: 21591 - protein, 469 aa, Artificial Sequence
  derived and/or modified protein sequence (wt) from neuraminidase__InfluenzaA__AEX36226
MNPNQKIITIGSVSLTISTICFFMQIAILITTVTLHFKQYEFSSPPNNQVMLCEPAIIERNITEIVYLTNTTIEKEICPKLAEYRNWSKPQCDITGFAPFSKDNSIRLSAGGDIWVTREPYVSCDPDKCYQFALGQGTTLNNVHSNDTVHNRTPYRTLLMNELGVPFHLGTKQVCIAWSSSSCHDGKAWLHVCVTGDDKNATASFIYNGRLVDSIVSWSKEILRTQESECVCINGTCTVVMTDGSASGKADTKILFIEEGKIVHTSTLSGSAQHVEECSCYPRYPGVRCVCRDNWKGSNRPIVDINIKDYSIVSRYVCSGIVGDTPRKNDSSSSSHCLDPNNEEGGHGVKGWAFDDGNDVWMGRTISEKSRSGYETFKVIEGWSNPNSKLQINRQVIVDRGNRSGYSGIFSVEGKSCINRCFYVELIRGRKEETEVLWTSNSIVVFCGTSGTYGTGSWPDGADINLMPI

SEQ ID NO: 21592 - protein, 469 aa, Artificial Sequence
  derived and/or modified protein sequence (wt) from neuraminidase__InfluenzaA__AEX36237
MNPNQKIITIGSVSLTISTICFFMQIAILITTVTLHFKQYEFNSPPNNQVMLCEPTIIERNITEIVYLTNTTIEKEICPKLAEYRKWSKPQCNITGFAPFSKDNSIRLSAGGDIWVTREPYVSCDPDKCYQFALGQGTTLNNVHSNDTVRERTPYRTLLMNELGVPFHLGTKQVCIAWSSSSCHDGKAWLHVCVTGDDKNATASFIYNGRLVDSIVSWSKEILRTQESECVCINGTCTVVMTDGSASGKADTKILFIEEGKIVHTSTLSGSAQHVEECSCYPRYPGVRCVCRDNWRGSNRPIVDINMKDYSIVSSYVCSGLVGDTPRKNDSSSSGHCLDPNDEEGGHGVKGWAFDDGNDVWMGRTISEKSRSGYETFKVIEGWSNPNSKLQINRQVIVDRGNRSGYSGIFSVEGKSCINRCFYVELIRGRKEETEVLWTSNSIVVFCGTSGTYGTGSWPDGADINLMPI

SEQ ID NO: 21593 - protein, 469 aa, Artificial Sequence
  derived and/or modified protein sequence (wt) from neuraminidase__InfluenzaA__AEX36248
MNPNQKIITIGSVSLTISTICFFMQIAILITTVTLHFKQYEFSSPPNNQVMLCEPAIIERNITEIVYLTNTTIEKEICPKLAEYRNWSKPQCDITGFAPFSKDNSIRLSAGGDIWVTREPYVSCDPDKCYQFALGQGTTLNNVHSNDTVHNRTPYRTLLMNELGVPFHLGTKQVCIAWSSSSCHDGKAWLHVCVTGDDKNATASFIYNGRLVDSIVSWSKEILRTQESECVCINGTCTVVMTDGSASGRADTKILFIEEGKIVHTSTLSGSAQHVEECSCYPRYPGVRCVCRDNWKGSNRPIVDINIKDYSIVSRYVCSGLVGDTPRKNDSSSSSHCLDPNNEEGGHGVKGWAFDDGNDVWMGRTISEKSRSGYETFKVIEGWSNPNSKLQINRQVIVDRGNRSGYSGIFSVEGKSCINRCFYVELIRGRKEETEVLWTSNSIVVFCGTSGTYGTGSWPDGADINLMPI

SEQ ID NO: 21594 - protein, 469 aa, Artificial Sequence; identical to SEQ ID NO: 16512
  derived and/or modified protein sequence (wt) from neuraminidase__InfluenzaA__AEX36259

SEQ ID NO: 21595 - protein, 469 aa, Artificial Sequence
  derived and/or modified protein sequence (wt) from neuraminidase__InfluenzaA__AEX36270
MNPNQKIITIGSVSLTISTICFFMQIAILITTVTLHFKQYEFSSPPNNQVMLCEPAIIERNITEIVYLTNTTIEKEICPKLAEYRNWSKPQCDITGFAPFSKDNSIRLSAGGDIWVTREPYVSCDPDKCYQFALGQGTTLNNVHSNDTVHGRTPYRTLLMNELGVPFHLGTKQVCIAWSSSSCHDGKAWLHVCVTGDDKNATASFIYNGRLVDSIVSWSKEILRTQESECVCINGTCTVVMTDGSASGKADTKILFIEEGKIVHTSTLSGSAQHVEECSCYPRYPGVRCVCRDNWKGSNRPIVDINIKDYSIVSRYVCSGLVGDTPRKNDSSSSSHCLDPNNEEGGHGVKGWAFDDGNDVWMGRTISEKSRSGYETFKVIEGWSNPNSKLQINRQVIVDRGNRSGYSGIFSVEGKSCINRCFYVELIRGREEETKVLWTSNSIVVFCGTSGTYGTGSWPDGADINLMPI

SEQ ID NO: 21596 - protein, 469 aa, Artificial Sequence
  derived and/or modified protein sequence (wt) from neuraminidase__InfluenzaA__AEX36281
MNPNQKIITIGSVSLTISTICFFMQIAILITTVTLHFKQYEFSSPPNNQVMLCEPAIIERNITEIVYLTNTTIEKEICPKLAEYRNWSKPQCDITGFAPFSKDNSIRLSAGGDIWVTREPYVSCDPDKCYQFALGQGTTLNNVHSNDTVHGRTPYRTLLMNELGVPFHLGTKQVCIAWSSSSCHDGKAWLHVCVTGDDKNATASFIYNGRLVDSIVSWSKEILRTQESECVCINGTCTVVMTDGSASGKADTKILFIEEGKIVHTSTLSGSAQHVEECSCYPRYPGVRCVCRDNWKGSNRPIVDINIKDYSIVSRYVCSGLVGDTPRKNDSSSSSHCLDPNNEEGGHGVKGWAFDDGNDVWMGRTISEKSRSGYETFKVIEGWSNPNSKLQINRQVIVDRGNRSGYSGIFSVEGKSCINRCFYVELIRGRKEETEVLWTSNSIVVFCGTSGTYGTGSWPDGADINLMPI

SEQ ID NO: 21597 - protein, 469 aa, Artificial Sequence; identical to SEQ ID NO: 21596
  derived and/or modified protein sequence (wt) from neuraminidase__InfluenzaA__AEX36292

SEQ ID NO: 21598 - protein, 469 aa, Artificial Sequence
  derived and/or modified protein sequence (wt) from neuraminidase__InfluenzaA__AEX36303
MNPNQKIITIGSVSLTISTICFFMQIAILITTVTLHFKQYEFSSPPNNQVMLCEPAIIERNITEIVYLTNTTIEKEICPKLAEYRNWSKPQCDITGFAPFSKDNSIRLSAGGDIWVTREPYVSCDPDKCYQFALGQGTTLNNVHSNDTVHERTPYRTLLMNELGVPFHLGTKQVCIAWSSSSCHDGKAWLHVCVTGDDKNATASFIYNGRLVDSIVSWSKEILRTQESECVCINGTCTVVMTDGSASGKADTKILFIEEGKIVHTSTLSGSAQHVEECSCYPRYPGVRCVCRDNWKGSNRPIVDINIKDYSIVSRYVCSGLVGDTPRKNDSSSSSHCLDPNNEEGGHGVKGWAFDDGNDVWMGRTISEKSRSGYETFKVIEGWSNPNSKLQINRQVIVDRGNRSGYSGIFSVEGKSCINRCFYVELIRGRKEETEVLWTSNSIVVFCGTSGTYGTGSWPDGADINLMPI

SEQ ID NO: 21599 - protein, 469 aa, Artificial Sequence
  derived and/or modified protein sequence (wt) from neuraminidase__InfluenzaA__AEX36314
MNPNQKIITIGSVSLTISTICFFMQIAILITTVTLHFKQYEFSSPPNNQVMLCEPTIIERNITEIVYLTNTTIEKEICPKLAEYRNWSKPQCDITGFAPFSKDNSIRLSAGGDIWVTREPYVSCDPDKCYQFALGQGTTLNNVHSNDTVHNRTPYRTLLMNELGVPFHLGTKQVCIAWSSSSCHDGKAWLHVCVTGDDKNATASFIYNGRLVDSIVSWSKEILRTQESECVCINGTCAVVMTDGSASGKADTKILFIEEGKIVHTSTLSGSAQHVEECSCYPRYPGVRCVCRDNWKGSNRPIVDINIKDYSIVSRYVCSGLVGDTPRKNDSSSSSHCLDPNNEEGDHGVKGWAFDDGNDVWMGRTISEKSRSGYETFKVIEGWSNPNSKLQINRQVIVDRGNRSGYSGIFSVEGKSCINRCFYVELIRGRKEETEVLWTSNSIVVFCGTSGTYGTGSWPDGAEINLMPI

SEQ ID NO: 21600 - protein, 469 aa, Artificial Sequence; identical to SEQ ID NO: 21596
  derived and/or modified protein sequence (wt) from neuraminidase__InfluenzaA__AEX36336

SEQ ID NO: 21601 - protein, 469 aa, Artificial Sequence
  derived and/or modified protein sequence (wt) from neuraminidase__InfluenzaA__AEX36347
MNPNQKIITIGSVSLTISTICFFMQIAILITTVTLHFKQYEFSSPPNNQVMLCEPIIIERNITEIVYLTNTTIEKEICPKLAEYRNWSKPQCDITGFAPFSKDNSIRLSAGGDIWVTREPYVSCDPDKCYQFALGQGTTLNNVHSNDTVHNRTPYRTLLMNELGVPFHLGTKQVCIAWSSSSCHDGKAWLHVCVTGDDKNATASFIYNGRLVDSIVSWSKEILRTQESECVCINGTCAVVMTDGSASGKADTKILFIEEGKIVHASTLSGSAQHVEECSCYPRYPGVRCVCRDNWKGSNRPIVDINIKDYSIVSRYVCSGLVGDTPRKNDSSSSSHCLDPNNEEGGHGVKGWAFDDGNDVWMGRTISEKSRSGYETFKVIEGWSNPNSKLQINRQVIVDRGNRSGYSGIFSVEGKSCINRCFYVELIRGRKEETEVLWTSNSIVVFCGTSGTYGTGSWPDGADINLMPI

SEQ ID NO: 21602 - protein, 469 aa, Artificial Sequence; identical to SEQ ID NO: 15884
  derived and/or modified protein sequence (wt) from neuraminidase__InfluenzaA__AEX36358

SEQ ID NO: 21603 - protein, 469 aa, Artificial Sequence
  derived and/or modified protein sequence (wt) from neuraminidase__InfluenzaA__AEX36369
MNPNQKIITIGSVSLTISTICFFMQIAILITTVTLHFKQYEFNSPPNNQVMLCEPTIIERNITEIVYLTNTTIEKEICPKLAEYRNWSKPQCDITGFAPFSKDNSIRLSAGGDIWVTREPYVSCDPDKCYQFALGQGTTLNNVHSNDTVRNRTPYRTLLMNELGVPFHLGTKQVCIAWSSSSCHDGKAWLHVCITGDDKNATASFIYNGRLVDSIVSWSKEILRTQESECVCINGTCTVVMTDGSASGKADTKILFIEEGKIVHTSTLSGSAQHVEECSCYPRYPGVRCVCRDNWKGSNRPIVDINIKDHSIVSSYVCSGLVGDTPRKNDSSSSSHCLDPNNEEGGHGVKGWAFDDGNDVWMGRTISEKSRLGYETFKVIEGWSNPKSKLQINRQVIVDRGNRTGYSGIFSVEGKSCINRCFYVELIRGRKEETEVLWTSNSIVVFCGTSGTYGTGSWPDGADINLMPI

SEQ ID NO: 21604 - protein, 469 aa, Artificial Sequence
  derived and/or modified protein sequence (wt) from neuraminidase__InfluenzaA__AEX36391
MNPNQKIITIGSVSLTISTICFFMQIAILITTVTLHFKQYEFNSPPNNQVMLCEPTIIERNITEIVYLTNTTIEKEICPKLAEYRNWSKPQCDIAGFAPFSKDNSIRLSAGGDIWVTREPYVSCDPDKCYQFALGQGTTLNNVHSNDTVRNRTPYRTLLMNELGVPFHLGTKQVCIAWSSSSCHDGKAWLHVCITGDDKNATASFIYNGRLVDSIVSWSKEILRTQESECVCINGTCTVVMTDGSASGKADTKILFIEEGKIVHTSTLSGSAQHVEECSCYPRYPGVRCVCRDNWKGSNRPIVDINIKDHSIVSSYVCSGLVGDTPRKNDSSSSSHCLDPNNEEGGHGVKGWAFDDGNDVWMGRTISEKSRLGYETFKVIEGWSNPKSKLQINRQVIVDRGDRSGYSGIFSVEGKSCINRCFYVELIRGRKEETEVLWTSNSIVVFCGTSGTYGTGSWPDGADINLMPI

SEQ ID NO: 21605 - protein, 469 aa, Artificial Sequence
  derived and/or modified protein sequence (wt) from neuraminidase__InfluenzaA__AEX36402
MNPNQKIITIGSVSLTISTICFFMQIAILITTVTLHFKQYEFNSPPNNQVMLCEPTIIERNITEIVYLTNTTIEKEICPKLAEYRNWSKPQCDITGFAPFSKDNSIRLSAGGDIWVTREPYVSCDPDKCYQFALGQGTTLNNVHSNDTVRGRTPYRTLLMNELGVPFHLGTKQVCIAWSSSSCHDGKAWLHVCITGDDKNATASFIYNGRLVDSIVSWSKEILRTQESECVCINGTCTVVMTDGSASGKADTKILFIEEGKIVHTSTLSGSAQHVEECSCYPRFPGVRCVCRDNWKGSNRPIVDINIKDHSIVSSYVCSGLVGDTPRKNDSSSSSHCLDPNNEEGGHGVKGWAFDDGNDVWMGRTISEKSRLGYETFKVIEGWSNPKSKLQINRQVIVDRGNRTGYSGIFSVEGKSCINRCFYVELIRGRKEETEVLWTSNSIVVFCGTSGTYGTGSWPDGADINLMPI

SEQ ID NO: 21606 - protein, 469 aa, Artificial Sequence; identical to SEQ ID NO: 15884
  derived and/or modified protein sequence (wt) from neuraminidase__InfluenzaA__AEX36413

SEQ ID NO: 21607 - protein, 469 aa, Artificial Sequence
  derived and/or modified protein sequence (wt) from neuraminidase__InfluenzaA__AEX36424
MNPNQKIITIGSVSLTISTICFFMQIAILITTVTLHFKQYEFNSPPNNQVMLCEPTIIERNITEIVYLTNTTIEKEICSKLAEYRNWSKPQCDITGFAPFSKDNSIRLSAGGDIWVTREPYVSCDPDKCYQFALGQGTTLNNVHSNDTIRDRTPYRTLLMNELGVPFHLGTKQVCIAWSSSSCHDGKAWLHVCITGDDKNATASFIYNGRLVDSVVSWSKEILRTQESECVCINGTCTVVMTDGSASGKADTKILFIEEGKIVHTSTLSGSAQHVEECSCYPRYPGVRCVCRDNWKGSNRPIVDINIKDHSIVSSYVCSGLVGDTPRKNDSSSSSHCLDPNNEEGGHGVKGWAFDDGNDVWMGRTISEKSRLGYETFKVIEGWSNPKSKLQINRQVIVDRGNRSGYSGIFSVEGKSCINRCFYVELIRGRKEETEVLWTSNSIVVFCGTSGTYGTGSWPDGADINLMPI

SEQ ID NO: 21608 - protein, 469 aa, Artificial Sequence
  derived and/or modified protein sequence (wt) from neuraminidase__InfluenzaA__AEX36435
MNPNQKIITIGSVSLTISTICFFMQIAILITTVTLHFKQYEFNSPPNNQVMLCEPTIIERNITEIVYLTNTTIEKEICPKLAEYRNWSKPQCDITGFAPFSKDNSIRLSAGGDIWVTREPYVSCDPDKCYQFALGQGTTLNNVHSNDTVRDRTPYRTLLMNELGVPFHLGTKQVCIAWSSSSCHDGKAWLHVCITGDDKNATASFIYNGRLVDSVVSWSKEILRTQESECVCINGTCTVVMTDGSASGKADTKILFIKEGKIVHTSTLSGSAQHVEECSCYPRYPGVRCVCRDNWKGSNRPIVDINIKDHSIVSSYVCSGLVGDTPRKNDSSSSSHCLDPNNEEGGHGVKGWAFDDGNDVWMGRTISEKSRLGYETFKVIEGWSNSKSKLQINRQVIVDRGNRSGYSGIFSVEGKSCINRCFYVELIRGRKEETEVLWTSNSIVVFCGTSGTYGTGSWPDGADINLMPI

SEQ ID NO: 21609 - protein, 469 aa, Artificial Sequence; identical to SEQ ID NO: 16066
  derived and/or modified protein sequence (wt) from neuraminidase__InfluenzaA__AEX36446

SEQ ID NO: 21610 - protein, 469 aa, Artificial Sequence; identical to SEQ ID NO: 16066
  derived and/or modified protein sequence (wt) from neuraminidase__InfluenzaA__AEX36457

SEQ ID NO: 21611 - protein, 469 aa, Artificial Sequence
  derived and/or modified protein sequence (wt) from neuraminidase__InfluenzaA__AEX36468
MNPNQKIITIGSVSLTISTICFFMQIAILITTVTLHFKQYEFSSPPNNQVMLCEPTIIERNITEIVYLTNTTIEKEICPKLAEYRNWSKPQCDITGFAPFSKDNSIRLSAGGDIWVTREPYVSCDPDKCYQFALGQGTTLNNVHSNDTVHNRTPYRTLLMNELGVPFHLGTKQVCIAWSSSSCHDGKAWLHVCVTGDDKNATASFIYNGRLVDSIVSWSKEILRTQESECVCINGTCTVVMTDGSASGKADTKILFIEEGKIVHTSTLSGNAQHVEECSCYPRYPGVRCVCRDNWKGSNRPIVDINIKDYSIVSRYVCSGLVGDTPRKNDSSSSSHCLDPNNEEGGHGVKGWAFDDGNDVWMGRTISEKSRSGYETFKVIEGWSNPNSKLQINRQVIVDRGNRSGYSGIFSVEGKSCINRCFYVELIRGRKEETKVLWTSNSIVVFCGTSGTYGTGSWPDGADINLMPI

SEQ ID NO: 21612 - protein, 469 aa, Artificial Sequence
  derived and/or modified protein sequence (wt) from neuraminidase__InfluenzaA__AEX36479
MNPNQKIITIGSVSLTISTICFFMQIAILITTVTLHFKQYEFSSPPNNQVMLCEPTIIERNITEIVYPTNTTTEKEICPKLAEYRNWSKPQCDITGFAPFSKDNSIRLSAGGDIWVTREPYVSCDPDKCYQFALGQGTTLNNVHSNDTVHDRTPYRTLLMNELGVPFHLGTKQVCIAWSSSSCHDGKAWLHVCVTGDDKNATASFIYNGRLVDSIVSWSKEILRTQESECVCINGTCTVVMTDGSASGKADTKILFIEEGKIVHTSTLSGSAQHVEECSCYPRYPGVRCVCRDNWKGSNRPIVDINIKDYSIVSRYVCSGLVGDTPRKNDSSSSSHCLDPNNEEGGHGVKGWAFDDGNDVWMGRTISEKLRSGYETFKVIEGWSNPNSKLQINRQVIVDRGNRSGYSGIFSVEGKSCINRCFYVELIRGRKEETEVLWTSNSIVVFCGTSGTYGTGSWPDGADINLMPI

SEQ ID NO: 21613 - protein, 469 aa, Artificial Sequence
  derived and/or modified protein sequence (wt) from neuraminidase__InfluenzaA__AEX36490
MNPNQKIITIGSVSLTISTICFFMQIAILITTVTLHFKQYEFSYPPNNQVMLCEPTIIERNITEIVYLTNTTIEKEICPKLAEYRNWSKPQCDITGFAPFSKDNSIRLSAGGDIWVTREPYVSCDPDKCYQFALGQGTTLNNVHSNDTVHDRTPYRTLLMNELGVPFHLGTKQVCIAWSSSSCHDGKAWLHVCVTGDDKNATASFIYNGRLVDSIVSWSKEILRTQESECVCINGTCTVVMTDGSASGKADTKILFIEEGKIVHTSTLSGNAQHVEECSCYPRYPGVRCVCRDNWKGSNRPIVDINIKDYSIVSRYVCSGLVGDTPRKNDSSSSSHCLDPNNEEGGHGVKGWAFDDGNDVWMGRTISEKSRSGYETFKVIEGWSNPNSKLQINRQVIVDRGNRSGYSGIFSVEGKSCINRCFYVELIRGRKEETKVLWTSNSIVVFCGTSGTYGTGSWPDGADINLMPI

SEQ ID NO: 21614 - protein, 469 aa, Artificial Sequence
  derived and/or modified protein sequence (wt) from neuraminidase__InfluenzaA__AEX36501
MNPNQKIITIGSVSLTISTICFFMQIAILITTVTLHFKQYEFSSPPNNQVMLCEPAIIERNITEIVYLTNTTIEKEKCPKLAEYRNWSKPQCDITGFAPFSKDNSIRLSAGGDIWVTREPYVSCDPDKCYQFALGQGTTLNNVHSNDTVHGRTPYRTLLMNELGVPFHLGTKQVCIAWSSSSCHDGKAWLHVCVTGDDKNATASFIYNGRLVDSIVSWSKEILRTQESECVCINGTCTVVMTDGSASGKADTKILFIEEGKIVHTSTLSGSAQHVEECSCYPRYPGVRCVCRDNWKGSNRPIVDINIKDYSIVSRYVCSGLVGDTPRKSDSSSSSHCLDPNNEEGGHGVKGWAFDDGNDVWMGRTISEKSRSGYETFKVIEGWSNPNSKLQINRQVIVDRGNRSGYSGIFSVEGKSCINRCFYVELIRGRKEETEVLWTSNSIVVFCGTSGTYGTGSWPDGADINLMPI

SEQ ID NO: 21615 - protein, 469 aa, Artificial Sequence
  derived and/or modified protein sequence (wt) from neuraminidase__InfluenzaA__AEX36512
MNPNQKIITIGSVSLTISTICFFMQIAILITTVTLHFKQYEFSSPPNNQVMLCEPAIIERNITEIVYLTNTTIEKEICPKLAEYRNWSKPQCDITGFAPFSKDNSIRLSAGGDIWVTREPYVSCDPDKCYQFALGQGTTLNNVHSNDTVHDRTPYRTLLMNELGVPFHLGTKQVCIAWSSSSCHDGKAWLHVCVTGDDKNATASFIYNGRLVDSIVSWSKEILRTQESECVCINGTCTVVMTDGSASGKADTKILFIEEGKIVHTSTLSGSAQHVEECSCYPRYPGVRCVCRDNWKGSNRPIVDINIKDYSIVSRYVCSGLVGDTPRKNDSSSSSHCLDPNNEEGGHGVKGWAFDDGNDVWMGRTISEKSRSGYETFKVIEGWSNPNSKLQINRQVIVDRGNRSGYSGIFSVEGKSCINRCFYVELIRGRKEETEVLWTSNSIVVFCGTSGTYGTGSWPDGADINLMPI

SEQ ID NO: 21616 - protein, 469 aa, Artificial Sequence
  derived and/or modified protein sequence (wt) from neuraminidase__InfluenzaA__AEX36523
MNPNQKIITIGSVSLTISTICFFMQIAILITTVTLHFKQYEFNSPPNNQVMLCEPTIIERNITEIVYLTNTTIEKEICPKLAEYRNWSKPQCDITGFAPFSKDNSIRLSAGGDIWVTREPYVSCDPDKCYQFALGQGTTLNNVHSNDTVRDRTPYRTLLMNELGVPFHLGTKQVCIAWSSSSCHDGKAWLHVCITGDDKNATASFIYNGRLVDSVVSWSKEILRTQESECVCINGTCTVVMTDGSASGEADTKILFIEEGKIVHTSTLSGSAQHVEECSCYPRYPGVRCVCRDNWKGSNRPIVDINIKDHSIVSSYVCSGLVGDTPRKNDSSSSSHCLDPNNEEGGHGVKGWAFDDGNDVWMGRTISEKSRLGYETFKVIEGWSNPKSKLQINRQVIVDRGNRSGYSGIFSVEGKSCINRCFYVELIRGRKEETEVLWTSNSIVVFCGTSGTYGTGSWPDGADINLMPI

SEQ ID NO: 21617 - protein, 469 aa, Artificial Sequence; identical to SEQ ID NO: 16599
  derived and/or modified protein sequence (wt) from neuraminidase__InfluenzaA__AEX36534

SEQ ID NO: 21618 - protein, 469 aa, Artificial Sequence
  derived and/or modified protein sequence (wt) from neuraminidase__InfluenzaA__AEX36545
MNPNQKIITIGSVSLTISTICFFMQIAILITTVTLHFKQYEFNSPPNNQVMLCEPTIIERNITEIVYLTNTTIEKEICPKLAEYRNWSKPQCDITGFAPFSKDNSIRLSAGGDIWVTREPYVSCDPDKCYQFALGQGTTLNNVHSNDTVRDRTPYRTLLMNELGVPFHLGTKQVCIAWSSSSCHDGKAWLHVCITGDDKNATASFIYNGRLVDSVVSWSKEILRTQESECVCINGTCTVVMTDGSALGKADTKILFIEEGKIVHTSTLSGSAQHVEECSCYPRYPGVRCVCRDNWKGSNRPIVDINIKDHSIVSSYVCSGLVGDTPRKNDSSSSSHCLDPNNEEGGHGVKGWAFDDGNDVWMGRTISEKSRLGYETFKVIEGWSNPKSKLQINRQVIVDRGNRSGYSGIFSVEGKSCINRCFYVELIRGRKEETEVLWTSNSIVVFCGTSGTYGTGSWPDGADINLMPI

SEQ ID NO: 21619 - protein, 469 aa, Artificial Sequence; identical to SEQ ID NO: 16512
  derived and/or modified protein sequence (wt) from neuraminidase__InfluenzaA__AEX36556

SEQ ID NO: 21620 - protein, 469 aa, Artificial Sequence; identical to SEQ ID NO: 16512
  derived and/or modified protein sequence (wt) from neuraminidase__InfluenzaA__AEX36567

SEQ ID NO: 21621 - protein, 469 aa, Artificial Sequence
  derived and/or modified protein sequence (wt) from neuraminidase__InfluenzaA__AEX36578
MNPNQKIITIGSVSLTISTICFFMQIAILITTVTLHFKQYEFNSPPNNQVMLCEPTIIERNITEIVYLTNTTIEKEICPKLAEYRNWSKPQCDITGFAPFSKDNSIRLSAGGDIWVTREPYVSCDPDKCYQFALGQGTTLNNVHSNDTVRDRTPYRTLLMNELGVPFHLGTKQVCIAWSSSSCHDGKAWLHVCITGDDKNATASFIYNGRLVDSVVSWSKEILRTQESECVCINGTCTVVMTDGSASGKADTKILFIKEGKIVHTSTLSGSAQHVEECSCYPRYPGVRCVCRDNWKGSNRPIVDINIKDHSIVSSYVCSGLVGDTPRKNDSSSSSHCLDPNNEEGGHGVKGWAFDDGNDVWMGRTISEKSRLGYETFKVIEGWSNPKSKLQINRQVIVDRGNRSGYSGIFSVEGKSCINRCFYVELIRGRKEETEVLWTSNSIVVFCGTSGTYGTGSWPDGADINLMPI

SEQ ID NO: 21622 - protein, 469 aa, Artificial Sequence; identical to SEQ ID NO: 21621
  derived and/or modified protein sequence (wt) from neuraminidase__InfluenzaA__AEX36589

SEQ ID NO: 21623 - protein, 469 aa, Artificial Sequence
  derived and/or modified protein sequence (wt) from neuraminidase__InfluenzaA__AEX36600
MNPNQKIITIGSVSLTISTICFFMQIAILITTVTLHFKQYEFNSPPNNQVMLCEPTIIERNITEIVYLTNTTIEKEICPKLAEYRNWSKPQCDITGFAPFSKDNSIRLSAGGDIWVTREPYVSCDPDKCYQFALGQGTTLNNVHSNDTVRDRTPYRTLLMNELGVPFHLGTKQVCIAWSSSSCHDGKAWLHVCITGDDKNATASFIYNGRLVDSVVSWSKEILRTQESECVCINGTCTVVMTDGSASGKADTKILFIKEGKIVHTSTLSGSAQHVEECSCYPRYPGVRCVCRDNWKGSNRPIVDINIKDHSIVSSYVCSGLVGDTPRKNDSSSSSHCLDPNNEEGGHGVKGWAFDDGNNVWMGRTISEKSRLGYETFKVIEGWSNPKSKLQINRQVIVDRGNRSGYSGIFSVEGKSCINRCFYVELIRGRKEETEVLWTSNSIVVFCGTSGTYGTGSWPDGADINLMPI

SEQ ID NO: 21624 - protein, 469 aa, Artificial Sequence; identical to SEQ ID NO: 14714
  derived and/or modified protein sequence (wt) from neuraminidase__InfluenzaA__AEX36622

SEQ ID NO: 21625 - protein, 469 aa, Artificial Sequence
  derived and/or modified protein sequence (wt) from neuraminidase__InfluenzaA__AEX63619
MNPNQKIITIGSICMTIGIASLILQIGNIISIWISHSIQTENQNQPEICNQNVITYENNTWVNQTYVNVSNTNFVAEQAVASVKLAGNSSLCPVSGWAIYSKDNSVRIGSKGDVFVIREPFISCSHSECRTFFLTQGALLNDKHSNGTIKDRSPYRTLMSCPIGEVPSPYNSRFESVAWSASACHDGTSWLTIGISGPDNGAVAVLKYNGIITDTIKSWRKNILRTQESECACVNGSCFTVMTDGPSNGQASYKVFKIERGKVVKSVELNAPNYHYEECSCYPESSEITCVCRDNWHGSNRPWVSFNQNLEYQMGYICSGIFGDNPRPNDKTGSCGPVFSNGANGVKGFSFKYGNGVWIGRTKSTSSRMGFEMIWDPDGWTKTDDKFSVKQDIIGITDWSGYSGSFVQHPELTGLDCMRPCFWVELIRGRPKENTIWTSGSSISFCGVNSDTVGWSWPDGAELPFTIDK

SEQ ID NO: 21626 - protein, 454 aa, Artificial Sequence; identical to SEQ ID NO: 15719
  derived and/or modified protein sequence (wt) from neuraminidase__InfluenzaA__AEX92876

SEQ ID NO: 21627 - protein, 454 aa, Artificial Sequence; identical to SEQ ID NO: 15719
  derived and/or modified protein sequence (wt) from neuraminidase__InfluenzaA__AEX92887

SEQ ID NO: 21628 - protein, 454 aa, Artificial Sequence; identical to SEQ ID NO: 15719
  derived and/or modified protein sequence (wt) from neuraminidase__InfluenzaA__AEX92904

SEQ ID NO: 21629 - protein, 454 aa, Artificial Sequence; identical to SEQ ID NO: 15719
  derived and/or modified protein sequence (wt) from neuraminidase__InfluenzaA__AEX96924

SEQ ID NO: 21630 - protein, 469 aa, Artificial Sequence; identical to SEQ ID NO: 18469
  derived and/or modified protein sequence (wt) from neuraminidase__InfluenzaA__AEY69091

SEQ ID NO: 21631 - protein, 469 aa, Artificial Sequence; identical to SEQ ID NO: 16599
  derived and/or modified protein sequence (wt) from neuraminidase__InfluenzaA__AEY69101

SEQ ID NO: 21632 - protein, 469 aa, Artificial Sequence; identical to SEQ ID NO: 16599
  derived and/or modified protein sequence (wt) from neuraminidase__InfluenzaA__AEY69112

SEQ ID NO: 21633 - protein, 469 aa, Artificial Sequence
  derived and/or modified protein sequence (wt) from neuraminidase__InfluenzaA__AEY69145
MNTNQKIITIGSVSLTISTICFFMQIAILITTVTLHFKQYEFNSPPNNQVMLCEPTIIERNITEIVYLTNTTIEKEICPKLAEYRNWSKPQCDITGFAPFSKDNSIRLSAGGDIWVTREPYVSCDPDKCYQFALGQGTTINNVHSNNTVRDRTPYRTLLMNELGVPFHLGTKQVCIAWSSSSCHDGKAWLHVCITGDDKNATASFIYNGRLVDSVVSWSKEILRTQESECVCINGTCTVVMTDGSASGKADTKILFIEEGKIVHTSTLSGSAQHVEECSCYPRYPGVRCVCRDNWKGSNRPIVDINMKDHSIVSSYVCSGLVGDTPRKNDSSSSSHCLDPNNEEGGHGVKGWAFDDGNDVWMGRTISEKSRLGYETFKVIEGWSNPKSKLQINRQVIVDRGNRSGYSGIFSVEGKSCINRCFYVELIRGRKEETEVLWTSNSVVVFCGTSGTYGTGSWPDGADINLMPI

SEQ ID NO: 21634 - protein, 469 aa, Artificial Sequence; identical to SEQ ID NO: 16599
  derived and/or modified protein sequence (wt) from neuraminidase__InfluenzaA__AEY69156

SEQ ID NO: 21635 - protein, 469 aa, Artificial Sequence
  derived and/or modified protein sequence (wt) from neuraminidase__InfluenzaA__AEY69167
MNPNQKIITIGSVSLTISTICFFMQIAILITTVTLHFKQYEFNSPPNNQVMLCEPTIIERNITEIVYLTNTTIEKEICPKLAEYRNWSKPQCDITGFAPFSKDNSIRLSAGGDIWVTREPYVSCDPDKCYQFALGQGTTLNNVHSNNTVRDRTPYRTLLMNELGVPFHLGTKQVCIAWSSSSCHDGKAWLHVCITGDDKNATASFIYNGRLVDSVVSWSKEILRTQESECVCINGTCTVVMTDGSASGKADTKILFIEEGKIVHTSTLSGSAQHVEECSCYPRYPGVRCVCRDNWKGSNRPIVDINIKDHSIVSSYVCSGLVGDTPRKNDSSSSSHCLDPNNEEGGHGVKGWAFDDGNDVWMGRTISEKSRLGYETFKVIEGWSNPKSKLQINRQVIVDRGNRSGYSGIFSVEGKSCINRCFYVELIRGRKEETEVLWTSNSIVVFCGTSGTYGTGSWPDGADINLMPV

SEQ ID NO: 21636 - protein, 469 aa, Artificial Sequence; identical to SEQ ID NO: 21635
  derived and/or modified protein sequence (wt) from neuraminidase__InfluenzaA__AEY69178

SEQ ID NO: 21637 - protein, 469 aa, Artificial Sequence; identical to SEQ ID NO: 21635
  derived and/or modified protein sequence (wt) from neuraminidase__InfluenzaA__AEY69189

SEQ ID NO: 21638 - protein, 469 aa, Artificial Sequence
  derived and/or modified protein sequence (wt) from neuraminidase__InfluenzaA__AEY69211
MNPNQKIITIGSVSLTISTICFFMQIAILITTVTLHFKQYKFNSPPNNQVMLCEPTIIERNITEIVYLTNTTIEKEICPKLAEYRNWSKPQCDITGFAPFSKDNSIRLSAGGDIWVTREPYVSCDPDKCYQFALGQGTTLNNVHSNNTVRDRTPYRTLLMNELGVPFHLGTKQVCIAWSSSSCHDGKAWLHVCITGDDKNATASFIYNGRLVDSVVSWSKEILRTQESECVCINGTCTVVMTDGSASGKADTKILFIEEGKIVHTSTLSGSAQHVEECSCYPRYPGVRCVCRDNWKGSNRPIVDINIKDHSIVSSYVCSGLVGDTPRKNDSSSSSHCLDPNNEEGGHGVKGWAFDDGNDVWMGRTISEKSRLGYETFKVIEGWSNPKSKLQINRQVIVDRGNRSGYSGIFSVEGKSCINRCFYVELIRGRKEETEVLWTSNSIVVFCGTSGTYGTGSWPDGADINLMPV

SEQ ID NO: 21639 - protein, 469 aa, Artificial Sequence; identical to SEQ ID NO: 21635
  derived and/or modified protein sequence (wt) from neuraminidase__InfluenzaA__AEY69233

SEQ ID NO: 21640 - protein, 469 aa, Artificial Sequence; identical to SEQ ID NO: 21635
  derived and/or modified protein sequence (wt) from neuraminidase__InfluenzaA__AEY69272

SEQ ID NO: 21641 - protein, 469 aa, Artificial Sequence; identical to SEQ ID NO: 21635
  derived and/or modified protein sequence (wt) from neuraminidase__InfluenzaA__AEY69283

SEQ ID NO: 21642 - protein, 469 aa, Artificial Sequence
  derived and/or modified protein sequence (wt) from neuraminidase__InfluenzaA__AEY69294
MNPNQKIITIGSVSLTISTICFFMQTAILITTVTLHFKQCEFNSPPNNQVMLCEPTIIERNITEIVYLTNTTIEKEICPKLAEYRNWSKPQCDITGFAPFSKDNSIRLSAGGDIWVTREPYVSCDPDKCYQFALGQGTTLNNVHSNNTVRDRTPYRTLLMNELGVPFHLGTKQVCIAWSSSSCHDGKAWLHVCITGDDKNATASFIYNGRLVDSVVSWSKEILRTQESECVCINGTCTVVMTDGSASGKADTKILFIEEGKIVHTSTLSGSAQHVEECSCYPRYPGVRCVCRDNWKGSNRPIVDINIKDHSIVSSYVCSGLVGDTPRKNDSSSSSHCLDPNNEEGGNGVKGWAFDDGNDVWMGRTISEKSRLGYETFKVIEGWSNPKSKLQINRQVIVDRGNRSGYSGIFSVEGKSCINRCFYVELIRGRKEETEVLWTSNSIVVFCGTSGTYGTGSWPDGADINLMPI

SEQ ID NO: 21643 - protein, 469 aa, Artificial Sequence; identical to SEQ ID NO: 21642
  derived and/or modified protein sequence (wt) from neuraminidase__InfluenzaA__AEY69305

SEQ ID NO: 21644 - protein, 469 aa, Artificial Sequence; identical to SEQ ID NO: 21642
  derived and/or modified protein sequence (wt) from neuraminidase__InfluenzaA__AEY69316

SEQ ID NO: 21645 - protein, 469 aa, Artificial Sequence; identical to SEQ ID NO: 21642
  derived and/or modified protein sequence (wt) from neuraminidase__InfluenzaA__AEY69788

SEQ ID NO: 21646 - protein, 469 aa, Artificial Sequence; identical to SEQ ID NO: 16599
  derived and/or modified protein sequence (wt) from neuraminidase__InfluenzaA__AEY69799

SEQ ID NO: 21647 - protein, 469 aa, Artificial Sequence; identical to SEQ ID NO: 16599
  derived and/or modified protein sequence (wt) from neuraminidase__InfluenzaA__AEY69810

SEQ ID NO: 21648 - protein, 469 aa, Artificial Sequence; identical to SEQ ID NO: 21635
  derived and/or modified protein sequence (wt) from neuraminidase__InfluenzaA__AEY69832

SEQ ID NO: 21649 - protein, 469 aa, Artificial Sequence
  derived and/or modified protein sequence (wt) from neuraminidase__InfluenzaA__AEY69843
MNPNQKIITIGSVSLTISTICFFMQIAILITTVTLHFKQYEFNSPPNNQVMLCEPTIIERNITEIVYLTNTTIEKEICPKLAEYRNWSKPQCDITGFAPFSKDNSIRLSAGGDIWVTREPYVSCDPDKCYQFALGQGTTLNNVHSNNTVRDRTPYRTLLMNELGVPFHLGTKQVCIAWSSSSCHDGKAWLHVCIAGDDKNATASFIYNGRLVDSVVSWSKEILRTQESECVCINGTCTVVMTDGSASGKADTKILFIEEGKIVHTSTLSGSAQHVEECSCYPRYPGVRCVCRDNWKGSNRPIVDINIKDHSIVSSYVCSGLVGDTPRKNDSSSSSHCLDPNNEEGGHGVKGWAFDDGNDVWMGRTISEKSRLGYETFKVIEGWSNPKSKLQINRQVIVDRGNRSGYSGIFSVEGKSCINRCFYVELIRGRKEETEVLWTSNSIVVFCGTSGTYGTGSWPDGADINLMPV

SEQ ID NO: 21650 - protein, 469 aa, Artificial Sequence; identical to SEQ ID NO: 21635
  derived and/or modified protein sequence (wt) from neuraminidase__InfluenzaA__AEY69854

SEQ ID NO: 21651 - protein, 469 aa, Artificial Sequence; identical to SEQ ID NO: 21635
  derived and/or modified protein sequence (wt) from neuraminidase__InfluenzaA__AEY69876

SEQ ID NO: 21652 - protein, 469 aa, Artificial Sequence; identical to SEQ ID NO: 21635
  derived and/or modified protein sequence (wt) from neuraminidase__InfluenzaA__AEY69887

SEQ ID NO: 21653 - protein, 469 aa, Artificial Sequence; identical to SEQ ID NO: 21635
  derived and/or modified protein sequence (wt) from neuraminidase__InfluenzaA__AEY69898

SEQ ID NO: 21654 - protein, 469 aa, Artificial Sequence; identical to SEQ ID NO: 16599
  derived and/or modified protein sequence (wt) from neuraminidase__InfluenzaA__AEY69909

SEQ ID NO: 21655 - protein, 469 aa, Artificial Sequence
  derived and/or modified protein sequence (wt) from neuraminidase__InfluenzaA__AEY69942
MNPNQKIITIGSVSLTISTICFFMQIAILITTVTLHFKQYEFNSPPNNQVMLCEPTIIERNITEIVYLTNTTIEKEICPKLAEYRNWSKPQCDITGFAPFSKDNSIRLSDGGDIWVTREPYVSCDPDKCYQFALGQGTTLNNIHSNNTVRDRTPYRTLLMNELGVPFHLGTKQVCIAWSSSSCHDGKAWLHVCITGDDKNATASFIYNGRLVDSVVSWSKEILRTQESECVCINGTCTVVMTDGSASGKADTKILFIEEGKIVHTSTLSGSAQHVEECSCYPRYPGVRCVCRDNWKGSNRPIVDINIKDHSIVSSYVCSGLVGDTPRKNDSSSSSHCLDPNNEEGGHGVKGWAFDDGNDVWMGRTISEKSRLGYETFKVIEGWSNPKSKLQINRQVIVDRGNRSGYSGIFSVEGKSCINRCFYVELIRGRKEETEVLWTSNSIVVFCGTSGTYGTGSWPDGADINLMPV

SEQ ID NO: 21656 - protein, 469 aa, Artificial Sequence; identical to SEQ ID NO: 21655
  derived and/or modified protein sequence (wt) from neuraminidase__InfluenzaA__AEY69953

SEQ ID NO: 21657 - protein, 469 aa, Artificial Sequence; identical to SEQ ID NO: 21655
  derived and/or modified protein sequence (wt) from neuraminidase__InfluenzaA__AEY69964

SEQ ID NO: 21658 - protein, 469 aa, Artificial Sequence; identical to SEQ ID NO: 21635
  derived and/or modified protein sequence (wt) from neuraminidase__InfluenzaA__AEY69975

SEQ ID NO: 21659 - protein, 469 aa, Artificial Sequence; identical to SEQ ID NO: 21635
  derived and/or modified protein sequence (wt) from neuraminidase__InfluenzaA__AEY69986

SEQ ID NO: 21660 - protein, 469 aa, Artificial Sequence; identical to SEQ ID NO: 21635
  derived and/or modified protein sequence (wt) from neuraminidase__InfluenzaA__AEY69997

SEQ ID NO: 21661 - protein, 469 aa, Artificial Sequence; identical to SEQ ID NO: 21635
  derived and/or modified protein sequence (wt) from neuraminidase__InfluenzaA__AEY70008

SEQ ID NO: 21662 - protein, 469 aa, Artificial Sequence; identical to SEQ ID NO: 21635
  derived and/or modified protein sequence (wt) from neuraminidase__InfluenzaA__AEY70019

SEQ ID NO: 21663 - protein, 469 aa, Artificial Sequence; identical to SEQ ID NO: 21635
  derived and/or modified protein sequence (wt) from neuraminidase__InfluenzaA__AEY70259

SEQ ID NO: 21664 - protein, 469 aa, Artificial Sequence; identical to SEQ ID NO: 21635
  derived and/or modified protein sequence (wt) from neuraminidase__InfluenzaA__AEY70270

SEQ ID NO: 21665 - protein, 469 aa, Artificial Sequence; identical to SEQ ID NO: 21635
  derived and/or modified protein sequence (wt) from neuraminidase__InfluenzaA__AEY70281

SEQ ID NO: 21666 - protein, 469 aa, Artificial Sequence; identical to SEQ ID NO: 16599
  derived and/or modified protein sequence (wt) from neuraminidase__InfluenzaA__AEY70303

SEQ ID NO: 21667 - protein, 469 aa, Artificial Sequence; identical to SEQ ID NO: 16599
  derived and/or modified protein sequence (wt) from neuraminidase__InfluenzaA__AEY70314

SEQ ID NO: 21668 - protein, 469 aa, Artificial Sequence
  derived and/or modified protein sequence (wt) from neuraminidase__InfluenzaA__AEY70325
MNPNQKIITIGSVSLTISTICFFMQIAILMTTVTLHFKQYEFNPPPNNQVMLCEPTIIERNITEIVYLTNTTIEKEICPKLAEYRNWSKPQCDITGFAPFSKDNSIRLSAGGDIWVTREPYVSCDPDKCYQFALGQGTTLNNVHSNNTVRDRTPYRTLLMNELGVPFHLGTKQVCIAWSSSSCHDGKAWLHVCITGDDKNATASFIYNGRLVDSVVSWSKEILRTQESECVCINGTCTVVMTDGSASGKADTKILFIEEGKIVHTSTLSGSAQHVEECSCYPRYPGVRCVCRDNWKGSNRPIVDINIKDHSIVSSYVCSGLVGDTPRKNDSSSSSHCLDPNNEEGGHGVKGWAFDDGNDVWMGRTISEKSRLGYETFKVIEGWSNPKSKLQINRQVIVDRGNRSGYSGIFSVEGKSCINRCFYVELIRGRKEETEVLWTSNSIVVFCGTSGTYGTGSWPDGADINLMPV

SEQ ID NO: 21669 - protein, 469 aa, Artificial Sequence
  derived and/or modified protein sequence (wt) from neuraminidase__InfluenzaA__AEY70336
MNPNQKIITIGSVSLTISTICFFMQIAILITTVTLHFKQYEFNSPPNNQVMLCEPTIIERNITEIVYLTNTTIEKEICPKLAEYRNWSKPQCDITGFAPFSKDNSIRLSAGGDIWVTREPYVSCDPDKCYQFALGQGTTLNNVHSNNTVRDRTPYRTLLMNELGVPFHLGTKQVCIAWSSSSCHDGKAWLHVCITGDDKNATASFIYNGRLVDSVVSWSKEILRTQESECVCINGTCTVVMTDGSASGKADTKILFIEEGKIVHTSTLSGSAQHVEECSCYPRYPGVRCICRDNWKGSNRPIVDINIKDHSIVSSYVCSGLVGDTPRKNDSSSSSHCLDPNNEEGGHGVKGWAFDDGNDVWMGRTISEKSRLGYETFKVIEGWSNPKSKLQINRQVIVDRGNRSGYSGIFSVEDKSCINRCFYVELIRGRKEETEVLWTSNSIVVFCGTSGTYGTGSWPDGADINLMPV

SEQ ID NO: 21670 - protein, 469 aa, Artificial Sequence; identical to SEQ ID NO: 16738
  derived and/or modified protein sequence (wt) from neuraminidase__InfluenzaA__AEY70358

SEQ ID NO: 21671 - protein, 469 aa, Artificial Sequence; identical to SEQ ID NO: 16599
  derived and/or modified protein sequence (wt) from neuraminidase__InfluenzaA__AEY70379

SEQ ID NO: 21672 - protein, 469 aa, Artificial Sequence; identical to SEQ ID NO: 18361
  derived and/or modified protein sequence (wt) from neuraminidase__InfluenzaA__AFB70139

SEQ ID NO: 21673 - protein, 469 aa, Artificial Sequence; identical to SEQ ID NO: 16738
  derived and/or modified protein sequence (wt) from neuraminidase__InfluenzaA__AFB70141

SEQ ID NO: 21674 - protein, 469 aa, Artificial Sequence; identical to SEQ ID NO: 18361
  derived and/or modified protein sequence (wt) from neuraminidase__InfluenzaA__AFB70147

SEQ ID NO: 21675 - protein, 469 aa, Artificial Sequence; identical to SEQ ID NO: 16738
  derived and/or modified protein sequence (wt) from neuraminidase__InfluenzaA__AFB70153

SEQ ID NO: 21676 - protein, 469 aa, Artificial Sequence; identical to SEQ ID NO: 16738
  derived and/or modified protein sequence (wt) from neuraminidase__InfluenzaA__AFB70155

SEQ ID NO: 21677 - protein, 469 aa, Artificial Sequence; identical to SEQ ID NO: 17708
  derived and/or modified protein sequence (wt) from neuraminidase__InfluenzaA__AFB70157

SEQ ID NO: 21678 - protein, 469 aa, Artificial Sequence; identical to SEQ ID NO: 16738
  derived and/or modified protein sequence (wt) from neuraminidase__InfluenzaA__AFB70159

SEQ ID NO: 21679 - protein, 469 aa, Artificial Sequence
  derived and/or modified protein sequence (wt) from neuraminidase__InfluenzaA__AFB70161
MNPNQKIITIGSVCMTIGMANLILQIGNIISIWISHSIQLGNQNQIETCNQSVITYENNTWVNQTYVNISNTNFAAGQSVVSVKLAGNSSLCPVSGWAIYSKDNSIRIGSKGDVFVIREPFISCSPLECRTFFLTQGALLNDKHSNGTIKDRSPYRTLMSCPIGEVPSPYNSRFESVAWSASACHDGINWLTIGISGPDNGAVAVLKYNGIITDTIKSWRNNILRTQESECACVNGSCFTVMTDGPSDGQASYKIFRIEKGKIVKSVEMNAPNYHYEECSCYPDSSEITCVCRDNWHGSNRPWVSFNQNLEYQIGYICSGIFGDNPRPNDKTGSCGPVSSNGANGVKGFSFKYGNGVWIGRTKSISSRNGFEMIWDPNGWTGTDNNFSTKQDIVGINEWSGYSGSFVQHPELTGLDCIRPCFWVELIRGRPKENTIWTSGSSISFCGVNSDTVGWYWPDGAELPFTIDK

SEQ ID NO: 21680 - protein, 469 aa, Artificial Sequence
  derived and/or modified protein sequence (wt) from neuraminidase__InfluenzaA__AFB70163
MNPNQKIITIGSVCMTIGMANLILQIGNIISIWISHSIQLGNQNQIETCNQSVITYENNTWVNQTYVNISNTNFAAGQSVVSVKLAGNSSLCPVSGWAIYSKDNSIRIGSKGDVFVIREPFISCSPLECRTFFLTQGALLNDKHSNGTIKDRSPYRTLMSCPIGEVPSPYNSRFESVAWSASACHDGINWLTIGISGPDNGAVAVLKYNGIITDTIKSWRNNILRTQESECACVNGSCFTVMTDGPSDGQASYKIFRIEKGKIVKSVEMNAPNYHYEECSCYPDSSEITCVCRDNWHGSNRPWVSFNQNLEYQIGYICSGIFGDNPRPNDKTGSCGPVSSNGANGVKGFSFKYGNGVWIGRTKSISSRNGFEMIWDPNGWTGTDNNFSIKQDIVGINEWSGYSGSFVQHPELTGLDCIRPCFWVELIRGRPKENAIWTSGSSISFCGVNSDTVGWSWPDGAELPFTIDK

SEQ ID NO: 21681 - protein, 469 aa, Artificial Sequence
  derived and/or modified protein sequence (wt) from neuraminidase__InfluenzaA__AFB70169
MNPNQKIITIGSVCMTIGMANLILQIGNIISIWINHSIQLGNQNQIETCNQSVITYENNTWVNQTYVNISNTNFAAGQSVVSVKLAGNSSLCPVSGWAIYSKDNSIRIGSKGDVFVIREPFISCSPLECRTFFLTQGALLNDKHSNGTIKDRSPYRTLMSCPIGEVPSPYNSRFESVAWSASACHDGINWLTIGISGPDNGAVAVLKYNGIITDTIKSWRNNILRTQESECACVNGSCFTVMTDGPSDGQASYKIFRIEKGKIVKSVEMNAPNYHYEECSCYPDSSEITCVCRDNWHGSNRPWVSFNQNLEYQIGYICSGIFGDNPRPNDKTGSCGPVSSNGANGVKGFSFKYGNGVWIGRTKSISSRNGFEMIWDPNGWTGTDNNFSIKQDIVGINEWSGYSGSFVQHPELTGLDCIRPCFWVELIRGRPKENTIWTSGSSISFCGVNSDTVGWSWPDGAELPFTIDK

SEQ ID NO: 21682 - protein, 469 aa, Artificial Sequence; identical to SEQ ID NO: 16738
  derived and/or modified protein sequence (wt) from neuraminidase__InfluenzaA__AFB70199

SEQ ID NO: 21683 - protein, 469 aa, Artificial Sequence; identical to SEQ ID NO: 16738
  derived and/or modified protein sequence (wt) from neuraminidase__InfluenzaA__AFB70209

SEQ ID NO: 21684 - protein, 469 aa, Artificial Sequence; identical to SEQ ID NO: 16738
  derived and/or modified protein sequence (wt) from neuraminidase__InfluenzaA__AFB70219

SEQ ID NO: 21685 - protein, 469 aa, Artificial Sequence; identical to SEQ ID NO: 16738
  derived and/or modified protein sequence (wt) from neuraminidase__InfluenzaA__AFB70229

SEQ ID NO: 21686 - protein, 469 aa, Artificial Sequence; identical to SEQ ID NO: 16738
  derived and/or modified protein sequence (wt) from neuraminidase__InfluenzaA__AFB70239

SEQ ID NO: 21687 - protein, 469 aa, Artificial Sequence; identical to SEQ ID NO: 16738
  derived and/or modified protein sequence (wt) from neuraminidase__InfluenzaA__AFB70249

SEQ ID NO: 21688 - protein, 469 aa, Artificial Sequence; identical to SEQ ID NO: 16738
  derived and/or modified protein sequence (wt) from neuraminidase__InfluenzaA__AFB70259

SEQ ID NO: 21689 - protein, 469 aa, Artificial Sequence; identical to SEQ ID NO: 17708
  derived and/or modified protein sequence (wt) from neuraminidase__InfluenzaA__AFB70269

SEQ ID NO: 21690 - protein, 469 aa, Artificial Sequence; identical to SEQ ID NO: 16738
  derived and/or modified protein sequence (wt) from neuraminidase__InfluenzaA__AFB70279

SEQ ID NO: 21691 - protein, 469 aa, Artificial Sequence; identical to SEQ ID NO: 16738
  derived and/or modified protein sequence (wt) from neuraminidase__InfluenzaA__AFB70289

SEQ ID NO: 21692 - protein, 469 aa, Artificial Sequence; identical to SEQ ID NO: 16738
  derived and/or modified protein sequence (wt) from neuraminidase__InfluenzaA__AFB70299

SEQ ID NO: 21693 - protein, 469 aa, Artificial Sequence; identical to SEQ ID NO: 16738
  derived and/or modified protein sequence (wt) from neuraminidase__InfluenzaA__AFB70309

SEQ ID NO: 21694 - protein, 469 aa, Artificial Sequence; identical to SEQ ID NO: 18361
  derived and/or modified protein sequence (wt) from neuraminidase__InfluenzaA__AFB70319

SEQ ID NO: 21695 - protein, 469 aa, Artificial Sequence; identical to SEQ ID NO: 16738
  derived and/or modified protein sequence (wt) from neuraminidase__InfluenzaA__AFB70329

SEQ ID NO: 21696 - protein, 469 aa, Artificial Sequence; identical to SEQ ID NO: 16738
  derived and/or modified protein sequence (wt) from neuraminidase__InfluenzaA__AFB70349

SEQ ID NO: 21697 - protein, 469 aa, Artificial Sequence; identical to SEQ ID NO: 16738
  derived and/or modified protein sequence (wt) from neuraminidase__InfluenzaA__AFB70359

SEQ ID NO: 21698 - protein, 469 aa, Artificial Sequence; identical to SEQ ID NO: 16738
  derived and/or modified protein sequence (wt) from neuraminidase__InfluenzaA__AFB70369

SEQ ID NO: 21699 - protein, 469 aa, Artificial Sequence; identical to SEQ ID NO: 16738
  derived and/or modified protein sequence (wt) from neuraminidase__InfluenzaA__AFB70379

SEQ ID NO: 21700 - protein, 469 aa, Artificial Sequence; identical to SEQ ID NO: 16738
  derived and/or modified protein sequence (wt) from neuraminidase__InfluenzaA__AFB70389

SEQ ID NO: 21701 - protein, 469 aa, Artificial Sequence; identical to SEQ ID NO: 16738
  derived and/or modified protein sequence (wt) from neuraminidase__InfluenzaA__AFB70399

SEQ ID NO: 21702 - protein, 469 aa, Artificial Sequence; identical to SEQ ID NO: 16738
  derived and/or modified protein sequence (wt) from neuraminidase__InfluenzaA__AFB70409

SEQ ID NO: 21703 - protein, 469 aa, Artificial Sequence
  derived and/or modified protein sequence (wt) from neuraminidase__InfluenzaA__AFB77614
MHPNQEVISIVSVCMTIGMANLILQIGNIISIWISHSIQLGNQNQIETCNQSVITYENNTWVNQTYVNISNTNFAAGQSVVSVKLAGNSSLCPVSGWAIYSKDNSIRIGSKGDVFVIREPFISCSPLECRTFFLTQGALLNDKHSNGTIKDRSPYRTLMSCPIGEVPSPYNSRFESVAWSASACHDGINWLTIGISGPDNGAVAVLKYNGIITDTIKSWRNNILRTQESECACVNGSCFTIMTDGPSDGQASYKIFRIEKGKIVKSVEMNAPNYHYEECSCYPDSSEITCVCRDNWHGSNRPWVSFNQNLEYQIGYICSGIFGDNPRPNDKTGSCGPVSSNGANGVKGFSFKYGNGVWIGRTKSISSRKGFEMIWDPNGWTGTDNNFSIKQDIVGINEWSGYSGSFVQHPELTGLDCIRPCFWVELIRGRPKENTIWTSGSSISFCGVNSDTVGWFWPDGAELPFTIDK

SEQ ID NO: 21704 - protein, 469 aa, Artificial Sequence
  derived and/or modified protein sequence (wt) from neuraminidase__InfluenzaA__AFB77615
MHPNQEIITFVSVCMTIGMANLILQIGNIISIWISHSIQLGNQNQIETCNQSVITYENNTWVNQTYVNISNTNFAAGQSVVSVKLAGNSSLCPVSGWAIYSKDNSIRIGSKGDVFVIREPFISCSPLECRTFFLTQGALLNDKHSNGTIKDRSPYRTLMSCPIGEVPSPYNSRFESVAWSASACHDGINWLTIGISGPDNGAVAVLKYNGIITDTIKSWRNNILRTQESECACVNGSCFTIMTDGPSDGQASYKIFRIEKGKIVKSVEMNAPNYHYEECSCYPDSSEITCVCRDNWHGSNRPWVSFNQNLEYQIGYICSGIFGDNPRPNDKTGSCGPVSSNGANGVKGFSFKYGNGVWIGRTKSISSRKGFEMIWDPNGWTGTDNNFSIKQDIVGINEWSGYSGSFVQHPELTGLDCIRPCFWVELIRGRPKENTIWTSGSSISFCGVNSDTVGWSWPDGAELPFTIDK

SEQ ID NO: 21705 - protein, 469 aa, Artificial Sequence
  derived and/or modified protein sequence (wt) from neuraminidase__InfluenzaA__AFB78128
MNPNQKIITIGSVSLTIATICFLMQIVILVTTVTLHFKQHECNSPPNNQVMLCEPTIIERNITEIVYLTNTTIEKEICPKLAEYRNWSKPQCKITGFAPFSKDNSIRLSAGGDIWVTREPYVSCDPDKCYQFALGQGTTLNNRHSNDTVHDRTPYRTLLMNELGVPFHLGTKQVCIAWSSSSCHDGKAWLHVCVTGHDENATASFIYDGRLVDSIGSWSKKILRTQESECVCINGTCTVVMTDGSASGRADTKILFIEEGKIVHTSKLSGSAQHVEECSCYPRYPGVRCVCRDNWKGSNRPIVDINVKDYSIVSSYVCSGLVGDTPRKNDSSSSSHCLDPNNEEGGHGVKGWAFDDGNDVWMGRTISEKSRSGYETFKVIEGWSKPNSKLQINRQVIVERGNMSGYSGIFSVEGKSCINRCFYVELIRGRKQETEVWWTSNSIVVFCGTSGTYGTGSWPDGADINLMPI

SEQ ID NO: 21706 - protein, 469 aa, Artificial Sequence
  derived and/or modified protein sequence (wt) from neuraminidase__InfluenzaA__AFC62078
MNPNQKIITIGSVCMTIGMANLILQIGNIISIWISHSIQLGNQSQIETCNQSVITYENNTWVNQTYVNISNTNFAAGQSVVSVKLAGNSSLCPVSGWAIYSKDNSIRIGSKGDVFVIRELFISCSPLECRTFFLTQGALLNDKHSNGTIKDRSPYRTLMSCPIGEVPSPYNSRFESVAWSASACHDGINWLTIGISGPDNGAVAVLKYNGIITDTIKSWRNDILRTQESECACVNGSCFTIMTDGPSDGQASYKIFRIEKGKIVKSVEMNAPNYHYEECSCYPDSSEITCVCRDNWHGSNRPWVSFNQNLEYQIGYICSGIFGDNPRPNDKTGSCGPVSSNGANGVKGFSFKYGNGVWIGRTKSISSRKGFEMIWDPNGWTGTDNNFSIKQDIVGINEWSGYSGSFVQHPELTGMDCIRPCFWVELIRGRPKENTIWTSGSSISFCGVNSDTVGWSWPDGAELPFTIDK

SEQ ID NO: 21707 - protein, 469 aa, Artificial Sequence
  derived and/or modified protein sequence (wt) from neuraminidase__InfluenzaA__AFC62079
MNPNQKIITIGSVCMTIGMANLILQIGNIISIWISHSIQLGNQNQIETCNQSVITYENNTWVNQTYVNISNTNFAAGQSVVSVKLAGNSSLCPVSGWAIYSKDNSIRIGSKGDVFVIREPFISCSPLECRTFFLTQGALLNDKHSNGTIKDRSPYRTLMSCPIGEVPSPYNSRFESVAWSASACHDGINWLTIGISGPDNGAVAVLKYNGIITDTIKSWRNNILRTQESECACVNGSCFTVMTDGPSDGQASYKIFRIEKGKIIKSVEMNAPNYHYEECSCYPDSSEITCVCRDNWHGSNRPWVSFNQNLEYQIGYICSGILGDNPRPNDKTGSCGPVSSNGANGVKGFSFKYGNGVWVGRTKSISSRNGFEMIWDPNGWTGTDNNFSIKQDIVGIKEWSGYSGSFVQHPELTGLDCIRPCFWVELIRGRPKENTIWTSGSIISFCGVNSDTVGWSWPDGAELPFTIDK

SEQ ID NO: 21708 - protein, 469 aa, Artificial Sequence
  derived and/or modified protein sequence (wt) from neuraminidase__InfluenzaA__AFC62080
MNPNQKIITIGSVCMTIGMANLILQIGNIISIWISHSIQLGNQSQIETCNQSVITYENNTWVNQTYVNISNTNFAAGQSVVSVKLAGNSSLCPVSGWAIYSKDNSIRIGSKGDVFVIREPFISCSPLECRTFFLTQGALLNDKHSNGTIKDRSPYRTLMSCPIGEVPSPYNSRFESVAWSASACHDGINWLTIGISGPDNGAVAVLKYNGIITDTIKSWRNNILRTQESECACVNGSCFTIMTDGPSDGQASYKIFRIEKGKIVKSVEMNAPNYYYEECSCYPDSSEITCVCRDNWHGSNRPWVSFNQNLEYQIGYICSGIFGDNPRPNDKTGSCGPVSSNGANGVKGFSFKYGNGVWIGRTKSISSRKGFEMIWDPNGWTGTDNNFSIKQDIVGINEWSGYSGSFVQHPELTGMGCIRPCFWVELIRGRPKENTIWTSGSSISFCGVNSDTVGWSWPDGAELPFTIDK

SEQ ID NO: 21709 - protein, 469 aa, Artificial Sequence
  derived and/or modified protein sequence (wt) from neuraminidase__InfluenzaA__AFC62082
MNPNQKIITIGSVSLTISTICFFMQIAILITTVTLHFKQYEFNSPPNNQVMLCEPTIIERNITEIVYLTNTTIEKEICPKLAEYRNWSKPQCDITGFAPFSKDNSIRLSAGGDIWVTREPYVSCDPNKCYQFALGQGTTLNNVHSNNTVRGRTPYRTLLMNELGVPFHLGTKQVCIAWSSSSCHDGKAWLHVCITGDDKNATASFIYNGRLVDSVVSWSKEILRTQESECVCINGTCTVVMTDGSASGKADTKILFIEEGKIVHTSTLSGSAQHVEECSCYPRYPGVRCVCRDNWKGSNRPIVDINMKDHSIVSSYVCSGLVGDTPRKNDSSSSSHCFDPNDEEGGHGVKGWAFDDGNDVWMGRTISEKSRLGYETFKVIEGWSNPKSKLQINRQVIVDRGDRSGYSGIFSVEGKSCINRCFYVELIRGSKEETEVLWTSNSIVVFCGTSGTYGTGSWPDGADINLMPI

SEQ ID NO: 21710 - protein, 469 aa, Artificial Sequence; identical to SEQ ID NO: 14225
  derived and/or modified protein sequence (wt) from neuraminidase__InfluenzaA__AFD63529

SEQ ID NO: 21711 - protein, 469 aa, Artificial Sequence; identical to SEQ ID NO: 14225
  derived and/or modified protein sequence (wt) from neuraminidase__InfluenzaA__AFD63540

SEQ ID NO: 21712 - protein, 469 aa, Artificial Sequence
  derived and/or modified protein sequence (wt) from neuraminidase__InfluenzaA__AFD63551
MNPNQKIITIGSVSLTIAAICFLMQIAILVTTVTLHFKQHECNPPPNNQVMLCEPTIIERNITEIVYLTNTTIEKEICPKLAEYRNWSKPQCNITGFAPFSKDNSIRLSAGGDIWVTREPYVSCDPDKCYQFALGQGTTLNNGHSNDTVHGRTPYRTLLMNELGVPFHLGTRQVCIAWSSSSCHDGKAWLHVCVTGDDKNATASFIYNGRLVDSIGSWSKKILRTQESECVCINGTCTVVMTDGSASGKADTKILFIEEGKIVHISTLSGSAQHVEECSCYPRYPGVRCVCRDNWKGSNRPIVDINVKDYSIVSSYVCSGLVGDTPRKNDSFSSSHCLDPNNEEGGHGVKGWAFDDGNDVWMGRTISEKLRSGYETFKVIEGWSKPNSKLQINRQVIVERGNRSGYSGIFSVEGKSCINRCFYVELIRGRKEETEVWWTSNSIVVFCGTSGTYGTGSWPDGADINLMPI

SEQ ID NO: 21713 - protein, 469 aa, Artificial Sequence; identical to SEQ ID NO: 14225
  derived and/or modified protein sequence (wt) from neuraminidase__InfluenzaA__AFD63562

SEQ ID NO: 21714 - protein, 469 aa, Artificial Sequence
  derived and/or modified protein sequence (wt) from neuraminidase__InfluenzaA__AFD63573
MNPNQKIITIGSVSLTIATICFLMQIAILVTTVTLHFKQHECNSPPNNQVMLCEPTIIGRNITEIVYLTNTTIEKEICPKLAEYRNWSKPQCNITGFAPFSKDNSIRLSAGGDIWVTREPYVSCDPDKCYQFALGQGTTLNNGHSNDTVHDRTPYRTLLMNELGVPFHLGTRQVCIAWSSSSCHDGKAWLHVCVTGDDKNATASFIYNGRLVDSIGSWSKKILRTQESECVCINGTCTVVMTDGSASGKADTKILFIEEGKIVHISTLSGSAQHVEECSCYPRYPGVRCVCRDNWKGSNRPIVDINVKDYSIVSSYVCSGLVGDTPRKNDSFSSSHCLDPNNEEGGHGVKGWAFDDGNDVWMGRTISEKLRSGYETFKVIEGWSKPNSKLQINRQVIVERGNRSGYSGIFSVEGKSCINRCFYVELIRGRKEETEVWWTSNSIVVFCGTSGTYGTGSWPDGADINLMPI

SEQ ID NO: 21715 - protein, 469 aa, Artificial Sequence
  derived and/or modified protein sequence (wt) from neuraminidase__InfluenzaA__AFD63584
MNPNQKIITIGSVSLTIATICFLMQIAILVTTVTLHFKQYECNSPPNNQVMLCEPTIIERNITEIVYLTNTTIEKEICPKLAEYRNWSKPQCNITGFAPFSKDNSIRLSAGGDIWVTREPYVSCDPDKCYQFALGQGTTLNNGHSNDTVHERTPYRTLLMNELGVPFHLGTRQVCIAWSSSSCHDGKAWLHVCVTGDDKNATASFIYNGRLVDSIGSWSKKILRTQESECVCINGTCTVVMTDGSASGKADTKILFIEEGKIIHISTLSGSAQHVEECSCYPRYPGVRCVCRDNWKGSNRPIVDINVKDYSIVSSYVCSGLVGDTPRKNDSSSSSHCLDPNNEEGGHGVKGWAFDDGNDVWMGRTISEKLRSGYETFKVIEGWSKPNSKLQINRQVIVERGNRSGYSGIFSVEGKSCINRCFYVELIRGRKEETEVWWTSNSIVVFCGTSGTYGTGSWPDGADINLMPI

SEQ ID NO: 21716 - protein, 469 aa, Artificial Sequence
  derived and/or modified protein sequence (wt) from neuraminidase__InfluenzaA__AFD63595
MNPNQKIITIGSVSLTIAAICFLMQIAILVTTVTLHFKQHECNSPPNNQVMLCEPTIIERNITEIVYLTNTTIEKEICPKLAEYRNWSKPQCNITGFAPFSKDNSIRLSAGGDIWVTREPYVSCDPDKCYQFALGQGTTLNNGHSNDTVHDRTPYRTLLMNELGVPFHLGTRQVCIAWSSSSCHDGKAWLHVCVTGDDKNATASFIYNGRLVDSIGSWSKKILRTQESECVCINGTCTVVMTDGSASGKADTKILFIEEGKIVHISTLSGSAQHVEECSCYPRYPGVRCVCKDNWKGSNRPIVDINVKDYSIVSSYVCSGLVGDTPRKNDSFSSSHCLDPNNEEGGHGVKGWAFDDGNDVWMGRTISEKLRSGYETFKVIEGWSKPNSKLQINRQVIVERGNRSGYSGIFSVEGKSCINRCFYVELIRGRKEETEVWWTSNSIVVFCGTSGTYGTGSWPDGADINLMPI

SEQ ID NO: 21717 - protein, 469 aa, Artificial Sequence; identical to SEQ ID NO: 14225
  derived and/or modified protein sequence (wt) from neuraminidase__InfluenzaA__AFD63606

SEQ ID NO: 21718 - protein, 469 aa, Artificial Sequence; identical to SEQ ID NO: 14145
  derived and/or modified protein sequence (wt) from neuraminidase__InfluenzaA__AFD63628

SEQ ID NO: 21719 - protein, 469 aa, Artificial Sequence; identical to SEQ ID NO: 14225
  derived and/or modified protein sequence (wt) from neuraminidase__InfluenzaA__AFD63639

SEQ ID NO: 21720 - protein, 469 aa, Artificial Sequence; identical to SEQ ID NO: 14225
  derived and/or modified protein sequence (wt) from neuraminidase__InfluenzaA__AFD63650

SEQ ID NO: 21721 - protein, 469 aa, Artificial Sequence
  derived and/or modified protein sequence (wt) from neuraminidase__InfluenzaA__AFD63661
MNPNQKIITIGSVSLTIAAICFLMQIAILVTTVTLHFKQHECNSPPNNQVMLCEPTIIERNITEIVYLTNSTIEKEICPKLAEYRNWSKPQCNITGFAPFSKDNSIRLSAGGDIWVTREPYVSCDPDKCYQFALGQGTTLNNGHSNDTVHDRTPYRTLLMNELGVPFHLGTRQVCIAWSSSSCHDGKAWLHVCVTGDDKNATASFIYNGRLVDSIGSWSKKILRTQESECVCINGTCTVVMTDGSASGKADTKILFIEEGKIVHISTLSGSAQHVEECSCYPRYPGVRCVCRDNWKGSNRPIVDINVKDYSIVSSYVCSGLVGDTPRKNDSFSSSHCLDPNNEEGGHGVKGWAFDDGNDVWMGRTISEKLRSGYETFKVIEGWSKPNSKLQINRQVIVERGNRSGYSGIFSVEGKSCINRCFYVELIRGRKEETEVWWTSNSIVVFCGTSGTYGTGSWPDGADINLMPI

SEQ ID NO: 21722 - protein, 469 aa, Artificial Sequence; identical to SEQ ID NO: 15931
  derived and/or modified protein sequence (wt) from neuraminidase__InfluenzaA__AFD63672

SEQ ID NO: 21723 - protein, 469 aa, Artificial Sequence
  derived and/or modified protein sequence (wt) from neuraminidase__InfluenzaA__AFD63683
MNPNQKIITMGSVSLTIATICFLMQIAILVTTVTLHFKQYECNSPPNNQVMLCEPTIIERNITEIVYLTNTTIEKEICPKLAEYRNWSKPQCNITGFAPFSKDNSIRLSAGGDIWVTREPYVSCDPDKCYQFALGQGTTLNNGHSNDTVHGRTPYRTLLMNELGVPFHLGTRQVCIAWSSSSCHDGKAWLHVCVTGDDKNATASFIYNGRLVDSIGSWSKKILRTQESECVCINGTCTVVMTDGSASGKADTKILFIEEGKIIHISTLSGSAQHVEECSCYPRYPGVRCVCRDNWKGSNRPIVDINVKDYSIVSSYVCSGLVGDTPRKNDSSSSSHCLDPNNEEGGHGVKGWAFDDGNDVWMGRTISEKLRSGYETFKVIEGWSKPNSKLQINRQVIVERGNRSGYSGIFSVEGKSCINRCFYVELIRGRKEETEVWWTSNSIVVFCGTSGTYGTGSWPDGADINLMPI

SEQ ID NO: 21724 - protein, 469 aa, Artificial Sequence
  derived and/or modified protein sequence (wt) from neuraminidase__InfluenzaA__AFD63694
MNPNQKIITIGSVSLTIATICFLMQIAILVTTITLHFKQHECNSPPNNQVMLCEPTIIERNITEIVYLTNTTIEKEICPKLAEYRNWSKPQCNITGFAPFSKDNSIRLSAGGDIWVTREPYVSCDPDKCYQFALGQGTTLNNGHSNDTVHDRTPYRTLLMNELGVPFHLGTRQVCIAWSSSSCHDGKAWLHVCVTGDDKNATASFIYNGRLVDSIGSWSKKILRTQESECVCINGTCTVVMTDGSASGKADTKILFIEEGKIVHISTLSGSAQHVEECSCYPRYPGVRCVCRDNWKGSNRPIVDINVKDYSIVSSYVCSGLVGDTPRKNDSFSSSHCLDPNNEEGGHGVKGWAFDDGNDVWMGRTISEKLRSGYETFKVIEGWSKPNSKLQINRQVIVERGNRSGYSGIFSVEGKSCINRCFYVELIRGRKEETEVWWTSNSIVVFCGTSGTYGTGSWPDGADINLMPI

SEQ ID NO: 21725 - protein, 469 aa, Artificial Sequence
  derived and/or modified protein sequence (wt) from neuraminidase__InfluenzaA__AFD63705
MNPNQKIITIGSVSLTIAAICFLMQIAILVTTVTLHFKQHECNSPPNNQVMLCEPTIIERNITEIVYLTNTTIEKEICPKLAEYRNWSKPQCNITGFAPFSKDNSIRLSAGGDIWVTREPYVSCDPDKCYQFALGKGTTLNNGHSNDTVHDRTPYRTLLMNELGVPFHLGTRQVCIAWSSSSCHDGKAWLHVCVTGDDKNATASFIYNGRLVDSIGSWSKKILRTQESECVCINGTCTVVMTDGSASGKADTKILFIEEGKIVHISTLSGSAQHVEECSCYPRYPGVRCVCRDNWKGSNRPIVDINVKDYSIVSSYVCSGLVGDTPRKNDSFSSSHCLDPNNEEGGHGVKGWAFDDGNDVWMGRTISEKLRSGYETFKVIEGWSKPNSKLQINRQVIVERGNRSGYSGIFSVEGKSCINRCFYVELIRGRKEETEVWWTSNSIVVFCGTSGTYGTGSWPDGADINLMPI

SEQ ID NO: 21726 - protein, 469 aa, Artificial Sequence
  derived and/or modified protein sequence (wt) from neuraminidase__InfluenzaA__AFD63716
MNPNQKIITIGSVSLTIAAICFLMQIAILVTTVTLHFKQHECNSPPNNQVMLCEPTIIERNITEIVYLTNTTIEKEICPKLAEYRNWSKPQCNITGFAPFSKDNSIRLSAGGDIWVTREPYVSCDPDKCHQFALGQGTTLNNGHSNDTVHDRTPYRTLLMNELGVPFHLGTRQVCIAWSSSSCHDGKAWLHVCVTGDDKNATASFIYNGRLVDSIGSWSKKILRTQESECVCINGTCTVVMTDGSASGKADTKILFIEEGKIVHISTLSGSAQHVEECSCYPRYPGVRCVCRDNWKGSNRPIVDINVKDYSIVSSYVCSGLVGDTPRKNDSFSSSHCLDPNNEEGGHGVKGWAFDDGNDVWMGRTISEKLRSGYETFKVIEGWSKPNSKLQINRQVIVERGNRSGYSGIFSVEGKSCINRCFYVELIRGRKEETEVWWTSNSIVVFCGTSGTYGTGSWPDGADINLMPI

SEQ ID NO: 21727 - protein, 469 aa, Artificial Sequence; identical to SEQ ID NO: 14225
  derived and/or modified protein sequence (wt) from neuraminidase__InfluenzaA__AFD63727

SEQ ID NO: 21728 - protein, 469 aa, Artificial Sequence; identical to SEQ ID NO: 14225
  derived and/or modified protein sequence (wt) from neuraminidase__InfluenzaA__AFD63738

SEQ ID NO: 21729 - protein, 469 aa, Artificial Sequence
  derived and/or modified protein sequence (wt) from neuraminidase__InfluenzaA__AFD63749
MNPNQKIITISSVSLTIATICFLMQIAILVTTVTLHFKQHECNSPPNNQVMLCEPTIIERNITEIVYLTNTTIEKEICPKLAEYRNWSKPQCNITGFAPFSKDNSIRLSAGGDIWVTREPYVSCDPDKCYQFALGQGTTLNNGHSNDTVHDRTPYRTLLMNELGVPFHLGTRQVCIAWSSSSCHDGKAWLHVCVTGDDKNATASFIYNGRLVDSIGSWSKKILRTQESECVCINGTCTVVMTDGSASGKADTKILFIEEGKIVHISTLSGSAQHVEECSCYPRYPGVRCVCRDNWKGSNRPIVDINVKDYSIVSSYVCSGLVGDTPRKNDSFSSSHCLDPNNEEGGHGVKGWAFDDGNDVWMGRTISEKLRSGYETFKVIEGWSKPNSKLQINRQVIVERGNRSGYSGIFSVEGKSCINRCFYVELIRGRKEETEVWWTSNSIVVFCGTSGTYGTGSWPDGADINLMPI

SEQ ID NO: 21730 - protein, 469 aa, Artificial Sequence
  derived and/or modified protein sequence (wt) from neuraminidase__InfluenzaA__AFD63760
MNPNQKIITIGSVSLTIATICFLMQIAILVTTVTLHFKQYECNSPPNNQVMLCEPTIIERNITEIVYLTNTTIEKEICPKLAEYRNWSKPQCNITGFAPFSKDNSIRLSAGGDIWVTREPYVSCDPDKCYQFALGQGTTLNNGHSNDTVHDRTPYRTLLMNELGVPFHLGTRQVCIAWSSSSCHDGKAWLHVCVTGDDKNATASFIYNGRLVDSIGSWSKKILRTQESECVCINGTCTVVMTDGSASGKADTKILFIEEGKIIHISTLSGSAQHVEECSCYPRYPGVRCVCRDNWKGSNRPIVDINVKDYSIVSSYVCSGLVGDTPRKNDSSSSSHCLDPNNEEGGHGVKGWAFDDGNDVWMGRTISEKLRSGYETFKVIEGWSKPNSKLQINRQVIVERGNRSGYSGIFSVEGKSCINRCFYVELIRGRKEETEVWWTSNSIVVFCGTSGTYGTGSWPDGADINLMPI

SEQ ID NO: 21731 - protein, 469 aa, Artificial Sequence; identical to SEQ ID NO: 14225
  derived and/or modified protein sequence (wt) from neuraminidase__InfluenzaA__AFD63771

SEQ ID NO: 21732 - protein, 469 aa, Artificial Sequence; identical to SEQ ID NO: 14225
  derived and/or modified protein sequence (wt) from neuraminidase__InfluenzaA__AFD63782

SEQ ID NO: 21733 - protein, 469 aa, Artificial Sequence; identical to SEQ ID NO: 21730
  derived and/or modified protein sequence (wt) from neuraminidase__InfluenzaA__AFD63793

SEQ ID NO: 21734 - protein, 469 aa, Artificial Sequence; identical to SEQ ID NO: 14225
  derived and/or modified protein sequence (wt) from neuraminidase__InfluenzaA__AFD63804

SEQ ID NO: 21735 - protein, 469 aa, Artificial Sequence; identical to SEQ ID NO: 14225
  derived and/or modified protein sequence (wt) from neuraminidase__InfluenzaA__AFD63815

SEQ ID NO: 21736 - protein, 469 aa, Artificial Sequence; identical to SEQ ID NO: 14225
  derived and/or modified protein sequence (wt) from neuraminidase__InfluenzaA__AFD63826

SEQ ID NO: 21737 - protein, 469 aa, Artificial Sequence; identical to SEQ ID NO: 21730
  derived and/or modified protein sequence (wt) from neuraminidase__InfluenzaA__AFD63837

SEQ ID NO: 21738 - protein, 469 aa, Artificial Sequence
  derived and/or modified protein sequence (wt) from neuraminidase__InfluenzaA__AFD63848
MNPNQKIITIGSVSLTIAAICFLMQIAILVTTVTLHFKQRECNSPPNNQVMLCEPTIIERNITEIVYLTNTTIEKEICPKLAEYRNWSKPQCNITGFAPFSKDNSIRLSAGGDIWVTREPYVSCDPDKCYQFALGQGTTLNNGHSNDTVHDRTPYRTLLMNELGVPFHLGTRQVCIAWSSSSCHDGKAWLHVCVTGDDKNATASFIYNGRLVDSIGSWSKKILRTQESECVCINGTCTVVMTDGSASGKADTKILFIEEGKIVHISTLSGSAQHVEECSCYPRYPGVRCVCRDNWKGSNRPIVDINVKDYSIVSSYVCSGLVGDTPRKNDSFSSSHCLDPNNEEGGHGVKGWAFDDGNDVWMGRTISEKLRSGYETFKVIEGWSKPNSKLQINRQVIVERGNRSGYSGIFSVEGKSCINRCFYVELIRGRKEKTEVWWTSNSIVVFCGTSGTYGTGSWPDGADINLMPI

SEQ ID NO: 21739 - protein, 469 aa, Artificial Sequence; identical to SEQ ID NO: 14145
  derived and/or modified protein sequence (wt) from neuraminidase__InfluenzaA__AFD63859

SEQ ID NO: 21740 - protein, 469 aa, Artificial Sequence; identical to SEQ ID NO: 14145
  derived and/or modified protein sequence (wt) from neuraminidase__InfluenzaA__AFD63870

SEQ ID NO: 21741 - protein, 469 aa, Artificial Sequence; identical to SEQ ID NO: 14225
  derived and/or modified protein sequence (wt) from neuraminidase__InfluenzaA__AFD63881

SEQ ID NO: 21742 - protein, 469 aa, Artificial Sequence; identical to SEQ ID NO: 14225
  derived and/or modified protein sequence (wt) from neuraminidase__InfluenzaA__AFD63892

SEQ ID NO: 21743 - protein, 469 aa, Artificial Sequence
  derived and/or modified protein sequence (wt) from neuraminidase__InfluenzaA__AFD63903
MNPNQKIITIGSVSLTIAAICFLMQIAILVTTVTLHFKQHECNSPPNNQVMLCEPTIIERNITGIVYLTNTTIEKEICPKLAEYRNWSKPQCNITGFAPFSKDNSIRLSAGGDIWVTREPYVSCDPDKCYQFALGQGTTLNNGHSNDTVHDRTPYRTLLMNELGVPFHLGTRQVCIAWSSSSCHDGKAWLHVCVTGDDKNATASFIYNGRLVDSIGSWSKKILRTQESECVCINGTCTVVMTDGSASGKADTKILFIEEGKIVHISTLSGSAQHVEECSCYPRYPGVRCVCRDNWKGSNRPIVDINVKDYSIVSSYVCSGLVGDTPRKNDSFSSSHCLDPNNEEGGHGVKGWAFDDGNDVWMGRTISEKLRSGYETFKVIEGWSKPNSKLQINRQVIVERGNRSGYSGIFSVEGKSCINRCFYVELIRGRKEETEVWWTSNSIVVFCGTSGTYGTGSWPDGADINLMPI

SEQ ID NO: 21744 - protein, 469 aa, Artificial Sequence
  derived and/or modified protein sequence (wt) from neuraminidase__InfluenzaA__AFD63914
MNPNQKIITIGSVSLTIAAICFLMQIAILVTTVTLHFKQHECNSPPNNQVMLCEPTIIERNITEIVYLTNTTIEKEICPKLAEYRNWSKPQCNITGFAPFSKDNSIRLSAGGDIWVTREPYVSCDPDKCYQFALGQGTTLNNGHSNDTVHDRTPYRTLLMNELGVPFHLGTRQVCIAWSSSSCHDGKAWLHVCVTGDDKNATASFIYNGRLVDSIGSWSKKILRTQESECVCINGTCTVVMTDGSASGKADTKILFIEEGKIVHISTLSGSAQHVEECSCYPRYPGVRCVCRDNWKGSNRPIVDINVKDYSIVSSYVCSGLVGDTPRKNDSFSSSHCLDPNNEEGGHGVKGWAFDDGNDVWMGRTISEKLRSGYETFKVIEGWSKPNSKLQINRQVIVERGNRSGYSGIFSVEGKSCINRCFYVELIRGRKEKTEVWWTSNSIVVFCGTSGTYGTGSWPDGADINLMPI

SEQ ID NO: 21745 - protein, 469 aa, Artificial Sequence; identical to SEQ ID NO: 21730
  derived and/or modified protein sequence (wt) from neuraminidase__InfluenzaA__AFD63925

SEQ ID NO: 21746 - protein, 469 aa, Artificial Sequence
  derived and/or modified protein sequence (wt) from neuraminidase__InfluenzaA__AFD63936
MNPNQKIITIGSVSLTIATICFLMQIAILVTTVTLHFKQHECNPPPNNQVMLCEPTIIERNITEIVYLTNTTIEKEICPKLAEYRNWSKPQCNITGFAPFSKDNSIRLSAGGDIWVTREPYVSCDPDKCYQFALGQGTTLNNGHSNDTVHDRTPYRTLLMNELGVPFHLGTRQVCIAWSSSSCHDGKAWLHVCVTGDDKNATASFIYNGRLVDSIGSWSKKILRTQESECVCINGTCTVVMTDGSASGKADTKILFIEEGKIVHISTLSGSAQHVEECSCYPRYPGVRCVCRDNWKGSNRPIVDINVKDYSIVSSYVCSGLVGDTPRKNDSFSSSHCLDPNNEEGGHGVKGWAFDDGNDVWMGRTISEKLRSGYETFKVIEGWSKPNSKLQINRQVIVERGNRSGYSGIFSVEGKSCINRCFYVELIRGRKEETEVWWTSNSIVVFCGTSGTYGTGSWPDGADINLMPI

SEQ ID NO: 21747 - protein, 469 aa, Artificial Sequence; identical to SEQ ID NO: 14225
  derived and/or modified protein sequence (wt) from neuraminidase__InfluenzaA__AFD63947

SEQ ID NO: 21748 - protein, 469 aa, Artificial Sequence; identical to SEQ ID NO: 14225
  derived and/or modified protein sequence (wt) from neuraminidase__InfluenzaA__AFD63958

SEQ ID NO: 21749 - protein, 469 aa, Artificial Sequence; identical to SEQ ID NO: 14225
  derived and/or modified protein sequence (wt) from neuraminidase__InfluenzaA__AFD63969

SEQ ID NO: 21750 - protein, 469 aa, Artificial Sequence; identical to SEQ ID NO: 14225
  derived and/or modified protein sequence (wt) from neuraminidase__InfluenzaA__AFD63980

SEQ ID NO: 21751 - protein, 469 aa, Artificial Sequence
  derived and/or modified protein sequence (wt) from neuraminidase__InfluenzaA__AFD64002
MNPNQKIITIGSVSLTIAAICFLMQIAILVTTVTLHFKQHECNSPPNNQVMLCEPTIIERNITEIVYLTNTTIEKEICPKLAEYRNWSKPQCNITGFAPFSKDNSIRLSAGGDIWVTREPYVSCDPDKCYQFALGQGTTLNNGHSNDTVHDRTPYRTLLMNELGVPFHLGTRQVCIAWSSSSCHDGKAWLHVCVTGDDKNATASFIYNGRLVDSIGSWSKKILRTQESECVCINGTCTVVMTDGSASGKADTKILFIEEGKIVHISTLSGSAQHVEECSCYPRYPGVRCVCRDNWKGSNRPIVDINVKDYSIVSSYVCSGLVGDTPRKTDSFSSSHCLDPNNEEGGHGVKGWAFDDGNDVWMGRTISEKLRSGYETFKVIEGWSKPNSKLQINRQVIVERGNRSGYSGIFSVEGKSCINRCFYVELIRGRKEETEVWWTSNSIVVFCGTSGTYGTGSWPDGADINLMPI

SEQ ID NO: 21752 - protein, 469 aa, Artificial Sequence; identical to SEQ ID NO: 14135
  derived and/or modified protein sequence (wt) from neuraminidase__InfluenzaA__AFD64013

SEQ ID NO: 21753 - protein, 469 aa, Artificial Sequence
  derived and/or modified protein sequence (wt) from neuraminidase__InfluenzaA__AFD64024
MNPNQKIITIGSVSLTIAAICFLMQIAILVTTVTLHFKQHECNSPPNNQVMLCEPTIIEKNITEIVYLTNTTIEKEICPKLAEYRNWSKPQCNITGFAPFSKDNSIRLSAGGDIWVTREPYVSCDPDKCYQFALGQGTTLNNGHSNDTVHDRTPYRTLLMNELGVPFHLGTRQVCIAWSSSSCHDGKAWLHVCVTGDDKNATASFIYNGRLVDSIGSWSKKILRTQESECVCINGTCTVVMTDGSASGKADTKILFIEEGKIVHISTLSGSAQHVEECSCYPRYPGVRCVCRDNWKGSNRPIVDINVKDYSIVSSYVCSGLVGDTPRKNDSFSSSHCLDPNNEEGGHGVKGWAFDDGNDVWMGRTISEKLRSGYETFKVIEGWSKPNSKLQINRQVIVERGNRSGYSGIFSVEGKSCINRCFYVELIRGRKEETEVWWTSNSIVVFCGTSGTYGTGSWPDGADINLMPI

SEQ ID NO: 21754 - protein, 469 aa, Artificial Sequence
  derived and/or modified protein sequence (wt) from neuraminidase__InfluenzaA__AFD64035
MNPNQKIITIGSVSLTIAAICFLMQIAILVTTVTLHFKQHECNSPPNNQVMLCEPTIIERNITEIVYLTNTTIEKEICPKLAEYRNWSKPQCNITGFAPFSKDNSIRLSAGGDIWVTREPYVSCDPDKCYQFALGQGTTLNNGHSNDTVHDRTPYRTLLMNELGVPFHLGTRQVCIAWSSSSCHDGKAWLHVCVTGDDKNATASFIYNGRLVDSIGSWSKKILRTQESECVCINGTCTVVMTDGSASGKADTKILFIEEGKIVHISTLSGSAQHVEECSCYPRYPGVRCVCRDNWKGSNRPIVDINVKDYSIVSSYVCSGLVGDTPRKNDSFSSSHCLDPNNEEGGHGVKGWAFDDGNDVWMGRTISEKLRSGYETFKVIEGWSKPNSKLQINRQVIVERGNRSGYSGIFSVEGKSCINRCFYVELIRGRKEETEVWWTSNSVVVFCGTSGTYGTGSWPDGADINLMPI

SEQ ID NO: 21755 - protein, 469 aa, Artificial Sequence
  derived and/or modified protein sequence (wt) from neuraminidase__InfluenzaA__AFD64046
MNPNQKIITIGSVSLTIATICFLMQIAILVTTVTLHFKQHECNSPPNNQVMLCEPTIIERNITEIVYLTNTTIEKEICPKLAEYRNWSKPQCNITGFAPFSKDNSIRLSAGGDIWVTREPYVSCDPDKCYQFALGQGTTLNNGHSNDTVHERTPYRTLLMNELGVPFHLGTRQVCIAWSSSSCHDGKAWLHVCVTGDDKNATASFIYNGRLVDSIGSWSKKILRTQESECVCINGTCTVVMTDGSASGKADTKILFIEEGKIVHISTLSGSAQHVEECSCYPRYPGVRCVCRDNWKGSNRPIVDINVKDYSIVSSYVCSGLVGDTPRKNDSFSSSHCLDPNNEEGGHGVKGWAFDDGNDVWMGRTISEKLRSGYETFKVIEGWSKPNSKLQINRQVIVERGNRSGYSGIFSVEGKSCINRCFYVELIRGRKEETEVWWTSNSIVVFCGTSGTYGTGSWPDGADINLMPI

SEQ ID NO: 21756 - protein, 469 aa, Artificial Sequence; identical to SEQ ID NO: 21730
  derived and/or modified protein sequence (wt) from neuraminidase__InfluenzaA__AFD64057

SEQ ID NO: 21757 - protein, 469 aa, Artificial Sequence
  derived and/or modified protein sequence (wt) from neuraminidase__InfluenzaA__AFD64068
MNPNQKIITIGSVSLTISTICFFMQIAILITTVTLHFKQYEFNSPPNNQVMLCEPTIIERNITEIVYLTNTTIEKEICPKLAEYRNWSKPQCDITGFAPFSKDNSIRLSAGGDIWVTREPYVSCDPDKCYQFALGQGTTLNNVHSNDTVHNRTPYRTLLMNELGVPFHLGTKQVCIAWSSSSCHDGKAWLHVCVTGDDKNATASFIYNGRLVDSIVSWSKKILRTQESECVCINGTCTVVMTDGSASGKADTKILFIEEGKIVHTSTLSGSAQHVEECSCYPRYPGVRCVCRDNWKGSNRPIVDINIKDYSIVSSYVCSGLVGDTPRKNDSSSSSHCLDPNNEEGGHGVKGWAFDDGNDVWMGRTISEKSRSGYETFKVIEGWSNPNSKLQINRQVIVDRGNRSGYSGIFSVEGKSCINRCFYVELIRGRKEETEVLWTSNSIVVFCGTSGTYGTGSWPDGADINLMPI

SEQ ID NO: 21758 - protein, 469 aa, Artificial Sequence
  derived and/or modified protein sequence (wt) from neuraminidase__InfluenzaA__AFD64079
MNPNQKIITIGSVSLTIAAICFLMQIAILVTTVTLHFKQHECNSPPNNQVMLCEPTIIERNITEIVYLTNTTIEKEICPKLAEYRNWSKPQCNITGFAPFSKDNSIRISAGGDIWVTREPYVSCDPDKCYQFALGQGTTLNNGHSNDTVHDRTPYRTLLMNELGVPFHLGTRQVCIAWSSSSCHDGKAWLHVCVTGDDKNATASFIYNGRLVDSIGSWSKKILRTQESECVCINGTCTVVMTDGSASGKADTKILFIEEGKIVHISTLSGSAQHVEECSCYPRYPGVRCVCRDNWKGSNRPIVDINVKDYSIVSSYVCSGLVGDTPRKNDSFSSSHCLDPNNEEGGHGVKGWAFDDGNDVWMGRTISEKLRSGYETFKVIEGWSKPNSKLQINRQVIVERGNRSGYSGIFSVEGKSCINRCFYVELIRGRKEETEVWWTSNSIVVFCGTSGTYGTGSWPDGADINLMPI

SEQ ID NO: 21759 - protein, 469 aa, Artificial Sequence; identical to SEQ ID NO: 14225
  derived and/or modified protein sequence (wt) from neuraminidase__InfluenzaA__AFD64090

SEQ ID NO: 21760 - protein, 469 aa, Artificial Sequence
  derived and/or modified protein sequence (wt) from neuraminidase__InfluenzaA__AFD64101
MNPNQKIITIGSVSLTIAAICFLMQIAILVTTVTLHFKQHECNSPPNNQVMLCEPTIIERNITEIVYLTNTTIEKEICPKLAEYRNWSKPQCNITGFAPFSKDNSIRLSAGGDIWVTREPYVSCDPDKCYQFALGQGTTLNNGHSNDTVHGRTPYRTLLMNELGVPFHLGTRQVCIAWSSSSCHDGKAWLHVCVTGDDKNATASFIYNGRLVDSIGSWSKKILRTQESECVCINGTCTVVMTDGSASGKADTKILFIEEGKIVHISTLSGSAQHVEECSCYPRYPGVRCVCRDNWKGSNRPIVDINVKDYSIVSSYVCSGLVGDTPRKNDSFSSSHCLDPNNEEGGHGVKGWAFDDGNDVWMGRTISEKLRSGYETFKVIEGWSKPNSKLQINRQVIVERGNRSGYSGIFSVEGKSCINRCFYVELIRGRKEETEVWWTSNSIVVFCGTSGTYGTGSWPDGADINLMPI

SEQ ID NO: 21761 - protein, 469 aa, Artificial Sequence
  derived and/or modified protein sequence (wt) from neuraminidase__InfluenzaA__AFD64112
MNPNQKIITIGSVSLTIATICFLMQIAILVTTVTLHFKQYECNSPPNNQVMLCEPTIIERNITEIVYLTNTTIEKEICPKLAEYRNWSKPQCNITGFAPFSKDNSIRLSAGGDIWVTREPYVSCDPDKCYQFALGQGTTLNNGHSNDTVHDRTPYRTLLMNELGVPFHLGTRQVCIAWSSSSCHDGKAWLHVCVTGDDKNATASFIYNGRLVDSIGSWSKKILRTQESECVCINGTCTVVMTDGSASGKADTKILFIEEGKIIHISTLSGSAQHVEECSCYPRYPGVRCVCRDNWKGSNRPIVDINVKDYSIVSSYVCSGLVGDTPRKNDSSSSSHCLDPNNEEGGHGVKGWAFDDGNDVWMGRTISEKLRSGYETFKVIEGWSKPNSKLQINRQVIVERDNRSGYSGIFSVEGKSCINRCFYVELIRGRKEETEVWWTSNSIVVFCGTSGTYGTGSWPDGADINLMPI

SEQ ID NO: 21762 - protein, 469 aa, Artificial Sequence; identical to SEQ ID NO: 15931
  derived and/or modified protein sequence (wt) from neuraminidase__InfluenzaA__AFD64123

SEQ ID NO: 21763 - protein, 469 aa, Artificial Sequence; identical to SEQ ID NO: 14225
  derived and/or modified protein sequence (wt) from neuraminidase__InfluenzaA__AFD64134

SEQ ID NO: 21764 - protein, 469 aa, Artificial Sequence; identical to SEQ ID NO: 14225
  derived and/or modified protein sequence (wt) from neuraminidase__InfluenzaA__AFD64145

SEQ ID NO: 21765 - protein, 469 aa, Artificial Sequence; identical to SEQ ID NO: 14225
  derived and/or modified protein sequence (wt) from neuraminidase__InfluenzaA__AFD64156

SEQ ID NO: 21766 - protein, 469 aa, Artificial Sequence; identical to SEQ ID NO: 14145
  derived and/or modified protein sequence (wt) from neuraminidase__InfluenzaA__AFD64167

SEQ ID NO: 21767 - protein, 469 aa, Artificial Sequence; identical to SEQ ID NO: 14225
  derived and/or modified protein sequence (wt) from neuraminidase__InfluenzaA__AFD64181

SEQ ID NO: 21768 - protein, 469 aa, Artificial Sequence
  derived and/or modified protein sequence (wt) from neuraminidase__InfluenzaA__AFD64192
MNPNQKIITIGSVSLTIAAICFLMQIAILVTTVTLHFKQHECNSPPNNQVMLCEPTIIERNITEIVYLTNTTIEKEICPKLAEYRNWSKPQCNITGFAPFSKDNSIRLSAGGDIWVTREPYVSCDPDKCYQFALGQGTTLNNGHSNDTVHDRTPYRTLLMNELGVPFHLGTRQVCIAWSSSSCHDGKAWLHVCVTGDDKNATASFIYNGRLVDSIGSWSKKILRTQESECVCINGTCTVVMTDGSASGKADTKILFIEEGKIVHVSTLSGSAQHVEECSCYPRYPGVRCVCRDNWKGSNRPIVDINVKDYSIVSSYVCSGLVGDTPRKNDSFSSSHCLDPNNEEGGHGVKGWAFDDGNDVWMGRTISEKLRSGYETFKVIEGWSKPNSKLQINRQVIVERGNRSGYSGIFSVEGKSCINRCFYVELIRGRKEETEVWWTSNSIVVFCGTSGTYGTGSWPDGADINLMPI

SEQ ID NO: 21769 - protein, 469 aa, Artificial Sequence
  derived and/or modified protein sequence (wt) from neuraminidase__InfluenzaA__AFD64203
MNPNQKIITIGSVSLTIAAICFLMQIAILVTTVTLHFKQHECNSPPNNQVMLCEPTIIERNITEIVYLTNTTIEKEICPKLAEYRNWSKPQCNITGFAPFSKDNSIRLSAGGDIWVTREPYVSCDPDKCYQFALGQGTTLNNRHSNDTVHDRTPYRTLLMNELGVPFHLGTRQVCIAWSSSSCHDGKAWLHVCVTGDDKNATASFIYNGRLVDSIGSWSKKILRTQESECVCINGTCTVVMTDGSASGKADTKILFIEEGKIVHISTLSGSAQHVEECSCYPRYPGVRCVCRDNWKGSNRPIVDINVKDYSIVSSYVCSGLVGDTPRKNDSFSSSHCLDPNNEEGGHGVKGWAFDDGNDVWMGRTLSEKLRSGYETFKVIEGWSKPNSKLQINRQVIVERGNRSGYSGIFSVEGKSCINRCFYVELIRGRKEETEVWWTSNSIVVFCGTSGTYGTGSWPDGADINLMPI

SEQ ID NO: 21770 - protein, 469 aa, Artificial Sequence; identical to SEQ ID NO: 21730
  derived and/or modified protein sequence (wt) from neuraminidase__InfluenzaA__AFD64214

SEQ ID NO: 21771 - protein, 469 aa, Artificial Sequence; identical to SEQ ID NO: 15929
  derived and/or modified protein sequence (wt) from neuraminidase__InfluenzaA__AFD64225

SEQ ID NO: 21772 - protein, 469 aa, Artificial Sequence; identical to SEQ ID NO: 14225
  derived and/or modified protein sequence (wt) from neuraminidase__InfluenzaA__AFD64317

SEQ ID NO: 21773 - protein, 469 aa, Artificial Sequence; identical to SEQ ID NO: 15931
  derived and/or modified protein sequence (wt) from neuraminidase__InfluenzaA__AFD64328

SEQ ID NO: 21774 - protein, 469 aa, Artificial Sequence; identical to SEQ ID NO: 21730
  derived and/or modified protein sequence (wt) from neuraminidase__InfluenzaA__AFD64339

SEQ ID NO: 21775 - protein, 469 aa, Artificial Sequence; identical to SEQ ID NO: 14225
  derived and/or modified protein sequence (wt) from neuraminidase__InfluenzaA__AFD64350

SEQ ID NO: 21776 - protein, 469 aa, Artificial Sequence; identical to SEQ ID NO: 21730
  derived and/or modified protein sequence (wt) from neuraminidase__InfluenzaA__AFD64361

SEQ ID NO: 21777 - protein, 469 aa, Artificial Sequence; identical to SEQ ID NO: 21730
  derived and/or modified protein sequence (wt) from neuraminidase__InfluenzaA__AFD64372

SEQ ID NO: 21778 - protein, 469 aa, Artificial Sequence; identical to SEQ ID NO: 14225
  derived and/or modified protein sequence (wt) from neuraminidase__InfluenzaA__AFD64383

SEQ ID NO: 21779 - protein, 469 aa, Artificial Sequence; identical to SEQ ID NO: 21730
  derived and/or modified protein sequence (wt) from neuraminidase__InfluenzaA__AFD64394

SEQ ID NO: 21780 - protein, 469 aa, Artificial Sequence; identical to SEQ ID NO: 14225
  derived and/or modified protein sequence (wt) from neuraminidase__InfluenzaA__AFD64405

SEQ ID NO: 21781 - protein, 469 aa, Artificial Sequence; identical to SEQ ID NO: 14225
  derived and/or modified protein sequence (wt) from neuraminidase__InfluenzaA__AFD64416

SEQ ID NO: 21782 - protein, 469 aa, Artificial Sequence; identical to SEQ ID NO: 14225
  derived and/or modified protein sequence (wt) from neuraminidase__InfluenzaA__AFD64427

SEQ ID NO: 21783 - protein, 469 aa, Artificial Sequence
  derived and/or modified protein sequence (wt) from neuraminidase__InfluenzaA__AFD64438
MNPNQKIITIGSVSLTIAAICFLMQIAILVTTVTLHFKQHECNSPPNNQVMLCEPTIIERNITEIVYLTNTTIEKEICPNLAEYRNWSKPQCNITGFAPFSKDNSIRLSAGGDIWVTREPYVSCDPDKCYQFALGQGTTLNNGHSNDTVHDRTPYRTLLMNELGVPFHLGTRQVCIAWSSSSCHDGKAWLHVCVTGDDKNATASFIYNGRLVDSIGSWSKKILRTQESECVCINGTCTVVMTDGSASGKADTKILFIEEGKIVHISTLSGSAQHVEECSCYPRYPGVRCVCRDNWKGSNRPIVDINVKDYSIVSSYVCSGLVGDTPRKNDSFSSSHCLDPNNEEGGHGVKGWAFDDGNDVWMGRTISEKLRSGYETFKVIEGWSKPNSKLQINRQVIVERGNRSGYSGIFSVEGKSCINRCFYVELIRGRKEETEVWWTSNSIVVFCGTSGTYGTGSWPDGADINLMPI

SEQ ID NO: 21784 - protein, 469 aa, Artificial Sequence; identical to SEQ ID NO: 14225
  derived and/or modified protein sequence (wt) from neuraminidase__InfluenzaA__AFD64449

SEQ ID NO: 21785 - protein, 469 aa, Artificial Sequence; identical to SEQ ID NO: 14145
  derived and/or modified protein sequence (wt) from neuraminidase__InfluenzaA__AFD64460

SEQ ID NO: 21786 - protein, 469 aa, Artificial Sequence; identical to SEQ ID NO: 21143
  derived and/or modified protein sequence (wt) from neuraminidase__InfluenzaA__AFD98098

SEQ ID NO: 21787 - protein, 469 aa, Artificial Sequence
  derived and/or modified protein sequence (wt) from neuraminidase__InfluenzaA__AFD98120
MNPNQKIITIGSVSLTISTICFFMQIAILITTVTLHFKQYEFNSPPNNQVMLCEPTIIERNITEIVYLTNTTIEKEICPKLAEYRNWSKPQCDITGFAPFSKDNSIRLSAGGDIWVTREPYVSCDPDKCYQFALGQGTTLNNVHSNNTVRDRTPYRTLLMNELGVPFHLGTKQVCIAWSSSSCHDGKAWLHVCITGDDKNATASFIYNGRLVDSVVSWSKEILRTQESECVCINGTCTVVMTDGSASGKADTKILFIEEGKIVHTSTLSGSAQHVEECSCYPRYPGVRCVCRDNWKGSNRPIVDINIKDHSIVSSYVCSGLVGDTPRKNDSSSSSHCLDPNNEEGGHGVKGWAFDDGNDVWMGRTINETSRLGYETFKVIEGWSNPKSKLQINRQVIVDKGNRSGYSGIFSVEGKSCINRCFYVELIRGRKEETEVLWTSNSIVVFCGTSGTYGTGSWPDGADLNLMPI

SEQ ID NO: 21788 - protein, 469 aa, Artificial Sequence; identical to SEQ ID NO: 19518
  derived and/or modified protein sequence (wt) from neuraminidase__InfluenzaA__AFD98131

SEQ ID NO: 21789 - protein, 469 aa, Artificial Sequence; identical to SEQ ID NO: 21143
  derived and/or modified protein sequence (wt) from neuraminidase__InfluenzaA__AFD98142

SEQ ID NO: 21790 - protein, 469 aa, Artificial Sequence; identical to SEQ ID NO: 21787
  derived and/or modified protein sequence (wt) from neuraminidase__InfluenzaA__AFD98164

SEQ ID NO: 21791 - protein, 469 aa, Artificial Sequence
  derived and/or modified protein sequence (wt) from neuraminidase__InfluenzaA__AFD98175
MNPNQKIITIGSVSLTISTICFFMQIAILITTVTLHFKQYEFNSPPNNQVMLCEPTIIERNITEIVYLTNTTIEKEICPKLAEYRNWSKPQCDITGFAPFSKDNSIRLSAGGDIWVTREPYVSCDPDKCYQFALGQGTTLNNVHSNNTVHDRTPYRTLLMNELGVPFHLGTKQVCIAWSSSSCHDGKAWLHVCITGDDKNATASFIYNGRLVDSVVSWSKEILRTQESECVCINGTCTVVMTDGSASGKADTKILFIEEGKIVHTSTLSGSAQHVEECSCYPRYPGVRCVCRDNWKGSNRPIVDINIKDHSIVSSYVCSGLVGDTPRKNDSSSSSHCLDPNNEEGGHGVKGWAFDDGNDVWMGRTINETSRLGYETFKVIEGWSNPKSKLQINRQVIVDKGNRSGYSGIFSVEGKSCINRCFYVELIRGRKEETEVLWTSNSIVVFCGTSGTYGTGSWPDGADLNLMPI

SEQ ID NO: 21792 - protein, 469 aa, Artificial Sequence
  derived and/or modified protein sequence (wt) from neuraminidase__InfluenzaA__AFD98186
MNPNQKIITIGSVSLTISTICFFMQIAILITTVTLHFKQYEFNSPPNNQVMLCEPTIIERNITEIVYLTNTTIEKEICPKLAEYRNWSKPQCDITGFAPFSKDNSIRLSAGGDIWVTREPYVSCDPDKCYQFALGQGTTLNNVHSNNTVRDRTPYRTLLMNELGVPFHLGTKQVCIAWSSSSCHDGKAWLHVCITGDDKNATASFIYNGKLVDSVVSWSKEILRTQESECVCINGTCTVVMTDGSASGKADTKILFVEEGKIVHTSTLSGSAQHVEECSCYPRYPGVRCVCRDNWKGSNRPIVDINIKDHSIISSYVCSGLVGDTPRKNDSSSSSHCLDPNNEEGGHGVKGWAFDDGNDVWMGRTINETSRLGYETFKVIEGWSNPKSKLQINRQVIVDRGNRSGYSGIFSVEGKSCINRCFYVELIRGRKEETEVLWTSNSIVVFCGTSGTYGTGSWPDGADLNLMPI

SEQ ID NO: 21793 - protein, 469 aa, Artificial Sequence; identical to SEQ ID NO: 19518
  derived and/or modified protein sequence (wt) from neuraminidase__InfluenzaA__AFD98197

SEQ ID NO: 21794 - protein, 469 aa, Artificial Sequence; identical to SEQ ID NO: 20255
  derived and/or modified protein sequence (wt) from neuraminidase__InfluenzaA__AFD98208

SEQ ID NO: 21795 - protein, 469 aa, Artificial Sequence
  derived and/or modified protein sequence (wt) from neuraminidase__InfluenzaA__AFD98218
MNPNQKIITIGSVSLTISTICFFMQIAILITTVTLHFKQYEFNSPPNNQVMLCEPTIIERNITEIVYLTNTTIEKEICPKPAEYRNWSKPQCDITGFAPFSKDNSIRLSAGGDIWVTREPYVSCDPDKCYQFALGQGTTLNNVHSNNTVRDRTPYRTLLMNELGVPFHLGTKQVCIAWSSSSCHDGKAWLHVCITGDDKNATASFIYNGRLVDSVVSWSKEILRTQESECVCINGTCTVVMTDGSASGKADTKILFIEEGKIVHTSTLSGSAQHVEECSCYPRYPGVRCVCRDNWKGSNRPIVDINIKDHSIVSSYVCSGLVGDTPRKNDSSSSSHCLDPNNEEGGHGVKGWAFDDGNDVWMGRTIDETSRLGYETFKVIEGWSNPKSKLQINRQVIVDKGNRSGYSGIFSVEGKSCINRCFYVELIRGRKEETEVLWTSNSIVVSCGTSGTYGTGSWPDGADLNLMPI

SEQ ID NO: 21796 - protein, 469 aa, Artificial Sequence; identical to SEQ ID NO: 19518
  derived and/or modified protein sequence (wt) from neuraminidase__InfluenzaA__AFD98229

SEQ ID NO: 21797 - protein, 469 aa, Artificial Sequence; identical to SEQ ID NO: 19518
  derived and/or modified protein sequence (wt) from neuraminidase__InfluenzaA__AFD98240

SEQ ID NO: 21798 - protein, 469 aa, Artificial Sequence; identical to SEQ ID NO: 21787
  derived and/or modified protein sequence (wt) from neuraminidase__InfluenzaA__AFD98251

SEQ ID NO: 21799 - protein, 469 aa, Artificial Sequence; identical to SEQ ID NO: 21787
  derived and/or modified protein sequence (wt) from neuraminidase__InfluenzaA__AFD98262

SEQ ID NO: 21800 - protein, 469 aa, Artificial Sequence; identical to SEQ ID NO: 20709
  derived and/or modified protein sequence (wt) from neuraminidase__InfluenzaA__AFD98273

SEQ ID NO: 21801 - protein, 469 aa, Artificial Sequence; identical to SEQ ID NO: 20257
  derived and/or modified protein sequence (wt) from neuraminidase__InfluenzaA__AFD98283

SEQ ID NO: 21802 - protein, 469 aa, Artificial Sequence; identical to SEQ ID NO: 19518
  derived and/or modified protein sequence (wt) from neuraminidase__InfluenzaA__AFD98293

SEQ ID NO: 21803 - protein, 469 aa, Artificial Sequence; identical to SEQ ID NO: 20709
  derived and/or modified protein sequence (wt) from neuraminidase__InfluenzaA__AFD98313

SEQ ID NO: 21804 - protein, 469 aa, Artificial Sequence; identical to SEQ ID NO: 20257
  derived and/or modified protein sequence (wt) from neuraminidase__InfluenzaA__AFD98323

SEQ ID NO: 21805 - protein, 469 aa, Artificial Sequence; identical to SEQ ID NO: 20709
  derived and/or modified protein sequence (wt) from neuraminidase__InfluenzaA__AFD98333

SEQ ID NO: 21806 - protein, 469 aa, Artificial Sequence; identical to SEQ ID NO: 21787
  derived and/or modified protein sequence (wt) from neuraminidase__InfluenzaA__AFD98343

SEQ ID NO: 21807 - protein, 469 aa, Artificial Sequence
  derived and/or modified protein sequence (wt) from neuraminidase__InfluenzaA__AFD98354
MNPNQKIITIGSVSLTISTICFFMQIAILITTVTLHFKQYEFNSPPNNQVMLCEPTIIERNITEIVYLTNTTIEKEICPKLAEYRNWSKPQCDITGFAPFSKDNSIRLSAGGDIWVTREPYVSCDPDKCYQFALGQGTTLNNVHSNNTVRDRTPYRTLLMNELGVPFHLGTKQVCIAWSSSSCHDGKAWLHVCITGDDKNATASFIYNGRLVDSVVSWSKEILRTQESECVCINGTCTVVMTDGNASGKADTKILFIEEGKIVHTSTLLGSAQHVEECSCYPRYPGVRCVCRDNWKGSNRPIVDINIKDHSIVSSYVCSGLVGDTPRKNDSSSSSHCLDPNNEEGGHGVKGWAFDDGNDVWMGRTINETSRLGYETFKVIEGWSNPKSKLQINRQVIVDKGNRSGYSGIFSVEGKSCINRCFYVELIRGRKEETEVLWTSNSIVVFCGTSGTYGTGSWPDGADLNLMPI

SEQ ID NO: 21808 - protein, 469 aa, Artificial Sequence
  derived and/or modified protein sequence (wt) from neuraminidase__InfluenzaA__AFD98365
MNPNQKIITIGSVSLTISTICFFMQIAILITTVTLHFKQYEFYSPPNNQVMLCEPTIIERNITEIVYLTNTTIEKEICPKLAEYRNWSKPQCDITGFAPFSKDNSIRLSAGGDIWVTREPYVSCDPDKCYQFALGQGTTLNNVHSNNTVRDRTPYRTLLMNELGVPFHLGTKQVCIAWSSSSCHDGKAWLHVCITGDDKNATASFIYNGRLVDSVVSWSKEILRTQESECVCINGTCTVVMTDGSASGKADTKILFIEEGKIVHTSTLSGSAQHVEECSCYPRYPGVRCVCRDNWKGSNRPIVDINIKDHSIVSSYVCSGLVGDTPRKNDSSSSSHCLDPNNEEGGHGVKGWAFDDGNDVWMGRTINETSRLGYETFKVIEGWSNPKSKLQINRQVIVDRGNRSGYSGIFSVEGKSCINRCFYVELIRGRKEETKVLWTSNSIVVFCGTSGTYGTGSWPDGADLNLMPI

SEQ ID NO: 21809 - protein, 469 aa, Artificial Sequence
  derived and/or modified protein sequence (wt) from neuraminidase__InfluenzaA__AFD98376
MNPNQKIITIGSVSLTISTICFFMQIAILITTVTLHFKQYEFNFPPNNQVMLCEPTIIERNITEIVYLTNTTIEKEICPKLAEYRNWSKPQCDITGFAPFSKDNSIRLSAGGDIWVTREPYVSCDPDKCYQFALGQGTTLNNVHSNNTVRDRTPYRTLLMNELGVPFHLGTKQVCIAWSSSSCHDGKAWLHVCITGDDKNATASFIYNGRLVDSVVSWSKEILRTQESECVCINGTCTVVMTDGSASGKADTKILFIEEGKIVHTSTLSGSAQHVEECSCYPRYPGVRCVCRDNWKGSNRPIVDINIKDHSIVSSYVCSGLVGDTPRKNDSSSSGHCLDPNNEEGGHGVKGWAFDDGNDVWMGRTINETSRLGYETFKVIEGWSNPKSKLQINRQVIVDKGNRSGYSGIFSVEGKSCINRCFYVELIRGRKEETEVLWTSNSIVVFCGTSGTYGTGSWPDGADLNLMPI

SEQ ID NO: 21810 - protein, 469 aa, Artificial Sequence
  derived and/or modified protein sequence (wt) from neuraminidase__InfluenzaA__AFD98387
MNPNQKIITIGSVSLTISTICFLMQIAILITTVTLHFKQYEFNSPPNNQVMLCEPTIIERNITEIVYLTNTTIEKEICPKLAEYRDWSKPQCDITGFAPFSKDNSIRLSAGGDIWVTREPYVSCDPDKCYQFALGQGTTLNNVHSNNTVRDRTPYRTLLMNELGVPFHLGTKQVCIAWSSSSCHDGKAWLHVCITGDDKNATASFIYNGKLVDSVVSWSKEILRTQESECVCINGTCTVVMTDGSASGKADTKILFIEEGKIVHTSTLSGSAQHVEECSCYPRYPGVRCVCRDNWKGSNRPIVDINIKDHSIVSSYVCSGLVGDTPRKNDRSSNSHCLDPNNEEGGHGVKGWAFDDGNDVWMGRTINETSRLGYETFKVIEGWSNPKSKLQINRQVIVDRGNRSGYSGIFSVEGKSCINRCFYVELIRGRKEETEVLWTSNSIVVFCGTSGTYGTGSWPDGADLNLMPI

SEQ ID NO: 21811 - protein, 469 aa, Artificial Sequence
  derived and/or modified protein sequence (wt) from neuraminidase__InfluenzaA__AFD98398
MNPNQKIITIGSVSLTISTICFFMQIAILITTVTLHFKQYEFNSPPNNQVMLCEPTIIERNITEIVYLTNTTIEKEICPKLAEYRNWSKPQCDITGFAPFSKDNSIRLSAGGDIWVTREPYVSCDPDKCYQFALGQGTTLNNVHSNNTVRDRTPYRTLLMNELGVPFHLGTRQVCIAWSSSSCHDGKAWLHVCITGDDKNATASFIYNGRLVDSVVSWSKEILRTQESECVCINGTCTVVMTDGSASGKADTKILFIEEGKIVHTSTLSGSAQHVEECSCYPRYPGVRCVCRDNWKGSNRPIVDINIKDHSIVSSYVCSGLVGDTPRKNDSSSSSHCLDPNNEEGGHGVKGWAFDDGNDVWMGRTINETSRLGYETFKVIEGWSNPKSKLQINRQVIVDKGNRSGYSGIFSVEGKSCINRCFYVELIRGRKEETEVLWTSNSIVVFCGTSGTYGTGSWPDGADLNLMPI

SEQ ID NO: 21812 - protein, 469 aa, Artificial Sequence
  derived and/or modified protein sequence (wt) from neuraminidase__InfluenzaA__AFD98409
MNPNQKIITIGSVSLTISTICFFMQIAILITTVTLHFKQYEFNSPPNNQVMLCEPTIIERNITEIVYLTNTTIEKEICPKLAEYRNWSKPQCDITGFAPFSKDNSIRLSAGGDIWVTREPYVSCDPDKCYQFALGQGTTLNNVHSNNTVRDRTPYRTLLMNELGVPFHLGTKQVCIAWSSSSCHDGKAWLHVCITGDDKNATASFIYNGRLVDSVVSWSKEILRTQESECVCINGTCTVVMTDGSASGKADTKILFIEEGKIVHTSTLSGSAQHVEECSCYPRYPGVRCVCRDNWKGSNRPIVDINIKDHSIVSSYVCSGLVGDTPRKNDSSSSGHCLDPNNEEGGHGVKGWAFDDGNDVWMGRTINETSRLGYETFKVIEGWSNPKSKLQINRQVIVDKGNRSGYSGIFSVEGKSCINRCFYVELIRGRKEETEVLWTSNSIVVFCGTSGTYGTGSWPDGADLNLMPI

SEQ ID NO: 21813 - protein, 469 aa, Artificial Sequence; identical to SEQ ID NO: 21787
  derived and/or modified protein sequence (wt) from neuraminidase__InfluenzaA__AFD98420

SEQ ID NO: 21814 - protein, 469 aa, Artificial Sequence
  derived and/or modified protein sequence (wt) from neuraminidase__InfluenzaA__AFD98431
MNPNQKIITIGSVSLTISTICFFMQIAILITTVTLHFKQYEFNSPPNNQVMLCEPTIIERNITEIVYLTNTTIEKEICPKLAEYRNWSKPQCDITGFAPFSKDNSIRLSAGGDIWVTREPYVSCDPDKCYQFALGQGTTLNNVHSNNTVRDRTPYRTLLMNELGVPFHLGTKQVCIAWSSSSCHDGKAWLHVCITGDDKNATASFIYNGRLVDSVVSWSKEILRTQESECVCINGTCTVVMTDGSASGKADTKILFIEEGKIVHTSTLSGSAQHVEECSCYPRYPGVRCVCRDNWKGSNRPIVDINIKDHSIVSSYVCSGLVGDTPRKNDSSSSSHCLDPNNEEGGHGVKGWAFDDGNDVWMGRTINETSRLGYETFKVIEGWSNPKSKLQINRQVIVGRGNRSGYSGIFSVEGKSCINRCFYVELIRGRKEETEVLWTSNSIVVFCGTSGTYGTGSWPDGADLNLMPI

SEQ ID NO: 21815 - protein, 469 aa, Artificial Sequence
  derived and/or modified protein sequence (wt) from neuraminidase__InfluenzaA__AFD98442
MNPNQKIITIGSVCMTIGMANLILQIGNIISIWISHSIQLGNQNQIETCNQSVITYENNTWVNQTYVNISNTNFAAGQSVVSVKLAGNSSLCPVSGWAIYSKDNSIRIGSKGDVFVIREPFISCSPLECRTFFLTQGALLNDKHSNGTIKDRSPYRTLMSCPIGEVPSPYNSRFESVAWSASACHDGINWLTIGISGPDNGAVAVLKYNGIITDTIKSWRNNILRTQESECACVNGSCFTIMTDGPSDGQASYKIFRIEKGKIVKSVEMNAPNYHYEECSCYPDSGEITCVCRDNWHGSNRPWVSFNQNLEYQIGYICSGIFGDNPRPNDKTGSCGPVSSNGANGVKGFSFKYGNGVWIGRTKSISSRKGFEMIWDPNGWTGTDNNFAIKQDIVGINEWSGYSGSFVQHPELTGLDCIRPCFWVELIRGRPKENTIWTSGSSISFCGVNSDTVGWSWPDGAELPFTIDK

SEQ ID NO: 21816 - protein, 469 aa, Artificial Sequence
  derived and/or modified protein sequence (wt) from neuraminidase__InfluenzaA__AFD98452
MNPNQKIITLGSVSLTISTICFFIQIAILITTVTLHFKQYEFNSPPNNQVMLCEPTIIERNITEIVYLTNTTIEKEICPKLAEYRNWSKPQCDITGFAPFSKDNSIRLSAGGDIWVTREPYVSCDPDKCYQFALGQGTTLNNVHSNNTVRDRTPYRTLLMNELGVPFHLGTKQVCIAWSSSSCHDGKAWLHVCITGDDKNATASFIYNGRLVDSVVSWSKEILRTQESECVCINGTCTVVMTDGSASGKADTKILFIEEGKIVHTSTLSGSAQHVEECSCYPRYPGVRCVCRDNWKGSNRPIVDINIKDHSIVSSYVCSGLVGDTPRKNDSSSSSHCLDPNNEEGGHGVKGWAFDDGNDVWMGRTINETSRLGYETFKVIEGWSNPKSKLQINRQVIVDRGNRSGYSGIFSVEGKSCINRCFYVELIRGRKEETEVLWTSNSIVVFCGTSGTYGTGSWPDGADLNLMPI

SEQ ID NO: 21817 - protein, 469 aa, Artificial Sequence; identical to SEQ ID NO: 21787
  derived and/or modified protein sequence (wt) from neuraminidase__InfluenzaA__AFD98463

SEQ ID NO: 21818 - protein, 469 aa, Artificial Sequence
  derived and/or modified protein sequence (wt) from neuraminidase__InfluenzaA__AFD98474
MNPNQKIITIGSVCMTIGMANLILQIGNIISIWISHSIQLGNQNQIETCNQSVITYENNTWVNQTYVNISNTNFAAGQSVVSVKLAGNSSLCPVSGWAIYSKDNSIRIGSKGDVFVIREPFISCSPLECRTFFLTQGALLNDKHSNGTIKDRSPYRTLMSCPIGEVPSPYNSRFESVAWSASACHDGINWLTIGISGPDNGAVAVLKYNGIITDTIKSWRNNILRTQESECACVNGSCFTIMTDGPSDGQASYKIFRIEKGKIVKSVEMNAPNYHYEECSCYPDSSEITCVCRDNWHGSNRPWVSFNQNLEYQIGYICSGIFGDNPRPNDKTGSCGPVSSNGANGVKGFSFKYGNGVWIGRTKSISSRKGFEMIWDPNGWTGTDNNFSIKQDIIGINEWSGYSGSFVQHPELTGLDCIRPCFWVELIRGRPKENTIWTSGSSISFCGVNSDTVGWSWPDGAELPFTIDK

SEQ ID NO: 21819 - protein, 469 aa, Artificial Sequence
  derived and/or modified protein sequence (wt) from neuraminidase__InfluenzaA__AFD98484
MNPNQKIITIGSVSLTISTICFFMQIAILITTVTLHFKQYEFNSPPNNQVMLCEPTIIERNITEIVYLTNTTIEKEICPKLAEYRNWSKPQCDITGFAPFSKDNSIRLSAGGDIWVTREPYVSCDPDKCYQFALGQGTTLNNVHSNNTVRDRTPYRTLLMNELGVPFHLGTKQVCIAWSSSSCHDGKAWLHVCITGDDKNATASFIYNGRLVDSVVSWSKEILRTQESECVCINGTCTVVMTDGSASGKADTKILFIEEGKIVHTSTLSGSAQHVEECSCYPRYPGVRCVCRDNWKGSNRPIVDINIKDHSIVSSYVCSGLVGDTPRKNDSSSSSHCLDPNNEEGGHGVKGWAFDDGNDVWMGRTINETSRLGYETFKVIEGWSNPKSKLQMNRQVIVDRGNRSGYSGIFSVEGKSCINRCFYVELIRGRKEETEVLWTSNSIVVFCGTSGTYGTGSWPDGADLNLMPI

SEQ ID NO: 21820 - protein, 469 aa, Artificial Sequence
  derived and/or modified protein sequence (wt) from neuraminidase__InfluenzaA__AFD98495
MNPNQKIITIGSVSLTISTICFFMQIAILITTVTLHFKQYEFNSPPNNQVMLCEPTIIERNITEIVYLTNTTIEKEICPKLAEYRNWSKPQCDITGFAPFSKDNSIRLSAGGDIWVTREPYVSCDPDKCYQFALGQGTTLNNVHSNNTVRDRTPYRTLLMNELGVPFHLGTKQVCIAWSSSSCHDGKAWLHVCITGDDKNATASFIYNGKLVDSVVSWSKEILRTQESECVCINGTCTVVMTDGSASGKANTKILFIEEGKIVHTSTLSGSAQHVEECSCYPRYPGVRCVCRDNWKGSNRPIVDINIKDHSIVSSYVCSGLVGDTPRKNDSSSSSHCLDPNNEEGGHGVKGWAFDDGNDVWMGRTINETSRLGYETFKVIEGWSNPKSKLQINRQVIVDRGNRSGYSGIFSVEGKSCINRCFYVELIRGRKEETEVLWTSNSIVVFCGTSGTYGTGSWPDGADLNLMPI

SEQ ID NO: 21821 - protein, 469 aa, Artificial Sequence; identical to SEQ ID NO: 21787
  derived and/or modified protein sequence (wt) from neuraminidase__InfluenzaA__AFD98506

SEQ ID NO: 21822 - protein, 469 aa, Artificial Sequence
  derived and/or modified protein sequence (wt) from neuraminidase__InfluenzaA__AFD98517
MNPNQKIITIGSVSLTISTICFFMQIAILITTVTLHFKQYEFNSPPNNQVMLCEPTIIERNITEIVYLTNTTIEKEICPKLAEYRNWSKPQCDITGFAPFSKDNSIRLSAGGDIWVTREPYVSCDPDKCYQFALGQGTTLNNVHSNNTVRDRTPYRTLLMNELGVPFHLGTKQVCIAWSSSSCHDGKAWLHVCITGDDKNATASFIYNGKLVDSVVSWSKEILRTQESECVCINGTCTVVMTDGSASGKADTKILFIKEGKIVHTSTLSGSAQHVEECSCYPRYPGVRCVCRDNWKGSNRPIVDINIKDHSIVSSYVCSGLVGDTPRKNDSSSSSHCLDPNNEEGGHGVKGWAFDDGNDVWMGRTINETSRLGYETFKVIEGWSNPKSKLQINRQVIVDRGNRSGYSGIFSVEGKSCINRCFYVELIRGRKEETEVLWTSNSIVVFCGTSGTYGTGSWPDGADLNLMPI

SEQ ID NO: 21823 - protein, 469 aa, Artificial Sequence; identical to SEQ ID NO: 19518
  derived and/or modified protein sequence (wt) from neuraminidase__InfluenzaA__AFD98528

SEQ ID NO: 21824 - protein, 469 aa, Artificial Sequence; identical to SEQ ID NO: 21787
  derived and/or modified protein sequence (wt) from neuraminidase__InfluenzaA__AFD98539

SEQ ID NO: 21825 - protein, 469 aa, Artificial Sequence; identical to SEQ ID NO: 21787
  derived and/or modified protein sequence (wt) from neuraminidase__InfluenzaA__AFD98550

SEQ ID NO: 21826 - protein, 469 aa, Artificial Sequence
  derived and/or modified protein sequence (wt) from neuraminidase__InfluenzaA__AFD98561
MNPNQKIITIGSVSLTISTICFFMQIAILITTVTLHFKQYEFNSPPNNQVMLCEPTIIERNITEIVYLTNTTIEKEICPKLAEYRNWSKPQCDITGFAPFSKDNSIRLSAGGDIWVTREPYVSCDPDKCYQFALGQGTTLNNVHSNNTVRDRTPYRTLLMNELGVPFHLGTKQVCIAWSSSSCHDGKAWLHVCITGDDKNATASFIYNGRLVDSVVSWSKEILRTQESECVCINGTCAVVMTDGSASGKADTKILFIEEGKIVHTSTLSGSAQHVEECSCYPRYPGVRCVCRDNWKGSNRPIVDINIKDHSIVSSYVCSGLVGDTPRKSDSSSSSHCLDPNNEEGGHGVKGWAFDDGNDVWMGRTINETSRLGYETFKVIEGWSNPKSKLQINRQVIVDRGNRSGYSGIFSVEGKSCINRCFYVELIRGRKEETEVLWTSNSIVVFCGTSGTYGTGSWPDGADLNLMPI

SEQ ID NO: 21827 - protein, 469 aa, Artificial Sequence
  derived and/or modified protein sequence (wt) from neuraminidase__InfluenzaA__AFD98572
MNPNQKIITIGSVSLTISTICFFMQIAILITTVTLHFKQYEFNSPPNNQVMLCEPTIIERNITEIVYLTNTTLEKEICPKLAEYRNWSKPQCDITGFAPFSKDNSIRLSAGGDIWVTREPYVSCDPDKCYQFALGQGTTLNNVHSNNTVRDRTPYRTLLMNELGVPFHLGTKQVCIAWSSSSCHDGKAWLHVCITGDDKNATASFIYNGRLVDSVVSWSKEILRTQESECVCINGTCTVVMTDGSASGKADTKILFIEEGKIVHTSTLSGSAQHVEECSCYPRYPGVRCVCRDNWKGSNRPIVDINIKDHSIVSSYVCSGLVGDTPRKNDSSSSSHCLDPNNEEGGHGVKGWAFDDGNDVWMGRTINETSRLGYETFKVIEGWSNPKSKLQINRQVIVDRGNRSGYSGIFSVEGKSCINRCFYVELIRGRKEETEVLWTSNSIVVFCGTSGTYGTGSWPDGADLNLMPI

SEQ ID NO: 21828 - protein, 469 aa, Artificial Sequence
  derived and/or modified protein sequence (wt) from neuraminidase__InfluenzaA__AFD98583
MNPNQKIITIGSVSLTISTICFFMQIAILITTVTLHFKQYEFNSPPNNQVMLCEPTIIERNITEIVYLTNTTIEKEICPKLAEYRNWSKPQCDITGFAPFSRDNSIRLSAGGDIWVTREPYVSCDPDKCYQFALGQGTTLNNVHSNNTVRDRTPYRTLLMNELGVPFHLGTKQVCIAWSSSSCHDGKAWLHVCITGDDKNATASFIYNGRLVDSVVSWSKEILRTQESECVCINGTCTVVMTDGSASGKADTKILFIEEGKIVHTSTLSGSAQHVEECSCYPRYPGVRCVCRDNWKGSNRPIVDINIKDHSIVSSYVCSGLVGDTPRKSDSSSSSHCLDPNNEEGGHGVKGWAFDDGNDVWMGRTINETSRLGYETFKVIEGWSNPKSKLQINRQVIVDRGNRSGYSGIFSVEGKSCINRCFYVELIRGRKEETEVLWTSNSIVVFCGTSGTYGTGSWPDGADLNLMPI

SEQ ID NO: 21829 - protein, 469 aa, Artificial Sequence
  derived and/or modified protein sequence (wt) from neuraminidase__InfluenzaA__AFE02944
MNPNQKIITIGSVCMTIGMANLILQIGNIISIWISHSIQLGNQNQIETCNQSVITYENNTWVNQTYVNISNTNFAAGQSVVSVKLAGNSSLCPVSGWAIYSKDNSIRIGSKGDVFVIREPFISCSPLECRTFFLTQGALLNDKHSNGTIKDRSPYRTLMSCPIGEVPSPYNSRFESVAWSASACHDGINWLTIGISGPDNGAVAVLKYNGIITDTIKSWRNNILRTQESECACVNGSCFTVMTDGPSDGQASYKIFRIEKGKIVKSVEMNAPNYHYEECSCYPDSSEITCVCRDNWHGSNRPWVSFNQNLEYQIGYICSGIFGDNPRPNDKTGSCGPVSSNGANGVKGFSFKYGNGVWIGRTKSISSRNGFEMIWDPNGWTGTDNNFSIKQDIVGINEWSGYSGSFVQHPELTGLNCIRPCFWVELIRGRPKENTVWTSGSSISFCGVNSDTVGWSWPDGAELPFTIDK

SEQ ID NO: 21830 - protein, 469 aa, Artificial Sequence
  derived and/or modified protein sequence (wt) from neuraminidase__InfluenzaA__AFE47627
MNPNQKIITIGSVSLTIATICFLMQIAILVTTVTLHFKQYECNSPPNNQVMLCEPTIIERNITEIVYLTNTTIEKEICPKLAEYRNWSKPQCNITGFAPFSKDNSIRLSAGGDIWVTREPYVSCDPDKCYQFALGQGTTLNNGHSNDTVHDRTPYRTLLMNELGVPFHLGTKQVCIAWSSSSCHDGKAWLHVCVTGDDENATASFIYNGRLVDSIGSWSKKILRTQESECVCINGTCTVVMTDGSASGKADTKILFIEEGKIVHTSSLSGSAQHVEECSCYPRYPGVRCVCRDNWKGSNRPIVDINVKDYSIVSSYVCSGLVGDTPRKNDSSSSSHCLDPNNEEGGHGVKGWAFDDGNDVWMGRTISEKLRSGYETFKVIEGWSKPNSKLQTNRQVIVDRGNRSGYSGIFSVESKSCINRCFYVELIRGRKQETEVLWTSNSIVVFCGTSGTYGTGSWPDGADINLMPI

SEQ ID NO: 21831 - protein, 469 aa, Artificial Sequence; identical to SEQ ID NO: 21143
  derived and/or modified protein sequence (wt) from neuraminidase__InfluenzaA__AFF18509

SEQ ID NO: 21832 - protein, 469 aa, Artificial Sequence
  derived and/or modified protein sequence (wt) from neuraminidase__InfluenzaA__AFF57129
MNPNQKIITIGSVCMTIGMANLILQIGNIISIWISHSIQLGNQNQIETCNQSVITYENNTWVNQTYVNISNTNFAAGQSVVSVKLAGNSSLCPVSGWAIYSKDNSIRIGSKGDVFVIREPFISCSPLECRTFFLTQGALLNDKHSNGTIKDRSPYRTLMSCPIGEVPSPYNSRFESVAWSASACHDGINWLTIGISGPDNGAVAVLKYNGIITDTIKSWRNNILRTQESECACVNGSCFTIMTDGPSDGQASYKIFRIEKGKIVKSVEMNAPNYHYEECSCYPDSSEITCVCRDNWHGSNRPWVSFNQNLEYQIGYICSGIFGDNPRPNDKTGSCGPVSSNGANGVKGFSFKYGNGVWIGRTKSISSRKGFEMIWDPNGWNGTDNNFSIKQDIVGINEWSGYSGSFVQHPELTGLDCIRPCFWVELIRGRPKENTIWTSGSSISFCGVNSDTVGWSWPDGAELPFTIDK

SEQ ID NO: 21833 - protein, 469 aa, Artificial Sequence
  derived and/or modified protein sequence (wt) from neuraminidase__InfluenzaA__AFF57133
MNPNQKIITIGSVCMTIGMANLILQIGNIISIWISHSIQLGNQSQIETCNQSVITYENNTWLNQTYVNISNTNFAAGQSVVSVKLAGNSSLCPVSGWAIYSKDNSIRIGSKGDVFVIREPFISCSPSECRTFFLTQGALLNDKHSNGTIKDRSPYRTLMSCPIGEVPSPYNSRFESVAWSASACHDGINWLTIGISGPDNGAVAVLKYNGIITDTIKSWRNNILRTQESECACVNGSCFTIMTDGPSDGQASYKIFRIEKGKIVKSVEMNAPNYHYEECSCYPDSSEITCVCRDNWHGSNRPWVSFNQNLEYQIGYICSGIFGDNPRPNDKTGSCGPVSSNGANGVKGFSFKYGNGVWIGRTKSISSRKGFEMIWDPNGWTGTDNNFSIKQDIVGINEWSGYSGSFVQHPELTGLDCIRPCFWVELIRGRPKENTIWTSGSSISFCGVNSDTVGWSWPDGAELPFTIDK

SEQ ID NO: 21834 - protein, 469 aa, Artificial Sequence; identical to SEQ ID NO: 16893
  derived and/or modified protein sequence (wt) from neuraminidase__InfluenzaA__AFF57137

SEQ ID NO: 21835 - protein, 469 aa, Artificial Sequence; identical to SEQ ID NO: 16893
  derived and/or modified protein sequence (wt) from neuraminidase__InfluenzaA__AFF57141

SEQ ID NO: 21836 - protein, 469 aa, Artificial Sequence; identical to SEQ ID NO: 16893
  derived and/or modified protein sequence (wt) from neuraminidase__InfluenzaA__AFF57145

SEQ ID NO: 21837 - protein, 469 aa, Artificial Sequence; identical to SEQ ID NO: 16893
  derived and/or modified protein sequence (wt) from neuraminidase__InfluenzaA__AFF57149

SEQ ID NO: 21838 - protein, 469 aa, Artificial Sequence; identical to SEQ ID NO: 16893
  derived and/or modified protein sequence (wt) from neuraminidase__InfluenzaA__AFF57153

SEQ ID NO: 21839 - protein, 469 aa, Artificial Sequence; identical to SEQ ID NO: 16893
  derived and/or modified protein sequence (wt) from neuraminidase__InfluenzaA__AFF57157

SEQ ID NO: 21840 - protein, 469 aa, Artificial Sequence; identical to SEQ ID NO: 16893
  derived and/or modified protein sequence (wt) from neuraminidase__InfluenzaA__AFF57161

SEQ ID NO: 21841 - protein, 469 aa, Artificial Sequence; identical to SEQ ID NO: 16893
  derived and/or modified protein sequence (wt) from neuraminidase__InfluenzaA__AFF57165

SEQ ID NO: 21842 - protein, 469 aa, Artificial Sequence; identical to SEQ ID NO: 16893
  derived and/or modified protein sequence (wt) from neuraminidase__InfluenzaA__AFF57169

SEQ ID NO: 21843 - protein, 469 aa, Artificial Sequence; identical to SEQ ID NO: 16893
  derived and/or modified protein sequence (wt) from neuraminidase__InfluenzaA__AFF57173

SEQ ID NO: 21844 - protein, 469 aa, Artificial Sequence; identical to SEQ ID NO: 16893
  derived and/or modified protein sequence (wt) from neuraminidase__InfluenzaA__AFF57177

SEQ ID NO: 21845 - protein, 469 aa, Artificial Sequence; identical to SEQ ID NO: 16893
  derived and/or modified protein sequence (wt) from neuraminidase__InfluenzaA__AFF57181

SEQ ID NO: 21846 - protein, 469 aa, Artificial Sequence; identical to SEQ ID NO: 16893
  derived and/or modified protein sequence (wt) from neuraminidase__InfluenzaA__AFF57185

SEQ ID NO: 21847 - protein, 469 aa, Artificial Sequence; identical to SEQ ID NO: 16893
  derived and/or modified protein sequence (wt) from neuraminidase__InfluenzaA__AFF57189

SEQ ID NO: 21848 - protein, 449 aa, Artificial Sequence
  derived and/or modified protein sequence (wt) from neuraminidase__InfluenzaA__AFF60789
MNPNKKIITIGSICMVTGMVSLMLQIGNLISIWVSHSIHTGNQHKAEPISNTNFLTEKAVASVKLAGNSSLCPINGWAVYSKDNSIRIGSKGDVFVIREPFISCSHLECRTFFLTQGALLNDKHSNGTVKDRSPHRTLMSCPVGEAPSPYNSRFESVAWSASACHDGTSWLTIGISGPDNGAVAVLKYNGIITDTIKSWRNNILRTQESECACVNGSCFTVMTDGPSNGQASHKIFKMEKGKVVKSVELDAPNYHYEECSCYPDAGEITCVCRDNWHGSNRPWVSFNQNLEYQIGYICSGVFGDNPRPNDGTGSCGPVSSNGAYGVKGFSFKYGNGVWIGRTKSTNSRSGFEMIWDPNGWTETDSSFSVKQDIVAITDWSGYSGSFVQHPELTGLDCIRPCFWVELIRGRPKESTIWTSGSSISFCGVTSDTVGWSWPDGAELPFTIDK

SEQ ID NO: 21849 - protein, 469 aa, Artificial Sequence
  derived and/or modified protein sequence (wt) from neuraminidase__InfluenzaA__AFG29043
MNPNQKIITIGSVCMTIGMANLILQIGNIISIWISHSIQLGNQNQIETCNQSVITYENNTWVNQTYVNISNTNFAAGQSVVSVKLAGNSSLCPVSGWAIYSKDNSIRIGSKGDVFVIREPFISCSPLECRTFFLTQGALLNDKHSNGTIRDRSPYRTLMSCPIGEVPSPYNSRFESVAWSASACHDGINWLTIGISGPDNGAVAVLKYNGIITDTIKSWRNNILRTQESECACVNGSCFTVMTDGPSDGQASYKIFRIEKGKIVKSVEMNAPNYHYEECSCYPDSSEITCVCRDNWHGSNRPWVSFNQNLEYQIGYICSGIFGDNPRPNDKTGSCGPVSSNGANGVKGFSFKYGNGVWIGRTKSISSRNGFEMIWDPNGWTGTDNNFSIKQDIVGINEWSGYSGSFVQHPELTGLDCIRPCFWVELIRGRPKENTIWTSGSSISFCGVNSDTVGWSWPDGAELPFTIDK

SEQ ID NO: 21850 - protein, 469 aa, Artificial Sequence; identical to SEQ ID NO: 18519
  derived and/or modified protein sequence (wt) from neuraminidase__InfluenzaA__AFG29045

SEQ ID NO: 21851 - protein, 469 aa, Artificial Sequence; identical to SEQ ID NO: 18651
  derived and/or modified protein sequence (wt) from neuraminidase__InfluenzaA__AFG31063

SEQ ID NO: 21852 - protein, 469 aa, Artificial Sequence; identical to SEQ ID NO: 16738
  derived and/or modified protein sequence (wt) from neuraminidase__InfluenzaA__AFG31073

SEQ ID NO: 21853 - protein, 469 aa, Artificial Sequence
  derived and/or modified protein sequence (wt) from neuraminidase__InfluenzaA__AFG31083
MNPNQKIITIGSVCMTIGMANLILQIGNIISIWISHSIQLVNQNQIETCNQSVITYENNTWVNQTYVNISNTNFAAGQSVVSVKLAGNSSLCPVSGWAIYSKDNSVRIGSKGDVFVIREPFISCSPLECRTFFLTQGALLNDKHSNGTIKDRSPYRTLMSCPIGEVPSPYNSRFESVAWSASACHDGINWLTIGISGPDNGAVAVLKYNGIITDTIKSWRNNILRTQESECACVNGSCFTVMTDGPSNGQASYKIFRIEKGKIVKSVEMNAPNYHYEECSCYPDSSEITCVCRDNWHGSNRPWVSFNQNLEYQIGYICSGIFGDNPRPNDKTGSCGPVSSNGANGVKGFSFKYGNGVWIGRTKSISSRNGFEMIWDPNGWTGTDNNFSIKQDIVGINEWSGYSGSFVQHPELTGLDCIRPCFWVELIRGRPKENTIWTSGSSISFCGVNSDTVGWSWPDGAELPFTIDK

SEQ ID NO: 21854 - protein, 469 aa, Artificial Sequence; identical to SEQ ID NO: 16738
  derived and/or modified protein sequence (wt) from neuraminidase__InfluenzaA__AFG31093

SEQ ID NO: 21855 - protein, 469 aa, Artificial Sequence; identical to SEQ ID NO: 16738
  derived and/or modified protein sequence (wt) from neuraminidase__InfluenzaA__AFG31103

SEQ ID NO: 21856 - protein, 469 aa, Artificial Sequence; identical to SEQ ID NO: 16738
  derived and/or modified protein sequence (wt) from neuraminidase__InfluenzaA__AFG31113

SEQ ID NO: 21857 - protein, 469 aa, Artificial Sequence; identical to SEQ ID NO: 16738
  derived and/or modified protein sequence (wt) from neuraminidase__InfluenzaA__AFG31123

SEQ ID NO: 21858 - protein, 469 aa, Artificial Sequence; identical to SEQ ID NO: 16738
  derived and/or modified protein sequence (wt) from neuraminidase__InfluenzaA__AFG31133

SEQ ID NO: 21859 - protein, 469 aa, Artificial Sequence; identical to SEQ ID NO: 16738
  derived and/or modified protein sequence (wt) from neuraminidase__InfluenzaA__AFG31143

SEQ ID NO: 21860 - protein, 469 aa, Artificial Sequence; identical to SEQ ID NO: 16738
  derived and/or modified protein sequence (wt) from neuraminidase__InfluenzaA__AFG31153

SEQ ID NO: 21861 - protein, 469 aa, Artificial Sequence; identical to SEQ ID NO: 16738
  derived and/or modified protein sequence (wt) from neuraminidase__InfluenzaA__AFG31163

SEQ ID NO: 21862 - protein, 469 aa, Artificial Sequence
  derived and/or modified protein sequence (wt) from neuraminidase__InfluenzaA__AFG31173
MNPNQKIITIGSVCMTIGMANLILQIGNIISIWISHSIQLGNQNQIETCNQSVITYENNTWVNQTYVNISNTNFAAGQSVVSVKLAGNSSLCPVSGWAIYSKDNSIRIGSKGDVFVIREPFISCSPLECRTFFLTQGALLNDKHSNGTIKDRSPYRTLMSCPIGEVPSPYNSRFESVAWSASACHDGINWLTIGISGPDNGAVAVLKYNGIITDTIKSWRNNILRTQESECACVNGSCFTVMTDGPSDGQASYKIFRIEKGKIVKSVEMNAPNYHYEECSCYPDSSEITCVCRDNWHGSNRPWVSFNQNLEYQIGYICSGIFGDNPRPNDKTGSCGPVSSNGANGVKGFSFKYGNGVWIGRTKSISSRNGFEMIWDPNGWTGTDNNFSIKQDIVGINEWSGYSGSFVQHPELTGLDCIRPCFWVELIRGLPKENTIWTSGSSISFCGVNSDTVGWSWPDGAELPFTIDK

SEQ ID NO: 21863 - protein, 469 aa, Artificial Sequence; identical to SEQ ID NO: 21862
  derived and/or modified protein sequence (wt) from neuraminidase__InfluenzaA__AFG31183

SEQ ID NO: 21864 - protein, 469 aa, Artificial Sequence; identical to SEQ ID NO: 16738
  derived and/or modified protein sequence (wt) from neuraminidase__InfluenzaA__AFG31193

SEQ ID NO: 21865 - protein, 469 aa, Artificial Sequence; identical to SEQ ID NO: 16738
  derived and/or modified protein sequence (wt) from neuraminidase__InfluenzaA__AFG31203

SEQ ID NO: 21866 - protein, 469 aa, Artificial Sequence; identical to SEQ ID NO: 16738
  derived and/or modified protein sequence (wt) from neuraminidase__InfluenzaA__AFG31213

SEQ ID NO: 21867 - protein, 469 aa, Artificial Sequence; identical to SEQ ID NO: 16738
  derived and/or modified protein sequence (wt) from neuraminidase__InfluenzaA__AFG31223

SEQ ID NO: 21868 - protein, 469 aa, Artificial Sequence; identical to SEQ ID NO: 16738
  derived and/or modified protein sequence (wt) from neuraminidase__InfluenzaA__AFG31233

SEQ ID NO: 21869 - protein, 469 aa, Artificial Sequence
  derived and/or modified protein sequence (wt) from neuraminidase__InfluenzaA__AFG31243
MNPNQKIITIGSVCMTIGMANLILQIGNIISIWISHSIQLGNQNQIETCNQSVITYENNTWVNQTYVNISNTNFVAGQSVVSVKLAGNSSLCPVSGWAIYSKDNSIRIGSKGDVFVIREPFISCSPLECRTFFLTQGALLNDKHSNGTIKDRSPYRTLMSCPIGEVPSPYNSRFESVAWSASACHDGINWLTIGISGPDNGAVAVLKYNGIITDTIKSWRNNILRTQESECACVNGSCFTVMTDGPSDGQASYKIFRIEKGKIVKSVEMNAPNYHYEECSCYPDSSEITCVCRDNWHGSNRPWVSFNQNLEYQIGYICSGIFGDNPRPNDKTGSCGPVSSNGANGVKGFSFKYGNGVWIGRTKSISSRNGFEMIWDPNGWTGTDNNFSIKQDIVGINEWSGYSGSFVQHPELTGLDCIRPCFWVELIRGRPKENTIWTSGSSISFCGVNSDTVGWSWPDGAELPFTIDK

SEQ ID NO: 21870 - protein, 469 aa, Artificial Sequence; identical to SEQ ID NO: 19730
  derived and/or modified protein sequence (wt) from neuraminidase__InfluenzaA__AFG31253

SEQ ID NO: 21871 - protein, 469 aa, Artificial Sequence; identical to SEQ ID NO: 16738
  derived and/or modified protein sequence (wt) from neuraminidase__InfluenzaA__AFG31263

SEQ ID NO: 21872 - protein, 469 aa, Artificial Sequence; identical to SEQ ID NO: 16738
  derived and/or modified protein sequence (wt) from neuraminidase__InfluenzaA__AFG31273

SEQ ID NO: 21873 - protein, 469 aa, Artificial Sequence; identical to SEQ ID NO: 16738
  derived and/or modified protein sequence (wt) from neuraminidase__InfluenzaA__AFG31283

SEQ ID NO: 21874 - protein, 469 aa, Artificial Sequence; identical to SEQ ID NO: 16738
  derived and/or modified protein sequence (wt) from neuraminidase__InfluenzaA__AFG31293

SEQ ID NO: 21875 - protein, 469 aa, Artificial Sequence; identical to SEQ ID NO: 16738
  derived and/or modified protein sequence (wt) from neuraminidase__InfluenzaA__AFG31303

SEQ ID NO: 21876 - protein, 469 aa, Artificial Sequence; identical to SEQ ID NO: 16738
  derived and/or modified protein sequence (wt) from neuraminidase__InfluenzaA__AFG31313

SEQ ID NO: 21877 - protein, 469 aa, Artificial Sequence; identical to SEQ ID NO: 16738
  derived and/or modified protein sequence (wt) from neuraminidase__InfluenzaA__AFG31326

SEQ ID NO: 21878 - protein, 469 aa, Artificial Sequence; identical to SEQ ID NO: 16738
  derived and/or modified protein sequence (wt) from neuraminidase__InfluenzaA__AFG31336

SEQ ID NO: 21879 - protein, 469 aa, Artificial Sequence; identical to SEQ ID NO: 19730
  derived and/or modified protein sequence (wt) from neuraminidase__InfluenzaA__AFG31346

SEQ ID NO: 21880 - protein, 469 aa, Artificial Sequence; identical to SEQ ID NO: 19730
  derived and/or modified protein sequence (wt) from neuraminidase__InfluenzaA__AFG31356

SEQ ID NO: 21881 - protein, 469 aa, Artificial Sequence; identical to SEQ ID NO: 19730
  derived and/or modified protein sequence (wt) from neuraminidase__InfluenzaA__AFG31366

SEQ ID NO: 21882 - protein, 469 aa, Artificial Sequence; identical to SEQ ID NO: 19730
  derived and/or modified protein sequence (wt) from neuraminidase__InfluenzaA__AFG31379

SEQ ID NO: 21883 - protein, 469 aa, Artificial Sequence; identical to SEQ ID NO: 19730
  derived and/or modified protein sequence (wt) from neuraminidase__InfluenzaA__AFG31389

SEQ ID NO: 21884 - protein, 469 aa, Artificial Sequence; identical to SEQ ID NO: 19730
  derived and/or modified protein sequence (wt) from neuraminidase__InfluenzaA__AFG31399

SEQ ID NO: 21885 - protein, 469 aa, Artificial Sequence; identical to SEQ ID NO: 19730
  derived and/or modified protein sequence (wt) from neuraminidase__InfluenzaA__AFG31409

SEQ ID NO: 21886 - protein, 469 aa, Artificial Sequence; identical to SEQ ID NO: 16738
  derived and/or modified protein sequence (wt) from neuraminidase__InfluenzaA__AFG31419

SEQ ID NO: 21887 - protein, 469 aa, Artificial Sequence; identical to SEQ ID NO: 16738
  derived and/or modified protein sequence (wt) from neuraminidase__InfluenzaA__AFG31429

SEQ ID NO: 21888 - protein, 469 aa, Artificial Sequence; identical to SEQ ID NO: 16738
  derived and/or modified protein sequence (wt) from neuraminidase__InfluenzaA__AFG31439

SEQ ID NO: 21889 - protein, 469 aa, Artificial Sequence; identical to SEQ ID NO: 16738
  derived and/or modified protein sequence (wt) from neuraminidase__InfluenzaA__AFG31449

SEQ ID NO: 21890 - protein, 469 aa, Artificial Sequence; identical to SEQ ID NO: 16738
  derived and/or modified protein sequence (wt) from neuraminidase__InfluenzaA__AFG31459

SEQ ID NO: 21891 - protein, 469 aa, Artificial Sequence; identical to SEQ ID NO: 16738
  derived and/or modified protein sequence (wt) from neuraminidase__InfluenzaA__AFG31469

SEQ ID NO: 21892 - protein, 469 aa, Artificial Sequence; identical to SEQ ID NO: 16738
  derived and/or modified protein sequence (wt) from neuraminidase__InfluenzaA__AFG31479

SEQ ID NO: 21893 - protein, 469 aa, Artificial Sequence; identical to SEQ ID NO: 16738
  derived and/or modified protein sequence (wt) from neuraminidase__InfluenzaA__AFG31499

SEQ ID NO: 21894 - protein, 469 aa, Artificial Sequence; identical to SEQ ID NO: 18629
  derived and/or modified protein sequence (wt) from neuraminidase__InfluenzaA__AFG31509

SEQ ID NO: 21895 - protein, 469 aa, Artificial Sequence; identical to SEQ ID NO: 19730
  derived and/or modified protein sequence (wt) from neuraminidase__InfluenzaA__AFG31519

SEQ ID NO: 21896 - protein, 469 aa, Artificial Sequence; identical to SEQ ID NO: 16738
  derived and/or modified protein sequence (wt) from neuraminidase__InfluenzaA__AFG31529

SEQ ID NO: 21897 - protein, 469 aa, Artificial Sequence; identical to SEQ ID NO: 18629
  derived and/or modified protein sequence (wt) from neuraminidase__InfluenzaA__AFG31539

SEQ ID NO: 21898 - protein, 469 aa, Artificial Sequence; identical to SEQ ID NO: 16738
  derived and/or modified protein sequence (wt) from neuraminidase__InfluenzaA__AFG31549

SEQ ID NO: 21899 - protein, 469 aa, Artificial Sequence; identical to SEQ ID NO: 16738
  derived and/or modified protein sequence (wt) from neuraminidase__InfluenzaA__AFG31559

SEQ ID NO: 21900 - protein, 469 aa, Artificial Sequence; identical to SEQ ID NO: 19730
  derived and/or modified protein sequence (wt) from neuraminidase__InfluenzaA__AFG31569

SEQ ID NO: 21901 - protein, 469 aa, Artificial Sequence; identical to SEQ ID NO: 16738
  derived and/or modified protein sequence (wt) from neuraminidase__InfluenzaA__AFG31579

SEQ ID NO: 21902 - protein, 469 aa, Artificial Sequence; identical to SEQ ID NO: 16738
  derived and/or modified protein sequence (wt) from neuraminidase__InfluenzaA__AFG31589

SEQ ID NO: 21903 - protein, 469 aa, Artificial Sequence; identical to SEQ ID NO: 16738
  derived and/or modified protein sequence (wt) from neuraminidase__InfluenzaA__AFG31599

SEQ ID NO: 21904 - protein, 469 aa, Artificial Sequence; identical to SEQ ID NO: 16738
  derived and/or modified protein sequence (wt) from neuraminidase__InfluenzaA__AFG31609

SEQ ID NO: 21905 - protein, 469 aa, Artificial Sequence; identical to SEQ ID NO: 16738
  derived and/or modified protein sequence (wt) from neuraminidase__InfluenzaA__AFG31619

SEQ ID NO: 21906 - protein, 469 aa, Artificial Sequence; identical to SEQ ID NO: 16738
  derived and/or modified protein sequence (wt) from neuraminidase__InfluenzaA__AFG31629

SEQ ID NO: 21907 - protein, 469 aa, Artificial Sequence; identical to SEQ ID NO: 19730
  derived and/or modified protein sequence (wt) from neuraminidase__InfluenzaA__AFG31639

SEQ ID NO: 21908 - protein, 469 aa, Artificial Sequence; identical to SEQ ID NO: 16738
  derived and/or modified protein sequence (wt) from neuraminidase__InfluenzaA__AFG31649

SEQ ID NO: 21909 - protein, 469 aa, Artificial Sequence; identical to SEQ ID NO: 16738
  derived and/or modified protein sequence (wt) from neuraminidase__InfluenzaA__AFG31659

SEQ ID NO: 21910 - protein, 469 aa, Artificial Sequence; identical to SEQ ID NO: 16738
  derived and/or modified protein sequence (wt) from neuraminidase__InfluenzaA__AFG31669

SEQ ID NO: 21911 - protein, 469 aa, Artificial Sequence; identical to SEQ ID NO: 14095
  derived and/or modified protein sequence (wt) from neuraminidase__InfluenzaA__AFG71868

SEQ ID NO: 21912 - protein, 469 aa, Artificial Sequence; identical to SEQ ID NO: 14095
  derived and/or modified protein sequence (wt) from neuraminidase__InfluenzaA__AFG71890

SEQ ID NO: 21913 - protein, 469 aa, Artificial Sequence; identical to SEQ ID NO: 14095
  derived and/or modified protein sequence (wt) from neuraminidase__InfluenzaA__AFG71901

SEQ ID NO: 21914 - protein, 469 aa, Artificial Sequence; identical to SEQ ID NO: 14114
  derived and/or modified protein sequence (wt) from neuraminidase__InfluenzaA__AFG71912

SEQ ID NO: 21915 - protein, 469 aa, Artificial Sequence
  derived and/or modified protein sequence (wt) from neuraminidase__InfluenzaA__AFG71934
MNPNQKIITIGSVSLTIATVCFLMQIAILITTVTLHFKQYECDSPANNQVMPCEPIIIERNITEIVYLTNTTIEKEICPKLVEYRNWSKPQCKITGFAPFSKDNSIRLSAGGDIWVTREPYVSCDPGKCYQFALGQGTTLDNKHSNDTIHDRIPHRTLLMNELGVPFHLGTRQVCIAWSSSSCHDGKAWLHVCVTGDDKNATASFIYDGRLVDSIGSWSQNILRTQESECVCINGTCTVVMTDGSASGRADTRILFIEEGKIVHISPLSGSAQHVEECSCYPRYPGVRCICRDNWKGSNRPVVDINVKDYSIDSRYVCSGLVGDTPRNNDRFSNSNCRNPNNERGNHGVKGWAFDDGNDVWMGRTISKDSRSGYETFKVIGGWSTPNSKSQINRQVIVDSDNRSGYSGIFSVEGKSCINRCFYVELIRGREQETRVWWTSNSIVVFCGTSGTYGTGSWPDGADINLMPI

SEQ ID NO: 21916 - protein, 469 aa, Artificial Sequence
  derived and/or modified protein sequence (wt) from neuraminidase__InfluenzaA__AFG71945
MNPNQKIITIGSVSLTIATVCFLMQIAILVTTVTLHFKQYECDSPANNQVMPCEPIIIERNITEIVYLTNTTIEKEICPKLVEYRNWSKPQCKITGFAPFSKDNSIRLSAGGDIWVTREPYVSCDPGKCYQFALGQGTTLDNKHSNDTIHDRIPHRTLLMNELGVPFHLGTRQVCIAWSSSSCHDGKAWLHVCVTGDDENATASFIYDGRLVDSIGSWSQNILRTQESECVCINGTCTVVMTDGSASGRADTRILFIEEGKIVHISPLSGSAQHVEECSCYPRYPGVRCICRDNWKGSNRPVVDINVKDYSIDSRYVCSGLVGDTPRNNDKSSNSNCRNPNNDKGNHGVKGWAFDDGNDVWMGRTISKDSRSGYETFKVIGGWSTPNSKSQINRQVIVDSDNRSGYSGIFSVEGKSCINRCFYVELIRGREQETKVWWTSNSIVVFCGTSGTYGTGSWPDGADINLMSI

SEQ ID NO: 21917 - protein, 469 aa, Artificial Sequence; identical to SEQ ID NO: 14118
  derived and/or modified protein sequence (wt) from neuraminidase__InfluenzaA__AFG71967

SEQ ID NO: 21918 - protein, 469 aa, Artificial Sequence; identical to SEQ ID NO: 14118
  derived and/or modified protein sequence (wt) from neuraminidase__InfluenzaA__AFG71978

SEQ ID NO: 21919 - protein, 469 aa, Artificial Sequence
  derived and/or modified protein sequence (wt) from neuraminidase__InfluenzaA__AFG71988
MNPNQKIITIGSVSLTIATICFLMQIAILVTTVTLHFKQYECDSPANNQVMPCEPIIIERNITEIVYLTNTTIEKEICPKLVEYRNWSKPQCKITGFAPFSKDNSIRLSAGGDIWVTREPYVSCDPGKCYQFALGQGTTLDNKHSNDTIHDRTPHRTLLMNELGVPFHLGTRQVCIAWSSSSCHDGKAWLHVCVTGYDKNATASFIYDGRLVDSIGSWSQNILRTQESECICINGTCTVVMTDGSASGRADTKILFIEEGKIVHISPLSGSAQHVEECSCYPRYPGVRCICRDNWKGSNRPVVDINVKDYSIDSSYVCSGLVGDTPRNNDRSSNSYCRNPNNEKGNHGVKGWAFDDGNDVWMGRTISEDSRSGYETFKVIGGWSTPNSKLQINRQVIVDSDNRSGYSGIFSVEGKSCINRCFYVELIRGREQETRVWWTSNSIVVFCGTSGTYGTGSWPDGADINLMPI

SEQ ID NO: 21920 - protein, 469 aa, Artificial Sequence; identical to SEQ ID NO: 14118
  derived and/or modified protein sequence (wt) from neuraminidase__InfluenzaA__AFG71999

SEQ ID NO: 21921 - protein, 469 aa, Artificial Sequence; identical to SEQ ID NO: 14576
  derived and/or modified protein sequence (wt) from neuraminidase__InfluenzaA__AFG72021

SEQ ID NO: 21922 - protein, 469 aa, Artificial Sequence
  derived and/or modified protein sequence (wt) from neuraminidase__InfluenzaA__AFG72032
MNPNQKIITIGSVSLTIATICFLMQIAILVTTVTLHFKQYECSSPPNNQVMPCEPIIIERNITEIVYLTNTTIEKEICPKLVEYRNWSKPQCKITGFAPFSKDNSIRLSAGGDIWVTREPYVSCDPGKCYQFALGQGTTLDNKHSNDTIHDRTPYRTLLMNELGVPFHLGTRQVCIAWSSSSCHDGKAWLHVCVTGYDKNATASFIYDGRLVDSIGSWSKNILRTQESECVCINGTCTVVMTDGSASERADTKILFIEEGKIVHISPLSGSAQHVEECSCYPRYPGVRCVCRDNWKGSNRPVVDINVKDYSIVSSYVCSGLVGDTPRKNDRSSSSYCRNPNNEKGNHGVKGWAFDDGNDVWMGRTISEESRSGYETFKVIGGWSTPNSKLQINRQVIVDSDNRSGYSGIFSVEGKSCINRCFYVELIRGREQETRVWWTSNSIVVFCGTSGTYGTGSWPDGADINLMPI

SEQ ID NO: 21923 - protein, 469 aa, Artificial Sequence; identical to SEQ ID NO: 14813
  derived and/or modified protein sequence (wt) from neuraminidase__InfluenzaA__AFG72088

SEQ ID NO: 21924 - protein, 469 aa, Artificial Sequence
  derived and/or modified protein sequence (wt) from neuraminidase__InfluenzaA__AFG72121
MNPNQKIITIGSVSLTIATICFLMQIAILVTTVTLHFKQYECSSPPNNRVMPCEPTIIERNITEIVYLTNTTIEKEICPKLVEYRNWSKPQCKITGFAPFSKDNSIRLSAGGDIWVTREPYVSCDPGKCYQFALGQGTTLNNRHSNDTVHDRTPYRTLLMNELGVPFHLGTKQVCMAWSSSSCHDGKAWLHVCVTGHDENATASFIYDGRLVDSIGSWSKNILRTQESECVCINGTCTVVMTDGSASERADTKILFIEEGKIVHISPLSGSAQHVEECSCYPRYPGVRCVCRDNWKGSNRPIVDINVKDYSIVSSYVCSGLVGDTPRKNDRSSSSYCRNPNNEKGSHGVKGWAFDDGNDVWMGRTIGEELRSGYETFKVIGGWSTPNSKLQINRQVIVDSGNRSGYSGIFSVEGKSCINRCFYVELIRGRKQETRVWWTSNSIVVFCGTSGTYGTGSWPDGADINLMPI

SEQ ID NO: 21925 - protein, 469 aa, Artificial Sequence
  derived and/or modified protein sequence (wt) from neuraminidase__InfluenzaA__AFG72143
MNPNQKIITIGSVSLTIATICLLMQIAILVTTVTLHFKQYECSSPPNNQVMPCEPTIIERNITEIVYLTNTTIEKEICPKLVEYRNWSKPQCKITGFAPFSKDNSIRLSAGGDIWVTREPYVSCDPGKCYQFALGQGTTLNNRHSNDTVHDRTPYRTLLMNELGVPFHLGTKQVCIAWSSSSCHDGKAWLHVCVTGHDENATASFIYDGRLVDSIGSWSKNILRTQESECVCINGTCTVVMTDGSASERADTKILFIEEGKIVHISPLSGSAQHVEECSCYPRYPGVRCVCRDNWKGSNRPIVDINVKDYSIVSSYVCSGLVGDTPRKNDSSSSSYCRNPNNEKGSHGVKGWAFDDGNDVWMGRTIGEELRSGYETFKVIGGWSTPNSKLQINRQVIVDSGNRSGYSGIFSVEGKSCINRCFYVELIRGRKQETKVWWTSNSIVVFCGTSGTYGTGSWPDGADINLMPI

SEQ ID NO: 21926 - protein, 469 aa, Artificial Sequence
  derived and/or modified protein sequence (wt) from neuraminidase__InfluenzaA__AFG72165
MNPNQKIITIGSVSLTIATICFLMQIAILVTTVTLHFKQYECNSPPNNQVMPCEPTIIERNITEIVYLTNTTIEKEICPKLVEYRNWSKPQCKITGFAPFSKDNSIRLSAGGDIWVTREPYVSCDPGKCYQFALGQGTTLNNRHSNDTVHDRTPYRTLLMNELGVPFHLGTKQVCIAWSSSSCHDGKAWLHVCVTGHDENATASFIYDGRLVDSIVSWSKNILRTQESECVCINGTCTVVMTDGSASERADTKILFIEEGKIVHISPLSGSAQHVEECSCYPRYPGVRCVCRDNWKGSNRPIVDINVKDYSIVSSYVCSGLVGDTPRKNDSSSSSYCRNPNNEKGSHGVKGWAFDDGNDVWMGRTIGEELRSGYETFKVIGGWSTPNSKLQTNRQVIVDRGNRSGYSGIFSVEGKSCINRCFYVELIRGRKQETKVWWTSNSIVVFCGTSGTYGTGSWPDGADINLMPI

SEQ ID NO: 21927 - protein, 469 aa, Artificial Sequence
  derived and/or modified protein sequence (wt) from neuraminidase__InfluenzaA__AFG72176
MNPNQKIITIGSVSLTIATICFLMQITILVTTVTLHFKQYECNSPPNNQVMLCEPTIIERNITEIVYLTNTTIEKEKCPKLVEYRNWSKPQCKITGFAPFSKDNSIRLSAGGDIWVTREPYVSCDPGKCYQFALGQGTTLNNRHSNDTVHDRTPYRTLLMNELGVPFHLGTKQVCIAWSSSSCHDGKAWLHVCVTGHDENATASFIYDGRLVDSIGSWSKNILRTQESECVCINGTCTVVMTDGSASERADTKILFIEEGKIVHISPLSGSAQHVEECSCYPRYPGVRCVCRDNWKGSNRPIVDINVKDYSIVSSYVCSGLVGDTPRKNDSSSSSYCRNPNNEKGSHGVKGWAFDDGNDVWMGRTISEELRSGYETFKVIGGWSTPNSKLQINRQVIVDRGNRSGYSGIFSVEGKSCINRCFYVELIRGRKQENKVWWTSNSIVVFCGTSGTYGTGSWPDGADINLMPI

SEQ ID NO: 21928 - protein, 469 aa, Artificial Sequence; identical to SEQ ID NO: 21926
  derived and/or modified protein sequence (wt) from neuraminidase__InfluenzaA__AFG72198

SEQ ID NO: 21929 - protein, 469 aa, Artificial Sequence; identical to SEQ ID NO: 21926
  derived and/or modified protein sequence (wt) from neuraminidase__InfluenzaA__AFG72209

SEQ ID NO: 21930 - protein, 469 aa, Artificial Sequence
  derived and/or modified protein sequence (wt) from neuraminidase__InfluenzaA__AFG72220
MNPNQKIITIGSVSLTIATICFLMQIAILVTTVTLHFKQYECNSPPNNQVMLCEPTIIERNITEIVHLTNTTIEKEICPKLAEYRNWSKPQCKITGFAPFSKDNSIRLSAGGDIWVTREPYVSCDPGKCYQFALGQGTTLNNRHSNDTVHDRTPYRTLLMNELGVPFHLGTKQVCIAWSSSSCHDGKAWLHVCVTGHDENATASFIYDGRLVDSIGSWSKNILRTQESECVCINGTCTVVMTDGSASERADTKILFIEEGKIVHISPLSGSAQHVEECSCYPRYPGVRCVCRDNWKGSNRPIVDINVKDYSIVSSYVCSGLVGDTPRKNDSSSSSYCRNPNNEKGSHGVKGWAFDDGNDVWMGRTISEELRSGYETFKVIGGWSKPNSKLQINRQVIVDRGNRSGYSGIFSVEGKSCINRCFYVELIRGRKQETEVWWTSNSIVVFCGTSGTYGTGSWPDGADINLMPI

SEQ ID NO: 21931 - protein, 469 aa, Artificial Sequence; identical to SEQ ID NO: 21926
  derived and/or modified protein sequence (wt) from neuraminidase__InfluenzaA__AFG72231

SEQ ID NO: 21932 - protein, 469 aa, Artificial Sequence
  derived and/or modified protein sequence (wt) from neuraminidase__InfluenzaA__AFG72297
MNPNQKIITIGSVSLTIATICFLMQIAILVTTVTLHFKQYECNSPPNNQVMLCEPTIIERNITEIVYLTNTTIEREICPKLAEYRNWSKPQCKITGFAPFSKDNSIRLSAGGDIWVTREPYVSCDPGKCYQFALGQGTTLNNRHSNDTVHERTPYRTLLMNELGVPFHLGTKQVCIAWSSSSCHDGKAWLHVCVTGHDENATASFIYDGRLVDSIGSWSKNILRTQESECVCINGTCTVVMTDGSASERADTKILFIEEGKIVHISPLSGSAQHVEECSCYPRYPGVRCVCRDNWKGSNRPIVDINVKDYSIVSSYVCSGLVGDTPRKNDSSSSSYCRNPNNEKGSHGVKGWAFDDGNDVWMGRTISEELRSGYETFKVIGGWSKPNSKLQINRQVIVDRGNRSGYSGIFSVEGKSCINRCFYVELIRGRKQETEVWWTSNSIVVFCGTSGTYGTGSWPDGADINLMPI

SEQ ID NO: 21933 - protein, 469 aa, Artificial Sequence
  derived and/or modified protein sequence (wt) from neuraminidase__InfluenzaA__AFG72308
MNPNQKIITIGSVSLTIATICFLMQIAILVTTVTLHFKQYECNSPPSNQVMLCEPTIIERNITEIVYLTNTTIEKEICPKLAEYRNWSKPQCKITGFAPFSKDNSIRLSAGGDIWVTREPYVSCDPGKCYQFALGQGTTLNNRHSNDTVHDRTPYRTLLMNELGVPFHLGTKQVCIAWSSSSCHDGKAWLHVCVTGHDENATASFIYDGRLVDSIGSWSKNILRTQESECVCINGTCTVVMTDGSASERADTKILFIEEGKIVHISPLSGSAQHVEECSCYPRYPGVRCVCRDNWKGSNRPIVDINVKDYSIVSSYVCSGLVGDTPRKNDSSSSSYCRNPNNEKGSHGVKGWAFDDGNDVWMGRTISEELRSGYETFRVIGGWSKPNSKLQINRQVIVDRGNRSGYSGIFSVEGKSCINRCFYVELIRGRKQETEVWWTSNSIVVFCGTSGTYGTGSWPDGADINLMPI

SEQ ID NO: 21934 - protein, 469 aa, Artificial Sequence; identical to SEQ ID NO: 15185
  derived and/or modified protein sequence (wt) from neuraminidase__InfluenzaA__AFG72320

SEQ ID NO: 21935 - protein, 469 aa, Artificial Sequence
  derived and/or modified protein sequence (wt) from neuraminidase__InfluenzaA__AFG72331
MNPNQKIITIGSVSLTVATICFLMQIAILVTTVTLHFKQYECNSPPNNQVMLCEPTIIERNITEIVYLTNTTIEKEICPKLAEYRNWSKPQCKITGFAPFSKDNSIRLSAGGDIWVTREPYVSCDPGKCYQFALGQGTTLNNRHSNDTVHDRTPYRTLLMNELGVPFHLGTKQVCIAWSSSSCHDGKAWLHVCVTGHDENATASFIYDGRLVDSIGSWSKNILRTQESECVCINGTCTVVMTDGSASERADTKILFIEEGKIVHISPLSGSAQHVEECSCYPRYPGVRCVCRDNWKGSNRPIVDINVKDYSIVSSYVCSGLVGDTPRKNDSSSSSYCRNPNNEKGSHGVKGWAFDDGNDVWMGRTISEELRSGYETFKVIGGWSKPNSKLQINRQVIVDRGNRSGYSGIFSVEGKSCINRCFYVELIRGRKQETEVWWTSNSIVVFCGTSGTYGTGSWPDGADINLMPI

SEQ ID NO: 21936 - protein, 469 aa, Artificial Sequence
  derived and/or modified protein sequence (wt) from neuraminidase__InfluenzaA__AFG72353
MNPNQKIITIGSVSLTIATICFLMQIAILVTTVTLHFKQYECNSPPNNQVMLCEPTIIERNITEIVYLTNTTIEKEICPKLAEYRNWSKPQCKITGFAPFSKDNSIRLSAGGDIWVTREPYVSCDSGKCYQFALGQGTTLNNRHSNDTVHDRTPYRTLLMNELGVPFHLGTKQVCIAWSSSSCHDGKAWLHVCVTGHDENATASFIYDGRLVDSIGSWSKNILRTQESECVCINGTCTVVMTDGSASERADTKILFIEEGKIVHISPLSGSAQHVEECSCYPRYPGVRCVCRDNWKGSNRPIVDINVKDYSIVSSYVCSGLVGDTPRKNDSSSSSYCRNPNNEKGSHGVKGWAFDDGNDVWMGRTISEELRSGYETFKVIGGWSKPNSKLQINRQVIVDRGNRSGYSGIFSVEGKSCINRCFYVELIRGRKQETEVWWTSNSIVVFCGTSGTYGTGSWPDGADINLMPI

SEQ ID NO: 21937 - protein, 469 aa, Artificial Sequence; identical to SEQ ID NO: 15185
  derived and/or modified protein sequence (wt) from neuraminidase__InfluenzaA__AFG72364

SEQ ID NO: 21938 - protein, 469 aa, Artificial Sequence
  derived and/or modified protein sequence (wt) from neuraminidase__InfluenzaA__AFG72430
MNPNQKIITIGSVSLTITTICFLMQIAILVITVTLHFKQCECNSPPNNQVMLCEPTIIERNITEIVYLTNTTIEKEICPKLAEYRNWSKPQCKITGFAPFSKDNSIRLSAGGDIWVTREPYVSCDPGKCYQFALGQGTTLNNRHSNDTVHDRTPYRTLLMNELGVPFHLGTKQVCIAWSSSSCHDGKAWLHVCVTGHNENATASFIYDGRLVDSIGSWSKNILRTQESECVCINGTCTVVMTDGSASGRADTKILFIEEGKIVHISQLSGSAQHVEECSCYPRYPGVRCVCRDNWKGSNRPIVDINVKDYSIVSSYVCSGLVGDTPRKNDSSSSSNCLDPNNEEGGHGVKGWAFDDGNDVWMGRTISEKLRSGYETFKVIGGWSKPNSKLQINRQVIVDRGNRSGYSGIFSVEGKSCINRCFYVELIRGRKQETEVWWTSNSIVVFCGTSGTYGTGSWPDGADINLMPI

SEQ ID NO: 21939 - protein, 469 aa, Artificial Sequence; identical to SEQ ID NO: 15185
  derived and/or modified protein sequence (wt) from neuraminidase__InfluenzaA__AFG72452

SEQ ID NO: 21940 - protein, 469 aa, Artificial Sequence
  derived and/or modified protein sequence (wt) from neuraminidase__InfluenzaA__AFG72474
MNPNQKIITIGSVSLTIATICFLMQIAILVTTVTLHFKQYECNSPPNNQVMLCEPTIIERNITEIVYLTNTTIEKEICPKLAEYRNWSKPQCEITGFAPFSKDNSIRLSAGGDIWVTREPYVSCDPGKCYQFALGQGTTLNNRHSNDTVHDRTPYRTLLMNELGVPFHLGTKQVCIAWSSSSCHDGKAWLHVCVTGHDENATASFIYDGRLVDSIGSWSKNILRTQESECVCINGTCTVVMTDGSASERADTKILFIEEGKIVHISPLSGSAQHVEECSCYPRYPGVRCVCRDNWKGSNRPIVDINVKDYSIVSSYVCSGLVGDTPRKNDSSSSSYCRNPNNEKGSHGVKGWAFDDGNDVWMGRTISEELRSGYETFKVIGGWSKPNSKLQINRQVIVDRGNRSGYSGIFSVEGKSCINRCFYVELIRGRKQETEVWWTSNSIVVFCGTSGTYGTGSWPDGADINLMPI

SEQ ID NO: 21941 - protein, 469 aa, Artificial Sequence
  derived and/or modified protein sequence (wt) from neuraminidase__InfluenzaA__AFG72485
MNPNQKIITIGSVSLTIATICFLMQIAILVTTVTLHFKQHECNSPPNNQVMLCEPTIIERNITEIVYLTNTTIEKEICPKLAEYRNWSKPQCKITGFAPFSKDNSIRLSAGGDIWVTREPYVSCDPGKCYQFALGQGTTLNNRHSNDTVHDRTPYRTLLMNELGVPFHLGTKQVCIAWSSSSCHDGKAWLHVCVTGHDENATASFIYDGRLVDSIGSWSKNILRTQESECVCINGTCTVVMTDGSASERADTKILFIEEGKIVHISPLSGSAQHVEECSCYPRYPGVRCVCRDNWKGSNRPIVDINVKDYSIVSSYVCSGLVGDTPRKNDSSSSSYCRNPNNEKGSHGVKGWAFDDGNDVWMGRTISEELRSGYETFKVIGGWSKPNSKLQINRQVIVDRGNRSGYSGIFSVEGKSCINRCFYVELIRGRKQETEVWWTSNSIVVFCGTSGTYGTGSWPDGADINLMPI

SEQ ID NO: 21942 - protein, 469 aa, Artificial Sequence; identical to SEQ ID NO: 15101
  derived and/or modified protein sequence (wt) from neuraminidase__InfluenzaA__AFG72507

SEQ ID NO: 21943 - protein, 469 aa, Artificial Sequence
  derived and/or modified protein sequence (wt) from neuraminidase__InfluenzaA__AFG72529
MNPNQKIITIGSVSLTIATICFLMQIAILVTTVTLHFKQYECNSPPNNQVMLCEPTIIERNITEIVYLTNTTIEKEICPKLAEYRNWSKPQCKITGFAPFSKDNSIRLSAGGDIWVTREPYVSCDPGKCYQFALGQGTTLNNRHSNDTVHDRTPYRTLLMNELGVPFHLGTKQVCIAWSSSSCHDGKAWLHVCVTGHDENATASFIYDGRLVDSIGSWSKKILRTQESECVCINGTCTVVMTDGSASERADTKILFIEEGKIVHISPLSGSAQHVEECSCYPRYPGVRCVCRDNWKGSNRPIVDINVKDYSIVSSYVCSGLVGDTPRKNDSSSSSYCQNPNNENGSHGVKGWAFDDGNDVWMGRTISEELRSGYETFKVIGGWSKPNSKLQINRQVIVDRGNRSGYSGIFSVEGKSCINRCFYVELIRGRKQETEVWWTSNSIVVFCGTSGTYGTGSWPDGADINLMPI

SEQ ID NO: 21944 - protein, 469 aa, Artificial Sequence
  derived and/or modified protein sequence (wt) from neuraminidase__InfluenzaA__AFG72540
MNPNQKIITIGSVSLTIATICFLMQIAILVTTVTLHFKQYECNPPPNNQVMLCEPTIIERNITEIVYLTNTTIKKEICPKLAEYRNWSKPQCKITGFAPFSKDNSIRLSAGGDIWVTREPYVSCDPGKCYQFALGQGTTLNNRHSNDTVHDRTPYRTLLMNELGVPFHLGTKQVCIAWSSSSCHDGKAWLHVCVTGHDENATASFIYDGRLVDSIGSWSKNILRTQESECVCINGTCTVVMTDGSASERADTKILFIEEGKIVHISPLSGSAQHVEECSCYPRYPGVRCVCRDNWKGSNRPIVDINVKDYSIVSSYVCSGLVGDTPRKNDSSSSSYCWNPNNEKGGHGVKGWAFDDGNDVWMGRTISEELRSGYETFKVIGGWSKPNSKLQINRQVIVDRGNRSGYSGIFSVEGKSCINRCFYVELIRGRKQETEVWWTSNSIVVFCGTSGTYGTGSWPDGADINLMPI

SEQ ID NO: 21945 - protein, 469 aa, Artificial Sequence
  derived and/or modified protein sequence (wt) from neuraminidase__InfluenzaA__AFG72562
MNPNQKIITIGSVSLTIATICFLMQIAILVTTVTLHFKQYECNSPPNNQVMLCEPTIIERNITEIVYLTNTTIEKEICPKLAEYRNWSKPQCKITGFAPFSKDNSIRLSAGGDIWVTREPYVSCDPGKCYQFALGQGTTLNNRHSNDTVHDRTPYRTLLMNELGVPFHLGTKQVCIAWSSSSCHDGKAWLHVCVTGHDENATASFIYDGRLVDSIGSWSKNILRTQESECVCINGTCTVVMTDGSASERADTKILFIEEGKIVHISPLSGSAQHVEECSCYPRYPGVRCVCRDNWKGSNRPIVDINVKDYSIVSSYVCSGLVGDTPRKNDSSSSSYCWNPNNEKGGHGVKGWAFDDGNDVWMGRTISEELRSGYETFKVIGGWSKPNSKLQINRQVIVDRGNRSGYSGIFSVEGKSCINRCFYVELIRGRKQETEVWWTSNSIVVFCGTSGTYGTGSWPDGADINLMPI

SEQ ID NO: 21946 - protein, 469 aa, Artificial Sequence
  derived and/or modified protein sequence (wt) from neuraminidase__InfluenzaA__AFG72584
MNPNQKIITIGSVSLTIATICFLMQIAILVTTVTLHFKQYECNSPPNNQVMLCEPTIIERNITEIVYLTNTTIEKEVCPKLAEYRNWSKPQCKITGFAPFSKDNSIRLSAGGDIWVTREPYVSCDPGKCYQFALGQGTTLNNKHSNDTVHDRTPYRTLLMNELGVPFHLGTKQVCIAWSSSSCHDGKAWLHVCVTGHDENATASFIYDGRLVDSIGSWSKNILRTQESECVCINGTCTVVMTDGSASEKADTKILFIEEGKIVHISPLSGSAQHVEECSCYPRYPGVRCVCRDNWKGSNRPIVDINVKDYSIVSSYVCSGLVGDTPRKNDSSSSSYCWNPNNEKGGHGVKGWAFDDGNDVWMGRTISEELRSGYETFKVIGGWSKPNSKLQINRQVIVDRGNRSGYSGIFSVEGKSCINRCFYVELIRGRKQETEVWWTSNSIVVFCGTSGTYGTGSWPDGADINLMPI

SEQ ID NO: 21947 - protein, 469 aa, Artificial Sequence
  derived and/or modified protein sequence (wt) from neuraminidase__InfluenzaA__AFG72606
MNPNQKIITIGSVSLTIATICFLMQIAILVTTVTLHFKQYECNSPPNNQVMLCEPTIIERNITEIVYLTNTTIEKEICPKLAEYRNWSKPQCKITGFAPFSKDNSIRLSAGGDIWVTREPYVSCDPGKCYQFALGQGTTLNNRHSNDTVHDRTPYRTLLMNELGVPFHLGTKQVCIAWSSSSCHDGKAWLHVCVTGHDENATASFIYDGRLVDSIGSWSKNILRTQESECVCINGTCTVVMTDGSASERADTKILFIEEGKIVHISPLSGSAQHVEECSCYPRYPGVRCVCRDNWKGSNRPIVDINVKDHSIVSSYVCSGLVGDTPRKNDSSSSSYCLNPNNEEGGHGVKGWAFDDGNDVWMGRTISEKLRSGYETFKVIGGWSKPNSKLQINRQVIVDRGNRSGYSGIFSVEGKSCVNRCFYVELIRGRKQETEVWWTSNSIVVFCGTSGTYGTGSWPDGADINLMPI

SEQ ID NO: 21948 - protein, 469 aa, Artificial Sequence
  derived and/or modified protein sequence (wt) from neuraminidase__InfluenzaA__AFG72617
MNPNQKIITIGSVSLTITTICFLMQIAILVITVTLHFKQCECNSPPNNQVMLCEPTIIERNITEIVYLTNTTIEKEICPKLAEYRNWSKPQCKITGFAPFSKDNSIRLSAGGDIWVTREPYVSCDPGKCYQFALGQGTTLNNRHSNDTVHDRTPYRTLLMNELGVPFHLGTKQVCIAWSSSSCHDGKAWLHVCVTGHNENATASFIYDGRLVDSIGSWSKNILRTQESECVCINGTCTVVMTDGSASGRADTKILFIEEGKIVHISPLSGSAQHVEECSCYPRYPGVRCVCRDNWKGSNRPIVDINVKDYSIVSSYVCSGLVGDTPRKNDSSSSSYCLNPNNEEGGHGVKGWAFDDGNDVWMGRTISEKLRSGYETFKVIGGWSKPNSKLQINRQVIVDRGNRSGYSGIFSVEGKSCINRCFYVELIRGRKQETEVWWTSNSIVVFCGTSGTYGTGSWPDGADINLMPI

SEQ ID NO: 21949 - protein, 469 aa, Artificial Sequence
  derived and/or modified protein sequence (wt) from neuraminidase__InfluenzaA__AFG72628
MNPNQKIITIGSVSLTIATICFLMQIAILVTTVTLHFKQYECNSPPNNQVMLCEPTIIERNITEIVYLTNTTIEKEICPKLAEYRNWSKPQCKITGFAPFSKDNSIRLSAGGDIWVTREPYVSCDPDKCYQFALGQGTTLNNRHSNDTVHDRTPYRTLLMNELGVPFHLGTKQVCIAWSSSSCHDGKAWLHVCVTGHDENATASFIYDGRLVDSIGSWSKKILRTQESECVCINGTCTVVMTDGSASGRADTKILFIEEGKIVHISPLSGSAQHVEECSCYPRYSGVRCVCRDNWKGSNRPIVDINVKDYSIVSSYVCSGLVGDTPRKNDSSSSSHCLNPNNEEGGHGVKGWAFDDGNDVWMGRTISEKLRSGYETFKVIGGWSKPNSKLQINRQVIVDRGNRSGYSGIFSVEGKSCINRCFYVELIRGRKQETEVWWTSNSIVVFCGTSGTYGTGSWPDGADINLMPI

SEQ ID NO: 21950 - protein, 469 aa, Artificial Sequence; identical to SEQ ID NO: 14980
  derived and/or modified protein sequence (wt) from neuraminidase__InfluenzaA__AFG72639

SEQ ID NO: 21951 - protein, 469 aa, Artificial Sequence
  derived and/or modified protein sequence (wt) from neuraminidase__InfluenzaA__AFG72650
MNPNQKIITIGSVSLTIATICFLMQIAILVTTVTLHFKQYECNSPPNNQVMLCEPTIIERNITEIVYLTNTTIEKEICPKLAEYRNWSKPQCKITGFAPFSKDNSIRLSAGGDIWVTREPYVSCDPGKCYQFALGQGTTLNNRHSNDTVHDRTPYRTLLMNELGVPFHLGTKQVCIAWSSSSCHDGKAWLHVCVTGHDENATASFIYDGRLVDSIGSWSKNILRTQESECVCINGTCTVVMTDGSASERADTKILFIEEGKIVHISPLSGSAQHVEECSCYPRYPGVRCVCRDNWKGSNRPIVDINVKDYSIVSSYVCSGLVGDTPRKNDSSSSSYCLNPNNEEGGHGVKGWAFDDGNDVWMGRTISEKLRSGYETFKVIGGWSKPNSKLQINRQVIVDRGNRSGYSGIFSVEGKSCVNRCFYVELIRGRKQETEVWWTSNSIVVFCGTSGTYGTGSWPDGADINLMPI

SEQ ID NO: 21952 - protein, 469 aa, Artificial Sequence; identical to SEQ ID NO: 21949
  derived and/or modified protein sequence (wt) from neuraminidase__InfluenzaA__AFG72672

SEQ ID NO: 21953 - protein, 468 aa, Artificial Sequence
  derived and/or modified protein sequence (wt) from neuraminidase__InfluenzaA__AFG72683
MNPNQKIITIGSVSLTIATICFLMQIAILVITVTLHFKQYECNSPPNNQVMLCEPTIIERNITEIVYLTNTTIEKEICPKLAEYRNWSKPQCKITGFAPFSKDNSIRLSAGGDIWVTREPYVSCDPGKCYQFALGQGTTLNNRHSNEVHDRTPYRTLLMNELGVPFHLGTKQVCIAWSSSSCHDGKAWLHVCVTGHNENATASFIYDGRLVDSIGSWSKNILRTQESECVCINGTCTVVMTDGSASGRADTKILFIEEGKIVHISPLSGSAQHVEECSCYPRYPGVRCVCRDNWKGSNRPIVDINVKDYSIVSSYVCSGLVGDTPRKNDSSSSSHCLNPNNEEGGHGVKGWAFDDGNDVWMGRTISEKLRSGYETFKVIGGWSKPNSKLQINRQVIVDRGNRSGYSGIFSVEGKSCINRCFYVELIRGRKQETEVWWTSNSIVVFCGTSGTYGTGSWPDGADINLMPI

SEQ ID NO: 21954 - protein, 469 aa, Artificial Sequence
  derived and/or modified protein sequence (wt) from neuraminidase__InfluenzaA__AFG72705
MNPNQKIITIGSVSLTIATICFLMQIAILVTTVTLHFKQYECNSPPNNQVMLCEPTIIERNITEIVYLTNTTIEKEICPKLAEYRNWSKPQCKITGFAPFSKDNSIRLSAGGDIWVTREPYVSCDPDKCYQFALGQGTTLNNRHSNDTVHDRTPYRTLLMNELGVPFHLGTKQVCIAWSSSSCHDGKAWLHVCVTGHDENATASFIYDGRLVDSIGSWSKKILRTQESECVCINGTCTVVMTDGSASGRADTKILFIEEGKIVHISQLSGSAQHVEECSCYPRYPGVRCVCRDNWKGSNRPIVDINVKDHSIVSSYVCSGLVGDTPRKNDSSSSSHCLNPNNEEGGHGVKGWAFDDGNDVWMGRTISEKLRSGYETFKVIEGWSKPNSKLQINRQVIVDRGNRSGYSGIFSVEGKSCINRCFYVELIRGRKQETEVWWTSNSIVVFCGTSGTYGTGSWPDGADINLMPI

SEQ ID NO: 21955 - protein, 469 aa, Artificial Sequence
  derived and/or modified protein sequence (wt) from neuraminidase__InfluenzaA__AFG72716
MNPNQKIITIGSVSLTITTICFLMQIAILVITVTLHFKQCECNSPPNNQVMLCEPTIIERNITEIVYLTNTTIEKEICPKLAEYRNWSKPQCKITGFAPFSKDNSIRLSAGGDIWVTREPYVSCDPGKCYQFALGQGTTLNNRHSNDTVHDRTPYRTLLMNELGVPFHLGTKQVCIAWSSSSCHDGKAWLHVCVTGHNENATASFIYDGRLVDSIGSWSKNILRTQESECVCINGTCTVVMTDGSASGRADTKILFIEEGKIVHISPLSGSAQHVEECSCYPRYPGVRCVCRDNWKGSNRPIVDINVKDYSIVSSYVCSGLVGDTPRKNDSSSSSYCLDPNNEEGGHGVKGWAFDDGNDVWMGRTISEKSRSGYETFKVIGGWSKPNSKLQINRQVIVDRGNRSGYSGIFSVEGKSCINRCFYVELIRGRRQETEVWWTSNSIVVFCGTSGTYGTGSWPDGADINLMPI

SEQ ID NO: 21956 - protein, 469 aa, Artificial Sequence
  derived and/or modified protein sequence (wt) from neuraminidase__InfluenzaA__AFG72738
MNPNQKIITIGSVSLTITTICFLMQIAILVITVTLHFKQCECNSPPNNQVMLCEPTIIERNITEIVYLTNTTIEKEICPKLAEYRNWSKPQCKITGFAPFSKDNSIRLSAGGDIWVTREPYVSCDPGKCYQFALGQGTTLNNRHSNDTVHDRTPYRTLLMNELGVPFHLGTKQVCIAWSSSSCHDGKAWLHVCVTGHNENATASFIYDGRLVDSIGSWSKNILRTQESECVCINGTCTVVMTDGSASGRADTKILFIEEGKIVHISQLSGSAQHVEECSCYPRYPGVRCVCRDNWKGSNRPIVDINVKDYSIVSSYVCSGLVGDTPRKNDSSSSSYCLDPNNEEGGHGVKGWAFDDGNDVWMGRTISEKLRSGYETFKVIGGWSKPNSKLQINRQVIVDRGNRSGYSGIFSVEGKSCINRCFYVELIRGRKQETEVWWTSNSIVVFCGTSGTYGTGSWPDGADINLMPI

SEQ ID NO: 21957 - protein, 469 aa, Artificial Sequence; identical to SEQ ID NO: 15185
  derived and/or modified protein sequence (wt) from neuraminidase__InfluenzaA__AFG72749

SEQ ID NO: 21958 - protein, 469 aa, Artificial Sequence; identical to SEQ ID NO: 14573
  derived and/or modified protein sequence (wt) from neuraminidase__InfluenzaA__AFG72760

SEQ ID NO: 21959 - protein, 469 aa, Artificial Sequence; identical to SEQ ID NO: 14040
  derived and/or modified protein sequence (wt) from neuraminidase__InfluenzaA__AFG72771

SEQ ID NO: 21960 - protein, 469 aa, Artificial Sequence
  derived and/or modified protein sequence (wt) from neuraminidase__InfluenzaA__AFG72782
MNPNQKIITIGSVSLTIATICFLMQIAILVTTVTLHFKQYECNSLPNNQVMLCEPTIIERNITEIVYLTNTTIEKEICPKLAEYRNWSKPQCKITGFAPFSKDNSIRLSAGGDIWVTREPYVSCDPDKCYQFALGQGTTLNNRHSNDTVHDRTPYRTLLMNELGVPFHLGTKQVCIAWSSSSCHDGKAWLHVCVTGHDENATASFIYDGRLVDSIGSWSKKILRTQESECVCINGTCTVVMTDGSASGRADTKILFIEEGKIIHTSQLSGSAQHVEECSCYPRYPGVRCVCRDNWKGSNRPIVDINVKDYSIVSSYVCSGLVGDTPRKNDSSSSSHCLNPNNEEGGHGVKGWAFDDGNDVWMGRTISEKFRSGYETFKVIEGWSKPNSKLQINRQVIVDRDNRSGYSGIFSVEGKSCINRCFYVELIRGRKQETEVWWTSNSIVVFCGTSGTYGTGSWPDGADINLMPI

SEQ ID NO: 21961 - protein, 469 aa, Artificial Sequence; identical to SEQ ID NO: 15749
  derived and/or modified protein sequence (wt) from neuraminidase__InfluenzaA__AFG72793

SEQ ID NO: 21962 - protein, 469 aa, Artificial Sequence; identical to SEQ ID NO: 14284
  derived and/or modified protein sequence (wt) from neuraminidase__InfluenzaA__AFG72804

SEQ ID NO: 21963 - protein, 469 aa, Artificial Sequence; identical to SEQ ID NO: 15929
  derived and/or modified protein sequence (wt) from neuraminidase__InfluenzaA__AFG72826

SEQ ID NO: 21964 - protein, 469 aa, Artificial Sequence
  derived and/or modified protein sequence (wt) from neuraminidase__InfluenzaA__AFG72837
MNPNQKIITIGSVSLTIATICFLMQIAILVTTVTLHFKQYECNSPPNNQVMLCEPTIIERNITEIVYLTNTTIEKEICPKLAEYRNWSKPQCNITGFAPFSKDNSIRLSAGGDIWVTREPYVSCDPDKCYQFALGQGTTLNNGHSNDTVHERTPYRTLLMNELGVPFHLGTKQVCIAWSSSSCHDGKAWLHVCVTGDDENATASFIYNGRLVDSIGSWSKKILRTQESECVCINGTCTVVMTDGSASGKADTKILFIEEGKIVHISTLSGSAQHVEECSCYPRYPGVRCVCRDNWKGSNRPIVDINVKDYSIVSSYVCSGLVGDTPRKNDSFSSSHCLDPNNEEGGHGVKGWAFDDGNDVWMGRTISEKLRSGYETFKVIEGWSKPNSKLQINRQVIVERGNRSGYSGIFSVEGKSCINRCFYVELIRGRKEETEVWWTSNSIVVFCGTSGTYGTGSWPDGADINLMPI

SEQ ID NO: 21965 - protein, 470 aa, Artificial Sequence
  derived and/or modified protein sequence (wt) from neuraminidase__InfluenzaA__AFG72848
MNPNQKIITIGSVSLTIATICFLMQIAILVTTVTLHFKQYECNSPPNNQVMLCEPTIIERNITEIVYLTNTTIEKEICPKSAEYRNWSKPQCNITGFAPFSKDNSIRLSAGGDIWVTREPYVSCDPDKCYQFALGQGTTLNNGHSNDTVHDRTPYRTLLMNELGVPFHLGTRQVCIAWSSSSCHDGKAWLHVCVTGDDKNATASFIYNGRLVDSIGSWSKKYILRTQESECVCINGTCTVVMTDGSASGKADTKILFIEEGKIIHISTLSGSAQHVEECSCYPRYPGVRCVCRDNWKGSNRPIVDINVKDYSIVSSYVCSGLVGDTPRKNDSSSSSHCLDPNNEEGGHGVKGWAFDDGNDVWMGRTISEKLRSGYETFKVIEGWSKPNSKLQINRQVIVERGNRSGYSGIFSVEGKSCINRCFYVELIRGRKEETEVWWTSNSIVVFCGTSGTYGTGSWPDGADINLMPI

SEQ ID NO: 21966 - protein, 469 aa, Artificial Sequence
  derived and/or modified protein sequence (wt) from neuraminidase__InfluenzaA__AFG72859
MNPNQKIITIGSVSLTISTICFFMQIAILITTVTLHFKQYEFNSPPNNQVMLCEPTIIERNITEIVYLTNTTIEKEICPKLAEYRNWSKPQCNITGFAPFSKDNSIRLSAGGDIWVTREPYVSCDPDKCYQFALGQGTTLNNVHSNDIVHDRTPYRTLLMNELGVPFHLGTKQVCIAWSSSSCHDGKAWLHVCVTGDDENATASFIYNGRLVDSIVSWSKKILRTQESECVCINGTCTVVMTDGSASGKADTKILFIEEGKIVHTSTLSGSAQHVEECSCYPRYPGVRCVCRDNWKGSNRPIVDINIKDYSIVSSYVCSGLVGDTPRKNDSSSSSHCLDPNNEEGGHGVKGWAFDDGNDVWMGRTISEKLRSGYETFKVIEGWSNPNSKLQINRQVIVDRGNRSGYSGIFSVEGKSCINRCFYVELIRGRKQETEVLWTSNSIVVFCGTSGTYGTGSWPDGADINLMPI

SEQ ID NO: 21967 - protein, 469 aa, Artificial Sequence
  derived and/or modified protein sequence (wt) from neuraminidase__InfluenzaA__AFG72870
MNPNQKIITIGSVSLTIATICFLMQIAILVTTVTLHFKQYECNSPPNNQVMLCEPTIIERNITEIVYLTNTTIEKEICPKLAEYRNWSKPQCNITGFAPFSKDNSIRLSAGGDIWVTREPYVSCDPDKCYQFALGQGTTLNNGHSNDTVHDRTPYRTLLMNELGVPFHLGTKQVCIAWSSSSCHDGKAWLHVCVTGDDENATASFIYNGRLVDSIGSWSKKILRTQESECVCINGTCTVVMTDGSTSGKADTKILFIEEGKIVHISTLSGSAQHVEECSCYPRYPGVRCVCRDNWKGSNRPIVDINVKDYSIVSSYVCSGLVGDTPRKNDSFSSSHCLDPNNEEGGHGVKGWAFDDGNDVWMGRTISEKLRSGYETFKVIEGWSKPNSKLQINRQVIVERGNRSGYSGIFSVESKSCINRCFYVELIRGRKEETEVWWTSNSIVVFCGTSGTYGTGSWPDGADINLMPI

SEQ ID NO: 21968 - protein, 469 aa, Artificial Sequence
  derived and/or modified protein sequence (wt) from neuraminidase__InfluenzaA__AFG72892
MNPNQKIITIGSVSLTISTICFFMQIAILITTVTLHFKQYEFNSPPNNQVMLCEPTIIERNITEIVYLTNTTIEKEICPKLAEYRNWSKPQCDITGFAPFSKDNSIRLSAGGDIWVTREPYVSCDPDKCYQFALGQGTTLNNVHSNDTVHDRTPYRTLLMNELGVPFHLGTKQVCIAWSSSSCHDGKAWLHVCVTGDDKNATASFIYNGRLVDSIVSWSKEILRTQESECVCINGTCTVVMTDGSASGKADTKILFIEEGKIVHTSTLSGSAQHVEECSCYPRYPGVRCVCRDNWKGSNRPIVDINIKDYSIVSSYVCSGLVGDTPRKNDSSSSSHCLDPNNEEGGHGVKGWAFDDGNDVWMGRTISEKLRSGYETFKVIEGWSNPNSKLQINRQVIVDRGNRSGYSGIFSVEGKSCINRCFYVELIRGRKEKTEVLWTSNSIVVFCGTSGTYGTGSWPDGADINLMPI

SEQ ID NO: 21969 - protein, 469 aa, Artificial Sequence
  derived and/or modified protein sequence (wt) from neuraminidase__InfluenzaA__AFG72903
MNPNQKIITIGSVSLTISTICFFMQIAILITTVTLHFKQYEFNSPPNNQVMLCEPTIIERNITEIVYLTNTTIEKEICPKLAEYRNWSKPQCNITGFAPFSKDNSIRLSAGGDIWVTREPYVSCDPDKCYQFALGQGTTLNNVHSNDTVHDRTPYRTLLMNELGVPFHLGTKQVCIAWSSSSCHDGKAWLHVCVTGDDKNATASFIYNGRLVDSIVSWSKEILRTQESECVCINGTCTVVMTDGSASGKADTKILFIEEGKIVHTSTLSGSAQHVEECSCYPRYPGVRCVCRDNWKGSNRPIVDINIKDYSIVSSYVCSGLVGDTPRKKDSSSSSHCLDPNNEEGGHGVKGWAFDDGNDVWMGRTISEKLRSGYETFKVIEGWSNPNSKLQINRQVIVDRGDRSGYSGIFSVEGKSCINRCFYVELIRGRKEETEVLWTSNSIVVFCGTSGTYGTGSWPDGADINLMPI

SEQ ID NO: 21970 - protein, 469 aa, Artificial Sequence
  derived and/or modified protein sequence (wt) from neuraminidase__InfluenzaA__AFG72936
MNPNQKIITIGSVSLTISTICFFIQIAILITTVTLHFKQYEFNSPPNNQVMLCEPTIIERNITEIVYLTNTTIEKEICPKLAEYRNWSKPQCDITGFAPFSKDNSIRLSAGGDIWVTREPYVSCDPDKCYQFALGQGTTLNNVHSNNIVRDRTPYRTLLMNELGVPFHLGTKQVCIAWSSSSCHDGKAWLHVCITGDDKNATASFIYNGRLVDSVVSWSKEILRTQESECVCINGTCTVVMTDGSASGKADTKILFIEEGKIVHTSTLSGSAQHVEECSCYPRYPGVRCVCRDNWKGSNRPIVDINIKDHSIVSSYVCSGLVGDTPRKNDSSSSSHCLDPNNEEGGHGVKGWAFDDGNDVWMGRTISEKSRLGYETFKVIEGWSNHKSKLQINRQVIVDRGNRSGYSGIFSVEGKSCINRCFYVELIRGRKEETEVLWTSNSIVVFCGTSGTYGTGSWPDGADLNLMPI

SEQ ID NO: 21971 - protein, 469 aa, Artificial Sequence
  derived and/or modified protein sequence (wt) from neuraminidase__InfluenzaA__AFG72958
MNPNQKIITIGSVSLTISTICFFMQIAILITTVTLHFKQYEFNSPPNNQVMLCEPTIIERNITEIVYLTNTTIEKEICPKLAEYRNWSKPQCDITGFAPFSKDNSIRLSAGGDIWVTREPYVSCDPDKCYQFALGQGTTLNNVHSNNIVRDRTPYRTLLMNELGVPFHLGTKQVCIAWSSSSCHDGKAWLHVCITGDDKNATASFIYNGRLVDSVVSWSKEILRTQESECVCINGTCTVVMTDGSASGKADTKILFIEEGKIVHTSTLSGSAQHVEECSCYPRYPGVRCVCRDNWKGSNRPIVDINIKDHSIVSSYVCSGLVGDTPRKNDSSSSSHCLDPNNEEGGHGVKGWAFDDGNDVWMGRTINETSRLGYETFKVIEGWSNPKSKLQINRQVIVDRGNRSGYSGIFSVEGKSCINRCFYVELIRGRKEETEVLWTSNSIVVFCGTSGTYGTGSWPDGADLNLMPI

SEQ ID NO: 21972 - protein, 469 aa, Artificial Sequence; identical to SEQ ID NO: 14103
  derived and/or modified protein sequence (wt) from neuraminidase__InfluenzaA__AFG98811

SEQ ID NO: 21973 - protein, 469 aa, Artificial Sequence
  derived and/or modified protein sequence (wt) from neuraminidase__InfluenzaA__AFG98822
MNPNQKIITIGSVSLIIATVCFLMQIAILVTTVTLHFKQHECDSPSSNQVMLCEPIIIERNITEIVYLNNTTIEKETCPKLVEYRNWSKPQCKITGFAPFSKDNSIRLSAGGDIWVTREPYVSCDPGKCYQFALGQGTTLDNKHSNDTIHDRIPHRTLLMNELGVPFHLGTRQVCIAWSSSSCHDGKAWLHVCVTGDDKNATASFIYDGRLVDSIGSWSQNILRTQESECVCINGTCTVVMTDGSASGRADTRILFIEEGKIVHISPLSGSAQHVEECSCYPRYPDVRCICRDNWKGSNRPIVDINMKDYSIDSSYVCSGLVGDTPRNDDRSSKSNCRNPNNERGNHGVKGWAFDNGNDVWMGRTISKDLRSGYETFKVIGGWSTPNSKSQINRQVIVDSDNRSGYSGIFSVEGKSCINRCFYVELIRGREQETRVWWTSNSIVVFCGTSGTYGTGSWPDGANINFMPI

SEQ ID NO: 21974 - protein, 469 aa, Artificial Sequence; identical to SEQ ID NO: 20127
  derived and/or modified protein sequence (wt) from neuraminidase__InfluenzaA__AFG98833

SEQ ID NO: 21975 - protein, 469 aa, Artificial Sequence
  derived and/or modified protein sequence (wt) from neuraminidase__InfluenzaA__AFG98844
MNPNQKIITIGSVSLTIATICFLMQIAILVTTVTLHFKQYECDSPANNQVMPCEPIIIERNITEIVYLTNTTIEKEMCPKLVEYRNWSKPQCKITGFAPFSKDNSIRLSAGGDIWVTREPYVSCDPGKCYQFALGQGTTLNNRHSNDTIHDRIPHRTLLMNELGVPFHLGTRQVCIAWSSSSCHDGKAWLHVCVTGDDKNATASFIYDGRLVDSIGSWSQNILRTQESECVCINRTCTVVMTDGSASGKADTRILFIEEGKIVHISPLSGSAQHVEECSCYPRYPGVRCICRDNWKGSNRPVVDINVKDYSIDSSYVCSGLVGDTPRNNDRSSSSYCRNPNNERGNHGVKGWAFDDENDVWMGRTISKDSRSGYETFKVIGGWSTPNSKSQINRQVIVDSDNRSGYSGIFSVEGKSCINRCFYVELIRGREQETRVWWTSNSIVVFCGTSGTYGTGSWPDGADINLMPI

SEQ ID NO: 21976 - protein, 469 aa, Artificial Sequence; identical to SEQ ID NO: 14118
  derived and/or modified protein sequence (wt) from neuraminidase__InfluenzaA__AFG98855

SEQ ID NO: 21977 - protein, 469 aa, Artificial Sequence; identical to SEQ ID NO: 14972
  derived and/or modified protein sequence (wt) from neuraminidase__InfluenzaA__AFG98866

SEQ ID NO: 21978 - protein, 469 aa, Artificial Sequence
  derived and/or modified protein sequence (wt) from neuraminidase__InfluenzaA__AFG98877
MNPNQKIITIGSVSLTIATICFLMQIAILVTTVTLHFKQYECDSPPNNQVMPCEPIIIERNITEIVYLTNTTIEKEICPKLVEYRNWSKPQCKITGFAPFSKDNSIRLSAGGDIWVTREPYVSCDPGKCYQFALGQGTTLDNKHSNDTIHDRTPHRTLLMNELGVPFHLGTRQVCIAWSSSSCHDGKAWLHVCVTGYDKNATASFIYDGRLVDSIGSWSQNILRTQESECVCINGTCTVVMTDGSASGRADTKILFIEEGKIVHISPLSGSAQHVEECSCYPRYPGVRCICRDNWKGSNRPVVDINVKDYSIDSSYVCSGLVGDTPRNNDRSSNSYCRNPNNEKGNHGVKGWAFDDGNDVWMGRTISEDSRSGYETFKVIGGWSTPNSKLQINRQVIVDSDNRSGYSGIFSVEGKSCINRCFYVELIRGREQETRVWWTSNSIVVFCGTSGTYGTGSWPDGADINLMPI

SEQ ID NO: 21979 - protein, 469 aa, Artificial Sequence; identical to SEQ ID NO: 14118
  derived and/or modified protein sequence (wt) from neuraminidase__InfluenzaA__AFG98888

SEQ ID NO: 21980 - protein, 469 aa, Artificial Sequence
  derived and/or modified protein sequence (wt) from neuraminidase__InfluenzaA__AFG98899
MNPNQKIITIGSVSLIIATICFLMQIAILVTTVTLHFKQYECDSPANNQVMPCEPIIIERNITEIVYLTNTTIEKEICPKLVEYRNWSKPQCKITGFAPFSKDNSIRLSAGGDIWVTREPYVSCDPGKCYQFALGQGTTLDNKHSNDTIHDRTPHRTLLMNELGVPFHLGTRQVCIAWSSSSCHDGKAWLHVCVTGYDKNATASFIYDGRLVDSIGSWSQNILRTQESECVCINGTCTVVMTDGSASGRADTKILFIEEGKIVHISPLSGSAQHVEECSCYPRYPGVRCICRDNWKGSNRPVVDINVKDYSIDSSYVCSGLVGDTPRNNDRSSNSYCRNPNNEKGNHGVKGWAFDDGNDVWMGRTISEDSRSGYETFKVIGGWSTPNSKLQINRQVIVDSDNRSGYSGIFSVEGKSCINRCFYVELIRGREQETRVWWTSNSIVVFCGTSGTYGTGSWPDGADINLMPI

SEQ ID NO: 21981 - protein, 469 aa, Artificial Sequence; identical to SEQ ID NO: 14118
  derived and/or modified protein sequence (wt) from neuraminidase__InfluenzaA__AFG98910

SEQ ID NO: 21982 - protein, 469 aa, Artificial Sequence; identical to SEQ ID NO: 14118
  derived and/or modified protein sequence (wt) from neuraminidase__InfluenzaA__AFG98921

SEQ ID NO: 21983 - protein, 469 aa, Artificial Sequence
  derived and/or modified protein sequence (wt) from neuraminidase__InfluenzaA__AFG98932
MNPNQKIITIGSVSLTIATICFLMQIAILVTTVTLHFKQYECDSPANNQVMPCEPIIVERNITEIVYLTNTTIEKEICPKLVEYRKWSKPQCKITGFAPFSKDNSIRLSAGGDIWVTREPYVSCDPGKCYQFALGQGTTLDNKHSNDTIHDRTPHRTLLMNELGVPFHLGTRQVCIAWSSSSCHDGKAWLHVCVTGYDKNATASFIYDGRLVDSIGSWSQNILRTQESECVCINGTCTVVMTDGSASGRADTKILFIEEGKIVHISPLSGSAQHVEECSCYPRYPGVRCICRDNWKGSNRPVVDINVKDYSIDSSYVCSGLVGDTPRNNDRSSNSYCRNPNNEKGNHGVKGWAFDDGNDVWMGRTISEDSRSGYETFKVIGGWSTPNSKLQINRQVIVDSDNRSGYSGIFSVEGKSCINRCFYVELIRGREQETRVWWTSNSIVVFCGTSGTYGTGSWPDGADINLMPI

SEQ ID NO: 21984 - protein, 469 aa, Artificial Sequence
  derived and/or modified protein sequence (wt) from neuraminidase__InfluenzaA__AFG98943
MNPNQKIITIGSVSLTIATICFLMQIAILVTTVTLHFKQYECDSPANNQVMPCEPIIIERNITEIVYLTNTTIEKEICPKLVEYRNWSKPQCKITGFAPFSKDNSIRLSAGGDIWVTREPYVSCDPGKCYQFALGQGTTLDNKHSNDTIHDRTPHRTLLMNELGVPFHLGTRQVCIAWSSSSCHDGKAWLHVCVTGYDKNATASFIYDGRLVDSIGSWSQNILRTQESECVCINGTCTVVMTDGSASGRADTKILFIEEGKIVHISPLSGSAQHVEECSCYPRYPGVRCICRDNWKGSNRPVVDINVKDYSIDSSYVCSGLVGDTPRKNDRSSNSYCRNPNNEKGNHGVKGWAFDDGNDVWMGRTISEDSRSGYETFKVIGGWSTPNSKLQINRQVIVDSDNRSGYSGIFSVEGKSCINRCFYVELIRGREQETRVWWTSNSIVVFCGTSGTYGTGSWPDGADIDLMPI

SEQ ID NO: 21985 - protein, 469 aa, Artificial Sequence
  derived and/or modified protein sequence (wt) from neuraminidase__InfluenzaA__AFG98965
MNPNQKIITIGSVSLTIATICFLMQIAILVTTVTLHFKQYECDSPANNQVMPCEPTIIERNITEIVYLTNITIEKEICPKLVEYRNWSKPQCKITGFAPFSKDNSIRLSAGGDIWVTREPYVSCDPGKCYQFALGQGTTLDNKHSNDTIHDRTPHRTLLMNELGVPFHLGTRQVCIAWSSSSCHDGKAWLHVCVTGYDKNATASFIYDGRLVDSIGSWSQNILRTQESECVCINGTCTVVMTDGSASGRADTKILFIEEGKIVHISPLSGSAQHVEECSCYPRYPGVRCICRDNWKGSNRPVVDINVKDYSIDSSYVCSGLVGDTPRNNDRSSNSYCRNPNNEKGNHGVKGWAFDDGNDVWMGRTISEDSRSGYETFKVIGGWSTPNSKLQINRQVIVDSDNRSGYSGIFSVEGKSCINRCFYVELIRGREQETRVWWTSNSIVVFCGTSGTYGAGSWPDGADINLMPI

SEQ ID NO: 21986 - protein, 469 aa, Artificial Sequence
  derived and/or modified protein sequence (wt) from neuraminidase__InfluenzaA__AFG98976
MNPNQKIITIGSVSLTIATICFLMQIAILVTTVTLHFKQYECDSPANNQVMPCEPIIIERNITEIVYLANTTIEKEICPKLVEYRNWSKPQCKITGFAPFSKDNSIRLSAGGDIWVTREPYVSCDPGKCYQFALGQGTTLDNKHSNDTIHDRTPHRTLLMNELGVPFHLGTRQVCIAWSSSSCHDGKAWLHVCVTGYDKNATASFIYDGRLVDSIGSWSKNILRTQESECVCINGTCTVVMTDGSASGRADTKILFIEEGKIVHISPLSGSAQHVEECSCYPRYPGVRCICRDNWKGSNRPVVDINVKDYSIDSSYVCSGLVGDTPRNNDRSSSSYCRNPNNEKGNHGVKGWAFDDGNDVWMGRTISEDSRSGYETFKVIGGWSTPNSKLQINRQVIVDSDNRSGYSGVFSVEGKSCINRCFYVELIRGRELETRVWWTSNSIVVFCGTSGTYGTGSWPDGADINLMPI

SEQ ID NO: 21987 - protein, 469 aa, Artificial Sequence; identical to SEQ ID NO: 21986
  derived and/or modified protein sequence (wt) from neuraminidase__InfluenzaA__AFG98987

SEQ ID NO: 21988 - protein, 469 aa, Artificial Sequence
  derived and/or modified protein sequence (wt) from neuraminidase__InfluenzaA__AFG98998
MNPNQKIITIGSVSLTIATICFLMQIAILVTTVTLHFKQYECDSPANNQVMPCEPIIIERNITEIVYLTNTTIEKEICPKLVEYRNWSKPQCKITGFAPFSKDNSIRLSAGGDIWVTREPYVSCDPGKCYQFALGQGTTLENKHSNDTIHDRTPHRTLLMNELGVPFHLGTRQVCIAWSSSSCHDGKAWLHVCVTGYDKNATASFIYDGRLVDSIGSWSQNILRTQESECVCINGTCTVVMTDGSASGRADTKILFIEEGKIVHISPLSGSAQHVEECSCYPRYPGVRCICRDNWKGSNRPVVDINVKDYSIDSSYVCSGLVGDTPRKNDRSSSSYCRNPNNEKGNHGVKGWAFDDGNDVWMGRTISEDSRSGYETFKVIGGWSTPNSKLQINRQVIVDSANRSGYSGIFSVEGKSCINRCFYVELIRGREQETRVWWTSNSIVVFCGTSGTYGTGSWPDGADINLMPI

SEQ ID NO: 21989 - protein, 469 aa, Artificial Sequence; identical to SEQ ID NO: 21986
  derived and/or modified protein sequence (wt) from neuraminidase__InfluenzaA__AFG99009

SEQ ID NO: 21990 - protein, 469 aa, Artificial Sequence
  derived and/or modified protein sequence (wt) from neuraminidase__InfluenzaA__AFG99020
MNPNQKIITIGSVSLTIATICFLMQIAILVTTVTLHFKQYECDSPANNQVMPCEPIIIERNITEIVYLTNTTIEKEICPKLVEYRNWSKPQCKITGFAPFSKDNSIRLSAGGDIWVTREPYVSCDPGKCYQFALGQGTTLDNKHSNDTIHDRTPHRTLLMNELGVPFHLGTRQVCIAWSSSSCHDGKAWLHVCVTGYDKNATASFIYDGRLVDSIGSWSQNILRTQESECVCINGTCTVVMTDGSASGRADTKILFIEEGKIVHTSPLSGSAQHVEECSCYPRYPGVRCICRDNWKGSNRPVVDINVKDYSIDSSYVCSGLVGDTPRNNDRSSSSYCRNPNNEKGTHGVKGWAFDDGNDVWMGRTISEDSRSGYETFKVIGGWSTPNSKLQINRQVIVDSDNRSGYSGIFSVEGKSCINRCFYVELIRGREQETRVWWTSNSIVVFCGTSGTYGTGSWPDGADINIMPI

SEQ ID NO: 21991 - protein, 469 aa, Artificial Sequence
  derived and/or modified protein sequence (wt) from neuraminidase__InfluenzaA__AFG99031
MNPNQKIITIGSVSLTIATICFLMQIAILVTTVTLHFKQYECDSPANNQVMPCEPIIIERNITEIVYLTNTTIEKEICPKLVEYRNWSKPQCKITGFAPFSKDNSIRLSAGGDIWVTREPYVSCDPGKCYQFALGQGTTLDNKHSNDTIHDRTPHRTLLMNELGVPFHLGTRQVCIAWSSSSCHDGKAWLHVCVTGYDKNATASFIYDGRLVDSIGSWSQNILRTQESECVCINGTCTVVMTDGSASGRADTKILFIEEGKIVHTSPLSGSAQHVEECSCYPRYPGVRCICRDNWRGSNRPVVDINVKDYSIDSSYVCSGLVGDTPRNNDRSSSSYCRNPNNEKGTHGVKGWAFDDGNDVWMGRTISEDSRSGYETFKVIGGWSTPNSKLQINRQVIVDSDNRSGYSGIFSVEGKSCINRCFYVELVRGREQETRVWWTSNSIVVFCGTSGTYGTGSWPDGADINLMPI

SEQ ID NO: 21992 - protein, 469 aa, Artificial Sequence; identical to SEQ ID NO: 14576
  derived and/or modified protein sequence (wt) from neuraminidase__InfluenzaA__AFG99042

SEQ ID NO: 21993 - protein, 469 aa, Artificial Sequence
  derived and/or modified protein sequence (wt) from neuraminidase__InfluenzaA__AFG99053
MNPNQKIITIGSVSLTIATICFLMQIAILVTTVTLHFKQYECDSPANNQVMPCEPIIIERNITEIVYLTNTTIEKEICPKLVEYRNWSKPQCKITGFAPFSKDNSIRLSAGGDIWVTREPYVSCDPGKCYQFALGQGTTLDNKHSNDTIHDRTPHRTLLMNELGVPFHLGTRQVCIAWSSSSCHDGKAWLHVCVTGYDKNATASFIYDGRLVDSIGSWSQNILRTQESECVCINGTCTVVMTDGSASGRADTKILFIEEGKIVHTSSLSGSAQHVEECSCYPRYPGVRCICRDNWKGSNRPVVDINVKDYSIDSSYVCSGLVGDTPRNNDRSSSSYCRNPNNEKGTHGVKGWAFDDGNDVWMGRTISEDSRSGYETFKVIGGWSIPNSKLQINRQVIVDSDNRSGYSGIFSVEGKSCINRCFYVELIRGREQETRVWWTSNSIVVFCGTSGTYGTGSWPDGADINLMPI

SEQ ID NO: 21994 - protein, 469 aa, Artificial Sequence
  derived and/or modified protein sequence (wt) from neuraminidase__InfluenzaA__AFG99064
MNPNQKIITIGSVSLTIATVCFLMQIAILVTTVTLHFKQYECDSPPNNQVMPCEPIIIERNVTEIVYLTNTTIEKEICPKLVEYRNWSKPQCKITGFAPFSKDNSIRLSAGGDIWVTREPYVSCDPSKCYQFALGQGTTLDNKHSNDTIHDRTPHRTLLMNELGVPFHLGTRQVCIAWSSSSCHDGKAWLHVCITGYDKNATASFIYDGRLVDSIGSWSKNILRTQESECVCINGTCTVVMTDGSASERADTKILFIEEGKIVHISPLSGSAQHVEECSCYPRYPGVRCICRDNWKGSNRPVVDINVKDYSIVSSYVCSGLVGDTPRKNDRSSSSYCRNPNNEKGNHGVKGWAFDDGNDVWMGRTISEESRSGYETFKVIGGWSTPNSKLQINRQVIVDSDNRSGYSGIFSVEGKSCINRCFYVELIRGREQETRVWWTSNSIVVFCGTSGTYGTGSWPDGADINLMPI

SEQ ID NO: 21995 - protein, 469 aa, Artificial Sequence
  derived and/or modified protein sequence (wt) from neuraminidase__InfluenzaA__AFG99086
MNPNQKIITIGSVSLTIATICFLMQIAILVTTVTLHFKQYECDSPANNQVMPCEPIIIERNVTEIVYLTNTTIEKEICPKLVEYRNWSKPQCKITGFAPFSKDNSIRLSAGGDIWVTREPYVSCDPGKCYQFALGQGTTLDNKHSNDTIHDRTPYRTLLMNELGVPFHLGTRQVCIAWSSSSCHDGKAWLHVCVTGYDKNATASFIYDGRLVDSIGSWSKNILRTQESECVCINGTCTVVMTDGSASERADTKILFIEEGKIVHISPLSGSAQHVEECSCYPRYPGVRCICRDNWKGSNRPVVDINVKDYSIVSSYVCSGLVGDTPRKNDRSSSSYCRNPNNEKGNHGVKGWAFDDGNDVWMGRTISEESRSGYETFKVIGGWSTPNSKLQINRQVIVDSDNRSGYSGIFSVEGKSCINRCFYVELIRGREQETRVWWTSNSIVVFCGTSGTYGTGSWPDGADINLMPI

SEQ ID NO: 21996 - protein, 469 aa, Artificial Sequence
  derived and/or modified protein sequence (wt) from neuraminidase__InfluenzaA__AFG99097
MNPNQKIITIGSVSLTIATICFLMQIAILVTTVTLHFKQYECDSPANNQVMPCEPIIIERNVTEIVYLTNTTIEKEICPKLVEYRNWSKPQCKITGFAPFSKDNSIRLSAGGDIWVTREPYVSCDPGKCYQFALGQGTTLDNKHSNDTIHDRTPYRTLLMNELGVPFHLGTRQVCIAWSSSSCHDGKAWLHVCVTGYDKNATASFIYDGRLVDSIGSWSKNILRTQESECVCINGTCTVVMTDGSASERADTKILFIEEGKIVHISPLSGSAQHVEECSCYPRYPGVRCICRDNWKGSNRPVVDINVKDYSIVSSYVCSGLVGDTPRKNDRSSSSYCRNPNNEKGNHGVKGWAFDDGNDVWMGRTISEESRLGYETFKVIGGWSTPNSKLQINRQVIVDSDNRSGYSGIFSVEGKSCINRCFYVELIRGREQETRVWWTSNSIVVFCGTSGTYGTGSWPDGADINLMPI

SEQ ID NO: 21997 - protein, 469 aa, Artificial Sequence
  derived and/or modified protein sequence (wt) from neuraminidase__InfluenzaA__AFG99119
MNPNQKIITIGSVSLTIATICFLMQIAILVTTVTLHFKQYECSSPPNNQVMPCEPIIIERNITEIVYLTNTTIEKEICPKLVEYRNWSKPQCKITGFAPFSKDNSIRLSAGGDIWVTREPYVSCDPGKCYQFALGQGTTLDNKHSNDTIHDRTPYRTLLMNELGVPFHLGTRQVCIAWSSSSCHDGKAWLHVCVTGHDKNATASFIYDGRLVDSIGSWSKNILRTQESECVCINGTCTVVMTDGSASERADTKILFIEEGKIVHISPLSGSAQHVEECSCYPRYPGVRCVCRDNWKGSNRPIVDINVKDYSIVSSYVCSGLVGDTPRKNDRSSSSYCRNPNNEKGNHGVKGWAFDDGNDVWMGRTISEESRSGYETFKVIGGWSTPNSKLQINRQVIVDSDNRSGYSGIFSVEGKSCINRCFYVELIRGREQETRVWWTSNSIVVFCGTSGTYGTGSWPDGADINLMPI

SEQ ID NO: 21998 - protein, 469 aa, Artificial Sequence
  derived and/or modified protein sequence (wt) from neuraminidase__InfluenzaA__AFG99130
MNPNQKIITIGSVSLTIATICFLMQIAILVTTVTLHFKQYECSSPPNNQVMPCGPIIIERNITEIVYLTNTTIEKEICPKLVEYRNWSKPQCKITGFAPFSKDNSIRLSAGGDIWVTREPYVSCDPGKCYQFALGQGTTLDNKHSNDTIHDRTPYRTLLMNELGVPFHLGTRQVCIAWSSSSCHDGKAWLHVCVTGHDKNATASFIYDGRLVDSIGSWSKNILRTQESECVCINGTCTVVMTDGSASERADTKILFIEEGKIVHISPLSGSAQHVEECSCYPRYPGVRCVCRDNWKGSNRPVVDINVKDYSIVSSYVCSGLVGDTPRKNDRSSSSYCRNPNNEKGNHGVKGWAFDDGNDVWMGRTISEESRSGYETFKVIGGWSTPNSKLQTNRQVIVDSDNRSGYSGIFSVEGKSCINRCFYVELIRGREQETRVWWTSNSIVVFCGTSGTYGTGSWPDGADINLMPI

SEQ ID NO: 21999 - protein, 469 aa, Artificial Sequence
  derived and/or modified protein sequence (wt) from neuraminidase__InfluenzaA__AFG99141
MNPNQKIITIGSVSLTIATICFLMQIAILVTTVTLHFKQYECSSPPNNQVMPCEPIIIERNITEIVYLTNTTIEKEICPKLVEYRNWSKPQCKITGFAPFSKDNSIRLSAGGDIWVTREPYVSCDPGKCYQFALGQGTTLDNKHSNDTIHDRTPYRTLLMNELGVPFHLGTRQVCIAWSSSSCHDGKAWLHVCVTGHDKNATASFIYDGRLVDSIGSWSKNILRTQESECVCINGTCTVVMTDGSASERAETKILFIEEGKIVHISPLSGSAQHVEECSCYPRYPGVRCVCRDNWKGSNRPVVDINVKDYSIVSSYVCSGLVGDTPRKNDRSSSSYCRNPNNEKGNHGVKGWAFDDGNDVWMGRTISEESRSGYETFKVIGGWSTPNSKLQINRQVIVDSDNRSGYSGIFSVEGKSCINRCFYVELIRGREQETRVWWTSNSIVVFCGTSGTYGTGSWPDGADINLMPI

SEQ ID NO: 22000 - protein, 469 aa, Artificial Sequence
  derived and/or modified protein sequence (wt) from neuraminidase__InfluenzaA__AFG99152
MNPNQKIMTIGSVSLTIATICFLMQIAILVTTVTLHFKHYEFSSPPNNQVMPCEPIIIERNITEIVYLTNTTIEKEVCPKLVEYRNWSKPQCKITGFAPFSKDNSIRLSAGGDIWVTREPYVSCDPGKCYQFALGQGTTLNNKHSNDTIHDRTPYRTLLMNELGVPFHLGTRQVCIAWSSSSCHDGKAWLHVCVTGHDKNATASFIYDGRLVDSIGSWSKNILRTQESECVCINGTCTVVMTDGSASGRADTKILFIEEGKIVHISPLSGSAQHVEECSCYPRYPGVRCVCRDNWKGSNRPIVDINVKDYSIVSSYVCSGLVGDTPRKNDRSSSSYCRNPNNEKGNHGVKGWAFDDGNDVWMGRTIGEELRSGYETFKVIGGWSTPNSKLQINRQVIVDSDNRSGYSGIFSVEGKSCINRCFYVELIRGREQETRVLWTSNSIVVFCGTSGTYGTGSWPDGADINLMPI

SEQ ID NO: 22001 - protein, 469 aa, Artificial Sequence; identical to SEQ ID NO: 18995
  derived and/or modified protein sequence (wt) from neuraminidase__InfluenzaA__AFG99163

SEQ ID NO: 22002 - protein, 469 aa, Artificial Sequence
  derived and/or modified protein sequence (wt) from neuraminidase__InfluenzaA__AFG99174
MNPSQKIITIGSVSLTIATICFLMQIAILVTTVTLHFKQYECSSPPNNQVMPCEPIIIERNITEIVYLTNTTIEKEICPKLMEYRNWSKPQCKITGFAPFSKDNSIRLSAGGDIWVTREPYVSCDPGKCYQFALGQGTTLDNKHSNDTIHDRTPYRTLLMNELGVPFHLGTRQVCIAWSSSSCHDGKAWLHVCVTGHDKNATASFIYDGRLVDSIGSWSKNILRTQESECVCINGTCTVVMTDGSASERAETKILFIEEGKIVHISPLSGSAQHVEECSCYPRYPGVRCVCRDNWKGSNRPVVDINVKDYSIVSSYVCSGLVGDTPRKNDRSSSSYCRNPNNEKGNHGVKGWAFDDGNDVWMGRTISEESRSGYETFKVIGGWSTPNSKLQINRQVIVDSDNRSGYSGIFSVEGKSCINRCFYVELIRGREQETRVWWTSNSIVVFCGTSGTYGTGSWPDGADINLMPI

SEQ ID NO: 22003 - protein, 469 aa, Artificial Sequence
  derived and/or modified protein sequence (wt) from neuraminidase__InfluenzaA__AFG99185
MNPNQKIITIGSVSLTIATICFLMQIAILVTTVTLHFKQYECSSPPNNQVMPCEPIIIERNITEIVYLTNTTIEKEICPKLVEYRNWSKPQCKITGFAPFSKDNSIRLSAGGDIWVTREPYVSCDPGKCYQFALGQGTTLNNKHSNDTIHDRTPYRTLLMNELGVPFHLGTKQVCIAWSSSSCHDGKAWLHVCVTGHDKNATASFIYDGRLVDSIGSWSKNILRTQESECVCINGTCTVVMTDGSASERADTKILFIEEGKIVHISPLSGSAQHVEECSCYPRYPGVRCVCRDNWKGSNRPIVDINVKDYSIVSSYVCSGLVGDTPRKNDRSSSSYCRNPNNEKGNHGVKGWAFDDGNDVWMGRTIGEELRSGYETFKVIGGWSTPNSKLQINRQVIVDSKNRSGYSGIFSVEGKSCINRCFYVELIRGREQETRVWWTSNSIVVFCGTSGTYGTGSWPDGADINLMPI

SEQ ID NO: 22004 - protein, 469 aa, Artificial Sequence
  derived and/or modified protein sequence (wt) from neuraminidase__InfluenzaA__AFG99196
MNPNQKIITIGSVSLTIATICFLTQIAILVTTVTLHFKQYECSSSPNNQVMPCEPIIIERNITEIVYLTNTTIEKEICPKLVEYRNWSKPQCKITGFAPFSKDNSIRLSAGGDIWVTREPYVSCDPGKCYQFALGQGTTLNNKHSNDTIHDRTPYRTLLMNELGVPFHLGTKQVCIAWSSSSCHDGKAWLHVCITGHDKNATASFIYDGRLVDSIGSWSKNILRTQESECVCINGTCTVVMTDGSASERADTKILFIEEGKIVHISPLSGSAQHVEECSCYPRYPGVRCVCRDNWKGSNRPIVDINVKDYSIVSSYVCSGLVGDTPRKNDRSSSSYCRNPNNEKGNHGVKGWAFDDGNDVWMGRTIGEELRSGYETFKVIGGWSTPNSKLQINRQVIVDSGNRSGYSGIFSVEGKSCINRCFYVELIRGREQETRVWWTSNSIVVFCGTSGTYGTGSWPDGADINLMPI

SEQ ID NO: 22005 - protein, 469 aa, Artificial Sequence
  derived and/or modified protein sequence (wt) from neuraminidase__InfluenzaA__AFG99207
MNPNQKIITIGSVSLTIATICFLMQIAILVTTVTLHFKPYECSSPPNNQVMPCEPIIIERNITEIVYLTNTTIEKEICPKLVEYRNWSKPQCKITGFAPFSKDNSIRLSAGGDIWVTREPYVSCDPGKCYQFALGQGTTLNNKHSNDTIHDRTPYRTLLMNELGVPFHLGTKQVCIAWSSSSCHDGKAWLHVCVTGHDKNATASFIYDGRLVDSIGSWSKNILRTQESECVCINGTCTVVMTDGSASERADTKILFIEEGKIVHISPLSGSAQHVEECSCYPRYPGVRCVCRDNWKGSNRPIVDINVKDYSIVSSYVCSGLVGDTPRKNDRSSSSYCRNPNNEKGNHGVKGWAFDDGNDVWMGRTIGEELRSGYETFKVIGGWSTPNSKLQINRQVIVDSKSRSGYSGIFSVEGKSCINRCFYVELIRGREQETRVWWTSNSIVVFCGTSGTYGTGSWPDGADINLMPI

SEQ ID NO: 22006 - protein, 469 aa, Artificial Sequence; identical to SEQ ID NO: 14814
  derived and/or modified protein sequence (wt) from neuraminidase__InfluenzaA__AFG99218

SEQ ID NO: 22007 - protein, 469 aa, Artificial Sequence
  derived and/or modified protein sequence (wt) from neuraminidase__InfluenzaA__AFG99229
MNPNQKIITIGSVSLTIATICFLMQIAILVTTVTLHFKQYECSSPPNNQVMPCEPIIIERNITKIVYLTNTTIEKEICPKLVEYRNWSKPQCKITGFAPFSKDNSIRLSAGGDIWVTREPYVSCDPGKCYQFALGQGTTLNNKHSNDTIHDRTPYRTLLMNELGVPFHLGTKQVCIAWSSSSCHDGKAWLHVCVTGHDKNATASFIYDGRLVDSIGSWSKNILRTQESECVCINGTCTVVMTDGSASERADTKILFIEEGKIVHISPLSGSAQHVEECSCYPRYPGVRCVCRDNWKGSNRPIVDINVKDYSIVSSYVCSGLVGDTPRKNDRSSSSYCRNPNNEKGNHGVKGWAFDDGNDVWMGRTIGEELRSGYETFKVIGGWSTPNSKLQINRQVIVDSKNRSGYSGIFSVEGKSCINRCFYVELIRGREQETRVWWTSNSIVVFCGTSGTYGTGSWPDGADINLMPI

SEQ ID NO: 22008 - protein, 469 aa, Artificial Sequence
  derived and/or modified protein sequence (wt) from neuraminidase__InfluenzaA__AFG99240
MNPNQKIITIGSVSLTIATICFLMQIAILVTTVTLHFKQYECSSPPSNQVMPCEPIIIERNITEIVYLTNTTIEKEICPKPVEYRNWSKPQCKITGFAPFSKDNSIRLSAGGDIWVTREPYVSCDPGKCYQFALGQGTTLNNKHSNDTIHDRTPYRTLLMNELGVPFHLGTKQVCIAWSSSSCHDGKAWLHVCVTGHDKNATASFIYDGRLVDSIGSWSKNILRTQESECVCINGTCTVVMTDGSASERADTKILFIEEGKIVHISPLSGSAQHVEECSCYPRYPGVRCVCRDNWKGSNRPIVDINVKDYSIVSSYVCSGLVGDTPRKNDRFSSSYCRNPNNEKGNHGVKGWAFDDGNDVWMGRTIGEELRSGYETFKVIGGWSTPNSKLQINRQVIVDSKNRSGYSGIFSVEGKSCINRCFYVELIRGREQETRVWWTSNSIVVFCGTSGTYGTGSWPDGADINLMPI

SEQ ID NO: 22009 - protein, 469 aa, Artificial Sequence; identical to SEQ ID NO: 14813
  derived and/or modified protein sequence (wt) from neuraminidase__InfluenzaA__AFG99251

SEQ ID NO: 22010 - protein, 469 aa, Artificial Sequence
  derived and/or modified protein sequence (wt) from neuraminidase__InfluenzaA__AFG99273
MNPNQKIITIGSVSLTIATMCFLMQIAILVTTVTLHFKQYECSSPPNNQVMPCEPTIIERNITEIVYLTNTTIEKEICPKLVEYRNWSKPQCKITGFAPFSKDNSIRLSAGGDIWVTREPYVSCDPGKCYQFALGQGTTLNNRHSNDTVHDRTPYRTLLMNELGVPFHLGTKQVCIAWSSSSCHDGKAWLHVCVTGHDKNATASFIYDGRLVDSIGSWSKNILRTQESECVCINGTCTVVMTDGSASERADTKILFIEEGKIVHISPLSGSAQHVEECSCYPRYPGVRCVCRDNWKGSNRPIVDINVKDYSIVSSYVCSGLVGDTPRKNDRSSSSYCRNPNNEKGSHGVKGWAFDDGNDVWMGRTIGEELRSGYETFKVIGGWSTPNSKLQINRQVIVDSGNRSGYSGIFSVEGKSCINRCFYVELIRGREQETRVWWTSNSIVVFCGTSGTYGTGSWPDGADINLMPI

SEQ ID NO: 22011 - protein, 469 aa, Artificial Sequence
  derived and/or modified protein sequence (wt) from neuraminidase__InfluenzaA__AFG99284
MNPNQKIITIGSVSLTIATICFLMQIAILVTTVTLHFKQYECSSPPSNQVMPCEPIIIERNITKIVYLTNTTIEKEICPKLVEYRNWSKPQCKITGFAPFSKDNSIRLSAGGDIWVTREPYVSCDPSKCYQFALGQGTTLNNKHSNDTIHDRTPYRTLLMNELGVPFHLGTKQVCIAWSSSSCHDGKAWLHVCVTGHDDNATASFIYDGRLVDSIGSWSKNILRTQESECVCINGTCTVVMTDGSASERADTKILFIEEGKIVHISPLSGSAQHVEECSCYPRYPGVRCVCRDNWKGSNRPIVDINVKDYSIVSSYVCSGLVGDTPRKNDRSSSSYCRNPNNEKGSHGVKGWAFDDGNDVWMGRTIGEELRSGYETFKVIGGWSTPNSKLQINRQVIVDSKNRSGYSGIFSVEGKSCINRCFYVELIRGREQETRVWWTSNSIVVFCGTSGTYGTGSWPDGADINLMPI

SEQ ID NO: 22012 - protein, 469 aa, Artificial Sequence
  derived and/or modified protein sequence (wt) from neuraminidase__InfluenzaA__AFG99295
MNPNQKIITIGSVSLTIATICFLMQIAILVTTVTLHFKQYECSSPPNNQVMPCEPTIIERNITEIVYLTNTTIEKEICPKLVEYRNWSKPQCKITGFAPFSKDNSIRLSAGGDIWVTREPYVSCDPDKCYQFALGQGTTLNNRHSNDTVHDRTPYRTLLMNELGVPFHLGTKQVCIAWSSSSCHDGKAWLHVCVTGHDKNATASFIYNGRLVDSIGSWSKNILRTQESECVCINGTCTVVMTDGSASERADTKILFIEEGKIVHISPLSGSAQHVEECSCYPRYPGVRCVCRDNWKGSNRPIVDINVKDYSIISSYVCSGLVGDTPRKNDRSSSSYCQNPNNEKGSHGVKGWAFDDGNDVWMGRTIGEELRSGYETFKVIGGWSTPNSKLQINRQVIVDSGNRSGYSGIFSVEGKSCINRCFYVELIRGRKQETRVWWTSNSIVVFCGTSGTYGTGSWPDGADINLMPI

SEQ ID NO: 22013 - protein, 469 aa, Artificial Sequence
  derived and/or modified protein sequence (wt) from neuraminidase__InfluenzaA__AFG99317
MNPNQKIITIGSVSLTIATICFLMQIAILVTTVTLHFKQYECSSPPNNQVMPCEPTIIERNITEIVYLTNTTIEKEICPKLVEYRNWSKPQCNITGFAPFSKDNSIRLSAGGDIWVTREPYVSCDPGKCYQFALGQGTTLNNRHSNDTVHDRTPYRTLLMNELGVPFHLGTKQVCIAWSSSSCHDGKAWLHVCVTGHDENATASFIYDGRLVDSIGSWSKNILRTQESECVCINGTCTVVMTDGSASERADTKILFIEEGKIVHISPLSGSAQHVEECSCYPRYPGVRCVCRDNWKGSNRPIVDINVKDYSIVSSYVCSGLVGDTPRKNDRSSSSYCRNPNNEKGSHGVKGWAFDDGNDVWMGRTIDEELRSGYETFKVIGGWSTPNSKLQINRQVIVDSGNRSGYSGIFSVEGKSCINRCFYVELIRGRKQETRVWWTSNSIVVFCGTSGTYGTGSWPDGADINLMPI

SEQ ID NO: 22014 - protein, 469 aa, Artificial Sequence
  derived and/or modified protein sequence (wt) from neuraminidase__InfluenzaA__AFG99328
MNPNQKIITIGSVSLTLATICFLMQIAILVTTVTLHFKQYECSSPPNNQVMPCEPTIIERNITEIVYLTNTTIEKEICPKLVEYRNWSKPQCKITGFAPFSKDNSIRLSAGGDIWVTREPYVSCDPSKCYQFALGQGTTLNNRHSNDTVHDRTPYRTLLMNELGVPFHLGTRQVCMAWSSSSCHDGKAWLHVCVTGHDENATASFIYDGRLVDSIGSWSKNVLRTQESECVCINGTCTVVMTDGSASERADTKILFIEEGKIVHISPLSGNAQHVEECSCYPRYPGVRCVCRDNWKGSNRPIVDINVKDYSIVSSYVCSGLVGDTPRKNDRSSSSYCRNPNNEKGSHGVKGWAFDDGNDVWMGRTIGEELRSGYETFKVIGGWSTPNSKLQINRQVIVDSGNRSGYSGIFSVEGKSCINRCFYVELIRGRKQETRVWWTSNSIVVFCGTSGTYGTGSWPDGADINLMPI

SEQ ID NO: 22015 - protein, 469 aa, Artificial Sequence
  derived and/or modified protein sequence (wt) from neuraminidase__InfluenzaA__AFG99350
MNPNQKIITIGSVSLTLATICFLMQIAILVTTVTLHFKQYECSSPPNNQVMPCEPTIIERNITEIVYLTNTTIEKEICPKLVEYRNWSKPQCKITGFAPFSKDNSIRLSAGGDIWVTREPYVSCDPSKCYQFALGQGTTLNNRHSNDTVHDRTPYRTLLMNELGVPFHLGTRQVCMAWSSSSCHDGKAWLHVCVTGHDENATASFIYDGRLVDSIGSWSKNILRTQESECVCINGTCTVVMTDGSASERADTKILFIEEGKIVHISPLSGSAQHVEECSCYPRYPGVRCVCRDNWKGSNRPIVDINVKDYSIVSSYVCSGLVGDTPRKNDRSSSSYCRNPNNEKGSHGVKGWAFDDGNDVWMGRTIGEELRSGYETFKVIGGWSTPNSKLQINRQVIVDSGNRSGYSGIFSVEGKSCINRCFYVELIRGRKQETRVWWTSNSIVVFCGTSGTYGTGSWPDGADINLMPI

SEQ ID NO: 22016 - protein, 469 aa, Artificial Sequence
  derived and/or modified protein sequence (wt) from neuraminidase__InfluenzaA__AFG99361
MNPNQKIITIGSVSLTIATICFLMQIAILVTTVTLHFKQYECNSPPNNQVMLCEPTIIERNITEIVYLTNTTIEKEKCPKLAEYRNWSKPQCKITGFAPFSKDNSIRLSAGGDIWVTREPYVSCDPGKCYQFALGQGTTLNNRHSNDTVHDRTPYRTLLMNELGVPFHLGTKQVCIAWSSSSCHDGKAWLHVCVTGHDENATASFIYDGRLVDSIGSWSKNILRTQESECVCINGTCTVVMTDGSASERADTKILFIEEGKIVHISPLSGSAQHVEECSCYPRYPGVRCVCRDNWKGSNRPIVDINVKDYSIVSSYVCSGLVGDTPRKNDSSSSSYCRNPNNEKGSHGVKGWAFDDGNDVWMGRTISEELRSGYETFKVIGGWSKPNSKLQINRQVIVDRGNRSGYSGIFSVEGKSCINRCFYVELIRGRKQETEVWWTSNSIVVFCGTSGTYGTGSWPDGADINLMPI

SEQ ID NO: 22017 - protein, 469 aa, Artificial Sequence
  derived and/or modified protein sequence (wt) from neuraminidase__InfluenzaA__AFG99383
MNPNQKIITIGSVSLTIATICFLMQIAILVTTVTLHFKQYECSSPPNNQVMPCEPTIIERNITEIVYLTNTTIEKEICPKLVEYRNWSKPQCKITGFAPFSKDNSIRLSAGGDIWVTREPYVSCDPGKCYQFALGQGTTLNNRHSNDTVHDRTPYRTLLMNELGVPFHLGTKQVCIAWSSSSCHDGKAWLHVCVTGHDENATASFIYDGRLVDSIGSWSKNILRTQESECVCINGTCTVVMTDGSASERADTKILFIEEGKIVHISPLSGSAQHVEECSCYPRYPGVRCVCRDNWKGSNRPIVDINVKDYSIVSSYVCSGLVGDTPRKNDSSSSSYCRNPNNEKGSHGVKGWAFDDGNDVWMGRTIGEELRSGYETFKVIGGWSTPNSKLQINRQVIVDSGNRSGYSGIFSVEGKSCINRCFYVELIRGRKQETKVWWTSNSIVVFCGTSGTYGTGSWPDGADINLMPI

SEQ ID NO: 22018 - protein, 469 aa, Artificial Sequence; identical to SEQ ID NO: 22017
  derived and/or modified protein sequence (wt) from neuraminidase__InfluenzaA__AFG99394

SEQ ID NO: 22019 - protein, 469 aa, Artificial Sequence
  derived and/or modified protein sequence (wt) from neuraminidase__InfluenzaA__AFG99405
MNPNQKIITIGSVSLTIATICFLMQIAILVTTVTLHFKQYECSSPPNNQVMPCEPTIIERNITEIVYLTNTTIEKEICPKLVEYRNWSKPQCKITGFAPFSKDNSIRLSAGGDIWVTREPYVSCDPGKCYQFALGQGTTLNNRHSNDTVHDRTPYRTLLMNELGVPFHLGTKQVCIAWSSSSCHDGKAWLHVCVTGHDKNATASFIYDGRLVDSIGSWSKNILRTQESECVCINGTCTVVMTDGSASERADTKILFIEEGKIVHISPLSGSAQHVEECSCYPRYPGVRCVCRDNWKGSNRPIVDINVKDYSIISSYVCSGLVGDTPRKNDRSSSSYCRNPNNEKGSHGVKGWAFDDGNDVWMGRTIGEELRSGYETFKVIGGWSTPNSKLQINRQVIVDSGNRSGYSGIFSVEGKSCINRCFYVELIRGREQETRVWWTSNSIVVFCGTSGTYGTGSWPDGADINLMPI

SEQ ID NO: 22020 - protein, 469 aa, Artificial Sequence
  derived and/or modified protein sequence (wt) from neuraminidase__InfluenzaA__AFG99416
MNPNQKIITIGSVSLTIATICFLMQIAILVTTVTLHFKQYECSSPPNNQVMPCEPTIIERNITEIVYLTNTTIEKEICPKLVEYRNWSKPQCKITGFAPFSKDNSIRLSAGGDIWVTREPYVSCDPGKCYQFALGQGTTLNNRHSNDTVHDRTPYRTLLMNELGVPFHLGTKQVCIAWSSSSCHDGKAWLHVCVTGHDENATASFIYDGRLVDSIGSWSKNILRTQESECVCINGTCTVVMTDGSASERADTKILFIEEGKIIHISPLSGSAQHVEECSCYPRYPGVRCVCRDNWKGSNRPIVDINVKDYSIVSSYVCSGLVGDTPRKNDSSSSSYCRNPNNEKGSHGVKGWAFDDGNDVWMGRTIGEELRSGYETFKVIGGWSTPNSKLQINRQVIVDGGNRSGYSGIFSVEGKSCINRCFYVELIRGRKQETKVWWTSNSIVVFCGTSGTYGTGSWPDGADINLMPI

SEQ ID NO: 22021 - protein, 469 aa, Artificial Sequence
  derived and/or modified protein sequence (wt) from neuraminidase__InfluenzaA__AFG99427
MNPNQKIITIGSVSLTIATICFLMQIAILVTTVTLHFKQYECSSPPNNQVMPCEPTIIERNITEIVYLTNTTIEKEVCPKLVEYRNWSKPQCKITGFAPFSKDNSIRLSAGGDIWVTREPYVSCDPGKCYQFALGQGTTLNNRHSNDTVHDRTPYRTLLMNELGVPFHLGTKQVCIAWSSSSCHDGKAWLHVCVTGHDENATASFIYDGRLVDSIGSWSKNILRTQESECVCINGTCTVVMTDGSASERADTKILFIEEGKIIHISPLSGSAQHVEECSCYPRYPGVRCVCRDNWKGSNRPIVDINVKDYSIVSSYVCSGLVGDTPRKNDSSSSSYCRNPNNEKGSHGVKGWAFDDGNDVWMGRTIGEELRSGYETFKVIGGWSTPNSKLQINRQVIVDSGNRSGYSGIFSVEGKSCINRCFYVELIRGRKQETKVWWTSNSIVVFCGTSGTYGTGSWPDGADINLMPI

SEQ ID NO: 22022 - protein, 469 aa, Artificial Sequence
  derived and/or modified protein sequence (wt) from neuraminidase__InfluenzaA__AFG99438
MNPNQKIITIGSVSLTIATICFLMQIAILVTTVTLHFRQYECSSPPNNQVMPCEPTIIERNITEIVYLTNTTIEKEICPKLVEYRNWSKPQCKITGFAPFSKDNSIRLSAGGDIWVTREPYVSCDPGKCYQFALGQGTTLNNRHSNDTVHDRTPYRTLLMNELGVPFHLGTKQVCMAWSSSSCHDGKAWLHVCVTGHDENATASFIYDGRLVDSIGSWSKNILRTQESECVCINGTCTVVMTDGSASERADTKILFIEEGKIVHISPLSGSAQHVEECSCYPRYPGVRCVCRDNWKGSNRPIVDINVKDYSIVSSYVCSGLVGDTPRKNDRSSSSYCRNPNNEKGSHGVKGWAFDDGNDVWMGRTIGEELRSGYETFKVIGGWSTPNSKLQINRQVIVDSGNRSGYSGIFSVEGKSCINRCFYVELIRGRKQETRVWWTSNSIVVFCGTSGTYGTGSWPDGADINLMPI

SEQ ID NO: 22023 - protein, 469 aa, Artificial Sequence
  derived and/or modified protein sequence (wt) from neuraminidase__InfluenzaA__AFG99449
MNPNQKIITIGSVSLTIATICFLMQIAILVTTVTLHFRQYECSSPPNNQVMPCEPTIIERNITEIVYLTNTTIEKEICPKLVEYRNWSKPQCKITGFAPFSKDNSIRLSAGGDIWVTREPYVSCDPGKCYQFALGQGTTLNNRHSNDTVHDRTPYRTLLMNELGVPFHLGTKQVCMAWSSSSCHDGKAWLHVCVTGHDENATASFIYDGRLVDSIGSWSKNILRTQESECVCINGTCTVVMTDGSASERADTKILFIEEGKIVHISPLSGSAQHVEECSCYPRYPGVRCVCRDNWKGSNRPIVDINVKDYSIVSSYVCSGLVGDTPRKNDRSSSSYCRNPNNEKGSHGVKGWAFDDGNDVWMGRTIGEELRSGYETFKVIGGWSTPNSKLQINRQVIVDSGNRSGYSGIFSVEGKNCINRCFYVELIRGRKQETRVWWTSNSIVVFCGTSGTYGTGSWPDGADINLMPI

SEQ ID NO: 22024 - protein, 469 aa, Artificial Sequence
  derived and/or modified protein sequence (wt) from neuraminidase__InfluenzaA__AFG99471
MNPNQKIITIGSVSLILATICFLMQIAILVTTVTLHFKQYECSSPPNNQVMPCEPTIIERNITEIVYLTNTTIEKEICPKLVEYRNWSKPQCKITGFAPFSKDNSIRLSAGGDIWVTREPYVSCDPGKCYQFALGQGTTLNNRHSNDTVHDRNPYRTLLMNELGVPFHLGTRQVCMAWSSSSCHDGKAWLHVCVTGHDENATASFIYDGRLVDSIGSWSKNILRTQESECVCINGTCTVVMTDGSASERADTKILFIEEGKIVHISPLSGSAQHVEECSCYPRYPGVRCVCRDNWKGSNRPIVDINVKDYSIVSSYVCSGLVGDTPRKNDRSSSSYCRNPNNEKGSHGVKGWAFDDGNDVWMGRTIGEELRSGYETFKVIGGWSTPNSKLQINRQVIVDSGNRSGYSGIFSVEGKSCINRCFYVELIRGRKQETRVWWTSNSIVVFCGTSGTYGTGSWPDGADINLMPI

SEQ ID NO: 22025 - protein, 469 aa, Artificial Sequence
  derived and/or modified protein sequence (wt) from neuraminidase__InfluenzaA__AFG99482
MNPNQKIITIGSVSLTIATICFLMQIAILVTTVTLHFKQYECNSPPNNQVMPCEPTIIERNITEIVYLTNTTIEKEICPKLVEYRNWSKPQCKITGFAPFSKDNSIRLSAGGDIWVTREPYVSCDPGKCYQFALGQGTTLNNRHSNDTVHDRTPYRTLLMNELGVPFHLGTKQVCIAWSSSSCHDGKAWLHVCVTGHDENATASFIYDGRLVDSIGSWSKNILRTQESECVCINGTCTVVMTDGSASGRADTKILFIEEGKIVHISPLSGSAQHVEECSCYPRYPGVRCVCRDNWKGSNRPIVDINVKDYSIVSSYVCSGLVGDTPRKNDSSSSSYCRNPNNEKGSHGVKGWAFDDGNDVWMGRTIGEELRSGYETFKVIGGWSTPNSKLQINRQVIVDRGNRSGYSGIFSVEGKNCINRCFYVELIRGRKQETKVWWTSNSIVVFCGTSGTYGTGSWPDGADINLMSI

SEQ ID NO: 22026 - protein, 469 aa, Artificial Sequence
  derived and/or modified protein sequence (wt) from neuraminidase__InfluenzaA__AFG99493
MNPNQKIITIGSVSLTIATICFLMQIAILVTTVTLHFKQYECNSPPNNQVMPCEPTIIERNITEIVYLTNTTIEKEICPKLVEYRNWSKPQCKITGFAPFSKDNSIRLSAGGDIWVTREPYVSCDPGKCYQFALGQGTTLNNRHSNDTVHDRTPYRTLLMNELGVPFHLGTKQVCIAWSSSSCHDGKAWLHVCVTGHDENATASFIYDGRLVDSIGSWSKNILRTQESECVCINGTCTVVMTDGSASGRADTKILFIEEGKIVHISPLSGSAQHVEECSCYPRYPGVRCVCRDNWKGSNRPIVDINVKDYSIVSSYVCSGLVGDTPRKNDSSSSSYCRNPNNEKGSHGVKGWAFDDGNDVWMGRTIGEELRSGYETFKVIGGWSTPNSKLQINRQVIVDRGNRSGYSGIFSVEGKSCINRCFYVELIRGRKQETKVWWTSNSIVVFCGTSGTYGTGSWPDGADINLMPI

SEQ ID NO: 22027 - protein, 469 aa, Artificial Sequence
  derived and/or modified protein sequence (wt) from neuraminidase__InfluenzaA__AFG99504
MNPNQKIITIGSVSLTIATICFLMQIAILVTTVTLHFKQYECSSPPNNQVMPCEPTIIERNITEIVYLTNTTIEKEICPKLVEYRNWSKPQCKITGFAPFSKDNSIRLSAGGDIWVTREPYVSCDPGKCYQFALGQGTTLNNRHSNDTVHDRTPYRTLLMNELGVPFHLGTKQVCIAWSSSSCHDGKAWLHVCVTGHDENATASFIYDGRLVDSIGSWSKNILRTQESECVCINGTCTVVMTDGSASERADTKILFIEEGKIVHISPLSGSAQHVEECSCYPRYPGVRCVCRDNWKGSNRPIVDINVKDYSIVSSYVCSGLVGDTPRKNDRSSSSYCRNPNNEKGSHGVKGWAFDDGNDVWMGRTIGEELRSGYETFKVIGGWSTPNSKLQINRQVIVDSGNRSGYSGIFSVEGKSCINRCFYVELIRGRKQETRVWWTSNSIVVFCGTSGTYGTGSWPDGADINLMPI

SEQ ID NO: 22028 - protein, 469 aa, Artificial Sequence
  derived and/or modified protein sequence (wt) from neuraminidase__InfluenzaA__AFG99515
MNPNQKIITIGSVSLTIATICFLMQIAILVTTVTLHFKQYECNSPPNNQVMLCEPTIIERNITEIVYLTNTTIEKEICPKLAEYRNWSKPQCKITGFAPFSKDNSIRLSAGGDIWVTREPYVSCDPGKCYQFALGQGTTLNNRHSNDTVHDRTPYRTLLMNELGVPFHLGTKQVCIAWSSSSCHDGKAWLHVCVTGHDENATASFIYDGRLVDSIGSWSKNILRTQESECVCINGTCTVVMTDGSASERADTKILFIEEGKIVHISPLSGSAQHVEECSCYPRYPGVRCVCRDNWKGSNRPIVDINVKDYSIVSSYVCSGLVGDTPRKNDSSSSSYCRNPNNEKGSHGVKGWAFDDGNDVWMGRTIGEELRSGYETFKVIGGWSTPNSKLQINRQVIVDRGNRSGYSGIFSVEGKSCINRCFYVELIRGRKQETEVWWTSNSIVVFCGTSGTYGTGSWPDGADINLMPI

SEQ ID NO: 22029 - protein, 469 aa, Artificial Sequence
  derived and/or modified protein sequence (wt) from neuraminidase__InfluenzaA__AFG99526
MNPNQKIITIGSVSLTLATICFLMQIAILVTTVTLHFKQYECSSPPNNQVMPCEPTIIERNITEIVYLTNTTIEKEVCPKLVEYRNWSKPQCKITGFAPFSKDNSIRLSAGGDIWVTREPYVSCDPGKCYQFALGQGTTLNNRHSNDTVHDRTPYRTLLMNELGVPFHLGTRQVCMAWSSSSCHDGKAWLHVCVTGHDENATASFIYDGRLVDSIGSWSKNILRTQESECVCINGTCTVVMTDGSASGRADTKILFIEEGKIVHISPLSGSAQHVEECSCYPRYPGVRCVCRDNWKGSNRPIVDINVKDYSIVSSYVCSGLVGDTPRKNDRSSSSYCRNPNNEKGSHGVKGWAFDDGNDVWMGRTIGEELRSGYETFKVIGGWSTPNSKLQINRQVIVDSGNRSGYSGIFSVEGKSCINRCFYVELIRGRKQETRVWWTSNSIVVFCGTSGTYGTGSWPDGADINLMPI

SEQ ID NO: 22030 - protein, 469 aa, Artificial Sequence; identical to SEQ ID NO: 21926
  derived and/or modified protein sequence (wt) from neuraminidase__InfluenzaA__AFG99537

SEQ ID NO: 22031 - protein, 469 aa, Artificial Sequence; identical to SEQ ID NO: 21926
  derived and/or modified protein sequence (wt) from neuraminidase__InfluenzaA__AFG99548

SEQ ID NO: 22032 - protein, 469 aa, Artificial Sequence; identical to SEQ ID NO: 21926
  derived and/or modified protein sequence (wt) from neuraminidase__InfluenzaA__AFG99559

SEQ ID NO: 22033 - protein, 469 aa, Artificial Sequence; identical to SEQ ID NO: 21926
  derived and/or modified protein sequence (wt) from neuraminidase__InfluenzaA__AFG99570

SEQ ID NO: 22034 - protein, 469 aa, Artificial Sequence; identical to SEQ ID NO: 21926
  derived and/or modified protein sequence (wt) from neuraminidase__InfluenzaA__AFG99581

SEQ ID NO: 22035 - protein, 469 aa, Artificial Sequence
  derived and/or modified protein sequence (wt) from neuraminidase__InfluenzaA__AFG99592
MNPNQKIITIGSVSLTIATTCFLMQIAILVTTVTLHFKQYECNSPPNNQVMPCEPTIIERNITEIVYLTNTTIEKEICPKLVEYRNWSKPQCKITGFAPFSKDNSIRLSAGGDIWVTREPYVSCDPGKCYQFALGQGTTLNNRHSNDTVHDRTPYRTLLMNELGVPFHLGTKQVCIAWSSSSCHDGKAWLHVCVTGHDENATASFIYDGRLVDSIVSWSKNILRTQESECVCINGTCTVVMTDGSASERADTKILFIEEGKIVHISPLSGSAQHVEECSCYPRYPGVRCVCRDNWKGSNRPIVDINVKDYSIVSSYVCSGLVGDTPRKNDSSSSSYCRNPNNEKGSHGVKGWAFDDGNDVWMGRTIGEELRSGYETFKVIGGWSTPNSKLQTNRQVIVDRGNRSGYSGIFSVEGKSCINRCFYVELIRGRKQETKVWWTSNSIVVFCGTSGTYGTGSWPDGADINLMPI

SEQ ID NO: 22036 - protein, 469 aa, Artificial Sequence; identical to SEQ ID NO: 21926
  derived and/or modified protein sequence (wt) from neuraminidase__InfluenzaA__AFG99603

SEQ ID NO: 22037 - protein, 469 aa, Artificial Sequence; identical to SEQ ID NO: 21926
  derived and/or modified protein sequence (wt) from neuraminidase__InfluenzaA__AFG99614

SEQ ID NO: 22038 - protein, 469 aa, Artificial Sequence; identical to SEQ ID NO: 21926
  derived and/or modified protein sequence (wt) from neuraminidase__InfluenzaA__AFG99625

SEQ ID NO: 22039 - protein, 469 aa, Artificial Sequence
  derived and/or modified protein sequence (wt) from neuraminidase__InfluenzaA__AFG99636
MNPNQKIITIGSVSLTIATICFLMQIAILVTTVTLHFKQYECNSPPNNQVMLCEPTIIERNITEIVYLTNTTIEKEICPKLAEYRNWSKPQCKITGFAPFSKDNSIRLSAGGDIWVTREPYVSCDPGKCYQFALGQGTTLNNRHSNDTVHDRTPYRTLLMNELGVPFHLGTKQVCIAWSSSSCHDGKAWLHVCVTGHDENATASFIYDGRLVDSIVSWSKNILRTQESECVCINGTCTVVMTDGSASERADTKILFIEEGKIVHISPLSGSAQHVEECSCYPRYPGVRCVCRDNWKGSNRPIVDINVKDYSIVSSYVCSGLVGDTPRKNDSSSSSYCRNPNNEKGSHGVKGWAFDDGNDVWMGRTIGEDLRSGYETFKVIGGWSTPNSKLQTNRQVIVDRGNRSGYSGIFSVEGKSCINRCFYVELIRGRKQETKVWWTSNSIVVFCGTSGTYGTGSWPDGADINLMPI

SEQ ID NO: 22040 - protein, 469 aa, Artificial Sequence
  derived and/or modified protein sequence (wt) from neuraminidase__InfluenzaA__AFG99658
MNPNQKIITIGSVSLTIATICFLMQITILVTTVTLHFKQYECNSPPNNQVMLCEPTIIERNITEIVYLTNTTIEKEICPKLVEYRNWSKPQCKITGFAPFSKDNSIRLSAGGDIWVTREPYVSCDPGKCYQFALGQGTTLNNRHSNDTVHDRTPYRTLLMNELGVPFHLGTKQVCIAWSSSSCHDGKAWLHVCVTGHDENATASFIYDGRLVDSISSWSKNILRTQESECVCINGTCTVVMTDGSASERADTKILFIEEGKIVHISPLSGSAQHVEECSCYPRYPGVRCVCRDNWKGSNRPIVDINVKDYSIVSSYVCSGLVGDTPRKNDSSSSSYCRNPNNEKGSHGVKGWAFDDGNDVWMGRTISEELRSGYETFKVIGGWSTPNSKLQINRQVIVDRGNRSGYSGIFSVEGKSCINRCFYVELIRGRKQENKVWWTSNSIVVFCGTSGTYGTGSWPDGADINLMPI

SEQ ID NO: 22041 - protein, 469 aa, Artificial Sequence
  derived and/or modified protein sequence (wt) from neuraminidase__InfluenzaA__AFG99680
MNPNQKIITIGSVSLTIATICFLMQIAILVTTVTLHFKQYECSSPPNNQVILCQPTIIERNITEIVYLTNTTIEKEICPKLVEYRNWSKPQCKITGFAPFSKDNSIRLSAGGDIWVTREPYVSCDPSKCYQFALGQGTTLNNRHSNDTVHDRTPYRTLLMNELGVPFHLGTKQVCIAWSSSSCHDGKAWLHVCVTGHDENATASFIYDGRLVDSIGSWSKNILRTQESECVCINGTCTVVMTDGSASERADTKILFIEEGKVVHISPLSGSAQHVEECSCYPRYPGVRCVCRDNWKGSNRPIVDINVKDYSIVSSYVCSGLVGDTPRKNDSSSSSYCRNPNNEKGSHGVKGWAFDDGNDVWMGRTISEELRSGYETFKVIGGWSTPNSKLQINRQVIVDSGNRSGYSGIFSVEGKSCINRCFYVELIRGRKQETKVWWTSNSIVVFCGTSGTYGTGSWPDGADINLMPI

SEQ ID NO: 22042 - protein, 469 aa, Artificial Sequence
  derived and/or modified protein sequence (wt) from neuraminidase__InfluenzaA__AFG99691
MNPNQKIITIGSVSLTIATICFLMQIAILVTTVTLHFKQYECNSPPNNQVMPCEPTIIERNTTEIVYLTNTTIEKEICPKLVEYRNWSKPQCKITGFAPFSKDNSIRLSAGGDIWVTREPYVSCDPGKCYQFALGQGTTLNNRHSNDTVHDRTPYRTLLMNELGVPFHLGTKQVCIAWSSSSCHDGKAWLHVCVTGHDENATASFIYDGRLVDSIVSWSKNILRTQESECVCINGTCTVVMTDGSASERADTKILFIEEGKIVHISPLSGSAQHVEECSCYPRYPGVRCVCRDNWKGSNRPIVDINVKDYSIVSSYVCSGLVGDTPRKNDSSSSSYCRNPNNEKGSHGVKGWAFDDGNDVWMGRTIGEELRSGYETFKVIGGWSTPNSKLQTNRQVIVDRGNRSGYSGIFSVEGKSCINRCFYVELIRGRKQETKVWWTSNSIVVFCGTSGTYGTGSWPDGADINLMPI

SEQ ID NO: 22043 - protein, 469 aa, Artificial Sequence; identical to SEQ ID NO: 21926
  derived and/or modified protein sequence (wt) from neuraminidase__InfluenzaA__AFG99704

SEQ ID NO: 22044 - protein, 469 aa, Artificial Sequence; identical to SEQ ID NO: 21926
  derived and/or modified protein sequence (wt) from neuraminidase__InfluenzaA__AFG99715

SEQ ID NO: 22045 - protein, 469 aa, Artificial Sequence; identical to SEQ ID NO: 21926
  derived and/or modified protein sequence (wt) from neuraminidase__InfluenzaA__AFG99726

SEQ ID NO: 22046 - protein, 469 aa, Artificial Sequence
  derived and/or modified protein sequence (wt) from neuraminidase__InfluenzaA__AFG99737
MNPNQKIITIGSVSLTIATICFLMQITILVTTVTLHFKQYECNSPPNNQVMLCEPTIIERNITEIVYLTNTTIEKEICPKLVEYRNWSKPQCKITGFAPFSKDNSIRLSAGGDIWVTREPYVSCDPGKCYQFALGQGTTLNNRHSNDTVHDRTPYRTLLMNELGVPFHLGTKQVCIAWSSSSCHDGKAWLHVCVTGHDENATASFIYDGRLVDSIGSWSKNILRTQESECVCINGTCTVVMTDGSASERADTKILFIEEGKIVHISPLSGSAQHVEECSCYPRYPGVRCVCRDNWKGSNRPIVDINVKDYSIVSSYVCSGLVGDTPRKNDSSSSSYCRNPNNEKGSHGVKGWAFDDGNDVWMGRTISEELRSGYETFKVIGGWSTPNSKLQINRQVIVDRGNRSGYSGIFSVEGKSCINRCFYVELIRGRKQENKVWWTSNSIVVFCGTSGTYGTGSWPDGADINLMPI

SEQ ID NO: 22047 - protein, 469 aa, Artificial Sequence
  derived and/or modified protein sequence (wt) from neuraminidase__InfluenzaA__AFG99748
MNPNQKIITIGSVSLTIATICFLMQIAILVTTVTLHFKQYDCNSPPNNQAMLCEPTIIERNITEIVYLTNTTIEKEICPKLAEYRNWSKPQCKITGFAPFSKDNSIRLSAGGDIWVTREPYVSCDPGKCYQFALGQGTTLNNRHSNDTVHDRTPYRTLLMNELGVPFHLGTKQVCIAWSSSSCHDGKAWLHVCVTGHDENATASFIYDGRLVDSIGSWSKNILRTQESECVCINGTCTVVMTDGSASERADTKILFIEEGKIVHISPLSGSAQHVEECSCYPRYPGVRCVCRDNWKGSNRPIVDINVKDYSIVSSYVCSGLVGDTPRKNDSSSSSYCRNPNNEKGSHGVKGWAFDDGNDVWMGRTIGEELRSGYETFKVIGGWSTPNSKLQINRQVIVDRGNRSGYSGIFSVEGKSCTNRCFYVELIRGRKQETEVWWTSNSIVVFCGTSGTYGTGSWPDGADINLMPI

SEQ ID NO: 22048 - protein, 469 aa, Artificial Sequence; identical to SEQ ID NO: 21926
  derived and/or modified protein sequence (wt) from neuraminidase__InfluenzaA__AFG99759

SEQ ID NO: 22049 - protein, 469 aa, Artificial Sequence
  derived and/or modified protein sequence (wt) from neuraminidase__InfluenzaA__AFG99770
MNPNQKIITIGSVSLTIATICFLMQIAILVTTVTLHFKQYECNSPPNNQIMLCEPTIIERNITEIVYLTNTTIEREICPKLVEYRNWSKPQCKITGFAPFSKDNSIRLSAGGDIWVTREPYVSCDPGKCYQFALGQGTTLNNRHSNDTVHDRTPYRTLLMNELGVPFHLGTKQVCIAWSSSSCHDGKAWLHVCVTGHDENATASFIYDGRLVDSIGSWSKNILRTQESECVCINGTCTVVMTDGSASERADTKILFIEEGKIVHISPLSGSAQHVEECSCYPRYPGVRCVCRDNWKGSNRPIVDINVKDYSIVSSYVCSGLVGDTPRKNDSSSSSYCRNPNNEKGSHGVKGWAFDDGNDVWMGRTIGEELRSGYETFKVIGGWSTPNSKLQINRQVIVDRGNRSGYSGIFSVEGKSCINRCFYVELIRGRKQETEVWWTSNSIVVFCGTSGTYGTGSWPDGADINLMPI

SEQ ID NO: 22050 - protein, 469 aa, Artificial Sequence
  derived and/or modified protein sequence (wt) from neuraminidase__InfluenzaA__AFG99781
MNPNQKIITIGSVSLTIATICFLMQIAILVTTVTLHFKQYECSSPPNNQVMLCQPTIIERNITEIVYLTNTTIEKEICPKLVEYRNWSKPQCKITGFAPFSKDNSIRLSAGGDIWVTREPYVSCDPGKCYQFALGQGTTLNNRHSNDTVHDRTPYRTLLMNELGVPFHLGTKQVCIAWSSSSCHDGKAWLHVCVTGHDENATASFIYDGRLVDSIGSWSKNILRTQESECVCINGTCTVVMTDGSASKRADTKILFIEEGKIVHISPLSGSAQHVEECSCYPRYPGVRCVCRDNWKGSNRPIVDINVKDYSIVSSYVCSGLVGDTPRKNDSSSSSYCRNPNNEKGSHGVKGWAFDDGNDVWMGRTISEELRSGYETFKVIGGWSTPNSKLQTNRQVIVDSGNRSGYSGIFSVEGKSCINRCFYVELIRGRKQETKVWWTSNSIVVFCGTSGTYGTGSWPDGADINLMPI

SEQ ID NO: 22051 - protein, 469 aa, Artificial Sequence; identical to SEQ ID NO: 21926
  derived and/or modified protein sequence (wt) from neuraminidase__InfluenzaA__AFG99792

SEQ ID NO: 22052 - protein, 469 aa, Artificial Sequence; identical to SEQ ID NO: 22046
  derived and/or modified protein sequence (wt) from neuraminidase__InfluenzaA__AFG99803

SEQ ID NO: 22053 - protein, 469 aa, Artificial Sequence; identical to SEQ ID NO: 21926
  derived and/or modified protein sequence (wt) from neuraminidase__InfluenzaA__AFG99825

SEQ ID NO: 22054 - protein, 469 aa, Artificial Sequence; identical to SEQ ID NO: 21926
  derived and/or modified protein sequence (wt) from neuraminidase__InfluenzaA__AFG99836

SEQ ID NO: 22055 - protein, 469 aa, Artificial Sequence; identical to SEQ ID NO: 21926
  derived and/or modified protein sequence (wt) from neuraminidase__InfluenzaA__AFG99847

SEQ ID NO: 22056 - protein, 469 aa, Artificial Sequence; identical to SEQ ID NO: 21926
  derived and/or modified protein sequence (wt) from neuraminidase__InfluenzaA__AFG99858

SEQ ID NO: 22057 - protein, 469 aa, Artificial Sequence; identical to SEQ ID NO: 21926
  derived and/or modified protein sequence (wt) from neuraminidase__InfluenzaA__AFG99869

SEQ ID NO: 22058 - protein, 469 aa, Artificial Sequence; identical to SEQ ID NO: 21926
  derived and/or modified protein sequence (wt) from neuraminidase__InfluenzaA__AFG99880

SEQ ID NO: 22059 - protein, 469 aa, Artificial Sequence
  derived and/or modified protein sequence (wt) from neuraminidase__InfluenzaA__AFG99891
MNPNQKIITIGSVSLTIATICFLMQIAILVTTVTLHFKQYECNSPPNNQVMLCEPTIIERNITEIVYFTNTTIEKEICPKLAEYRNWSKPQCKITGFAPFSKDNSIRLSAGGDIWVTREPYVSCDPGKCYQFALGQGTTLNNRHSNDTVHDRTPYRTLLMNELGVPFHLGTKQVCIAWSSSSCHDGKAWLHVCVTGHDENATASFIYDGRLVDSIGSWSKNILRTQESECVCINGTCTVVMTDGSASERADTKILFIEEGKIVHISSLSGSAQHVEECSCYPRYPGVRCVCRDNWKGSNRPIVDINVKDYSIVSSYVCSGLVGDTPRKNDSSSSSYCRNPNNEKGSHGVKGWAFDDGNDVWMGRTIGEELRSGYETFRVIGGWSTPNSKLQINRQVIVDRGNRSGYSGIFSVEGKSCINRCFYVELIRGRKQETEVWWTSNSIVVFCGTSGTYGTGSWPDGADINLMPI

SEQ ID NO: 22060 - protein, 469 aa, Artificial Sequence; identical to SEQ ID NO: 21926
  derived and/or modified protein sequence (wt) from neuraminidase__InfluenzaA__AFG99902

SEQ ID NO: 22061 - protein, 469 aa, Artificial Sequence; identical to SEQ ID NO: 21926
  derived and/or modified protein sequence (wt) from neuraminidase__InfluenzaA__AFG99913

SEQ ID NO: 22062 - protein, 469 aa, Artificial Sequence; identical to SEQ ID NO: 21926
  derived and/or modified protein sequence (wt) from neuraminidase__InfluenzaA__AFG99924

SEQ ID NO: 22063 - protein, 469 aa, Artificial Sequence
  derived and/or modified protein sequence (wt) from neuraminidase__InfluenzaA__AFG99935
MNPNQKIITIGSVSLTIATICFLMQIAILVTTVTLHFKQYECNSPPNNQVMLCEPTIVERNITEIVYLTNTTIEKEICPKLAEYRNWSKPQCKITGFAPFSKDNSIRLSAGGDIWVTREPYVSCDPSKCYQFALGQGTTLNNRHSNDTVHDRTPYRTLLMNELGVPFHLGTKQVCIAWSSSSCHDGKAWLHVCVTGHDENATASFIYDGRLVDSIGSWSKNILRTQESECVCINGTCTVVMTDGSASERADTKILFIEEGKIVHISPLSGSAQHVEECSCYPRYPGVRCVCRDNWKGSNRPIVDINMKDYSIVSSYVCSGLVGDTPRNNDSSSSSYCRNPNNEKGSHGVKGWAFDDGNDVWMGRTIGEELRSGYETFKVIGGWSTPNSKLQINRQVIVDRGNRSGYSGIFSVEGKSCINRCFYVELIRGRKQETEVWWTSNSIVVFCGTSGTYGTGSWPDGADINLMPI

SEQ ID NO: 22064 - protein, 469 aa, Artificial Sequence; identical to SEQ ID NO: 21926
  derived and/or modified protein sequence (wt) from neuraminidase__InfluenzaA__AFG99946

SEQ ID NO: 22065 - protein, 469 aa, Artificial Sequence
  derived and/or modified protein sequence (wt) from neuraminidase__InfluenzaA__AFG99957
MNPNQKIITIGSVSLTIATICFLMQIAILVTTVTLHFKQYECNSPPNNQAMLCEPTIIERNITEIVYLTNTTIEKEICPKLAEYRNWSKPQCKITGFAPFSKDNSIRLSAGGDIWVTREPYVSCDPGKCYQFALGQGTTLNNRHSNDTVHDRTPYRTLLMNELGVPFHLGTKQVCIAWSSSSCHDGKAWLHVCVTGHDENATASFIYDGRLVDSIGSWSKNILRTQESECVCINGTCTVVMTDGSASERADTKILFIEEGKIVHISPLSGSAQHVEECSCYPRYPGVRCVCRDNWKGSNRPIVDINVKDYSIVSSYVCSGLVGDTPRKNDSSSSSYCRNPNNEKGSHGVKGWAFDDGNDVWMGRTIGEELRSGYETFKVIGGWSTPNSKLQINRQVIVDRGNRSGYSGIFSVEGKSCTNRCFYVELIRGRKQETEVWWTSNSIVVFCGTSGTYGTGSWPDGADINLMPI

SEQ ID NO: 22066 - protein, 469 aa, Artificial Sequence; identical to SEQ ID NO: 21926
  derived and/or modified protein sequence (wt) from neuraminidase__InfluenzaA__AFG99968

SEQ ID NO: 22067 - protein, 469 aa, Artificial Sequence
  derived and/or modified protein sequence (wt) from neuraminidase__InfluenzaA__AFG99979
MNPNQKIITIGSVSLTIATICFLMQIAILVTTVTLHFKQYECNSPPNNQVMPCEPTIIERNITEIVYLTNTTIEKEICPKLVEYRNWSKPQCKITGFAPFSKDNSIRLSAGGDIWVTREPYVSCDPGKCYQFALGQGTTLNNRHSNDTVHDRTPYRTLLMNELGVPFHLGTKQVCIAWSSSSCHDGKAWLHVCVTGHDENATASFIYDGRLVDSIVSWSKNILRTQESECVCINGTCTVVMTDGSASERADTKILFIEEGKIVHISPLSGSAQHVEECSCYPRYPGVRCVCRDNWKGSNRPIVDINVKDYSIVSSYVCSGLVGDTPRKNDSSSSSYCLNPNNEKGSHGVKGWAFDDGNDVWMGRTIGEELRSGYETFKVIGGWSTPNSKLQTNRQVIVDRGNRSGYSGIFSVESKSCINRCFYVELIRGRKQETKVWWTSNSIVVFCGTSGTYGTGSWPDGADINLMPI

SEQ ID NO: 22068 - protein, 469 aa, Artificial Sequence
  derived and/or modified protein sequence (wt) from neuraminidase__InfluenzaA__AFG99990
MNPNQKIITIGSVSLTIATICFLMQIAILVTTVTLHFKQYECNSPPNNQAMLCEPKIIERNITEIVYLTNTTIEKEICPKLAEYRNWSKPQCKITGFAPFSKDNSIRLSAGGDIWVTREPYVSCDPGKCYQFALGQGTTLNNRHSNDTVHDRTPYRTLLMNELGVPFHLGTKQVCIAWSSSSCHDGKAWLHVCVTGHDENATASFIYDGRLVDSIGSWSKNILRTQESECVCINGTCTVVMTDGSASERADTKILFIEEGKIVHISPLSGSAQHVEECSCYPRYPGVRCVCRDNWKGSNRPIVDINVKDYSIVSSYVCSGLVGDTPRKNDSSSSSYCRNPNNEKGSHGVKGWAFDDGNDVWMGRTISEELRSGYETFKVIGGWSKPNSKLQINRQVIVDRGNRSGYSGIFSVEGKSCINRCFYVELIRGRKQETEVWWTSNSIVVFCGTSGTYGTGSWPDGADINLMPI

SEQ ID NO: 22069 - protein, 469 aa, Artificial Sequence
  derived and/or modified protein sequence (wt) from neuraminidase__InfluenzaA__AFH00002
MNPNQKIITIGSVSLTIATICFLMQIAILVTTVTLHFKQYECSSPPNNQVIPCQPTIIERNITEIVYLTNTTIEKEICPKLVEYRNWSKPQCKITGFAPFSKDNSIRLSAGGDIWVTREPYVSCDPGKCYQFALGQGTTLNNRHSNDTVHDRTPYRTLLMNELGVPFHLGTKQVCIAWSSSSCHDGKAWLHVCVTGHDENATASFIYDGRLVDSIGSWSKNILRTQESECVCINGTCAVVMTDGSASERADTKILFIEEGKVVHISPLSGSAQHVEECSCYPRYPGVRCVCRDNWKGSNRPIVDINVKNYSIVSSYVCSGLVGDTPRKNDSSSSSYCRNPNNEKGSHGVKGWAFDDGNDVWMGRTISEELRSGYETFKVIGGWSTPNSKLQINRQVIVDSGNRSGYSGIFSVEGKSCINRCFYVELIRGRKQETKVWWTSNSIVVFCGTSGTYGTGSWPDGADINLMPI

SEQ ID NO: 22070 - protein, 469 aa, Artificial Sequence; identical to SEQ ID NO: 15185
  derived and/or modified protein sequence (wt) from neuraminidase__InfluenzaA__AFH00013

SEQ ID NO: 22071 - protein, 469 aa, Artificial Sequence
  derived and/or modified protein sequence (wt) from neuraminidase__InfluenzaA__AFH00024
MNPNQKIITIGSVSLTIATICFLMQITILVTTVTLHFKQYECNSPPNNQVMLCEPTIIERNITEIVYLTNTTIEKEICPKLVEYRNWSKPQCKITGFAPFSKDNSIRLSAGGDIWVTREPYVSCDPGKCYQFALGQGTTLNNRHSNDTVHDRTPYRTLLMNELGVPFHLGTKQVCIAWSSSSCHDGKAWLHVCVTGHDENATASFIYDGRLVDSIGSWSKNILRTQESECVCINGTCTVVMTDGSASERADTKILFIEEGRIVHISPLSGSAQHVEECSCYPRYPGVRCVCRDNWKGSNRPIVDINVKDYSIVSSYVCSGLVGDTPRKNDSSSSSYCRNPNNEKGSHGVKGWAFDDGNDVWMGRTISEELRSGYETFKVIGGWSTPNSKLQINRQVIVDRGNRSGYSGIFSVEGKSCINRCFYVELIRGRKQENKVWWTSNSIVVFCGTSGTYGTGSWPDGADINLMPI

SEQ ID NO: 22072 - protein, 469 aa, Artificial Sequence; identical to SEQ ID NO: 15185
  derived and/or modified protein sequence (wt) from neuraminidase__InfluenzaA__AFH00035

SEQ ID NO: 22073 - protein, 469 aa, Artificial Sequence; identical to SEQ ID NO: 15185
  derived and/or modified protein sequence (wt) from neuraminidase__InfluenzaA__AFH00046

SEQ ID NO: 22074 - protein, 469 aa, Artificial Sequence
  derived and/or modified protein sequence (wt) from neuraminidase__InfluenzaA__AFH00057
MNPNQKIITIGSVSLTIATICFLMQIAILVTTVTLHFKQYECNSPPNNQVMLCEPTIIERNITEIVYLTNTTIEKEICPKLAEYRNWSKPQCKITGFAPFSKDNSIRLSAGGDIWVTREPYVSCDPGKCYQFALGQGTTLNNRHSNDTVHDRTPYRTLLMNELGVPFHLGTKQVCIAWSSSSCHDGKAWLHVCVTGHDENATASFIYDGRLVDSIGSWSKNVLRTQESECVCINGTCTVVMTDGSASERADTKILFIEEGKIVHISPLSGSAQHVEECSCYPRYPGVRCVCRDNWKGSNRPIVDINVKDYSIVSSYVCSGLVGDTPRKNDSSSSSYCRNPNNEKGSHGVKGWAFDDGNDVWMGRTISEELRSGYETFKVIGGWSNPNSKLQINRQVIVDRGNRSGYSGIFSVEGKSCINRCFYVELIRGRKQETEVWWTSNSIVVFCGTSGTYGTGSWPDGADINLMPI

SEQ ID NO: 22075 - protein, 469 aa, Artificial Sequence; identical to SEQ ID NO: 15185
  derived and/or modified protein sequence (wt) from neuraminidase__InfluenzaA__AFH00068

SEQ ID NO: 22076 - protein, 469 aa, Artificial Sequence
  derived and/or modified protein sequence (wt) from neuraminidase__InfluenzaA__AFH00079
MNPNQKIITIGSVSLTIATICFLMQIAILVTTVTLHFKQYECNSPPNNQVMLCEPTIIERNITEIVYLTNTTIEKEICPKLAEYRNWSKPQCKITGFAPFSKDNSIRLSAGGDIWVTREPYVSCDPGKCYQFALGQGTTLNNRHSNDTVHDRTPYRTLLMNELGVPFHLGTKQVCIAWSSSSCHDGKAWLHVCVTGHDENATASFIYDGRLVDSIGSWSKNILRTQESECVCINGTCTVVMTDGSASERADTKILFIEEGKIVHISPLSGSAQHVEECSCYPRYPGVRCVCRDNWKGSNRPIVDINVKDYSIVSSYVCSGLVGDTPRKNDSSSSSYCRNPNNEKGSHGVKGWAFDDGNDVWMGRTISEELRSGYETFKVIEGWSKPNSKLQINRQVIVDRGNRSGYSGIFSVEGKSCINRCFYVELIRGRKQETEVWWTSNSIVVFCGTSGTYGTGSWPDGADINLMPI

SEQ ID NO: 22077 - protein, 469 aa, Artificial Sequence
  derived and/or modified protein sequence (wt) from neuraminidase__InfluenzaA__AFH00090
MNPNQKIITIGSVSLTIATICFLMQIAILVTTVTLHFKQYECNSPPNNQVMLCEPTIIERNITEIVYLTNTTIEKEICPKLAEYRNWSKPQCKITGFAPFSKDNSIRLSAGGDIWVTREPYVSCDPGKCYQFALGQGTTLNNRHSNDTVHDRTPYRTLLMNELGVPFHLGTKQVCIAWSSSSCHDGKAWLHVCVTGHDENATASFIYDGRLVDSIGSWSKNILRTQESECVCINGTCTVVMTDGSASERADTKILFIEEGKIVHISPLSGSAQHVEECSCYPRYPGVRCVCRDNWKGSNRPIVDINVKDYSIVSSYVCSGLVGDTPRKNDSSSSSYCWNPNNEKGSHGVKGWAFDDGNDVWMGRTISEELRSGYETFKVIGGWSKPNSKLQINRQVIVDRGNRSGYSGIFSVEGKSCINRCFYVELIRGRKQETEVWWTSNSIVVFCGTSGTYGTGSWPDGADINLMPI

SEQ ID NO: 22078 - protein, 469 aa, Artificial Sequence
  derived and/or modified protein sequence (wt) from neuraminidase__InfluenzaA__AFH00101
MNPNQKIITIGSVSLTIATICFLMQIAILVTTVTLHFKQYECNSPPNNQVMLCEPTIIERNITEIVYLTNTTIEKEICPKLAEYRNWSKPQCKITGFAPFSKDNSIRLSAGGDIWVTREPYVSCDPGKCYQFALGQGTTLNNRHSNDTVHDRTPYRTLLMNELGVPFHLGTKQVCIAWSSSSCHDGKAWLHVCVTGHDENATASFIYDGRLVDSIGSWSKKILRTQESECVCINGTCTVVMTDGSASERADTKILFIEEGKIVHISPLSGSAQHVEECSCYPRYPGVRCVCRDNWKGSNRPIVDINVKDYSIVSSYVCSGLVGDTPRKNDSSSSSYCRNPNNEKGSHGVKGWAFDDGNDVWMGRTISEELRSGYETFKVIGGWSKPNSKLQINRQVIVDRGNRSGYSGIFSVEGKSCINRCFYVELIRGRKQETEVWWTSNSIVVFCGTSGTYGTGSWPDGADINLMPI

SEQ ID NO: 22079 - protein, 469 aa, Artificial Sequence; identical to SEQ ID NO: 15101
  derived and/or modified protein sequence (wt) from neuraminidase__InfluenzaA__AFH00112

SEQ ID NO: 22080 - protein, 469 aa, Artificial Sequence; identical to SEQ ID NO: 15101
  derived and/or modified protein sequence (wt) from neuraminidase__InfluenzaA__AFH00123

SEQ ID NO: 22081 - protein, 469 aa, Artificial Sequence
  derived and/or modified protein sequence (wt) from neuraminidase__InfluenzaA__AFH00156
MNPNQKIITIGSVSLTIATICFLMQIAILVTTVTLHFKQYECNSPPNNQVMLCEPTIIERNITEIVYLTNTTIEKEICPKLAEYRNWSKPQCKITGFAPFSKDNSIRLSAGGDIWVTREPYVSCDPGKCYQFALGQGTTLNNRHSNDTVHDRTPYRTLLMNELGVPFHLGTKQVCIAWSSSSCHDGKAWLHVCVTGHDENATASFIYDGRLVDSIGSWSKNILRTQESECVCINGTCTVVMTDGSASERADTKILFIEEGKIVHISPLSGSAQHVEECSCYPRYPGVRCVCRDNWKGSNRPIIDINVKDYSIVSSYVCSGLVGDTPRKNDSSSSSYCRNPNNEKGSHGVKGWAFDDGNDVWMGRTISEELRSGYETFKVIGGWSKPNSKLQINRQVIVDRGNRSGYSGIFSVEGKSCINRCFYVELIRGRKQETEVWWTSNSIVVFCGTSGTYGTGSWPDGADINLMPI

SEQ ID NO: 22082 - protein, 469 aa, Artificial Sequence
  derived and/or modified protein sequence (wt) from neuraminidase__InfluenzaA__AFH00167
MNPNQKIITIGSVSLTIATMCFLMQIAILVTTVTLHFKQYECNSPPNNQVMLCEPTIIERNITEIVYLTNTTIEKEICPKLAEYRNWSKPQCKITGFAPFSKDNSIRLSAGGDIWVTREPYVSCDPGKCYQFALGQGTTLNNRHSNDTVHDRTPYRTLLMNELGVPFHLGTKQVCIAWSSSSCHDGKAWLHVCVTGHDENATASFIYDGRLVDSIGSWSKNILRTQESECVCINGTCTVVMTDGSASERADTKILFIEEGKIVHISPLSGSAQHVEECSCYPRYPGVRCVCRDNWKGSNRPIVDINVKDYSIVSSYVCSGLVGDTPRKNDSSSSSYCRNPNNEKGSHGVKGWAFDDGNDVWMGRTISEELRSGYETFKVIGGWSKPNSKLQINRQVIVDRGNRSGYSGIFSVEGKSCINRCFYVELIRGRKQETEVWWTSNSIVVFCGTSGTYGTGSWPDGADINLMPI

SEQ ID NO: 22083 - protein, 469 aa, Artificial Sequence; identical to SEQ ID NO: 22081
  derived and/or modified protein sequence (wt) from neuraminidase__InfluenzaA__AFH00178

SEQ ID NO: 22084 - protein, 469 aa, Artificial Sequence
  derived and/or modified protein sequence (wt) from neuraminidase__InfluenzaA__AFH00189
MNPNQKIITIGSVSLTIATICFLMQIAILVTTVTLHFKQYEYNSPPNNQVMLCEPKIIERNITEIVYLTNTTIEKEICPKLAEYRNWSKPQCKITGFAPFSKDNSIRLSAGGDIWVTREPYVSCDPGKCYQFALGQGTTLNNRHSNDTVHDRTPYRTLLMNELGVPFHLGTKQVCIAWSSSSCHDGKAWLHVCVTGHDENATASFIYDGRLVDSIGSWSKNILRTQESECVCINGTCTVVMTDGSASERADTKILFIEEGKIVHISPLSGSAQHVEECSCYPRYPGVRCVCRDNWKGSNRPIVDINVKDYSIVSSYVCSGLVGDTPRKNDSSSSSYCRNPNNEKGSHGVKGWAFDDGNDVWMGRTISEELRSGYETFKVIGGWSKPNSKLQINRQVIVDRGNRSGYSGIFSVEGKSCINRCFYVELIRGRKQETEVWWTSNSIVVFCGTSGTYGTGSWPDGADINLMPI

SEQ ID NO: 22085 - protein, 469 aa, Artificial Sequence; identical to SEQ ID NO: 15185
  derived and/or modified protein sequence (wt) from neuraminidase__InfluenzaA__AFH00200

SEQ ID NO: 22086 - protein, 469 aa, Artificial Sequence; identical to SEQ ID NO: 22082
  derived and/or modified protein sequence (wt) from neuraminidase__InfluenzaA__AFH00211

SEQ ID NO: 22087 - protein, 469 aa, Artificial Sequence
  derived and/or modified protein sequence (wt) from neuraminidase__InfluenzaA__AFH00222
MNPNQKIITIGSVSLTIATICFLMQIAILVTTVTLHFKQYECNSPPNNQVMLCEPTIIERNITEIVYLTNTTIEKEICPKLAEYRNWSKPQCKITGFAPFSKDNSIRLSAGGDIWVTREPYVSCDPGKCYQFALGQGTTLNNRHSNNTVHDRTPYRTLLMNELGVPFHLGTKQVCIAWSSSSCHDGKAWLHVCVTGHDENATASFIYDGRLVDSIGSWSKNILRTQESECVCINGTCTVVMTDGSASERADTKILFIEEGKIVHISPLSGSAQHVEECSCYPRYPGVRCVCRDNWKGSNRPIVDINVKDYSIVSSYVCSGLVGDTPRKNDSSSSSYCRNPNNEKGSHGVKGWAFDDGNDVWMGRTISEELRSGYETFKVIGGWSKPNSKLQINRQVIVDRGNRSGYSGIFSVEGKSCINRCFYVELIRGRKQETEVWWTSNSIVVFCGTSGTYGTGSWPDGADINLMPI

SEQ ID NO: 22088 - protein, 469 aa, Artificial Sequence; identical to SEQ ID NO: 15101
  derived and/or modified protein sequence (wt) from neuraminidase__InfluenzaA__AFH00233

SEQ ID NO: 22089 - protein, 469 aa, Artificial Sequence
  derived and/or modified protein sequence (wt) from neuraminidase__InfluenzaA__AFH00244
MNPNQKIITIGSVSLTIATICFLMQIAILVTTVTLYFKQYECNSPPSNQVMLCEPTIVERNITEIVYLTNTTIEKEICPKLAEYRNWSKPQCKITGFAPFSKDNSIRLSAGGDIWVTREPYVSCDPGKCYQFALGQGTTLNNRHSNDTVHDRTPYRTLLMNELGVPFHLGTKQVCIAWSSSSCHDGKAWLHVCVTGHDENATASFIYDGRLVDSIGSWSKNILRTQESECVCINGTCTVVMTDGSASERADTKILFIEEGKIVHISPLSGSAKHVEECSCYPRYPGVRCVCRDNWKGSNRPIVDINVKDYSIVSSYVCSGLVGDTPRKNDSSSSSYCRNPNNEKGSHGVKGWAFDDGNDVWMGRTISEELRSGYETFKVIGGWSKPNSKLQINRQVIVDRGNRSGYSGIFSVEGKSCINRCFYVELIRGRKQETEVWWTSNSIVVFCGTSGTYGTGSWPDGADINLMPI

SEQ ID NO: 22090 - protein, 469 aa, Artificial Sequence; identical to SEQ ID NO: 15185
  derived and/or modified protein sequence (wt) from neuraminidase__InfluenzaA__AFH00255

SEQ ID NO: 22091 - protein, 469 aa, Artificial Sequence; identical to SEQ ID NO: 15185
  derived and/or modified protein sequence (wt) from neuraminidase__InfluenzaA__AFH00266

SEQ ID NO: 22092 - protein, 469 aa, Artificial Sequence
  derived and/or modified protein sequence (wt) from neuraminidase__InfluenzaA__AFH00277
MNPNQKIITIGSVSLTIATICFLMQIAILVTTVTLHFKQYECNSPPSNQVMLCEPTIIERNITEIVYLTNTTIEKEICPKLAEYRNWSKPQCKITGFAPFSKDNSIRLSAGGDIWVTREPYVSCDPGKCYQFALGQGTTLNNRHSNDTVHDRTPYRTLLMNELGVPFHLGTKQVCIAWSSSSCHDGKAWLHVCVTGHDENATASFIYDGRLVDSIGSWSKNILRTQESECVCINGTCTVVMTDGSASERADTKILFIEEGKIVHISPLSGSAQHVEECSCYPRYPGVRCVCRDNWKGSNRPIVDINVKDYSIVSSYVCSGLVGDTPRKNDSSSSSYCRKPNNEKGSHGLKGWAFDDGNDVWMGRTISEELRSGYETFKVIGGWSKPNSKLQINRQVIVDRGNRSGYSGIFSVEGKSCINRCFYVELIRGRKQETEVWWTSNSIVVFCGTSGTYGTGSWPDGADINLMPI

SEQ ID NO: 22093 - protein, 469 aa, Artificial Sequence; identical to SEQ ID NO: 15185
  derived and/or modified protein sequence (wt) from neuraminidase__InfluenzaA__AFH00288

SEQ ID NO: 22094 - protein, 469 aa, Artificial Sequence; identical to SEQ ID NO: 22017
  derived and/or modified protein sequence (wt) from neuraminidase__InfluenzaA__AFH00299

SEQ ID NO: 22095 - protein, 469 aa, Artificial Sequence
  derived and/or modified protein sequence (wt) from neuraminidase__InfluenzaA__AFH00310
MNPNQKIITIGSVSLTIATICFLMQIAILVTTVTLHFKQYECSSSPNNQVIPCQPTIIERNITEIVYLTNTTIEKEICPKLVEYRNWSKPQCKITGFAPFSKDNSIRLSAGGDIWVTREPYVSCDPGKCYQFALGQGTTLNNRHSNDTVHDRTPYRTLLMNELGVPFHLGTKQVCIAWSSSSCHDGKAWLHVCVTGHDENATASFIYDGRLVDSIGSWSKNILRTQESECVCINGTCTVVMTDGSASEKADTKILFIEEGKVVHISPLSGSAQHVEECSCYPRYPGVRCVCRDNWKGSNRPIVDINVKNYSIVSSYVCSGLVGDTPRKNDSSSSSYCRNPNNEKGSHGVKGWAFDDGNDVWMGRTISEELRSGYETFKVIGGWSTPNSKLQINRQVIVDSGNRSGYSGIFSVEGKSCINRCFYVELIRGRKQETKVWWTSNSLVVFCGTSGTYGTGSWPDGADINLMPI

SEQ ID NO: 22096 - protein, 469 aa, Artificial Sequence; identical to SEQ ID NO: 22095
  derived and/or modified protein sequence (wt) from neuraminidase__InfluenzaA__AFH00321

SEQ ID NO: 22097 - protein, 469 aa, Artificial Sequence
  derived and/or modified protein sequence (wt) from neuraminidase__InfluenzaA__AFH00332
MNPNQKIITIGSVSLTIATICFLMQIAILVTTVTLHFKQYECNSPPNNQVMLCEPTIIERNITEIVYLTNTTIEKEICPKLAEYRNWSKPQCKITGFAPFSKDNSIRLSAGGDIWVTREPYVSCDPGKCYQFALGQGTTLNNRHSNDTVHDRTPYRTLLMNELGVPFHLGTKQVCIAWSSSSCHDGKAWLHVCVTGHDENATASFIYDGRLVDSIGSWSKNILRTQESECVCINGTCTVVMTDGSASERADTKILFIEEGKIVHISPLSGSAQHVEECSCYPRYPGVRCVCRDNWKGSNRPIVDINVKDYSIVSSYVCSGLVGDTPRKNDSSSSSHCLNPNNEEGGHGVKGWAFDDGNDVWMGRTISEKLRSGYETFKVIGGWSKPNSKLQINRQVIVDRGNRSGYSGIFSVEGKGCINRCFYVELIRGRKQETEVWWTSNSIVVFCGTSGTYGTGSWPDGADINLMPI

SEQ ID NO: 22098 - protein, 469 aa, Artificial Sequence
  derived and/or modified protein sequence (wt) from neuraminidase__InfluenzaA__AFH00343
MNPNQKIITIGSVSLTIATICFLMQIAILVTTVTLHFKQYECNSPPSNQAMLCEPTIIERNITEIVYLTNTTIEKEICPKLAEYRNWSKPQCKITGFAPFSKDNSIRLSAGGDIWVTREPYVSCDPGKCYQFALGQGTTLNNRHSNDTVHDRTPYRTLLMNELGVPFHLGTKQVCIAWSSSSCHDGKAWLHVCVTGHDENATASFIYDGRLVDSIGSWSKNILRTQESECVCINGTCTVVMTDGSASERADTKILFIEEGKIVHISPLSGSAQHVEECSCYPRYPGVRCVCRDNWKGSNRPIVDINVKDYSIVSSYVCSGLVGDTPRKNDSSSSSYCRNPNNEKGSHGVKGWAFDDGNDVWMGRTISEELRSGYETFKVIGGWSKPNSKLQINRQVIVDRGNRSGYSGIFSVEGKSCINRCFYVELIRGRKQETEVWWTSNSIVVFCGTSGTYGTGSWPDGADINLMPI

SEQ ID NO: 22099 - protein, 469 aa, Artificial Sequence
  derived and/or modified protein sequence (wt) from neuraminidase__InfluenzaA__AFH00354
MNPNQKIITIGSVSLTIATICFLMQIAILVTTVTLHFKQYECNSPPNNQVMLCEPTIIERNITKIVYLTNTTIEKEICPKLAEYRNWSKPQCKITGFAPFSKDNSIRLSAGGDIWVTREPYVSCDPGKCYQFALGQGTTLNNRHSNDTVHDRTPYRTLLMNELGVPFHLGTKQVCIAWSSSSCHDGKAWLHVCVTGHDENATASFIYDGRLVDSIGSWSKNILRTQESECVCINGTCTVVMTDGSASERADTKILFIEEGKIVHISPLSGSAQHVEECSCYPRYPGVRCVCRDNWKGSNRPIVDINVKDYSIVSSYVCSGLVGDTPRKNDSSSSSYCLNPNNEEGGHGVKGWAFDDGNDVWMGRTISEKLRSGYETFKVIGGWSKPNSKLQINRQVIVDRGNRSGYSGIFSVEGKSCVNRCFYVELIRGRKQETEVWWTSNSIVVFCGTSGTYGTGSWPDGADINLMPI

SEQ ID NO: 22100 - protein, 469 aa, Artificial Sequence; identical to SEQ ID NO: 14980
  derived and/or modified protein sequence (wt) from neuraminidase__InfluenzaA__AFH00365

SEQ ID NO: 22101 - protein, 469 aa, Artificial Sequence
  derived and/or modified protein sequence (wt) from neuraminidase__InfluenzaA__AFH00376
MNPNQKIITIGSVSLTIATICFLMQIAILVTTVTLHFKQCECNSPPNNQVMLCEPTIIERNITEIVYLTNTTIEKEICPKLAEYRNWSKPQCKITGFAPFSKDNSIRLSAGGDIWVTREPYVSCDPGKCYQFALGQGTTLNNRHSNDTVHDRTPYRTLLMNELGVPFHLGTKQVCIAWSSSSCHDGKAWLHVCVTGHDENATASFIYDGRLVDSIGSWSKNILRTQESECVCINGTCTVVMTDGSASGRADTKILFIEEGKIVHISPLSGSAQHVEECSCYPRYPGVRCVCRDNWKGSNRPIVDINVKDYSIVSSYVCSGLVGDTPRKNDSSSSSYCLNPNNEEGGHGVKGWAFDDGNDVWMGRTISEKLRSGYETFKVIGGWSKPNSKLQINRQVIVDRGNRSGYSGIFSVEGKSCINRCFYVELIRGRKQETEVWWTSNSIVVFCGTSGTYGTGSWPDGADINLMPI

SEQ ID NO: 22102 - protein, 469 aa, Artificial Sequence
  derived and/or modified protein sequence (wt) from neuraminidase__InfluenzaA__AFH00387
MNPNQKIITIGSVSLTIATICFLMQIAILVTTVTLHFKQYECNSPPNNQVMLCEPTIIERNITEIVYLTNTTIEKEICPKLAEYRNWSKPQCKITGFAPFSKDNSIRLSAGGDIWVTREPYVSCDPDKCYQFALGQGTTLNNRHSNDTVHDRTPYRTLLMNELGVPFHLGTKQVCIAWSSSSCHDGKAWLHVCVTGHDENATASFIYDGRLVDSISSWSKNILRTQESECVCINGTCTVVMTDGSASERADTKILFIEEGKIVHISPLSGSAQHVEECSCYPRYPGVRCVCRDNWKGSNRPIVDINVKDYSIVSSYVCSGLVGDTPRKNDSSSSSYCLNPNNEEGGHGVKGWAFDDGNDVWMGRTISEKLRSGYETFKVIGGWSKPNSKLQINRQVIVDRGNRSGYSGIFSVEGKSCVNRCFYVELIRGRKQETEVWWTSNSIVVFCGTSGTYGTGSWPDGADINLMPI

SEQ ID NO: 22103 - protein, 469 aa, Artificial Sequence
  derived and/or modified protein sequence (wt) from neuraminidase__InfluenzaA__AFH00398
MNPNQKIITIGSVSLTIATICFLMQIAILVTTVTLHFKQYECNSPPNNQVMLCEPTIIERNITEIVYLTNTTIEKEICPKLAEYRNWSKPQCKITGFAPFSKDNSIRLSAGGDIWVTREPYVSCDPGKCYQFALGQGTTLNNRHSNDTVHDRTPYRTLLMNELGVPFHLGTKQVCIAWSSSSCHDGKAWLHVCVTGHDENATASFIYDGRLVDSIGSWSKNILRTQESECVCINGTCTVVMTDGSASERADTKILFIEEGKIVHISPLSGSAQHVEECSCYPRYPGVRCVCRDNWKGSNRPIVDINVKDYSIVSSYVCSGLVGDTPRKNDSSSSSYCLNPNNEEGGHGVKGWAFDDGNDVWMGRTISEKLRSGYETFKVIGGWSKPNSKLQINRQVIVDRGNRSGYSGIFSVEGKSCVNRCFYVELIRGRKQETEVWWTSNSIVVFCGTSGTYGAGSWPDGADINLMPI

SEQ ID NO: 22104 - protein, 469 aa, Artificial Sequence
  derived and/or modified protein sequence (wt) from neuraminidase__InfluenzaA__AFH00409
MNPNQKIITIGSVSLTIATICFLMQIAILVTTVTLHFKQYECNSPPNNQVMLCEPTIIERNITEIVYLTNTTIEKEICPKLAEYRNWSKPQCKITGFAPFSKDNSIRLSAGGDIWVTREPYVSCDPGKCYQFALGQGTTLNNRHSNDTVHDRTPYRTLLMNELGVPFHLGTKQVCIAWSSSSCHDGKAWLHVCVTGHNENATASFIYDGRLVDSIGSWSKNILRTQESECVCINGTCTVVMTDGSASGRADTKILFIEEGKIVHISPLSGSAQHVEECSCYPRYPGVRCVCRDNWKGSNRPIVDINVKDYSIVSSYVCSGLVGDTPRKNDSSSSSYCLNPNNEEGGHGVKGWAFDDGNDVWMGRTISEKLRSGYETFKVIGGWSKPNSKLQINRQVIVDRGNRSGYSGIFSVEGKSCINRCFYVELIRGRKQETEVWWTSNSIVVFCGTSGTYGTGSWPDGADINLMPI

SEQ ID NO: 22105 - protein, 469 aa, Artificial Sequence; identical to SEQ ID NO: 14980
  derived and/or modified protein sequence (wt) from neuraminidase__InfluenzaA__AFH00420

SEQ ID NO: 22106 - protein, 469 aa, Artificial Sequence; identical to SEQ ID NO: 15113
  derived and/or modified protein sequence (wt) from neuraminidase__InfluenzaA__AFH00431

SEQ ID NO: 22107 - protein, 469 aa, Artificial Sequence
  derived and/or modified protein sequence (wt) from neuraminidase__InfluenzaA__AFH00442
MNPNQKIITIGSVSLTIATICFLMQIAILVITVTLHFKQYECNSPPNNQVMLCEPTIIERNITEIVYLTNTTIEKEICPKLAEYRNWSKPQCKITGFAPFSKDNSIRLSAGGDIWVTREPYVSCDPGKCYQFALGQGTTLNNRHSNDTVHDRTPYRTLLMNELGVPFHLGTKQVCIAWSSSSCHDGKAWLHVCVTGHNENATASFIYDGRLVDSIGSWSKNILRTQESECVCINGTCTVVMTDGSASGRADTKILFIEEGKIVHISPLSGSAQHVEECSCYPRYPGVRCVCRDNWKGSNRPIVDINVKDYSIVSSYVCSGLVGDTPRKNDSSSSSHCLNPNNEEGGHGVKGWAFDDGNDVWMGRTISEKLRSGYETFKVIGGWSKPNSKLQINRQVIVDRGNRSGYSGIFSVEGKSCINRCFYVELIRGRKQETEVWWTSNSIVVFCGTSGTYGTGSWPDGADINLMPI

SEQ ID NO: 22108 - protein, 469 aa, Artificial Sequence
  derived and/or modified protein sequence (wt) from neuraminidase__InfluenzaA__AFH00453
MNPNQKIITIGSVSLTIATICFLMQIAILVTTVTLHFKQYECNSPPNNQVMLCEPTIIERNITEVVYLTNTTIEKEICPKLAEYRNWSKPQCKITGFAPFSKDNSIRLSAGGDIWVTREPYVSCDPDKCYQFALGQGTTLNNRHSNDIVHDRTPYRTLLMNELGVPFHLGTKQVCIAWSSSSCHDGKAWLHVCVTGHDENATASFIYDGRLVDSIGSWSKKILRTQESECVCINGTCTVVMTDGSASGRADTKILFIEEGKIVHISPLSGSAQHVEECSCYPRYPGVRCVCRDNWKGSNRPIVDINVKDYSIVSSYVCSGLVGDTPRKNDSSSSSHCLNPNNEEGGHGVKGWAFDDGNDVWMGRTISEKLRSGYETFKVIGGWSKPNSKLQINRQVIVDRGNRSGYSGIFSVEGKSCINRCFYVELIRGRKQETEVWWTSNSIVVFCGTSGTYGTGSWPDGADINLMPI

SEQ ID NO: 22109 - protein, 469 aa, Artificial Sequence
  derived and/or modified protein sequence (wt) from neuraminidase__InfluenzaA__AFH00464
MNPNQKIITIGSVSLTIATICFLMQIAILVTTVTLHFKQYECNSPPNNQVMLCEPTIIERNITEIVYLTNTTIEKEICPKLAEYRNWSKPQCKITGFAPFSKDNSIRLSAGGDIWVTREPYVSCDPGKCYQFALGQGTTLKNRHSNDTVHDRTPYRTLLMNELGVPFHLGTKQVCIAWSSSSCHDGKAWLHVCVTGHDENATASFIYGGRLVDSIGSWSKKILRTQESECVCINGTCTVVMTDGSASGRADTKILFIEEGKIVHISPLSGSAQHVEECSCYPRYPGVRCVCRDNWKGSNRPIVDINVKDYSIVSSYVCSGLVGDTPRKNDSSSSSYCLNPNNEEGGHGVKGWAFDDGNDVWMGRTISEKLRSGYETFKVIGGWSKPNSKLQINRQVIVDRGNRSGYSGIFSVEGKSCINRCFYVELIRGRKQETEVWWTSNSIVVFCGTSGTYGTGSWPDGADINLMPI

SEQ ID NO: 22110 - protein, 469 aa, Artificial Sequence
  derived and/or modified protein sequence (wt) from neuraminidase__InfluenzaA__AFH00475
MNPNQKIITIGSVSLTIATICFLMQIAILVTTVTLHFKQYECNSPPNNQVMLCEPTIIERNITEIVYLTNTTIEKEICPKLAEYRNWSKPQCKITGFAPFSKDNSIRLSAGGDIWVTREPYVSCNPDKCYQFALGQGTTLNNRHSNDTVHDRTPYRTLLMNELGVPFHLGTKQVCIAWSSSSCHDGKAWLHVCVTGHDENATASFIYDGRLVDSIGSWSKKILRTQESECVCINGTCTVVMTDGSASGRADTKILFIEEGKIVHISPLSGSAQHVEECSCYPRYPGVRCVCRDNWKGSNRPIVDINVKDYSIVSSYVCSGLVGDTPRKNDSSSSSHCLNPNNEEGGHGVKGWAFDDGNDVWMGRTISEKLRSGYETFKVIEGWSKPNSKLQINRQVIVDRGNRSGYSGIFSVEGKSCINRCFYVELIRGRKQETEVWWTSNSIVVFCGTSGTYGTGSWPDGADINLMPI

SEQ ID NO: 22111 - protein, 469 aa, Artificial Sequence
  derived and/or modified protein sequence (wt) from neuraminidase__InfluenzaA__AFH00486
MNPNQKIITIGSVSLTIATICFLMQIAILVTTVTLHFKQYECNSPPNNQVMLCEPTIIERNITEIVYLTNTTIEKEICPKLAEYRNWSKPQCKITGFAPFSKDNSIRLSAGGDIWVTREPYVSCDPDKCYQFALGQGTTLNNRHSNDTVHDRTPYRTLLMNELGVPFHLGTKQVCIAWSSSSCHDGKAWLHVCVTGHDENATASFIYDGRLVDSIGSWSKKILRTQESECVCINGTCTVVMTDGSASGRADTKILFIEEGKIVHISPLLGSAQHVEECSCYPRYPGVRCVCRDNWKGSNRPIVDINVKDYSIVSSYVCSGLVGDTPRKNDSSSSSHCLNPNNEEGGHGVKGWAFDDGNDVWMGRTISEKLRSGYETFKVIEGWSKPNSKLQINRQVIVDRGNRSGYSGIFSVEGKSCINRCFYVELIRGRKQETEVWWTSNSIVVFCGTSGTYGTGSWPDGADINLMPI

SEQ ID NO: 22112 - protein, 469 aa, Artificial Sequence
  derived and/or modified protein sequence (wt) from neuraminidase__InfluenzaA__AFH00497
MNPNQKIITIGSVSLTIATICFLMQIAILVTTVTLHFKQYECNSPPNNQVMLCEPTIIERNITEIVYLTNTTIKKEICPKLAEYRNWSKPQCKITGFAPFSKDNSIRLSAGGDIWVTREPYVSCDPGKCYQFALGQGTTLNNRHSNDTVHDRTPYRTLLMNELGVPFHLGTKQVCIAWSSSSCHDGKAWLHVCVTGHDENATASFIYDGRLVDSIGSWSKNILRTQESECVCINGTCTVVMTDGSASERADTKILFIEEGKIVHISPLSGSAQHVEECSCYPRYPGVRCVCRDNWKGSNRPIVDINVKDYSIVSSYVCSGLVGDTPRKNDSSSSSYCWNPNNEKGGHGVKGWAFDDGNDVWMGRTISEELRSGYETFKVIGGWSKPNSKLQINRQVIVDRGNRSGYSGIFSVEGKSCINRCFYVELIRGRKQETEVWWTSNSIVVFCGTSGTYGTGSWPDGADINLMPI

SEQ ID NO: 22113 - protein, 469 aa, Artificial Sequence
  derived and/or modified protein sequence (wt) from neuraminidase__InfluenzaA__AFH00508
MNPNQKIITIGSVSLTIATICFLMQIAILVITVTLHFKQYECNSPPNNQVMLCEPTIIERNITEIVYLTNTTIEKEICPKLAEYRNWSKPQCKITGFAPFSKDNSIRLSAGGDIWVTREPYVSCDPGKCYQFALGQGTTLNNRHSNDTVHDRTPYRTLLMNELGVPFHLGTKQVCIAWSSSSCHDGKAWLHVCVTGHNENATASFIYDGRLVDSIGSWSKNILRTQESECVCINGTCTVVMTDGSASGRADTKILFIEEGKIVHISPLSGSAQHVEECSCYPRYPGVRCVCRDNWKGSNRPIVDINVKDYSIVSSYVCSGLVGDTPRKNDSSSSSHCLNPNNEEGGHGVKGWAFDDGNDVWMGRTISEKLRSGYETFRVIGGWSKPNSKLQINRQVIVDRGNRSGYSGIFSVEGKSCINRCFYVELIRGRKQETEVWWTSNSIVVFCGTSGTYGTGSWPDGADINLMPI

SEQ ID NO: 22114 - protein, 469 aa, Artificial Sequence
  derived and/or modified protein sequence (wt) from neuraminidase__InfluenzaA__AFH00519
MNPNQKIITIGSVSLTIATMCFLMQIAILVTTVTLHFKQYECNSPPNNQVMLCEPTIIERNITEIVYLTNTTIEKEICPKLAEYRNWSKPQCKITGFAPFSKDNSIRLSAGGDIWVTREPYVSCDPGKCYQFALGQGTTLNNGHSNDTVHDRTPYRTLLMNELGVPFHLGTKQVCIAWSSSSCHDGKAWLHVCVTGHDENATASFIYDGRLVDSIGSWSKNILRTQESECVCINGTCTVVMTDGSASGRADTKILFIEEGKIVHISPLSGSAQHVEECSCYPRYPGVRCVCRDNWKGSNRPIVDINVKDYSIVSSYVCSGLVGDTPRKNDSSSSSHCLNPNNEEGGHGVKGWAFDDGNDVWMGRTISEKLRSGYETFKVIGGWSKPNSKLQINRQVIVDRGNRSGYSGIFSVEGKSCINRCFYVELIRGRKQETEVWWTSNSIVVFCGTSGTYGTGSWPDGADINLMPI

SEQ ID NO: 22115 - protein, 469 aa, Artificial Sequence; identical to SEQ ID NO: 14573
  derived and/or modified protein sequence (wt) from neuraminidase__InfluenzaA__AFH00530

SEQ ID NO: 22116 - protein, 469 aa, Artificial Sequence; identical to SEQ ID NO: 14573
  derived and/or modified protein sequence (wt) from neuraminidase__InfluenzaA__AFH00541

SEQ ID NO: 22117 - protein, 469 aa, Artificial Sequence
  derived and/or modified protein sequence (wt) from neuraminidase__InfluenzaA__AFH00552
MNPNQKIITIGSVSLTIATICFLMQIAILVTTVTLHFKQYECNSLPNNQVMLCEPTIIERNITEIVYLTNTTIEKEICPKLAEYRNWSKPQCKITGFAPFSKDNSIRLSAGGDIWVTREPYVSCDPDKCYQFALGQGTTLNNRHSNDTVHDRTPYRTLLMNELGVPFHLGTKQVCIAWSSSSCHDGKAWLHVCVTGHDENATASFIYDGRLVDSIGSWSKKILRTQESECVCINGTCTVVMTDGSASGRADTKILFIEEGKIIHISQLSGSTQHVEECSCYPRYPGVRCVCRDNWKGSNRPIVDINVKDYSIVSSYVCSGLVGDTPRKNDSSSSSHCLNPNNEEGGHGVKGWAFDDGNDVWMGRTISEKFRSGYETFKVIEGWSKPNSKLQINRQVIVDRDNRSGYSGIFSVEGKSCINRCFYVELIRGRKQETEVWWTSNSIVVFCGTSGTYGTGSWPDGADINLMPI

SEQ ID NO: 22118 - protein, 469 aa, Artificial Sequence
  derived and/or modified protein sequence (wt) from neuraminidase__InfluenzaA__AFH00563
MNPNQKIITIGSVSLTIATICFLMQIAILVTTVTLHFKQYECNSPPNNQVMLCEPTIIERNITEIVYLTNTTIEKEICPKLAEYRNWSKPQCNITGFAPFSKDNSIRLSAGGDIWVTREPYVSCDPDKCYQFALGQGTTLNNGHSNDTVHERTPYRTLLMNELGVPFHLGTKQVCIAWSSSSCHDGKAWLHVCVTGDDENATASFIYNGRLVDSIGSWSKKILRTQESECVCINGTCTVVMTDGSASGKADTKILFIEEGKIVHTSPLSGSAQHVEECSCYPRYPGVRCVCRDNWKGSNRPIVDINVKDYSIVSSYVCSGLVGDTPRKNDSSSSSHCLDPNNEEGGHGVKGWAFDDGNDVWMGRTISEKLRSGYETFKVIEGWSKPNSKLQINRQVIVDRGNRSGYSGIFSVEGKSCINRCFYVELIRGRKQETEVLWTSNSIVVFCGTSGTYGTGSWPDGADINLMPI

SEQ ID NO: 22119 - protein, 469 aa, Artificial Sequence
  derived and/or modified protein sequence (wt) from neuraminidase__InfluenzaA__AFH00574
MNPNQKIITIGSVSLTIATICFLMQIAILVTTVTLHFKQYECNSPPNNQVMLCEPKIIERNITEIVYLNNTTIEKEICPKLAEYRNWSKPQCNITGFAPFSKDNSIRLSAGGDIWVTREPYVSCDPDKCYQFALGQGTTLNNGHSNDTVHDRTPYRTLLMNELGVPFHLGTKQVCIAWSSSSCHDGKAWLHVCVTGDDENATASFIYNGRLVDSIGSWSKKILRTQESECVCINGTCTVVMTDGSASGKADTKILFIEEGKIVHTSLLSGSAQHVEECSCYPRYPGVRCVCRDNWKGSNRPIVDINVKDYSIVSSYVCSGLVGDTPRKNDSSSSSHCLDPNNEEGGHGVKGWAFDDGNDVWMGRTISEKLRSGYETFKVIEGWSKPNSKLQINRQVIVDRGNRSGYSGIFSVEGKSCINRCFYVELIRGRKQETEVLWTSNSIVVFCGTSGTYGTGSWPDGADINLMPI

SEQ ID NO: 22120 - protein, 469 aa, Artificial Sequence
  derived and/or modified protein sequence (wt) from neuraminidase__InfluenzaA__AFH00585
MNPNQKIITIGSVSLTIATICFLMQIAILVTTVTLHFKQYECNSPPNNQVMLCEPTIIERNITEIVYLTNTTIKKEICPKLAEYRNWSKPQCNITGFAPFSKDNSIRLSAGGDIWVTREPYVSCDPDKCYQFALGQGTTLNNRHSNDKVHDRTPYRTLLMNELGVPFHLGTKQVCIAWSSSSCHDGKAWLHVCVTGDDENATASFIYNGRLVDSIGSWSKKILRTQESECVCINGTCTVVMTDGSASGKADTKILFIKEGKIVHTSSLSGSAQHVEECSCYPRYPGVRCVCRDNWKGSNRPIVDINVKDYSIVSSYVCSGLVGDTPRKNDSSSSSHCLDPNNEEGGHGVKGWAFDDGNDVWMGRTISEKLRSGYETFKVIEGWSKANSKLQINRQVIVDRGNRSGYSGIFSVESKSCINRCFYVELIRGRKQETEVLWTSNSIVVFCGTSGTYGTGSWPDGADINLMPI

SEQ ID NO: 22121 - protein, 469 aa, Artificial Sequence; identical to SEQ ID NO: 14708
  derived and/or modified protein sequence (wt) from neuraminidase__InfluenzaA__AFH00596

SEQ ID NO: 22122 - protein, 469 aa, Artificial Sequence
  derived and/or modified protein sequence (wt) from neuraminidase__InfluenzaA__AFH00607
MNPNQKIITIGFVFFTIATICFLMQIAILVTTVTLHFKQYECNPPPNNQVMLCEPTIIERNITEIVYLTNTTIEKEICPKLAEYRNWSKPQCNITGFAPFSKDNSIRLSAGGDIWVTREPYVSCDPDKCYQFALGQGTTLNNGHSNDTVHDRTPYRTLLMNELGVPFHLGTRQVCIAWSSSSCHDGKAWLHVCVTGDDENATASFIYNGRLVDSIGSWSKKILRTQESECVCINGTCTVVMTDGSASGKADTKILFIEEGKIVHISTLSGSAQHVEECSCYPRYPGVRCVCRDNWKGSNRPIVDINVKDYSIVSSYVCSGLVGDTPRKNDSFSSSHCLDPNNEEGGHGVKGWAFDDGNDVWMGRTISEKLRSGYETFKVIEGWSKPNSKLQTNRQVIVERGNRSGYSGIFSVEGKSCINRCFYVELIRGRKEETEVWWTSNSIVVFCGTSGTYGTGSWPDGADINLMPI

SEQ ID NO: 22123 - protein, 469 aa, Artificial Sequence; identical to SEQ ID NO: 15929
  derived and/or modified protein sequence (wt) from neuraminidase__InfluenzaA__AFH00618

SEQ ID NO: 22124 - protein, 469 aa, Artificial Sequence
  derived and/or modified protein sequence (wt) from neuraminidase__InfluenzaA__AFH00629
MNPNQKIITIGSVSLTIATICFLMQITILVTTVTLHFKQYECNSPPNNQVMLCEPTIIERNITEIVYLTNTTIEKGICPKLAEYRNWSKPQCNITGFAPFSKDNSIRLSAGGDIWVTREPYVSCDPDKCYQFALGQGTTLNNGHSNDTVHDRTPYRTLLMNELGVPFHLGTRQVCIAWSSSSCHDGKAWLHVCVTGDDKNATASFIYNGRLVDSIGSWSKKILRTQESECVCINGTCTVVMTDGSASGKADTKILFIEEGKIIHISTLLGSAQHVEECSCYPRYPGVRCVCRDNWKGSNRPIVDINVKDYSIVSSYVCSGLVGDTPRKNDSSSSSHCLDPNNEEGGHGVKGWAFDDGNDVWMGRTISEKLRSGYETFKVIEGWSKPNSKLQINRQVIVERGNRSGYSGIFSVEGKSCINRCFYVELIRGRKEETEVWWTSNSIVVFCGTSGTYGTGSWPDGADINLMPI

SEQ ID NO: 22125 - protein, 469 aa, Artificial Sequence; identical to SEQ ID NO: 14327
  derived and/or modified protein sequence (wt) from neuraminidase__InfluenzaA__AFH00640

SEQ ID NO: 22126 - protein, 469 aa, Artificial Sequence; identical to SEQ ID NO: 16456
  derived and/or modified protein sequence (wt) from neuraminidase__InfluenzaA__AFH00651

SEQ ID NO: 22127 - protein, 469 aa, Artificial Sequence; identical to SEQ ID NO: 14327
  derived and/or modified protein sequence (wt) from neuraminidase__InfluenzaA__AFH00662

SEQ ID NO: 22128 - protein, 469 aa, Artificial Sequence
  derived and/or modified protein sequence (wt) from neuraminidase__InfluenzaA__AFH00673
MNPNQKIITIGSVSLTISTICFFMQIAILITTVTLHFKQYEFSSPPNNQVMLCEPTIIERNITEIVYLTNTTIEKETCPKLAEYRNWSKPQCDITGFAPFSKDNSIRLSAGGDIWVTREPYVSCDPDKCYQFALGQGTTLNNVHSNDTVHDRTPYRTLLMNELGVPFHLGTKQVCIAWSSSSCHDGKAWLHVCVTGDDKNATASFIYNGRLVDSIVSWSKEILRTQESECVCINGTCTVVMTDGSASGKADTKILFIEEGKIVHTSTLSGSAQHVEECSCYPRYPGVRCVCRDNWKGSNRPIVDINIKDYSIVSRYVCSGLVGDTPRKNDSSSSSHCLDPNNEEGGHGVKGWAFDDGNDVWMGRTISVKSRSGYETFKVIEGWSNPNSKLQINRQVIVDRGNRSGYSGIFSVEGKSCINRCFYVELIRGRKEETEVLWTSNSIVVFCGTSGTYGTGSWPDGADINLMPI

SEQ ID NO: 22129 - protein, 469 aa, Artificial Sequence
  derived and/or modified protein sequence (wt) from neuraminidase__InfluenzaA__AFH00684
MNPNQKIITIGSVSLTISTICFFMQIAILITTVTLHFKQYEFNSPPNNQVMLCEPTIIERNITEIVYLTNTTIEKEICPKLAEYRNWSKPQCDITGFAPFSKDNSIRLSAGGDIWVTREPYVSCDPDKCYQFALGQGTTLNNVHSNNTVRERTPYRTLLMNELGVPFHLGTKQVCIAWSSSSCHDGKAWLHVCITGDDKNATASFIYNGRLVDSIVSWSKEILRTQESECVCINGTCTVVMTDGSASGKADTKILFIEEGKIVHTSTLSGSAQHVEECSCYPRYPGVRCVCRDNWKGSNRPIVDINIKDHSIVSSYVCSGLVGDTPRKNDSSSSSHCLDPNNEEGGHGVKGWAFDDGNDVWMGRTISEKSRLGYETFKVIEGWSNPKSKLQINRQVIVDRGNRSGYSGIFSVEGKSCINRCFYVELIRGRKEETEVLWTSNSIVVFCGTSGTYGTGSWPDGADINLMPI

SEQ ID NO: 22130 - protein, 469 aa, Artificial Sequence
  derived and/or modified protein sequence (wt) from neuraminidase__InfluenzaA__AFH00695
MNPNQKIITIGSVSLTISTICFFMQIAILITTVTLHFKQYEFNSPPNNQVMLCEPTIIERNITEIVYLTNTTIEKEICPKLAEYRNWSKPQCDITGFAPFSKDNSIRLSAGGDIWVTREPYVSCDPDKCYQFALGQGTTLNNVHSNDTVRERTPYRTLLMNELGVPFHLGTKQVCIAWSSSSCHDGKAWLHVCITGDDKNATASFIYNGRLVDSIVSWSKEILRTQESECVCINGTCTVVMTDGSASGKADTKILFIEEGKIVHTSTLSGSAQHVEECSCYPRYPGVRCVCRDNWKGSNRPIVDINIKDHSIVSSYVCSGLVGDTPRKNDSSSSSHCLDPNNEEGGHGVKGWAFDDGNDVWMGRTISEKSRLGYETFKVIEGWSNPKSKLQINRQVIVDRGNRSGYSGIFSVEGKSCINRCFYVELIRGRKEETEVLWTSNSIVVFCGTSGTYGTGSWPDGADINLMPI

SEQ ID NO: 22131 - protein, 469 aa, Artificial Sequence
  derived and/or modified protein sequence (wt) from neuraminidase__InfluenzaA__AFH00706
MNPNQKIITIGSVSLTISTICFFMQIAILITTVTLHFKQYEFNSPPNNQVMLCEPTIIERNITEIVYLTNTTIEKEICPKLAEYRNWSKPQCDITGFAPFSKDNSIRLSAGGDIWVTREPYVSCDPNKCYQFALGQGTTLNNVHSNNTVRDRTPYRTLLMNELGVPFHLGTKQVCIAWSSSSCHDGKAWLHVCITGDDKNATASFIYNGRLVDSVVSWSKEILRTQESECVCINGTCTVVMTDGSASGKADTKILFIEEGKIVHTSTLSGSAQHVEECSCYPRYPGVRCVCRDNWKGSNRPIVDINMKDHSIVSSYVCSGLVGDTPRKNDSSSSSHCFDPNNEEGGHGVKGWAFDDGNDVWMGRTISEKSRLGYETFKVIEGWSNPKSKLQINRQVIVDRGDRSGYSGIFSVEGKSCINRCFYVELIRGSKEETEVLWTSNSIVVFCGTSGTYGTGSWPDGADINLMPI

SEQ ID NO: 22132 - protein, 469 aa, Artificial Sequence
  derived and/or modified protein sequence (wt) from neuraminidase__InfluenzaA__AFH00728
MNPNQKIITIGSVSLTIATICFLMQIAILVTTVTLHFKQYECSSPPNNQVMPCEPIIIERNITEIVYLTNTTIEKEICPKLVEYRNWSKPQCKITGFAPFSKDNSIRLSAGGDIWVTREPYVSCDPGKCYQFALGQGTTLNNKHSNDTIHDRTPYRTLLMNELGVPFHLGTRQVCIAWSSSSCHDGKAWLHVCVTGHDKNATASFIYNGRLVDSIGSWSKNILRTQESECVCINGTCTVVMTDGSASERADTKILFIEEGKIVHISPLSGSAQHVEECSCYPRYPGVRCVCRDNWKGSNRPIVDINVKDYSIVSSYVCSGLVGDTPRKNDRSSSSYCRNPNNEKGNHGVKGWAFDDGNDVWMGRTIGEELRSGYETFKVIGGWSTPNSKLQINRQVIVDSDNRSGYSGIFSVEGKSCINRCFYVELIRGREQETRVLWTSNSIVVFCGTSGTYGTGSWPDGADINLMPI

SEQ ID NO: 22133 - protein, 469 aa, Artificial Sequence
  derived and/or modified protein sequence (wt) from neuraminidase__InfluenzaA__AFH00739
MNPNQKIITIGSVSLTIATICFLMQIAILVTTVTLHFKQYECSSPPNNQVMPCEPTIIERNITEIVYLTNTTIEKEICPKLVEYRNWSKPQCKITGFAPFSKDNSIRLSAGGDIWVTREPYVSCDPGKCYQFALGQGTTLNNRHSNDTVHDRTPYRTLLMNELGVPFHLGTKQVCIAWSSSSCHDGKAWLHVCVTGHDKNATASFIYDGRLVDSIGSWSKNILRTQESECVCINGTCTVVMTDGSASERADTKILFIEEGKIVHISPLSGSAQHVEECSCYPRYPGVRCVCRDNWKGSNRPIVDINVKDYSIVSSYVCSGLVGDTPRKNDRSSSSYCRNPNNEKGSHGVKGWAFDDGNDVWMGRTIGEELRSGYETFKVIGGWSTPNSKLQINRQVIVDSGNRSGYSGIFSVEGKSCINRCFYVELIRGRGQETRVWWTSNSIVVFCGTSGTYGTGSWPDGADINLMPI

SEQ ID NO: 22134 - protein, 469 aa, Artificial Sequence
  derived and/or modified protein sequence (wt) from neuraminidase__InfluenzaA__AFH00750
MNPNQKIITIGSVSLTIATICFLMQIAILVTTVTLHFKQYECSSPPNNQVMPCEPTIIERNITEIVYLTNTTIEKEICPKLVEYRNWSKPQCKITGFAPFSKDNSIRLSAGGDIWVTREPYVSCDPGKCYQFALGQGTTLNNRHSNDTVHDRTPYRTLLMNELGVPFHLGTKQVCIAWSSSSCHDGKAWLHVCVTGHDKNATASFIYDGRLVDSIGSWSKNILRTQESECVCINGTCTVVMTDGSASERAYTKILFIKEGKIVHISPLSGSAQHVEECSCYPRYPGVRCVCRDNWKGSNRPIVDINVKDYSIVSSYVCSGLVGDTPRKNDRSSSSYCRNPNNEKGSHGVKGWAFDDGNDVWMGRTIGEELRSGYETFKVIGGWSTPNSKLQINRQVIVESGNRSGYSGIFSVEGKSCINRCFYVELIRGREQETRVWWTSNSIVVFCGTSGTYGTGSWPDGADINLMPI

SEQ ID NO: 22135 - protein, 469 aa, Artificial Sequence
  derived and/or modified protein sequence (wt) from neuraminidase__InfluenzaA__AFH00761
MNPNQKIITIGSVSLTIATICFLMQIAILVTTVTLHFKQYECNSPPNNQVMPCEPTIIERNITEIVYLTNTTIEKEICPKLVEYRNWSKPQCKITGFAPFSKDNSIRLSAGGDIWVTREPYVSCDPGKCYQFALGQGTTLNNRHSNDTVHDRTPYRTLLMNELGVPFHLGTKQVCIAWSSSSCHDGKAWLHVCVTGHDENATASFIYDGRLVDSIGSWSKNILRTQESECVCINGTCTVVMTDGSASERADTKILFIEEGKIVHISPLSGSAQHVEECSCYPRYPGVRCVCRDNWKGSNRPIVDINVKDYSIVSSYVCSGLVGDTPRKNDSSSSSYCRNPNNEKGSHGVKGWAFDDGDDVWMGRTIGEELRSGYETFKVIGGWSTPNSKLQINRQVIVDRGNRSGYSGIFSVEGKSCINRCFYVELIRGRKQETKVWWTSNSIVVFCGTSGTYGTGSWPDGADINLMPI

SEQ ID NO: 22136 - protein, 469 aa, Artificial Sequence
  derived and/or modified protein sequence (wt) from neuraminidase__InfluenzaA__AFH00783
MNPNQKIITIGSVSLTIATICFLMQIAILVTTVTLHFKQYECNSPPNNQVMLCEPTIIERNITEIVYLTNTTIEKEICPKLAEYRNWSKPQCKITGFAPFSKDNSIRLSAGGDIWVTREPYVSCDPDKCYQFALGRGTTLNNRHSNDTVHDRTPYRTLLMNELGVPFHLGTKQVCIAWSSSSCHDGKAWLHVCVTGHDENATASFIYDGRLVDSIGSWSKKILRTQESECVCINGTCTVVMTDGSASGRADTKILFIEEGKIVHISPLSGSAQHVEECSCYPRYSGVRCVCRDNWKGSNRPIVDINVKDYSIVSSYVCSGLVGDTPRKNDSSSSSHCLNPNNEEGGHGVKGWAFDDGNDVWMGRTISEKFRSGYETFKVIGGWSKPNSKLQINRQVIVDRGNRSGYSGIFSVEGKSCINRCFYVELIRGRKQETEVWWTSNSIVVFCGTSGTYGTGSWPDGADINLMPI

SEQ ID NO: 22137 - protein, 469 aa, Artificial Sequence
  derived and/or modified protein sequence (wt) from neuraminidase__InfluenzaA__AFH00794
MNPNQKIITIGSVSLTIATICFLMQIAILVTTVTLHFKQYECNSPPNNQVMLCEPTIIERNITEIVYLTNTTIEKEICPKLAEYRNWSKPQCKITGFAPFSKDNSIRLAAGGDIWVTREPYVSCDPDKCYQFALGQGTTLNNRHSNDTVHDRTPYRTLLMNELGVPFHLGTKQVCIAWSSSSCHDGKAWLHVCVTGHDENATASFIYDGRLVDSIGSWSKKILRTQESECVCINGTCTVVMTDGSASERADTKILFIEEGKIVHISQLSGSAQHVEECSCYPRYPGVRCVCRDNWKGSNRPIVDINVKDYSIVSSYVCSGLVGDTPRKNDSSSSSHCLNPNNEEGGHGVKGWAFDDGDDVWMGRTISEKLRSGYETFKVIEGWSKPNSKLQTNRQVIVDRGNRSGYSGIFSVEGKSCINRCFYVELIRGRKQETEVWWTSNSIVVFCGTSGTYGTGSWPDGADINLMPI

SEQ ID NO: 22138 - protein, 469 aa, Artificial Sequence; identical to SEQ ID NO: 15488
  derived and/or modified protein sequence (wt) from neuraminidase__InfluenzaA__AFH00805

SEQ ID NO: 22139 - protein, 469 aa, Artificial Sequence; identical to SEQ ID NO: 19518
  derived and/or modified protein sequence (wt) from neuraminidase__InfluenzaA__AFH00816

SEQ ID NO: 22140 - protein, 469 aa, Artificial Sequence
  derived and/or modified protein sequence (wt) from neuraminidase__InfluenzaA__AFH00827
MNPNQKIITIGSVSLTISTTCFFMQIAILITTVTLHFKQYEFNSPPNNQVMLCEPTIIERNMTEIVYLTNTTIEKEICPKPAEYRNWSKPQCDITGFAPFSKDNSIRLSAGGDIWVTREPYVSCDPDKCYQFALGQGTTLNNVHSNNTVRDRTPYRTLLMNELGVPFHLGTKQVCIAWSSSSCHDGKAWLHVCITGDDKNATASFIYNGRLVDSVVSWSKEILRTQESECVCINGTCTVVMTDGSASGKADTKILFIEEGKIVHTSTLSGSAQHVEECSCYPRYPGVRCVCRDNWKGSNRPIVDINIKDHSIVSSYVCSGLVGDTPRKNDSSSSSHCLDPNNEEGGHGVKGWAFDDGNDVWMGRTINETSRLGYETFKVIEGWSNPKSKLQINRQVIVDRGDRSGYSGIFSVEGKSCINRCFYVELIRGRKEETEVLWTSNSIVVFCGTSGTYGTGSWPDGADLNLMPL

SEQ ID NO: 22141 - protein, 469 aa, Artificial Sequence; identical to SEQ ID NO: 15929
  derived and/or modified protein sequence (wt) from neuraminidase__InfluenzaA__AFH01410

SEQ ID NO: 22142 - protein, 469 aa, Artificial Sequence
  derived and/or modified protein sequence (wt) from neuraminidase__InfluenzaA__AFH34942
MNPNQKIITIGSVSLTISTICFFMQIAILITTVTLHFKQYEFNSPPNNQVMLCEPKIIERNITEIVYLTNTTIEKEICPKPAEYRNWSKPQCDITGFAPFSKDNSIRLSAGGDIWVTREPYVSCDPDKCYQFALGQGTTLNNVHSNNTVRNRTPYRTLLMNELGVPFHLGTKQVCIAWSSSSCHDGKAWLHVCITGDDKNATASFIYNGKLVDSVVSWSKEILRTQESECVCINGTCTVVMTDGSASGKADTKILFIEEGKIVHTSTLSGSAQHVEECSCYPRYPGVRCVCRDNWKGSNRPIVDINIKDHSIVSSYVCSGLVGDTPRKNDSSSSSHCLDPNNEEGGHGVKGWAFDDGNDVWMGRTINETSRLGYETFKVIEGWSNPKSKLQINRQVIVDRGDRSGYSGIFSVEGKSCINRCFYVELIRGRKEETEVLWTSNSIVVFCGTSGTYGTGSWPDGADLNLMPI

SEQ ID NO: 22143 - protein, 469 aa, Artificial Sequence
  derived and/or modified protein sequence (wt) from neuraminidase__InfluenzaA__AFH34956
MNPNQKIITIGSVSLTISTICFFMQIAILITTVTLHFKQYEFNSPPNNQVMLCEPTIIERNITEIVYLTNTTIEKEICPKPAEYRNWSKPQCDITGFAPFSKDNSIRLSAGGDIWVTREPYVSCDPDKCYQFALGQGTTLNNVHSNNTVRGRTPYRTLLMNELGVPFHLGTKQVCIAWSSSSCHDGKAWLHVCITGDDKNATASFIYNGRLVDSVVSWSKEILRTQESECVCINGTCTVVMTDGSASGKADTKILFIEEGKIVHTSTLSGSAQHVEECSCYPRYPGVRCVCRDNWKGSNRPIVDINIKDHSIVSSYVCSGLVGDTPRKNDSSSSSHCLDPNNEEGGHGVKGWAFDDGNDVWMGRTINETSRLGYETFKVIEGWSNPKSKLQINRQVIVDRGDRSGYSGIFSVEGKSCINRCFYVELIRGRKEENEVLWTSNSIVVFCGTSGTYGTGSWPDGADLNLMPI

SEQ ID NO: 22144 - protein, 469 aa, Artificial Sequence
  derived and/or modified protein sequence (wt) from neuraminidase__InfluenzaA__AFH34963
MNPNQKIITIGSVSLTISTICFFMQIAILITTVTLHFKQYEFNSPPNNQVMLCEPTIIERNITEIVYLTNTTIEKEICPKPAEYRNWSKPQCDITGFAPFSKDNSIRLSAGGDIWVTREPYVSCDPDKCYQFALGQGTTLNNVHSNNIVRDRTPYRTLLMNELGVPFHLGTKQVCIAWSSSSCHDGKAWLHVCITGDDKNATASFIYNGRLVDSVVSWSKEILRTQESECVCINGTCTVVMTDGSASGKADTKILFIEEGKIVHTSTLSGSAQHVEECSCYPRYPGVRCVCRDNWKGSNRPIVDINIKDHSIVSSYVCSGLVGDTPRKNDSSSSSHCLDPNNEEGGHGVKGWAFDDGNDVWMGRTINETSRLGYETFKVIEGWSNPKSKLQINRQVIVDRGDRSGYSGIFSVEGKSCINRCFYVELIRGRKEENEVLWTSNSIVVFCGTSGTYGTGSWPDGADLNLMPI

SEQ ID NO: 22145 - protein, 469 aa, Artificial Sequence
  derived and/or modified protein sequence (wt) from neuraminidase__InfluenzaA__AFH34970
MNPNQKIITIGSVSLTISTICFFMQIAILITTVTLHFKQYEFNSPPNNQVMLYEPTIIERNITEIVYLTNTTIEKEICPKPAEYRNWSKPQCDITGFAPFSKDNSIRLSAGGDIWVTREPYVSCDPDKCYQFALGQGTTLNNVHSNNTVRDRTPYRTLLMNELGVPFHLGTKQVCIAWSSSSCHDGKAWLHVCITGDDKNATASFIYNGRLVDSVVSWSKEILRTQESECVCINGTCTVVMTDGSASGKADTKILFIEEGKIVHTSTLSGSAQHVEECSCYPRYPGVRCVCRDNWKGSNRPIVDINIKDHSIVSSYVCSGLVGDTPRKNDSSSSSHCLDPNNEEGGHGVKGWAFDDGNDVWMGRTINETSRLGYETFKVIEGWSNPKSKLQINRQVIVDRGDRSGYSGIFSVEGKSCINRCFYVELIRGRKEENEVLWTSNSIVVFCGTSGTYGTGSWPDGADLNLMPI

SEQ ID NO: 22146 - protein, 469 aa, Artificial Sequence
  derived and/or modified protein sequence (wt) from neuraminidase__InfluenzaA__AFH34977
MNPNQKIITIGSVSLTISTICFFMQIAILITTVTLHFKQYEFNSPPNNQVMLCEPTIIERNITEIVYLTNTTIEKEICPKPAEYRNWSKPQCGITGFAPFSKDNSIRLSAGGDIWVTREPYVSCDPDKCYQFALGQGTTLNNVHSNNTVRDRTPYRTLLMNELGVPFHLGTKQVCIAWSSSSCHDGKAWLHVCITGDDKNATASFIYNGRLVDSVVSWSKEILRTQESECVCINGTCTVVMTDGSASGKADTKILFIEEGKIVHTSTLSGSAQHVEECSCYPRYPGVRCVCRDNWKGSNRPIVDINIKDHSIVSSYVCSGLVGDTPRKNDSSSSSHCLDPNNEEGGHGVKGWAFDDGNDVWMGRTINETSRLGYETFKVIEGWSNPKSKLQINRQVIVDRGDRSGYSGIFSVEGKSCINRCFYVELIRGRKEETEVLWTSNSIVVFCGTSGTYGTGSWPDGADLNLMPI

SEQ ID NO: 22147 - protein, 469 aa, Artificial Sequence
  derived and/or modified protein sequence (wt) from neuraminidase__InfluenzaA__AFH74468
MNPNQKIITIGSVSLTISTICFFMQTAILITTVTLHFKQCEFNSPPNNQVMLCEPTIIERNITEIVYLTNTTIEKEICPKLAEYRNWSKPQCDITGFAPFSKDNSIRLSAGGDIWVTREPYVSCDPDKCYQFALGQGTTLNNVHSNNTVRDRTPYRTLLMNELGVPFHLGTKQVCIAWSSSSCHDGKAWLHVCITGDDKNATASFIYNGRLVDSVVSWSKEILRTQESECVCINGTCTVVMTDGSASGKADTKILFIEEGRIVHTSTLSGSAQHVEECSCYPRYPGVRCVCRDNWKGSNRPIVDINIKDHSIVSSYVCSGLVGDTPRKNDSSSSSHCLDPNNEEGDNGVKGWAFDDGNDVWMGRTISEKSRLGYETFKVIEGWSNPKSKLQINRQVIVDRGNRSGYSGIFSVEGKSCINRCFYVELIRGRKEETEVLWTSNSIVVFCGTSGTYGTGSWPDGADINLMPI

SEQ ID NO: 22148 - protein, 469 aa, Artificial Sequence; identical to SEQ ID NO: 18651
  derived and/or modified protein sequence (wt) from neuraminidase__InfluenzaA__AFH74469

SEQ ID NO: 22149 - protein, 469 aa, Artificial Sequence; identical to SEQ ID NO: 16599
  derived and/or modified protein sequence (wt) from neuraminidase__InfluenzaA__AFH74480

SEQ ID NO: 22150 - protein, 469 aa, Artificial Sequence; identical to SEQ ID NO: 16599
  derived and/or modified protein sequence (wt) from neuraminidase__InfluenzaA__AFH74491

SEQ ID NO: 22151 - protein, 469 aa, Artificial Sequence; identical to SEQ ID NO: 21642
  derived and/or modified protein sequence (wt) from neuraminidase__InfluenzaA__AFH74502

SEQ ID NO: 22152 - protein, 469 aa, Artificial Sequence
  derived and/or modified protein sequence (wt) from neuraminidase__InfluenzaA__AFH74513
MNPNQKIITIGSVSLTISTICFFMQIAILITTVTLHFKQYEFNSPPNNQVMLCEPTIIERNITEIVYLTNTTIEKETCPKLAEYRNWSKPQCDITGFAPFSKDNSIRLSAGGDIWVTREPYVSCDPDKCYQFALGQGTTLNNVHSNNTVRDRTPYRTLLMNELGVPFHLGTKQVCIAWSSSSCHDGKAWLHVCITGDDKNATASFIYNGRLVDSVVSWSKEILRTQESECVCINGTCTVVMTDGSASGKADTKILFIEEGKIVHTSTLSGSAQHVEECSCYPRYPGVRCVCRDNWKGSNRPIVDINIKDHSIVSSYVCSGLVGDTPRKNDSSSSSHCLDPNNEEGGHGVKGWAFDDGNDVWMGRTISEKSRLGYETFKVIEGWSNPKSKLQINRQVIVDRGNRSGYSGIFSVEGKSCINRCFYVELIRGRKEETEVLWTSNSIVVFCGTSGTYGTGSWPDGADINLMPV

SEQ ID NO: 22153 - protein, 469 aa, Artificial Sequence
  derived and/or modified protein sequence (wt) from neuraminidase__InfluenzaA__AFH74524
MNPNQKIITIGSVSLTISTICFFMQIAILITTVTLHFKQYEFNSPPNNQVMLCEPTIIERNITEIVYLTNTTIEKEICPKLAEYRNWSKPQCDITGFAPFSKDNSIRLSAGGDIWVTREPYVSCDPDKCYQFALGQGTTINNVHSNNTVRDRTPYRTLLMNELGVPFHLGTKQVCIAWSSSSCHDGKAWLHVCITGDDKNATASFIYNGRLVDSVVSWSKEILRTQESECVCINGTCTVVMTDGSASGKADTKILFIEEGKIVHTSTLSGSAQHVEECSCYPRYPGVRCVCRDNWKGSNRPIVDINMKDHSIVSSYVCSGLVGDTPRKNDSSSSSHCLDPNNEEGGHGVKGWAFDDGNDVWMGRTISEKSRLGYETFKVIEGWSNPKSKLQINRQVIVDRGNRSGYSGIFSVEGKSCINRCFYVELIRGRKEETEVLWTSNSVVVFCGTSGTYGTGSWPDGADINLMPI

SEQ ID NO: 22154 - protein, 469 aa, Artificial Sequence; identical to SEQ ID NO: 16599
  derived and/or modified protein sequence (wt) from neuraminidase__InfluenzaA__AFH74535

SEQ ID NO: 22155 - protein, 469 aa, Artificial Sequence; identical to SEQ ID NO: 21635
  derived and/or modified protein sequence (wt) from neuraminidase__InfluenzaA__AFH74546

SEQ ID NO: 22156 - protein, 469 aa, Artificial Sequence; identical to SEQ ID NO: 21635
  derived and/or modified protein sequence (wt) from neuraminidase__InfluenzaA__AFH74557

SEQ ID NO: 22157 - protein, 469 aa, Artificial Sequence; identical to SEQ ID NO: 21635
  derived and/or modified protein sequence (wt) from neuraminidase__InfluenzaA__AFH74568

SEQ ID NO: 22158 - protein, 469 aa, Artificial Sequence; identical to SEQ ID NO: 21638
  derived and/or modified protein sequence (wt) from neuraminidase__InfluenzaA__AFH74579

SEQ ID NO: 22159 - protein, 469 aa, Artificial Sequence
  derived and/or modified protein sequence (wt) from neuraminidase__InfluenzaA__AFH74590
MNPNQKIITIGSVSLTISTICFFMQIAILITTVTLHFKQYEFNSPPNNQVMLCEPTIIERNITEIVYLTNTTIEKEICPKLAEYRNWSKPQCDITGFAPFSKDNSIRLSAGGDIWVTREPYVSCDPDKCYQFALGQGTTLNNVHSNNTVRDRTPYRTLLMNELGVPFHLGTKQVCIAWSSSSCHDGKAWLHVCITGDDKNATASFIYNGRLVDSVVSWSKEILRTQESECVCINGTCTVVMTDGSASGKADTKILFIEEGKIVHTSTLSGSAQHVEECSCYPRYPGVRCVCRDNWKGSNRPIVDINIKDHSIVSSYVCSGLVGDTPRKNDSSSSSHCLDPNNEEGGHGVKGWAFDDGNDVWMGRTISEKSRLGYETFKVIEGWSNPKSKLQINRQVIVDRGNRSGYSGIFSVEGKSCINRCFYVELIRGRKEETEVLWTSNSIVVFCGTSGTYGTGSWPDGADINLMSV

SEQ ID NO: 22160 - protein, 469 aa, Artificial Sequence; identical to SEQ ID NO: 21635
  derived and/or modified protein sequence (wt) from neuraminidase__InfluenzaA__AFH74601

SEQ ID NO: 22161 - protein, 469 aa, Artificial Sequence
  derived and/or modified protein sequence (wt) from neuraminidase__InfluenzaA__AFH74612
MNPNQKIITIGSVSLTISTICFFMQTAILITTVTLHFKQCEFNSPPNNQVMLCEPTIIERNITEIVYLTNTTIEKEICPKLAEYRNWSKPQCDITGFAPFSKDNSIRLSAGGDIWVTREPYVSCDPDKCYQFALGQGTTLSNVHSNNTVRDRTPYRTLLMNELGVPFHLGTKQVCIAWSSSSCHDGKAWLHVCITGDDKNATASFIYNGRLVDSVVSWSKEILRTQESECVCINGTCTVVMTDGSASGKADTKILFIEEGKIVHTSTLSGSAQHVEECSCYPRYPGVRCVCRDNWKGSNRPIVDINIKDHSIVSSYVCSGLVGDTPRKNDSSSSSHCLDPNNEEGGHGVKGWAFDDGNDVWMGRTISEKSRLGYETFKVIEGWSNPKSKLQINRQVIVDRGNRSGYSGIFSVEGKSCINRCFYVELIRGRKEETEVLWTSNSIVVFCGTSGTYGTGSWPDGADINLMPI

SEQ ID NO: 22162 - protein, 469 aa, Artificial Sequence; identical to SEQ ID NO: 21635
  derived and/or modified protein sequence (wt) from neuraminidase__InfluenzaA__AFH74623

SEQ ID NO: 22163 - protein, 469 aa, Artificial Sequence; identical to SEQ ID NO: 21635
  derived and/or modified protein sequence (wt) from neuraminidase__InfluenzaA__AFH74634

SEQ ID NO: 22164 - protein, 469 aa, Artificial Sequence; identical to SEQ ID NO: 21642
  derived and/or modified protein sequence (wt) from neuraminidase__InfluenzaA__AFH74645

SEQ ID NO: 22165 - protein, 469 aa, Artificial Sequence; identical to SEQ ID NO: 21642
  derived and/or modified protein sequence (wt) from neuraminidase__InfluenzaA__AFH74656

SEQ ID NO: 22166 - protein, 469 aa, Artificial Sequence; identical to SEQ ID NO: 21642
  derived and/or modified protein sequence (wt) from neuraminidase__InfluenzaA__AFH74667

SEQ ID NO: 22167 - protein, 469 aa, Artificial Sequence; identical to SEQ ID NO: 21642
  derived and/or modified protein sequence (wt) from neuraminidase__InfluenzaA__AFH74678

SEQ ID NO: 22168 - protein, 469 aa, Artificial Sequence; identical to SEQ ID NO: 16599
  derived and/or modified protein sequence (wt) from neuraminidase__InfluenzaA__AFH74689

SEQ ID NO: 22169 - protein, 469 aa, Artificial Sequence; identical to SEQ ID NO: 16599
  derived and/or modified protein sequence (wt) from neuraminidase__InfluenzaA__AFH74700

SEQ ID NO: 22170 - protein, 469 aa, Artificial Sequence
  derived and/or modified protein sequence (wt) from neuraminidase__InfluenzaA__AFH74711
MNPNQKIITIGSVSLTISTICFFMQIAILITTVTLHFKQYEFNSPPNNQVMLCEPTIIERNITEIVYLTNTTIEKEICPKLAEYRNWSKPQCDITGFAPFSKDNSIRLSAGGDIWVTREPYVSCDPDKCYQFALGQGTTLNNVHSNNTVRDRTPYRTLLMNELGVPFHLGTKQVCIAWSSSSCHDGKAWLHVCITGDDKNATASFIYNGRLVDSVVSWSKEILRTQESECVCINGTCTVVMTDGSASGKADTKILFIEEGKIVHTSTLSGSAQHVEECSCYPRYPCVRCVCRDNWKGSNRPIVDINIKDHSIVSSYVCSGLVGDTPRKNDSSSSSHCLDPNNEEGGHGVKGWAFDDGNDVWMGRTISEKSRLGYETFKVIEGWSNPKSKLQINRQVIVDRGNRSGYSGIFSVEGKSCINRCFYVELIRGRKEETEVLWTSNSIVVFCGTSGTYGTGSWPDGADINLMPV

SEQ ID NO: 22171 - protein, 469 aa, Artificial Sequence; identical to SEQ ID NO: 21635
  derived and/or modified protein sequence (wt) from neuraminidase__InfluenzaA__AFH74722

SEQ ID NO: 22172 - protein, 469 aa, Artificial Sequence; identical to SEQ ID NO: 21635
  derived and/or modified protein sequence (wt) from neuraminidase__InfluenzaA__AFH74733

SEQ ID NO: 22173 - protein, 469 aa, Artificial Sequence
  derived and/or modified protein sequence (wt) from neuraminidase__InfluenzaA__AFH74744
MNPNQKIITIGSVSLTISTICFFMQIAILITTVTLHFKQYEFNSPPNNQVMLCEPTIIERNITEIVYLTNTTIEKEICPKLAEYRNWSKPQCDITGFAPFSKDNSIRLSAGGDIWVTREPYVSCDPDKCYQFALGQGTTLNNVHSNNTVRDRTPYRTLLMNELGVPFHLGTKQVCIAWSSSSCHDGKAWLHVCITGDDKNATASFIYNGRLVDSVVSWSKEILRTQESECVCINGTCTVVMTDGSASGKADTKILFIEEGKIVHTSTLSGSAQHVEECSCYPRYPGVRCVCRDNWKGSNRPIVDINIKDHSIVSNYVCSGLVGDTPRKNDSSSSSHCLDPNNEEGGHGVKGWAFDDGNDVWMGRTISEKSRLGYETFKVIEGWSNPKSKLQINRQVIVDRGNRSGYSGIFSVEGKSCINRCFYVELIRGRKEETEVLWTSNSIVVFCGTSGTYGTGSWPDGADINLMPV

SEQ ID NO: 22174 - protein, 469 aa, Artificial Sequence; identical to SEQ ID NO: 21635
  derived and/or modified protein sequence (wt) from neuraminidase__InfluenzaA__AFH74755

SEQ ID NO: 22175 - protein, 469 aa, Artificial Sequence; identical to SEQ ID NO: 21635
  derived and/or modified protein sequence (wt) from neuraminidase__InfluenzaA__AFH74766

SEQ ID NO: 22176 - protein, 469 aa, Artificial Sequence; identical to SEQ ID NO: 21635
  derived and/or modified protein sequence (wt) from neuraminidase__InfluenzaA__AFH74777

SEQ ID NO: 22177 - protein, 469 aa, Artificial Sequence; identical to SEQ ID NO: 16599
  derived and/or modified protein sequence (wt) from neuraminidase__InfluenzaA__AFH74788

SEQ ID NO: 22178 - protein, 469 aa, Artificial Sequence
  derived and/or modified protein sequence (wt) from neuraminidase__InfluenzaA__AFH74799
MNPNQKIITIGSVSLTISTICFFMQIAILITTVTLHFKQYEFNSPPNNQVMLCEPTIIERNITEIVYLTNTTIEKEICPKLAEYRNWSKPQCDITGFAPFSKDNSIRLSAGGDIWVTREPYVSCGPDKCYQFALGQGTTLNNVHSNNTVRDRTPYRTLLMNELGVPFHLGTKQVCIAWSSSSCHDGKAWLHVCITGDDKNATASFIYNGRLVDSVVSWSKEILRTQESECVCINGTCTVVMTDGSASGKADTKILFIEEGKIVHTSTLSGSAQHVEECSCYPRYPGVRCVCRDNWKGSNRPIVDINIKDHSIVSSYVCSGLVGDTPRKNDSSSSSHCLDPNNEEGGHGVKGWAFDDGNDVWMGRTISEKSRLGYETFKVIEGWSNPKSKLQINRQVIVDRGNRSGYSGIFSVEGKSCINRCFYVELIRGRKEETEVLWTSNSIVVFCGTSGTYGTGSWPDGADINLMPV

SEQ ID NO: 22179 - protein, 469 aa, Artificial Sequence; identical to SEQ ID NO: 21655
  derived and/or modified protein sequence (wt) from neuraminidase__InfluenzaA__AFH74810

SEQ ID NO: 22180 - protein, 469 aa, Artificial Sequence; identical to SEQ ID NO: 21655
  derived and/or modified protein sequence (wt) from neuraminidase__InfluenzaA__AFH74821

SEQ ID NO: 22181 - protein, 469 aa, Artificial Sequence; identical to SEQ ID NO: 21655
  derived and/or modified protein sequence (wt) from neuraminidase__InfluenzaA__AFH74832

SEQ ID NO: 22182 - protein, 469 aa, Artificial Sequence; identical to SEQ ID NO: 21655
  derived and/or modified protein sequence (wt) from neuraminidase__InfluenzaA__AFH74843

SEQ ID NO: 22183 - protein, 469 aa, Artificial Sequence; identical to SEQ ID NO: 21635
  derived and/or modified protein sequence (wt) from neuraminidase__InfluenzaA__AFH74854

SEQ ID NO: 22184 - protein, 469 aa, Artificial Sequence; identical to SEQ ID NO: 21635
  derived and/or modified protein sequence (wt) from neuraminidase__InfluenzaA__AFH74865

SEQ ID NO: 22185 - protein, 469 aa, Artificial Sequence; identical to SEQ ID NO: 21635
  derived and/or modified protein sequence (wt) from neuraminidase__InfluenzaA__AFH74876

SEQ ID NO: 22186 - protein, 469 aa, Artificial Sequence; identical to SEQ ID NO: 21635
  derived and/or modified protein sequence (wt) from neuraminidase__InfluenzaA__AFH74887

SEQ ID NO: 22187 - protein, 469 aa, Artificial Sequence; identical to SEQ ID NO: 21635
  derived and/or modified protein sequence (wt) from neuraminidase__InfluenzaA__AFH74898

SEQ ID NO: 22188 - protein, 469 aa, Artificial Sequence; identical to SEQ ID NO: 21635
  derived and/or modified protein sequence (wt) from neuraminidase__InfluenzaA__AFH74909

SEQ ID NO: 22189 - protein, 469 aa, Artificial Sequence
  derived and/or modified protein sequence (wt) from neuraminidase__InfluenzaA__AFH74920
MNPNQKIITIGSVSLTISTICFFMQTAILITTVTLHFKQCEFNSPPNNQVMLCEPTIIERNITEIVYLTNTTIEKEICPKLAEYRNWSKPQCDITGFAPFSKDNSIRLSAGGDIWVTREPYVSCDPDKCYQFALGQGTTLNNVHSNNTVRDRTPYRTLLMNELGVPFHLGTKQVCIAWSSSSCHDGKAWLHVCITGDDKNATASFIYNGRLVDSVVSWSKEILRTQESECVCINGTCTVVMTDGSASGKADTKILFIEEGKIVHTSTLSGSAQHVEECSCYPRYPGVRCVCRDNWKGSNRPIVDINIKDHSIVSSYVCSGLVGDTPRKNDSSSSSHCLDPNNEEGDHGVKGWAFDDGNDVWMGRTISEKSRLGYETFKVIEGWSNPKSKLQINRQVIVDRGNRSGYSGIFSVEGKSCINRCFYVELIRGRKEETEVLWTSNSIVVFCGTSGTYGTGSWPDGADINLMPI

SEQ ID NO: 22190 - protein, 469 aa, Artificial Sequence; identical to SEQ ID NO: 16599
  derived and/or modified protein sequence (wt) from neuraminidase__InfluenzaA__AFH74931

SEQ ID NO: 22191 - protein, 469 aa, Artificial Sequence; identical to SEQ ID NO: 16599
  derived and/or modified protein sequence (wt) from neuraminidase__InfluenzaA__AFH74942

SEQ ID NO: 22192 - protein, 469 aa, Artificial Sequence; identical to SEQ ID NO: 21635
  derived and/or modified protein sequence (wt) from neuraminidase__InfluenzaA__AFH74953

SEQ ID NO: 22193 - protein, 469 aa, Artificial Sequence
  derived and/or modified protein sequence (wt) from neuraminidase__InfluenzaA__AFH74964
MNPNQKIITIGSVSLTISTICFFMQIAILITTVTLHFKQYEFNSPPNNQVMLCEPTIIERNITEIVYLTNTTIEKEICPKLAEYRNWSKPQCDITGFAPFSKDNSIRLSAGGDIWVTREPYVSCDPDKCYQFALGQGTTLNNVHSNNTVRDRTPYRTLLMNELGVPFHLGTKQVCIAWSSSSCHDGKAWLHVCITGDDKNATASFIYNGRLVDSVVSWSKEILRTQESECVCINGTCTVVMTDGSASGKADTKILFIEEGKIVHTSILSGSAQHVEECSCYPRYPGVRCVCRDNWKGSNRPIVDINIKDHSIVSSYVCSGLVGDTPRKNDSSSSSHCLDPNNEEGGHGVKGWAFDDGNDVWMGRTISEKSRLGYETFKVIEGWSNPKSKLQINRQVIVDRGNRSGYSGIFSVEGKSCINRCFYVELIRGRKEETEVLWTSNSIVVFCGTSGTYGTGSWPDGADINLMPV

SEQ ID NO: 22194 - protein, 469 aa, Artificial Sequence; identical to SEQ ID NO: 21635
  derived and/or modified protein sequence (wt) from neuraminidase__InfluenzaA__AFH75391

SEQ ID NO: 22195 - protein, 469 aa, Artificial Sequence; identical to SEQ ID NO: 16738
  derived and/or modified protein sequence (wt) from neuraminidase__InfluenzaA__AFH97143

SEQ ID NO: 22196 - protein, 469 aa, Artificial Sequence
  derived and/or modified protein sequence (wt) from neuraminidase__InfluenzaA__AFI56407
MNPNQKIITIGSVCMTIGMANLILQIGNIISIWISHSIQLGNQNQIETCNQSVITYENNTWVNQTYVNISNTNFAAGQSVVSVKLAGNSSLCPVSGWAIYSKDNSIRIGSKGNVFVIREPFISCSPLECRTFFLTQGALLNDKHSNGTIKDRSPYRTLMSCPIGEVPSPYNSRFESVAWSASACHDGINWLTIGISGPDNGAVAVLKYNGIITDTIKSWRNNILRTQESECACVNGSCFTIMTDGPSDGQASYKIFRIEKGKIVKSVEMNAPNYHYEECSCYPDSSEITCVCRDNWHGSNRPWVSFNQNLEYQIGYICSGIFGDNPRPNDKTGSCGPVSSNGANGVKGFSFKYGNGVWIGRTKSISSRKGFEMIWDPNGWTGTDNSFSIKQDIVGINEWSGYSGSFVQHPELTGLDCIRPCFWVELIRGRPKENTIWTSGSSISFCGVNSGTVGWSWPDGAELPFTIDK

SEQ ID NO: 22197 - protein, 469 aa, Artificial Sequence
  derived and/or modified protein sequence (wt) from neuraminidase__InfluenzaA__AFJ05141
MNPNQKIITIGSVSLTISTICFFMQIAILITTVTLHFKQYEFNSPPNNQVMLCEPTIIERNITEIVYLTNTTIEKEICPKPAEYRNWSKPQCDITGFAPFSKDNSIRLSAGGDIWVTREPYVSCDPDKCYQFALGQGTTLNNVHSNNTVRDRTPYRSLLMNELGVPFHLGTKQVCIAWSSSSCHDGKAWLHVCITGDDKNATASFIYNGRLVDSVVSWSKEILRTQESECVCINGTCTVVMTDGSASGKADTKILFIEEGKIVHTSTLSGSAQHVEECSCYPRYPGVRCVCRDNWKGSNRPIVDINIKDHSIVSSYVCSGLVGDTPRKNDSSSSSHCLDPNNEEGGHGVKGWAFDDGNDVWMGRTINETSRLGYETFKVIEGWSNPKSKLQINRQVIVDRGDRSGYSGIFSVEGKSCINRCFYVELIRGRKEETEVLWTSNSIVVFCGTSGTYGTGSWPDGADLNLMPI

SEQ ID NO: 22198 - protein, 469 aa, Artificial Sequence
  derived and/or modified protein sequence (wt) from neuraminidase__InfluenzaA__AFJ05145
MNPNQKIITIGSVSLTMSTICFFMQIAILITTVTLHFKQYEFNSPPNNQVMLCEPTIIERNITEIVYLTNTTIEKEICPKPAEYRNWSKPQCDITGFAPFSKDNSIRLSAGGDIWVTREPYVSCDPDKCYQFALGQGTTLNNVHSNNTVRDRTPYRTLLMNELGVPFHLGTKQVCIAWSSSSCHDGKAWLHVCITGDDKNATASFIYNGRLVDSVVSWSKEILRTQESECVCINGTCTVVMTDGSASGKADTKILFIEEGKIVHTSTLSGSAQHVEECSCYPRYPGVRCVCRDNWKGSNRPIVDINIKDHSIVSSYVCSGLVGDTPRKNDSSSSSHCLDPNNEEGGHGVKGWAFDDGNDVWMGRTINETSRLGYETFKVIEGWSNPKSKLQINRQVIVDRGDRSGYSGIFSVEGKSCINRCFYVELIRGRKEETEVLWTSNSIVVFCGTSGTYGTGSWPDGADLNLMPI

SEQ ID NO: 22199 - protein, 469 aa, Artificial Sequence
  derived and/or modified protein sequence (wt) from neuraminidase__InfluenzaA__AFJ05635
MNPNQKIITIGSVCMTIGMANLILQIGNIISIWISHSIQLRNQSQIETCNQSVITYENNTWVNQTYVNISNTNFAAGQSVVSMKLAGNSSLCPVSGWAIYSKDNSIRIGSKGDVFVIREPFISCSPLECRTFFLTQGALLNDKHSNGTIKDRSPYRTLMSCPIGEVPSPYNSRFESVAWSASACHDGINWLTIGISGPDNGAVAVLKYNGIITDTIKSWRNNILRTQESECACVNGSCFTIMTDGPSDGQASYKIFRIEKGKIVKSVEMNAPNYHYEECSCYPDSSEITCVCRDNWHGSNRPWVSFNQNLEYQIGYICSGIFGDNPRPNDKTGSCGPVSSNGANGVKGFSFKYGNGVWIGRTKSISSRKGFEMIWDPNGWTGTDNNFSIKQDIVGINEWSGYSGSFVQHPELTGLDCIRPCFWVELIRGRPKENTIWTSGSSISFCGVNSDTVGWSWPDGAELPFTIDK

SEQ ID NO: 22200 - protein, 469 aa, Artificial Sequence
  derived and/or modified protein sequence (wt) from neuraminidase__InfluenzaA__AFJ11709
MNPNQKIITIGSVSLTISTICFFMQIAILITTVTLHFKQYEFNSPPNNQVMLCEPTIIERNITEIVYLTNTTIEKEICPKLAEYRNWSKPQCDITGFAPFSKDNSIRLSAGGDIWVTREPYVSCDPDKCYQFALGQGTTLNNVHSNNTVRDRTPYRTLLMNELGVPFHLGTKQVCIAWSSSSCHDGKAWLHVCITGDDKNATASFIYNGRLVDSVVSWSKEILRTQESECVCINGTCTVVMTDGSASGKADTKILFIEEGKIVHTSTLSGSAQHVEECSCYPRYPGVRCVCRDNWKGSNRPIVDINIKDHSIVSSYVCSGLVGDTPRKNDSSSSSHCLDPNNEEGGHGVKGWAFDDGNDVWMGRTINETSRLGYETFKVIEGWSNPKSKLQINRQVIVDRGNRSGYSGIFSVEGKSCINRCFYVELIRGRKEETEVLWTSNSIVVFCGTSGTYGTGSWPDGADLNLMLI

SEQ ID NO: 22201 - protein, 469 aa, Artificial Sequence
  derived and/or modified protein sequence (wt) from neuraminidase__InfluenzaA__AFJ11720
MNPNQKIITIGSVSLTISTICFFMQIAILITTVTLHFKQYEFNSPPNNQVMLCEPTIIERNITEIVYLTNTTIEKEICPKLAEYRNWSKPQCDITGFAPFSKDNSIRLSAGGDIWVTREPYVSCDPDKCYQFALGQGTTLNNVHSNNTVRDRTPYRTLLMNELGVPFHLGTKQVCIAWSSSSCHDGKAWLHVCITGDDKNATASFIYNGRLIDSVVSWSKEILRTQESECVCINGTCTVVMTDGSASGKADTKILFIEEGKIVHTSTLSGSAQHVEECSCYPRYPGVRCVCRDNWKGSNRPIVDINIKDHSIVSSYVCSGLVGDTPRKNDSSSSSHCLDPNNEEGGHGVKGWAFDDGNDVWMGRTINETSRLGYETFKVIEGWSNPKSKLQINRQVIVDKGNRSGYSGIFSVEGKSCINRCFYVELIRGRKEETEVLWTSNSIVVFCGTSGTYGTGSWPDGADLNLMPI

SEQ ID NO: 22202 - protein, 469 aa, Artificial Sequence; identical to SEQ ID NO: 21143
  derived and/or modified protein sequence (wt) from neuraminidase__InfluenzaA__AFJ11731

SEQ ID NO: 22203 - protein, 469 aa, Artificial Sequence
  derived and/or modified protein sequence (wt) from neuraminidase__InfluenzaA__AFJ19845
MNPNQKIITIGSVSLTISTICFFMQIAILITTVTLHFKQYEFNSPPNNQVMLCEPTIIERNITEIVYLTNTTIEKEICPKLAEYRNWSKPQCDITGFAPFSKDNSIRLSAGGDIWVTREPYVSCDPDKCYQFALGQGTTLNNVHSNNTVRDRTPYRTLLMNELGVPFHLGTKQVCIAWSSSSCHDGKAWLHVCITGDDKNATASFIYNGRLVDSVVSWSKEILRTQESECVCINGTCTVVMTDGSASGKADTKILFIEEGKIVHTSTLSGSAQHVEECSCYPRYPDVRCVCRDNWKGSNRPIVDINIKDHSIVSSYVCSGLVGDTPRKNDSSSSSHCLDPNNEEGGHGVKGWAFDDGNDVWMGRTINETSRLGYETFKVIEGWSNPKSKLQINRQVIVDKGNRSGYSGIFSVEGKSCINRCFYVELIRGRKEETEVLWTSNSIVVFCGTSGTYGTGSWPDGADLNLMPI

SEQ ID NO: 22204 - protein, 469 aa, Artificial Sequence; identical to SEQ ID NO: 16738
  derived and/or modified protein sequence (wt) from neuraminidase__InfluenzaA__AFJ44697

SEQ ID NO: 22205 - protein, 469 aa, Artificial Sequence; identical to SEQ ID NO: 20257
  derived and/or modified protein sequence (wt) from neuraminidase__InfluenzaA__AFJ69989

SEQ ID NO: 22206 - protein, 469 aa, Artificial Sequence
  derived and/or modified protein sequence (wt) from neuraminidase__InfluenzaA__AFJ69990
MNPNQKIITIGSVCMTIGMANLILQIGNITSIWISHSIQLGNQNQIETCNQSVITYENNTWVNQTYVNISNTNFAAGQSVVSVKLAGNSSLCPVSGWAIYSKDNSIRIGSKGDVFVIREPFISCSPLECRTFFLTQGALLNDKHSNGTIKDRSPYRTLMSCPIGEVPSPYNSRFESVAWSASACHDGINWLTIGISGPDNGAVAVLKYNGIITDTIKSWRNNILRTQESECACVNGSCFTVMTDGPSDGQASYKIFRIEKGKIVKSVEMNAPNYHYEECSCYPDSSEITCVCRDNWHGSNRPWVSFNQNLEYRIGYICSGIFGDNPRPNDKTGSCGPVSSNGANGVKGFSFKYGNGVWIGRTKSISSRNGFEMIWDPNGWTGTDNNFSIKQDIIGINEWSGYSGSFVQHPELTGLDCIRPCFWVELIRGRPKENTIWTSGSSISFCGVNSDTVGWSWPDGAELPFTIDK

SEQ ID NO: 22207 - protein, 469 aa, Artificial Sequence
  derived and/or modified protein sequence (wt) from neuraminidase__InfluenzaA__AFJ69991
MNPNQKIITIGSVCMTIGMANLILQIGNIISIWISHSIQLGNQSQIETCNQSVITYENNTWVNQTYVNISNTNFAAGQSVVSVKLAGNSSLCPVSGWAIYSKDNSIRIGSKGDVFVIREPFISCSPLECRTFFLTQGALLNDKHSNGTIKDRSPYRTLMSCPIGEVPSPYNQDLSHSAWSASACHDGINWLTIGISGPDNGAVAVLKYNGIITDTIKSWRNNILRTQESECACVNGSCFTIMTDGPSDGQASYKIFRIEKGKIVKSVEMNAPNYHYEECSCYPDSSEITCVCRDNWHGSNRPWVSFNQNLEYQIGYICSGIFGDNPRPNDKTGSCGPVSSNGANGVKGFSFKYGNGVWIGRTKSISSRKGFEMIWDPNGWTGTDNNFSIKQDIVGINEWSGYSGSFVQHPELTGLDCIRPCFWVELIRGRPKENTIWTSGSSISFCGVNSDTVGWSWPDGAELPFTIDK

SEQ ID NO: 22208 - protein, 469 aa, Artificial Sequence; identical to SEQ ID NO: 17564
  derived and/or modified protein sequence (wt) from neuraminidase__InfluenzaA__AFJ69992

SEQ ID NO: 22209 - protein, 469 aa, Artificial Sequence
  derived and/or modified protein sequence (wt) from neuraminidase__InfluenzaA__AFJ69993
MNPNQKIITIGSVSLTISTICFFMQIAILITTVTLHFKQYEFNSPPNNQVMLCEPTIIERNITEIVYLTNTTIEKEICPKLAEYRNWSKPQCDITGFAPFSKDNSIRLSAGGDIWVTREPYVSCDPDKCYQFALGQGTTLNNVHSNNTVRDRTPYRTLLMNELGVPFHLGTKQVCIAWSSSSCHDGKAWLHVCITGDDKNATASFIYNGRLVDSVVSWSKEILRTQESECVCINGTCTVVMTDGSASGKADTKILFIEEGKIVHTSTLSGSAQHVEECSCYPRYPGVRCVCRDNWKGSNRPIVDINIKDHSIVSSYVCSGLVGDTPRKNDSSSSSHCLDPNNEEGGHGVKGWAFDDGNDVWMGRTINETSRLGYETFKVIEGWSNPKSKLQINRQVIVGRGNRSGYSGIFSVEGKSCINRCFYVELIRGRKEETEVLWTSNSIVVFCGTSGTYGTGSWPDGANLNLMPI

SEQ ID NO: 22210 - protein, 469 aa, Artificial Sequence; identical to SEQ ID NO: 19518
  derived and/or modified protein sequence (wt) from neuraminidase__InfluenzaA__AFJ69994

SEQ ID NO: 22211 - protein, 470 aa, Artificial Sequence
  derived and/or modified protein sequence (wt) from neuraminidase__InfluenzaA__AFJ74389
MNPNQKIITIGSISIAIGIISLILQIGNIISIWASHSIQTGSQNHTGVCNQRIITYENSTWVNQTYVNINNTNVVAGKDKTSMTLAGNSSLCPIRGWAIYTKDNSIRIGSKGDVFVIREPFISCSHLECRTFFLTQGALLNDKHSNGTVKDRSPYRALMSCPLGEAPSPYNSRFESVAWSASACHDGLGWLTIGISGPDNGAVAVLKYNGIITETIKSWKKRILRTQESECVCMNGSCFTIMTDGPSNGAASYRIFKIEKGRVTKSIELDAPNYHYEECSCYPDTGTVMCVCRDNWHGSNRPWVSFNQNLDYQIGYICSGVFGDNPRPKDGEGSCNPVTVDGADGVKGFSYRYGNGVWIGRTKSNRLRKGFEMIWDPNGWTDTDSDFSMKQDIVAMTDWSGYSGSFVQHPELTGLDCMRPCFWVELVRGLPRENTTIWTSGSSISFCGVNSDTANWSWPDGAELPFTIDK

SEQ ID NO: 22212 - protein, 469 aa, Artificial Sequence
  derived and/or modified protein sequence (wt) from neuraminidase__InfluenzaA__AFJ74399
MNPNQKIITIGSVSLTIATICFLMQIAILVITLTLHFKQYECNSPPNNQVMLCEPTIIERNITEIVYLTNTTIEKEICPKLAEYRNWSKPQCKITGFAPFSKDNSIRLSAGGDIWVTREPYVSCDPGKCYQFALGQGTTLNNRHSNDTVHDRTPYRTLLMNELGVPFHLGTKQVCIAWSSSSCHDGKAWLHVCVTGHNENATASFIYDGRLVDSIGSWSKNILRTQESECVCINGTCTVVMTDGSASGRADTKILFIEEGKIVHISPLSGSAQHVEECSCYPRYPGVRCVCRDNWKGSNRPIVDINVKDFSIVSSYVCSGLVGDTPRKNDSSSSSHCLNPNNEEGGHGVKGWAFDDGNDVWMGRTISEKLRSGYETFKVIGGWSKPNSKLQINRQVIVDRGNRSGYSGIFSVEGKSCINRCFYVELIRGRKQETEVWWTSNSIVVFCGTSGTYGTGSWPDGADINLMPI

SEQ ID NO: 22213 - protein, 469 aa, Artificial Sequence
  derived and/or modified protein sequence (wt) from neuraminidase__InfluenzaA__AFJ74410
MNPNQKIITIGSVSLTIATICFLMQIAILVMTVTLHFKQYECNSPPNNQVMLCEPTIIERNITEIVYLTNTTIEKEICPKLAEYRNWSKPQCKITGFAPFSKDNSIRLSAGGDIWVTREPYVSCDPGKCYQFALGQGTTLNNRHSNDTVHDRTPYRTLLMNELGVPFHLGTKQVCIAWSSSSCHDGKAWLHVCVTGHNENATASFIYDGRLVDSIGSWSKNILRTQESECVCINGTCTVVMTDGSASGRADTKILFIEEGKIVHISPLSGSAQHVEECSCYPRYPGVRCVCRDNWKGSNRPIVDINVKDYSIISSYVCSGLVGDTPRKNDSSSSSHCLNPNNEEGGHGVKGWAFDDGNDVWMGRTISEKLRSGYETFKVIGGWSKPNSKLQINRQVIVDRGNRSGYSGIFSVEGKSCINRCFYVELIRGRKQETEVWWTSNSIVVFCGTSGTYGTGSWPDGADINLMPI

SEQ ID NO: 22214 - protein, 469 aa, Artificial Sequence; identical to SEQ ID NO: 14315
  derived and/or modified protein sequence (wt) from neuraminidase__InfluenzaA__AFJ74451

SEQ ID NO: 22215 - protein, 470 aa, Artificial Sequence
  derived and/or modified protein sequence (wt) from neuraminidase__InfluenzaA__AFJ74462
MNPNQKIITIGSISVAIGIISLILQIGNIISIWASHSIQTGSQNYTGICNQRIITYENSTWVNQTYVNINNTNVVAGKDKTSMTLAGNSSLCPIRGWAIYTKDNSIRIGSKGDVFVIREPFISCSHLECRTFFLTQGALLNDKHSNGTVKDRSPYRALMSCPLGEAPSPYNSRFESVAWSASACHDGLGWLTIGISGPDNGAVAVLKYNGIITETIKSWKKQILRTQESECVCVNGSCFTIMTDGPSNRAASYRIFKIEKGRVTKSIELDAPNYHYEECSCYPDTGTVMCVCRDNWHGSNRPWVSFNQNLDYQIGYICSGVFGDNPRPKDGEGSCNPVTVDGADGVKGFSYRYGNGVWIGRTKSNRLRKGFEMIWDPNGWTDTDSDFSMKQDVVAMTDWSGYSGSFVQHPELTGLDCMRPCFWVELVRGLPRENTTIWTSGSSISFCGVNSETANWSWPDGAELPFTIDK

SEQ ID NO: 22216 - protein, 469 aa, Artificial Sequence
  derived and/or modified protein sequence (wt) from neuraminidase__InfluenzaA__AFJ74517
MNPNQKIITIGSVSLTIATICFLMQIAILVTTVTLHFKQYECNSPPNNQVMLCEPTIIERNITEIVYMTNTTIEKEICPKLAEYRNWSKPQCKITGFAPFSKDNSIRLSAGGDIWVTREPYVSCDPDKCYQFALGQGTTLNNRHSNDTVHDRTPYRTLLMNELGVPFHLGTKQVCIAWSSSSCHDGKAWLHVCVTGHDENATASFIYDGRLVDSIGSWSKKILRTQESECVCINGTCTVVMTDGSASGRADTKILFIEEGKIVHISQLSGSAQHVEECSCYPRYPGVRCVCRDNWKGSNRPIVDINVKDYSIVSSYVCSGLVGDTPRKNDSSSSSHCLNPNNEEGGHGVKGWAFDDGNDVWMGRTISEKLRSGYETFKVIEGWSKPNSKLQINRQVIVDRGNRSGYSGIFSVEGKSCINRCFYVELIRGRKQENEVWWTSNSIVVFCGTSGTYGTGSWPDGADINLMPI

SEQ ID NO: 22217 - protein, 469 aa, Artificial Sequence
  derived and/or modified protein sequence (wt) from neuraminidase__InfluenzaA__AFJ74564
MNPNQKIITIGSVSLTIATICFLMQIAILVTTVTLHFKQYECNSPPNNQVMLCEPTIIERNITEIVYLTNTTTEKEICPKLAEYRNWSKPQCNITGFAPFSKDNSIRLSAGGDIWVTREPYVSCDPDKCYQFALGQGTTLNNGHSNDTVHDRTPYRTLLMNELGVPFHLGTRQVCIAWSSSSCHDGKAWLHVCVTGDDENATASFIYNGRLVDSIGSWSKKILRTQESECVCINGTCTVVMTDGSASGKADTKILFIEEGKIVHISTLSGSAQHVEECSCYPRYPGVRCVCRDNWKGSNRPIVDINVKDYSIVSSYVCSGLVGDTPRKNDSFSSSHCLDPNNEEGGHGVKGWAFDDGNDVWMGRTISETLRSGYETFKVIEGWSKPNSKLQINRQVIVERGNRSGYSGIFSVEGKSCINRCFYVELIRGRKEETEVWWTSNSIVVFCGTSGTYGTGSWPDGADINLMPI

SEQ ID NO: 22218 - protein, 470 aa, Artificial Sequence
  derived and/or modified protein sequence (wt) from neuraminidase__InfluenzaA__AFJ74639
MNPNQKIITIGSISIAIGIISLMLQIGNIISIWASHSIQTGSQNHTGICNQRIITYENNTWVNHTYVNINNTNVVAGKDKTSVTLAGNSSLCSISGWAIYTKDNSIRIGSKGDVFVIREPFISCSHLECRTFFLTQGALLNDKHSNGTVKDRSPYRALMSCPLGEAPSPYNSKFESVAWSASACHDGMGWLTIGISGPDNGAVAVLKYNGIITETIKSWKKRILRTQESECVCMNGSCFTIMTDGPSNGAASYKIFKIEKGKVTKSIELNAPSFHYEECSCYPDTGTVMCVCRDNWHGSNRPWVSFNQNLDYQIGYICSGVFGDNPRPKDGEGSCNPVTVDGADGVKGFSYKYGNGVWIGRTKSNRLRKGFEMIWDPNGWTNTDSDFSVKQDVVAITDWSGYSGSFVQHPELTGLDCIRPCFWVELVRGLPRENTTIWTSGSSISFCGVNSDTANWSWPDGAELPFTIDK

SEQ ID NO: 22219 - protein, 469 aa, Artificial Sequence
  derived and/or modified protein sequence (wt) from neuraminidase__InfluenzaA__AFJ74640
MNPNQKIITIGSVSLTISTICFFMQIAILITTVTLHFKQYEFNSPPNNQVMLCEPTIIERNITEIVYLTNTTIEKEICPKLAGYRNWSKPQCNITGFAPFSKDNSIRLSAGGDIWVTREPYVSCDPDKCYQFALGQGTTLNNVHSNDTVHDRTPYRTLLMNELGVPFHLGTKQVCIAWSSSSCHDGKAWLHVCVTGDDENATASFIYNGRLVDSIVSWSKKILRTQESECVCINGTCTVVMTDGSASGKADTKILFIEEGKIVHTSTLSGSAQHVEECSCYPRYPGVRCVCRDNWKGSNRPIVDINIKDYSIVSSYVCSGLVGDTPRKNDSSSSSHCLDPNNEEGGHGVKGWAFDDGNDVWMGRTISEKLRSGYETFKVIEGWSNPNSKLQINRQVIVDKGNRSGYSGIFSVEGKSCINRCFYVELIRGRKQETEVLWTSNSIVVFCGTSGTYGTGSWPDGADINLMPI

SEQ ID NO: 22220 - protein, 470 aa, Artificial Sequence; identical to SEQ ID NO: 22218
  derived and/or modified protein sequence (wt) from neuraminidase__InfluenzaA__AFJ74659

SEQ ID NO: 22221 - protein, 470 aa, Artificial Sequence
  derived and/or modified protein sequence (wt) from neuraminidase__InfluenzaA__AFJ74679
MNPNQKIITIGSISIAIGIISLMLQIGNIISIWASHSIQTGSQNHTGICNQRIITYENNTWVNHTYVNINNTNVVAGKDKTSVTLAGNSSLCSISGWAIYTKDNSIRIGSKGDVFVIREPFISCSHLECRTFFLTQGALLNDKHSNGTVKDRSPYRALMSCPLGEAPSPYNSKFESVAWSASACHDGMGWLTIGISGPDNGAVAVLKYNGIITETIKSWKKRILRTQESECVCMNGSCFTIMTDGPSNGAASYKIFKIEKGKVTKSIELNAPSFHYEECSCYPDTGTVMCVCRDNWHGSNRPWVSFNQNLDYQIGYICSGVFGDNPRPKDGEGSCNPVTVDGADGVKGFSYKYDNGVWIGRTKSNRLRKGFEMIWDPNGWTNTDSDFSVKQDVVAITDWSGYSGSFVQHPELTGLDCIRPCFWVELVRGLPRENTTIWTSGSSISFCGVNSDTANWSWPDGAELPFTIDK

SEQ ID NO: 22222 - protein, 469 aa, Artificial Sequence
  derived and/or modified protein sequence (wt) from neuraminidase__InfluenzaA__AFJ74680
MNPNQKIITIGSVSLTISTICFFMQIAILITTVTLHFKQYEFNSPPNNQVILCEPTIIERNITEIVYLTNTTIEKEICPKLAEYRNWSKPQCNITGFAPFSKDNSIRLSAGGDIWVTREPYVSCDPDKCYQFALGQGTTLNNVHSNDTVHDRTPYRTLLMNELGVPFHLGTKQVCIAWSSSSCHDGKAWLHVCVTGDDENATASFIYNGRLVDSIVSWSKKILRTQESECVCINGTCTVVMTDGSASGKADTKILFIKEGKIVHTSTLSGSAQHVEECSCYPRYPGVRCVCRDNWKGSNRPIVDINIKDYSIVSSYVCSGLVGDTPRKNDSSSSSHCLDPNNEEGGHGVKGWAFDDGNDVWMGRTISEKLRSGYETFKVIEGWSNPNSKLQINRQVIVDRGNRSGYSGIFSVEGKSCINRCFYVELIRGRKQETEVLWTSNSIVVFCGTSGTYGTGSWPDGADINLMPI

SEQ ID NO: 22223 - protein, 469 aa, Artificial Sequence
  derived and/or modified protein sequence (wt) from neuraminidase__InfluenzaA__AFJ74701
MNPNQKIITIGSVSLTIATICFLMQIAILVTTVTLHFNQYECNSPPNNQVMLCEPTIIERNITEIVYLTNTTIEKEICPKLAEYRIWSKPQCNITGFAPFSKDNSIRLSAGGDIWVTREPYVSCDPDKCYQFALGQGTTLNNGHSNDTVHDRTPYRTLLMNELGVPFHLGTRQVCMAWSSSSCHDGKAWLHVCVTGDDENATASFIYNGRLVDSIGSWSKKILRTQESECVCINGTCTVVMTDGSASGKADTKILFIEEGKIVHISTLSGSAQHVEECSCYPRYPGVRCVCRDNWKGSNRPIVDINVKDYSIVSSYVCSGLVGDTPRKNDSFSSSHCLDPNNEEGGHGVKGWAFDDGNDVWMGRTISEKLRSGYETFKVIEGWSKPNSKLQVNRQVIVERGNRSGYSGIFSVEGKSCINRCFYVELIRGRKEETEVWWTSNSIVVFCGTSGTYGTGSWPDGADINLMPI

SEQ ID NO: 22224 - protein, 469 aa, Artificial Sequence
  derived and/or modified protein sequence (wt) from neuraminidase__InfluenzaA__AFJ74731
MNPNQKIITIGSVSLTISTICFFMQIAILITTVTLHFKQYEFNSPPNNQVMLCEPTIIERNITEIVYLTNTTIEKEICPKLAEYRNWSKPQCNITGFAPFSKDNSIRLSAGGDIWVTREPYVSCDPDKCYQFALGQGTTLNNVHSNDTVHDRTPYRTLLMNELGVPFHLGTKQVCIAWSSSSCHDGKAWLHVCVTGDDENATASFIYNGRLVDSIVSWSKKILRTQESECVCINGTCTVVMTDGSASGKADTKILFIEEGKIVHTSTLSGSAQHVEECSCYPRYPGVRCVCRDNWKGSNRPIVDINIKDYSIVSSYVCSGLVGDTPRKTDSSSSSHCLDPNNEEGGHGVKGWAFDDGNDVWMGRTISEKLRSGYETFKVIEGWSNPNSKLQINRQVIVDRGNRSGYSGIFSVEGKSCINRCFYVELIRGRNQETEVLWTSNSIVVFCGTSGTYGTGSWPDGAEINLMPI

SEQ ID NO: 22225 - protein, 470 aa, Artificial Sequence; identical to SEQ ID NO: 22218
  derived and/or modified protein sequence (wt) from neuraminidase__InfluenzaA__AFJ74766

SEQ ID NO: 22226 - protein, 469 aa, Artificial Sequence
  derived and/or modified protein sequence (wt) from neuraminidase__InfluenzaA__AFJ74767
MNPNQKIITIGSVSLTISTICFFMQIAILITTVTLHFKQYEFNSPPNNQVMLCEPTIIERNITEIVYLTNTTIEKEICPKLAEYRNWSKPQCNITGFAPFSKDNSIRLSAGGDIWVTREPYVSCDPDKCYQFALGQGTTLNNVHSNDTVHDRTPYRTLLMNELGVPFHLGTKQVCIAWSSSSCHDGKAWLHVCVTGDDENATASFIYNGRLVDSIVSWSKKILRTQESECVCINGTCTVVMTDGSASGKADTKILFIEEGKIVHTSTLSGSAQHVEECSCYPRYPGVRCVCRDNWKGSNRPIVDINIKDYSIVSSYVCSGLVGDTPRKNDSSSSSHCLDPNNEEGGHGVKGWAFDDGNDVWMGRTISEKLRSGYETFKVIEGWSNPNSKLQINRQVIVDRGNRSGYSGIFSVEGKSCINRCFYVELIRGRNQETEVLWTSNSIVVFCGTSGTYGTGSWPDGADINLMPI

SEQ ID NO: 22227 - protein, 469 aa, Artificial Sequence; identical to SEQ ID NO: 22226
  derived and/or modified protein sequence (wt) from neuraminidase__InfluenzaA__AFJ74783

SEQ ID NO: 22228 - protein, 469 aa, Artificial Sequence; identical to SEQ ID NO: 14145
  derived and/or modified protein sequence (wt) from neuraminidase__InfluenzaA__AFJ74807

SEQ ID NO: 22229 - protein, 469 aa, Artificial Sequence; identical to SEQ ID NO: 14145
  derived and/or modified protein sequence (wt) from neuraminidase__InfluenzaA__AFJ74822

SEQ ID NO: 22230 - protein, 469 aa, Artificial Sequence; identical to SEQ ID NO: 14714
  derived and/or modified protein sequence (wt) from neuraminidase__InfluenzaA__AFJ74834

SEQ ID NO: 22231 - protein, 469 aa, Artificial Sequence; identical to SEQ ID NO: 14145
  derived and/or modified protein sequence (wt) from neuraminidase__InfluenzaA__AFJ74845

SEQ ID NO: 22232 - protein, 470 aa, Artificial Sequence
  derived and/or modified protein sequence (wt) from neuraminidase__InfluenzaA__AFJ75039
MNPNQKIITIGSISIAIGIISLMLQIGNIISIWASHSIQTGSQNHTGICNQRIITYENSTWVNNTYVNINNTSVVAEKDKTSVTLAGNSSLCSISGWAIYTKDNSIRIGSKGDVFVIREPFISCSHLECRTFFLTQGALLNDKHSNGTVKDRSPYRALMSCPLGEAPSPYNSKFESVAWSASACHDGMGWLTIGISGPDNGAVAVLKYNGIITETIKSWKKRILRTQESECVCMNGSCFTIMTDGPSNGGASYKIFKIEKGKVTKSIELNAPNFHYEECSCYPDTGTVMCVCRDNWHGSNRPWVSFNQNLDYQIGYICSGVFGDNPRPKDGEGSCNPVTIDGADGVKGFSYKYGNGVWIGRTKSNRLRKGFEMIWDPNGWTNTDSDFSVKQDVVAITDWSGYSGSFVQHPELTGLDCIRPCFWVELVRGLPRENTTIWTSGSSISFCGVNSDTANWSWPDGAELPFTIDK

SEQ ID NO: 22233 - protein, 469 aa, Artificial Sequence
  derived and/or modified protein sequence (wt) from neuraminidase__InfluenzaA__AFJ75050
MNPNQKIITIGSVSLTISTICFFMQIAILITTVTLHFKQYEFNSPPNNQVMLCEPTIIERNITEIVYLTNTTIEKEICPKLAEYRNWSKPQCNITGFAPFSKDNSVRLSAGGDIWVTREPYVSCDPDKCYQFALGQGTTLNNVHSNDTVHDRTPYRTLLMNELGVPFHLGTKQVCIAWSSSSCHDGKAWLHVCVTGDDKNATASFIYNGRLVDSIVSWSKEILRTQESECVCINGTCTVVMTDGSASGKADTKILFIVEGKIVHTSALSGSAQHVEECSCYPRYPGVRCVCRDNWKGSNRPIVDINIKDYSIVSSYVCSGLVGDTPRKNDSSSSSHCLDPNNEEGGHGVKGWAFDDGNDVWMGRTISEKLRSGYETFKVIEGWSNPNSKLQINRQVIVDRGNRSGYSGIFSVEGKSCINRCFYVELIRGRKEETEVLWTSNSIVVFCGTSGTYGTGSWPDGADINLMPI

SEQ ID NO: 22234 - protein, 469 aa, Artificial Sequence
  derived and/or modified protein sequence (wt) from neuraminidase__InfluenzaA__AFJ75094
MNPNQKIITIGSVSLTISTICFFMQIAILITTVTLHFKQYEFNSPPNNQVMLCEPTIIEKNITEIVYLTNTTIEKEICPKLAEYRNWSKPQCDITGFAPFSKDNSIRLSAGGDIWVTREPYVSCDPDKCYQFALGQGTTLNNVHSNDTVRDRTPYRTLLMNELGVPFHLGTKQVCIAWSSSSCHDGKAWLHVCITGDDKNATASFIYNGRLVDSIVSWSKEILRTQESECVCINGTCTVVMTDGSASGKADTKILFIEEGKIVHTSTLSGSAQHVEECSCYPRYPGVRCVCRDNWKGSNRPIVDINIKDHSIVSSYVCSGLVGDTPRKNDSSSSSNCLDPNNEEGGHGVKGWAFDDGNDVWMGRTISEKSRLGYETFKVIEGWSNPNSKLQINRQVIVDRGNRSGYSGIFSVEGKSCINRCFYVELIRGRKEEIEVLWTSNSIVVFCGTSGTYGTGSWPDGADINIMPI

SEQ ID NO: 22235 - protein, 470 aa, Artificial Sequence
  derived and/or modified protein sequence (wt) from neuraminidase__InfluenzaA__AFJ75104
MNPNQKIITIGSISIAIGIISLMLQIGNIISIWASHSIQTGSQNHTGICNQRIITYENSTWVNHTYVNINNTNVVAGKDKTPVTLAGNSSLCSISGWAIHTKDNSIRIGSKGDVFVIREPFISCSHLECKTFFLTQGALLNDKHSNGTVKDRSPYRALMSCPLGEAPSPYNSKFESVAWSASACHDGIGWLTIGISGPDNGAVAVLKYNGIITGTIKSWKKQILRTQESECVCMNGSCFTIMTDGPSNGAASYKIFKIEKGKVTKSMELNAPNFHYEECSCYPDTGTVMCVCRDNWHGSNRPWVSFNQNLDYQIGYICSGVFGDNPRPEDGEGSCNPVTVDGANGVKGFSYKYGNGVWIGRTKSNRIRKGFEMIWDPNGWTNTDSDFSVKQDIVAITDWSGYSGSFVQHPELTGLDCIRPCFWVELVRGLPRENTTIWTSGSSISFCGVNSDIANWSWPDGAELPFTIDK

SEQ ID NO: 22236 - protein, 469 aa, Artificial Sequence; identical to SEQ ID NO: 15884
  derived and/or modified protein sequence (wt) from neuraminidase__InfluenzaA__AFJ75114

SEQ ID NO: 22237 - protein, 469 aa, Artificial Sequence; identical to SEQ ID NO: 15884
  derived and/or modified protein sequence (wt) from neuraminidase__InfluenzaA__AFJ75452

SEQ ID NO: 22238 - protein, 469 aa, Artificial Sequence; identical to SEQ ID NO: 15884
  derived and/or modified protein sequence (wt) from neuraminidase__InfluenzaA__AFJ75463

SEQ ID NO: 22239 - protein, 470 aa, Artificial Sequence; identical to SEQ ID NO: 22235
  derived and/or modified protein sequence (wt) from neuraminidase__InfluenzaA__AFJ75552

SEQ ID NO: 22240 - protein, 470 aa, Artificial Sequence
  derived and/or modified protein sequence (wt) from neuraminidase__InfluenzaA__AFJ75574
MNPNQKIITIGSISIAIGIISLMLQIGNIISIWASHSIQTGSQNHTGICNQRIITYENSTWVNHTYVNINNTNVVAGKDKTPVTLAGNSSLCSISGWAIHTKDNSIRIGSKGDVFVIREPFISCSHLECKTFFLTQGALLNDKHSNGTVKDRSPYRALMSCPLGEAPSPYNSKFESVAWSASACHDGIGWLTIGISGPDNGAVAVLKYNGIITGTIKSWKGQILRTQESECVCMNGSCFTIMTDGPSNGAASYKIFKIEKGKVTKSMELNAPNFHYEECSCYPDTGTVMCVCRDNWHGSNRPWVSFNQNLDYQIGYICSGVFGDNPRPEDGEGSCNPVTVDGANGVKGFSYKYGNGVWIGRTKSNRIRKGFEMIWDPNGWTNTDSDFSVKQDIVAITDWSGYSGSFVQHPELTGLDCIRPCFWVELVRGLPRENTTIWTSGSSISFCGVNSDIANWSWPDGAELPFTIDK

SEQ ID NO: 22241 - protein, 469 aa, Artificial Sequence; identical to SEQ ID NO: 15884
  derived and/or modified protein sequence (wt) from neuraminidase__InfluenzaA__AFJ75585

SEQ ID NO: 22242 - protein, 469 aa, Artificial Sequence
  derived and/or modified protein sequence (wt) from neuraminidase__InfluenzaA__AFJ75596
MNPNQKIITIGSVSLTISTICFFMQTAILITTVTLHFKQYEFNSPPNNQVMLCEPTIIERNITEIVYLTNTTIEKEICPKLAEYRNWSKPQCGITGFAPFSKDNSIRLSAGGDIWVTREPYVSCDPDKCYQFALGQGTTLNNVHSNNTVRDRTPYRTLLMNELGVPFHLGTKQVCIAWSSSSCHDGKAWLHVCITGDDKNATASFIYNGRLVDSIVSWSKEILRTQESECVCINGTCTVVMTDGSASGKADTKILFIEEGKIVHTSTLSGSAQHVEECSCYPRYPGVRCVCRDNWKGSNRPIVDINIKDHSIVSSYVCSGLVGDTPRKNDSSSSSHCLDPNNEEGGHGVKGWAFDDGNDVWMGRTISEKSRLGYETFKVIEGWSNPKSKLQINRQVIVDRGNRSGYSGIFSVEGKSCINRCFYVELIRGRKEETEVLWTSNSIVVFCGTSGTYGTGSWPDGADINLMPI

SEQ ID NO: 22243 - protein, 469 aa, Artificial Sequence
  derived and/or modified protein sequence (wt) from neuraminidase__InfluenzaA__AFJ75607
MNPTQKIITIGSVSLTISTICFFMQTAILITTVTLHFKQYEFNSPPNNQVMLCEPTIIERNITEIVYLTNTTIEKEICPKLAEYRNWSKPQCDITGFAPFSKDNSIRLSAGGDIWVTREPYVSCDPEKCYQFALGQGTTLNNVHSNNTVRDRTPYRTLLMNELGVPFHLGTKQVCIAWSSSSCHDGKAWLHVCITGDDKNATASFIYNGRLVDSIVSWSKEILRTQESECVCINGTCTVVMTDGSASGKADTKILFIEEGKIVHTSKLSGSAQHVEECSCYPRYPGVRCVCRDNWKGSNRPIVDINIKDHSIVSSYVCSGLVGDTPRKNDSSGSSHCLDPNNEEGGHGVKGWAFDDGNDVWMGRTISEKSRLGYETFKVIEGWSNPKSKLQINRQVIVDRGNRSGYSGIFSVEGKSCINRCFYVELIRGRKEETEVLWTSNSIVVFCGTSGTYGTGSWPDGADINLMPI

SEQ ID NO: 22244 - protein, 469 aa, Artificial Sequence
  derived and/or modified protein sequence (wt) from neuraminidase__InfluenzaA__AFJ75633
MNPNQKIITIGSVSLTISTICFFMQIAILITTVTLHFKQYEFNSPPNNQVMLCEPTIIERNITEIVYLTNTTIEKEICPKLAEYRNWSKPQCDITGFAPFSKDNSIRLSAGGDIWVTREPYVSCDPDKCYQFALGQGTTLNNVHSNDTVRDRTPYRTLLMNELGVPFHLGTKQVCIAWSSSSCHDGKAWLHVCITGDDKNATASFIYNGRLVDSVVSWSKDILRTQESECVCINGTCTVVMTDGSASGKADTKILFIEEGKIVHTSTLSGSAQHVEECSCYPRYPGVRCVCRDNWKGSNRPIVDINIKNHSIVSSYVCSGLVGDTPRKNDSSSSSHCLDPNNEEGGHGVKGWAFDDGNDVWMGRTISEKSRLGYETFKVIEGWSNPKSKLQINRQVIVDRGNRSGYSGIFSVEGKSCINRCFYVELIRGRKEETEVLWTSNSIVVFCGTSGTYGTGSWPDGADINLMPI

SEQ ID NO: 22245 - protein, 470 aa, Artificial Sequence; identical to SEQ ID NO: 17461
  derived and/or modified protein sequence (wt) from neuraminidase__InfluenzaA__AFJ75654

SEQ ID NO: 22246 - protein, 469 aa, Artificial Sequence; identical to SEQ ID NO: 15884
  derived and/or modified protein sequence (wt) from neuraminidase__InfluenzaA__AFJ75665

SEQ ID NO: 22247 - protein, 470 aa, Artificial Sequence
  derived and/or modified protein sequence (wt) from neuraminidase__InfluenzaA__AFJ75676
MNPNQKIITIGSISIAIGIISLMLQIGNIISIWASHSIQTGSQNHTGICNQRIITYENSTWVNHTYVNINNTNVVAGKDKTPVTLAGNSSLCSISGWAIHTKDNSIRIGSKGDVFVIREPFISCSHLECKTFFLTQGALLNDKHSNGTVKDRSPYRALMSCPLGEAPSPYNSKFESVAWSASACHDGIGWLTIGISGPDNGAVAVLKYNGIITGTIKSWKKQILRTQESECVCMNGSCFTIMTDGPSNGAASYKIFKIEKGKVTKSMELNAPNFHYEECSCYPDTGTVMCVCRDNWHGSNRPWVSFNQNLDYQIGYICSGVFGDNPRPKDGEGSCNPVTVDGANGVKGFSYKYGNGVWIGRTKSNRIRKGFEMIWDPNGWTNTDSDFSVKQDIVAITDWSGYSGSFVQHPELTGLDCIRPCFWVELVRGLPRENTTIWTSGSSISFCGVNSDIANWSWPDGAELPFTIDK

SEQ ID NO: 22248 - protein, 470 aa, Artificial Sequence; identical to SEQ ID NO: 17461
  derived and/or modified protein sequence (wt) from neuraminidase__InfluenzaA__AFJ75687

SEQ ID NO: 22249 - protein, 469 aa, Artificial Sequence; identical to SEQ ID NO: 16738
  derived and/or modified protein sequence (wt) from neuraminidase__InfluenzaA__AFJ76122

SEQ ID NO: 22250 - protein, 469 aa, Artificial Sequence; identical to SEQ ID NO: 21316
  derived and/or modified protein sequence (wt) from neuraminidase__InfluenzaA__AFJ76134

SEQ ID NO: 22251 - protein, 469 aa, Artificial Sequence; identical to SEQ ID NO: 16738
  derived and/or modified protein sequence (wt) from neuraminidase__InfluenzaA__AFJ76146

SEQ ID NO: 22252 - protein, 469 aa, Artificial Sequence; identical to SEQ ID NO: 16738
  derived and/or modified protein sequence (wt) from neuraminidase__InfluenzaA__AFJ76159

SEQ ID NO: 22253 - protein, 469 aa, Artificial Sequence; identical to SEQ ID NO: 16738
  derived and/or modified protein sequence (wt) from neuraminidase__InfluenzaA__AFJ76173

SEQ ID NO: 22254 - protein, 469 aa, Artificial Sequence; identical to SEQ ID NO: 16738
  derived and/or modified protein sequence (wt) from neuraminidase__InfluenzaA__AFJ76191

SEQ ID NO: 22255 - protein, 470 aa, Artificial Sequence
  derived and/or modified protein sequence (wt) from neuraminidase__InfluenzaA__AFJ76192
MNPNQKIITIGSISIAIGIISLMVQIGNIISIWASHSIQTGIQNNTGICNQRIITYENSTWVNHTYVNINNTNVVAGEDKTSVTLAGNSSLCSISGWAIYTKDNSIRIGSKGDVFVIREPFISCSHLECRTFFLTQGALLNDKHSNGTVKDRSPYRALMSCPLGEAPSPYNSKFESVAWSASACHDGMGWLTIGISGPDNGAVAVLKYNGIITGTIKSWKKQILRTQESECVCMNGSCFTIMTDGPSNKAASYKIFKIEKGKVTKSIELNAPNFYYEECSCYPDTGIVMCVCRDNWHGSNRPWVSFNQNLDYQIGYICSGVFGDNPRPEDGEGSCNPVTVDGANGVKGFSYKYGNGVWIGRTKSNRLRKGFEMIWDPNGWTNTDSDFSVKQDVVAITDWSGYSGSFVQHPELTGLDCIRPCFWVELVRGLPRENTTIWTSGSSISFCGVNSDTANWSWPDGAELPFTIDK

SEQ ID NO: 22256 - protein, 469 aa, Artificial Sequence; identical to SEQ ID NO: 16738
  derived and/or modified protein sequence (wt) from neuraminidase__InfluenzaA__AFJ76206

SEQ ID NO: 22257 - protein, 469 aa, Artificial Sequence
  derived and/or modified protein sequence (wt) from neuraminidase__InfluenzaA__AFJ76216
MNPNQKIITIGSVSLTIATICFLMQIAILVTTVTLHFKQHECNSPPNNQVMLCEPTIIKRNITEIVYLTNTTIEKEICPKLAEYRNWSKPQCNITGFAPFSKDNSIRLSAGGDIWVTREPYVSCDPDKCYQFALGQGTTLNNGHSNDTVHDRTPYRTLLMNELGVPFHLGTRQVCIAWSSSSCHDGKAWLHVCVTGDDKNATASFIYNGRLVDSIGSWSKKILRTQESECVCINGTCTVVMTDGSASGKADTKILFIEEGKIVHISTLSGSAQHVEECSCYPRYPGVRCVCRDNWKGSNRPIVDINVKDYSIVSSYVCSGLVGDTPRKNDSFSSSHCLDPNNEEGGHGVKGWAFDDGNDVWMGRTISEKLRSGYETFKVIEGWSKPNSKLQINRQVIVERGNRSGYSGIFSVEGKSCINRCFYVELIRGRKEETEVWWTSNSIVVFCGTSGTYGTGSWPDGADINLMPI

SEQ ID NO: 22258 - protein, 469 aa, Artificial Sequence
  derived and/or modified protein sequence (wt) from neuraminidase__InfluenzaA__AFJ77411
MNPNQKIITIGSVSLTIATICFLMQIVILVTTVTLHFKQYECNSPPNNQVMLCEPTIIERNITEIVYLTNTTIEKEICPKLAEYRNWSKPQCKITGFAPFSKDNSIRLSAGGDIWVTREPYVSCDPGKCYQFALGQGTTLNNRHSNDTVHDRTPYRTLLMNELGVPFHLGTKQVCIAWSSSSCHDGKAWLHVCVTGHDENATASFIYDGRLVDSIGSWSKNILRTQESECVCINGTCTVVMTDGSASERADTKILFIEEGKIVHISPLSGSAQHVEECSCYPRYPGVRCVCRDNWKGSNRPIVDINVKDYSIVSSYVCSGLVGDTPRKNDSSSSSYCLNPNNEEGGHGVKGWAFDDGNDVWMGRTISEKLRSGYETFKVIGGWSKPNSKLQINRQVIVDRGNRSGYSGIFSVEGKSCVNRCFYVELIRGRKQETEVWWTSNSIVVFCGTSGTYGTGSWPDGADINLMPI

SEQ ID NO: 22259 - protein, 469 aa, Artificial Sequence
  derived and/or modified protein sequence (wt) from neuraminidase__InfluenzaA__AFJ77422
MNPNQKIITIGSVSLTIATICFLMQIAILVITVTLHFKQYECNSPPNNQVMLCEPTIIERNITEIVYLTNTTIEKEICPKLAEYRNWSKPQCKITGFAPFSKDNSIRLSAGGDIWVTREPYVSCDPDKCYQFALGQGTTLNNRHSNDTVHDRTPYRTLLMNELGVPFHLGTKQVCIAWSSSSCHDGKAWLHVCVTGHDENATASFIYDGRLVDSIGSWSKKILRTQESECVCINGTCTVVMTDGSASGRADTKILFIEEGKIVHISPLSGSAQHVEECSCYPRYSGVRCVCRDNWKGSNRPIVDINVKDYSIVSSFVCSGLVGDTPRKNDSSSSSHCLNPNNEEGGHGVKGWAFDDGNDVWMGRTISEKLRSGYETFKVIGGWSKPNSKLQINRQVIVDRGNRSGYSGIFSVEGKSCINRCFYVELIRGRKQETEVWWTSNSIVVFCGTSGTYGTGSWPDGADINLMPI

SEQ ID NO: 22260 - protein, 469 aa, Artificial Sequence
  derived and/or modified protein sequence (wt) from neuraminidase__InfluenzaA__AFJ77433
MNPNQKIITIGSVSLTIATICFLMQIVILVTTVTLHFKQYECNSPPNNQVMLCEPTIIERNITEIVYLTNTTIEKEICPKLAEYRNWSKPQCKITGFAPFSKDNSIRLSAGGDIWVTREPYVSCDPGKCYQFALGQGTTLNNRHSNDTVHDRTPYRTLLMNELGVPFHLGTKQVCIAWSSSSCHDGKAWLHVCVTGHDENATASFIYDGRLVDSIGSWSKNILRTQESECVCINGTCTVVMTDGSASERADTKILFIEEGKIVHISPLSGSAQHVEECSCYPRYPGVRCVCRDNWKGSNRPIVDINVKDYSIVSSYVCSGLVGDTPRKTDSSSSSDCLNPNNEEGGHGVKGWAFDDGNDVWMGRTISEKLRSGYETFKVIGGWSKPNSKLQINRQVIVDRGNRSGYSGIFSVEGKSCVNRCFYVELIRGRKQETEVWWTSNSIVVFCGTSGTYGTGSWPDGADINLMPI

SEQ ID NO: 22261 - protein, 469 aa, Artificial Sequence
  derived and/or modified protein sequence (wt) from neuraminidase__InfluenzaA__AFJ77443
MNPNQKIITIGSVSLTIATICFLMQIAILVITLTLHFKQYECNSPPNNQVMLCEPTIIERNITEIVYLTNTTIEKEICPKLAEYRNWSKPQCKITGFAPFSKDNSIRLSAGGDIWVTREPYVSCDPGKCYQFALGQGTTLNNRHSNDTVHDRTPYRTLLMNELGVPFHLGTKQVCIAWSSSSCHDGKAWLHVCVTGHNENATASFIYDGRLVDSIGSWSKNILRTQESECVCINGTCTVVMTDGSASGRADTKILFIEEGKIVHISPLSGSAQHVEECSCYPRYPGVRCVCRDNWKGSNRPIVDINVKDFSIVSSYVCSGLVGDTPRKNDSSSSSHCLNPNNEEGGNGVKGWAFDDGNDVWMGRTISEKLRSGYETFKVIGGWSKPNSKLQINRQVIVDRGNRSGYSGIFSVEGKSCINRCFYVELIRGRKQETEVWWTSNSIVVFCGTSGTYGTGSWPDGADINLMPI

SEQ ID NO: 22262 - protein, 469 aa, Artificial Sequence
  derived and/or modified protein sequence (wt) from neuraminidase__InfluenzaA__AFJ77465
MNPNQKIITIGSVSLTIATICFLMQIAILVTTVTLHFKQYECNPPPNNQVMLCEPTIIERNITEIVYLTNTTIEKEICPKLAEYRNWSKPQCKITGFAPFSKDNSIRLSAGGDIWVTREPYVSCDPDKCYQFALGQGTTLNNRHSNDTVHDRTPYRTLLMNELGVPFHLGTKQVCIAWSSSSCHDGKAWLHVCVTGHDENATASFIYDGRLVDSIGSWSKKILRTQESECVCINGTCTVVMTDGSASGRADTKILFIEEGKIVHISPLSGSAQHVEECSCYPRYPGVRCVCRDNWKGSNRPIVDINVKNYSIVSSYVCSGLVGDTPRKNDSSSSSHCLNPNNEEGGHGVKGWAFDDGNDVWMGRTISEKLRSGYETFKVIEGWSKPNSKLQINRQVIVDRGNRSGYSGIFSVEGKSCINRCFYVELIRGRKQETEVWWTSNSIVVFCGTSGTYGTGSWPDGADINLMPI

SEQ ID NO: 22263 - protein, 469 aa, Artificial Sequence
  derived and/or modified protein sequence (wt) from neuraminidase__InfluenzaA__AFJ77476
MNPNQKIITIGSVSLTIATICFLMQIAILVTTVTLHFKQYECNSLPNNQVMLCEPTIIERNITEIVYLTNTTIEKEICPKLAEYRNWSKPQCKITGFAPFSKDNSIRLSAGGDIWVTREPYVSCDPDKCYQFALGQGTTLNNRHSNDTVHDRTPYRTLLMNELGVPFHLGTKQVCIAWSSSSCHDGKAWLHVCVTGHDENATASFIYGGRLVDSIGSWSKKILRTQESECVCINGTCTVVMTDGSASGRADTKILFIEEGKIIHISQLSGSAQHVEECSCYPRYPGVRCVCRDNWKGSNRPIVDINVKDYSIVSSYVCSGLVGDTPRKNDSSSSSHCLDPNNEEGGHGVKGWAFDDGNDVWMGRTISEKFRSGYETFKVIEGWSKPNSKLQINRQIIVDRDNRSGYSGIFSVEGKSCINRCFYVELIRGRKQETEVWWTSNSIVVFCGTSGTYGTGSWPDGADINLMPI

SEQ ID NO: 22264 - protein, 469 aa, Artificial Sequence; identical to SEQ ID NO: 14315
  derived and/or modified protein sequence (wt) from neuraminidase__InfluenzaA__AFJ77487

SEQ ID NO: 22265 - protein, 469 aa, Artificial Sequence
  derived and/or modified protein sequence (wt) from neuraminidase__InfluenzaA__AFJ77498
MNPNQKIITIGSVSLTIATICFLMQIAILVTTVTLHFKQYECNSPPNNQVMLCEPTIIERNITEIVYLTNTTIEKEICPKLAEYRNWSKPQCKITGFAPFSKDNSIRLSAGGDIWVTREPYVSCDPDKCYQFALGQGTTLNNRHSNDTVHDRTPYRTLLMNELGVPFHLGTKQVCIAWSSSSCHDGKAWLHVCVTGHDENATASFIYDGRLVDSIGSWSKKILRTQESECVCINGTCTVVMTDGSASGRADTKILFIEEGKIVHTSKLSGSAQHVEECSCYPRYPGVRCVCRDNWKGSNRPIVDINVKDYSIISSYVCSGLVGDTPRKNDSSSSSHCLDPNNEEGGHGVKGWAFDDGNDVWMGRTISEKSRSGYETFKVIEGWSKPNSKLQINRQVIVERGNMSGYSGIFSVEGKSCINRCFYVELIRGRKQETEVWWTSNSIVVFCGTSGTYGTGSWPDGADINLMPI

SEQ ID NO: 22266 - protein, 469 aa, Artificial Sequence; identical to SEQ ID NO: 14315
  derived and/or modified protein sequence (wt) from neuraminidase__InfluenzaA__AFJ77509

SEQ ID NO: 22267 - protein, 469 aa, Artificial Sequence
  derived and/or modified protein sequence (wt) from neuraminidase__InfluenzaA__AFJ77520
MNPNQKIITIGSVSLTIATICFLMQIAILVTTVTLHFKQYECNSPPNNQVMLCEPTIIERNITEIVYLTNTTIEKEICPKLAEYRNWSKPQCNITGFAPFSKDNSIRLSAGGDIWVTREPYVSCDPDKCYQFALGQGTTLNNGHSNDTVHDRTPYRTLLMNELGVPFHLGTKQVCIAWSSSSCHDGKAWLHVCVTGDDENATASFIYNGRLVDSIGSWSKKILRTQESECVCINGTCTVVMTDGSASGKADTKILFIEEGKIVHTSSLSGSAQHVEECSCYPRYPGVRCVCRDNWKGSNRPIVDINVKDYSIVSSYVCSGLVGDTPRKNDSSSSSHCLDPNNEEGGHGVKGWAFDDGNDVWMGRTISEKLRSGYETFKVIEGWSKPNSKLQINRQVIVDRGNRSGYSGIFSVEGKSCINRCFYVELIRGRKQEIEVLWTSNSIVVFCGTSGTYGTGSWPDGADINLMPI

SEQ ID NO: 22268 - protein, 469 aa, Artificial Sequence
  derived and/or modified protein sequence (wt) from neuraminidase__InfluenzaA__AFJ77531
MNPNQKIITIGSVSLTITTICFLMQIAILVITVTLHFKQCECNSPPNNQVMLCEPTIIERNITEIVYLTNTTIEKEICPKLAEYRNWSKPQCKVTGFAPFSKDNSIRLSAGGDIWVTREPYVSCDPGKCYQFALGQGTTLNNRHSNDTVHDRTPYRTLLMNELGVPFHLGTKQVCIAWSSSSCHDGKAWLHVCVTGHNENATASFIYDGRLVDSIGSWSKNILRTQESECVCINGTCTVVMTDGSASGRADTKILFIEEGKIVHISPLSGSAQHVEECSCYPRYPGVRCVCRDNWKGSNRPIVDINVKDYSIVSSYVCSGLVGDTPRKNDSSSSSYCLDPNNEEGGHGVKGWAFDDGNDVWMGRTISEKLRSGYETFKVIGGWSKPNSKLQINRQVIVDRGNRSGYSGIFSVEGKSCINRCFYVELIRGRKQETEVWWTSNSIVVFCGTSGTYGTGSWPDGADINLMPI

SEQ ID NO: 22269 - protein, 469 aa, Artificial Sequence
  derived and/or modified protein sequence (wt) from neuraminidase__InfluenzaA__AFJ77542
MNPNQKIITIGSVSLTISTICFLMQIAILVTTVTLHFKQYECNSPPNNQVMLCEPTIIERNITEIVYLTNTTIEKEICPKLAEYRNWSKPQCNITGFAPFSKDNSIRLSAGGDIWVTREPYVSCDPDKCYQFALGQGTTLNNGHSNDTVHDRTPYRTLLMNELGVPFHLGTKQVCIAWSSSSCHDGKAWLHVCVTGDDENATASFIYNGRLVDSIGSWSKKILRTQESECVCINGTCTVVMTDGSASGKADTKILFIEEGKIVHTSTLSGSAQHVEECSCYPRYPGVRCVCRDNWKGSNRPIVDINIKDYSIVSSYVCSGLVGDTPRKNDSSSSSHCLDPNNEEGGHGVKGWAFDDGNDVWMGRTISEKLRSGYETFKVIEGWSKPNSKLQINRQVIVDRGNRSGYSGIFSVEGKSCINRCFYVELIRGRKQETEVLWTSNSIVVFCGTSGTYGTGSWPDGADINLMPI

SEQ ID NO: 22270 - protein, 469 aa, Artificial Sequence; identical to SEQ ID NO: 14253
  derived and/or modified protein sequence (wt) from neuraminidase__InfluenzaA__AFJ77553

SEQ ID NO: 22271 - protein, 469 aa, Artificial Sequence
  derived and/or modified protein sequence (wt) from neuraminidase__InfluenzaA__AFJ77564
MNPNQKIITIGSVSLTIATICFLMQIAILVTTVTLHFKQYECNSPPNNQVMLCEPTIIERNITEIVYLTNTTIEKEICPKLAEYRNWSKPQCKITGFAPFSKDNSIRLSAGGDIWVTREPYVSCDPDKCYQFALGQGTTLNNRHSNDTVHDRTPYRTLLMNELGVPFHLGTKQVCIAWSSSSCHDGKAWLHVCVTGHDENATASFIYDGRLVDSIGSWSKKILRTQESECVCINGTCTVVMTDGSASGRADTKILFIEEGKIVHISQLSGSAQHVEECSCYPRYPGVRCVCRDNWKGSNRPIVDINVKDYSIVSSYVCSGLVGDTPRKNDSSSSSHCLNPNNEEGGHGVKGWAFDDGNDVWMGRTISEKLRSGYETFKVIEGWSKPNSKLQINRQVIVDRGNRSGYSGIFSVEGKSCINRCFYVELIRGRKQENEVWWTSNSIVVFCGTSGTYGTGSWPDGADINLMPI

SEQ ID NO: 22272 - protein, 442 aa, Artificial Sequence
  derived and/or modified protein sequence (wt) from neuraminidase__InfluenzaA__AFJ77575
MNPNQKIITIGSVSLTIATICFLMQIAILVIERNITEIVYLTNTTIEKEICPKLAEYRNWSKPQCNITGFAPFSKDNSIRLSAGGDIWVTREPYVSCDPDKCYQFALGQGTTLNNGHSNDTVHDRTPYRTLLMNELGVPFHLGTKQVCIAWSSSSCHDGKAWLHVCVTGDDENATASFIYNGRLVDSIGSWSKKILRTQESECVCINGTCTVVMTDGSASGKADTKILFIEEGKIVHTSSLSGSAQHVEECSCYPRYPGVRCVCRDNWKGSNRPIVDINVKDYSIVSSYVCSGLVGDTPRKNDSSSSSHCLDPNNEEGGHGVKGWAFDDGNDVWMGRTISEKLRSGYETFKVIEGWSKPNSKLQINRQVIVDRGNRSGYSGIFSVEGKSCINRCFYVELIRGRKQETEVLWTSNSIVVFCGTSGTYGTGSWPDGADINLMPI

SEQ ID NO: 22273 - protein, 469 aa, Artificial Sequence
  derived and/or modified protein sequence (wt) from neuraminidase__InfluenzaA__AFJ77597
MNPNQKIITIGSVSLTIATICFLMQIAILVTTVTLHFKQYECNSPPNNQVMLCEPTIIERNITEIVYLTNTTIEKEICPKLAEYRNWSKPQCNITGFAPFSKDNSIRLSAGGDIWVTREPYVSCDPDKCYQFALGQGTTLNNGHSNDTVHDRTPYRTLLMNELGVPFHLGTKQVCIAWSSSSCHDGKAWLHVCVTGDDENATASFIYNGRLVDSIGSWSKKILRTQESECVCINGTCTVVMTDGSASGKADTKILFIEEGKIVHTRPLSGSAQHVEECSCYPRYPGVRCVCRDNWKGSNRPIVDINVKDYSIVSSYVCSGLVGDTPRKNDSSSSSHCLDPNNEEGGHGVKGWAFDDGNDVWMGRTISEKLRSGYETFKVIEGWSKPNSKLQINRQVIVDRGNRSGYSGIFSVEGKSCINRCFYVELIRGRKQETEVLWTSNSIVVFCGTSGTYGTGSWPDGADINLMPI

SEQ ID NO: 22274 - protein, 469 aa, Artificial Sequence
  derived and/or modified protein sequence (wt) from neuraminidase__InfluenzaA__AFJ77608
MNPNQKIITIGSVSLTIATICFLMQTAILVTTVTLHFKQYECNSPPNNQVMLCEPTIIERNMTEIVYLTNTTIEKEICPKLAEYRNWSKPQCNITGFAPFSKDNSIRLSAGGDLWVTREPYVSCDPDKCYQFALGQGTTLNNGHSNDTVHDRTPYRTLLMNELGVPFHLGTKQVCIAWSSSSCHDGKAWLHVCVTGDDENATASFIYNGRLVDSIGSWSKKILRTQESECVCINGTCTVVMTDGSASGKADTKILFIEEGKIVHTSSLSGSAQHVEECSCYPRYPGVRCVCRDNWKGSNRPIVDINVKDYSIVSSYVCSGLVGDTPRKNDSSSSSHCLDPNNEEGGHGVKGWAFDDGNDVWMGRTISEKLRSGYETFKVIEGWSKPNSKLQINRQVIVDRGNRSGYSGIFSVEGKSCINRCFYVELIRGRKQETEVLWTSNSIVVFCGTSGTYGTGSWPDGADINLMPI

SEQ ID NO: 22275 - protein, 469 aa, Artificial Sequence; identical to SEQ ID NO: 22273
  derived and/or modified protein sequence (wt) from neuraminidase__InfluenzaA__AFJ77619

SEQ ID NO: 22276 - protein, 469 aa, Artificial Sequence; identical to SEQ ID NO: 22273
  derived and/or modified protein sequence (wt) from neuraminidase__InfluenzaA__AFJ77630

SEQ ID NO: 22277 - protein, 469 aa, Artificial Sequence; identical to SEQ ID NO: 22269
  derived and/or modified protein sequence (wt) from neuraminidase__InfluenzaA__AFJ77641

SEQ ID NO: 22278 - protein, 469 aa, Artificial Sequence; identical to SEQ ID NO: 22269
  derived and/or modified protein sequence (wt) from neuraminidase__InfluenzaA__AFJ77652

SEQ ID NO: 22279 - protein, 469 aa, Artificial Sequence; identical to SEQ ID NO: 14040
  derived and/or modified protein sequence (wt) from neuraminidase__InfluenzaA__AFJ77663

SEQ ID NO: 22280 - protein, 469 aa, Artificial Sequence; identical to SEQ ID NO: 14040
  derived and/or modified protein sequence (wt) from neuraminidase__InfluenzaA__AFJ77674

SEQ ID NO: 22281 - protein, 469 aa, Artificial Sequence; identical to SEQ ID NO: 14040
  derived and/or modified protein sequence (wt) from neuraminidase__InfluenzaA__AFJ77685

SEQ ID NO: 22282 - protein, 469 aa, Artificial Sequence
  derived and/or modified protein sequence (wt) from neuraminidase__InfluenzaA__AFJ77696
MNPNQKIITIGSVSLTIATICFLMQIAILVTTVTLHFKQYECNSPPNNQVMLCEPTIIERNITEIVYLTNTTIEKEICPKLAEYRNWSKPQCNITGFAPFSKDNSIRLSAGGDIWVTREPYVSCDPDKCYQFALGQGTTLNNGHSNDTVHDRTPYRTLLMNELGVPFHLGTKQVCIAWSSSSCHDGKAWLHVCVTGDDENATASFIYNGRLVDSIGSWSKKILRTQESECVCINGTCTVVMTDGSASEKADTKILFIEEGKIVHTSLLSGSAQHVEECSCYPRYPGVRCVCRDNWKGSNRPIVDINVKDYSIVSSYVCSGLVGDTPRKNDSSSSSHCLDPNNEEGGHGVKGWAFDDGNDVWMGRTISEKLRSGYETFKVIEGWSKPNSKLQINRQVIVDRGNRSGYSGIFSVEGKSCINRCFYVELIRGRKQETEVLWTSNSIVVFCGTSGTYGTGSWPDGADINLMPI

SEQ ID NO: 22283 - protein, 469 aa, Artificial Sequence; identical to SEQ ID NO: 14040
  derived and/or modified protein sequence (wt) from neuraminidase__InfluenzaA__AFJ77707

SEQ ID NO: 22284 - protein, 469 aa, Artificial Sequence; identical to SEQ ID NO: 14061
  derived and/or modified protein sequence (wt) from neuraminidase__InfluenzaA__AFJ77718

SEQ ID NO: 22285 - protein, 469 aa, Artificial Sequence; identical to SEQ ID NO: 14061
  derived and/or modified protein sequence (wt) from neuraminidase__InfluenzaA__AFJ77729

SEQ ID NO: 22286 - protein, 469 aa, Artificial Sequence
  derived and/or modified protein sequence (wt) from neuraminidase__InfluenzaA__AFJ77740
MNPNQKIITIGSVSLTISTICFFMQIAILITTVTLHFKQYEFNSPPNNQVMLCEPTIIERNITEIVYLTNTTIEKEICPKLAEYRNWSKPQCNITGFAPFSKDNSIRLSAGGDIWVTREPYVSCDPDKCYQFALGQGTTLNNVHSNDTVHDRTPYRTLLMNELGVPFHLGTKQVCIAWSSSSCHDGKAWLHVCVTGDDENATASFIYNGRLVDSIVSWSKKILRTQESECVCINGTCIVVMTDGSASGKADTKILFIEEGKIVHTSTLSGSAQHVEECSCYPRYPGVRCVCRDNWKGSNRPIVDINIKDYSIVSSYVCSGLVGDTPRKNDSSSSSHCLDPNNEEGGHGVKGWAFDDGNDVWMGRTISEKLRSGYETFKVIEGWSNPNSKLQINRQVIVDRGNRSGYSGIFSVEGKSCINRCFYVELIRGRKQETEVLWTSNSIVVFCGTSGTYGTGSWPDGADINLMPI

SEQ ID NO: 22287 - protein, 469 aa, Artificial Sequence
  derived and/or modified protein sequence (wt) from neuraminidase__InfluenzaA__AFJ77751
MNPNQKIITIGSVSLTIATICFLMQIAILVTTVTLHFKQHECNSPPNNQVMLCEPTIIERNITEIVYLTNTTIEKEICPKLAEYRNWSKPQCNITGFAPFSKDNSIRLSAGGDIWVTREPYVSCDPDKCYQFALGQGTTLNNGHSNDTVRDRTPYRTLLMNELGVPFHLGTRQVCIAWSSSSCHDGKAWLHVCVTGDDKNATASFIYNGRLVDSIGSWSKKILRTQESECVCINGTCTVVMTDGSASGKADTKILFIEEGKIVHISTLSGSAQHVEECSCYPRYPGVRCVCRDNWKGSNRPIVDINVKDYSIFSSYVCSGLVGDTPRKNDSFSSSHCLDPNNEEGGHGVKGWAFDDGNDVWMGRTISEKLRSGYETFKVIEGWSKPNSKLQINRQVIVERGNRSGYSGIFSVEGKSCINRCFYVELIRGRKEETEVWWTSNSIVVFCGTSGTYGTGSWPDGADINLMPI

SEQ ID NO: 22288 - protein, 469 aa, Artificial Sequence; identical to SEQ ID NO: 14145
  derived and/or modified protein sequence (wt) from neuraminidase__InfluenzaA__AFJ77762

SEQ ID NO: 22289 - protein, 469 aa, Artificial Sequence; identical to SEQ ID NO: 14145
  derived and/or modified protein sequence (wt) from neuraminidase__InfluenzaA__AFJ77773

SEQ ID NO: 22290 - protein, 469 aa, Artificial Sequence; identical to SEQ ID NO: 14145
  derived and/or modified protein sequence (wt) from neuraminidase__InfluenzaA__AFJ77784

SEQ ID NO: 22291 - protein, 469 aa, Artificial Sequence; identical to SEQ ID NO: 14714
  derived and/or modified protein sequence (wt) from neuraminidase__InfluenzaA__AFJ77795

SEQ ID NO: 22292 - protein, 469 aa, Artificial Sequence; identical to SEQ ID NO: 14714
  derived and/or modified protein sequence (wt) from neuraminidase__InfluenzaA__AFJ77806

SEQ ID NO: 22293 - protein, 469 aa, Artificial Sequence; identical to SEQ ID NO: 14714
  derived and/or modified protein sequence (wt) from neuraminidase__InfluenzaA__AFJ77817

SEQ ID NO: 22294 - protein, 469 aa, Artificial Sequence; identical to SEQ ID NO: 14714
  derived and/or modified protein sequence (wt) from neuraminidase__InfluenzaA__AFJ77828

SEQ ID NO: 22295 - protein, 469 aa, Artificial Sequence
  derived and/or modified protein sequence (wt) from neuraminidase__InfluenzaA__AFJ77839
MNPNQKIITIGSVSLTISTICFFMQIAILITTVTLHFKQYEFNSPPNNQVMLCEPTIIERNITEIVYLTNTTIEKEICPKLAEYRNWSKPQCDITGFAPFSKDNSIRLSAGGDIWVTREPYVSCDPDKCYQFALGQGTTLNNVHSNDTVHDRTPYRTLLMNELGVPFHLGTKQVCIAWSSSSCHDGKAWLHVCVTGDDKNATASFIYNGRLVDSIVSWSKKILRTQESECVCINGTCTVVMTDGSASGKADTKILFIEEGKIIHTSTLSGSAQHVEECSCYPRYPGVRCVCRDNWKGSNRPIVDINIKDYSIVSSYVCSGLVGDTPRKNDSSSSSHCLDPNNEEGGHGVKGWAFDDGNDVWMGRTISEKLRSGYETFKVIEGWSNPNSKLQINRQVIVDRGNRSGYSGIFSVEGKSCINRCFYVELIRGRKEETEVLWTSNSIVVFCGTSGTYGTGSWPDGADINLMPI

SEQ ID NO: 22296 - protein, 469 aa, Artificial Sequence
  derived and/or modified protein sequence (wt) from neuraminidase__InfluenzaA__AFJ77850
MNPNQKIITIGSVSLTISTICFFMQIAILITTVTLHFKQYEFNSPPNNQVMLCEPTIIERNITEIVYLTNTTIEKEICPKLAKYRNWSKPQCDITGFAPFSKDNSIRLSAGGDIWVTREPYVSCDPDKCYQFALGQGTTLNNVHSNDTVHDRTPYRTLLMNELGVPFHLGTKQVCIAWSSSSCHDGKAWLHVCVTGDDKNATASFIYNGRLVDSIVSWSKKILRTQESECVCINGTCTVVMTDGSASGKADTKILFIEEGKIVHTSTLSGSAQHVEECSCYPRYPGVRCVCRDNWKGSNRPIVDINIKDYSIVSSYVCSGLVGDTPRKNDSSSSSHCLDPNNEEGGHGVKGWAFDDGNDVWMGRTISEKLRSGYETFKVIEGWSNPNSKLQINRQVIVDRGNRSGYSGIFSVEGKSCINRCFYVELIRGRKEETEVLWTSNSIVVFCGTSGTYGTGSWPDGADINLMPI

SEQ ID NO: 22297 - protein, 469 aa, Artificial Sequence; identical to SEQ ID NO: 14714
  derived and/or modified protein sequence (wt) from neuraminidase__InfluenzaA__AFJ77861

SEQ ID NO: 22298 - protein, 469 aa, Artificial Sequence; identical to SEQ ID NO: 14714
  derived and/or modified protein sequence (wt) from neuraminidase__InfluenzaA__AFJ77872

SEQ ID NO: 22299 - protein, 469 aa, Artificial Sequence; identical to SEQ ID NO: 15180
  derived and/or modified protein sequence (wt) from neuraminidase__InfluenzaA__AFJ77883

SEQ ID NO: 22300 - protein, 469 aa, Artificial Sequence; identical to SEQ ID NO: 14714
  derived and/or modified protein sequence (wt) from neuraminidase__InfluenzaA__AFJ77894

SEQ ID NO: 22301 - protein, 469 aa, Artificial Sequence; identical to SEQ ID NO: 14714
  derived and/or modified protein sequence (wt) from neuraminidase__InfluenzaA__AFJ77905

SEQ ID NO: 22302 - protein, 469 aa, Artificial Sequence
  derived and/or modified protein sequence (wt) from neuraminidase__InfluenzaA__AFJ77916
MNPNQKIITIGSVSLTISTICFFMQIAILITTVTLHFKQYEFNSPPNNQVMLCEPTIIERNITEIVYLTNTTIEKEICPKLAEYRNWSKPQCDITGFAPFSKDNSIRLSAGGDIWVTREPYVSCDPDKCYQFALGQGTTLNNVHSNDTVHDRTPYRTLLMNELGVPFHLGTKQVCIAWSSSSCHDGKAWLHVCVTGDDKNATASFIYNGRLVDSIVSWSKKILRTQESECVCINGTCTVVMTDGSASGKADTKILFIEEGKIVHTSTLSGSAQHVEECSCYPRYPGVRCVCRDNWKGSNRPIVDINIKDYSIVSSYVCSGLVGDTPRKNDSSSSSHCLDPNNEEGGHGVKGWAFDDGNDVWMGRTISEKLRSGYETFKVIEGWSNPNSKLQINRQVIVDRGNRSGYSGIFSVEGKSCINRCFYVELIRGRKEETEVLWTSNSIIVFCGTSGTYGTGSWPDGADINLMPI

SEQ ID NO: 22303 - protein, 469 aa, Artificial Sequence; identical to SEQ ID NO: 14736
  derived and/or modified protein sequence (wt) from neuraminidase__InfluenzaA__AFJ77927

SEQ ID NO: 22304 - protein, 469 aa, Artificial Sequence; identical to SEQ ID NO: 14736
  derived and/or modified protein sequence (wt) from neuraminidase__InfluenzaA__AFJ77938

SEQ ID NO: 22305 - protein, 469 aa, Artificial Sequence; identical to SEQ ID NO: 14714
  derived and/or modified protein sequence (wt) from neuraminidase__InfluenzaA__AFJ77949

SEQ ID NO: 22306 - protein, 469 aa, Artificial Sequence; identical to SEQ ID NO: 14714
  derived and/or modified protein sequence (wt) from neuraminidase__InfluenzaA__AFJ77960

SEQ ID NO: 22307 - protein, 469 aa, Artificial Sequence
  derived and/or modified protein sequence (wt) from neuraminidase__InfluenzaA__AFJ77971
MNPNQKIITIGSVSLTISTICFFMQIAILITTVTLHFKQYEFNSPPNNQVMLCEPTIIERNITEIVYLTNTTIEKEICPKLAEYRNWSKPQCNITGFAPFSKDNSIRLSAGGDIWVTREPYVSCDPDKCYQFALGQGTTLNNVHSNDTVHDRTPYRTLLMNELGVPFHLGTKQVCIAWSSSSCHDGKAWLHVCVTGDDKNATASFIYNGRLVDSIVSWSKEILRTQESECVCINGTCTVVMTDGSASGKADTKILFIEEGKIVHTSTLSGSAQHVEECSCYPRYPGVRCVCRDNWKGSNRPIVDINIKDYSIVSSYVCSGLVGDTPRKNDSSSSSHCLDPNNEEGGHGVKGWAFDDGNDVWMGRTISEKLRSGYETFKVIEGWSNPNSKLQINRQVIVDRGNRSGYSGIFSVEGKSCINRCFYVELIRGRKDETEVLWTSNSIVVFCGTSGTYGTGSWPDGADINLMPI

SEQ ID NO: 22308 - protein, 469 aa, Artificial Sequence
  derived and/or modified protein sequence (wt) from neuraminidase__InfluenzaA__AFJ77982
MNPNQKIITIGFVSLTISTICFFMQIAILITTVPLHFKQYEFNSPPNNQVMLCEPTIIERNITEIVYLTNTTIEKEICPKLAEYRNWSKPQCNITGFAPFSKDNSIRLSAGGDIWVTREPYVSCDPDKCYQFALGQGTTLNNVHSNDTVHDRTPYRTLLMNELGVPFHLGTKQVCIAWSSSSCHDGKAWLHVCVTGDDKNATASFIYNGRLVDSIVSWSKEILRTQESECVCINGTCTVVMTDGSASGKADTKILFIEEGKIVHTSTLSGSAQHVEECSCYPRYPGVRCVCRDNWKGSNRPIVDINIKDYSIVSSYVCSGIVGDTPRKNDSSSSSHCLDPNNEEGGHGVKGWAFDDGNDVWMGRTISEKLRSGYETFKVIEGWSNPNSKLQINRQVIVDRGNRSGYSGIFSVEGKSCINRCFYVELIRGRKEETEVLWTSNSIVVFCGTSGTYGTGSWPDGADINLMPI

SEQ ID NO: 22309 - protein, 469 aa, Artificial Sequence; identical to SEQ ID NO: 14712
  derived and/or modified protein sequence (wt) from neuraminidase__InfluenzaA__AFJ77993

SEQ ID NO: 22310 - protein, 469 aa, Artificial Sequence
  derived and/or modified protein sequence (wt) from neuraminidase__InfluenzaA__AFJ78004
MNPNQKIITIGSVSLTISTICFFMQIAILITTVTLHFKQYEFNSPPNNQVMLCEPTIIEKNITEIVYLTNTTIEKEICPKLAEYRNWSKPQCNITGFAPFSKDNSIRLSAGGDIWVTREPYVSCDPDKCYQFALGQGTTLNNVHSNDTVHDRTPYRTLLMNELGVPFHLGTKQVCIAWSSSSCHDGKAWLHVCVTGDDKNATASFIYNGRLVDSIVSWSKEILRTQESECVCINGTCTVVMTDGSASGKADTKILFIEEGKIVHTSTLSGSAQHVEECSCYPRYPGVRCVCRDNWKGSNRPIVDINIKDYSIVSSYVCSGLVGDTPRKNDSSSSSHCLDPNNEEGGHGVKGWAFDDGNDVWMGRTISEKLRSGYETFKVIEGWSNPNSKLQINRQVIVDRGNRSGYSGIFSVEGKSCINRCFYVELIRGRKEETEVLWTSNSIVVFCGTSGTYGTGSWPDGADINLMPI

SEQ ID NO: 22311 - protein, 469 aa, Artificial Sequence; identical to SEQ ID NO: 14712
  derived and/or modified protein sequence (wt) from neuraminidase__InfluenzaA__AFJ78015

SEQ ID NO: 22312 - protein, 469 aa, Artificial Sequence; identical to SEQ ID NO: 21569
  derived and/or modified protein sequence (wt) from neuraminidase__InfluenzaA__AFJ78026

SEQ ID NO: 22313 - protein, 469 aa, Artificial Sequence; identical to SEQ ID NO: 21569
  derived and/or modified protein sequence (wt) from neuraminidase__InfluenzaA__AFJ78037

SEQ ID NO: 22314 - protein, 469 aa, Artificial Sequence
  derived and/or modified protein sequence (wt) from neuraminidase__InfluenzaA__AFJ78048
MNPNQKIITIGSVSLTISTICFFMQIAILITTVTLHFKQYEFNSPPNNQVMLCEPTIIERNITEIVYLTNTTIEKEICPKLAEYRNWSKPQCNITGFAPFSKDNSIRLSAGGDIWVTREPYVSCDPDKCYQFALGQGTTLNNVHSNDTVHDRTPYRTLLMNELGVPFHLGTKQVCIAWSSSSCHDGKAWLHVCVTGDDKNATASFIYNGRLVDSIVSWSKEILRTQESECVCINGTCTVVMTDGNASGKADTKILFIEEGKIVHTSTLSGSAQHVEECSCYPRYPGVRCVCRDNWKGSNRPIVDINIKDYSIVSSYVCSGLVGDTPRKNDSSSSSHCLDPNNEEGGHGVKGWAFDDGNDVWMGRTISEKLRSGYETFKVIEGWSNPNSKLQINRQVIVDRGNRSGYSGIFSVEGKSCINRCFYVELIRGRKEETEVLWTSNSIVVFCGTSGTYGTGSWPDGADINLMPI

SEQ ID NO: 22315 - protein, 469 aa, Artificial Sequence
  derived and/or modified protein sequence (wt) from neuraminidase__InfluenzaA__AFJ78059
MNPNQKIITIGSVSLTISTICFFMQIAILITTVTLHFKQYEFNPPPNNQVMLCEPTIIERNITEIVYLTNTTIEKEICPKLAEYRNWSKPQCNITGFAPFSKDNSIRLSAGGDIWVTREPYVSCDPDKCYQFALGQGTTLNNVHSNDTVHDRTPYRTLLMNELGVPFHLGTKQVCIAWSSSSCHDGKAWLHVCVTGDDKNATASFIYNGRLVDSIVSWSKEILRTQESECVCINGTCTVVMTDGSASGKADTKILFIEEGKIVHTSTLSGSAQHVEECSCYPRYPGVRCVCRDNWKGSNRPIVDINIKDYSIVSSYVCSGLVGDTPRKNDSSSSSHCLDPNNEEGGHGVKGWAFDDGNDVWMGRTISEKLRSGYETFKVIEGWSNPNSKLQINRQVIVDRGNRSGYSGIFSVEGKSCINRCFYVELIRGRKDETEVLWTSNSIVVFCGTSGTYGTGSWPDGADINLMPI

SEQ ID NO: 22316 - protein, 469 aa, Artificial Sequence
  derived and/or modified protein sequence (wt) from neuraminidase__InfluenzaA__AFJ78070
MNPNQKIITIGSVSLTISTICFFMQIAILITTVTLHFKQYEFNSPPNNQVMLCEPTIIERNITEIVYLTNTTIEKEICPKLAEYRKWSKPQCNITGFAPFSKDNSIRLSAGGDIWVTREPYVSCDPDKCYQFALGQGTTLNNVHSNDTVRDRTPYRTLLMNELGVPFHLGTKQVCIAWSSSSCHDGKAWLHVCVTGDDKNATASFIYNGRLVDSIVSWSKEILRTQESECVCINGTCTVVMTDGSASGKADTKILFIEEGKIVHTSTLSGSAQHVEECSCYPRYPGVRCVCRDNWKGSNRPIVDINIKDYSIVSSYVCSGLVGDTPRKNDSSSSGHCLDPNNEEGGHGVKGWAFDDGNDVWMGRTISEKSRSGYETFKVIEGWSNPNSKLQINRQVIVDRGNRSGYSGIFSVEGKSCINRCFYVELIRGRKEETEVLWTSNSIVVFCGTSGTYGTGSWPDGADINLMPI

SEQ ID NO: 22317 - protein, 469 aa, Artificial Sequence
  derived and/or modified protein sequence (wt) from neuraminidase__InfluenzaA__AFJ78081
MNPNQKIITIGSVSLTISTICFFMQIAILITTVTLHFKQYEFNSPPNNQVMLCEPTIIERNITEIVYLTNTTIEKEICPKLAEYRNWSKPQCDITGFAPFSKDNSIRLSAGGDIWVTREPYVSCDPDKCYQFALGQGTTLNNVHSNDTVRDRTPYRTLLMNELGVPFHLGTKQVCIAWSSSSCHDGKAWLHVCITGDDKNATASFIYNGRLVDSIVSWSKEILRTQESECVCINGTCTVVMTDGSASGKADTKILFIEEGKIVHTSTLSGSAQHVEECSCYPRYPGVRCVCRDNWKGSNRPIVDINIKDHSIVSSYVCSGLVGDTPRKNDNSSSSHCLDPNNEEGGHGVKGWAFDDGNDVWMGRTISEKSRLGYETFKVIEGWSNPNSKLQMNRQVIVDRGNRSGYSGIFSVEGKSCINRCFYVELIRGRKEETEVLWTSNSIVVFCGTSGTYGTGSWPDGADINLMPI

SEQ ID NO: 22318 - protein, 469 aa, Artificial Sequence; identical to SEQ ID NO: 22234
  derived and/or modified protein sequence (wt) from neuraminidase__InfluenzaA__AFJ78092

SEQ ID NO: 22319 - protein, 469 aa, Artificial Sequence
  derived and/or modified protein sequence (wt) from neuraminidase__InfluenzaA__AFJ78103
MNPNQKIITIGSVSLTISTICFFMQIAILITTVTLHFKQYEFNSPPNNQVMLCEPTIIERNITEIVYLTNTTIEKEICPKLAEYRNWSKPQCDITGFAPFSKDNSIRLSAGGDIWVTREPYVSCDPDKCYQFALGQGTTLNNVHSNDTVRDRTPYRTLLMNELGVPFHLGTKQVCIAWSSSSCHDGKAWLHVCITGDDKNATASFIYNGRLVDSIVSWSKEILRTQESECVCINGTCTVVMTDGSASGKADTKILFIEEGKIVHTSTLLGSAQHVEECSCYPRYPGVRCVCRDNWKGSNRPIVDINIKDHSIVSSYVCSGLVGDTPRKNDSSSSGHCLDPNNEEGGHGVKGWAFDDGNDVWMGRTISEKSRLGYETFKVIEGWSNPSSKLQINRQVIVDRGNRSGYSGIFSVEGKSCINRCFYVELIRGRKEETEVLWTSNSIVVFCGTSGTYGTGSWPDGADINLMPI

SEQ ID NO: 22320 - protein, 469 aa, Artificial Sequence
  derived and/or modified protein sequence (wt) from neuraminidase__InfluenzaA__AFJ78114
MNPNQKIITIGSVSLTISTICFFMQIAILITTVTLHFKQYELNSPPNNQVMLCEPTIIERNITEIVYLTNTTIEKEICPKLAEYRNWSKPQCDITGFAPFSKDNSIRLSAGGDIWVTREPYVSCDPDKCYQFALGQGTTLNNVHSNDTVRDRTPYRTLLMNELGVPFHLGTKQVCIAWSSSSCHDGKAWLHVCITGDDKNATASFIYNGRLVDSIVSWSKEILRTQESECVCINGTCTVVMTDGSASGKADTKILFIEEGKIVHTSTLSGSAQHVEECSCYPRYPGVRCVCRDNWKGSNRPIVDINIKDHSIVSSYVCSGLVGDTPRKNDSSSSSHCLDPNNEEGGHGVKGWAFDDGNDVWMGRTISEKSRLGYETFKVIEGWSNPNSKLQINRQVIVDRSNRSGYSGIFSVEGKSCINRCFYVELIRGRKEETEVLWTSNSIVVFCGTSGTYGTGSWPDGADINLMPI

SEQ ID NO: 22321 - protein, 469 aa, Artificial Sequence
  derived and/or modified protein sequence (wt) from neuraminidase__InfluenzaA__AFJ78125
MNPNQKIITIGSVSLTISTICFFMQIAILITTVTLHFKQYEFNSPPNNQVMLCEPTIIERNITEIVYLTNTTIEKEMCPKLAEYRNWSKPQCDITGFAPFSKDNSIRLSAGGDIWVTREPYVSCDPDKCYQFALGQGTTLNNVHSNDTVRDRTPYRTLLMNELGVPFHLGTKQVCIAWSSSSCHDGKAWLHVCITGDDKNATASFIYNGRLVDSIVSWSKEILRTQESECVCINGTCTVVMTDGSASGKADTKILFIEEGKIVHTSTLSGSAQHVEECSCYPRYPGVRCVCRDNWKGSNRPIVDINIKDHSIVSSYVCSGLVGDTPRKNDSSSSSHCLDPNNEEGGHGVKGWAFDDGNDVWMGRTISEKSRLGYETFKVIEGWSNPNSKLQMNRQVIVDRGNRSGYSGIFSVEGKSCINRCFYVELIRGRKEETEVLWTSNSIVVFCGTSGTYGTGSWPDGADINLMPI

SEQ ID NO: 22322 - protein, 469 aa, Artificial Sequence
  derived and/or modified protein sequence (wt) from neuraminidase__InfluenzaA__AFJ78136
MNPNQKIITIGSVSLTISTICFFMQTAILITTVTLHFKQYEFNSPPNNQVMLCEPTIIERNITEIVYLTNTTIEKEICPKLAEYRNWSKPQCDITGFAPFSKDNSIRLSAGGDIWVTREPYVSCDPDKCYQFALGQGTTLNNVHSNNTVRDRTPYRTLLMNELGVPFHLGTKQVCIAWSSSSCHDGKAWLHVCITGDDKNATASFIYNGRLVDSIVSWSKEILRTQESECVCINGTCTVVMTDGSASGKADTKILFIEEGKIVHTSTLSGSAQHVEECSCYPRYPGVRCVCRDNWKGSNRPIVDINIKDHSIVSSYVCSGLVGDTPRKNDSSSSSHCLDPNNEEGGHGVKGWAFDDGNDVWMGRTISEKSRLGYETFKVIEGWSNPKSKLQINRQVIVDRGNRSGYSGIFSVEGKSCINRCFYVELIRGRKEETEVLWTSNSIVVFCGTSGTYGTGSWPDGADINLMPI

SEQ ID NO: 22323 - protein, 469 aa, Artificial Sequence; identical to SEQ ID NO: 22322
  derived and/or modified protein sequence (wt) from neuraminidase__InfluenzaA__AFJ78147

SEQ ID NO: 22324 - protein, 469 aa, Artificial Sequence; identical to SEQ ID NO: 22322
  derived and/or modified protein sequence (wt) from neuraminidase__InfluenzaA__AFJ78158

SEQ ID NO: 22325 - protein, 469 aa, Artificial Sequence; identical to SEQ ID NO: 15884
  derived and/or modified protein sequence (wt) from neuraminidase__InfluenzaA__AFJ78169

SEQ ID NO: 22326 - protein, 469 aa, Artificial Sequence; identical to SEQ ID NO: 16402
  derived and/or modified protein sequence (wt) from neuraminidase__InfluenzaA__AFJ78180

SEQ ID NO: 22327 - protein, 469 aa, Artificial Sequence; identical to SEQ ID NO: 15884
  derived and/or modified protein sequence (wt) from neuraminidase__InfluenzaA__AFJ78191

SEQ ID NO: 22328 - protein, 469 aa, Artificial Sequence
  derived and/or modified protein sequence (wt) from neuraminidase__InfluenzaA__AFJ78202
MNPNQKIITIGSVSLTISTICFFMQTAILITTVTLHFKQYEFNSPPNNQVMLCEPTIIERNITEIVYLINTTIEKEICPKLAEYRNWSKPQCDITGFAPFSKDNSIRLSAGGDIWVTREPYVSCDPDKCYQFALGQGTTLNNVHSNNTVRDRTPYRTLLMNELGVPFHLGTKQVCIAWSSSSCHDGKAWLHVCITGDDKNATASFIYNGRLVDSIVSWSKEILRTQESECVCINGTCTVVMTDGSASGKADTKILFIEEGKIVHTSTLSGGAQHVEECSCYPRYPGVRCVCRDNWKGSNRPIVDINIKDHSIVSSYVCSGLVGDTPRKNDSSSSSHCLDPNNEEGGHGVKGWAFDDGNDVWMGRTISEKSRLGYETFKVIEGWSNPKSKLQINRQVIVDRGNRSGYSGIFSVEGKSCINRCFYVELIRGRKEETEVLWTSNSIVVFCGTSGTYGTGSWPDGADISLMPI

SEQ ID NO: 22329 - protein, 469 aa, Artificial Sequence
  derived and/or modified protein sequence (wt) from neuraminidase__InfluenzaA__AFJ78213
MNPNQKIITIGSVSLTISTICFFMQIAILITTVTLHFKQYEFNSPPNNQVMLCEPTIIERNITEIVYLTNTTIEKEICPKLAEYRNWSKPQCDITGFAPFSKDNSIRLSAGGDIWVTREPYVSCDPDKCYQFALGQGTTLNNVHSNDTVRDRTPYRTLLMNELGVPFHLGTKQVCIAWSSSSCHDGKAWLHVCITGDDKNATASFIYNGRLVDSIVSWSKEILRTQESECVCINGTCTVVMTDGSASGKADTKILFIEEGKIVHTSTLSGSAQHVEECSCYPRYPGVRCVCRDNWKGSNRPIVDINIKDHSIVSSYVCSGLVGDTPRKNDSSSSSHCLDPNNEEGGHGVKGWAFDDGNDVWMGRTISEKSRLGYETFKVIEGWSNPKSKLQINRQVIVDRGNRSGYSGIFSVEGKSCINRCFYVELIRGRKEETEVLWTSNSIVVFCGTSGTYGTGSWPDGADINLMLI

SEQ ID NO: 22330 - protein, 469 aa, Artificial Sequence; identical to SEQ ID NO: 15884
  derived and/or modified protein sequence (wt) from neuraminidase__InfluenzaA__AFJ78224

SEQ ID NO: 22331 - protein, 469 aa, Artificial Sequence; identical to SEQ ID NO: 15884
  derived and/or modified protein sequence (wt) from neuraminidase__InfluenzaA__AFJ78235

SEQ ID NO: 22332 - protein, 469 aa, Artificial Sequence
  derived and/or modified protein sequence (wt) from neuraminidase__InfluenzaA__AFJ78246
MNPNQKIITIGSVSLTISTICFFMQIAILITTVTLHFKQYEFNSPPNNQAMLCEPTIIERNITEIVYLTNTTIEKEICPKLAEYRNWSKPQCDITGFAPFSKDNSIRLSAGGDIWVTREPYVSCDPDKCYQFALGQGTTLNNVHSNDTVRDRTPYRTLLMNELGVPFHLGTKQVCIAWSSSSCHDGKAWLHVCITGDDKNATASFIYNGRLVDSIVSWSKEILRTQESECVCINGTCTVVMTDGSASGKADTKILFIEEGKIVHTSTLSGSAQHVEECSCYPRYPGVRCVCRDNWKGSNRPIVDINIKDHSIVSSYVCSGLVGDTPRKNDSSSSSHCLDPNNEEGGHGVKGWAFDDGNDVWMGRTISEKSRLGYETFKVIEGWSNPKSKLQINRQVIVDRGNRSGYSGIFSVEGKSCINRCFYVELIRGRKEETEVLWTSNSIVVFCGTSGTYGTGSWPDGADINLMPI

SEQ ID NO: 22333 - protein, 469 aa, Artificial Sequence
  derived and/or modified protein sequence (wt) from neuraminidase__InfluenzaA__AFJ78268
MNPNQKIITIGSVSLTISTICFFMQTAILITTVTLHFKQYEFNSPPNNQVMLCEPTIIERNITEIVYLTNTTIEKEICPKLAEYRNWSKPQCDITGFAPFSKDNSIRLSAGGDIWVTREPYVSCDPDKCYQFALGQGTTLNNVHSNNTVRDRTPYRTLLMNELGVPFHLGTKQVCIAWSSSSCHDGKAWLHVCITGDDKNATASFIYNGRLVDSIVSWSKEILRTQESECVCINGTCTVVMTDGSASGKADTKILFIEEGKIVHTSKLSGSAQHVEECSCYPRYPGVRCVCRDNWKGSNRPIVDINMKDHSIVSSYVCSGLVGDTPRKNDSSSSSHCLDPNNEEGGHGVKGWAFDDGNDVWMGRTISEKSRLGYETFKVIEGWSNPKSKLQINRQVIVDRGNRSGYSGIFSVEGKSCINRCFYVELIRGRKEETEVLWTSNSIVVFCGTSGTYGTGSWPDGADINLMPI

SEQ ID NO: 22334 - protein, 469 aa, Artificial Sequence
  derived and/or modified protein sequence (wt) from neuraminidase__InfluenzaA__AFJ78279
MNPNQKIITIGSVSLTISTICFFMQTAILITTVTLHFKQYEFNSPPNNQVMLCEPTIIERNITEIVYLINTTIEKEICPKLAEYRNWSKPQCDITGFAPFSKDNSIRLSAGGDIWVTREPYVSCDPDKCYQFALGQGTTLNNVHSNNTVRDRTPYRTLLMNELGVPFHLGTKQVCIAWSSSSCHDGKAWLHVCITGDDKNATASFIYNGRLVDSIVSWSKEILRTQESECVCINGTCTVVMTDGSASGKADTKILFIEEGKIVHTSTLSGGAQHVEECSCYPRYPGVRCVCRDNWKGSNRPIVDINIKDHSIVSSYVCSGLVGDTPRKNDSSSSSHCLDPNNEEGGHGVKGWAFDDGNDVWMGRTISEKSRLGYETFKVIEGWSNPKSKLQINRQVIVDRGNRSGYSGIFSVEGKSCINRCFYVELIRGRKEETEVLWTSNSIVVFCGTSGTYGTGSWPDGADINLMPI

SEQ ID NO: 22335 - protein, 469 aa, Artificial Sequence
  derived and/or modified protein sequence (wt) from neuraminidase__InfluenzaA__AFJ78290
MNPNQKIITIGSVSLTISTICFFMQIAILITTVTLHFKQYEFNSPPNNQVMLCEPTIIERNITEIVYLTNTTIEKEICPKLAEYRNWSKPQCDITGFAPFSKDNSIRLSAGGDIWVTREPYVSCDPDKCYQFALGQGTTLNNVHSNNTVRDRTPYRTLLMNELGVPFHLGTKQVCIAWSSSSCHDGKAWLHVCITGDDKNATASFIYNGRLVDSVVSWSKEILRTQESECVCINGTCTVVMTDGSASGKADTKILFIEEGKIVHTSALSGSAQHVEECSCYPRYPGVRCVCRDNWKGSNRPIVDINIKDHSIVSSYVCSGLVGDTPRKNDSSSSSHCLDPNNEEGGHGVKGWAFDDGNDVWMGRTISEKSRLGYETFKVIEGWSNPKSKLQINRQVIVDRGNRSGYSGIFSVEGKSCINRCFYVELIRGRKEETEVLWTSNSIVVFCGTSGTYGTGSWPDGADINLMPI

SEQ ID NO: 22336 - protein, 470 aa, Artificial Sequence
  derived and/or modified protein sequence (wt) from neuraminidase__InfluenzaA__AFJ78312
MNPNQKIITIGSISIAIGIISLMLQIGNIISIWASHSIQTGSQNHTGICNQRIITYENSTWVNHTYVNINNTNVVAGKDKTSVTLAGNSSLCSISGWAIYTKDNSIRIGSKGDVFVIREPFISCSHLECRTFFLTQGALLNDKHSNGTVKDRSPYRALMSCPLGEAPSPYNSKFESVAWSASACHDGMGWLTIGISGPDNGAVAVLKYNGIITETIKSWEKRILRTQESECVCVNGSCFTIMTDGPSNGAASYKIFKIEKGKVTKSIELNAPNSHYEECSCYPDTGTVMCVCRDNWHGSNRPWVSFNQNLDYQIGYICSGVFGDNPRPKDGEGSCNPVTADGADGVKGFSYKYGNGVWIGRTKSNRLRKGFEMIWDPNGWTDTDSDFSVKQDVVAITDWSGYSGSFVQHPELTGLDCIRPCFWVELVRGRPRENTTIWTSGSSISFCGVNSDTANWSWPDGAELPFTIDK

SEQ ID NO: 22337 - protein, 469 aa, Artificial Sequence; identical to SEQ ID NO: 22269
  derived and/or modified protein sequence (wt) from neuraminidase__InfluenzaA__AFJ78323

SEQ ID NO: 22338 - protein, 470 aa, Artificial Sequence
  derived and/or modified protein sequence (wt) from neuraminidase__InfluenzaA__AFJ78334
MNPNQKIITIGSISIAIGIISLMLQIGNIISIWASHSIQTGSQNHTGICNQRIITYENSTWVNHTYVNINNTNVVAGKDKTSVTLAGNSSLCSISGWAIYTKDNSIRIGSKGDVFVIREPFISCSHLECRTFFLTQGALLNDKHSNGTVKDRSPYRALMSCPLGEAPSPYNSKFESVAWSASACHDGMGWLTIGISGPDNGAVAVLKYNGIITETIKSWKKQILRTQESECVCVNGSCFTIMTDGPSNGAASYKIFKIEKGKVTKSIELNAPNFHYEECSCYPDTGTVMCVCRDNWHGSNRPWVSFNQNLDYQIGYICSGVFGDNPRPKDGEGSCNPVTVDGADGVKGFSYKYGNGVWIGRTKSNRLRKGFEMIWDPNGWTDTDSDFSVKQDVVAITDWSGYSGSFVQHPELTGLDCIRPCFWVELVRGLPRENTTIWTSGSSISFCGVNSDTANWSWPDGAELPFTIDK

SEQ ID NO: 22339 - protein, 470 aa, Artificial Sequence; identical to SEQ ID NO: 22338
  derived and/or modified protein sequence (wt) from neuraminidase__InfluenzaA__AFJ78345

SEQ ID NO: 22340 - protein, 470 aa, Artificial Sequence
  derived and/or modified protein sequence (wt) from neuraminidase__InfluenzaA__AFJ78356
MNPNQKIITIGSISIAIGIISLMLQIGNIISIWASHSIQTGSQNHTGICNQRIITYENSTWVNHTYVNINNTNVVVGKDKTSVTLAGNSSLCSISGWAIYTKDNSIRIGSKGDVFVIREPFISCSHLECRTFFLTQGALLNDKHSNGTVKDRSPYRALMSCPLGEAPSPYNSKFESVAWSASACHDGMGWLTIGISGPDNGAVAVLKYNGIITETIKSWKKQILRTQESECVCVNGSCFTIMTDGPSNGAASYKIFKIEKGKVTKSIELNAPNFHYEECSCYPDTGTVMCICRDNWHGSNRPWVSFNQNLDYQIGYICSGVFGDNPRPKDGEGSCNPVTVDGADGVKGFSYKYGNGVWIGRTKSNRLRKGFEMIWDPNGWTDTDSDFSVKQDVVAITDWSGYSGSFVQHPELTGLDCIRPCFWVELVRGLPRENTTIWTSGSSISFCGVNSDTANWSWPDGAELPFTIDK

SEQ ID NO: 22341 - protein, 470 aa, Artificial Sequence
  derived and/or modified protein sequence (wt) from neuraminidase__InfluenzaA__AFJ78367
MNPNQKIITIGSISIAIGIISLMLQIGNIISIWASHSIQTGSQNHTGICNQRIITYENSTWVNHTYVNINNTNVVAGKDKTSVTLAGNSSLCSISGWAIYTKDNSIRIGSKGDVFVIREPFISCSHLECRTFFLTQGALLNDKHSNGTVKDRSPYRALMSCPLGEAPSPYNSKFESVAWSASACHDGMGWLTIGISGPDNGAVAVLKYNGIITETIKSWKKRILRTQESECVCVNGSCFTIMTDGPSNGAASYKIFKIEKGKVTKSIELNAPNSHYEECSCYPDTGTVMCVCRDNWHGSNRPWVSFNQNLDYQIGYICSGVFGDNPRPKDGEGSCNPVTADGADGVKGFSYKYGNGVWIGRTKSNRLRKGFEMIWDPNGWTDTDSDFSVKQDVVAITDWSGYSGSFVQHPELTGLDCIRPCFWVELVRGRPRENTTIWTSGSSISFCGVNGDTANWSWPDGAELPFTIDK

SEQ ID NO: 22342 - protein, 470 aa, Artificial Sequence
  derived and/or modified protein sequence (wt) from neuraminidase__InfluenzaA__AFJ78378
MNPNQKVITIGSISIAIGIISLMLQIGNIISIWASHSIQTGSQNHTGICNQRIITYENSTWVNHTYVNINNTNVVAGKDKTSVTLAGNSSLCSISGWAIYTKDNSIRIGSKGDVFVIREPFISCSHMECRTFFLTQGALLNDKHSNGTVKDRSPYRALMSCPLGEAPSPYNSKFESVAWSASACHDGMGWLTIGISGPDNGAVAVLKYNGIITETIKSWKKRILRTQESECVCVNGSCFTIMTDGPSNGAASYKIFKIEKGKVTKSIELNAPNSHYEECSCYPDTGTVMCVCRDNWHGSNRPWVSFNQNLDYQIGYICSGVFGDNPRPRDGEGSCNPVTVDGADGVKGFSYKYGNGVWIGRTKSNRLRKGFEMIWDPNGWTDTDSDFAVKQDVVAITDWSGYSGSFVQHPELTGLDCIRPCFWVELVRGLPRENTTIWTSGSSISFCGVNSDTANWSWPDGAELPFTIDK

SEQ ID NO: 22343 - protein, 470 aa, Artificial Sequence; identical to SEQ ID NO: 14386
  derived and/or modified protein sequence (wt) from neuraminidase__InfluenzaA__AFJ78389

SEQ ID NO: 22344 - protein, 470 aa, Artificial Sequence; identical to SEQ ID NO: 14386
  derived and/or modified protein sequence (wt) from neuraminidase__InfluenzaA__AFJ78400

SEQ ID NO: 22345 - protein, 470 aa, Artificial Sequence; identical to SEQ ID NO: 14386
  derived and/or modified protein sequence (wt) from neuraminidase__InfluenzaA__AFJ78411

SEQ ID NO: 22346 - protein, 470 aa, Artificial Sequence
  derived and/or modified protein sequence (wt) from neuraminidase__InfluenzaA__AFJ78422
MNPNQKIITIGSISIAIGIISLMLQIGNIISIWASHSIQTGSQNHTGICNQRIITYENSTWVNHTYVNINNTNVVAGKDKTSVTLAGNSSLCSISGWAIYTKDNSIRIGSKGDVFVIREPFISCSHLECRTFFLTQGALLNDKHSNGTVKDRSPYRALMSCPLGEAPSPYNSKFESVAWSASACHDGTGWLTIGISGPDNGAVAVLKYNGIITETIKSWKKRILRTQESECVCMNGSCFTIMTDGPSNGAASYKIFKIEKGKVTKSIELNAPSFHYEECSCYPDTGTVMCVCRDNWHGSNRPWVSFNQNLDYQIGYICSGVFGDNPRPQDGEGSCNPVTVDGADGVKGFSYKYGNGVWIGRTKSNRLRKGFEMIWDPNGWTNTDSDFSVKQDVVAITDWSGYSGSFVQHPELTGLDCIRPCFWVELVRGLPRENTTIWTSGSSISFCGVNSDTANWSWPDGAELPFTIDK

SEQ ID NO: 22347 - protein, 470 aa, Artificial Sequence; identical to SEQ ID NO: 16493
  derived and/or modified protein sequence (wt) from neuraminidase__InfluenzaA__AFJ78433

SEQ ID NO: 22348 - protein, 470 aa, Artificial Sequence; identical to SEQ ID NO: 16493
  derived and/or modified protein sequence (wt) from neuraminidase__InfluenzaA__AFJ78444

SEQ ID NO: 22349 - protein, 470 aa, Artificial Sequence
  derived and/or modified protein sequence (wt) from neuraminidase__InfluenzaA__AFJ78466
MNPNQKIITIGSISIAIGIISLMLQIGNIISIWASHSIQTGSQNHTGICNQRIITYENSTWVNHTYVNINNTNVVAGKDKTSVTLAGNSSLCSISGWAIYTKDNSIRIGSKGDVFVIREPFISCSHLECRTFFLTQGALLNDKHSNGTVKDRSPYRALMSCPLGEAPSPYNSKFESVAWSASACHDGIGWLTIGISGPDNGAVAVLKYNGIITGTIKSWKKQILRTQESECVCINGSCFTIMTDGPSNGAASYKIFKIEKGKVTKSIELNAPNFHYEECSCYPDTGTVMCVCRDNWHGSNRPWVSFNQNLDYQIGYICSGVFGDNPRPKDGEGRCNPVTVDGADGVKGFSYKYGNGVWIGRTKSNRLRKGFEMIWDPNGWTNTDSDFSVKQDVVAITDWSGYSGSFVQHPELTGLDCIRPCFWVELVRGLPRENTTIWTSGSSISFCGVNSDTANWSWPDGAELPFTIDK

SEQ ID NO: 22350 - protein, 470 aa, Artificial Sequence
  derived and/or modified protein sequence (wt) from neuraminidase__InfluenzaA__AFJ78477
MNPNQKIITIGSISIAIGIIGLMLQIGNIISIWASHSIQTGSQNHTGICSQRIITYENSTWVNNTYVNINNTNVVAEKDKTSVTLAGNSSLCSISGWAIYTKDNSIRIGSKGDVFVIREPFISCSHLECRTFFLTQGALLNDKHSNGTVKDRSPYRALMSCPLGEAPSPYNSRFESVAWSASACHDGMGWLTIGISGPDNGAVAVLKYNGIITETIKSWKKRILRTQESECVCMNGSCFTIMTDGPSNGAASYKIFKIEKGKVTKSIELNAPNFHYEECSCYPDTGTVMCVCRDNWHGSNRPWVSFNQNLDYQIGYICSGVFGDNPRPKDGEGSCNPVTVDGADGVKGFSYKYGNGVWIGRTKSNRLRKGFEMIWDPNGWTNTDSDFSVKQDVVAITDWSGYSGSFVQHPELTGLDCIRPCFWVELVRGLPRENTTIWTSGSSISFCGVNSGTANWSWPDGAELPFTIDK

SEQ ID NO: 22351 - protein, 470 aa, Artificial Sequence
  derived and/or modified protein sequence (wt) from neuraminidase__InfluenzaA__AFJ78488
MNPNQKIITIGSISIAIGIISLILQIGNIISIWASHSIQTGSQNHTGICNQRIITYENSTWVNNTYVNINNTNVVAEKDKTSVTLAGNSSLCSISGWAIYTKDNSIRIGSKGDVFVIREPFISCSHLECRTFFLTQGALLNDKHSNGTVKDRSPYRALMSCPLGEAPSPYNSRFESVAWSASACHDGMGWLTIGISGPDNGAVAVLKYNGIITETIKSWKKRILRTQESECVCMNGSCFTIMTDGPSNGAASYKIFKIEKGKVTKTIELNAPNFHYEECSCYPDTGTVMCVCRDNWHGSNRPWVSFNQNLDYQIGYICSGVFGDNPRPKDGEGSCNPVTVDGADGVKGFSYKYGNGVWIGRTKSNRLRKGFEMIWDPNGWTNTDSDFSMKQDVVAITDWSGYSGSFVQHPELTGLDCIRPCFWVELVRGLPRENTTIWTSGSSISFCGVNSGTANWSWPDGAELPFTIDK

SEQ ID NO: 22352 - protein, 470 aa, Artificial Sequence
  derived and/or modified protein sequence (wt) from neuraminidase__InfluenzaA__AFJ78510
MNPNQKIITIGSISIAIGIISLMLQIGNIISIWASHSIQTGSQNHTGICNQRIITYENSTWVNHTYVNINNTNVVAGKDKTSVTLAGNSSLCSISGWAIYTKDNSIRIGSKGDVFVIREPFISCSHLECRTFFLTQGALLNDKHSNGTVKDRSPYRALMSCPLGEAPSPYNSKFESVAWSASACHDGMGWLTIGISGPDNGAVAVLKYNGIITGTIKSWKKQILRTQESECVCMNGSCFTIMTDGPSNGAASYKIFKIEKGKVTKSIELNAPNFHYEECSCYPDTGIVMCVCRDNWHGSNRPWVSFNQNLDYQIGYICSGVFGDNPRPKDGEGSCNPVTVDGADGVKGFSYKYDNGVWIGRTKSNRLRKGFEMIWDPNGWTNTDSDFSVKQDVVAITDWSGYSGSFVQHPELTGLDCIRPCFWVELVRGLPRENTTIWTSGSSISFCGVNSDTANWSWPDGAELPFTIDK

SEQ ID NO: 22353 - protein, 470 aa, Artificial Sequence
  derived and/or modified protein sequence (wt) from neuraminidase__InfluenzaA__AFJ78521
MNPNQKIITIGSISIAIGIISLILQIGNIISIWASHSIQTGSQNHTGICNQRIITYENSTWVNNTYVNINNTNVVAEKDKTSVTLAGNSSLCSISGWAIYTKDNSIRIGSKGDVFVIREPFISCSHLECRTFFLTQGALLNDKHSNGTVKDRSPYRALMSCPLGEAPSPYNSRFESVAWSASACHDGMGWLTIGISGPDNGAVAVLKYNGIITETIKSWKKRILRTQESECVCMNGSCFTIMTDGPSNGAASYKIFKIEKGKVTKTIELNAPNFHYEECSCYPDTGTVMCVCRDNWHGSNRPWVSFNQNLDYQIGYICSGVFGDNPRPKDGEGSCNPVTVDGADGVKGFSYKYGNGVWIGRTKSNRLRKGFEMIWDPNGWTNTDSDFSVKQDVVAITDWSGYSGSFVQHPELTGLDCIRPCFWVELVRGLPRENTTIWTSGSSISFCGVNSGTANWSWPDGAELPFTIDK

SEQ ID NO: 22354 - protein, 470 aa, Artificial Sequence; identical to SEQ ID NO: 22247
  derived and/or modified protein sequence (wt) from neuraminidase__InfluenzaA__AFJ78532

SEQ ID NO: 22355 - protein, 470 aa, Artificial Sequence; identical to SEQ ID NO: 22247
  derived and/or modified protein sequence (wt) from neuraminidase__InfluenzaA__AFJ78543

SEQ ID NO: 22356 - protein, 470 aa, Artificial Sequence; identical to SEQ ID NO: 22247
  derived and/or modified protein sequence (wt) from neuraminidase__InfluenzaA__AFJ78554

SEQ ID NO: 22357 - protein, 470 aa, Artificial Sequence; identical to SEQ ID NO: 22235
  derived and/or modified protein sequence (wt) from neuraminidase__InfluenzaA__AFJ78565

SEQ ID NO: 22358 - protein, 470 aa, Artificial Sequence
  derived and/or modified protein sequence (wt) from neuraminidase__InfluenzaA__AFJ78576
MNPNQKIITIGSISIAIGIISLMLQIGNIISIWASHSIQTGSQNHTGICNQRIITYENSTWVNHTYVNINNTNVVAGKDKTPVTLAGNSSLCSISGWAIHTKDNSIRIGSKGDVFVIREPFISCSHLECKTFFLTQGALLNDKHSNGTVKDRSPYRALMSCPLGEAPSPYNSKFESVAWSASACHDGIGWLTIGISGPDNGAVAVLKYNGIITGTIKSWKKQILRTQESECVCMNGSCFTIMTDGPSNGAASYKIFKIEKGKVTKSMELNAPNFHYEECSCYPDTGTVMCVCRDNWHGSNRPWVSFNQNLDYQIGYICTGVFGDNPRPEDGEGSCNPVTVDGANGVKGFSYKYGNGVWIGRTKSNRIRKGFEMIWDPNGWTNTDSDFSVKQDIVAITDWSGYSGSFVQHPELTGLDCIRPCFWVELVRGLPRENTTIWTSGSSISFCGVNSDIANWSWPDGAELPFTIDK

SEQ ID NO: 22359 - protein, 470 aa, Artificial Sequence
  derived and/or modified protein sequence (wt) from neuraminidase__InfluenzaA__AFJ78598
MNPNQKIITIGSISIAIGIISLMLQIGNIISIWASHSIQTGIQNNTGICNQRIITYENSTWVNHTYVNINNTNVVAGEDKTSVTLAGNSSLCSISGWAIYTKDNSIRIGSKGDVFVIREPFISCSHLECRTFFLTQGALLNDKHSNGTVKDRSPYRALMSCPLGEAPSPYNSKFESVAWSASACHDGMGWLTIGISGPDNGAVAVLKYNGIITGTIKSWKKQILRTQESECVCMNGSCFTIMTDGPSNKAASYKIFKIEKGKVTKSIELNAPNFHYEECSCYPDTGIVMCVCRDNWHGSNRPWVSFNQNLDYQIGYICSGVFGDNPRPEDGEGSCNPVTVDGANGVKGFSYKYDNGVWIGRTKSNRLRKGFEMIWDPNGWTNTDSDFSVKQDVVAITDWSGYSGSFVQHPELTGLDCIRPCFWVELVRGLPRENTTIWTSGSSISFCGVNSDTANWSWPDGAELPFTIDK

SEQ ID NO: 22360 - protein, 470 aa, Artificial Sequence
  derived and/or modified protein sequence (wt) from neuraminidase__InfluenzaA__AFJ78609
MNPNQKIITIGSISIAIGIISLMLQIGNIISIWASHSIQTGSQNNTGICNQRIITYENSTWVNHTYVNINNTNVVAGEDKTSVILAGNSSLCSISGWAIYTKDNSIRIGSKGDVFVIREPFISCSHLECRTFFLTQGALLNDKHSNGTVKDRSPYRALMSCPLGEAPSPYNSKFESVAWSASACHDGMGWLTIGISGPDNGAVAVLKYNGIITGTIKSWKKQILRTQESECVCMNGSCFTIMTDGPSNKAASYKIFKIEKGKVTKSIELNAPNFYYEECSCYPDTGIVMCVCRDNWHGSNRPWVSFNQNLDYQIGYICSGVFGDNPRPEDGEGSCNPVTVDGANGVKGFSYKYGNGVWIGRTKSNRLRKGFEMIWDPNGWTNTDSDFSVKQDVVAITDWSGYSGSFVQHPELTGLDCIRPCFWVELVRGLPRENTTIWTSGSSISFCGVNSDTANWSWPDGAELPFTIDK

SEQ ID NO: 22361 - protein, 470 aa, Artificial Sequence; identical to SEQ ID NO: 17461
  derived and/or modified protein sequence (wt) from neuraminidase__InfluenzaA__AFJ78620

SEQ ID NO: 22362 - protein, 470 aa, Artificial Sequence; identical to SEQ ID NO: 22235
  derived and/or modified protein sequence (wt) from neuraminidase__InfluenzaA__AFJ78631

SEQ ID NO: 22363 - protein, 470 aa, Artificial Sequence; identical to SEQ ID NO: 17461
  derived and/or modified protein sequence (wt) from neuraminidase__InfluenzaA__AFJ78642

SEQ ID NO: 22364 - protein, 470 aa, Artificial Sequence; identical to SEQ ID NO: 17461
  derived and/or modified protein sequence (wt) from neuraminidase__InfluenzaA__AFJ78653

SEQ ID NO: 22365 - protein, 469 aa, Artificial Sequence; identical to SEQ ID NO: 16738
  derived and/or modified protein sequence (wt) from neuraminidase__InfluenzaA__AFJ78664

SEQ ID NO: 22366 - protein, 469 aa, Artificial Sequence; identical to SEQ ID NO: 16738
  derived and/or modified protein sequence (wt) from neuraminidase__InfluenzaA__AFJ78674

SEQ ID NO: 22367 - protein, 469 aa, Artificial Sequence; identical to SEQ ID NO: 16738
  derived and/or modified protein sequence (wt) from neuraminidase__InfluenzaA__AFJ78684

SEQ ID NO: 22368 - protein, 469 aa, Artificial Sequence; identical to SEQ ID NO: 16738
  derived and/or modified protein sequence (wt) from neuraminidase__InfluenzaA__AFJ78694

SEQ ID NO: 22369 - protein, 469 aa, Artificial Sequence; identical to SEQ ID NO: 16738
  derived and/or modified protein sequence (wt) from neuraminidase__InfluenzaA__AFJ78704

SEQ ID NO: 22370 - protein, 469 aa, Artificial Sequence; identical to SEQ ID NO: 16738
  derived and/or modified protein sequence (wt) from neuraminidase__InfluenzaA__AFJ78714

SEQ ID NO: 22371 - protein, 469 aa, Artificial Sequence
  derived and/or modified protein sequence (wt) from neuraminidase__InfluenzaA__AFJ78724
MNPNQKIITIGSVCMTIGMANLILQIGNIISIWISHSIQLGNQNQIETCNQSVITYENNTWVNQTYVNISNTNFAAGQSVVSVKLAGNSSLCPVSGWAIYSKDNSIRIGSKGDVFVIREPFISCSPLECRTFFLTQGALLNDKHSNGTIKDRSPYRTLMSCPIGEVPSPYNSRFESVAWSASACHDGINWLTIGISGPDNGAVAVLKYNGIITDTIKSWRNNILRTQESECACVNGSCFTLMTDGPSDGQASYKIFRIEKGKIVKSVEMNAPNYHYEECSCYPDSSEITCVCRDNWHGSNRPWVSFNQNLEYQIGYICSGIFGDNPRPNDKTGSCGPVSSNGANGVKGFSFKYGNGVWIGRTKSISSRNGFEMIWDPNGWTGTDNNFSIKQDIVGINEWSGYSGSFVQHPELTGLDCIRPCFWVELIRGRPKENTIWTSGSSISFCGVNSDTVGWSWPDGAELPFTIDK

SEQ ID NO: 22372 - protein, 469 aa, Artificial Sequence; identical to SEQ ID NO: 16738
  derived and/or modified protein sequence (wt) from neuraminidase__InfluenzaA__AFJ78734

SEQ ID NO: 22373 - protein, 469 aa, Artificial Sequence; identical to SEQ ID NO: 16738
  derived and/or modified protein sequence (wt) from neuraminidase__InfluenzaA__AFJ78744

SEQ ID NO: 22374 - protein, 469 aa, Artificial Sequence; identical to SEQ ID NO: 16738
  derived and/or modified protein sequence (wt) from neuraminidase__InfluenzaA__AFJ78754

SEQ ID NO: 22375 - protein, 469 aa, Artificial Sequence; identical to SEQ ID NO: 16738
  derived and/or modified protein sequence (wt) from neuraminidase__InfluenzaA__AFJ78764

SEQ ID NO: 22376 - protein, 469 aa, Artificial Sequence; identical to SEQ ID NO: 16738
  derived and/or modified protein sequence (wt) from neuraminidase__InfluenzaA__AFJ78774

SEQ ID NO: 22377 - protein, 469 aa, Artificial Sequence; identical to SEQ ID NO: 16738
  derived and/or modified protein sequence (wt) from neuraminidase__InfluenzaA__AFJ78784

SEQ ID NO: 22378 - protein, 469 aa, Artificial Sequence
  derived and/or modified protein sequence (wt) from neuraminidase__InfluenzaA__AFJ78794
MNPNQKIITIGSVCMTIGMANLILQIGNIISIWISHSIQLGNQNQIETCNQSVITYENNTWVNQTYVNISNTNFAAGQSVVSVKLAGNSSLCPVSGWAIYSKDNSIRIGSKGDVFVIREPFISCSPLECRTFFLTQGALLNDKHSNGTIKDRSPYRTLMSCPIGEVPSPYNSRFESVAWSASACHDGINWLTIGISGPDNGAVAVLKYNGIITDTIKSWRNNILRTQESECACVNGSCFTVMTDGPSDGQASYKIFRIEKGKIVKSVEMNAPNYHYEECSCYPDSGEITCVCRDNWHGSNRPWVSFNQNLEYQIGYICSGIFGDNPRPNDKTGSCGPVSSNGANGVKGFSFKYGNGVWIGRTKSISSRNGFEMIWDPNGWTGTDNNFSIKQDIVGINEWSGYSGSFVQHPELTGLDCIRPCFWVELIRGRPKENTIWTSGSSISFCGVNSDTVGWSWPDGAELPFTIDK

SEQ ID NO: 22379 - protein, 469 aa, Artificial Sequence; identical to SEQ ID NO: 16738
  derived and/or modified protein sequence (wt) from neuraminidase__InfluenzaA__AFJ78804

SEQ ID NO: 22380 - protein, 469 aa, Artificial Sequence; identical to SEQ ID NO: 16738
  derived and/or modified protein sequence (wt) from neuraminidase__InfluenzaA__AFJ78814

SEQ ID NO: 22381 - protein, 469 aa, Artificial Sequence; identical to SEQ ID NO: 16738
  derived and/or modified protein sequence (wt) from neuraminidase__InfluenzaA__AFJ78824

SEQ ID NO: 22382 - protein, 469 aa, Artificial Sequence; identical to SEQ ID NO: 16738
  derived and/or modified protein sequence (wt) from neuraminidase__InfluenzaA__AFJ78834

SEQ ID NO: 22383 - protein, 469 aa, Artificial Sequence; identical to SEQ ID NO: 16738
  derived and/or modified protein sequence (wt) from neuraminidase__InfluenzaA__AFJ78844

SEQ ID NO: 22384 - protein, 469 aa, Artificial Sequence; identical to SEQ ID NO: 18987
  derived and/or modified protein sequence (wt) from neuraminidase__InfluenzaA__AFJ78854

SEQ ID NO: 22385 - protein, 469 aa, Artificial Sequence; identical to SEQ ID NO: 16738
  derived and/or modified protein sequence (wt) from neuraminidase__InfluenzaA__AFJ78864

SEQ ID NO: 22386 - protein, 469 aa, Artificial Sequence; identical to SEQ ID NO: 16738
  derived and/or modified protein sequence (wt) from neuraminidase__InfluenzaA__AFJ78874

SEQ ID NO: 22387 - protein, 469 aa, Artificial Sequence; identical to SEQ ID NO: 16738
  derived and/or modified protein sequence (wt) from neuraminidase__InfluenzaA__AFJ78884

SEQ ID NO: 22388 - protein, 469 aa, Artificial Sequence; identical to SEQ ID NO: 16738
  derived and/or modified protein sequence (wt) from neuraminidase__InfluenzaA__AFJ78894

SEQ ID NO: 22389 - protein, 469 aa, Artificial Sequence; identical to SEQ ID NO: 16738
  derived and/or modified protein sequence (wt) from neuraminidase__InfluenzaA__AFJ78904

SEQ ID NO: 22390 - protein, 469 aa, Artificial Sequence; identical to SEQ ID NO: 16738
  derived and/or modified protein sequence (wt) from neuraminidase__InfluenzaA__AFJ78914

SEQ ID NO: 22391 - protein, 469 aa, Artificial Sequence
  derived and/or modified protein sequence (wt) from neuraminidase__InfluenzaA__AFJ78924
MNPNQKIITIGSVCMTIGMANLILQIGNIISIWISHSIQLGNQNQIETCNQSVITYENNTWVNQTYVDISNTNFAAGQSVVSVKLAGNSSLCPVSGWAIYSKDNSIRIGSKGDVFVIREPFISCSPLECRTFFLTQGALLNDKHSNGTIKDRSPYRTLMSCPIGEIPSPYNSRFESVAWSASACHDGINWLTIGISGPDNGAVAVLKYNGIITDTIKSWRNNILRTQESECACVNGSCFTVMTDGPSDGQASYKIFRIEKGKIVKSVEMNAPNYHYEECSCYPDSSEITCVCRDNWHGSNRPWVSFNQNLEYQIGYICSGIFGDNPRPNDKTGSCGPVSSNGANGVKGFSFKYGNGVWIGRTKSISSRNGFEMIWDPNGWTGTDNNFSIKQDIVGINEWSGYSGSFVQHPELTGLDCIRPCFWVELIRGRPKENTIWTSGSSISFCGVNSDTVGWSWPDGAELPFTIDK

SEQ ID NO: 22392 - protein, 469 aa, Artificial Sequence
  derived and/or modified protein sequence (wt) from neuraminidase__InfluenzaA__AFJ97569
MNPNQKIITIGSVCMTIGMANLILQIGNIISIWISHSIQLGNQNQIETCNQSVITYENNTWVNQTYVNISNTNFAAGQSVVSVKLAGNSSLCPVSGWAIYSKDNSIRIGSKGDVFVIREPFISCSPLECRTFFLTQGALLNDKHSNETIKDRSPYRTLMSCPIGEVPSPYNSRFESVAWSASACHDGINWLTIGISGPDNGAVAVLKYNGIITDTIKSWRNNILRTQESECACVNGSCFTVMTDGPSDGQASYKIFRIEKGKIVKSVEMNAPNYHYEECSCYPDSSEITCVCRDNWHGSNRPWVSFNQNLEYQIGYICSGIFGDNPRPNDKTGSCGPVSSNGANGVKGFSFKYGNGVWIGRTKSISSRNGFEMIWDPNGWTGTDNNFSIKQDIVGINEWSGYSGSFVQHPELTGLDCIRPCFWVELIRGRPKENTIWTSGSSISFCGVNSDTVSWSWPDGAELPFTIDK

SEQ ID NO: 22393 - protein, 469 aa, Artificial Sequence; identical to SEQ ID NO: 16728
  derived and/or modified protein sequence (wt) from neuraminidase__InfluenzaA__AFK14107

SEQ ID NO: 22394 - protein, 469 aa, Artificial Sequence; identical to SEQ ID NO: 16738
  derived and/or modified protein sequence (wt) from neuraminidase__InfluenzaA__AFK14117

SEQ ID NO: 22395 - protein, 469 aa, Artificial Sequence; identical to SEQ ID NO: 17505
  derived and/or modified protein sequence (wt) from neuraminidase__InfluenzaA__AFK14141

SEQ ID NO: 22396 - protein, 469 aa, Artificial Sequence
  derived and/or modified protein sequence (wt) from neuraminidase__InfluenzaA__AFK14150
MNPNQKIITIGSVCMTIGMANLILQIGNIISIWISHSIRLGNQNQIETCNQSVITYENNTWVNQTYVNISNTNFAAGQSVVSVKLAGNSSLCPVSGWAIYSKDNSIRIGSKGDVFVIREPFISCSPLECRTFFLTQGALLNDKHSNGTIKDRSPYRTLMSCPIGEVPSPYNSRFESVAWSASACHDGINWLTIGISGPDNGAVAVLKYNGIITDTIKSWRNNILRTQESECACVNGSCFTVMTDGPSDEQASYKIFRIEKGKIVKSVEMNAPNYHYEECSCYPDSSEITCVCRDNWHGSNRPWVSFNQNLEYQIGYICSGIFGDNPRPNDKTGSCGPVSSNGANGVKGFSFKYGNGVWIGRTKSISSRNGFEMIWDPNGWTGTDNNFSIKQDIVGINEWSGYSGSFVQHPELTGLDCIRPCFWVELIRGRPKENTIWTSGSSISFCGVNSDTVGWSWPDGAELPFTIDK

SEQ ID NO: 22397 - protein, 469 aa, Artificial Sequence; identical to SEQ ID NO: 17321
  derived and/or modified protein sequence (wt) from neuraminidase__InfluenzaA__AFK14159

SEQ ID NO: 22398 - protein, 469 aa, Artificial Sequence; identical to SEQ ID NO: 16738
  derived and/or modified protein sequence (wt) from neuraminidase__InfluenzaA__AFK14168

SEQ ID NO: 22399 - protein, 469 aa, Artificial Sequence; identical to SEQ ID NO: 16738
  derived and/or modified protein sequence (wt) from neuraminidase__InfluenzaA__AFK14177

SEQ ID NO: 22400 - protein, 469 aa, Artificial Sequence
  derived and/or modified protein sequence (wt) from neuraminidase__InfluenzaA__AFK14186
MNPNQKIITIGSVCMTIGMANLILQIGNIISIWISHSIQLGNQNQIETCNQSVITYENNTWVNQTYVNISNTNFAAGQSVVSVKLAGNSSLCPVSGWAIYSKDNSIRIGSKGDVFVIREPFISCSPLECRTFFLTQGALLNDKHSNGTIKDRSPYRTLMSCPIGEVPSPYNSRFESVAWSASACHDGINWLTIGISGPDNGAVAVLKYNGIITDTIKSWRNNILRTQESECACVNGSCFTVMTDGPSDGQASYKIFRIEKGKIVKSVEMNAPNYHFEECSCYPDSSEITCVCRDNWHGSNRPWVSFNQNLEYQIGYICSGIFGDNPRPNDKTGSCGPVSSNGANGVKGFSFKYGNGVWIGRTKSISSRNGFEMIWDPNGWTGTDNNFSIKQDIVGINEWSGYSGSFVQHPELTGLDCIRPCFWVELIRGRPKENTIWTSGSSISFCGVNSDTVGWSWPDGAELPFTIDK

SEQ ID NO: 22401 - protein, 469 aa, Artificial Sequence; identical to SEQ ID NO: 18719
  derived and/or modified protein sequence (wt) from neuraminidase__InfluenzaA__AFK14195

SEQ ID NO: 22402 - protein, 469 aa, Artificial Sequence; identical to SEQ ID NO: 16738
  derived and/or modified protein sequence (wt) from neuraminidase__InfluenzaA__AFK14204

SEQ ID NO: 22403 - protein, 469 aa, Artificial Sequence; identical to SEQ ID NO: 18719
  derived and/or modified protein sequence (wt) from neuraminidase__InfluenzaA__AFK14213

SEQ ID NO: 22404 - protein, 469 aa, Artificial Sequence
  derived and/or modified protein sequence (wt) from neuraminidase__InfluenzaA__AFK14222
MNPNQKIITIGSVCMTIGMANLILQIGNIISIWISHSIRLGNQNQIETCNQSVITYENNTWVNQTYVNISNTNFAAGQSVVSVKLAGNSSLCPVSGWAIYSKDNSIRIGSKGDVFVIREPFISCSPLECRTFFLTQGALLNDKHSNGTIKDRSPYRTLMSCPIGEVPSPYNSRFESVAWSASACHDGINWLTIGISGPDNGAVAVLKYNGIITDTIKSWRNNILRTQESECACVNGSCFTVMTDGPSDGQASYKIFRIEKGKIVKSVEMNAPNYHYEECSCYPDSSEITCVCRDNWHGSNRPWVSFNQNLEYQIGYICSGIFGDNPRPNDKTGSCGPVSSNGANGVKGFSFKYGNGVWIGRTKSISSRNGFEMIWDPNGWTGTDNNFSIKQDIVGINEWSGYSGSFVQHPELTGLDCIRPCFWVELIRGRPKENTIWTSGSSISFCGVNSDTVGWSWPDGAELPFTIDK

SEQ ID NO: 22405 - protein, 469 aa, Artificial Sequence; identical to SEQ ID NO: 17321
  derived and/or modified protein sequence (wt) from neuraminidase__InfluenzaA__AFK14231

SEQ ID NO: 22406 - protein, 469 aa, Artificial Sequence; identical to SEQ ID NO: 16738
  derived and/or modified protein sequence (wt) from neuraminidase__InfluenzaA__AFK14240

SEQ ID NO: 22407 - protein, 469 aa, Artificial Sequence; identical to SEQ ID NO: 17505
  derived and/or modified protein sequence (wt) from neuraminidase__InfluenzaA__AFK14249

SEQ ID NO: 22408 - protein, 469 aa, Artificial Sequence; identical to SEQ ID NO: 16738
  derived and/or modified protein sequence (wt) from neuraminidase__InfluenzaA__AFK14257

SEQ ID NO: 22409 - protein, 469 aa, Artificial Sequence; identical to SEQ ID NO: 16738
  derived and/or modified protein sequence (wt) from neuraminidase__InfluenzaA__AFK14266

SEQ ID NO: 22410 - protein, 469 aa, Artificial Sequence; identical to SEQ ID NO: 16738
  derived and/or modified protein sequence (wt) from neuraminidase__InfluenzaA__AFK14274

SEQ ID NO: 22411 - protein, 469 aa, Artificial Sequence
  derived and/or modified protein sequence (wt) from neuraminidase__InfluenzaA__AFK14281
MNPNQKIITIGSVCMTIGMANLILQIGNIISIWISHSIQLGNQNQIETCNQSVITYENNTWVNQTDVNISNTNFAAGQSVVSVKLAGNSSLCPVSGWAIYSKDNSIRIGSKGDVFVIREPFISCSPLECRTFFLTQGALLNDKHSNGTIKDRSPYRTLMSCPIGEVPSPYNSRFESVAWSASACHDGINWLTIGISGPDNGAVAVLKYNGIITDTIKSWRNNILRTQESECACVNGSCFTVMTDGPSDGQASYKIFRIEKGKIVKSVEMNAPNYHYEECSCYPDSSEITCVCRDNWHGSNRPWVSFNQNLEYQIGYICSGIFGDNPRPNDKTGSCGPVSSNGANGVKGFSFKYGNGVWIGRTKSISSRNGFEMIWDPNGWTGTDNNFSIKQDIVGINEWSGYSGSFVQHPELTGLDCIRPCFWVELIRGRPKENTIWTSGSSISFCGVNSDTVGWSWPDGAELPFTIDK

SEQ ID NO: 22412 - protein, 469 aa, Artificial Sequence; identical to SEQ ID NO: 16738
  derived and/or modified protein sequence (wt) from neuraminidase__InfluenzaA__AFK14289

SEQ ID NO: 22413 - protein, 469 aa, Artificial Sequence; identical to SEQ ID NO: 17321
  derived and/or modified protein sequence (wt) from neuraminidase__InfluenzaA__AFK14298

SEQ ID NO: 22414 - protein, 469 aa, Artificial Sequence; identical to SEQ ID NO: 16738
  derived and/or modified protein sequence (wt) from neuraminidase__InfluenzaA__AFK14307

SEQ ID NO: 22415 - protein, 469 aa, Artificial Sequence; identical to SEQ ID NO: 18719
  derived and/or modified protein sequence (wt) from neuraminidase__InfluenzaA__AFK14316

SEQ ID NO: 22416 - protein, 469 aa, Artificial Sequence
  derived and/or modified protein sequence (wt) from neuraminidase__InfluenzaA__AFK14325
MNPNQKIITIGSVCMTIGMANLILQIGNIISIWISHSIQLGNQNQIETCNQSVITYENNTWVNQTYVNISNTNFAAGQSVVSVKLAGNSSLCPVSGWAIYSKDNSIRIGSKGDVFVIREPFISCSPLECRTFFLTQGALLNDKHSNGTIKDRSPYRTLMSCPIGEVPSPYNSRFESVAWSASACHDGINWLTIGISGPDNGAVAVLKYNGIITDTIKSWRNNILRTQESECACVNGSCFTVMTDGPSDGQASYKIFRIERGKIVKSVEMNAPNYHYEECSCYPDSSEITCVCRDNWHGSNRPWVSFNQNLEYQIGYICSGIFGDNPRPNDKTGSCGPVSSNGANGVKGFSFKYGNGVWIGRTKSISSRNGFEMIWDPNGWTGTDNNFSIKQDIVGINEWSGYSGSFVQHPELTGLDCIRPCFWVELIRGRPKENTIWTSGSSISFCGVNSDTVGWSWPDGAELPFTIDK

SEQ ID NO: 22417 - protein, 469 aa, Artificial Sequence; identical to SEQ ID NO: 16738
  derived and/or modified protein sequence (wt) from neuraminidase__InfluenzaA__AFK14334

SEQ ID NO: 22418 - protein, 469 aa, Artificial Sequence; identical to SEQ ID NO: 16738
  derived and/or modified protein sequence (wt) from neuraminidase__InfluenzaA__AFK14343

SEQ ID NO: 22419 - protein, 469 aa, Artificial Sequence; identical to SEQ ID NO: 16738
  derived and/or modified protein sequence (wt) from neuraminidase__InfluenzaA__AFK14352

SEQ ID NO: 22420 - protein, 469 aa, Artificial Sequence; identical to SEQ ID NO: 16738
  derived and/or modified protein sequence (wt) from neuraminidase__InfluenzaA__AFK14360

SEQ ID NO: 22421 - protein, 469 aa, Artificial Sequence; identical to SEQ ID NO: 16738
  derived and/or modified protein sequence (wt) from neuraminidase__InfluenzaA__AFK14369

SEQ ID NO: 22422 - protein, 469 aa, Artificial Sequence
  derived and/or modified protein sequence (wt) from neuraminidase__InfluenzaA__AFK14387
MNPNQKIITIGSVCMTIGMANLILQIGNITSIWISHSIQLGNQNQIDTCNQSVITYENNTWVNQTYVNISNTNFAAGQSVVSVKLAGNSSLCPVSGWAIYSKDNSIRIGSKGDVFVIREPFISCSPLECRTFFLTQGALLNDKHSNGTIKDRSPYRTLMSCPIGEVPSPYNSRFESVAWSASACHDGINWLTIGISGPDNGAVAVLKYNGIITDTIKSWRNNILRTQESECACVNGSCFTVMTDGPSDGQASYKIFRIEKGKIVKSVEMNAPNYHYEECSCYPDSSEITCVCRDNWHGSNRPWVSFNQNLEYQIGYICSGIFGDNPRPNDKTGSCGPVSSNGANGVKGFSFKYGNGVWIGRTKSISSRNGFEMIWDPNGWTGTDNNFSIKQDIVGINEWSGYSGSFVQHPELTGLDCIRPCFWVELIRGRPKENTIWTSGSSISFCGVNSDTVGWSWPDGAELPFTIDK

SEQ ID NO: 22423 - protein, 469 aa, Artificial Sequence; identical to SEQ ID NO: 17321
  derived and/or modified protein sequence (wt) from neuraminidase__InfluenzaA__AFK14397

SEQ ID NO: 22424 - protein, 469 aa, Artificial Sequence; identical to SEQ ID NO: 16738
  derived and/or modified protein sequence (wt) from neuraminidase__InfluenzaA__AFK14406

SEQ ID NO: 22425 - protein, 469 aa, Artificial Sequence; identical to SEQ ID NO: 16738
  derived and/or modified protein sequence (wt) from neuraminidase__InfluenzaA__AFK14415

SEQ ID NO: 22426 - protein, 469 aa, Artificial Sequence; identical to SEQ ID NO: 16738
  derived and/or modified protein sequence (wt) from neuraminidase__InfluenzaA__AFK14424

SEQ ID NO: 22427 - protein, 469 aa, Artificial Sequence
  derived and/or modified protein sequence (wt) from neuraminidase__InfluenzaA__AFK14433
MNPNQKIITIGSVCMIIGMANLILQIGNIISIWISHSIQLGNQNQIETCNQSVITYENNTWVNQTYVNISNTNFAAGQSVVSVKLAGNSSLCPVSGWAIYSKDNSIRIGSKGDVFVIREPFISCSPLECRTFFLTQGALLNDKHSNGTIKDRSPYRTLMSCPIGEVPSPYNSRFESVAWSASACHDGINWLTIGISGPDNGAVAVLKYNGIITDTIKSWRNNILRTQESECACVNGSCFTVMTDGPSDGQASYKIFRIEKGKIVKSVEMNAPNYHYEECSCYPDSSEITCVCRDNWHGSNRPWVSFNQNLEYQIGYICSGIFGDNPRPNDKTGSCGPVSSNGANGVKGFSFKYGNGVWIGRTKSISSRNGFEMIWDPNGWTGTDNNFSIKQDIVGINEWSGYSGSFVQHPELTGLDCIRPCFWVELIRGRPKENTIWTSGSSISFCGVNSDTVGWSWPDGAELPFTIDK

SEQ ID NO: 22428 - protein, 469 aa, Artificial Sequence; identical to SEQ ID NO: 16738
  derived and/or modified protein sequence (wt) from neuraminidase__InfluenzaA__AFK14442

SEQ ID NO: 22429 - protein, 469 aa, Artificial Sequence
  derived and/or modified protein sequence (wt) from neuraminidase__InfluenzaA__AFK14451
MNPNQKIITIGSVCMTIGMANLILQIGNIISIWISHSIQLGNQNQIETCNQSVITYENNTWVNQTYVNISNTNFAAGQSVASAKLAGNSSLCPVSGWAIYSKDNSIRIGSKGDVFVIREPFISCSPLECRTFFLTQGALLNDKHSNGTIKDRSPYRTLMSCPIGEVPSPYNSRFESVAWSASACHDGINWLTIGISGPDNGAVAVLKYNGIITDTIKSWRNNILRTQESECACVNGSCFTVMTDGPSDGQASYKIFRIEKGKIVKSVEMNAPNYHYEECSCYPDSSEITCVCRDNWHGSNRPWVSFNQNLEYQIGYICSGIFGDNPRPNDKTGSCGPVSSNGANGVKGFSFKYGNGVWIGRTKSISSRNGFEMIWDPNGWTGTDNNFSIKQDIVGINEWSGYSGSFVQHPELTGLDCIRPCFWVELIRGRPKENTIWTSGSIISFCGVNSDTVGWSWPDGAELPFTIDK

SEQ ID NO: 22430 - protein, 469 aa, Artificial Sequence; identical to SEQ ID NO: 16738
  derived and/or modified protein sequence (wt) from neuraminidase__InfluenzaA__AFK14458

SEQ ID NO: 22431 - protein, 469 aa, Artificial Sequence; identical to SEQ ID NO: 16738
  derived and/or modified protein sequence (wt) from neuraminidase__InfluenzaA__AFK14467

SEQ ID NO: 22432 - protein, 469 aa, Artificial Sequence; identical to SEQ ID NO: 16738
  derived and/or modified protein sequence (wt) from neuraminidase__InfluenzaA__AFK14476

SEQ ID NO: 22433 - protein, 469 aa, Artificial Sequence; identical to SEQ ID NO: 19797
  derived and/or modified protein sequence (wt) from neuraminidase__InfluenzaA__AFK14485

SEQ ID NO: 22434 - protein, 469 aa, Artificial Sequence; identical to SEQ ID NO: 16738
  derived and/or modified protein sequence (wt) from neuraminidase__InfluenzaA__AFK14504

SEQ ID NO: 22435 - protein, 469 aa, Artificial Sequence; identical to SEQ ID NO: 16738
  derived and/or modified protein sequence (wt) from neuraminidase__InfluenzaA__AFK14514

SEQ ID NO: 22436 - protein, 469 aa, Artificial Sequence; identical to SEQ ID NO: 16738
  derived and/or modified protein sequence (wt) from neuraminidase__InfluenzaA__AFK14522

SEQ ID NO: 22437 - protein, 469 aa, Artificial Sequence; identical to SEQ ID NO: 16738
  derived and/or modified protein sequence (wt) from neuraminidase__InfluenzaA__AFK14529

SEQ ID NO: 22438 - protein, 469 aa, Artificial Sequence; identical to SEQ ID NO: 16738
  derived and/or modified protein sequence (wt) from neuraminidase__InfluenzaA__AFK14538

SEQ ID NO: 22439 - protein, 469 aa, Artificial Sequence; identical to SEQ ID NO: 19113
  derived and/or modified protein sequence (wt) from neuraminidase__InfluenzaA__AFK14547

SEQ ID NO: 22440 - protein, 469 aa, Artificial Sequence
  derived and/or modified protein sequence (wt) from neuraminidase__InfluenzaA__AFK14555
MNPNQKIITIGSVCMTIGMANLILQIGNIISIWISHSIQLGNQNQIETCNQSVITYENNTWVNQTYVNISNTNFAAGQSVISVKLAGNSSLCPVSGWAIYSKDNSIRIGSKGDVFVIREPFISCSPLECRTFFLTQGALLNDKHSNGTIKDRSPYRTLMSCPIGEVPSPYNSRFESVAWSASACHDGINWLTIGISGPDNGAVAVLKYNGIITDTIKSWRNNILRTQESECACVNGSCFTVMTDGPSDGQASYKIFRIEKGKIVKSVEMNAPNYHYEECSCYPDSSEITCVCRDNWHGSNRPWVSFNQNLEYQIGYICSGIFGDNPRPNDKTGSCGPVSSNGANGVKGFSFKYGNGVWIGRTKSISSRNGFEMIWDPNGWTGTDNNFSIKQDIVGINEWSGYSGSFVQHPELTGLDCIRPCFWVELIRGRPKENTIWTSGSSISFCGVNSDTVGWSWPDGAELPFTIDK

SEQ ID NO: 22441 - protein, 469 aa, Artificial Sequence; identical to SEQ ID NO: 16738
  derived and/or modified protein sequence (wt) from neuraminidase__InfluenzaA__AFK14564

SEQ ID NO: 22442 - protein, 469 aa, Artificial Sequence; identical to SEQ ID NO: 16738
  derived and/or modified protein sequence (wt) from neuraminidase__InfluenzaA__AFK14573

SEQ ID NO: 22443 - protein, 469 aa, Artificial Sequence
  derived and/or modified protein sequence (wt) from neuraminidase__InfluenzaA__AFK14579
MNPNQKIITIGSVCMTIGMANLILQIGNIISIWISHSIQLGNQNQIETCNQSVITYENNTWVNQTYVNISNTNFAAGQSVVSVKLAGNSSLCPVSGWAIYSKDNSIRIGSKGDVFVIREPFISCSPLECRTFFLTQGALLNDKHSNGTIKDRSPYRTLMSCPIGEVPSPYNSRFESVAWSASACHDGINWLTIGISGPDNGAVAVLKYNGIITDTIKSWRNNILRTQESECACVNGSCFTVMTDGPSDGQASYKIFRIEKGKIVKSVEMNAPNYHYEECSCYPDSSEITCVCRDNWHGSNRPWVSFNQNLEYQIGYMCSGIFGDNPRPNDKTGSCGPVSSNGANGVKGFSFKYGNGVWIGRTKSISSRNGFEMIWDPNGWTGTDNNFSIKQDIVGINEWSGYSGSFVQHPELTGLDCIRPCFWVELIRGRPKENTIWTSGSSISFCGVNSDTVGWSWPDGAELPFTIDK

SEQ ID NO: 22444 - protein, 469 aa, Artificial Sequence; identical to SEQ ID NO: 16738
  derived and/or modified protein sequence (wt) from neuraminidase__InfluenzaA__AFK14588

SEQ ID NO: 22445 - protein, 469 aa, Artificial Sequence; identical to SEQ ID NO: 16738
  derived and/or modified protein sequence (wt) from neuraminidase__InfluenzaA__AFK14597

SEQ ID NO: 22446 - protein, 469 aa, Artificial Sequence; identical to SEQ ID NO: 16738
  derived and/or modified protein sequence (wt) from neuraminidase__InfluenzaA__AFK14604

SEQ ID NO: 22447 - protein, 469 aa, Artificial Sequence; identical to SEQ ID NO: 16738
  derived and/or modified protein sequence (wt) from neuraminidase__InfluenzaA__AFK14632

SEQ ID NO: 22448 - protein, 469 aa, Artificial Sequence; identical to SEQ ID NO: 16728
  derived and/or modified protein sequence (wt) from neuraminidase__InfluenzaA__AFK14641

SEQ ID NO: 22449 - protein, 469 aa, Artificial Sequence; identical to SEQ ID NO: 16738
  derived and/or modified protein sequence (wt) from neuraminidase__InfluenzaA__AFK14651

SEQ ID NO: 22450 - protein, 469 aa, Artificial Sequence; identical to SEQ ID NO: 16738
  derived and/or modified protein sequence (wt) from neuraminidase__InfluenzaA__AFK14656

SEQ ID NO: 22451 - protein, 469 aa, Artificial Sequence; identical to SEQ ID NO: 16738
  derived and/or modified protein sequence (wt) from neuraminidase__InfluenzaA__AFK14663

SEQ ID NO: 22452 - protein, 469 aa, Artificial Sequence; identical to SEQ ID NO: 16738
  derived and/or modified protein sequence (wt) from neuraminidase__InfluenzaA__AFK14672

SEQ ID NO: 22453 - protein, 469 aa, Artificial Sequence; identical to SEQ ID NO: 16738
  derived and/or modified protein sequence (wt) from neuraminidase__InfluenzaA__AFK14680

SEQ ID NO: 22454 - protein, 469 aa, Artificial Sequence; identical to SEQ ID NO: 16738
  derived and/or modified protein sequence (wt) from neuraminidase__InfluenzaA__AFK14690

SEQ ID NO: 22455 - protein, 469 aa, Artificial Sequence; identical to SEQ ID NO: 16738
  derived and/or modified protein sequence (wt) from neuraminidase__InfluenzaA__AFK14707

SEQ ID NO: 22456 - protein, 469 aa, Artificial Sequence; identical to SEQ ID NO: 16738
  derived and/or modified protein sequence (wt) from neuraminidase__InfluenzaA__AFK14715

SEQ ID NO: 22457 - protein, 469 aa, Artificial Sequence; identical to SEQ ID NO: 16738
  derived and/or modified protein sequence (wt) from neuraminidase__InfluenzaA__AFK14724

SEQ ID NO: 22458 - protein, 469 aa, Artificial Sequence; identical to SEQ ID NO: 16738
  derived and/or modified protein sequence (wt) from neuraminidase__InfluenzaA__AFK14733

SEQ ID NO: 22459 - protein, 469 aa, Artificial Sequence; identical to SEQ ID NO: 16738
  derived and/or modified protein sequence (wt) from neuraminidase__InfluenzaA__AFK14751

SEQ ID NO: 22460 - protein, 469 aa, Artificial Sequence; identical to SEQ ID NO: 16738
  derived and/or modified protein sequence (wt) from neuraminidase__InfluenzaA__AFK14757

SEQ ID NO: 22461 - protein, 469 aa, Artificial Sequence; identical to SEQ ID NO: 16738
  derived and/or modified protein sequence (wt) from neuraminidase__InfluenzaA__AFK14766

SEQ ID NO: 22462 - protein, 469 aa, Artificial Sequence; identical to SEQ ID NO: 17321
  derived and/or modified protein sequence (wt) from neuraminidase__InfluenzaA__AFK14774

SEQ ID NO: 22463 - protein, 469 aa, Artificial Sequence; identical to SEQ ID NO: 22440
  derived and/or modified protein sequence (wt) from neuraminidase__InfluenzaA__AFK14781

SEQ ID NO: 22464 - protein, 469 aa, Artificial Sequence; identical to SEQ ID NO: 17321
  derived and/or modified protein sequence (wt) from neuraminidase__InfluenzaA__AFK14790

SEQ ID NO: 22465 - protein, 469 aa, Artificial Sequence
  derived and/or modified protein sequence (wt) from neuraminidase__InfluenzaA__AFK14800
MNPNQKIITIGSVCMTIGMANLILQIGNIISIWISHSIQLGNQNQIETCNQSVITYENNTWVNQTYVNISNTNFAAGQSVVSVKLAGNSSLCPVSGWAIYSKDNSIRIGSKGDVFVIREPFISCSPLECRTFFLTQGALLNDKHSNGTIKDRSPYRTLMSCPIGEVPSPYNSRFESVAWSASACHDGINWLTIGISGPDNGAVAVLKYNGIITDTIKSWRNNILRTQESECACVNGSCFTVMTDGPSDGQASYKIFRIEKGKIVKSVEMNAPNYHYEECSCYPDSSEITCVCRDNWHGSNRPWVSFNQNLEYQIGYICSGIFGDNPRPNDKTGSCGPVSSNGANGVKGFSFKYGNGVWIGRTKSISSRNGFEMIWDPNGWTGTDNNFSIKQDIVGINEWSGYSGSFVQHPELTGLDCIRPCFWVELIRGRPRENTIWTSGSSISFCGVNSDTVGWSWPDGAELPFTIDK

SEQ ID NO: 22466 - protein, 469 aa, Artificial Sequence; identical to SEQ ID NO: 18719
  derived and/or modified protein sequence (wt) from neuraminidase__InfluenzaA__AFK14809

SEQ ID NO: 22467 - protein, 469 aa, Artificial Sequence; identical to SEQ ID NO: 18719
  derived and/or modified protein sequence (wt) from neuraminidase__InfluenzaA__AFK14816

SEQ ID NO: 22468 - protein, 469 aa, Artificial Sequence; identical to SEQ ID NO: 16738
  derived and/or modified protein sequence (wt) from neuraminidase__InfluenzaA__AFK14824

SEQ ID NO: 22469 - protein, 469 aa, Artificial Sequence; identical to SEQ ID NO: 16738
  derived and/or modified protein sequence (wt) from neuraminidase__InfluenzaA__AFK14841

SEQ ID NO: 22470 - protein, 469 aa, Artificial Sequence; identical to SEQ ID NO: 17811
  derived and/or modified protein sequence (wt) from neuraminidase__InfluenzaA__AFK14849

SEQ ID NO: 22471 - protein, 469 aa, Artificial Sequence
  derived and/or modified protein sequence (wt) from neuraminidase__InfluenzaA__AFK14856
MNPNQKIITIGSVCMTIGMANLILQIGNIISIWISHSIQLGNQNQIETCNQSVITYENNTWVNQTYVNISNTNFAAGQSVVSVKLAGNSSLCPVSGWAIYSKDNSVRIGSKGDVFVIREPFISCSPLECRTFFLTQGALLNDKHSNGTIKDRSPYRTLMSCPIGEVPSPYNSRFESVAWSASACHDGINWLTIGISGPDNGAVAVLKYNGIITDTIKSWRNNILRTQESECACVNGSCFTVMTDGPSNGQASYKIFKIEKGKIVKSVEMNAPNYHYEECSCYPDSSEITCVCRDNWHGSNRPWVSFNQNLEYQIGYICSGIFGDNPRPIDKTGSCGPVSSNGANGVKGFSFKYGNGVWIGRTKSISSRNGFEMIWDPNGWTGTDNNFSIKQDIVGINEWSGYSGSFVQHPELTGLDCIRPCFWVELIRGRPKENTIWTSGSSISFCGVNSDTVGWSWPDGAELPFTIDK

SEQ ID NO: 22472 - protein, 469 aa, Artificial Sequence; identical to SEQ ID NO: 16738
  derived and/or modified protein sequence (wt) from neuraminidase__InfluenzaA__AFK14870

SEQ ID NO: 22473 - protein, 469 aa, Artificial Sequence; identical to SEQ ID NO: 16738
  derived and/or modified protein sequence (wt) from neuraminidase__InfluenzaA__AFK14879

SEQ ID NO: 22474 - protein, 469 aa, Artificial Sequence; identical to SEQ ID NO: 16738
  derived and/or modified protein sequence (wt) from neuraminidase__InfluenzaA__AFK14885

SEQ ID NO: 22475 - protein, 469 aa, Artificial Sequence; identical to SEQ ID NO: 16738
  derived and/or modified protein sequence (wt) from neuraminidase__InfluenzaA__AFK14894

SEQ ID NO: 22476 - protein, 469 aa, Artificial Sequence; identical to SEQ ID NO: 16738
  derived and/or modified protein sequence (wt) from neuraminidase__InfluenzaA__AFK14903

SEQ ID NO: 22477 - protein, 469 aa, Artificial Sequence; identical to SEQ ID NO: 16738
  derived and/or modified protein sequence (wt) from neuraminidase__InfluenzaA__AFK14912

SEQ ID NO: 22478 - protein, 469 aa, Artificial Sequence; identical to SEQ ID NO: 16738
  derived and/or modified protein sequence (wt) from neuraminidase__InfluenzaA__AFK14921

SEQ ID NO: 22479 - protein, 469 aa, Artificial Sequence; identical to SEQ ID NO: 16738
  derived and/or modified protein sequence (wt) from neuraminidase__InfluenzaA__AFK14931

SEQ ID NO: 22480 - protein, 469 aa, Artificial Sequence
  derived and/or modified protein sequence (wt) from neuraminidase__InfluenzaA__AFK25604
MNPNQKIITIGSVCMTIGMANLILQIGNIISIWISHSIQLRNQSQIETCNQSVITYENNTWVNQTYVNISNTNFAAGQSVVSVKLAGNSSLCPVSGWAIYSKDNSIRIGSKGDVFVIREPFISCSPLECRTFFLTQGALLNDKHSNGTIKDRSPYRTLMSCPIGEVPSPYNSRFESVAWSASACHDGINWLTIGISGPDNGAVAVLKYNGIITDTIKSWRNNILRTQESECACVNGSCFTIMTDGPSDGQASYKIFRIEKGKIVKSVEMNAPNYYYEECSCYPDSSEITCVCRDNWHGSNRPWVSFNQNLEYQIGYICSGIFGDNPRPNDKTGSCGPVSSNGANGVKGFSFKYGNGVWIGRTKSISSRKGFEMIWDPNGWTGTDNNFSIKQDIVGINEWSGYSGSFVQHPELTGLDCIRPCFWVELIRGRPKENTIWTSGSSISFCGVNSDTVGWSWPDGAELPFTIDK

SEQ ID NO: 22481 - protein, 469 aa, Artificial Sequence; identical to SEQ ID NO: 22480
  derived and/or modified protein sequence (wt) from neuraminidase__InfluenzaA__AFK25606

SEQ ID NO: 22482 - protein, 469 aa, Artificial Sequence; identical to SEQ ID NO: 18089
  derived and/or modified protein sequence (wt) from neuraminidase__InfluenzaA__AFK74537

SEQ ID NO: 22483 - protein, 469 aa, Artificial Sequence; identical to SEQ ID NO: 16738
  derived and/or modified protein sequence (wt) from neuraminidase__InfluenzaA__AFK74547

SEQ ID NO: 22484 - protein, 469 aa, Artificial Sequence; identical to SEQ ID NO: 19730
  derived and/or modified protein sequence (wt) from neuraminidase__InfluenzaA__AFK74557

SEQ ID NO: 22485 - protein, 469 aa, Artificial Sequence; identical to SEQ ID NO: 16738
  derived and/or modified protein sequence (wt) from neuraminidase__InfluenzaA__AFK74567

SEQ ID NO: 22486 - protein, 469 aa, Artificial Sequence; identical to SEQ ID NO: 16738
  derived and/or modified protein sequence (wt) from neuraminidase__InfluenzaA__AFK74578

SEQ ID NO: 22487 - protein, 469 aa, Artificial Sequence; identical to SEQ ID NO: 21853
  derived and/or modified protein sequence (wt) from neuraminidase__InfluenzaA__AFK74588

SEQ ID NO: 22488 - protein, 469 aa, Artificial Sequence; identical to SEQ ID NO: 16738
  derived and/or modified protein sequence (wt) from neuraminidase__InfluenzaA__AFK74598

SEQ ID NO: 22489 - protein, 469 aa, Artificial Sequence; identical to SEQ ID NO: 16738
  derived and/or modified protein sequence (wt) from neuraminidase__InfluenzaA__AFK74608

SEQ ID NO: 22490 - protein, 469 aa, Artificial Sequence; identical to SEQ ID NO: 16738
  derived and/or modified protein sequence (wt) from neuraminidase__InfluenzaA__AFK74618

SEQ ID NO: 22491 - protein, 469 aa, Artificial Sequence; identical to SEQ ID NO: 16738
  derived and/or modified protein sequence (wt) from neuraminidase__InfluenzaA__AFK74628

SEQ ID NO: 22492 - protein, 469 aa, Artificial Sequence; identical to SEQ ID NO: 16738
  derived and/or modified protein sequence (wt) from neuraminidase__InfluenzaA__AFK74638

SEQ ID NO: 22493 - protein, 469 aa, Artificial Sequence; identical to SEQ ID NO: 16738
  derived and/or modified protein sequence (wt) from neuraminidase__InfluenzaA__AFK74648

SEQ ID NO: 22494 - protein, 469 aa, Artificial Sequence; identical to SEQ ID NO: 21862
  derived and/or modified protein sequence (wt) from neuraminidase__InfluenzaA__AFK74658

SEQ ID NO: 22495 - protein, 469 aa, Artificial Sequence; identical to SEQ ID NO: 21862
  derived and/or modified protein sequence (wt) from neuraminidase__InfluenzaA__AFK74668

SEQ ID NO: 22496 - protein, 469 aa, Artificial Sequence; identical to SEQ ID NO: 16738
  derived and/or modified protein sequence (wt) from neuraminidase__InfluenzaA__AFK74678

SEQ ID NO: 22497 - protein, 469 aa, Artificial Sequence; identical to SEQ ID NO: 16738
  derived and/or modified protein sequence (wt) from neuraminidase__InfluenzaA__AFK74688

SEQ ID NO: 22498 - protein, 469 aa, Artificial Sequence; identical to SEQ ID NO: 16738
  derived and/or modified protein sequence (wt) from neuraminidase__InfluenzaA__AFK74698

SEQ ID NO: 22499 - protein, 469 aa, Artificial Sequence; identical to SEQ ID NO: 21869
  derived and/or modified protein sequence (wt) from neuraminidase__InfluenzaA__AFK74708

SEQ ID NO: 22500 - protein, 469 aa, Artificial Sequence; identical to SEQ ID NO: 19730
  derived and/or modified protein sequence (wt) from neuraminidase__InfluenzaA__AFK74718

SEQ ID NO: 22501 - protein, 469 aa, Artificial Sequence; identical to SEQ ID NO: 16738
  derived and/or modified protein sequence (wt) from neuraminidase__InfluenzaA__AFK74728

SEQ ID NO: 22502 - protein, 469 aa, Artificial Sequence; identical to SEQ ID NO: 16738
  derived and/or modified protein sequence (wt) from neuraminidase__InfluenzaA__AFK74738

SEQ ID NO: 22503 - protein, 469 aa, Artificial Sequence; identical to SEQ ID NO: 16738
  derived and/or modified protein sequence (wt) from neuraminidase__InfluenzaA__AFK74748

SEQ ID NO: 22504 - protein, 469 aa, Artificial Sequence; identical to SEQ ID NO: 16738
  derived and/or modified protein sequence (wt) from neuraminidase__InfluenzaA__AFK74758

SEQ ID NO: 22505 - protein, 469 aa, Artificial Sequence; identical to SEQ ID NO: 16738
  derived and/or modified protein sequence (wt) from neuraminidase__InfluenzaA__AFK74768

SEQ ID NO: 22506 - protein, 469 aa, Artificial Sequence; identical to SEQ ID NO: 16738
  derived and/or modified protein sequence (wt) from neuraminidase__InfluenzaA__AFK74778

SEQ ID NO: 22507 - protein, 469 aa, Artificial Sequence; identical to SEQ ID NO: 19730
  derived and/or modified protein sequence (wt) from neuraminidase__InfluenzaA__AFK74788

SEQ ID NO: 22508 - protein, 469 aa, Artificial Sequence; identical to SEQ ID NO: 19730
  derived and/or modified protein sequence (wt) from neuraminidase__InfluenzaA__AFK74798

SEQ ID NO: 22509 - protein, 469 aa, Artificial Sequence; identical to SEQ ID NO: 19730
  derived and/or modified protein sequence (wt) from neuraminidase__InfluenzaA__AFK74808

SEQ ID NO: 22510 - protein, 469 aa, Artificial Sequence; identical to SEQ ID NO: 19730
  derived and/or modified protein sequence (wt) from neuraminidase__InfluenzaA__AFK74818

SEQ ID NO: 22511 - protein, 469 aa, Artificial Sequence; identical to SEQ ID NO: 16738
  derived and/or modified protein sequence (wt) from neuraminidase__InfluenzaA__AFK74828

SEQ ID NO: 22512 - protein, 469 aa, Artificial Sequence; identical to SEQ ID NO: 18629
  derived and/or modified protein sequence (wt) from neuraminidase__InfluenzaA__AFK74838

SEQ ID NO: 22513 - protein, 469 aa, Artificial Sequence; identical to SEQ ID NO: 16738
  derived and/or modified protein sequence (wt) from neuraminidase__InfluenzaA__AFK74848

SEQ ID NO: 22514 - protein, 469 aa, Artificial Sequence; identical to SEQ ID NO: 16738
  derived and/or modified protein sequence (wt) from neuraminidase__InfluenzaA__AFK74898

SEQ ID NO: 22515 - protein, 469 aa, Artificial Sequence; identical to SEQ ID NO: 16738
  derived and/or modified protein sequence (wt) from neuraminidase__InfluenzaA__AFK74908

SEQ ID NO: 22516 - protein, 469 aa, Artificial Sequence; identical to SEQ ID NO: 16738
  derived and/or modified protein sequence (wt) from neuraminidase__InfluenzaA__AFK74918

SEQ ID NO: 22517 - protein, 469 aa, Artificial Sequence; identical to SEQ ID NO: 16738
  derived and/or modified protein sequence (wt) from neuraminidase__InfluenzaA__AFK74928

SEQ ID NO: 22518 - protein, 469 aa, Artificial Sequence
  derived and/or modified protein sequence (wt) from neuraminidase__InfluenzaA__AFK74938
MNPNQKIITIGSVCMTIGMANLILQIGNIISIWISHSIQLGNQNQIETCNQSVITYENNTWVNQTYVNISNTNFAAGQSVVSVKLAGNSSLCPVSGWAIYSKDNSIRIGSKGDVFVIREPFISCSPLECRTFFLTQGALLNDKHSNGTIKDRSPYRTLMSCPIGEVPSPYNSRFESVAWSASACHDGINWLTIGISGPDNGAVAVLKYNGIITDTIKSWRNNILRTQESECACVNGSCFTVMTDGPSDGQASYKIFRIEKGKIVKSVEMNAPNYHYEECSCYPDSSEITCVCRDNWHGSNRPWVSFNQNLEYQIGYICSGIFGDNPRPNDNTGSCGPVSSNGANGVKGFSFKYGNGVWIGRTKSISSRNGFEMIWDPNGWTGTDNNFSIKQDIVGINEWSGYSGSFVQHPELTGLDCIRPCFWVELIRGRPKENTIWTSGSSISFCGVNSDTVGWSWPDGAELPFTIDK

SEQ ID NO: 22519 - protein, 469 aa, Artificial Sequence; identical to SEQ ID NO: 16738
  derived and/or modified protein sequence (wt) from neuraminidase__InfluenzaA__AFK74948

SEQ ID NO: 22520 - protein, 469 aa, Artificial Sequence; identical to SEQ ID NO: 18629
  derived and/or modified protein sequence (wt) from neuraminidase__InfluenzaA__AFK74958

SEQ ID NO: 22521 - protein, 469 aa, Artificial Sequence; identical to SEQ ID NO: 19730
  derived and/or modified protein sequence (wt) from neuraminidase__InfluenzaA__AFK74968

SEQ ID NO: 22522 - protein, 469 aa, Artificial Sequence; identical to SEQ ID NO: 16738
  derived and/or modified protein sequence (wt) from neuraminidase__InfluenzaA__AFK74978

SEQ ID NO: 22523 - protein, 469 aa, Artificial Sequence; identical to SEQ ID NO: 18629
  derived and/or modified protein sequence (wt) from neuraminidase__InfluenzaA__AFK74988

SEQ ID NO: 22524 - protein, 469 aa, Artificial Sequence; identical to SEQ ID NO: 16738
  derived and/or modified protein sequence (wt) from neuraminidase__InfluenzaA__AFK74998

SEQ ID NO: 22525 - protein, 469 aa, Artificial Sequence; identical to SEQ ID NO: 19730
  derived and/or modified protein sequence (wt) from neuraminidase__InfluenzaA__AFK75008

SEQ ID NO: 22526 - protein, 469 aa, Artificial Sequence; identical to SEQ ID NO: 16738
  derived and/or modified protein sequence (wt) from neuraminidase__InfluenzaA__AFK75018

SEQ ID NO: 22527 - protein, 469 aa, Artificial Sequence; identical to SEQ ID NO: 16738
  derived and/or modified protein sequence (wt) from neuraminidase__InfluenzaA__AFK75028

SEQ ID NO: 22528 - protein, 469 aa, Artificial Sequence; identical to SEQ ID NO: 16738
  derived and/or modified protein sequence (wt) from neuraminidase__InfluenzaA__AFK75038

SEQ ID NO: 22529 - protein, 469 aa, Artificial Sequence; identical to SEQ ID NO: 16738
  derived and/or modified protein sequence (wt) from neuraminidase__InfluenzaA__AFK75048

SEQ ID NO: 22530 - protein, 469 aa, Artificial Sequence; identical to SEQ ID NO: 16738
  derived and/or modified protein sequence (wt) from neuraminidase__InfluenzaA__AFK75058

SEQ ID NO: 22531 - protein, 469 aa, Artificial Sequence; identical to SEQ ID NO: 19730
  derived and/or modified protein sequence (wt) from neuraminidase__InfluenzaA__AFK75068

SEQ ID NO: 22532 - protein, 469 aa, Artificial Sequence; identical to SEQ ID NO: 16738
  derived and/or modified protein sequence (wt) from neuraminidase__InfluenzaA__AFK75078

SEQ ID NO: 22533 - protein, 469 aa, Artificial Sequence; identical to SEQ ID NO: 16738
  derived and/or modified protein sequence (wt) from neuraminidase__InfluenzaA__AFK75088

SEQ ID NO: 22534 - protein, 469 aa, Artificial Sequence; identical to SEQ ID NO: 16738
  derived and/or modified protein sequence (wt) from neuraminidase__InfluenzaA__AFK75098

SEQ ID NO: 22535 - protein, 469 aa, Artificial Sequence; identical to SEQ ID NO: 18651
  derived and/or modified protein sequence (wt) from neuraminidase__InfluenzaA__AFK75108

SEQ ID NO: 22536 - protein, 469 aa, Artificial Sequence; identical to SEQ ID NO: 16738
  derived and/or modified protein sequence (wt) from neuraminidase__InfluenzaA__AFK77860

SEQ ID NO: 22537 - protein, 469 aa, Artificial Sequence; identical to SEQ ID NO: 16738
  derived and/or modified protein sequence (wt) from neuraminidase__InfluenzaA__AFK77870

SEQ ID NO: 22538 - protein, 469 aa, Artificial Sequence; identical to SEQ ID NO: 16738
  derived and/or modified protein sequence (wt) from neuraminidase__InfluenzaA__AFK77880

SEQ ID NO: 22539 - protein, 469 aa, Artificial Sequence
  derived and/or modified protein sequence (wt) from neuraminidase__InfluenzaA__AFK77890
MNPNQKIITIGSVCMTIGMANLILQIGNIISIWISHSIQLGNQNQIETCNQSVITYENNTWVNQTYVNISNTNFAAGQSVVSVKLAGNSSLCPVSGWAIYSKDNSIRIGSKGDVFVIREPFISCSPLECRTFFLTQGALLNDKHSNGTIKDRSPYRTLMSCPIGEVPSPYNSRFESVAWSASACHDGINWLTIGISGPDNGAVAVLKYNGIITDTIKSWRNNILRTQESECACVNGSCFTVMTDGPSDGQASYKIFRIEKGKIVKSVEMNAPNYHYEECSCYPDSSEITCVCRDNWHGSNRPWVSFNQNLEYQIGYICSGIFGDNPRPNDKTGSCGPVSSNGANGVKGFSFKYGNGVWIGRTKGISSRNGFEMIWDPNGWTGTDNNFSIKQDIVGINEWSGYSGSFVQHPELTGLDCIRPCFWVELIRGRPKENTIWTSGSSISFCGVNSDTVGWSWPDGAELPFTIDK

SEQ ID NO: 22540 - protein, 469 aa, Artificial Sequence
  derived and/or modified protein sequence (wt) from neuraminidase__InfluenzaA__AFK77900
MNPNQKIITIGSVCMTIGMANLILQIGNIISIWISHSIQIGNQNQIETCNQSVITYENNTWVNQTYVNISNTNFAAGQSVASVKLAGNSSLCPVSGWAIYSKDNSIRIGSKGDVFVIREPFISCSPLECRTFFLTQGALLNDKHSNGTIKDRSPYRALMSCPIGEVPSPYNSRFESVAWSASACHDGINWLTIGISGPDNGAVAVLKYNGIITDTIKSWRNNILRTQESECACVNGSCFTIMTDGPSDGQASYKIFRIEKGKIVKSVEMNAPNYHYEECSCYPDSSEITCVCRDNWHGSNRPWVSFNQNLEYQIGYICSGIFGDNPRPNDKTGSCGPVSSNGANGVKGFSFKYGNGVWIGRTKSISSRKGFEMIWDPNGWTGTDNNFSIKQDIVGMNEWSGYSGSFVQHPELTGLDCIRPCFWVELIRGRPKENTIWTSGSSISFCGVNSDTVGWSWPDGAELPFTIDK

SEQ ID NO: 22541 - protein, 469 aa, Artificial Sequence
  derived and/or modified protein sequence (wt) from neuraminidase__InfluenzaA__AFK78031
MNPNQKIITIGSVCMTIGMANLILQIGNIISIWISHSIQLGNQNQIETCNQSVITYENNTWVNQTYVNISNTNFAAGQSVASVKLAGNSSLCPVSGWAIYSKDNSIRIGSKGDVFVIREPFISCSPLECRTFFLTQGALLNDKHSNGTIKDRSPYRALMSCPIGEVPSPYNSRFESVAWSASACHDGINWLTIGISGPDNGAVAVLKYNGIITDTIKSWRNNILRTQESECACVNGSCFTIMTDGPSDGQASYKIFRIEKGKIVKSVEMNAPNYHYEECSCYPDSSEITCVCRDNWHGSNRPWVSFNQNLEYQIGYICSGIFGDNPRPNDKTGSCGPVSSNGANGVKGFSFKYGNGVWIGRTKSISSRKGFEMIWDPNGWTGTDNNFSIKQDIVGMNEWSGYSGSFVQHPELTGLDCIRPCFWVELIRGRPKENTIWTSGSSISFCGVNSDTVGWSWPDGAELPFTIDK

SEQ ID NO: 22542 - protein, 469 aa, Artificial Sequence; identical to SEQ ID NO: 16738
  derived and/or modified protein sequence (wt) from neuraminidase__InfluenzaA__AFK78190

SEQ ID NO: 22543 - protein, 453 aa, Artificial Sequence
  derived and/or modified protein sequence (wt) from neuraminidase__InfluenzaA__AFM68957
MNPNQKIITIGSICMVVGIISLILQIGNIISIWISHSIQTGNQNHTGICNQGIITHNVVAGQDSTSVILTGNSSLCPIRGWAIHSKDNGIRIGSKGDVFVIREPFISCSHLECRTFFLTQGALLNDKHSYGTSKDRSPYRALMSCPVGEAPSPYNSRFESVAWSASACHDGMGWLTIGISGPDNGAVAVLKYNGIITETIKSWRKKILRTQESECTCVNGSCFTIMTDGPSDGLASYKIFKIEKGKVTKSIELNAPNSHYEECSCYPDTGKVMCVCRDNWHGSNRPWVSFDQNLDYQIGYICSGVFGDNPRPKDGTGSCGPVSADGANGVKGFSYRYGNGVWIGRTKSDSSRHGFEMIWDPNGWTETDSRFSVRQDVVAMTDRSGYSGSFVQHPELTGLDCMRPCFWVELIRGQPEEETIWTSGSIISFCGVNSDTVDWSWPDGAELPFTIDK

SEQ ID NO: 22544 - protein, 469 aa, Artificial Sequence
  derived and/or modified protein sequence (wt) from neuraminidase__InfluenzaA__AFM68968
MNPNQKIITIGSVSLTIATICFLMQIAILVTTVTLHFKQYECDSPANNQVMPCEPIIIERNITEIVYLTNTTIEKEICPKLVEYRNWSKPQCKITGFAPFSKDNSIRLSAGGDIWVTREPYVSCDPGKCYQFALGQGTTLDNKHSNDTIHDRTPHRTLLMNELGVPFHLGTRQVCIAWSSSSCHDGKAWLHVCVTGYDKNATASFIYDGRLVDSIGSWSKNILRTQESECVCINGTCTVVMTDGSASERADTKILFIEEGKIVHISPLSGSAQHVEECSCYPRYPGVRCVCRDNWKGSNRPIVDINVKDYSIASSYVCSGLVGDTPRKNDRSSSSYCRNPNNEKGNHGVKGWAFDDGNDVWMGRTISEESRSGYETFKVIGGWSTPNSKLQINRQVIVDSDNRSGYSGIFSVEGKSCINRCFYVELIRGREQETRVWWTSNSIVVFCGTSGTYGTGSWPDGADINLMPI

SEQ ID NO: 22545 - protein, 469 aa, Artificial Sequence
  derived and/or modified protein sequence (wt) from neuraminidase__InfluenzaA__AFM68979
MNPNQKIITIGSVSLTIATICFLMQIAILVTTVTLHFKQYECSSPPNNQVMPCEPIIIERNITEIVYLTNTTIEKEICPKLVEYRNWSKPQCKITGFAPFSKDNSIRLSAGGGIWVTREPYVSCDPGKCYQFALGQGTTLDNKHSNDTIHDRTPYRTLLMNELGVPFHLGTRQVCIAWSSSSCHDGKAWLHVCVTGYDKNATASFIYDGRLVDSIGSWSKNILRTQESECVCINGTCTVVMTDGSASERADTKILFIEEGKIVHISPLSGSAQHVEECSCYPRYPGVRCVCRDNWKGSNRPVVDINVKDYSIVSSYVCSGLVGDTPRKNDRSSSSYCRNPNNEKGNHGVKGWAFDDGNDVWMGRTISEESRSGYETFKVIGGWSTPNSKLQINRQVIVDSDNRSGYSGIFSVEGKSCINRCFYVELIRGREQETRVWWTSNSIVVFCGTSGTYGTGSWPDGADINLMPI

SEQ ID NO: 22546 - protein, 469 aa, Artificial Sequence; identical to SEQ ID NO: 22545
  derived and/or modified protein sequence (wt) from neuraminidase__InfluenzaA__AFM68990

SEQ ID NO: 22547 - protein, 469 aa, Artificial Sequence; identical to SEQ ID NO: 14813
  derived and/or modified protein sequence (wt) from neuraminidase__InfluenzaA__AFM71723

SEQ ID NO: 22548 - protein, 469 aa, Artificial Sequence; identical to SEQ ID NO: 22135
  derived and/or modified protein sequence (wt) from neuraminidase__InfluenzaA__AFM71734

SEQ ID NO: 22549 - protein, 469 aa, Artificial Sequence; identical to SEQ ID NO: 21949
  derived and/or modified protein sequence (wt) from neuraminidase__InfluenzaA__AFM71745

SEQ ID NO: 22550 - protein, 469 aa, Artificial Sequence; identical to SEQ ID NO: 18609
  derived and/or modified protein sequence (wt) from neuraminidase__InfluenzaA__AFM71771

SEQ ID NO: 22551 - protein, 469 aa, Artificial Sequence; identical to SEQ ID NO: 21635
  derived and/or modified protein sequence (wt) from neuraminidase__InfluenzaA__AFM71782

SEQ ID NO: 22552 - protein, 469 aa, Artificial Sequence; identical to SEQ ID NO: 21635
  derived and/or modified protein sequence (wt) from neuraminidase__InfluenzaA__AFM71794

SEQ ID NO: 22553 - protein, 469 aa, Artificial Sequence; identical to SEQ ID NO: 16599
  derived and/or modified protein sequence (wt) from neuraminidase__InfluenzaA__AFM71805

SEQ ID NO: 22554 - protein, 469 aa, Artificial Sequence
  derived and/or modified protein sequence (wt) from neuraminidase__InfluenzaA__AFM71827
MNPNQKIITIGSVSLTISTICFFMQIAILITTVTLHFKQYEFNSPPNNQVMLCEPTIIERNITEIVYLTNTTIEKEICPKLAEYRNWSKPQCDITGFAPFSKDNSIRLSAGGDIWVTREPYVSCDPDKCYQFALGQGTTLNNVHSNNTVRDRTPYRTLLMNELGVPFHLGTKQVCIAWSSSSCHDGKAWLHVCITGDDKNATASFIYNGRLVDSVVSWSKEILRTQESECVCINGTCTVVMTDGSASGKADTKILFIEEGKIVHTSTLSGSAQHVEECSCYPRYPGVRCVCRDNWKGSNRPIVDINIKDHSIVSSYVCSGLVGDTPRKNDSSSSSHCLDPNNEEGGHGVKGWAFDDGKDVWMGRTISEKSRLGYETFKVIEGWSNPKSKLQINRQVIVDRGNRSGYSGIFSVEGKSCINRCFYVELIRGRKEETEVLWTSNSIVVFCGTSGTYGTGSWPDGADINLMPI

SEQ ID NO: 22555 - protein, 469 aa, Artificial Sequence; identical to SEQ ID NO: 19518
  derived and/or modified protein sequence (wt) from neuraminidase__InfluenzaA__AFM71838

SEQ ID NO: 22556 - protein, 454 aa, Artificial Sequence; identical to SEQ ID NO: 15719
  derived and/or modified protein sequence (wt) from neuraminidase__InfluenzaA__AFM71849

SEQ ID NO: 22557 - protein, 469 aa, Artificial Sequence; identical to SEQ ID NO: 14095
  derived and/or modified protein sequence (wt) from neuraminidase__InfluenzaA__AFM71860

SEQ ID NO: 22558 - protein, 469 aa, Artificial Sequence; identical to SEQ ID NO: 14327
  derived and/or modified protein sequence (wt) from neuraminidase__InfluenzaA__AFM71871

SEQ ID NO: 22559 - protein, 469 aa, Artificial Sequence; identical to SEQ ID NO: 14327
  derived and/or modified protein sequence (wt) from neuraminidase__InfluenzaA__AFM71882

SEQ ID NO: 22560 - protein, 469 aa, Artificial Sequence
  derived and/or modified protein sequence (wt) from neuraminidase__InfluenzaA__AFM71893
MNPNQKIITIGSVSLTIATVCFLMQIAILATTVTLHFKQHECDSPASNQVMPCEPIIIERNITEIVYLNNTTIEKEICPEVVEYRNWSKPQCQITGFAPFSKDNSIRLSAGGDIWVTREPYVSCDPGKCYQFALGQGTTLDNKHSNGTIHDRIPHRTLLMNELGVPFHLGTKQVCVAWSSSSCHDGKAWLHVCVTGDDRNATASFIYDGRLVDSIGSWSQNILRTQESECVCINGTCTVVMTDGSASGRADTRILFIKEGKIVHISPLSGSAQHIEECSCYPRYPDVRCICRDNWKGSNRPVIDINMEDYSIDSSYVCSGLVGDTPRNDDSSSNSNCRDPNNERGNPGVKGWAFDNGDDVWMGRTINKESRSGYETFKVIGGWSTPNSKSQVNRQVIVDNNNWSGYSGIFSVEGKSCINRCFYVELIRGRPQETRVWWTSNSIVVFCGTSGTYGTGSWPDGANINFMPI

SEQ ID NO: 22561 - protein, 469 aa, Artificial Sequence
  derived and/or modified protein sequence (wt) from neuraminidase__InfluenzaA__AFM71904
MNPNQKIITIGSVSLTIATVCFLMQIAILATTVTLHFKQHECDSPASNQVMPCEPIIIERNITEIVYLNNTTIEKEICPEVVEYRNWSKPQCQITGFAPFSKDNSIRLSAGGDIWVTREPYVSCDPGKCYQFALGQGTTLDNKHSNVTIHDRIPHRTLLMNELGVPFHLGTKQVCVAWSSSSCHDGKAWLHVCVTGDDRNATASFIYDGRLVDSIGSWSQNILRTQESECVCINGTCTVVMTDGSASGRADTRILFIKEGKIVHISPLSGSAQHIEECSCYPRYPDVRCICRDNWKGSNRPVIDINMEDYSIDSGYVCSGLVGDTPRNDDSSSNSNCRDPNNERGNPGVKGWAFDNGDDVWMGRTINKESRSGYETFKVIGGWSTPNSKSQVNRQVIVDNNNWSGYSGIFSVEGKSCINRCFYVELIRGRPQETRVWWTSNSIVVFCGTSGTYGTGSWPDGANINFMPI

SEQ ID NO: 22562 - protein, 469 aa, Artificial Sequence; identical to SEQ ID NO: 14972
  derived and/or modified protein sequence (wt) from neuraminidase__InfluenzaA__AFM71915

SEQ ID NO: 22563 - protein, 469 aa, Artificial Sequence; identical to SEQ ID NO: 14972
  derived and/or modified protein sequence (wt) from neuraminidase__InfluenzaA__AFM71926

SEQ ID NO: 22564 - protein, 469 aa, Artificial Sequence; identical to SEQ ID NO: 14972
  derived and/or modified protein sequence (wt) from neuraminidase__InfluenzaA__AFM71937

SEQ ID NO: 22565 - protein, 469 aa, Artificial Sequence; identical to SEQ ID NO: 21980
  derived and/or modified protein sequence (wt) from neuraminidase__InfluenzaA__AFM71948

SEQ ID NO: 22566 - protein, 469 aa, Artificial Sequence; identical to SEQ ID NO: 21980
  derived and/or modified protein sequence (wt) from neuraminidase__InfluenzaA__AFM71959

SEQ ID NO: 22567 - protein, 469 aa, Artificial Sequence
  derived and/or modified protein sequence (wt) from neuraminidase__InfluenzaA__AFM71970
MNPNQKIITIGSVSLTIATICFLMQIAILVTTVTLHFKQYECDSPANNQVMPYEPIIIERNITEIVYLTNTTIEKEICPKLVEYRNWSKPQCKITGFAPFSKDNSIRLSAGGDIWVTREPYVSCDPGKCYQFALGQGTTLENKHSNDTIHDRTPHRTLLMNELGVPFHLGTRQVCIAWSSSSCHDGKAWLHVCVTGYDKNATASFIYDGRLVDSIGSWSQNILRTQESECVCINGTCTVVMTDGSASGRADTKILFIEEGKIVHISPLSGSAQHVEECSCYPRYPGVRCICRDNWKGSNRPVVDINVKDYSIDSSYVCSGLVGDTPRKNDRSSSSYCRNPNNEKGNHGVKGWAFDDGNDVWMGRTISEDSRSGYETFKVIGGWSTPNSKLQINRQVIVDSANRSGYSGIFSVEGKSCINRCFYVELIRGREQETRVWWTSNSIVVFCGTSGTYGTGSWPDGADINLMPI

SEQ ID NO: 22568 - protein, 469 aa, Artificial Sequence; identical to SEQ ID NO: 21988
  derived and/or modified protein sequence (wt) from neuraminidase__InfluenzaA__AFM71981

SEQ ID NO: 22569 - protein, 469 aa, Artificial Sequence
  derived and/or modified protein sequence (wt) from neuraminidase__InfluenzaA__AFM71992
MNPNQKIITIGSVSLTISTICFFMQIAILITTVTLHFKQYEFNSPPNNQVMLCEPTIIERNITEIVYLTNTTIEKEICPKLAEYRNWSKPQCDITGFAPFSKDNSIRLSAGGDIWVTREPYVSCDPDKCYQFALGQGTTLNNVHSNNTVRDRTPYRTLLMNELGVPFHLGTKQVCIAWSSSSCHDGKAWLHVCITGDDKNATASFIYNGRLVDSVVSWSQEILRTQESECVCINGTCTVVMTDGSASGKADTKILFIEEGKIVHTSTLSGSAQHVEECSCYPRYPGVRCVCRDNWKGSNRPIVDINIKDHSIVSSYVCSGLVGDTPRKNDSSSSSHCLDPNNEEGGHGVKGWAFDDGNDVWMGRTINETSRLGYETFKVIEGWSNPKSKLQMNRQVIVDRGNRSGYSGIFSVEGKSCINRCFYVELIRGRKEETEVLWTSNSIVVFCGTSGTYGTGSWPDGADLNLMPI

SEQ ID NO: 22570 - protein, 469 aa, Artificial Sequence; identical to SEQ ID NO: 22544
  derived and/or modified protein sequence (wt) from neuraminidase__InfluenzaA__AFM72013

SEQ ID NO: 22571 - protein, 454 aa, Artificial Sequence; identical to SEQ ID NO: 15719
  derived and/or modified protein sequence (wt) from neuraminidase__InfluenzaA__AFM72024

SEQ ID NO: 22572 - protein, 469 aa, Artificial Sequence; identical to SEQ ID NO: 18995
  derived and/or modified protein sequence (wt) from neuraminidase__InfluenzaA__AFM72035

SEQ ID NO: 22573 - protein, 469 aa, Artificial Sequence; identical to SEQ ID NO: 18995
  derived and/or modified protein sequence (wt) from neuraminidase__InfluenzaA__AFM72046

SEQ ID NO: 22574 - protein, 470 aa, Artificial Sequence
  derived and/or modified protein sequence (wt) from neuraminidase__InfluenzaA__AFM72057
MNPNQKIITIGSICTTIGIISLILQIGNIISIWVSHSIQTGSQNHTGICNQRIITYENSTWVNQTYVNINNTNVVAGKDTTSVTLAGNSSLCPIRGWAIYSKDNSIRIGSKGDVFVIREPFISCSHLECRTFFLTQGALLNDKHSNGTVKDRSPYRALMSCPIGEAPSPYNSRFESVAWSASACHDGMGWLTIGISGPDDGAVAVLKYNGIITETIKSWRKRILRTQESECVCVNGSCFTIMTDGPSNGPASYRIFKIEKGKITKSIELDAPNSHYEECSCYPDTGTVMCVCRDNWHGSNRPWVSFNQNLDYQIGYICSGVFGDNPRPKDGKGSCDPVTVDGADGVKGFSYRYGNGVWIGRTKSNSSRKGFEMIWDPNGWTDTDSNFLVKQDVVAMTDWSGYSGSFVQHPELTGLDCMRPCFWVELIRGRPREKTTIWTSGSSISFCGVNSDTANWSWPDGAELPFTIDK

SEQ ID NO: 22575 - protein, 470 aa, Artificial Sequence; identical to SEQ ID NO: 15059
  derived and/or modified protein sequence (wt) from neuraminidase__InfluenzaA__AFM72068

SEQ ID NO: 22576 - protein, 469 aa, Artificial Sequence
  derived and/or modified protein sequence (wt) from neuraminidase__InfluenzaA__AFM72090
MNPNQKIITIGSVSLTIATICFLMQIAILVTTVTLHFKQYECSSPPNNQVMPCEPIIIERNITEIVYLTNTTIEKEICPKLVEYRNWSKPQCKITGFAPFSKDNSIRLSAGGDIWVTREPYVSCDPGKCYQFALGQGTTLNNKHSNDTVHDRTPYRTLLMNELGVPFHLGTKQVCIAWSSSSCHDGKAWLHVCVTGHDKNATASFIYDGRLVDSIGSWSKNILRTQESECVCINGTCTVVMTDGSASERADTKILFIEEGKIVHISPLSGSAQHVEECSCYPRYPGVRCVCRDNWKGSNRPIVDINVKDYSIVSSYVCSGLVGDTPRKNDRSSSSYCRNPNNEKGNHGVKGWAFDDGNDVWMGRTIGEELRLGYETFKVIGGWSTPNSKLQINRQVIVDSKNRSGYSGIFSVEGKSCINRCFYVELIRGREQETRVWWTSNSIVVFCGTSGTYGTGSWPDGADINLMPI

SEQ ID NO: 22577 - protein, 469 aa, Artificial Sequence
  derived and/or modified protein sequence (wt) from neuraminidase__InfluenzaA__AFM72101
MNPNQKIITIGSVSLTIATICFLMQIAILVTTVTLHFKQYECSSPPNNQAMPCEPTIIERNITEIVYLTNTTIEKEICPKLVEYRNWSKPQCKITGFAPFSKDNSIRLSAGGDIWVTREPYVSCDPGKCYQFALGQGTTLNNRHSNDTVHDRTPYRTLLMNELGVPFHLGTKQVCIAWSSSSCHDGKAWLHVCVTGHDKNATASFIYDGRLVDSIGSWSKNILRTQESECVCINGTCTVVMTDGSASERADTKILFIEEGKIVHISPLSGSAQHVEECSCYPRYPGVRCVCRDNWKGSNRPIVDINVKDYSIVSSYVCSGLVGDTPRKNDRSSSSYCRNPNNEKGSHGVKGWAFDDGNDVWMGRTIGEELRSGYETFKVIGGWSTPNSKLQINRQVIVDSGNRSGYSGIFSVEGKSCINRCFYVELIRGREQETRVWWTSNSIVVFCGTSGTYGTGSWPDGADINLMPI

SEQ ID NO: 22578 - protein, 469 aa, Artificial Sequence; identical to SEQ ID NO: 14813
  derived and/or modified protein sequence (wt) from neuraminidase__InfluenzaA__AFM72112

SEQ ID NO: 22579 - protein, 469 aa, Artificial Sequence
  derived and/or modified protein sequence (wt) from neuraminidase__InfluenzaA__AFM72123
MNPNQKIITIGSVSLTIATICFLMQIAILVTTVTLHFKQYECSSPPNNQVMPCEPTIIERNITEIVYLTNTTIEKEICPKLVEYRNWSKPQCKITGFAPFSKDNSIRLSAGGDIWVTREPYVSCDPGKCYQFALGQGTTLNNRHSNDTVHDRTPYRTLLMNELGVPFHLGTKQVCIAWSSSSCHDGKAWLHVCVTGHDKNATASFIYDGRLVDSIGSWSKNILRTQESECVCINGTCTVVMTDGSASERADTKILFIEEGKIVHISPLSGSAQHVEECSCYPRYPGVRCVCRDNWKGSNRPIVDINVKDYSIVSSYVCSGLVGDTPRKNDRSSSSYCRNPNNEKGSHGVKGWAFDDGNDVWMGRTIGEELRSGYETFKVIGGWSTPNSKLQTNRQVIVDSGNRSGYSGIFSVEGKSCINRCFYVELIRGREQETRVWWTSNSIVVFCGTSGTYGTGSWPDGADINLMPI

SEQ ID NO: 22580 - protein, 469 aa, Artificial Sequence; identical to SEQ ID NO: 22135
  derived and/or modified protein sequence (wt) from neuraminidase__InfluenzaA__AFM72134

SEQ ID NO: 22581 - protein, 469 aa, Artificial Sequence
  derived and/or modified protein sequence (wt) from neuraminidase__InfluenzaA__AFM72145
MNPNQKIITIGSVSLTIATICFLMQIAILAITVTLHFKQYECNSPPNNQVMLCEPTIIERNTTEIVYLTNTTIEKEVCPKLAEYRNWSKPQCKITGFAPFSKDNSIRLSAGGDIWVTREPYVSCDPGKCYQFALGQGTTLNNRHSNDTVHDRTPYRTLLMNELGVPFHLGTKQVCIAWSSSSCHDGKAWLHVCVTGHDENATASFIYDGRLVDSIGSWSKNILRTQESECVCINGTCTVVMTDGSASERADTKILFIEEGKIVHISPLSGSAQHVEECSCYPRYPGVRCVCRDNWKGSNRPIVDINVKDYSIVSSYVCSGLVGDTPRKNDSSSSSYCRNPNNEKGSHGVKGWAFDDGNDVWMGRTISEELRSGYETFKVIGGWSKPNSKLQINRQVIVDRGNRSGYSGIFSVEGKSCINRCFYVELIRGRKQETEVWWTSNSIVVFCGTSGTYGTGSWPDGADINLMPI

SEQ ID NO: 22582 - protein, 469 aa, Artificial Sequence; identical to SEQ ID NO: 15185
  derived and/or modified protein sequence (wt) from neuraminidase__InfluenzaA__AFM72156

SEQ ID NO: 22583 - protein, 469 aa, Artificial Sequence
  derived and/or modified protein sequence (wt) from neuraminidase__InfluenzaA__AFM72167
MNPNQKIITIGSISLTIATICFLMQIAILVTTVTLHFKQYECNSPPNNQVMLCEPTIIERNITEIVYLTNTTIEKEICPELAEYRNWSKPQCKITGFAPFSKDNSIRLSAGGDIWVTREPYVSCDPGKCYQFALGQGTTLNNRHSNDTVHDRTPYRTLLMNELGVPFHLGTKQVCIAWSSSSCHDGKAWLHVCVTGHDENATASFIYDGRLVDSIGSWSKNILRTQESECVCINGTCTVVMTDGSASERADTKILFIEEGKIVHISPLSGSAQHVEECSCYPRYPGVRCVCRDNWKGSNRPIVDINVKDYSIVSSYVCSGLVGDTPRKNDSSSSSYCWNPNNEKGGHGVKGWAFDDGNDVWMGRTISEELRSGYETFKVIGGWSKPNSKLQINRQVIVDRGNRSGYSGIFSVEGKSCINRCFYVELIRGRKQETEVWWTSNSIVVFCGTSGTYGTGSWPDGADINLMPI

SEQ ID NO: 22584 - protein, 469 aa, Artificial Sequence
  derived and/or modified protein sequence (wt) from neuraminidase__InfluenzaA__AFM72178
MNPNQKIITIGSVSLTIATICFLMQIAILVTTVTLHFKQYECNSPPNNQVMLCEPTIIERNITEIVYLTNTTIEKEICPELAEYRNWSKPQCKITGFAPFSKDNSIRLSAGGDIWVTREPYVSCDPGKCYQFALGQGTTLNNRHSNDTVHDRTPYRTLLMNELGVPFHLGTKQVCIAWSSSSCHDGKAWLHVCVTGHDENATASFIYDGRLVDSIGSWSKNILRTQESECVCINGTCTVVMTDGSASERADTKILFIEEGKIVHISPLSGSAQHVEECSCYPRYPGVRCVCRDNWKGSNRPIVDINVKDYSIVSSYVCSGLVGDTPRKNDSSSSSYCWNPNNEKGGHGVKGWAFDDGNDVWMGRTISEELRSGYETFKVIGGWSKPNSKLQINRQVIVDRGNRSGYSGIFSVEGKSCINRCFYVELIRGRKQETEVWWTSNSIVVFCGTSGTYGTGSWPDGADINLMPI

SEQ ID NO: 22585 - protein, 469 aa, Artificial Sequence
  derived and/or modified protein sequence (wt) from neuraminidase__InfluenzaA__AFM72189
MNPNQKIITIGSVSLTIATICFLMQIAILVTTVTLHFKQYECNSPPNNQVMLCEPTIIERNITEIVYLTNTTIEKEICPKLAEYRNWSKPQCKITGFAPFSKDNSIRLSAGGDIWVTREPYVSCDPDKCYQFALGQGTTLNNRHSNDTVHDRTPYRTLLMNELGVPFHLGTKQVCIAWSSSSCHDGKAWLHVCVTGHDENATASFIYDGRLVDSIGSWSKKILRTQESECVCINGTCTVVMTDGSASGRADTKILFIEEGKIVHISPLLGSAQHVEECSCYPRYPGVRCVCRDNWKGSNRPIVDINVKDYSIVSSYVCSGLVGDTPRKNDSSSSSHCLNPNNEEGGHGVKGWAFDDGDDVWMGRTISEKLRSGYETFKVIEGWSKPNSKLQINRQVIVDRGNRSGYSGIFSVEGKSCINRCFYVELIRGRKQETEVWWTSNSIVVFCGTSGTYGTGSWPDGADINLMPI

SEQ ID NO: 22586 - protein, 469 aa, Artificial Sequence; identical to SEQ ID NO: 22585
  derived and/or modified protein sequence (wt) from neuraminidase__InfluenzaA__AFM72200

SEQ ID NO: 22587 - protein, 469 aa, Artificial Sequence; identical to SEQ ID NO: 15749
  derived and/or modified protein sequence (wt) from neuraminidase__InfluenzaA__AFM72211

SEQ ID NO: 22588 - protein, 469 aa, Artificial Sequence; identical to SEQ ID NO: 15749
  derived and/or modified protein sequence (wt) from neuraminidase__InfluenzaA__AFM72222

SEQ ID NO: 22589 - protein, 470 aa, Artificial Sequence; identical to SEQ ID NO: 16453
  derived and/or modified protein sequence (wt) from neuraminidase__InfluenzaA__AFM72233

SEQ ID NO: 22590 - protein, 469 aa, Artificial Sequence; identical to SEQ ID NO: 14573
  derived and/or modified protein sequence (wt) from neuraminidase__InfluenzaA__AFM72249

SEQ ID NO: 22591 - protein, 469 aa, Artificial Sequence; identical to SEQ ID NO: 14061
  derived and/or modified protein sequence (wt) from neuraminidase__InfluenzaA__AFM72260

SEQ ID NO: 22592 - protein, 469 aa, Artificial Sequence; identical to SEQ ID NO: 14061
  derived and/or modified protein sequence (wt) from neuraminidase__InfluenzaA__AFM72271

SEQ ID NO: 22593 - protein, 469 aa, Artificial Sequence
  derived and/or modified protein sequence (wt) from neuraminidase__InfluenzaA__AFM72293
MNPNQKIITIGSVSLTIATICFLMQIAILVTTVTLHFKQYECNSPPNNQVMLCEPTIIERNITEIVYLTNTTIEKEICPKLAEYRNWSKPQCNITGFAPFSKDNSIRLSAGGDIWVTREPYVSCDPDKCYQFALGQGTTLNNGHSNYTVHDRTPYRTLLMNELGVPFHLGTKQVCIAWSSSSCHDGKAWLHVCVTGDDENATASFIYNGRLVDSIGSWSKKILRTQESECVCINGTCTVVMTDGSASGKADTKILFIEEGKIVHTSSLSGSAQHVEECSCYPRYPGVRCVCRDNWKGSNRPIVDINVKDYSIVSSYVCSGLVGDTPRKNDSSSSSHCLDPNNEEGGHGVKGWAFDDGNDVWMGRTISEKLRSGYETFKVIEGWSKPNSKLQINRQVIVDRGNRSGYSGIFSVEGKSCINRCFYVELIRGRKQETEVLWTSNSIVVFCGTSGTYGTGSWPDGADINLMPI

SEQ ID NO: 22594 - protein, 469 aa, Artificial Sequence; identical to SEQ ID NO: 15929
  derived and/or modified protein sequence (wt) from neuraminidase__InfluenzaA__AFM72304

SEQ ID NO: 22595 - protein, 469 aa, Artificial Sequence
  derived and/or modified protein sequence (wt) from neuraminidase__InfluenzaA__AFM72315
MNPNQKIITIGSVSLTISTICFFMQIAILITTVTLHFKQYEFNSPPNNQVMLCEPTIIERNITEIVYLTNTTIEKEICPKLAEYRNWSKPQCNITGFAPFSKDNSIRLSAGGDIWVTREPYVSCDPDKCYQFALGQGTTLNNVHSNDTVHDRTPYRTLLMNELGVPFHLGTKQVCIAWSSSSCHDGKAWLHVCVTGDDENATASFIYNGRLVDSIVSWSKKILRTQESECVCINGTCTVVMTDGSASGKADTKILFIEEGKIVHTSTLSGSAQHVEECSCYPRYPGVRCVCRDNWKGSNRPIVDINIKDYSIVSSYVCSGLVGDTPRKNDSSSSSHCLDPNNEKGGHGVKGWAFDDGNDVWMGRTISEKLRSGYETFKVIEGWSNPNSKLQINRQVIVDRDNRSGYSGIFSVEGKSCINRCFYVELIRGRNQETEVLWTSNSIVVFCGTSGTYGTGSWPDGADINLMPI

SEQ ID NO: 22596 - protein, 469 aa, Artificial Sequence
  derived and/or modified protein sequence (wt) from neuraminidase__InfluenzaA__AFM72326
MNPNQKIITIGSVSLTISTICFFMQIAILITTVTLHFKQYEFNSPPNNQVMLCEPTIIERNITEIVYLTNTTIEKEICPKLAEYRNWSKPQCNITGFAPFSKDNSIRLSAGGDIWVTREPYVSCDPDKCYQFALGQGTTLNNVHSNDTVHDRTPYRTLLMNELGVPFHLGTKQVCIAWSSSSCHDGKAWLHVCVTGDDENATASFIYNGRLVDSIVSWSKKILRTQESECVCINGTCTVVMTDGSASGKADTKILFIEEGKIVHTSTLSGSAQHVEECSCYPRYPGVRCVCRDNWKGSNRPIVDINIKDYSIVSSYVCSGLVGDTPRKNDSSSSSHCLDPNNEEGGHGVKGWAFDDGNDVWMGRTISEKLRSGYETFKVIEGWSNPNSKFQINRQVIVDRDNRSGYSGIFSVEGKSCINRCFYVELIRGRNQETEVLWTSNSIVVFCGTSGTYGTGSWPDGADINLMPI

SEQ ID NO: 22597 - protein, 469 aa, Artificial Sequence
  derived and/or modified protein sequence (wt) from neuraminidase__InfluenzaA__AFM72337
MNPNQKIITIGSVSLTISTICFFMQIAILITTVTLHFKQYEFNSPPNNQVMLCEPTIIERNITEIVYLTNTTIEKEICPKLAEYRNWSKPQCDITGFAPFSKDNSIRLSAGGDIWVTREPYVSCDPDKCYQFALGQGTTLNNVHSNDTVRDRTPYRTLLMNELGVPFHLGTKQVCIAWSSSSCHDGKAWLHVCITGDDKNATASFIYNGRLVDSVVSWSKEILRTQESECVCINGTCTVVMTDGSASGKADTKILFIEEGKIVHTSTLSGSAQHVEECSCYPRYPGVRCVCRDNWKGSNRPIVDINIKDHSIVSSYVCSGLVGDTPRKNDSSSSSHCLDPNNEEGGHGVKGWAFDDGNDVWMGRTINETSRLGYETFKVIEGWSNPKSKLQINRQVIVDRGNRSGYSGIFSVEGKSCINRCFYVELIRGRKEETEVLWTSNSIVVFCGTSGTYGTGSWPDGADLNLMPI

SEQ ID NO: 22598 - protein, 469 aa, Artificial Sequence
  derived and/or modified protein sequence (wt) from neuraminidase__InfluenzaA__AFM72348
MNPNQKIITIGSVSLTIATICFLMQIAILVTTVTLHFKQHECNSPPNNQVMLCEPTIIERNITEIVYLTNTTIEKEICPKLAEYRNWSKPQCNITGFAPFSKDNSIRLSAGGDIWVTREPYVSCDPDKCYQFALGQGTTLNNGHSNDTVHDRTPYRTLLMNELGIPFHLGTRQVCIAWSSSSCHDGKAWLHVCVTGDDKNATASFIYNGRLVDSIGSWSKKILRTQESECVCINGTCTVVMTDGSASGKADTKILFIEEGKIVHISTLSGSAQHVEECSCYPRYPGVRCVCRDNWKGSNRPIVDINVKDYSIVSSYVCSGLVGDTPRKNDSSSSSHCLDPNNEEGGHGVKGWAFDDGNDVWMGRTISEKLRSGYETFKVIEGWSKPNSKLQINRQVIVERGNRSGYSGIFSVEGKSCINRCFYVELIRGRKEETEVWWTSNSIVVFCGTSGTYGTGSWPDGADINLMPI

SEQ ID NO: 22599 - protein, 469 aa, Artificial Sequence
  derived and/or modified protein sequence (wt) from neuraminidase__InfluenzaA__AFM72359
MNPNQKIITIGSVSLTISTICFFMQIAILITTVTLHFKQYEFNSPPNNQVMLCEPTIIERNITEIVYLTNTTIEKEICPKLAEYRNWSKPQCDITGFAPFSKDNSIRLSAGGDIWVTREPYVSCDPDKCYQFALGQGTTLNNVHSNDTVHDRTPYRTLLMNELGVPFHLGTKQVCIAWSSSSCHDGKAWLHVCVTGDDKNATASFIYNGRLVDSIVSWSKKILRTQESECVCINGTCTVVMTDGSASGKADTKILFIEEGKIVHTSTLSGSAQHVEECSCYPRYPGVRCVCRDNWKGSNRPIVDINIKDYSIVSSYVCSGLVGDTPRKNDSSSSSHCLDPNNEEGGHGVKGWAFDDGNDVWMGRTISEKLRSGYETFKVIEGWSNPNSKLQINRQVIVDRGNRSGYSGIFSVEGKSCINRCFYVELIRGRKEETKVLWTSNSIVVFCGTSGTYGTGSWPDGADINLMPI

SEQ ID NO: 22600 - protein, 469 aa, Artificial Sequence; identical to SEQ ID NO: 22599
  derived and/or modified protein sequence (wt) from neuraminidase__InfluenzaA__AFM72370

SEQ ID NO: 22601 - protein, 469 aa, Artificial Sequence; identical to SEQ ID NO: 19518
  derived and/or modified protein sequence (wt) from neuraminidase__InfluenzaA__AFM72381

SEQ ID NO: 22602 - protein, 469 aa, Artificial Sequence; identical to SEQ ID NO: 19518
  derived and/or modified protein sequence (wt) from neuraminidase__InfluenzaA__AFM72392

SEQ ID NO: 22603 - protein, 469 aa, Artificial Sequence; identical to SEQ ID NO: 16402
  derived and/or modified protein sequence (wt) from neuraminidase__InfluenzaA__AFM72403

SEQ ID NO: 22604 - protein, 469 aa, Artificial Sequence; identical to SEQ ID NO: 16402
  derived and/or modified protein sequence (wt) from neuraminidase__InfluenzaA__AFM72414

SEQ ID NO: 22605 - protein, 469 aa, Artificial Sequence; identical to SEQ ID NO: 16066
  derived and/or modified protein sequence (wt) from neuraminidase__InfluenzaA__AFM72425

SEQ ID NO: 22606 - protein, 469 aa, Artificial Sequence; identical to SEQ ID NO: 16066
  derived and/or modified protein sequence (wt) from neuraminidase__InfluenzaA__AFM72436

SEQ ID NO: 22607 - protein, 469 aa, Artificial Sequence; identical to SEQ ID NO: 16066
  derived and/or modified protein sequence (wt) from neuraminidase__InfluenzaA__AFM72447

SEQ ID NO: 22608 - protein, 469 aa, Artificial Sequence; identical to SEQ ID NO: 16066
  derived and/or modified protein sequence (wt) from neuraminidase__InfluenzaA__AFM72458

SEQ ID NO: 22609 - protein, 469 aa, Artificial Sequence; identical to SEQ ID NO: 16066
  derived and/or modified protein sequence (wt) from neuraminidase__InfluenzaA__AFM72469

SEQ ID NO: 22610 - protein, 469 aa, Artificial Sequence
  derived and/or modified protein sequence (wt) from neuraminidase__InfluenzaA__AFM72491
MNPNQKIITIGSVSLTISTICFFMQIAILITTVTLHFKQYEFNSPPNNQVMMCEPTIIERNITEIVYLTNTTIEKEICPKLAEYRNWSKPQCDITGFAPFSKDNSIRLSAGGDIWVTREPYVSCDPDKCYQFALGQGTTLNNVHSNDTVRDRTPYRTLLMNELGVPFHLGTKQVCIAWSSSSCHDGKAWLHVCITGDDKNATASFIYNGRLVDSIVSWSKEILRTQESECVCINGTCTVVMTDGSASGKADTKILFIEEGKIVHTSTLSGSAQHVEECSCYPRYPGVRCVCRDNWKGSNRPIVDINIKDHSIVSSYVCSGLVGDTPRKNDSSSSSHCLDPNNEEGGHGVKGWAFDDGNDVWMGRTISEKSRLGYETFKVIEGWSNPNSKLQINRQVIVDRGNRSGYSGIFSVEGKSCINRCFYVELIRGRKEETEVLWTSNSIVVFCGTSGTYGTGSWPDGADINLMPI

SEQ ID NO: 22611 - protein, 469 aa, Artificial Sequence; identical to SEQ ID NO: 22610
  derived and/or modified protein sequence (wt) from neuraminidase__InfluenzaA__AFM72502

SEQ ID NO: 22612 - protein, 470 aa, Artificial Sequence; identical to SEQ ID NO: 16632
  derived and/or modified protein sequence (wt) from neuraminidase__InfluenzaA__AFM72513

SEQ ID NO: 22613 - protein, 470 aa, Artificial Sequence; identical to SEQ ID NO: 16632
  derived and/or modified protein sequence (wt) from neuraminidase__InfluenzaA__AFM72524

SEQ ID NO: 22614 - protein, 470 aa, Artificial Sequence; identical to SEQ ID NO: 16632
  derived and/or modified protein sequence (wt) from neuraminidase__InfluenzaA__AFM72535

SEQ ID NO: 22615 - protein, 470 aa, Artificial Sequence; identical to SEQ ID NO: 16632
  derived and/or modified protein sequence (wt) from neuraminidase__InfluenzaA__AFM72546

SEQ ID NO: 22616 - protein, 470 aa, Artificial Sequence; identical to SEQ ID NO: 16632
  derived and/or modified protein sequence (wt) from neuraminidase__InfluenzaA__AFM72557

SEQ ID NO: 22617 - protein, 469 aa, Artificial Sequence
  derived and/or modified protein sequence (wt) from neuraminidase__InfluenzaA__AFM72579
MNPNQKIITIGSVSLTISTICFFMQTAILITTVTLHFKQYEFNSPPNNQVMLCEPTIIERNITEIVYLTNTTIEKEICPKLAEYRNWSKPQCDITGFAPFSKDNSIRLSAGGDIWVTREPYVSCDPDKCYQFALGQGTTLNNVHSNDTVHDRTPYRTLLMNELGVPFHLGTKQVCIAWSSSSCHDGKAWLHVCITGDDKNATASFIYNGRLVDSIVSWSKEILRTQESECVCINGTCTVVMTDGSASGKADTKILFIEEGKIVHTSILSGSAQHVEECSCYPRYPGVRCVCRDNWKGSNRPIVDINIKDHSIVSSYVCSGLVGDTPRKNDSSSSSHCLDPNNEEGGHGVKGWAFDDGNDVWMGRTISEKSRLGYETFKVIEGWSNPKSKLQINRQVIVDRGNRSGYSGIFSVEGKSCINRCFYVELIRGRKEETEVLWTSNSIVVFCGTSGTYGTGSWPDGADINLMPI

SEQ ID NO: 22618 - protein, 470 aa, Artificial Sequence
  derived and/or modified protein sequence (wt) from neuraminidase__InfluenzaA__AFM72802
MNPNQKIITIGSISIAIGIISLMLQIGNIISIWASHSIQTGSQNHTGMCNQRIITYENSTWVNHTYVNINNTNVVAGKDKTPVTLAGNSSLCSISGWAIHTKDNSIRIGSKGDVFVIREPFISCSHLECKTFFLTQGALLNDKHSNGTVKDRSPYRALMSCPLGEAPSPYNSKFESVAWSASACHDGIGWLTIGISGPDNGAVAVLKYNGIITGTIKSWKKQILRTQESECVCMNGSCFTIMTDGPSNGAASYKIFKIEKGKVIKSMELNAPNFHYEECSCYPDTGTVMCVCRDNWHGSNRPWVSFNQNLDYQIGYICSGVFGDNPRPEDGEGSCNPVTVDGANGVKGFSYKYGNGVWIGRTKSNRIRKGFEMIWDPNGWTNTDSDFSVKQDIVAITDWSGYSGSFVQHPELTGLDCIRPCFWVELVRGLPRENTTIWTSGSSISFCGVNSDIANWSWPDGAELPFTIDK

SEQ ID NO: 22619 - protein, 470 aa, Artificial Sequence; identical to SEQ ID NO: 22618
  derived and/or modified protein sequence (wt) from neuraminidase__InfluenzaA__AFM72813

SEQ ID NO: 22620 - protein, 470 aa, Artificial Sequence; identical to SEQ ID NO: 22618
  derived and/or modified protein sequence (wt) from neuraminidase__InfluenzaA__AFM72824

SEQ ID NO: 22621 - protein, 469 aa, Artificial Sequence; identical to SEQ ID NO: 16728
  derived and/or modified protein sequence (wt) from neuraminidase__InfluenzaA__AFM72835

SEQ ID NO: 22622 - protein, 469 aa, Artificial Sequence; identical to SEQ ID NO: 16728
  derived and/or modified protein sequence (wt) from neuraminidase__InfluenzaA__AFM72845

SEQ ID NO: 22623 - protein, 469 aa, Artificial Sequence; identical to SEQ ID NO: 16728
  derived and/or modified protein sequence (wt) from neuraminidase__InfluenzaA__AFM72855

SEQ ID NO: 22624 - protein, 469 aa, Artificial Sequence; identical to SEQ ID NO: 16728
  derived and/or modified protein sequence (wt) from neuraminidase__InfluenzaA__AFM72865

SEQ ID NO: 22625 - protein, 469 aa, Artificial Sequence
  derived and/or modified protein sequence (wt) from neuraminidase__InfluenzaA__AFM72875
MNPNQKIITIGSVSLTISTICFFMQIAILITTVTLHFKQYEFNSPPNNQVMLCEPTIIERNITEIVYLTNTTIEKEICPKLAEYRNWSKPQCDITGFAPFSKDNSIRLSAGGDIWVTREPYVSCDPDKCYQFALGQGTTLNNVHSNNTVRDRTPYRTLLMNELGVPFHLGTKQVCIAWSSSSCHDGKAWLHVCITGDDKNATASFIYNGRLVDSVVSWSKEILRTQESECVCINGTCTVVMTDGSASGKADTKILFIEEGKIVHTSTLSGSAQHVEECSCYPRYPGVRCVCRDNWKGSNRPIVDINIKDHSIVSSYVCSGLVGDTPRKSDSSSSSHCLDPNNEEGGHGVKGWAFDDGNDVWMGRTISEKSRLGYETFKVIEGWSNPKSKLQINRQVIVDRGNRSGYSGIFSVEGKSCINRCFYVELIRGRKEETEVLWTSNSIVVFCGTSGTYGTGSWPDGADINLMPV

SEQ ID NO: 22626 - protein, 469 aa, Artificial Sequence; identical to SEQ ID NO: 16599
  derived and/or modified protein sequence (wt) from neuraminidase__InfluenzaA__AFM72886

SEQ ID NO: 22627 - protein, 469 aa, Artificial Sequence; identical to SEQ ID NO: 16599
  derived and/or modified protein sequence (wt) from neuraminidase__InfluenzaA__AFM72897

SEQ ID NO: 22628 - protein, 469 aa, Artificial Sequence
  derived and/or modified protein sequence (wt) from neuraminidase__InfluenzaA__AFM72908
MNPNQKIITIGSVSLTISTICFFMQIAILITTVTLHFKQYEFNSPPNNQVMLCEPTIIERNITEIVYLTNTTIEKEICPKLAEYRNWSKPQCDITGFAPFSKDNSIRLSAGGDIWVTREPYVSCDPDKCYQFALGQGTTLNNVHSNNTVRDRTPYRTLLMNELGVPFHLGTKQVCIAWSSSSCHDGKAWLHVCITGDDKNATASFIYNGRLVDSVVSWSKEILRTQESECVCINGTCTVVMTDGSASGKADTKILFIEEGKIVHTSTLSGSAQHVEECSCYPRYPGVRCVCRDNWKGSNRPIVDINTKDHSIVSSYVCSGLVGDTPRKNDSSSSSHCLDPNNEEGGHGVKGWAFDDGNDVWMGRTISEKSRLGYETFKVIEGWSNPKSKLQINRQVIVDRGNRSGYSGIFSVEGKSCINRCFYVELIRGRKEETEVLWTSNSIVVFCGTSGTYGTGSWPDGADINLMPV

SEQ ID NO: 22629 - protein, 469 aa, Artificial Sequence
  derived and/or modified protein sequence (wt) from neuraminidase__InfluenzaA__AFM72919
MNPNQKIITIGSVSLTISTICFFMQIAILITTVTLHFKQHEFNSPPNNQVMLCEPTIIERNITEIVYLTNTTIEKEICPKLAEYRNWSKPQCDITGFAPFSKDNSIRLSAGGDIWVTREPYVSCDPDKCYQFALGQGTTLNNVHSNNTVRDRTPYRTLLMNELGVPFHLGTKQVCIAWSSSSCHDGKAWLHVCITGDDKNATASFIYNGRLVDSVVSWSKEILRTQESECVCINGTCTVVMTDGSASGKADTKILFIEEGKIVHTSTLSGSAQHVEECSCYPRYPGVRCVCRDNWKGSNRPIVDINTKDHSIVSSYVCSGLVGDTPRKNDSSSSSHCLDPNNEEGGHGVKGWAFDDGNDVWMGRTISEKSRLGYETFKVIEGWSNPKSKLQINRQVIVDRGNRSGYSGIFSVEGKSCINRCFYVELIRGRKEETEVLWTSNSIVVFCGTSGTYGTGSWPDGADINLMPV

SEQ ID NO: 22630 - protein, 469 aa, Artificial Sequence; identical to SEQ ID NO: 17905
  derived and/or modified protein sequence (wt) from neuraminidase__InfluenzaA__AFM72930

SEQ ID NO: 22631 - protein, 469 aa, Artificial Sequence; identical to SEQ ID NO: 17905
  derived and/or modified protein sequence (wt) from neuraminidase__InfluenzaA__AFM72941

SEQ ID NO: 22632 - protein, 469 aa, Artificial Sequence; identical to SEQ ID NO: 17905
  derived and/or modified protein sequence (wt) from neuraminidase__InfluenzaA__AFM72952

SEQ ID NO: 22633 - protein, 469 aa, Artificial Sequence; identical to SEQ ID NO: 17905
  derived and/or modified protein sequence (wt) from neuraminidase__InfluenzaA__AFM72963

SEQ ID NO: 22634 - protein, 469 aa, Artificial Sequence; identical to SEQ ID NO: 17905
  derived and/or modified protein sequence (wt) from neuraminidase__InfluenzaA__AFM72974

SEQ ID NO: 22635 - protein, 469 aa, Artificial Sequence; identical to SEQ ID NO: 19518
  derived and/or modified protein sequence (wt) from neuraminidase__InfluenzaA__AFM72985

SEQ ID NO: 22636 - protein, 469 aa, Artificial Sequence; identical to SEQ ID NO: 19518
  derived and/or modified protein sequence (wt) from neuraminidase__InfluenzaA__AFM72996

SEQ ID NO: 22637 - protein, 469 aa, Artificial Sequence; identical to SEQ ID NO: 19518
  derived and/or modified protein sequence (wt) from neuraminidase__InfluenzaA__AFM73007

SEQ ID NO: 22638 - protein, 469 aa, Artificial Sequence
  derived and/or modified protein sequence (wt) from neuraminidase__InfluenzaA__AFM73018
MNPNQKIITIGSVCMTIGMANLILQIGNIISIWISHSIQLGNQSQIETCNQSVITYENNTWVNQTYVNISNTNFAAGQSVVSVKLAGNSSLCPVSGWAIYSKDNSIRIGSKGDVFVIREPFISCSPLECRTFFLTQGALLNDKHSNGTIKDRSPYRTLMSCPIGEVPSPYNSRFESVAWSASACHDGINWLTIGISGPDNGAVAVLKYNGIITDTIKSWRNNILRTQESECACVNGSCFTIMTDGPSDGQASYKIFRIEKGKIVKSVEMNAPNYHYEECSCYPDSSEITCVCRDNWHGSNRPWVSFNQNLEYQIGYICSGIFGDNPRPNDKTGSCGPVSSNGANGVKGFSFKYGNGIWIGRTKSISSRKGFEMIWDPNGWTGTDNNFSIKQDIVGINEWSGYSGSFVQHPELTGLDCIRPCFWVELIRGRPKENTIWTSGSSISFCGVNSDTVGWSWPDGAELPFTIDK

SEQ ID NO: 22639 - protein, 469 aa, Artificial Sequence; identical to SEQ ID NO: 22638
  derived and/or modified protein sequence (wt) from neuraminidase__InfluenzaA__AFM73028

SEQ ID NO: 22640 - protein, 469 aa, Artificial Sequence; identical to SEQ ID NO: 22638
  derived and/or modified protein sequence (wt) from neuraminidase__InfluenzaA__AFM73038

SEQ ID NO: 22641 - protein, 469 aa, Artificial Sequence; identical to SEQ ID NO: 18473
  derived and/or modified protein sequence (wt) from neuraminidase__InfluenzaA__AFM73048

SEQ ID NO: 22642 - protein, 469 aa, Artificial Sequence
  derived and/or modified protein sequence (wt) from neuraminidase__InfluenzaA__AFM73058
MNPNQKIITIGSFCMTIGLANLILQIGNIISIWISHSIQLGNQNQIETCNQSVITYENNTWVNQTYVNISNTNFAAGQSVVSVKLAGNSSLCPVSGWAIYSKDNSVRIGSKGDVFVIREPFISCSPLECRTFFLTQGALLNDKHSNGTIKDRSPYRTLMSCPIGEVPSPYNSRFESVAWSASACHDGINWLTIGISGPDNGAVAVLKYNGIITDTIKSWRNNILRTQESECACVNGSCFTVMTDGPSDGQASYKIFRIEKGKIVKSVEMNAPNYHYEECSCYPDSSEITCVCRDNWHGSNRPWVSFNQNLEYRIGYICSGIFGDNPRPNDKTGSCGPVSSNGANGVKGFSFKYGNGVWIGRTKSISSRNGFEMIWDPNGWTGTDKNFSIKQDIVGINEWSGYSGSFVQHPELTGLDCIRPCFWVELIRGRPKENTIWTSGSSISFCGVNSDTVGWSWPDGAELPFTIDK

SEQ ID NO: 22643 - protein, 469 aa, Artificial Sequence; identical to SEQ ID NO: 18473
  derived and/or modified protein sequence (wt) from neuraminidase__InfluenzaA__AFM73068

SEQ ID NO: 22644 - protein, 470 aa, Artificial Sequence; identical to SEQ ID NO: 14951
  derived and/or modified protein sequence (wt) from neuraminidase__InfluenzaA__AFM73480

SEQ ID NO: 22645 - protein, 449 aa, Artificial Sequence
  derived and/or modified protein sequence (wt) from neuraminidase__InfluenzaA__AFM78569
MNPNQKIITIGSICMVIGIVSLMLQIGNMISIWVIHSIQTGNQHQAESISNTNPLTEKAVASVTLAGNSSLCPIRGWAVHSKDNNIRIGSKGDVFVIREPFISCSHLECRTFFLTQGALLNDKHSNGTVKDRSPHRTLMSCPVGEAPSPYNSRFESVAWSASACHDGTSWLTIGISGPDNEAVAVLKYNGIITDTIKSWRNDILRTQESECACVNGSCFTVMTDGPSNGQASYKIFKMEKGKVVKSVELDAPNYHYEECSCYPDAGEITCVCRDNWHGSNRPWVSFNQNLEYQIGYICSGVFGDNPRPNDGTGSCGPMSPNGAYGVKGFSFKYGNGVWIGRTKSTNSRSGFEMIWDPNGWTGTDSSFSVKQDIVAITDWSGYSGSFVQHPELTGLDCIRPCFWVELIRGRPKESTIWTSGSSISFCGVNSDTVSWSWPDGAELPFTIDK

SEQ ID NO: 22646 - protein, 469 aa, Artificial Sequence
  derived and/or modified protein sequence (wt) from neuraminidase__InfluenzaA__AFM85180
MNPNQKIITIGSVSLTIATICFLTQIAILVTTVTLHFKQYECNSSPNNQVMLCEPTIIERNITEIVYLTNTTIEKEICPKLAEYRNWSKPQCNITGFAPFSKDNSIRLSAGGDIWVTREPYVSCGPDKCYQFALGQGTTLNNGHSNDTVHDRTPYRTLLMNELGVPFHLGTKQVCIAWSSSSCHDGKAWLHVCVTGDDKNATASFIYNGRLVDSIGSWSKKILRTQESECVCINGTCTVVMTDGSASGKADTKILFIEEGKIVHTSLLSGSAQHVEECSCYPRYPGVRCVCRDNWKGSNRPIVDINVKDYSIVSSYVCSGLVGDTPRKNDSSSSSHCLDPNNEEGGHGVKGWAFDDGNDVWMGRTISEKLRSGYETFKVIEGWSKPNSKLQINRQVIVDRGNRSGYSGIFSVEGKSCINRCFYVELIRGRNQETEVLWTSNSIVVFCGTSGTYGTGSWPDGADINLMPI

SEQ ID NO: 22647 - protein, 469 aa, Artificial Sequence; identical to SEQ ID NO: 14103
  derived and/or modified protein sequence (wt) from neuraminidase__InfluenzaA__AFN11830

SEQ ID NO: 22648 - protein, 469 aa, Artificial Sequence
  derived and/or modified protein sequence (wt) from neuraminidase__InfluenzaA__AFN11831
MNPNQKIITIGSVSLTIATICFLMQIAILVTTVTLHFKQYECDSPANNQVMPCEPIIIERNITEIVYLTNTTIEKEICPKLVEYRNWSKPQCKITGFAPFSKDNSIRLSAGGDIWVTREPYVSCDPGKCYQFALGQGTTLDNKHSNDTIHDRTPHRTLLMNELGVPFHLGTRQVCIAWSSSSCHDGKAWLHVCVTGYDKNATASFIYDGRLVDSIGSWSKNILRTQESECVCINGTCTVVMTDGSASGRADTKILFIEEGKIVHISPLSGSAQHVEECSCYPRYPGVRCVCRDNWKGSNRPVVDINVKDYSIVSSYVCSGLVGDTPRNNDRSSSSYCRNPNNEKGNHGVKGWAFDDGNDVWMGRTISEESRSGYETFKVIGGWSTPNSKLQINRQVIVDSDNRSGYSGIFSVEGKSCINRCFYVELIRGREQETRVWWTSNSIVVFCGTSGTYGTGSWPDGADINLMPI

SEQ ID NO: 22649 - protein, 469 aa, Artificial Sequence; identical to SEQ ID NO: 14576
  derived and/or modified protein sequence (wt) from neuraminidase__InfluenzaA__AFN11833

SEQ ID NO: 22650 - protein, 469 aa, Artificial Sequence; identical to SEQ ID NO: 16511
  derived and/or modified protein sequence (wt) from neuraminidase__InfluenzaA__AFN11835

SEQ ID NO: 22651 - protein, 469 aa, Artificial Sequence
  derived and/or modified protein sequence (wt) from neuraminidase__InfluenzaA__AFN11836
MNPNQKIITIGSVSLTIATMCFLMQIAILVTTVTLHFKQYECSSPPNNQVMPCEPTIIERNITEIVYLTNTTIEKEICPKLVEYRNWSKPQCKITGFAPFSKDNSIRLSAGGDIWVTREPYVSCDPGKCYQFALGQGTTLNNRHSNDTVHDRTPYRTLLMNELGVPFHLGTKQVCIAWSSSSCHDGKAWLHVCVTGHDKNATASFIYDGRLVDSIGSWSKNILRTQESECVCINGTCTVVMTDGSASERADTKILFIEEGKIIHISPLSGSAQHVEECSCYPRYPGVRCVCRDNWKGSNRPIVDINVKDYSIVSSYVCSGLVGDTPRKNDRSSSSYCRNPNNEKGSHGVKGWAFDDGNDVWMGRTIGEELRSGYETFKVIGGWSTPNSKLQINRQVIVDSGNRSGYSGIFSVEGKSCINRCFYVELIRGREQETRVWWTSNSIVVFCGTSGTYGTGSWPDGADINLMPI

SEQ ID NO: 22652 - protein, 469 aa, Artificial Sequence
  derived and/or modified protein sequence (wt) from neuraminidase__InfluenzaA__AFN11839
MNPNQKIITIGSVSLTIATICFLMQIAILVTTVTLHFKQYECSSPPNNQVMPCQPTIIERNITEIVYLTNTTIEKEICPKLVEYRNWSKPQCKITGFAPFSKDNSIRLSAGGDIWVTREPYVSCDPGKCYQFALGQGTTLNNRHSNDTVHDRTPYRTLLMNELGVPFHLGTKQVCIAWSSSSCHDGKAWLHVCVTGHDENATASFIYDGRLVDSIGSWSKNILRTQESECVCINGTCTVVMTDGSASERADTKILFIEEGKIVHISPLSGSAQHVEECSCYPRYPGVRCVCRDNWKGSNRPIVDINMKDYSIVSSYVCSGLVGDTPRKNDSSSSSYCRNPNNEKGSHGVKGWAFDDGNDVWMGRTISEELRSGYETFKVIGGWSTPNSKLQINRQVIVDSGNRSGYSGIFSVEGKSCINRCFYVELIRGRKQETKVWWTSNSIVVFCGTSGTYGTGSWPDGADINLMPI

SEQ ID NO: 22653 - protein, 469 aa, Artificial Sequence
  derived and/or modified protein sequence (wt) from neuraminidase__InfluenzaA__AFN11840
MNPNQKIITIGSVSLTIATICFLMQIAILVTTVTLHFKQYECNSPPNNQVMLCEPTIIERNITEIVYLTNTTIEKEICPKLAEYRNWSKPQCKITGFAPFSKDNSIRLSAGGDIWVTREPYVSCDPGKCYQFALGQGTTLNNRHSNDTVHDRTPYRTLLMNELGVPFHLGTKQVCIAWSSSSCHDGKAWLHVCVTGHDENATASFIYDGRLVDSIGSWSKNILRTQESECVCINGTCTVVMTDGSASERADTKILFIEEGKIVHISPLSGSAQHVEECSCYPRYPGVRCVCRDNWKGSNRPIVDINVKDYSIVSSYVCSGLVGDTPRKNDSSSSSYCRNPNNEKGSHGVKGWAFDDGNDVWMGRTIGEELRSGYETFKVIGGWSTPNSKLQINRQVIVDRGNRSGYSGIFSVEGKSCINRCFYVELVRGRKQETEVWWTSNSIVVFCGTSGTYGTGSWPDGADINLMPI

SEQ ID NO: 22654 - protein, 469 aa, Artificial Sequence; identical to SEQ ID NO: 15929
  derived and/or modified protein sequence (wt) from neuraminidase__InfluenzaA__AFN11841

SEQ ID NO: 22655 - protein, 469 aa, Artificial Sequence; identical to SEQ ID NO: 22017
  derived and/or modified protein sequence (wt) from neuraminidase__InfluenzaA__AFN11842

SEQ ID NO: 22656 - protein, 469 aa, Artificial Sequence
  derived and/or modified protein sequence (wt) from neuraminidase__InfluenzaA__AFN11844
MNPNQKIITIGSVSLTISTICFFMQIAILITTVTLHFKQYEFNSPPNNQVMLCEPTIIERNITEIVYLTNTTIEKEICPKLAEYRNWSKPQCNITGFAPFSKDNSIRLSAGGDIWVTREPYVSCDPDKCYQFALGQGTTLNNVHSNDTVRDRTPYRTLLMNELGVPFHLGTKQVCIAWSSSSCHDGKAWLHVCVTGDDKNATASFIYNGRLVDSIVSWSKEILRTQESECVCINGTCTVVMTDGSASGKADTKILFIEEGKIVHTSTLSGSAQHVEECSCYPRYPGVRCVCRDNWKGSNRPIVDINIKDYSIVSSYVCSGLVGDTPRKNDSSSSSHCLDPNNEEGGHGVKGWAFDDGNDVWMGRTISEKLRSGYETFKVIEGWSNPNSKLQINRQVIVDRGNRSGYSGIFSVEGKSCINRCFYVELIRGRKEETEVLWTSNSIVVFCGTSGTYGTGSWPDGADIGLMPM

SEQ ID NO: 22657 - protein, 469 aa, Artificial Sequence; identical to SEQ ID NO: 22576
  derived and/or modified protein sequence (wt) from neuraminidase__InfluenzaA__AFN11845

SEQ ID NO: 22658 - protein, 469 aa, Artificial Sequence; identical to SEQ ID NO: 22104
  derived and/or modified protein sequence (wt) from neuraminidase__InfluenzaA__AFN11847

SEQ ID NO: 22659 - protein, 469 aa, Artificial Sequence
  derived and/or modified protein sequence (wt) from neuraminidase__InfluenzaA__AFN11848
MNPNQKIITIGSVSLTISTICFFMQIAILITTVTLHFKQYEFNSPPNNQVMLCEPTIIERNITEIVYLTNTTIEKEICPKLAEYRNWSKPQCNITGFAPFSKDNSIRLSAGGDIWVTREPYVSCDPDKCYQFALGQGTTLNNVHSNDTVHDRTPYRTLLMNELGVPFHLGTKQVCIAWSSSSCHDGKAWLHVCVTGDDENATASFIYNGRLVDSIVSWSKKILRTQESECVCINGTCTVVMTDGSASGKADTKILFIEEGKIVHTSTLSGSAQHVEECSCYPRYPGVRCVCRDNWKGSNRPIVDINIKDYSIVSSYVCSGLVGDTPRKNDSSSSSHCLGPNNEEGGHGVKGWAFDDGNDVWMGRTISEKLRSGYETFKVIEGWSNPNSKLQINRQVIVDRGNRSGYSGIFSVEGKSCINRCFYVELIRGRKQETEVLWTSNSIVVFCGTSGTYGTGSWPDGADINLMPI

SEQ ID NO: 22660 - protein, 469 aa, Artificial Sequence
  derived and/or modified protein sequence (wt) from neuraminidase__InfluenzaA__AFN11850
MNPNQKIITIGSVSLTISTICFFMQIAILITTVTLHFKQYEFNSPPNNQVMLCEPTIIERNITEIVYLTNTTIEKEICPKLAEYRNWSKPQCDITGFAPFSKDNSIRLSAGGDIWVTREPYVSCDPDKCYQFALGQGTTLNNVHSNNTVRGRTPYRTLLMNELGVPFHLGTKQVCIAWSSSSCHDGKAWLHVCITGDDKNATASFIYNGRLVDSVVSWSKEILRTQESECVCINGTCTVVMTDGSASGKADTKILFIEEGKIVHTSTLSGSAQHVEECSCYPRYPGVRCVCRDNWKGSNRPIVDINIKDHSIVSSYVCSGLVGDTPRKNDSSSSSHCLDPNNEEGGHGVKGWAFDDGNDVWMGRTISEKSRLGYETFKVIEGWSNHKSKLQINRQVIVDRGNRSGYSGIFSVEGKSCINRCFYVELIRGRKEETEVLWTSNSIVVFCGTSGTYGTGSWPDGADLNLMPI

SEQ ID NO: 22661 - protein, 469 aa, Artificial Sequence
  derived and/or modified protein sequence (wt) from neuraminidase__InfluenzaA__AFN11851
MNPNQKIITIGSVSLTIATICLLMQIAILVTTVTLHFKQYECNSPPNNQVMLCEPTIIERNITKIVYLTNTTIEKEICPKLAEYRNWSKPQCKITGFAPFSKDNSIRLSAGGDIWVTREPYVSCDPGKCYQFALGQGTTLNNRHSNDTVHDRTPYRTLLMNELGVPFHLGTKQVCIAWSSSSCHDGKAWLHVCVTGHDENATASFIYDGRLVDSIGSWSKNILRTQESECVCINGTCTVVMTDGSASERADTKILFIEEGKIVHISPLSGSAQHVEECSCYPRYPGVRCVCRDNWKGSNRPIVDINVKDYSIVSSYVCSGLVGDTPRKNDSSSSSYCRNPNNEKGSHGVKGWAFDDGNDVWMGRTISEELRSGYETFKVIGGWSKPNSKLQINRQVIVDRGNRSGYSGIFSVEGKSCINRCFYVELIRGRKQETEVWWTSNSIVVFCGTSGTYGTGSWPDGADINLMPI

SEQ ID NO: 22662 - protein, 469 aa, Artificial Sequence; identical to SEQ ID NO: 14327
  derived and/or modified protein sequence (wt) from neuraminidase__InfluenzaA__AFN11853

SEQ ID NO: 22663 - protein, 469 aa, Artificial Sequence
  derived and/or modified protein sequence (wt) from neuraminidase__InfluenzaA__AFN11855
MNPNQKIITIGSVSLTISTICFFMQTAILITIVTLHFKQYEFNSPPNNQVMLCEPTIIERNITEIVYLTNTTIEKEICPKLAEYRNWSKPQCDITGFAPFSKDNSIRLSAGGDIWVTREPYVSCDPDKCYQFALGQGTTLNNVHSNDTVHDRTPYRTLLMNELGVPFHLGTKQVCIAWSSSSCHDGKAWLHVCITGDDKNATASFIYNGRLVDSIVSWSKEILRTQESECVCINGTCTVVMTDGSASGKADTKILFIEEGKIVHTSILSGSAQHVEECSCYPRYPGVRCVCRDNWKGSNRPIVDINIKDHSIVSSYVCSGLVGDTPRKNDSSSSSHCLDPNNEEGGHGVKGWAFDDGNDVWMGRTISEKSRLGYETFKVIEGWSNPKSKLQINRQVIVDRGNRSGYSGIFSVEGKSCINRCFYVELIRGRKEETEVLWTSNSIVVFCGTSGTYGTGSWPDGADINLMPI

SEQ ID NO: 22664 - protein, 469 aa, Artificial Sequence; identical to SEQ ID NO: 15929
  derived and/or modified protein sequence (wt) from neuraminidase__InfluenzaA__AFN11857

SEQ ID NO: 22665 - protein, 469 aa, Artificial Sequence; identical to SEQ ID NO: 16738
  derived and/or modified protein sequence (wt) from neuraminidase__InfluenzaA__AFN17373

SEQ ID NO: 22666 - protein, 469 aa, Artificial Sequence; identical to SEQ ID NO: 22371
  derived and/or modified protein sequence (wt) from neuraminidase__InfluenzaA__AFN17383

SEQ ID NO: 22667 - protein, 469 aa, Artificial Sequence; identical to SEQ ID NO: 16738
  derived and/or modified protein sequence (wt) from neuraminidase__InfluenzaA__AFN17393

SEQ ID NO: 22668 - protein, 469 aa, Artificial Sequence; identical to SEQ ID NO: 16738
  derived and/or modified protein sequence (wt) from neuraminidase__InfluenzaA__AFN17403

SEQ ID NO: 22669 - protein, 469 aa, Artificial Sequence; identical to SEQ ID NO: 16738
  derived and/or modified protein sequence (wt) from neuraminidase__InfluenzaA__AFN17413

SEQ ID NO: 22670 - protein, 469 aa, Artificial Sequence; identical to SEQ ID NO: 16738
  derived and/or modified protein sequence (wt) from neuraminidase__InfluenzaA__AFN17423

SEQ ID NO: 22671 - protein, 469 aa, Artificial Sequence; identical to SEQ ID NO: 16738
  derived and/or modified protein sequence (wt) from neuraminidase__InfluenzaA__AFN17433

SEQ ID NO: 22672 - protein, 469 aa, Artificial Sequence; identical to SEQ ID NO: 16738
  derived and/or modified protein sequence (wt) from neuraminidase__InfluenzaA__AFN17443

SEQ ID NO: 22673 - protein, 469 aa, Artificial Sequence; identical to SEQ ID NO: 16738
  derived and/or modified protein sequence (wt) from neuraminidase__InfluenzaA__AFN17453

SEQ ID NO: 22674 - protein, 469 aa, Artificial Sequence; identical to SEQ ID NO: 16738
  derived and/or modified protein sequence (wt) from neuraminidase__InfluenzaA__AFN17459

SEQ ID NO: 22675 - protein, 469 aa, Artificial Sequence; identical to SEQ ID NO: 16738
  derived and/or modified protein sequence (wt) from neuraminidase__InfluenzaA__AFN17469

SEQ ID NO: 22676 - protein, 469 aa, Artificial Sequence; identical to SEQ ID NO: 16738
  derived and/or modified protein sequence (wt) from neuraminidase__InfluenzaA__AFN17479

SEQ ID NO: 22677 - protein, 469 aa, Artificial Sequence; identical to SEQ ID NO: 16738
  derived and/or modified protein sequence (wt) from neuraminidase__InfluenzaA__AFN17489

SEQ ID NO: 22678 - protein, 469 aa, Artificial Sequence; identical to SEQ ID NO: 16738
  derived and/or modified protein sequence (wt) from neuraminidase__InfluenzaA__AFN17499

SEQ ID NO: 22679 - protein, 469 aa, Artificial Sequence; identical to SEQ ID NO: 16738
  derived and/or modified protein sequence (wt) from neuraminidase__InfluenzaA__AFN17509

SEQ ID NO: 22680 - protein, 469 aa, Artificial Sequence; identical to SEQ ID NO: 16738
  derived and/or modified protein sequence (wt) from neuraminidase__InfluenzaA__AFN17519

SEQ ID NO: 22681 - protein, 469 aa, Artificial Sequence; identical to SEQ ID NO: 16738
  derived and/or modified protein sequence (wt) from neuraminidase__InfluenzaA__AFN17529

SEQ ID NO: 22682 - protein, 469 aa, Artificial Sequence; identical to SEQ ID NO: 16738
  derived and/or modified protein sequence (wt) from neuraminidase__InfluenzaA__AFN17539

SEQ ID NO: 22683 - protein, 469 aa, Artificial Sequence; identical to SEQ ID NO: 16738
  derived and/or modified protein sequence (wt) from neuraminidase__InfluenzaA__AFN17549

SEQ ID NO: 22684 - protein, 469 aa, Artificial Sequence; identical to SEQ ID NO: 16738
  derived and/or modified protein sequence (wt) from neuraminidase__InfluenzaA__AFN17559

SEQ ID NO: 22685 - protein, 469 aa, Artificial Sequence; identical to SEQ ID NO: 16738
  derived and/or modified protein sequence (wt) from neuraminidase__InfluenzaA__AFN17569

SEQ ID NO: 22686 - protein, 469 aa, Artificial Sequence; identical to SEQ ID NO: 16738
  derived and/or modified protein sequence (wt) from neuraminidase__InfluenzaA__AFN17575

SEQ ID NO: 22687 - protein, 469 aa, Artificial Sequence; identical to SEQ ID NO: 16738
  derived and/or modified protein sequence (wt) from neuraminidase__InfluenzaA__AFN17581

SEQ ID NO: 22688 - protein, 469 aa, Artificial Sequence; identical to SEQ ID NO: 16738
  derived and/or modified protein sequence (wt) from neuraminidase__InfluenzaA__AFN17587

SEQ ID NO: 22689 - protein, 469 aa, Artificial Sequence; identical to SEQ ID NO: 16738
  derived and/or modified protein sequence (wt) from neuraminidase__InfluenzaA__AFN17597

SEQ ID NO: 22690 - protein, 469 aa, Artificial Sequence; identical to SEQ ID NO: 22371
  derived and/or modified protein sequence (wt) from neuraminidase__InfluenzaA__AFN17607

SEQ ID NO: 22691 - protein, 469 aa, Artificial Sequence; identical to SEQ ID NO: 16738
  derived and/or modified protein sequence (wt) from neuraminidase__InfluenzaA__AFN17617

SEQ ID NO: 22692 - protein, 469 aa, Artificial Sequence; identical to SEQ ID NO: 16738
  derived and/or modified protein sequence (wt) from neuraminidase__InfluenzaA__AFN17627

SEQ ID NO: 22693 - protein, 469 aa, Artificial Sequence; identical to SEQ ID NO: 16738
  derived and/or modified protein sequence (wt) from neuraminidase__InfluenzaA__AFN17637

SEQ ID NO: 22694 - protein, 469 aa, Artificial Sequence; identical to SEQ ID NO: 16738
  derived and/or modified protein sequence (wt) from neuraminidase__InfluenzaA__AFN17647

SEQ ID NO: 22695 - protein, 469 aa, Artificial Sequence; identical to SEQ ID NO: 16738
  derived and/or modified protein sequence (wt) from neuraminidase__InfluenzaA__AFN17657

SEQ ID NO: 22696 - protein, 469 aa, Artificial Sequence; identical to SEQ ID NO: 16738
  derived and/or modified protein sequence (wt) from neuraminidase__InfluenzaA__AFN17667

SEQ ID NO: 22697 - protein, 469 aa, Artificial Sequence; identical to SEQ ID NO: 16738
  derived and/or modified protein sequence (wt) from neuraminidase__InfluenzaA__AFN17677

SEQ ID NO: 22698 - protein, 469 aa, Artificial Sequence; identical to SEQ ID NO: 22371
  derived and/or modified protein sequence (wt) from neuraminidase__InfluenzaA__AFN17687

SEQ ID NO: 22699 - protein, 469 aa, Artificial Sequence; identical to SEQ ID NO: 16738
  derived and/or modified protein sequence (wt) from neuraminidase__InfluenzaA__AFN17697

SEQ ID NO: 22700 - protein, 469 aa, Artificial Sequence; identical to SEQ ID NO: 22371
  derived and/or modified protein sequence (wt) from neuraminidase__InfluenzaA__AFN17707

SEQ ID NO: 22701 - protein, 469 aa, Artificial Sequence; identical to SEQ ID NO: 16738
  derived and/or modified protein sequence (wt) from neuraminidase__InfluenzaA__AFN17717

SEQ ID NO: 22702 - protein, 469 aa, Artificial Sequence; identical to SEQ ID NO: 22371
  derived and/or modified protein sequence (wt) from neuraminidase__InfluenzaA__AFN17727

SEQ ID NO: 22703 - protein, 469 aa, Artificial Sequence; identical to SEQ ID NO: 16738
  derived and/or modified protein sequence (wt) from neuraminidase__InfluenzaA__AFN17737

SEQ ID NO: 22704 - protein, 469 aa, Artificial Sequence; identical to SEQ ID NO: 16738
  derived and/or modified protein sequence (wt) from neuraminidase__InfluenzaA__AFN17743

SEQ ID NO: 22705 - protein, 469 aa, Artificial Sequence; identical to SEQ ID NO: 22371
  derived and/or modified protein sequence (wt) from neuraminidase__InfluenzaA__AFN17749

SEQ ID NO: 22706 - protein, 469 aa, Artificial Sequence; identical to SEQ ID NO: 16738
  derived and/or modified protein sequence (wt) from neuraminidase__InfluenzaA__AFN17759

SEQ ID NO: 22707 - protein, 469 aa, Artificial Sequence; identical to SEQ ID NO: 16738
  derived and/or modified protein sequence (wt) from neuraminidase__InfluenzaA__AFN17769

SEQ ID NO: 22708 - protein, 469 aa, Artificial Sequence; identical to SEQ ID NO: 16738
  derived and/or modified protein sequence (wt) from neuraminidase__InfluenzaA__AFN17775

SEQ ID NO: 22709 - protein, 469 aa, Artificial Sequence
  derived and/or modified protein sequence (wt) from neuraminidase__InfluenzaA__AFN17785
MNPNQKIITIGSVCMTIGMANLILQIGNIISIWISHSIQLGNQNQIETCNQSVITYENNTWVNQTYVNISNTNFAAGQSVVSVKLAGNSSLCPVSGWAIYSKDNSIRIGSKGDVFVIREPFISCSPLECRTFFLTQGALLNDKHSNGTIKDRSPYRTLMSCPIGEVPSPYNSRFESVAWSASACHDGINWLTIGISGPDNGAVAVLKYNGIITDTIKSWRNNILRTQESECACVNGSCFTLMTDGPSDGQASYKIFRIEKGKIVKSVEMNAPNYHYEECSCYPDSSEITCVCRDNWHGSNRPWVSFNQNLEYQIGYICSGIFGDNPRPNDKTGSCGPVSSNGANGVKGFSFKYGNGVWIGRTKSISSRNGFEMIWDPNGWTGTDNTFSIKQDIVGINEWSGYSGSFVQHPELTGLDCIRPCFWVELIRGRPKENTIWTSGSSISFCGVNSDTVGWSWPDGAELPFTIDK

SEQ ID NO: 22710 - protein, 469 aa, Artificial Sequence
  derived and/or modified protein sequence (wt) from neuraminidase__InfluenzaA__AFN17795
MNPNQKIITIGSVCMTIGMANLILQIGNIISIWISHSIQLGNQNQIETCNQSVITYENNTWVNQTYVNISNTNFAAGQSVVSVKLAGNSSLCPVGGWAIYSKDNSIRIGSKGDVFVIREPFISCSPLECRTFFLTQGALLNDKHSNGTIKDRSPYRTLMSCPIGEVPSPYNSRFESVAWSASACHDGINWLTIGISGPDNGAVAVLKYNGIITDTIKSWRNNILRTQESECACVNGSCFTVMTDGPSDGQASYKIFRIEKGKIVKSVEMNAPNYHYEECSCYPDSSEITCVCRDNWHGSNRPWVSFNQNLEYQIGYICSGIFGDNPRPNDKTGSCGPVSSNGANGVKGFSFKYGNGVWIGRTKSISSRNGFEMIWDPNGWTGTDNNFSIKQDIVGINEWSGYSGSFVQHPELTGLDCIRPCFWVELIRGRPKENTIWTSGSSISFCGVNSDTVGWSWPDGAELPFTIDK

SEQ ID NO: 22711 - protein, 469 aa, Artificial Sequence; identical to SEQ ID NO: 16738
  derived and/or modified protein sequence (wt) from neuraminidase__InfluenzaA__AFN17805

SEQ ID NO: 22712 - protein, 469 aa, Artificial Sequence
  derived and/or modified protein sequence (wt) from neuraminidase__InfluenzaA__AFN17815
MNPNQKIITIGSVSMTIGMANLILQIGNIISIWISHSIQLGNQNQIETCNQSVITYENNTWVNQTYVNISNTNFAAGQSVVSVKLAGNSSLCPVSGWAIYSKDNSIRIGSKGDVFVIREPFISCSPLECRTFFLTQGALLNDKHSNGTIKDRSPYRTLMSCPIGEVPSPYNSRFESVAWSASACHDGINWLTIGISGPDNGAVAVLKYNGIITDTIKSWRNNILRTQESECACVNGSCFTVMTDGPSDGQASYKIFRIEKGKIVKSVEMNAPNYHYEECSCYPDSSEITCVCRDNWHGSNRPWVSFNQNLEYQIGYICSGIFGDNPRPNDKTGSCGPVSSNGANGVKGFSFKYGNGVWIGRTKSISSRNGFEMIWDPNGWTGTDNNFSIKQDIVGINEWSGYSGSFVQHPELTGLDCIRPCFWVELIRGRPKENTIWTSGSSISFCGVNSDTVGWSWPDGAELPFTIDK

SEQ ID NO: 22713 - protein, 469 aa, Artificial Sequence; identical to SEQ ID NO: 16738
  derived and/or modified protein sequence (wt) from neuraminidase__InfluenzaA__AFN17825

SEQ ID NO: 22714 - protein, 469 aa, Artificial Sequence; identical to SEQ ID NO: 22371
  derived and/or modified protein sequence (wt) from neuraminidase__InfluenzaA__AFN17835

SEQ ID NO: 22715 - protein, 469 aa, Artificial Sequence; identical to SEQ ID NO: 16738
  derived and/or modified protein sequence (wt) from neuraminidase__InfluenzaA__AFN17845

SEQ ID NO: 22716 - protein, 469 aa, Artificial Sequence; identical to SEQ ID NO: 16738
  derived and/or modified protein sequence (wt) from neuraminidase__InfluenzaA__AFN17855

SEQ ID NO: 22717 - protein, 469 aa, Artificial Sequence; identical to SEQ ID NO: 18552
  derived and/or modified protein sequence (wt) from neuraminidase__InfluenzaA__AFN17865

SEQ ID NO: 22718 - protein, 469 aa, Artificial Sequence; identical to SEQ ID NO: 22371
  derived and/or modified protein sequence (wt) from neuraminidase__InfluenzaA__AFN17875

SEQ ID NO: 22719 - protein, 469 aa, Artificial Sequence; identical to SEQ ID NO: 22371
  derived and/or modified protein sequence (wt) from neuraminidase__InfluenzaA__AFN17885

SEQ ID NO: 22720 - protein, 469 aa, Artificial Sequence; identical to SEQ ID NO: 16738
  derived and/or modified protein sequence (wt) from neuraminidase__InfluenzaA__AFN17895

SEQ ID NO: 22721 - protein, 469 aa, Artificial Sequence; identical to SEQ ID NO: 22371
  derived and/or modified protein sequence (wt) from neuraminidase__InfluenzaA__AFN17905

SEQ ID NO: 22722 - protein, 469 aa, Artificial Sequence; identical to SEQ ID NO: 16738
  derived and/or modified protein sequence (wt) from neuraminidase__InfluenzaA__AFN17911

SEQ ID NO: 22723 - protein, 469 aa, Artificial Sequence; identical to SEQ ID NO: 22371
  derived and/or modified protein sequence (wt) from neuraminidase__InfluenzaA__AFN17921

SEQ ID NO: 22724 - protein, 469 aa, Artificial Sequence
  derived and/or modified protein sequence (wt) from neuraminidase__InfluenzaA__AFN17931
MNPNQKIITIGSVCMTIGMANLILQIGNIISIWISHSIQLGNQNQIETCNQSVITYENNTWVNQTYVNISNTNFAAGQSVVSVKLAGNSSLCPVSGWAIYSKDNSIRIGSRGDVFVIREPFISCSPLECRTFFLTQGALLNDKHSNGTIKDRSPYRTLMSCPIGEVPSPYNSRFESVAWSASACHDGINWLTIGISGPDNGAVAVLKYNGIITDTIKSWRNNILRTQESECACVNGSCFTVMTDGPSDGQASYKIFRIEKGKIVKSVEMNAPNYHYEECSCYPDSSEITCVCRDNWHGSNRPWVSFNQNLEYRIGYICSGIFGDNPRPNDKTGSCGPVSSNGANGVKGFSFKYGNGVWIGRTKSISSRNGFEMIWDPNGWTGTDNNFSIKQDIVGINEWSGYSGSFVQHPELTGLDCIRPCFWVELIRGRPKENTIWTSGSSISFCGVNSDTVGWSWPDGAELPFTIDK

SEQ ID NO: 22725 - protein, 469 aa, Artificial Sequence; identical to SEQ ID NO: 16738
  derived and/or modified protein sequence (wt) from neuraminidase__InfluenzaA__AFN17941

SEQ ID NO: 22726 - protein, 469 aa, Artificial Sequence; identical to SEQ ID NO: 16738
  derived and/or modified protein sequence (wt) from neuraminidase__InfluenzaA__AFN17951

SEQ ID NO: 22727 - protein, 469 aa, Artificial Sequence
  derived and/or modified protein sequence (wt) from neuraminidase__InfluenzaA__AFN17961
MNPNQKIITIGSVCMTIGMANLILQIGNIISIWISHSIQLGNQNQIETCNQSVITYENNTWVNQTYVNISNTNFAAGQSVVSVKLAGNSSLCPVSGWAIYSKDNSIRIGSKGDVFVIREPFISCSPLECRTFFLTQGALLNDKHSNGTIKDRSPYRTLMSCPIGEVPSPYNSRFESVAWSASACHDGINWLTIGISGPDNGAVAVLKYNGIITDTIKSWRNNILRTQESECACVNGSCFTVMTDGPSDGQASYKIFRIEKGKIVNSVEMNAPNYHYEECSCYPDSSEITCVCRDNWHGSNRPWVSFNQNLEYQIGYICSGIFGDNPRPNDKTGSCGPVSSNGANGVKGFSFKYGNGVWIGRTKSISSRNGFEMIWDPNGWTGTDNNFSIKQDIVGINEWSGYSGSFVQHPELTGLDCIRPCFWVELIRGRPKENTIWTSGSSISFCGVNSDTVGWSWPDGAELPFTIDK

SEQ ID NO: 22728 - protein, 469 aa, Artificial Sequence; identical to SEQ ID NO: 16738
  derived and/or modified protein sequence (wt) from neuraminidase__InfluenzaA__AFN17971

SEQ ID NO: 22729 - protein, 469 aa, Artificial Sequence; identical to SEQ ID NO: 16738
  derived and/or modified protein sequence (wt) from neuraminidase__InfluenzaA__AFN17981

SEQ ID NO: 22730 - protein, 469 aa, Artificial Sequence; identical to SEQ ID NO: 16738
  derived and/or modified protein sequence (wt) from neuraminidase__InfluenzaA__AFN17991

SEQ ID NO: 22731 - protein, 469 aa, Artificial Sequence
  derived and/or modified protein sequence (wt) from neuraminidase__InfluenzaA__AFN18001
MNPNQKIITISSVCMTIGMANLILQIGNIISIWISHSIQLGNQNQIETCNQSVITYENNTWVNQTYVNISNTNFAAGQSVVSVKLAGNSSLCPVSGWAIYSKDNSIRIGSKGDVFVIREPFISCSPLECRTFFLTQGALLNDKHSNGTIKDRSPYRTLMSCPIGEVPSPYNSRFESVAWSASACHDGINWLTIGISGPDNGAVAVLKYNGIITDTIKSWRNNILRTQESECACVNGSCFTLMTDGPSDGQASYKIFRIEKGKIVKSVEMNAPNYHYEECSCYPDSSEITCVCRDNWHGSNRPWVSFNQNLEYQIGYICSGIFGDNPRPNDKTGSCGPVSSNGANGVKGFSFKYGNGVWIGRTKSISSRNGFEMIWDPNGWTGTDNNFSIKQDIVGINEWSGYSGSFVQHPELTGLDCIRPCFWVELIRGRPKENTIWTSGSSISFCGVNSDTVGWSWPDGAELPFTIDK

SEQ ID NO: 22732 - protein, 469 aa, Artificial Sequence; identical to SEQ ID NO: 16738
  derived and/or modified protein sequence (wt) from neuraminidase__InfluenzaA__AFN18011

SEQ ID NO: 22733 - protein, 469 aa, Artificial Sequence; identical to SEQ ID NO: 16738
  derived and/or modified protein sequence (wt) from neuraminidase__InfluenzaA__AFN18021

SEQ ID NO: 22734 - protein, 469 aa, Artificial Sequence
  derived and/or modified protein sequence (wt) from neuraminidase__InfluenzaA__AFN18031
MNPNQKIITIGSICMTIGMANLILQIGNIISIWISHSIQLGNQNQIETCNQSVITYENNTWVNQTYVNISNTNFAAGQSVVSVKLAGNSSLCPVSGWAIYSKDNSIRIGSKGDVFVIREPFISCSPLECRTFFLTQGALLNDKHSNGTIKDRSPYRTLMSCPIGEVPSPYNSRFESVAWSASACHDGINWLTIGISGPDNGAVAVLKYNGIITDTIKSWRNNILRTQESECACVNGSCFTLMTDGPSDGQASYKIFRIEKGKIVKSVEMNAPNYHYEECSCYPDSSEITCVCRDNWHGSNRPWVSFNQNLEYQIGYICSGIFGDNPRPNDKTGSCGPVSSNGANGVKGFSFKYGNGVWIGRTKSISSRNGFEMIWDPNGWTGTDNNFSIKQDIVGINEWSGYSGSFVQHPELTGLDCIRPCFWVELIRGRPKENTIWTSGSSISFCGVNSDTVGWSWPDGAELPFTIDK

SEQ ID NO: 22735 - protein, 469 aa, Artificial Sequence; identical to SEQ ID NO: 16738
  derived and/or modified protein sequence (wt) from neuraminidase__InfluenzaA__AFN18041

SEQ ID NO: 22736 - protein, 469 aa, Artificial Sequence; identical to SEQ ID NO: 22371
  derived and/or modified protein sequence (wt) from neuraminidase__InfluenzaA__AFN18051

SEQ ID NO: 22737 - protein, 469 aa, Artificial Sequence; identical to SEQ ID NO: 22371
  derived and/or modified protein sequence (wt) from neuraminidase__InfluenzaA__AFN18061

SEQ ID NO: 22738 - protein, 469 aa, Artificial Sequence; identical to SEQ ID NO: 16738
  derived and/or modified protein sequence (wt) from neuraminidase__InfluenzaA__AFN18070

SEQ ID NO: 22739 - protein, 469 aa, Artificial Sequence; identical to SEQ ID NO: 16738
  derived and/or modified protein sequence (wt) from neuraminidase__InfluenzaA__AFN18080

SEQ ID NO: 22740 - protein, 469 aa, Artificial Sequence; identical to SEQ ID NO: 16738
  derived and/or modified protein sequence (wt) from neuraminidase__InfluenzaA__AFN18090

SEQ ID NO: 22741 - protein, 469 aa, Artificial Sequence; identical to SEQ ID NO: 16738
  derived and/or modified protein sequence (wt) from neuraminidase__InfluenzaA__AFN18100

SEQ ID NO: 22742 - protein, 469 aa, Artificial Sequence; identical to SEQ ID NO: 16738
  derived and/or modified protein sequence (wt) from neuraminidase__InfluenzaA__AFN18106

SEQ ID NO: 22743 - protein, 469 aa, Artificial Sequence
  derived and/or modified protein sequence (wt) from neuraminidase__InfluenzaA__AFN18108
MNPNQKIITIGSVCMTIGMANLILQIGNIISIWISHSIQLGNQNQIETCNQSVITYENNTWVNQTYVNISNTNFAAGQSVVSVKLAGNSSLCPVSGWAIYSKDNSIRIGSKGDVFVIREPFISCSPLECRTFFLTQGALLNDKHSNGTIKDRSPYRTLMSCPIGEVPSPYNSRFESVAWSASACHDGINWLTIGISGPDNGAVAVLKYNGIITDTIKSWRNNILRTQESECACVNGSCFTVMTDGPSDGQASYKIFRIEKGKIVKSVEMNAPNYHYEECSCYPDSSEITCVCRDNWHGSNRPWVSFNQNLEYRIGYICSGIFGDNPRPNDKTGSCGPVLSNGANGVKGFSFKYGNGVWIGRTKSISSRNGFEMIWDPNGWTGTDNNFSIKQDIVGINEWSGYSGSFVQHPELTGLDCIRPCFWVELIRGRPKENTIWTSGSSISFCGVNSDTVGWSWPDGAELPFTIDK

SEQ ID NO: 22744 - protein, 469 aa, Artificial Sequence
  derived and/or modified protein sequence (wt) from neuraminidase__InfluenzaA__AFN18118
MNPNQKIITIGSVCMTIGMANLILQIGNMISIWISHSIQLGNQNQIETCNQSVITYENNTWVNQTYVKISNTNFAAGQSVVSVKLAGNSSLCPVSGWAIYSKDNSIRIGSKGDVFVIREPFISCSPLECRTFFLTQGALLNDKHSNGTIKDRSPYRTLMSCPIGEVPSPYNSRFESVAWSASACHDGINWLTIGISGPDNGAVAVLKYNGIITDTIKSWRNNILRTQESECACVNGSCFTLMTDGPSDGQASYKIFRIEKGKIVKSVEMNAPNYHYEECSCYPDSSEITCVCRDNWHGSNRPWVSFNQNLEYQIGYICSGIFGDNPRPNDKTGSCGPVSSNGANGVKGFSFKYGNGVWIGRTKSISSRNGFEMIWDPNGWTGTDNNFSIKQDIVGINEWSGYSGSFVQHPELTGLDCIRPCFWVELIRGRPKENTIWTSGSSISFCGVNSDTVGWSWPDGAELPFTIDK

SEQ ID NO: 22745 - protein, 469 aa, Artificial Sequence; identical to SEQ ID NO: 16738
  derived and/or modified protein sequence (wt) from neuraminidase__InfluenzaA__AFN18120

SEQ ID NO: 22746 - protein, 469 aa, Artificial Sequence; identical to SEQ ID NO: 16738
  derived and/or modified protein sequence (wt) from neuraminidase__InfluenzaA__AFN18122

SEQ ID NO: 22747 - protein, 469 aa, Artificial Sequence; identical to SEQ ID NO: 22371
  derived and/or modified protein sequence (wt) from neuraminidase__InfluenzaA__AFN18128

SEQ ID NO: 22748 - protein, 469 aa, Artificial Sequence; identical to SEQ ID NO: 22371
  derived and/or modified protein sequence (wt) from neuraminidase__InfluenzaA__AFN18134

SEQ ID NO: 22749 - protein, 469 aa, Artificial Sequence; identical to SEQ ID NO: 16738
  derived and/or modified protein sequence (wt) from neuraminidase__InfluenzaA__AFN18136

SEQ ID NO: 22750 - protein, 469 aa, Artificial Sequence; identical to SEQ ID NO: 16738
  derived and/or modified protein sequence (wt) from neuraminidase__InfluenzaA__AFN18138

SEQ ID NO: 22751 - protein, 469 aa, Artificial Sequence
  derived and/or modified protein sequence (wt) from neuraminidase__InfluenzaA__AFN18140
MNPNQKIITIGSVCMTIGMANLILQIGNIISIWISHSIQLGNQNQIETCNQSVITYENNTWVNQTYVNISNTNFAAGQSVVSVKLAGNSSLCPVSGWAIYSKDNSIRIGSKGDVFVIREPFISCSPLECRTFFLTQGALLNDKHSNGTIKDRSPYRTLMSCPIGEVPSPYNSRFESVAWSASACHDGINWLTIGISGPDNGAVAVLKYNGIITDTIKSWRNNILRTQESECACVNGSCFTVMTDGPSDGQASYKIFRIEKGKIVKSVEMNAPNYHYEECSCYPDSSEITCVCRDNWHGSNRPWVSFNQNLEYRIGYICSGIFGDNPRPNDKTGSCGPVSSNGANGVKGFSFKYGNGIWIGRTKSISSRNGFEMIWDPNGWTGTDNNFSIKQDIVGINEWSGYSGSFVQHPELTGLDCIRPCFWVELIRGRPKENTIWTSGSSISFCGVNSDTVGWSWPDGAELPFTIDK

SEQ ID NO: 22752 - protein, 469 aa, Artificial Sequence; identical to SEQ ID NO: 16738
  derived and/or modified protein sequence (wt) from neuraminidase__InfluenzaA__AFN18144

SEQ ID NO: 22753 - protein, 469 aa, Artificial Sequence; identical to SEQ ID NO: 16738
  derived and/or modified protein sequence (wt) from neuraminidase__InfluenzaA__AFN18150

SEQ ID NO: 22754 - protein, 469 aa, Artificial Sequence; identical to SEQ ID NO: 16738
  derived and/or modified protein sequence (wt) from neuraminidase__InfluenzaA__AFN18156

SEQ ID NO: 22755 - protein, 469 aa, Artificial Sequence; identical to SEQ ID NO: 16738
  derived and/or modified protein sequence (wt) from neuraminidase__InfluenzaA__AFN18158

SEQ ID NO: 22756 - protein, 469 aa, Artificial Sequence; identical to SEQ ID NO: 18552
  derived and/or modified protein sequence (wt) from neuraminidase__InfluenzaA__AFN18160

SEQ ID NO: 22757 - protein, 469 aa, Artificial Sequence
  derived and/or modified protein sequence (wt) from neuraminidase__InfluenzaA__AFN18166
MNPNQKIITIGSVCMTIGMANLILQIGNIISIWISHSIQLGNQNQIETCNQSVITYENKTWVNQTYVNISNANFAAGQSVVSVKLAGNSSLCPVSGWAIYSKDNSIRIGSKGDVFVIREPFISCSPLECRTFFLTQGALLNDKHSNGTIKDRSPYRTLMSCPIGEVPSPYNSKFESVAWSASACHDGINWLTIGISGPDNGAVAVLKYNGIITDTIKSWRNNILRTQESECACVNGSCFTVMTDGPSDGQASYKIFRIEKGKIVKSVEMNAPNYHYEECSCYPDSSEITCVCRDNWHGSNRPWVSFNQNLEYQIGYICSGIFGDNPRPNDKTGSCGPVSSNGANGVKGFSFKYGNGVWIGRTKSISSRNGFEMIWDPNGWTGTDNNFSIKQDIVGINEWSGYSGSFVQHPELTGLDCIRPCFWVELIRGRPKENTIWTSGSSISFCGVNSDTVGWSWPDGAELPFTIDK

SEQ ID NO: 22758 - protein, 469 aa, Artificial Sequence; identical to SEQ ID NO: 16738
  derived and/or modified protein sequence (wt) from neuraminidase__InfluenzaA__AFN18172

SEQ ID NO: 22759 - protein, 469 aa, Artificial Sequence; identical to SEQ ID NO: 17756
  derived and/or modified protein sequence (wt) from neuraminidase__InfluenzaA__AFN18178

SEQ ID NO: 22760 - protein, 469 aa, Artificial Sequence
  derived and/or modified protein sequence (wt) from neuraminidase__InfluenzaA__AFN18184
MNPNQKIITIGSVCMTIGMANLILQIGNIISIWISHSIQLGNQNQIETCNQSVITYENNTWVNQTYVNISNTNFAAGQSMVSVKLAGNSSLCPVSGWAIYSKDNSIRIGSKGDVFVIREPFISCSPLECRTFFLTQGALLNDKHSNGTIKDRSPYRTLMSCPIGEVPSPYNSRFESVAWSASACHDGINWLTIGISGPDNGAVAVLKYNGIITDTIKSWRNNILRTQESECACVNGSCFTVMTDGPSDGQASYKIFRIEKGKIVKSVEMNAPNYHYEECSCYPDSSEITCVCRDNWHGSNRPWVSFNQNLEYQIGYICSGIFGDNPRPNDKTGSCGPVSSNGANGVKGFSFKYGNGVWIGRTKSISSRNGFEMIWDPNGWTGTDNNFSIKQDIVGINEWSGYSGSFVQHPELTGLDCIRPCFWVELIRGRPKENTIWTSGSSISFCGVNSDTVGWSWPDGAELPFTIDK

SEQ ID NO: 22761 - protein, 469 aa, Artificial Sequence; identical to SEQ ID NO: 19730
  derived and/or modified protein sequence (wt) from neuraminidase__InfluenzaA__AFN18190

SEQ ID NO: 22762 - protein, 469 aa, Artificial Sequence; identical to SEQ ID NO: 20751
  derived and/or modified protein sequence (wt) from neuraminidase__InfluenzaA__AFN18196

SEQ ID NO: 22763 - protein, 469 aa, Artificial Sequence
  derived and/or modified protein sequence (wt) from neuraminidase__InfluenzaA__AFN18202
MNPNQKIITIGSVCMTIGMANLILQIGNIISIWISHSIQLGNQNQIETCNQSVITYENNTWVNQTYVNISNTNFAAGRSVVSVKLAGNSSLCPVSGWAIYSKDNSIRIGSKGDVFVIREPFISCSPLECRTFFLTQGALLNDKHSNGTIKDRSPYRTLMSCPIGEVPSPYNSRFESVAWSASACHDGINWLTIGISGPDNGAVAVLKYNGIITDTIKSWRNNILRTQESECACVNGSCFTVMTDGPSDGQASYKIFRIEKGKIVKSVEMNAPNYHYEECSCYPDSSEITCVCRDNWHGSNRPWVSFNQNLEYQIGYICSGIFGDNPRPNDKTGSCGPVSSNGANGVKGFSFKYGNGVWIGRTKSISSRNGFEMIWDPNGWTGTDNNFSIKQDIVGINEWSGYSGSFVQHPELTGLDCIRPCFWVELIRGRPKENTIWTSGSSISFCGVNSDTVGWSWPDGAELPFTIDK

SEQ ID NO: 22764 - protein, 469 aa, Artificial Sequence; identical to SEQ ID NO: 16738
  derived and/or modified protein sequence (wt) from neuraminidase__InfluenzaA__AFN18208

SEQ ID NO: 22765 - protein, 469 aa, Artificial Sequence
  derived and/or modified protein sequence (wt) from neuraminidase__InfluenzaA__AFN18210
MNPNQKIITIGSVCMTIGMANLILQIGNIISIWISHSIQLGNQNQIETCNQSVITYENNTWVNQTYVNISNTNFAAGQSVVSVKLAGNSSLCPVSGWAIYSKDNSIRIGSKGDVFVIREPFISCSPLECRAFFLTQGALLNDKHSNGTIKDRSPYRTLMSCPIGEVPSPYNSRFESVAWSASACHDGINWLTIGISGPDNGAVAVLKYNGIITDTIKSWRNNILRTQESECACVNGSCFTVMTDGPSDGQASYKIFRIEKGKIVKSVEMNAPNYHYEECSCYPDSSEITCVCRDNWHGSNRPWVSFNQNLEYRIGYICSGIFGDNPRPNDKTGSCGPVSSNGANGVKGFSFKYGNGVWIGRTKSISSRNGFEMIWDPNGWTGTDNNFSIKQDIVGINEWSGYSGSFVQHPELTGLDCIRPCFWVELIRGRLKENTIWTSGSSISFCGVNSDTVGWSWPDGAELPFTIDK

SEQ ID NO: 22766 - protein, 469 aa, Artificial Sequence; identical to SEQ ID NO: 17321
  derived and/or modified protein sequence (wt) from neuraminidase__InfluenzaA__AFN18216

SEQ ID NO: 22767 - protein, 469 aa, Artificial Sequence; identical to SEQ ID NO: 19067
  derived and/or modified protein sequence (wt) from neuraminidase__InfluenzaA__AFN18226

SEQ ID NO: 22768 - protein, 469 aa, Artificial Sequence; identical to SEQ ID NO: 16738
  derived and/or modified protein sequence (wt) from neuraminidase__InfluenzaA__AFN18232

SEQ ID NO: 22769 - protein, 469 aa, Artificial Sequence; identical to SEQ ID NO: 16738
  derived and/or modified protein sequence (wt) from neuraminidase__InfluenzaA__AFN18234

SEQ ID NO: 22770 - protein, 469 aa, Artificial Sequence; identical to SEQ ID NO: 16738
  derived and/or modified protein sequence (wt) from neuraminidase__InfluenzaA__AFN18244

SEQ ID NO: 22771 - protein, 469 aa, Artificial Sequence; identical to SEQ ID NO: 16738
  derived and/or modified protein sequence (wt) from neuraminidase__InfluenzaA__AFN18246

SEQ ID NO: 22772 - protein, 469 aa, Artificial Sequence; identical to SEQ ID NO: 19067
  derived and/or modified protein sequence (wt) from neuraminidase__InfluenzaA__AFN18256

SEQ ID NO: 22773 - protein, 469 aa, Artificial Sequence; identical to SEQ ID NO: 16738
  derived and/or modified protein sequence (wt) from neuraminidase__InfluenzaA__AFN18262

SEQ ID NO: 22774 - protein, 469 aa, Artificial Sequence; identical to SEQ ID NO: 16738
  derived and/or modified protein sequence (wt) from neuraminidase__InfluenzaA__AFN18268

SEQ ID NO: 22775 - protein, 469 aa, Artificial Sequence; identical to SEQ ID NO: 16738
  derived and/or modified protein sequence (wt) from neuraminidase__InfluenzaA__AFN18270

SEQ ID NO: 22776 - protein, 469 aa, Artificial Sequence; identical to SEQ ID NO: 19727
  derived and/or modified protein sequence (wt) from neuraminidase__InfluenzaA__AFN18272

SEQ ID NO: 22777 - protein, 469 aa, Artificial Sequence; identical to SEQ ID NO: 16738
  derived and/or modified protein sequence (wt) from neuraminidase__InfluenzaA__AFN18274

SEQ ID NO: 22778 - protein, 469 aa, Artificial Sequence; identical to SEQ ID NO: 16738
  derived and/or modified protein sequence (wt) from neuraminidase__InfluenzaA__AFN18282

SEQ ID NO: 22779 - protein, 469 aa, Artificial Sequence; identical to SEQ ID NO: 16738
  derived and/or modified protein sequence (wt) from neuraminidase__InfluenzaA__AFN18304

SEQ ID NO: 22780 - protein, 469 aa, Artificial Sequence
  derived and/or modified protein sequence (wt) from neuraminidase__InfluenzaA__AFN18306
MNPNQKIITIGSVCMTIGIANLILQIGNIISIWISHSIQLGNQNQIETCNQSVITYENNTWVNQTYVNISNTNFAAGQSVVSVKLAGNSSLCPVSGWAIYSKDNSIRIGSKGDVFVIREPFISCSPLECRTFFLTQGALLNDKHSNGTIKDRSPYRTLMSCPIGEVPSPYNSRFESVAWSASACHDGINWLTIGISGPDNGAVAVLKYNGIITDTIKSWRNNILRTQESECACVNGSCFTVMTDGPSDGQASYKIFRIEKGKIVKSVEMNAPNYHYEECSCYPDSSEITCVCRDNWHGSNRPWVSFNQNLEYQIGYICSGIFGDNPRPNDKTGSCGPVSSNGANGVKGFSFKYGNGVWIGRTKSISSRNGFEMIWDPNGWTGTDNNFSIKQDIVGINEWSGYSGSFVQHPELTGLDCIRPCFWVELIRGRPKENTIWTSGSSISFCGVNSDTVGWSWPDGAELPFTIDK

SEQ ID NO: 22781 - protein, 469 aa, Artificial Sequence
  derived and/or modified protein sequence (wt) from neuraminidase__InfluenzaA__AFN18308
MNPNQKIITIGSVCMTIGMANLILQIGNIISIWISHSIQLGNQNQIETCNQSVITYENNTWVNQTYVNISNTNFAAGQSVVSVKLAGNSSLCPVSGWAIYSKDNSIRIGSKGDVFVIREPFISCSPLECRTFFLTQGALLNDKHSNGTIKDRSPYRTLMSCPIGEVPSPYNSRFESVAWSASACHDGINWLTIGISGPDNGAVAVLKYNGIITDTIKSWRNNILRTQESECACVNGSCFTVMTDGPSDGQASYKIFRIEKGKIVKSVEMNAPNYHYEECSCYPDSSEITCVCRDNWHGSNRPWVSFNQNLEYQIGYICSGIFGDNPRPNDKTGSCGPVSSKGANGVKGFSFKYGNGVWIGRTKSISSRNGFEMIWDPNGWTGTDNNFSIKQDIVGINEWSGYSGSFVQHPELTGLDCIRPCFWVELIRGRPKENTIWTSGSSISFCGVNSDTVGWSWPDGAELPFTIDK

SEQ ID NO: 22782 - protein, 469 aa, Artificial Sequence
  derived and/or modified protein sequence (wt) from neuraminidase__InfluenzaA__AFN18314
MNPNQKIITIGSVCMTIGMANLILQIGNIISIWISHSIQLGNQNQIETCNQSVITYENNTWVNQTYVNISNTNFAAGQSVVSVKLAGNSSLCPVSGWAIYSKDNSIRIGSKGDVFVIREPFISCSPLECRTFFLTQGALLNDKHSNGTIKDRSPYRTLMSCPIGEVPSPYNSRFESVAWSASACHDGINWLTIGISGPDNGAVAVLKYNGIITDTIKSWRNNILRTQESECACVNGSCFTVMTDGPSDGQASYKIFRIEKGKIVKSVEMNAPNYHYEECSCYPDSSEITCVCRDNWHGSNRPWVSFNQNLEYQIGYICSGIFGDNPRPNDKTGSCGPVSSNGANGVKGFSFKYGNGVWIGRTKSISSRNGFEMIWDPNGWTGTDNNFSIKQDIVGINEWSGYSGSFVQHPELTGLDCIRPCFWVELIRGRPKEKTIWTSGSSISFCGVNSDTVGWSWPDGAELPFTIDK

SEQ ID NO: 22783 - protein, 469 aa, Artificial Sequence; identical to SEQ ID NO: 16738
  derived and/or modified protein sequence (wt) from neuraminidase__InfluenzaA__AFN18320

SEQ ID NO: 22784 - protein, 469 aa, Artificial Sequence
  derived and/or modified protein sequence (wt) from neuraminidase__InfluenzaA__AFN18326
MNPNQKIITIGSVCMTIGMANLLLQIGNIISIWISHSIQLGNQNQIETCNQSVITYENNTWVNQTYVNISNTNFAAGQSVVSVKLAGNSSLCPVSGWAIYSKDNSIRIGSKGDVFVIREPFISCSPLECRTFFLTQGALLNDKHSNGTIKDRSPYRTLMSCPIGEVPSPYNSRFESVAWSASACHDGINWLTIGISGPDNGAVAVLKYNGIITDTIKSWRNNILRTQESECACVNGSCFTVMTDGPSDGQASYKIFRIEKGKIVKSVEMNAPNYHYEECSCYPDSSEITCVCRDNWHGSNRPWVSFNQNLEYQIGYICSGIFGDNPRPNDKTGSCGPVSSNGANGVKGFSFKYGNGVWIGRTKSISSRNGFEMIWDPNGWTGTDNNFSIKQDIVGINEWSGYSGSFVQHPELTGLDCIRPCFWVELIRGRPKENTIWTSGSSISFCGVNSDTVGWSWPDGAELPFTIDK

SEQ ID NO: 22785 - protein, 469 aa, Artificial Sequence; identical to SEQ ID NO: 16738
  derived and/or modified protein sequence (wt) from neuraminidase__InfluenzaA__AFN18336

SEQ ID NO: 22786 - protein, 469 aa, Artificial Sequence; identical to SEQ ID NO: 16738
  derived and/or modified protein sequence (wt) from neuraminidase__InfluenzaA__AFN18346

SEQ ID NO: 22787 - protein, 469 aa, Artificial Sequence; identical to SEQ ID NO: 22371
  derived and/or modified protein sequence (wt) from neuraminidase__InfluenzaA__AFN18356

SEQ ID NO: 22788 - protein, 469 aa, Artificial Sequence
  derived and/or modified protein sequence (wt) from neuraminidase__InfluenzaA__AFN18366
MNPNQKIITIGSVCMTIGMANLILQIGNIISIWISHSIQLGNQNQIETCNQSVITYENNTWVNQTYVNISNTNFAAEQSVVSVKLAGNSSLCPVSGWAIYSKDNSIRIGSKGDVFVIREPFISCSPLECRTFFLTQGALLNDKHSNGTIKDRSPYRTLMSCPIGEVPSPYNSRFESVAWSASACHDGINWLTIGISGPDNGAVAVLKYNGIITDTIKSWRNNILRTQESECACVNGSCFTVMTDGPSDGQASYKIFRIEKGKIVKSVEMNAPNYHYEECSCYPDSSEVTCVCRDNWHGSNRPWVSFNQNLEYQIGYICSGIFGDNPRPNDKTGSCGPVSSNGANGVKGFSFKYGNGVWIGRTKSISSRNGFEMIWDPNGWTGTDNNFSIKQDIVGINEWSGYSGSFVQHPELTGLDCIRPCFWVELIRGRPKENTIWTSGSSISFCGVNSDTVGWSWPDGAELPFTIDK

SEQ ID NO: 22789 - protein, 469 aa, Artificial Sequence; identical to SEQ ID NO: 22371
  derived and/or modified protein sequence (wt) from neuraminidase__InfluenzaA__AFN18376

SEQ ID NO: 22790 - protein, 469 aa, Artificial Sequence; identical to SEQ ID NO: 16738
  derived and/or modified protein sequence (wt) from neuraminidase__InfluenzaA__AFN18382

SEQ ID NO: 22791 - protein, 469 aa, Artificial Sequence; identical to SEQ ID NO: 16738
  derived and/or modified protein sequence (wt) from neuraminidase__InfluenzaA__AFN18392

SEQ ID NO: 22792 - protein, 469 aa, Artificial Sequence; identical to SEQ ID NO: 16738
  derived and/or modified protein sequence (wt) from neuraminidase__InfluenzaA__AFN18402

SEQ ID NO: 22793 - protein, 469 aa, Artificial Sequence; identical to SEQ ID NO: 16738
  derived and/or modified protein sequence (wt) from neuraminidase__InfluenzaA__AFN18412

SEQ ID NO: 22794 - protein, 469 aa, Artificial Sequence; identical to SEQ ID NO: 16738
  derived and/or modified protein sequence (wt) from neuraminidase__InfluenzaA__AFN18422

SEQ ID NO: 22795 - protein, 469 aa, Artificial Sequence; identical to SEQ ID NO: 16738
  derived and/or modified protein sequence (wt) from neuraminidase__InfluenzaA__AFN18432

SEQ ID NO: 22796 - protein, 469 aa, Artificial Sequence; identical to SEQ ID NO: 16738
  derived and/or modified protein sequence (wt) from neuraminidase__InfluenzaA__AFN18442

SEQ ID NO: 22797 - protein, 469 aa, Artificial Sequence; identical to SEQ ID NO: 16738
  derived and/or modified protein sequence (wt) from neuraminidase__InfluenzaA__AFN18452

SEQ ID NO: 22798 - protein, 469 aa, Artificial Sequence; identical to SEQ ID NO: 16738
  derived and/or modified protein sequence (wt) from neuraminidase__InfluenzaA__AFN18462

SEQ ID NO: 22799 - protein, 469 aa, Artificial Sequence
  derived and/or modified protein sequence (wt) from neuraminidase__InfluenzaA__AFN18472
MNPNQKIITIGSVCMTIGMANLILQIGNIISIWISHSIQLGNQNQIETCNQSVITYENNTWVNQTYVNISNTNFAAGQSVVSVKLAGNSSLCPVSGWAIYSKDNSIRIGSKGDVFVIREPFISCSPLECRTFFLTQGALLNDKHSNGTIKDRSPYRTLMSCPIGEVPSPYNSRFESVAWSASACHDGINWLTIGISGPDNGAVAVLKYNGIITDTIKSWRNNILRTQESECACVNGSCFTVMTDGPSDGQASYKIFRIEKGKIVKSVEMNAPNYHYEECSCYPDSSEITCVCRDNWHGSNRPWVSFNQNLEYQIGYICSGIFGDNPRPNDKTGSCGPVSSNGAKGVKGFSFKYGNGVWIGRTKSISSRNGFEMIWDPNGWTGTDNNFSIKQDIVGINEWSGYSGSFVQHPELTGLDCIRPCFWVELIRGRPKENTIWTSGSSISFCGVNSDTVGWSWPDGAELPFTIDK

SEQ ID NO: 22800 - protein, 469 aa, Artificial Sequence; identical to SEQ ID NO: 16738
  derived and/or modified protein sequence (wt) from neuraminidase__InfluenzaA__AFN18482

SEQ ID NO: 22801 - protein, 469 aa, Artificial Sequence; identical to SEQ ID NO: 16738
  derived and/or modified protein sequence (wt) from neuraminidase__InfluenzaA__AFN18492

SEQ ID NO: 22802 - protein, 469 aa, Artificial Sequence
  derived and/or modified protein sequence (wt) from neuraminidase__InfluenzaA__AFN18514
MNPNQKIITIGSVCMTIGMANLILQIGNIISIWISHSIQLGNQNQIETCNQSVITYENNTWVNQTYVNISNTNFAAGQSVVSVKLVGNSSLCPVSGWAIYSKDNSIRIGSKGDVFVIREPFISCSPLECRTFFLTQGALLNDKHSNGTIKDRSPYRTLMSCPIGEVPSPYNSRFESVAWSASACHDGINWLTIGISGPDNGAVAVLKYNGIITDTIKSWRNNILRTQESECACVNGSCFTVMTDGPSDGQASYKIFRIEKGKIVKSVEMNAPNYHYEECSCYPDSSEITCVCRDNWHGSNRPWVSFNQNLEYQIGYICSGIFGDNPRPNDKTGSCGPVSSNGANGVKGFSFKYGNGVWIGRTKSISSRNGFEMIWDPNGWTGTDNNFSIKQDIVGINEWSGYSGSFVQHPELTGLDCIRPCFWVELIRGRPKENTIWTSGSSISFCGVNSDTVGWSWPDGAELPFTIDK

SEQ ID NO: 22803 - protein, 469 aa, Artificial Sequence
  derived and/or modified protein sequence (wt) from neuraminidase__InfluenzaA__AFN18520
MNPNQKIITIGSVCMTIGMANLILQIGNIISIWISHSIQLGNQNQIETCNQSVITYENNTWVNQTYVNISNTNFAAGQSVVSVKLAGNSSLCPVSGWAIYSKDNSIRIGSKGDVFVIREPFISCSPLECRTFFLTQGALLNDKHSNGTIKDRSPYRTLMSCPIGEVPSPYNSRFESVAWSASACHDGINWLTIGISGPDNGAVAVLKYNGVITDTIKSWRNNILRTQESECACVNGSCFTLMTDGPSDGQASYKIFRIEKGKIVKSVEMNAPNYHYEECSCYPDSSEITCVCRDNWHGSNRPWVSFNQNLEYQIGYICSGIFGDNPRPNDKTGSCGPVSSNGANGVKGFSFKYGNGVWIGRTKSISSRNGFEMIWDPNGWTGTDNNFSIKQDIVGINEWSGYSGSFVQHPELTGLDCIRPCFWVELIRGRPKENTIWTSGSSISFCGVNSDTVGWSWPDGAELPFTIDK

SEQ ID NO: 22804 - protein, 469 aa, Artificial Sequence; identical to SEQ ID NO: 16738
  derived and/or modified protein sequence (wt) from neuraminidase__InfluenzaA__AFN18522

SEQ ID NO: 22805 - protein, 469 aa, Artificial Sequence; identical to SEQ ID NO: 16738
  derived and/or modified protein sequence (wt) from neuraminidase__InfluenzaA__AFN18524

SEQ ID NO: 22806 - protein, 469 aa, Artificial Sequence; identical to SEQ ID NO: 22371
  derived and/or modified protein sequence (wt) from neuraminidase__InfluenzaA__AFN18530

SEQ ID NO: 22807 - protein, 469 aa, Artificial Sequence; identical to SEQ ID NO: 16738
  derived and/or modified protein sequence (wt) from neuraminidase__InfluenzaA__AFN18532

SEQ ID NO: 22808 - protein, 469 aa, Artificial Sequence; identical to SEQ ID NO: 16738
  derived and/or modified protein sequence (wt) from neuraminidase__InfluenzaA__AFN18538

SEQ ID NO: 22809 - protein, 469 aa, Artificial Sequence; identical to SEQ ID NO: 16738
  derived and/or modified protein sequence (wt) from neuraminidase__InfluenzaA__AFN18544

SEQ ID NO: 22810 - protein, 469 aa, Artificial Sequence; identical to SEQ ID NO: 16738
  derived and/or modified protein sequence (wt) from neuraminidase__InfluenzaA__AFN18546

SEQ ID NO: 22811 - protein, 469 aa, Artificial Sequence; identical to SEQ ID NO: 16738
  derived and/or modified protein sequence (wt) from neuraminidase__InfluenzaA__AFN18552

SEQ ID NO: 22812 - protein, 469 aa, Artificial Sequence; identical to SEQ ID NO: 16738
  derived and/or modified protein sequence (wt) from neuraminidase__InfluenzaA__AFN18558

SEQ ID NO: 22813 - protein, 469 aa, Artificial Sequence; identical to SEQ ID NO: 16738
  derived and/or modified protein sequence (wt) from neuraminidase__InfluenzaA__AFN18560

SEQ ID NO: 22814 - protein, 469 aa, Artificial Sequence; identical to SEQ ID NO: 16738
  derived and/or modified protein sequence (wt) from neuraminidase__InfluenzaA__AFN18562

SEQ ID NO: 22815 - protein, 469 aa, Artificial Sequence; identical to SEQ ID NO: 16738
  derived and/or modified protein sequence (wt) from neuraminidase__InfluenzaA__AFN18564

SEQ ID NO: 22816 - protein, 469 aa, Artificial Sequence; identical to SEQ ID NO: 16738
  derived and/or modified protein sequence (wt) from neuraminidase__InfluenzaA__AFN18566

SEQ ID NO: 22817 - protein, 469 aa, Artificial Sequence; identical to SEQ ID NO: 16738
  derived and/or modified protein sequence (wt) from neuraminidase__InfluenzaA__AFN18572

SEQ ID NO: 22818 - protein, 469 aa, Artificial Sequence; identical to SEQ ID NO: 16738
  derived and/or modified protein sequence (wt) from neuraminidase__InfluenzaA__AFN18582

SEQ ID NO: 22819 - protein, 469 aa, Artificial Sequence; identical to SEQ ID NO: 16738
  derived and/or modified protein sequence (wt) from neuraminidase__InfluenzaA__AFN18592

SEQ ID NO: 22820 - protein, 469 aa, Artificial Sequence; identical to SEQ ID NO: 22371
  derived and/or modified protein sequence (wt) from neuraminidase__InfluenzaA__AFN18602

SEQ ID NO: 22821 - protein, 469 aa, Artificial Sequence
  derived and/or modified protein sequence (wt) from neuraminidase__InfluenzaA__AFN18612
MNPNQKIITIGSVCMTIGMANLILQIGNIISIWISHSIQLGNQNQIETCNQSVITYENNTWVNQTYVNISNTNFAAGQSVVSVKLAGNSSLCPVSGWAIYSKDNSIRIGSKGDVFVIREPFISCSPLECRTFFLTQGALLNDKHSNGTIKDRSPYRTLMSCPIGEVPSPYNSRFESVAWSASACHDGINWLTIGISGPDNGAVAVLKYNGIITDTIKSWRNNILRTQESECACVNGSCFTVMTDGPSDGQASYKIFRIEKGKIIKSVEMNAPNYHYEECSCYPDSSEITCVCRDNWHGSNRPWVSFNQNLEYQIGYICSGIFGDNPRPNDKTGSCGPVSSNGANGVKGFSFKYGNGVWIGRTKSISSRNGFEMIWDPNGWTGTDNNFSIKQDIVGINEWSGYSGSFVQHPELTGLDCIRPCFWVELIRGRPKENTIWTSGSSISFCGVNSDTVGWSWPDGAELPFTIDK

SEQ ID NO: 22822 - protein, 469 aa, Artificial Sequence; identical to SEQ ID NO: 16738
  derived and/or modified protein sequence (wt) from neuraminidase__InfluenzaA__AFN18618

SEQ ID NO: 22823 - protein, 469 aa, Artificial Sequence; identical to SEQ ID NO: 17564
  derived and/or modified protein sequence (wt) from neuraminidase__InfluenzaA__AFN18624

SEQ ID NO: 22824 - protein, 469 aa, Artificial Sequence
  derived and/or modified protein sequence (wt) from neuraminidase__InfluenzaA__AFN18630
MNPNQKIITIGSVCMTIGMANLILQIGNIISIWISHSIQLGNQNQIETCNQSVITYENNTWVNQTYVNISNTNFAAGQSVVSVKLAGNSSLCPVSGWAIYSKDNSIRIGSKGDVFVIREPFISCSPLECRTFFLTQGALLNDKHSNGTIKDRSPYRTLMSCPIGEVPSPYNSRFESVAWSASACHDGINWLTIGISGPDNGAVAVLKYNGIITDTIKSWRNNILRTQESECACVNGSCFTVMTDGPSDGQASYKIFRIEKGKIVKSVEMNAPNYHYEECSCYPDSSEITCVCRDNWHGSNRPWVSFNQNLEYQIGYICSGIFGDNPRPNDKTGSCGPVSSNGANGVKGFSFKYGNGVWIGRTKSISSRNGFEMIWDPNGWTGTDNNFSIKQDIVGINEWSGYSGSFVQHPELTGLGCIRPCFWVELIRGRPKENTIWTSGSSISFCGVNSDTVGWSWPDGAELPFTIDK

SEQ ID NO: 22825 - protein, 469 aa, Artificial Sequence
  derived and/or modified protein sequence (wt) from neuraminidase__InfluenzaA__AFN18636
MNPNQKIITIGSVCMTIGMANLILQIGNIISIWISHSIQLGNQNQIETCNQSVITYENNTWVNQTYVNISNTNFAAGQSVVSVKLAGNSSLCPVSGWAIYSKDNSIRIGSKGDVFVIREPFISCSPLECRTFFLTQGALLNDKHSNGTIKDRSPYRTLMSCPIGEVPSPYNSRFESVAWSASACHDGINWLTIGISGPDNGAVAVLKYNGIITDTIKSWRNNILRTQESECACVNGSCFTVMTDGPSDGQASYKIFRIEKGKIVKSVEMNAPNYHYEECSCYPDSSEITCVCRDNWHGSNRPWVSFNQNLEYRIGYICSGIFGDNPRPNDKTGSCGPVSSNGANGVKGFSFKYGNGVWIGRTKSISSRNGFEMIWDPNGWTGTDNNFSIKQDIVGINEWSGYSGSFVQHPELTGLDCIRPCFWVELIRGRSKENTIWTSGSSISFCGVNSDTVGWSWPDGAELPFTIDK

SEQ ID NO: 22826 - protein, 469 aa, Artificial Sequence; identical to SEQ ID NO: 16738
  derived and/or modified protein sequence (wt) from neuraminidase__InfluenzaA__AFN18646

SEQ ID NO: 22827 - protein, 469 aa, Artificial Sequence; identical to SEQ ID NO: 16738
  derived and/or modified protein sequence (wt) from neuraminidase__InfluenzaA__AFN18656

SEQ ID NO: 22828 - protein, 469 aa, Artificial Sequence
  derived and/or modified protein sequence (wt) from neuraminidase__InfluenzaA__AFN18666
MNPNQKIITIGSVCMTIGMANLILQIGNIISIWISHSIQLGNQNQIETCNQSVITYENNTWVNQTYVNISNTNFAAGQSVVSVKLAGNSSLCPVSGWAIYSKDNSIRIGSKGDVFVIREPFISCSPLECRTFFLTQGALLNDKHSNGTIKDRSPYRTLMSCPIGEVPSPYNSRFESVAWSASACHDGINWLTIGISGPDNGAVAVLKYNGIITDTIKSWRNNILRTQESECACVNGSCFTVMTDGPSDGQASYKIFRIEKGKIVKSVEMNAPNYHYEECSCYPDSSEITCVCRDNWHGSNRPWVSFNQNLEYQIGYICSGIFGDNPRPNDKTGSCGPVSSNGANGVKGFSFKYGNGVWIGRTKSISSRNGFEMIWDPNGWTGTDNNFSIKQDIVGINEWSGYSGSFVQHPELTGLDCIRPCFWVELIRGRPKENTIWTSGSSISFCGVNSDTVGWSWPDGAELPFIIDK

SEQ ID NO: 22829 - protein, 469 aa, Artificial Sequence
  derived and/or modified protein sequence (wt) from neuraminidase__InfluenzaA__AFN18676
MNPNQKIITIGSVCMTIGMANLILQIGNIISIWISHSIQLGNQNQIETCNQSVITYENNTWVNQTYVNISNTNFAAGQSVVSVKLAGNSSLCPVSGWAIYSKDNSIRIGSKGDVFVIREPFISCSPLECRTFFLTQGALLNDKHSNGTIKDRSPYRTLMSCPIGEVPSPYNSRFESVAWSASACHDGINWLTIGISGPDNGAVAVLKYNGIITDTIKSWRNNILRTQESECACVNGSCFTVMTDGPSDGQASYKIFRIEKGKIVKSVEMNAPNYHYEECSCYPDSSEITCVCRDNWHGSNRPWVSFNQNLEYRIGYICSGIFGDNPRPNDKTGSCGPVSSNGANGVKGFSFKYGNGVWIGRTKSISSRNGFEMIWDPNGWTETDNNFSIKQDIVGINEWSGYSGSFVQHPELTGLDCIRPCFWVELIRGRPKENTIWTSGSSISFCGVNSDTVGWSWPDGAELPFTIDK

SEQ ID NO: 22830 - protein, 469 aa, Artificial Sequence
  derived and/or modified protein sequence (wt) from neuraminidase__InfluenzaA__AFN18686
MNPNQKIITIGSVCMTIGMANLILQIGNIISIWISHSIQLGNQNQIETCNQSVITYENNTWVNQTYVNISSTNFAAGQSVVSVKLAGNSSLCPVSGWAIYSKDNSIRIGSKGDVFVIREPFISCSPLECRTFFLTQGALLNDKHSNGTIKDRSPYRTLMSCPIGEVPSPYNSRFESVAWSASACHDGINWLTIGISGPDNGAVAVLKYNGIITDTIKSWRNNILRTQESECACVNGSCFTLMTDGPSDGQASYKIFRIEKGKIVKSVEMNAPNYHYEECSCYPDSSEITCVCRDNWHGSNRPWVSFNQNLEYQIGYICSGIFGDNPRPNDKTGSCGPVSSNGANGVKGFSFKYGNGVWIGRTKSISSRNGFEMIWDPNGWTGTDNNFSIKQDIVGINEWSGYSGSFVQHPELTGLDCIRPCFWVELIRGRPKENTIWTSGSSISFCGVNSDTVGWSWPDGAELPFTIDK

SEQ ID NO: 22831 - protein, 469 aa, Artificial Sequence; identical to SEQ ID NO: 16738
  derived and/or modified protein sequence (wt) from neuraminidase__InfluenzaA__AFN18696

SEQ ID NO: 22832 - protein, 469 aa, Artificial Sequence; identical to SEQ ID NO: 19325
  derived and/or modified protein sequence (wt) from neuraminidase__InfluenzaA__AFN18706

SEQ ID NO: 22833 - protein, 469 aa, Artificial Sequence; identical to SEQ ID NO: 16738
  derived and/or modified protein sequence (wt) from neuraminidase__InfluenzaA__AFN18716

SEQ ID NO: 22834 - protein, 469 aa, Artificial Sequence; identical to SEQ ID NO: 16738
  derived and/or modified protein sequence (wt) from neuraminidase__InfluenzaA__AFN18727

SEQ ID NO: 22835 - protein, 469 aa, Artificial Sequence
  derived and/or modified protein sequence (wt) from neuraminidase__InfluenzaA__AFN18737
MNPNQKIITIGSVCMTIGMANLILQIGNIISIWISHSIQLGNQNQIETCNQSVITYENNTWVNQTYVNISNTNFAAGQSVVSVKLAGNSSLCPVSGWAIYSKDNSIRIGSKGDVFVIREPFISCSPLECRTFFLTQGALLNDKHSNGTIKDRSPYRTLMSCPIGEVPSPYNSRFESVAWSASACHDGINWLTIGISGPDNGAVAVLKYNGIITDTIKSWRNNILRTQESECACVNGSCFTVMTDGPSDGQASYKIFRIEKGKIVKSVEMNAPNYHYEECSCYPDSSEITCVCRDNWHGSNRPWVSFNQNLEYQIGYICSGIFGDNPRPNDKTGSCGPVSSNGANGVKGFSFKYGNGVWIGRTKSISSRNGFEMVWDPNGWTGTDNNFSIKQDIVGINEWSGYSGSFVQHPELTGLDCIRPCFWVELIRGRPKENTIWTSGSSISFCGVNSDTVGWSWPDGAELPFTIDK

SEQ ID NO: 22836 - protein, 469 aa, Artificial Sequence; identical to SEQ ID NO: 16738
  derived and/or modified protein sequence (wt) from neuraminidase__InfluenzaA__AFN18743

SEQ ID NO: 22837 - protein, 469 aa, Artificial Sequence; identical to SEQ ID NO: 16738
  derived and/or modified protein sequence (wt) from neuraminidase__InfluenzaA__AFN18749

SEQ ID NO: 22838 - protein, 469 aa, Artificial Sequence; identical to SEQ ID NO: 16738
  derived and/or modified protein sequence (wt) from neuraminidase__InfluenzaA__AFN18759

SEQ ID NO: 22839 - protein, 469 aa, Artificial Sequence
  derived and/or modified protein sequence (wt) from neuraminidase__InfluenzaA__AFN18769
MNPNQKIITIGSVCMTIGMANLILQIGNIISIWISHSIQLGNQNQIETCNQSVITYENNTWVNQTYVNISNTNFAAGQSVVSVKLAGNSSLCPVSGWAIYSKDNSIRIGSKGDVFVIREPFISCSPLECRTFFLTQGALLNDKHSNGTIKDRSPYRTLMSCPIGEVPSPYNSRFESVAWSASACHDGINWLTIGISGPDNGAVAVLKYNGIITDTIKSWRNNILRTQESECACVNGSCFTLMTDGPSDGQASYKIFRIEKGKIVKSVEMNAPNYHYEECSCYPDSNEITCVCRDNWHGSNRPWVSFNQNLEYQIGYICSGIFGDNPRPNDKTGSCGPVSSNGANGVKGFSFKYGNGVWIGRTKSISSRNGFEMIWDPNGWTGTDNNFSIKQDIVGINEWSGYSGSFVQHPELTGLDCIRPCFWVELIRGRPKENTIWTSGSSISFCGVNSDTVGWSWPDGAELPFTIDK

SEQ ID NO: 22840 - protein, 469 aa, Artificial Sequence; identical to SEQ ID NO: 18640
  derived and/or modified protein sequence (wt) from neuraminidase__InfluenzaA__AFN18775

SEQ ID NO: 22841 - protein, 469 aa, Artificial Sequence; identical to SEQ ID NO: 16738
  derived and/or modified protein sequence (wt) from neuraminidase__InfluenzaA__AFN18777

SEQ ID NO: 22842 - protein, 469 aa, Artificial Sequence; identical to SEQ ID NO: 16738
  derived and/or modified protein sequence (wt) from neuraminidase__InfluenzaA__AFN18779

SEQ ID NO: 22843 - protein, 469 aa, Artificial Sequence
  derived and/or modified protein sequence (wt) from neuraminidase__InfluenzaA__AFN18785
MNPNQKIITIGSVCMTIGMANLILQIGNIISIWISHSIQLGNQNQIETCNQSVITYENNTWVNQTYVNISNTNFAAGQSVVSVKLAGNSSLCPVSGWAIYSKDNSIRIGSKGDVFVIREPFISCSPLECRTFFLTQGALLNDKHSNGTIKDRSPYRTLMSCPIGEVPSPYNSRFESVAWSASACHDGINWLTIGISGPDNGAVAVLKYNGIITDTIKSWRNNILRTQESECACVNGSCFTVMTDGPSDGQASYKIFRIEKGKIVKSVEMNAPNYHYEECSCYPDSSEITCVCRDNWHGSNRPWVSFNQNLEYQIGYICSGIFGDNPRPNDKTGSCGPVSSNGANGVKGFSFKYGNGVWIGRTKSISSRNGFEMIWDPNGWTGTDNNFSIRQDIVGINEWSGYSGSFVQHPELTGLDCIRPCFWVELIRGRPKENTIWTSGSSISFCGVNSDTVGWSWPDGAELPFTIDK

SEQ ID NO: 22844 - protein, 469 aa, Artificial Sequence
  derived and/or modified protein sequence (wt) from neuraminidase__InfluenzaA__AFN18791
MNPNQKIITIGSVCMTIGMANLILQIGNIISIWISHSIQLGNQNQIETCNQSVITYENNTWVNQTYVNISNTNFAAGQSVVSVKLAGNSSLCPVSGWAIYSKDNSIRIGSKGDVFVIREPFISCSPLECRTFFLTQGALLNDKHSNGTIKDRSPYRTLMSCPIGEVPSPYNSRFESVAWSASACHDGINWLTIGISGPDNGAVAVLKYNGIITDTIKSWRNNILRTQESECACVNGSCFTVMTDGPSDGQASYKIFRIEKGKIVKSVEMNAPNYHYEECSCYPESSEITCVCRDNWHGSNRPWVSFNQNLEYQIGYICSGIFGDNPRPNDKTGSCGPVSSNGANGVKGFSFKYGNGVWIGRTKSISSRNGFEMIWDPNGWTGTDNNFSIKQDIVGINEWSGYSGSFVQHPELTGLDCIRPCFWVELIRGRPKENTIWTSGSSISFCGVNSDTVGWSWPDGAELPFTIDK

SEQ ID NO: 22845 - protein, 469 aa, Artificial Sequence; identical to SEQ ID NO: 16738
  derived and/or modified protein sequence (wt) from neuraminidase__InfluenzaA__AFN18801

SEQ ID NO: 22846 - protein, 469 aa, Artificial Sequence; identical to SEQ ID NO: 19157
  derived and/or modified protein sequence (wt) from neuraminidase__InfluenzaA__AFN18811

SEQ ID NO: 22847 - protein, 469 aa, Artificial Sequence; identical to SEQ ID NO: 16738
  derived and/or modified protein sequence (wt) from neuraminidase__InfluenzaA__AFN18817

SEQ ID NO: 22848 - protein, 469 aa, Artificial Sequence; identical to SEQ ID NO: 16738
  derived and/or modified protein sequence (wt) from neuraminidase__InfluenzaA__AFN18819

SEQ ID NO: 22849 - protein, 469 aa, Artificial Sequence; identical to SEQ ID NO: 19730
  derived and/or modified protein sequence (wt) from neuraminidase__InfluenzaA__AFN18821

SEQ ID NO: 22850 - protein, 469 aa, Artificial Sequence; identical to SEQ ID NO: 16738
  derived and/or modified protein sequence (wt) from neuraminidase__InfluenzaA__AFN18823

SEQ ID NO: 22851 - protein, 469 aa, Artificial Sequence; identical to SEQ ID NO: 16738
  derived and/or modified protein sequence (wt) from neuraminidase__InfluenzaA__AFN18825

SEQ ID NO: 22852 - protein, 469 aa, Artificial Sequence; identical to SEQ ID NO: 16738
  derived and/or modified protein sequence (wt) from neuraminidase__InfluenzaA__AFN18827

SEQ ID NO: 22853 - protein, 469 aa, Artificial Sequence; identical to SEQ ID NO: 16738
  derived and/or modified protein sequence (wt) from neuraminidase__InfluenzaA__AFN18829

SEQ ID NO: 22854 - protein, 469 aa, Artificial Sequence; identical to SEQ ID NO: 16738
  derived and/or modified protein sequence (wt) from neuraminidase__InfluenzaA__AFN18831

SEQ ID NO: 22855 - protein, 469 aa, Artificial Sequence; identical to SEQ ID NO: 17875
  derived and/or modified protein sequence (wt) from neuraminidase__InfluenzaA__AFN18833

SEQ ID NO: 22856 - protein, 469 aa, Artificial Sequence; identical to SEQ ID NO: 17913
  derived and/or modified protein sequence (wt) from neuraminidase__InfluenzaA__AFN18835

SEQ ID NO: 22857 - protein, 469 aa, Artificial Sequence; identical to SEQ ID NO: 16738
  derived and/or modified protein sequence (wt) from neuraminidase__InfluenzaA__AFN18841

SEQ ID NO: 22858 - protein, 469 aa, Artificial Sequence
  derived and/or modified protein sequence (wt) from neuraminidase__InfluenzaA__AFN18851
MNPNQKIITIGSVCMTIGMANLILQIGNMISIWISHSIQLGNQNQIETCNQSVITYENNTWVNQTYVNISNTNFAAGQSVVSVKLAGNSSLCPVSGWAIYSKDNSIRIGSKGDVFVIREPFISCSPLECRTFFLTQGALLNDKHSNGTIKDRSPYRTLMSCPIGEVPSPYNSRFESVAWSASACHDGINWLTIGISGPDNGAVAVLKYNGIITDTIKSWRNNILRTQESECACVNGSCFTVMTDGPSDGQASYKIFRIEKGKIVKSVEMNAPNYHYEECSCYPDSSEITCVCRDNWHGSNRPWVSFNQNLEYQIGYICSGIFGDNPRPNDKTGSCGPVSSNGANGVKGFSFKYGNGVWIGRTKSISSRNGFEMIWDPNGWTGTDNNFSIKQDIVGINEWSGYSGSFVQHPELTGLDCIRPCFWVELIRGRPKENTIWTSGSSISFCGVNSDTVGWSWPDGAELPFTIDK

SEQ ID NO: 22859 - protein, 469 aa, Artificial Sequence; identical to SEQ ID NO: 16738
  derived and/or modified protein sequence (wt) from neuraminidase__InfluenzaA__AFN18857

SEQ ID NO: 22860 - protein, 469 aa, Artificial Sequence
  derived and/or modified protein sequence (wt) from neuraminidase__InfluenzaA__AFN18859
MNPNQKIITIGSVCMTIGLANLILQIGNIISIWISHSIQLGNQNQIETCNQSVITYENNTWVNQTYVNISNTNFAAGQSVVSVKLAGNSSLCPVSGWAIYSKDNSIRIGSKGDVFVIREPFISCSPLECRTFFLTQGALLNDKHSNGTIKDRSPYRTLMSCPIGEVPSPYNSRFESVAWSASACHDGINWLTIGISGPDNGAVAVLKYNGIITDTIKSWRNNILRTQESECACVNGSCFTVMTDGPSDGQASYKIFRIEKGKIVKSVEMNAPNYHYEECSCYPDSSEITCVCRDNWHGSNRPWVSFNQNLEYQIGYICSGIFGDNPRPNDKTGSCGPVSSNGANGVKGFSFKYGNGVWIGRTKSISSRNGFEMIWDPNGWTGTDNNFSIKQDIVGINEWSGYSGSFVQHPELTGLDCIRPCFWVELIRGRPKENTIWTSGSSISFCGVNSDTVGWSWPDGAELPFTIDK

SEQ ID NO: 22861 - protein, 469 aa, Artificial Sequence
  derived and/or modified protein sequence (wt) from neuraminidase__InfluenzaA__AFN18861
MNPNQKIITIGSVCMTIGMANLILQIGNIISIWISHSIQLGNQNQIETCNQSVITYENNTWVNQTYVNISNTNFAAGQSVVSVKLAGNSSLCSVSGWAIYSKDNSIRIGSKGDVFVIREPFISCSPLECRTFFLTQGALLNDKHSNGTIKDRSPYRTLMSCPIGEVPSPYNSRFESVAWSASACHDGINWLTIGISGPDNGAVAVLKYNGIITDTIKSWRNNILRTQESECACVNGSCFTVMTDGPSDGQASYKIFRIEKGKIVKSVEMNAPNYHYEECSCYPDSSEITCVCRDNWHGSNRPWVSFNQNLEYQIGYICSGIFGDNPRPNDKTGSCGPVSSNGANGVKGFSFKYGNGVWIGRTKSISSRNGFEMIWDPNGWTGTDNNFSIKQDIVGINEWSGYSGSFVQHPELTGLDCIRPCFWVELIRGRPKENTIWTSGSSISFCGVNSDTVGWSWPDGAELPFTIDK

SEQ ID NO: 22862 - protein, 469 aa, Artificial Sequence; identical to SEQ ID NO: 16738
  derived and/or modified protein sequence (wt) from neuraminidase__InfluenzaA__AFN18867

SEQ ID NO: 22863 - protein, 469 aa, Artificial Sequence; identical to SEQ ID NO: 18552
  derived and/or modified protein sequence (wt) from neuraminidase__InfluenzaA__AFN18877

SEQ ID NO: 22864 - protein, 469 aa, Artificial Sequence; identical to SEQ ID NO: 16738
  derived and/or modified protein sequence (wt) from neuraminidase__InfluenzaA__AFN18887

SEQ ID NO: 22865 - protein, 469 aa, Artificial Sequence; identical to SEQ ID NO: 17756
  derived and/or modified protein sequence (wt) from neuraminidase__InfluenzaA__AFN18893

SEQ ID NO: 22866 - protein, 469 aa, Artificial Sequence
  derived and/or modified protein sequence (wt) from neuraminidase__InfluenzaA__AFN18895
MNPNQKIITIGSVCMTIGMANLILQIGNIISIWISHSIQLGNQNQIETCNQSVITYENNTWVNQTYVNISNTNFAAGQSVVSVKLAGNSSLCPVSGWAIYSKDNSIRIGSKGDVFVIREPFISCSPLECRTFFLTQGALLNDKHSNGTIKDRSPYRTLMSCPIGEVPSPYNSRFESVAWSASACHDGINWLTIGISGPDNGAVAVLKYNGIITDTIKSWRNNILRTQESECACVNGSCFTVMTDGPSDGQASYKIFRIEKGKIVKSVEMNAPNYHYEECSCYPDSSEITCVCRDNWHGSNRPWVSFNQNLEYRIGYICSGIFGDNPRPNDKTGSCGPVSSNGANGVKGFSFKYGNGVWIGRTKSISSRNGFEMIWDPNGWTGTDNNFSIKQDIVGINEWSGYSGSFVQHPELTGLDCIRPCFWVELIKGRPKENTIWTSGSSISFCGVNSDTVGWSWPDGAELPFTIDK

SEQ ID NO: 22867 - protein, 469 aa, Artificial Sequence; identical to SEQ ID NO: 18640
  derived and/or modified protein sequence (wt) from neuraminidase__InfluenzaA__AFN18905

SEQ ID NO: 22868 - protein, 469 aa, Artificial Sequence; identical to SEQ ID NO: 18552
  derived and/or modified protein sequence (wt) from neuraminidase__InfluenzaA__AFN18913

SEQ ID NO: 22869 - protein, 469 aa, Artificial Sequence
  derived and/or modified protein sequence (wt) from neuraminidase__InfluenzaA__AFN18919
MNPNQKIITIGSVCMTIGMANLILQIGNIISIWISHSIQLGNQNQIETCNQSVITYENNTWVNQTYVNISNTNFAAGQSVVSVKLAGNSSLCPVSGWAIYSKDNSIRIGSKGDVFVIREPFISCSPLECRTFFLTQGALLNDKHSNGTIKDRSPYRTLMSCPIGEVPSPYNSRFESVAWSASACHDGINWLTIGISGPDNGAVAVLKYNGIITDTIKSWRNNILRTQESECACVNGSCFTVMTDGPSDGQASYKIFRIEKGKIVKSVEMNAPNYHYEECSCYPDSSEITCVCRDNWHGSNRPWVSFNQNLEYQIGYICSGIFGDNPRPNDKTGSCGPVSSNGENGVKGFSFKYGNGVWIGRTKSISSRNGFEMIWDPNGWTGTDNNFSIKQDIVGINEWSGYSGSFVQHPELTGLDCIRPCFWVELIRGRPKENTIWTSGSSISFCGVNSDTVGWSWPDGAELPFTIDK

SEQ ID NO: 22870 - protein, 469 aa, Artificial Sequence
  derived and/or modified protein sequence (wt) from neuraminidase__InfluenzaA__AFN18929
MNPNQKIITIGSVCMTIGMANLILQIGNIISIWISHSIQLGNQNQIETCNQSVITYENNTWVNQTYVNISNTNFAAGQSVVSVKLAGNSSLCPVSGWAIYSKDNSIRIGSKGDVFVIREPFISCSPLECRTFFLTQGALLNDKHSNGTIKDRSPYRTLMSCPIGEVPSPYNSRFESVAWSASACHDGINWLTIGISGPDNGAVAVLKYNGIITDTIKSWRNNILRTQESECACVNGSCFTLMTDGPSDGQASYKIFRIEKGKIVKSVEMNAPNYHYEECSCYPDSSEITCVCRDNWHGSNRPWVSFNQNLEYQIGYICSGIFGDNPRPNDKTGSCGPVSSNGANGVKGFSFKYGNGVWIGRTKSISSRNGFEMIWDPNGWTGTDNNFSIKQDIVGINEWSGYSGSFVQHPELTGLDCIRPCFWVELIRGRPKENTIWTSGSSISFCGVNSDTVGWSWSDGAELPFTIDK

SEQ ID NO: 22871 - protein, 469 aa, Artificial Sequence; identical to SEQ ID NO: 16738
  derived and/or modified protein sequence (wt) from neuraminidase__InfluenzaA__AFN18939

SEQ ID NO: 22872 - protein, 469 aa, Artificial Sequence; identical to SEQ ID NO: 16738
  derived and/or modified protein sequence (wt) from neuraminidase__InfluenzaA__AFN18953

SEQ ID NO: 22873 - protein, 469 aa, Artificial Sequence; identical to SEQ ID NO: 16738
  derived and/or modified protein sequence (wt) from neuraminidase__InfluenzaA__AFN18959

SEQ ID NO: 22874 - protein, 469 aa, Artificial Sequence; identical to SEQ ID NO: 16738
  derived and/or modified protein sequence (wt) from neuraminidase__InfluenzaA__AFN18965

SEQ ID NO: 22875 - protein, 469 aa, Artificial Sequence; identical to SEQ ID NO: 20808
  derived and/or modified protein sequence (wt) from neuraminidase__InfluenzaA__AFN18975

SEQ ID NO: 22876 - protein, 469 aa, Artificial Sequence; identical to SEQ ID NO: 16738
  derived and/or modified protein sequence (wt) from neuraminidase__InfluenzaA__AFN18981

SEQ ID NO: 22877 - protein, 469 aa, Artificial Sequence
  derived and/or modified protein sequence (wt) from neuraminidase__InfluenzaA__AFN18983
MNPNQKIITIGSVCMTIGMANLILQIGNIISIWISHSIQLGNQNQIETCNQSVITYENNTWVNQTYVNISNTNFAAGQSVVSVKLAGNSSLCPVSGWAIYSKDNSIRIGSKGDVFVIREPFISCSPLECRTFFLTQGALLNDKHSNGTIKDRSPYRTLMSCPIGEVPSPYNSRFESVAWSASACHDGINWLTIGISGPDNGAVAVLKYNGIITDTIKSWRNNILRTQESECACVNGSCFTVMTDGPSDGQASYKIFRIEKGKIVKSVEMNASNYHYEECSCYPDSSEITCVCRDNWHGSNRPWVSFNQNLEYQIGYICSGIFGDNPRPNDKTGSCGPVSSNGANGVKGFSFKYGNGVWIGRTKSISSRNGFEMIWDPNGWTGTDNNFSIKQDIVGINEWSGYSGSFVQHPELTGLDCIRPCFWVELIRGRPKENTIWTSGSIISFCGVNSDTVGWSWPDGAELPFTIDK

SEQ ID NO: 22878 - protein, 469 aa, Artificial Sequence; identical to SEQ ID NO: 16738
  derived and/or modified protein sequence (wt) from neuraminidase__InfluenzaA__AFN18985

SEQ ID NO: 22879 - protein, 469 aa, Artificial Sequence
  derived and/or modified protein sequence (wt) from neuraminidase__InfluenzaA__AFN18987
MNPNQKIITIGSVCMTIGMANLILQIGNIISIWISHSIQLGNQNQIETCNQSVITYENNTWVNQTYVNISNTNFAAGQSVVSVKLAGNSSLCPVSGWAIYSKDNSIRIGSKGDVFVIREPFISCSPLECRTFFLTQGALLNDKHSNGTIKDRSPYRTLMSCPIGEVPSPYNSRFESVAWSASACHDGINWLTIGISGPDNGAVAVLKYNGIITDTIKSWRNNILRTQESECACVNGSCFTVMTDGPSDGQASYKIFRIEKGKIVKSVEMNAPNYHYEECSCYPDSSEITCVCRDNWHGSNRPWVSFNQNLEYQIGYICSGIFGDNPRPIDKTGSCGPVSSNGANGVKGFSFKYGNGVWIGRTKSISSRNGFEMIWDPNGWTGTDNNFSIKQDIVGINEWSGYSGSFVQHPELTGLDCIRPCFWVELIRGRPKENTIWTSGSSISFCGVNSDTVGWSWPDGAELPFTIDK

SEQ ID NO: 22880 - protein, 469 aa, Artificial Sequence; identical to SEQ ID NO: 16738
  derived and/or modified protein sequence (wt) from neuraminidase__InfluenzaA__AFN18989

SEQ ID NO: 22881 - protein, 469 aa, Artificial Sequence; identical to SEQ ID NO: 16738
  derived and/or modified protein sequence (wt) from neuraminidase__InfluenzaA__AFN18995

SEQ ID NO: 22882 - protein, 469 aa, Artificial Sequence; identical to SEQ ID NO: 22860
  derived and/or modified protein sequence (wt) from neuraminidase__InfluenzaA__AFN19001

SEQ ID NO: 22883 - protein, 469 aa, Artificial Sequence; identical to SEQ ID NO: 16738
  derived and/or modified protein sequence (wt) from neuraminidase__InfluenzaA__AFN19007

SEQ ID NO: 22884 - protein, 469 aa, Artificial Sequence; identical to SEQ ID NO: 16738
  derived and/or modified protein sequence (wt) from neuraminidase__InfluenzaA__AFN19024

SEQ ID NO: 22885 - protein, 469 aa, Artificial Sequence
  derived and/or modified protein sequence (wt) from neuraminidase__InfluenzaA__AFN19025
MNPNQKIITIGSVCMTIGMANLILQIGNIISIWISHSIQLGNQNQIETCNQSVITYENNTWVNQTYVNISNTNFAAGQSVVSVKLAGNSSLCPVSGWAIYSKDNSIRIGSKGDVFVIREPFISCSPLECRTFFLTQGALLNDKHSNGTIKDRSPYRTLMSCPIGEVPSPYNSRFESVAWSASACHDGINWLTIGISGPDNGAVAVLKYNGIITDTIKSWRNKILRTQESECACVNGSCFTVMTDGPSDGQASYKIFRIEKGKIVKSVEMNAPNYHYEECSCYPDSSEITCVCRDNWHGSNRPWVSFNQNLEYQIGYICSGIFGDNPRPNDKTGSCGPVSSNGANGVKGFSFKYGNGVWIGRTKSISSRNGFEMIWDPNGWTGTDNNFSIKQDIVGINEWSGYSGSFVQHPELTGLDCIRPCFWVELIRGRPKENTIWTSGSSISFCGVNSDTVGWSWPDGAELPFTIDK

SEQ ID NO: 22886 - protein, 469 aa, Artificial Sequence; identical to SEQ ID NO: 16738
  derived and/or modified protein sequence (wt) from neuraminidase__InfluenzaA__AFN19027

SEQ ID NO: 22887 - protein, 469 aa, Artificial Sequence; identical to SEQ ID NO: 16738
  derived and/or modified protein sequence (wt) from neuraminidase__InfluenzaA__AFN19032

SEQ ID NO: 22888 - protein, 469 aa, Artificial Sequence; identical to SEQ ID NO: 16738
  derived and/or modified protein sequence (wt) from neuraminidase__InfluenzaA__AFN19038

SEQ ID NO: 22889 - protein, 469 aa, Artificial Sequence; identical to SEQ ID NO: 22371
  derived and/or modified protein sequence (wt) from neuraminidase__InfluenzaA__AFN19049

SEQ ID NO: 22890 - protein, 469 aa, Artificial Sequence; identical to SEQ ID NO: 16738
  derived and/or modified protein sequence (wt) from neuraminidase__InfluenzaA__AFN19055

SEQ ID NO: 22891 - protein, 469 aa, Artificial Sequence; identical to SEQ ID NO: 16738
  derived and/or modified protein sequence (wt) from neuraminidase__InfluenzaA__AFN19065

SEQ ID NO: 22892 - protein, 469 aa, Artificial Sequence; identical to SEQ ID NO: 16738
  derived and/or modified protein sequence (wt) from neuraminidase__InfluenzaA__AFN19071

SEQ ID NO: 22893 - protein, 469 aa, Artificial Sequence; identical to SEQ ID NO: 16738
  derived and/or modified protein sequence (wt) from neuraminidase__InfluenzaA__AFN19077

SEQ ID NO: 22894 - protein, 469 aa, Artificial Sequence; identical to SEQ ID NO: 16738
  derived and/or modified protein sequence (wt) from neuraminidase__InfluenzaA__AFN19083

SEQ ID NO: 22895 - protein, 469 aa, Artificial Sequence; identical to SEQ ID NO: 16738
  derived and/or modified protein sequence (wt) from neuraminidase__InfluenzaA__AFN19089

SEQ ID NO: 22896 - protein, 469 aa, Artificial Sequence; identical to SEQ ID NO: 16738
  derived and/or modified protein sequence (wt) from neuraminidase__InfluenzaA__AFN19099

SEQ ID NO: 22897 - protein, 469 aa, Artificial Sequence; identical to SEQ ID NO: 16738
  derived and/or modified protein sequence (wt) from neuraminidase__InfluenzaA__AFN19105

SEQ ID NO: 22898 - protein, 469 aa, Artificial Sequence; identical to SEQ ID NO: 16738
  derived and/or modified protein sequence (wt) from neuraminidase__InfluenzaA__AFN19114

SEQ ID NO: 22899 - protein, 469 aa, Artificial Sequence; identical to SEQ ID NO: 16738
  derived and/or modified protein sequence (wt) from neuraminidase__InfluenzaA__AFN19126

SEQ ID NO: 22900 - protein, 469 aa, Artificial Sequence; identical to SEQ ID NO: 16738
  derived and/or modified protein sequence (wt) from neuraminidase__InfluenzaA__AFN19136

SEQ ID NO: 22901 - protein, 469 aa, Artificial Sequence; identical to SEQ ID NO: 16738
  derived and/or modified protein sequence (wt) from neuraminidase__InfluenzaA__AFN19146

SEQ ID NO: 22902 - protein, 469 aa, Artificial Sequence; identical to SEQ ID NO: 16738
  derived and/or modified protein sequence (wt) from neuraminidase__InfluenzaA__AFN19156

SEQ ID NO: 22903 - protein, 469 aa, Artificial Sequence; identical to SEQ ID NO: 16738
  derived and/or modified protein sequence (wt) from neuraminidase__InfluenzaA__AFN19166

SEQ ID NO: 22904 - protein, 469 aa, Artificial Sequence; identical to SEQ ID NO: 16738
  derived and/or modified protein sequence (wt) from neuraminidase__InfluenzaA__AFN19186

SEQ ID NO: 22905 - protein, 469 aa, Artificial Sequence; identical to SEQ ID NO: 22371
  derived and/or modified protein sequence (wt) from neuraminidase__InfluenzaA__AFN19196

SEQ ID NO: 22906 - protein, 469 aa, Artificial Sequence; identical to SEQ ID NO: 16738
  derived and/or modified protein sequence (wt) from neuraminidase__InfluenzaA__AFN19205

SEQ ID NO: 22907 - protein, 469 aa, Artificial Sequence; identical to SEQ ID NO: 16738
  derived and/or modified protein sequence (wt) from neuraminidase__InfluenzaA__AFN19215

SEQ ID NO: 22908 - protein, 469 aa, Artificial Sequence; identical to SEQ ID NO: 16738
  derived and/or modified protein sequence (wt) from neuraminidase__InfluenzaA__AFN19225

SEQ ID NO: 22909 - protein, 469 aa, Artificial Sequence; identical to SEQ ID NO: 16738
  derived and/or modified protein sequence (wt) from neuraminidase__InfluenzaA__AFN19235

SEQ ID NO: 22910 - protein, 469 aa, Artificial Sequence; identical to SEQ ID NO: 16738
  derived and/or modified protein sequence (wt) from neuraminidase__InfluenzaA__AFN19245

SEQ ID NO: 22911 - protein, 469 aa, Artificial Sequence; identical to SEQ ID NO: 16738
  derived and/or modified protein sequence (wt) from neuraminidase__InfluenzaA__AFN19251

SEQ ID NO: 22912 - protein, 469 aa, Artificial Sequence; identical to SEQ ID NO: 16738
  derived and/or modified protein sequence (wt) from neuraminidase__InfluenzaA__AFN19261

SEQ ID NO: 22913 - protein, 469 aa, Artificial Sequence; identical to SEQ ID NO: 22371
  derived and/or modified protein sequence (wt) from neuraminidase__InfluenzaA__AFN19271

SEQ ID NO: 22914 - protein, 469 aa, Artificial Sequence; identical to SEQ ID NO: 18469
  derived and/or modified protein sequence (wt) from neuraminidase__InfluenzaA__AFN19281

SEQ ID NO: 22915 - protein, 469 aa, Artificial Sequence
  derived and/or modified protein sequence (wt) from neuraminidase__InfluenzaA__AFN19287
MNPNQKIITIGSVCMTIGMANLILQIGNIISIWISHSIQLGNQNQIETCNQSVITYENNTWVNQTYVNISNTNFAAGQSVVSVKLAGNSSLCPVSGWAIYSKDNSIRIGSKGDVFVIREPFISCSPLECRTFFLTQGALLSDKHSNGTIKDRSPYRTLMSCPIGEVPSPYNSRFESVAWSASACHDGINWLTIGISGPDNGAVAVLKYNGIITDTIKSWRNNILRTQESECACVNGSCFTVMTDGPSDGQASYKIFRIEKGKIVKSVEMNAPNYHYEECSCYPDSSEITCVCRDNWHGSNRPWVSFNQNLEYQIGYICSGIFGDNPRPNDKTGSCGPVSSNGANGVKGFSFKYGNGVWIGRTKSISSRNGFEMIWDPNGWTGTDNNFSIKQDIVGINEWSGYSGSFVQHPELTGLDCIRPCFWVELIRGRPKENTIWTSGSSISFCGVNSDTVGWSWPDGAELPFTIDK

SEQ ID NO: 22916 - protein, 469 aa, Artificial Sequence; identical to SEQ ID NO: 16738
  derived and/or modified protein sequence (wt) from neuraminidase__InfluenzaA__AFN19297

SEQ ID NO: 22917 - protein, 469 aa, Artificial Sequence; identical to SEQ ID NO: 16738
  derived and/or modified protein sequence (wt) from neuraminidase__InfluenzaA__AFN19307

SEQ ID NO: 22918 - protein, 469 aa, Artificial Sequence; identical to SEQ ID NO: 16738
  derived and/or modified protein sequence (wt) from neuraminidase__InfluenzaA__AFN19317

SEQ ID NO: 22919 - protein, 469 aa, Artificial Sequence; identical to SEQ ID NO: 22371
  derived and/or modified protein sequence (wt) from neuraminidase__InfluenzaA__AFN19327

SEQ ID NO: 22920 - protein, 469 aa, Artificial Sequence; identical to SEQ ID NO: 16738
  derived and/or modified protein sequence (wt) from neuraminidase__InfluenzaA__AFN19346

SEQ ID NO: 22921 - protein, 469 aa, Artificial Sequence
  derived and/or modified protein sequence (wt) from neuraminidase__InfluenzaA__AFN19352
MNPNQKIITIGSVSLTISTICFFMQIAILITTVTLHFKQYEFNSPPNNQVMLCEPTIIERNMTEIVYLTNTTIEKEICPKPAEYRNWSKPQCDITGFAPFSKDNSIRLSAGGDIWVTREPYVSCDPDKCYQFALGQGTTLNNVHSNNTVRDRTPYRTLLMNELGVPFHLGTKQVCIAWSSSSCHDGKAWLHVCITGDDKNATASFIYNGRLVDSVVSWSKEILRTQESECVCINGTCTVVMTDGSASGKADTKILFIEEGKIVHTSTLSGSAQHVEECSCYPRYPGVRCVCRDNWKGSNRPIVDINIKDHSIVSSYVCSGLVGDTPRKNDSSSSGHCLDPNNEEGGHGVKGWAFDDGNDVWMGRTINETSRLGYETFKVIEGWSNPKSKLQINRQVIVDRSDRSGYSGIFSVEGKSCINRCFYVELIRGRKEETEVLWTSNSIVVFCGTSGTYGTGSWPDGADLNLMPI

SEQ ID NO: 22922 - protein, 469 aa, Artificial Sequence
  derived and/or modified protein sequence (wt) from neuraminidase__InfluenzaA__AFN19354
MNPNQKIITIGSVSLTISTICFFMQIAILITTVTLHFKQYEFNSPPNNQVMLCEPTIIERNITEIVYLTNTTIEKEICPKPAEYRNWSKPQCDITGFAPFSKDNSIRLSAGGDIWVTREPYVSCDPDKCYQFALGQGTTLNNVHSNNTVRDRTPYRTLLMNELGVPFHLGTKQVCIAWSSSSCHDGKAWLHVCITGDDKNATASFIYNGRLVDSVVSWSKEILRTQESECVCINGTCTVVMTDGSASGKADTKILFIEEGKIVHTSTLSGSAQHVEECSCYPRYPGVRCVCRDNWKGSNRPIVDINIKDHSIVSSYVCSGLVGDTPRKNDSSSSSHCLDPNNEEGGHGVKGWAFDDGNDVWMGRTINETSRLGYETFKVIEGWSNPKSKLQINRQVIVDRGDRSGYSGIFSVEGKSCINRCFYVELIRGRKEETEVLWTSNSIVVFCGTSGTYGTGSWPDGADLNLMPI

SEQ ID NO: 22923 - protein, 469 aa, Artificial Sequence; identical to SEQ ID NO: 22922
  derived and/or modified protein sequence (wt) from neuraminidase__InfluenzaA__AFN19356

SEQ ID NO: 22924 - protein, 469 aa, Artificial Sequence; identical to SEQ ID NO: 22922
  derived and/or modified protein sequence (wt) from neuraminidase__InfluenzaA__AFN19358

SEQ ID NO: 22925 - protein, 469 aa, Artificial Sequence; identical to SEQ ID NO: 22922
  derived and/or modified protein sequence (wt) from neuraminidase__InfluenzaA__AFN19360

SEQ ID NO: 22926 - protein, 469 aa, Artificial Sequence
  derived and/or modified protein sequence (wt) from neuraminidase__InfluenzaA__AFN19362
MNPNQKIITIGSVSLTISTICFFMQIAILITTVTLHFKQYEFNSPPNNQVMLCEPTIIERNITEIVYLTNTTIEKEICPKPAEYRNWSKPQCDITGFAPFSKDNSIRLSAGGDIWVTREPYVSCDPDKCYQFALGQGTTLNNVHSNNTVRDRTPYRTLLMNELGVPFHLGTKQVCIAWSSSSCHDGKAWLHVCITGDDKNATASFIYNGRLVDSVVSWSKEILRTQESECVCINGTCTVVMTDGSASGKADTKILFIEEGKIVHTSTLSGSAQHVEECSCYPRYPGVRCVCRDNWKGSNRPIVDINIKDHSIVSSYVCSGLVGDTPRKNDSSSSSHCLDPNNEEGGHGVKGWAFDDGNDVWMGRTINETSRLGYETFKVIEGWSNPKSKLQINRQVIVDRGDRSGYSGIFSVEGKRCINRCFYVELIRGRKEETEVLWTSNSIVVFCGTSGTYGTGSWPDGADLNLMPI

SEQ ID NO: 22927 - protein, 469 aa, Artificial Sequence; identical to SEQ ID NO: 22922
  derived and/or modified protein sequence (wt) from neuraminidase__InfluenzaA__AFN19364

SEQ ID NO: 22928 - protein, 469 aa, Artificial Sequence; identical to SEQ ID NO: 19518
  derived and/or modified protein sequence (wt) from neuraminidase__InfluenzaA__AFN19366

SEQ ID NO: 22929 - protein, 469 aa, Artificial Sequence; identical to SEQ ID NO: 22922
  derived and/or modified protein sequence (wt) from neuraminidase__InfluenzaA__AFN19370

SEQ ID NO: 22930 - protein, 469 aa, Artificial Sequence
  derived and/or modified protein sequence (wt) from neuraminidase__InfluenzaA__AFN19374
MNPNQKIITIGSVSLTISTICFFMQIAILITTVTLHFKQYEFNSPPNNQVMLCEPTIIERNITEIVYLTNTTIEKEICPKPAEYRNWSKPQCGITGFAPFSKDNSIRLSAGGDIWVTREPYVSCDPDKCYQFALGQGTTLNNVHSNNTVRDRTPYRTLLMNELGVPFHLGTKQVCIAWSSSSCHDGKAWLHVCITGDDKNATASFIYNGRLVDSVVSWSKEILRTQESECVCINGTCTVVMTDGSASGKADTKILFIKEGKIVHTSTLSGSAQHVEECSCYPRYPGVRCVCRDNWKGSNRPIVDINIKDHSIVSSYVCSGLVGDTPRKTDSSSSSHCLDPNNEEGGHGVKGWAFDDGNDVWMGRTINETSRLGYETFKVIEGWSNPKSKLQINRQVIVDRGDRSGYSGIFSVEGKSCINRCFYVELIRGRKEETEVLWTSNSIVVFCGTSGTYGTGSWPDGADLNLMPI

SEQ ID NO: 22931 - protein, 469 aa, Artificial Sequence; identical to SEQ ID NO: 22922
  derived and/or modified protein sequence (wt) from neuraminidase__InfluenzaA__AFN19376

SEQ ID NO: 22932 - protein, 469 aa, Artificial Sequence; identical to SEQ ID NO: 22922
  derived and/or modified protein sequence (wt) from neuraminidase__InfluenzaA__AFN19378

SEQ ID NO: 22933 - protein, 469 aa, Artificial Sequence
  derived and/or modified protein sequence (wt) from neuraminidase__InfluenzaA__AFN19380
MNPNQKIITIGSVSLTISTICFFMQIAILITTVTLHFKQYEFNSPPNNQVMLCEPTIIERNITEIVYLTNTTIEKEICPKPSEYRNWSKPQCDITGFAPFSKDNSIRLSAGGDIWVTREPYVSCDPDKCYQFALGQGTTLNNVHSNNTVRDRTPYRTLLMNELGVPFHLGTKQVCIAWSSSSCHDGKAWLHVCITGDDKNATASFIYNGRLVDSVVSWSKEILRTQESECVCINGTCTVVMTDGSASGKADTKILFIEEGKIVHTSTLSGSAQHVEECSCYPRYPGVRCVCRDNWKGSNRPIVDINIKDHSIVSSYVCSGLVGDTPRKNDSSSSSHCLDPNNEEGGHGVKGWAFDDGNDVWMGRTINETSRLGYETFKVIEGWSNPKSKLQINRQVIVDRGDRSGYSGIFSVEGKSCINRCFYVELIRGRKEETEVLWTSNSIVVFCGTSGTYGTGSWPDGADLNLMPI

SEQ ID NO: 22934 - protein, 469 aa, Artificial Sequence; identical to SEQ ID NO: 22930
  derived and/or modified protein sequence (wt) from neuraminidase__InfluenzaA__AFN19382

SEQ ID NO: 22935 - protein, 469 aa, Artificial Sequence; identical to SEQ ID NO: 22922
  derived and/or modified protein sequence (wt) from neuraminidase__InfluenzaA__AFN19384

SEQ ID NO: 22936 - protein, 469 aa, Artificial Sequence
  derived and/or modified protein sequence (wt) from neuraminidase__InfluenzaA__AFN19386
MNPNQKIITIGSVSLTISTICFFMQIAILITTVTLHFKQYEFNSPPNNQVMLCEPTIIERNITEIVYLTNTTIEKEICPKPAEYRNWSKPQCDITGFAPFSKDNSIRLSAGGDIWVTREPYVSCDPDKCYQFALGQGTTLNNVHSNNTVRDRTPYRTLLMNELGVPFHLGTKQVCIAWSSSSCHDGKAWLHVCITGDDKNATASFIYNGRLVDSVVSWSKEILRTQESECVCINGTCTVVMTDGSASGKADTKILFIEEGKIVHTSTLSGSAQHVEECSCYPRYPGVRCVCRDNWKGSNRPIVDINIKDHSIVSSYVCSGLVGDTPRKNDSSSSSHCLDPNNEEGGHGVKGWAFDDGNDVWMGRTINETSRLGYETFKVIEGWSNPKSKLQINRQIIVDRGDRSGYSGIFSVEGKSCINRCFYVELIRGRKEETEVLWTSNSIVVFCGTSGTYGTGSWPDGADLNLMPI

SEQ ID NO: 22937 - protein, 469 aa, Artificial Sequence; identical to SEQ ID NO: 22922
  derived and/or modified protein sequence (wt) from neuraminidase__InfluenzaA__AFN19388

SEQ ID NO: 22938 - protein, 469 aa, Artificial Sequence; identical to SEQ ID NO: 22922
  derived and/or modified protein sequence (wt) from neuraminidase__InfluenzaA__AFN19390

SEQ ID NO: 22939 - protein, 469 aa, Artificial Sequence
  derived and/or modified protein sequence (wt) from neuraminidase__InfluenzaA__AFN19392
MNPNQKIITIGSVSLTISTICFFMQIAVLITTVTLHFKQYEFNSPPNNQVMLCEPTIIERNITEIVYLTNTTIEKEICPKPAEYRNWSKPQCDITGFAPFSKDNSIRLSAGGDIWVTREPYVSCDPDKCYQFALGQGTTLNNVHSNNTVRDRTPYRTLLMNELGVPFHLGTKQVCIAWSSSSCHDGKAWLHVCITGDDKNATASFIYNGRLVDSVVSWSKEILRTQESECVCINGTCTVVMTDGSASGKADTKILFIEEGKIVHTSTLSGSAQHVEECSCYPRYPGVRCVCRDNWKGSNRPIVDINIKDHSIVSSYVCSGLVGDTPRKNDSSSSSHCLDPNNEEGGHGVKGWAFDDGNDVWMGRTINETSRLGYETFKVIEGWSNPKSKLQINRQVIVDRGDRSGYSGIFSVEGKSCINRCFYVELIRGRKEETEVLWTSNSIVVFCGTSGTYGTGSWPDGADLNLMPI

SEQ ID NO: 22940 - protein, 469 aa, Artificial Sequence; identical to SEQ ID NO: 21787
  derived and/or modified protein sequence (wt) from neuraminidase__InfluenzaA__AFN19394

SEQ ID NO: 22941 - protein, 469 aa, Artificial Sequence
  derived and/or modified protein sequence (wt) from neuraminidase__InfluenzaA__AFN19396
MNPNQKIITIGSVSLTISTICFFMQIAILITTVTLHFKQYEFNSPPNNQVMLCEPTIIERNITEIVYLTNTTIEKEICPKLAEYRNWSKPQCDITGFAPFSKDNSIRLSAGGDIWVTREPYVSCDPDKCYQFALGQGTTLNNVHSNNTVRDRTPYRTLLMNELGVPFHLGTKQVCIAWSSSSCHDGKAWLHVCITGDDKNATASFIYNGRLVDSVVSWSKDILRTQESECVCINGTCAVVMTDGSASGKADTKILFIEEGKIVHTSTLSGSAQHVEECSCYPRYPGVRCVCRDNWKGSNRPIVDINIKDHSIVSSYVCSGLVGDTPRKNDSSSSSHCLDPNNEEGGHGVKGWAFDDGNDVWMGRTINETSRLGYETFKVIEGWSNPKSKLQINRQVIVDRGNRSGYSGIFSVEGKNCINRCFYVELIRGRKEETEVLWTSNSIVVFCGTSGTYGTGSWPDGADLNLMPI

SEQ ID NO: 22942 - protein, 469 aa, Artificial Sequence
  derived and/or modified protein sequence (wt) from neuraminidase__InfluenzaA__AFN19398
MNPNQKIITIGSVSLTISTICFFMQIAILITTVTLHFKQYEFNSPPNNQVMLCEPTIIERNITEIVYLTNTTIEKEICPKPAEYRNWSKPQCDITGFAPFSKDNSIRLSAGGDIWVTREPYVSCDPDKCYQFALGQGTTLNNVHSNNTVRDRTPYRTLLMNELGVPFHLGTKQVCIAWSSSSCHDGKAWLHVCITGDDKNATASFIYNGRLVDSVVSWSKEILRTQESECVCINGTCTVVMTDGSASGKADTKILFIEEGKIVHTSTLSGSAQHVEECSCYPRYPGVRCVCRDNWRGSNRPIVDINIKDHSIVSSYVCSGLVGDTPRKNDSSSSSHCLDPNNEEGGHGVKGWAFDDGNDVWMGRTINETSRLGYETFKVIEGWSNPKSKLQINRQVIVDRGDRSGYSGIFSVEGKSCINRCFYVELIRGRKEETEVLWTSNSIVVFCGTSGTYGTGSWPDGADLNLMPI

SEQ ID NO: 22943 - protein, 469 aa, Artificial Sequence
  derived and/or modified protein sequence (wt) from neuraminidase__InfluenzaA__AFN19400
MNPNQKIITIGSVSLTISTICFFMQIAILITTVTLHFKQYEFNSPPNNQVMLCEPTIIERNITEIVYLTNTTIEKEICPKPSEYRNWSKPQCDITGFAPFSKDNSIRLSDGGDIWVTREPYVSCDPDKCYQFALGQGTTLNNVHSNNTVRDRTPYRTLLMNELGVPFHLGTKQVCIAWSSSSCHDGKAWLHVCITGDDKNATASFIYNGRLVDSVVSWSKEILRTQESECVCINGTCTVVMTDGSASGKADTKILFIEEGKIVHTSTLSGSAQHVEECSCYPRYPGVRCVCRDNWKGSNRPIVDINIKDHSIVSSYVCSGLVGDTPRKNDSSSSSHCLDPNNEEGGHGVKGWAFDDGNDVWMGRTINETSRLGYETFKVIEGWSNPKSKLQINRQVIVDRGDRSGYSGIFSVEGKSCINRCFYVELIRGRKEETEVLWTSNSIVVFCGTSGTYGTGSWPDGADLNLMPI

SEQ ID NO: 22944 - protein, 469 aa, Artificial Sequence; identical to SEQ ID NO: 22922
  derived and/or modified protein sequence (wt) from neuraminidase__InfluenzaA__AFN19402

SEQ ID NO: 22945 - protein, 469 aa, Artificial Sequence; identical to SEQ ID NO: 22922
  derived and/or modified protein sequence (wt) from neuraminidase__InfluenzaA__AFN19404

SEQ ID NO: 22946 - protein, 469 aa, Artificial Sequence; identical to SEQ ID NO: 22922
  derived and/or modified protein sequence (wt) from neuraminidase__InfluenzaA__AFN19406

SEQ ID NO: 22947 - protein, 469 aa, Artificial Sequence; identical to SEQ ID NO: 22922
  derived and/or modified protein sequence (wt) from neuraminidase__InfluenzaA__AFN19410

SEQ ID NO: 22948 - protein, 469 aa, Artificial Sequence; identical to SEQ ID NO: 22922
  derived and/or modified protein sequence (wt) from neuraminidase__InfluenzaA__AFN19412

SEQ ID NO: 22949 - protein, 469 aa, Artificial Sequence; identical to SEQ ID NO: 22922
  derived and/or modified protein sequence (wt) from neuraminidase__InfluenzaA__AFN19414

SEQ ID NO: 22950 - protein, 469 aa, Artificial Sequence; identical to SEQ ID NO: 22922
  derived and/or modified protein sequence (wt) from neuraminidase__InfluenzaA__AFN19416

SEQ ID NO: 22951 - protein, 469 aa, Artificial Sequence
  derived and/or modified protein sequence (wt) from neuraminidase__InfluenzaA__AFN19418
MNPNQKIITIGSVSLTISTICFFMQIAILITTVTLHFKQYEFNSPPNNQVMLCEPTIIERNITEIVYLTNTTIEKEICPKPAEYRNWSKPQCDITGFAPFSKDNSIRLSAGGDIWVTREPYVSCDPDKCYQFALGQGTTLNNVHSNNTVRDRTPYRTLLMNELGVPFHLGTKQVCIAWSSSSCHDGKAWLHVCITGDDKNATASFIYNGRLVDSVVSWSKEILRTQESECVCINGTCTVVMTDGSASGRADTKILFIEEGKIVHTSTLSGSAQHVEECSCYPRYPGVRCVCRDNWKGSNRPIVDINIKDHSIVSSYVCSGLVGDTPRKNDSSSSSHCLDPNNEEGGHGVKGWAFDDGNDVWMGRTINETSRLGYETFKVIEGWSNPKSKLQINRQVIVDRGDRSGYSGIFSVEGKSCINRCFYVELIRGRKEETEVLWTSNSIVVFCGTSGTYGTGSWPDGADLNLMPI

SEQ ID NO: 22952 - protein, 469 aa, Artificial Sequence
  derived and/or modified protein sequence (wt) from neuraminidase__InfluenzaA__AFN19420
MNPNQKIITIGSVSLTISTICFFMQIAILITTVTLHFKQYEFNSPPNNQVMLCEPTIIERNMTEIVYLTNTTIEKEICPKPAEYRNWSKPQCDITGFAPFSKDNSIRLSAGGDIWVTREPYVSCDPDKCYQFALGQGTTLNNVHSNNTVRDRTPYRTLLMNELGVPFHLGTKQVCIAWSSSSCHDGKAWLHVCITGDDKNATASFIYNGRLVDSVVSWSKEILRTQESECVCINGTCTVVMTDGSASGKADTKILFIEEGKIVHTSTLSGSAQHVEECSCYPRYPGVRCVCRDNWKGSNRPIVDINIKDHSIVSSYVCSGLVGDTPRKNDSSSSSHCLDPNNEEGGHGVKGWAFDDGNDVWMGRTINETSRLGYETFKVIEGWSNPKSKLQINRQVIVDRGDRSGYSGIFSVEGKSCINRCFYVELIRGRKEETEVLWTSNSIVVFCGTSGTYGTGSWPDGADLNLMPI

SEQ ID NO: 22953 - protein, 469 aa, Artificial Sequence
  derived and/or modified protein sequence (wt) from neuraminidase__InfluenzaA__AFN19422
MNPNQKIITIGSVSLTISTICFFMQIAILITTVTLHFKQYEFNSPPNNQVMLCEPTIIERNITEIVYLTNTTIEKEICPKPAEYRNWSKPQCGITGFAPFSKDNSIRLSAGGDIWVTREPYVSCDPDKCYQFALGQGTTLNNVHSNNTVRDRTPYRTLLMNELGVPFHLGTKQVCIAWSSSSCHDGKAWLHVCITGNDKNATASFIYNGRLVDSVVSWSKEVLRTQESECVCINGTCTVVMTDGSASGKADTKILFIEEGKIVHTSTLSGSAQHVEECSCYPRYPGVRCVCRDNWKGSNRPIVDINIKDHSIVSSYVCSGLVGDTPRKNDSSSSSHCLDPNNEEGGHGVKGWAFDDGNDVWMGRTINETSRLGYETFKVIEGWSNPKSKLQINRQVIVDRGDRSGYSGIFSVEGKSCINRCFYVELIRGRKEETEVLWTSNSIVVFCGTSGTYGTGSWPDGADLNLMPI

SEQ ID NO: 22954 - protein, 469 aa, Artificial Sequence
  derived and/or modified protein sequence (wt) from neuraminidase__InfluenzaA__AFN19426
MNPNQKIITIGSVSLTISTICFFMQIAILITTVTLHFKQYEFNSPPNNQVMLCEPTIIERNITEIVYLTNTTIEKEICPKPAEYRNWSKPQCDITGFAPFSKDNSIRLSAGGDIWVTREPYVSCDPDKCYQFALGQGTTLNNVHSNNTVRDRTPYRTLLMNELGVPFHLGTKQVCIAWSSSSCHDGKAWLHVCITGDDENATASFIYNGRLVDSVVSWSKEILRTQESECVCINGTCTVVMTDGSASGKADTKILFIEEGKIVHTSTLSGSAQHVEECSCYPRYPGVRCVCRDNWKGSNRPIVDINIKDHSIVSSYVCSGLVGDTPRKNDSSSSSHCLDPNNEEGGHGVKGWAFDDGNDVWMGRTINETSRLGYETFKVIEGWSNPKSKLQINRQVIVDRGDRSGYSGIFSVEGKSCINRCFYVELIRGRKEETEVLWTSNSIVVFCGTSGTYGTGSWPDGADLNLMPI

SEQ ID NO: 22955 - protein, 469 aa, Artificial Sequence; identical to SEQ ID NO: 22922
  derived and/or modified protein sequence (wt) from neuraminidase__InfluenzaA__AFN19428

SEQ ID NO: 22956 - protein, 469 aa, Artificial Sequence
  derived and/or modified protein sequence (wt) from neuraminidase__InfluenzaA__AFN19430
MNPNQKIITIGSVSLTISTICFFMQIAILIITVTLHFKQYEFNSPPNNQVMLCEPTIIERNMTEIVYLTNTTIEKEICPKPAEYRNWSKPQCDITGFAPFSKDNSIRLSAGGDIWVTREPYVSCDPDKCYQFALGQGTTLNNVHSNNTVRDRTPYRTLLMNELGVPFHLGTKQVCIAWSSSSCHDGKAWLHVCITGDDKNATASFIYNGRLVDSVVSWSKEILRTQESECVCINGTCTVVMTDGSASGKADTKILFIEEGKIVHTSTLSGSAQHVEECSCYPRYPGVRCVCRDNWKGSNRPIVDINIKDHSIVSSYVCSGLVGDTPRKNDSSSSSHCLDPNNEEGGHGVKGWAFDDGNDVWMGRTINETSRLGYETFKVIEGWSNPKSKLQINRQVIVDRSDRSGYSGIFSVEGKSCINRCFYVELIRGRKEETEVLWTSNSIVVFCGTSGTYGTGSWPDGADLNLMPI

SEQ ID NO: 22957 - protein, 469 aa, Artificial Sequence
  derived and/or modified protein sequence (wt) from neuraminidase__InfluenzaA__AFN19432
MNPNQKIITIGSVSLTISTICFFMQIAILITTVTLHFKQYEFNSPPNNQVMLCEPTIIERNITEIVYLTNTTIEKEICPKPAEYRNWSKPQCDITGFAPFSKDNSIRLSAGGDIWVTREPYVSCDPDKCYQFALGQGTTLNNVHSNNTVRDRTPHRTLLMNELGVPFHLGTKQVCIAWSSSSCHDGKAWLHVCITGDDKNATASFIYNGRLVDSVVSWSKEILRTQESECVCINGTCTVVMTDGSASGKADTKILFIEEGKIVHTSTLSGSAQHVEECSCYPRYPGVRCVCRDNWKGSNRPIVDINIKDHSIVSSYVCSGLVGDTPRKNDSSSSSHCLDPNNEEGGHGVKGWAFDDGNDVWMGRTINETSRLGYETFKVIEGWSNPKSKLQINRQVIVDRGDRSGYSGIFSVEGKSCINRCFYVELIRGRKEETEVLWTSNSIVVFCGTSGTYGTGSWPDGADLNLMPI

SEQ ID NO: 22958 - protein, 469 aa, Artificial Sequence
  derived and/or modified protein sequence (wt) from neuraminidase__InfluenzaA__AFN19434
MNPNQKIITIGSVSLTISTICFFMQIAILITTVTLHFKQYEFNSPPNNQVMLCEPTIIERNMTEIVYLTNTTIEKEICPKPAEYRNWSKPQCDITGFAPFSKDNSIRLSAGGDIWVTREPYVSCDPDKCYQFALGQGTTLNNVHSNNTVRDRTPYRTLLMNELGVPFHLGTKQVCIAWSSSSCHDGKAWLHVCITGDDKNATASFIYNGRLVDSVVSWSKEILRTQESECVCINGTCTVVMTDGSASGKADTKILFIEEGKIVHTSTLSGSAQHVEECSCYPRYPGVRCVCRDNWKGSNRPIVDINIKDHSIVSSYVCSGLVGDTPRKNDSSSSSHCLDPNNEEGGHGVKGWAFDDGNDVWMGRTINETSRLGYETFKVIEGWSNPKSKLQINRQVIVDRSDRSGYSGIFSVEGKSCINRCFYVELIRGRKEETEVLWTSNSIVVFCGTSGTYGTGSWPDGADLNLMPI

SEQ ID NO: 22959 - protein, 469 aa, Artificial Sequence; identical to SEQ ID NO: 22146
  derived and/or modified protein sequence (wt) from neuraminidase__InfluenzaA__AFN19436

SEQ ID NO: 22960 - protein, 469 aa, Artificial Sequence
  derived and/or modified protein sequence (wt) from neuraminidase__InfluenzaA__AFN19438
MNPNQKIITIGSVSLTISTICFFMQIAILITTVTLHFKQYEFNSPPNNQVMLCEPTIIERNMTEIVYLTNTTIEKEICPKPAEYRNWSKPQCDITGFAPFSKDNSIRLSAGGDIWVTREPYVSCDPDKCYQFALGQGTTLNNVHSNNTVRDRTPYRTLLMNELGVPFHLGTKQVCIAWSSSSCHDGKAWLHVCITGDDKNATASFIYNGRLVDSVVSWSKEILRTQESECVCINGTCTVVMTDGSASGKADTKILFIEEGKIVHTSTLSGSAQHVEECSCYPRYPGVRCVCRDNWKGSNRPIVDINIKDHSIVSSYVCSGLVGDTPRKNDSSSSSHCLDPNNEEGGHGVKGWAFDDGNDVWMGRTINETSRLGYETFKVIEGWSNPKSKLQINRQVIVDRSDRSGYSGIFSVEGKSCINRCFYVELIRGRKEETEVLWTSNSIVVFCGTSGTYGTGSWPDGADLNLMSI

SEQ ID NO: 22961 - protein, 469 aa, Artificial Sequence
  derived and/or modified protein sequence (wt) from neuraminidase__InfluenzaA__AFN19442
MNPNQKIITIGSVSLTISTICFFMQIAILITTVTLHFKQYEFNSPPNNQVMLCEPTIIERNITEIVYLTNTIIEKEICPKPTEYRNWSKPQCDITGFAPFSKDNSIRLSAGGDIWVTREPYVSCDPDKCYQFALGQGTTLNNVHSNNTVRDRTPYRTLLMNELGVPFHLGTKQVCIAWSSSSCHDGKAWLHVCITGDDKNATASFIYNGRLVDSVVSWSKEILRTQESECVCINGTCTVVMTDGSASGKADTKILFIEEGKIVHTSTLSGSAQHVEECSCYPRYPGVRCVCRDNWKGSNRPIVDINIKDHSIVSSYVCSGLVGDTPRKNDSSSSSHCLDPNNEEGGHGVKGWAFDDGNDVWMGRTINETSRLGYETFKVIEGWSNPKSKLQINRQVIVDRGDRSGYSGIFSVEGKSCINRCFYVELIRGRKEETEVLWTSNSIVVFCGTSGTYGTGSWPDGADLNLMHI

SEQ ID NO: 22962 - protein, 469 aa, Artificial Sequence; identical to SEQ ID NO: 22146
  derived and/or modified protein sequence (wt) from neuraminidase__InfluenzaA__AFN19446

SEQ ID NO: 22963 - protein, 469 aa, Artificial Sequence; identical to SEQ ID NO: 22146
  derived and/or modified protein sequence (wt) from neuraminidase__InfluenzaA__AFN19448

SEQ ID NO: 22964 - protein, 469 aa, Artificial Sequence; identical to SEQ ID NO: 22922
  derived and/or modified protein sequence (wt) from neuraminidase__InfluenzaA__AFN19458

SEQ ID NO: 22965 - protein, 469 aa, Artificial Sequence
  derived and/or modified protein sequence (wt) from neuraminidase__InfluenzaA__AFN19460
MNPNQKIITIGSVSLTISTICFFMQIAILITTVTLHFKQYEFNSPPNNQVMLCEPTIIERNITEIVYLTNTTIEKEICPKPAEYRNWSKPQCGITGFAPFSKDNSIRLSAGGDIWVTREPYVSCDPDKCYQFALGQGTTLNNMHSNNTVRDRTPYRTLLMNELGVPFHLGTKQVCIAWSSSSCHDGKAWLHVCITGDDKNATASFIYNGRLVDSVVSWSNEILRTQESECVCINGTCTVVMTDGSASGKADTKILFIEEGKIVHTSTLSGSAQHVEECSCYPRYPGVRCVCRDNWKGSNRPIVDINIKDHSIVSSYVCSGLVGDTPRKNDSSSSSHCLDPNNEEGGHGVKGWAFDDGNDVWMGRTINETSRLGYETFKVIEGWSNPKSKLQINRQVIVDRGDRSGYSGIFSVEGKSCINRCFYVELIRGRKEENEVLWTSNSIVVFCGTSGTYGTGSWPDGADLNLMPI

SEQ ID NO: 22966 - protein, 469 aa, Artificial Sequence; identical to SEQ ID NO: 22146
  derived and/or modified protein sequence (wt) from neuraminidase__InfluenzaA__AFN19462

SEQ ID NO: 22967 - protein, 469 aa, Artificial Sequence
  derived and/or modified protein sequence (wt) from neuraminidase__InfluenzaA__AFN19466
MNPNQKIITIGSVSLTISTICFFMQIAILITTVTLHFKQYEFNSPPNNQVMLCEPTIIERNITEIVYLTNTTIEKEICPKPAEYRNWSKPQCDIAGFAPFSKDNSIRLSAGGDIWVTREPYVSCDPDKCYQFALGQGTTLNNVHSNNTVRDRTPYRTLLMNELGVPFHLGTKQVCIAWSSSSCHDGKAWLHVCITGDDKNATASFIYNGRLVDSVVSWSKEILRTQESECVCINGTCTVVMTDGSASGKADTKILFIEEGKIVHTSTLSGSAQHVEECSCYPRYPGVRCVCRDNWKGSNRPIVDINIKDHSIVSSYVCSGLVGDTPRKNDSSSSSHCLDPNNEEGGHGVKGWAFDDGNDVWMGRTINETSRLGYETFKVIEGWSNPKSKLQINRQVIVDRGDRSGYSGIFSVEGKSCINRCFYVELIRGRKEETEVLWTSNSIVVFCGTSGTYGTGSWPDGADLNLMPI

SEQ ID NO: 22968 - protein, 469 aa, Artificial Sequence; identical to SEQ ID NO: 22146
  derived and/or modified protein sequence (wt) from neuraminidase__InfluenzaA__AFN19468

SEQ ID NO: 22969 - protein, 469 aa, Artificial Sequence
  derived and/or modified protein sequence (wt) from neuraminidase__InfluenzaA__AFN19470
MNPNQKIITIGSVSLTISTICFFMQIAILITTVTLHFKQYEFNSPPNNQVMLCEPTIIERNMTEIVYLTNTTIEKEICPKPAEYRNWSKPQCDITGFAPFSKDNSIRLSAGGDIWVTREPYVSCDPDKCYQFALGQGTTLNNVHSNNTVRDRTPYRTLLMNELGVPFHLGTKQVCIAWSSSSCHDGKAWLHVCITGDDKNATASFIYNGRLVDSVVSWSKEILRTQESECVCINGTCTVVMTDGSASGKADTKILFIEEGKIVHTSTLSGSAQHVEECSCYPRYPGVRCVCRDNWKGSNRPIVDINIKDHSIVSSYVCSGLVGDTPRKNDSSSSSHCLDPNNEEGGHGVKGWAFDDGNDVWMGRTINETSRLGYETFKVIEGWSNPKSKLQINRQVIVNKSDRSGYSGIFSVEGKSCINRCFYVELIRGRKEETEVLWTSNSIVVFCGTSGTYGTGSWPDGADLNLMPI

SEQ ID NO: 22970 - protein, 469 aa, Artificial Sequence; identical to SEQ ID NO: 22922
  derived and/or modified protein sequence (wt) from neuraminidase__InfluenzaA__AFN19472

SEQ ID NO: 22971 - protein, 469 aa, Artificial Sequence
  derived and/or modified protein sequence (wt) from neuraminidase__InfluenzaA__AFN19476
MNPNQKIITIGSVSLTISTICFFMQIAILITTVTLHFKQYEFNSPPNNQVMLCEPTIIERNITEIVYLTNTTIEKEICPKPAEYRNWSKPQCGITGFAPLSKDNSIRLSAGGDIWVTREPYVSCDPDKCYQFALGQGTTLNNVHSNNTVRDRTPYRTLLMNELGVPFHLGTKQVCIAWSSSSCHDGKAWLHVCITGDDKNATASFIYNGRLVDSVVSWSKEILRTQESECVCINGTCTVVMTDGSASGKADTKILFIEEGKIVHTSTLSGSAQHVEECSCYPRYPGVRCVCRDNWKGSNRPIVDINIKDHSIVSSYVCSGLVGDTPRKNDSSSSSHCLDPNNEEGGHGVKGWAFDDGNDVWMGRTINETSRLGYETFKVIEGWSNPKSKLQINRQVIVDRGDRSGYSGIFSVEGKSCINRCFYVELIRGRKEETEVLWTSNSIVVFCGTSGTYGTGSWPDGADLNLMPI

SEQ ID NO: 22972 - protein, 469 aa, Artificial Sequence; identical to SEQ ID NO: 22922
  derived and/or modified protein sequence (wt) from neuraminidase__InfluenzaA__AFN19478

SEQ ID NO: 22973 - protein, 469 aa, Artificial Sequence
  derived and/or modified protein sequence (wt) from neuraminidase__InfluenzaA__AFN19480
MNPNQKIITIGSVSLTISTICFFMQIAILITTVTLHFKQYEFNSPPNNQVMLCEPTIIERNMTEIVYLTNTTIEKEICPKPAEYRNWSKPQCDITGFAPFSKDNSIRLSAGGDIWVTREPYVSCDPDKCYQFALGQGTTLNNVHSNNTVGDRTPYRTLLMNELGVPFHLGTKQVCIAWSSSSCHDGKAWLHVCITGDDKNATASFIYNGRLVDSVVSWSKEILRTQESECVCINGTCTVVMTDGSASGKADTKILFIEEGKIVHTSTLSGSAQHVEECSCYPRYPGVRCVCRDNWKGSNRPIVDINIKDHSIVSSYVCSGLVGDTPRKNDSSSSSHCLDPNNEEGGHGVKGWAFDDGNDVWMGRTINETSRLGYETFKVIEGWSNPKSKLQINRQVIVDRSDRSGYSGIFSVEGKSCINRCFYVELIRGRKEETEVLWTSNSIVVFCGTSGTYGTGSWPDGADLNLMPI

SEQ ID NO: 22974 - protein, 469 aa, Artificial Sequence
  derived and/or modified protein sequence (wt) from neuraminidase__InfluenzaA__AFN19482
MNPNQKIITIGSVSLTISTICFFMQIAILITTVTLHFKQYEFNSPPNNQVMLCEPTIIERNITEIVYLTNTTIEKEICPKPAKYRNWSKPQCDITGFAPFSKDNSIRLSAGGDIWVTREPYVSCDPDKCYQFALGQGTTLNNVHSNNTVRDRTPYRTLLMNELGVPFHLGTKQVCIAWSSSSCHDGKAWLHVCITGDDKNATASFIYNGRLVDSVVSWSKEILRTQESECVCINGTCTVVMTDGSASGKADTKILFIEEGKIVHTSTLSGSAQHVEECSCYPRYPGVRCVCRDNWKGSNRPIVDINIKDHSIVSSYVCSGLVGDTPRKNDSSSSSHCLDPNNEEGGHGVKGWAFDDGNDVWMGRTINETSRLGYETFKVIEGWSNPKSKLQINRQVIVDRSDRSGYSGIFSVEGKSCINRCFYVELIRGRKEETEVLWTSNSIVVFCGTSGTYGTGSWPDGADLNLMPI

SEQ ID NO: 22975 - protein, 469 aa, Artificial Sequence; identical to SEQ ID NO: 22146
  derived and/or modified protein sequence (wt) from neuraminidase__InfluenzaA__AFN19484

SEQ ID NO: 22976 - protein, 469 aa, Artificial Sequence; identical to SEQ ID NO: 22922
  derived and/or modified protein sequence (wt) from neuraminidase__InfluenzaA__AFN19488

SEQ ID NO: 22977 - protein, 469 aa, Artificial Sequence
  derived and/or modified protein sequence (wt) from neuraminidase__InfluenzaA__AFN19492
MNPNQKIITIGSVSLTISTICFFMQIAILITTVTLHFKQYEFNSPPNNQVMLCEPTIIERNITEIVYLTNTTIEKEICPKPAEYRNWSKPQCDITGFAPFSKDNSIRLSAGGDIWVTREPYVSCDPDKCYQFALGQGTTLNNVHSNNTVRDRTPYRTLLMNELGVPFHLGTKQVCIAWSSSSCHDGKAWLHVCITGDDKNATASFIYNGKLVDSVVSWSKEILRTQESECVCINGTCTVVMTDGSASGKADTKILFIEEGKIVHTSTLSGSAQHVEECSCYPRYPGVRCVCRDNWKGSNRPIVDINIKDHSIVSSYVCSGLVGDTPRKNDSSSSSHCLDPNNEEGGHGVKGWAFDDGNDVWMGRTINETSRLGYETFKVIEGWSNPKSKLQINRQVIVDRGDRSGYSGIFSVEGKSCINRCFYVELIRGRKEETEVLWTSNSIVVFCGTSGTYGTGSWPDGADLNLMPI

SEQ ID NO: 22978 - protein, 469 aa, Artificial Sequence
  derived and/or modified protein sequence (wt) from neuraminidase__InfluenzaA__AFN19494
MNPNQKIITIGSVSLTISTICFFMQIAILITTVTLHFKQYEFNSPPNNQVMLCEPTIIERNITEIVYLTNTTIEKEICPKLAEYRNWSKPQCDITGFAPFSKDNSIRLSAGGDIWVTREPYVSCDPDKCYQFALGQGTTLNNMHSNNTVRDRTPYRTLLMNELGVPFHLGTKQVCIAWSSSSCHDGKAWLHVCITGDDKNATASFIYNGRLVDSVVSWSKEILRTQESECVCINGTCTVVMTDGSASGKADTKILFIEEGKIVHTSTLSGSAQHVEECSCYPRYPGVRCVCRDNWKGSNRPIVDINIKDHSIVSSYVCSGLVGDTPRKNDSSSSSHCLDPNNEEGGHGVKGWAFDDGNDVWMGRTINETSRLGYETFKVIEGWSNPKSKLQINRQVIVDRGNRSGYSGIFSVEGKSCINRCFYVELIRGRKEETEVLWTSNSIVVFCGTSGTYGTGSWPDGADLNLMPI

SEQ ID NO: 22979 - protein, 469 aa, Artificial Sequence; identical to SEQ ID NO: 21787
  derived and/or modified protein sequence (wt) from neuraminidase__InfluenzaA__AFN19496

SEQ ID NO: 22980 - protein, 469 aa, Artificial Sequence
  derived and/or modified protein sequence (wt) from neuraminidase__InfluenzaA__AFN19498
MNPNQKIITIGSVSLTISTICFFMQIAILITTVTLHFKQYEFNSPPNNQVMLCEPTIIERNITEIVYLTNTTIEKEICPKLAEYRNWSKPQCDITGFAPFSKDNSIRLSAGGDIWVTREPYVSCDPDKCYQFALGQGTTLNNVHSNNTVRDRTPYRTLLMNELGVPFHLGTKQVCIAWSSSSCHDGKAWLHVCITGDDKNATASFIYNGKLVDSVVSWSKEILRTQESECVCINGTCTVVMTDGSASGKADTKILFIEEGKIVHTSTLSGSAQHVEECSCYPRYPGVRCVCRDNWKGSNRPIVDINIKDHSIVSSYVCSGLVGDTPRKNDSSSSSHCLDPNNEEGGHGVKGWAFDDGNDVWMGRTINETSRLGYETFKVIEGWSNPKSKLQINRQVIVDRGNRSGYSGIFSVEGKSCINRCFYVELIRGRTEETEVLWTSNSIVVFCGTSGTYGTGSWPDGADLNLMPI

SEQ ID NO: 22981 - protein, 469 aa, Artificial Sequence; identical to SEQ ID NO: 22930
  derived and/or modified protein sequence (wt) from neuraminidase__InfluenzaA__AFN19500

SEQ ID NO: 22982 - protein, 469 aa, Artificial Sequence; identical to SEQ ID NO: 22922
  derived and/or modified protein sequence (wt) from neuraminidase__InfluenzaA__AFN19502

SEQ ID NO: 22983 - protein, 469 aa, Artificial Sequence; identical to SEQ ID NO: 19518
  derived and/or modified protein sequence (wt) from neuraminidase__InfluenzaA__AFN19504

SEQ ID NO: 22984 - protein, 469 aa, Artificial Sequence; identical to SEQ ID NO: 19518
  derived and/or modified protein sequence (wt) from neuraminidase__InfluenzaA__AFN19506

SEQ ID NO: 22985 - protein, 469 aa, Artificial Sequence; identical to SEQ ID NO: 22930
  derived and/or modified protein sequence (wt) from neuraminidase__InfluenzaA__AFN19508

SEQ ID NO: 22986 - protein, 469 aa, Artificial Sequence; identical to SEQ ID NO: 22922
  derived and/or modified protein sequence (wt) from neuraminidase__InfluenzaA__AFN19510

SEQ ID NO: 22987 - protein, 469 aa, Artificial Sequence; identical to SEQ ID NO: 22922
  derived and/or modified protein sequence (wt) from neuraminidase__InfluenzaA__AFN19512

SEQ ID NO: 22988 - protein, 469 aa, Artificial Sequence; identical to SEQ ID NO: 22922
  derived and/or modified protein sequence (wt) from neuraminidase__InfluenzaA__AFN19516

SEQ ID NO: 22989 - protein, 469 aa, Artificial Sequence; identical to SEQ ID NO: 22930
  derived and/or modified protein sequence (wt) from neuraminidase__InfluenzaA__AFN19518

SEQ ID NO: 22990 - protein, 469 aa, Artificial Sequence; identical to SEQ ID NO: 22930
  derived and/or modified protein sequence (wt) from neuraminidase__InfluenzaA__AFN19520

SEQ ID NO: 22991 - protein, 469 aa, Artificial Sequence; identical to SEQ ID NO: 22922
  derived and/or modified protein sequence (wt) from neuraminidase__InfluenzaA__AFN19522

SEQ ID NO: 22992 - protein, 469 aa, Artificial Sequence
  derived and/or modified protein sequence (wt) from neuraminidase__InfluenzaA__AFN19524
MNPNQKIITIGSVSLTISTICFFMQIAILITTVTLHFKQYEFNSPPNNQVMLCEPTIIERNITEIVYLTNTTIEKEICPKPAEYRNWSKPQCDITGFAPFSKDNSIRLSAGGDIWVTREPYVSCDPDKCYQFALGQGTTLNNVHSNNTVRDRTPYRTLLMNELGVPFHLGTKQVCIAWSSSSCHDGKAWLHVCITGDDKNATASFIYNGRLVDSVVSWSKEILRTQESECVCINGTCTVVMTDGSASGKADTKILFIEEGKIVHTSTLSGSAQHVEECSCYPRYPGVRCVCRDNWKGSNRPIVDINIKDHSIVSSYVCSGLVGDTPRKNDSSSSSHCLDPNNEEGGHGVKGWAFDDGNDVWMGRTINETSRLGYETFKVIEGWSNPKSKLQINRQVIVDRGDRSGYSGIFSVEGKSCINRCFYVELIRGRKEETEVLWTSNSIVVFCGTSGTYGTGSWPDGADLSLMPI

SEQ ID NO: 22993 - protein, 469 aa, Artificial Sequence
  derived and/or modified protein sequence (wt) from neuraminidase__InfluenzaA__AFN19526
MNPNQKIITIGSVSLTISTICFFMQIAILITTVTLHFKQCEFNSPPNNQVMLCEPTIIERNITEIVYLTNTTTEKEICPKPAEYRNWSKPQCDITGFAPFSKDNSIRLSAGGDIWVTREPYVSCDPDKCYQFALGQGTTLNNVHSNNTVRDRTPYRTLLMNELGVPFHLGTKQVCIAWSSSSCHDGKAWLHVCITGDDKNATASFIYNGRLVDSVVSWSKEILRTQESECVCINGTCTVVMTDGSASGKADTKILFIEEGKIVHTSTLSGSAQHVEECSCYPRYPGVRCVCRDNWKGSNRPIVDINIKDHSIVSSYVCSGLVGDTPRKTDSSSSSHCLDPNNEEGGHGVKGWAFDDGNDVWMGRTINETSRLGYETFKVIEGWSNPKSKLQINRQVIVDRGDRSGYSGIFSVEGKSCINRCFYVELIRGRKEETEVLWTSNSIVVFCGTSGTYGTGSWPDGADLNLMPI

SEQ ID NO: 22994 - protein, 469 aa, Artificial Sequence
  derived and/or modified protein sequence (wt) from neuraminidase__InfluenzaA__AFN19528
MNPNQKIITIGSVSLTISTICFFMQIAILITTVTLHFKQYEFNSPPNNQVMLCEPTIIERNMTEIVYLTNTTIEKEICPKPAEYRNWSKPQCDITGFAPFSKDNSIRLSAGGDIWVTREPYVSCDPDKCYQFALGQGTTLNNVHSNNTVRDRTPYRTLLMNELGVPFHLGTKQVCIAWSSSSCHDGKAWLHVCITGDDKNATASFIYNGRLVDSVVSWSKEILRTQESECVCINGTCTVVMTDGSASGKSDTKILFIEEGKIVHTSTLSGSAQHVEECSCYPRYPGVRCVCRDNWKGSNRPIVDINIKDHSIVSSYVCSGLVGDTPRKNDSSSSSHCLDPNNEEGGHGVKGWAFDDGNDVWMGRTINETSRLGYETFKVIEGWSNPKSKLQINRQVIVDRSDRSGYSGIFSVEGKSCINRCFYVELIRGRKEETEVLWTSNSIVVFCGTSGTYGTGSWPDGADLNLMPI

SEQ ID NO: 22995 - protein, 469 aa, Artificial Sequence; identical to SEQ ID NO: 22958
  derived and/or modified protein sequence (wt) from neuraminidase__InfluenzaA__AFN19530

SEQ ID NO: 22996 - protein, 469 aa, Artificial Sequence; identical to SEQ ID NO: 22922
  derived and/or modified protein sequence (wt) from neuraminidase__InfluenzaA__AFN19532

SEQ ID NO: 22997 - protein, 469 aa, Artificial Sequence; identical to SEQ ID NO: 22958
  derived and/or modified protein sequence (wt) from neuraminidase__InfluenzaA__AFN19534

SEQ ID NO: 22998 - protein, 469 aa, Artificial Sequence; identical to SEQ ID NO: 22922
  derived and/or modified protein sequence (wt) from neuraminidase__InfluenzaA__AFN19536

SEQ ID NO: 22999 - protein, 469 aa, Artificial Sequence; identical to SEQ ID NO: 22922
  derived and/or modified protein sequence (wt) from neuraminidase__InfluenzaA__AFN19538

SEQ ID NO: 23000 - protein, 469 aa, Artificial Sequence; identical to SEQ ID NO: 22922
  derived and/or modified protein sequence (wt) from neuraminidase__InfluenzaA__AFN19544

SEQ ID NO: 23001 - protein, 469 aa, Artificial Sequence
  derived and/or modified protein sequence (wt) from neuraminidase__InfluenzaA__AFN19546
MNPNQKIITIGSVSLTISTICFFMQIAILITTVTLHFKQYEFNSPPNNQVMLCEPTIIERNITEIVYLTNTTIEKEICPKPAEYRNWSKPQCGITGFAPFSKDNSIRLSAGGDIWVTREPYVSCDPDKCYQFALGQGTTLNNVHSNNTVRDRTPYRTLLMSELGVPFHLGTKQVCIAWSSSSCHDGKAWLHVCITGDDKNATASFIYNGRLVDSVVSWSKEILRTQESECVCINGTCTVVMTDGSASGKADTKILFIEEGKIVHTSTLSGSAQHVEECSCYPRYPGVRCVCRDNWKGSNRPIVDINIKDHSIVSSYVCSGLVGDTPRKNDSSSSSHCLDPNNEEGGHGVKGWAFDDGNDVWMGRTINETSRLGYETFKVIEGWSNPKSKLQINRQVIVDRGDRSGYSGIFSVEGKSCINRCFYVELIRGRKEETEVLWTSNSIVVFCGTSGTYGTGSWPDGADLNLMPI

SEQ ID NO: 23002 - protein, 469 aa, Artificial Sequence
  derived and/or modified protein sequence (wt) from neuraminidase__InfluenzaA__AFN19548
MNPNQKIITIGSVSLTISTICFFMQIAILITTVTLHFKQYEFNSPPNNQVMLCEPTIIERNITEIVYLTNTTIEKEICPKPAEYRNWSKPQCDITGFAPFSKDNSIRLSAGGDIWVTREPYVSCDPDKCYQFALGQGTTLNNVHSNNTVRDRTPYRTLLMNELGVPFHLGTKQVCIAWSSSSCHDGKAWLHVCITGDDKNATASFIYNGRLVDSVVSWSKEILRTQESECVCINGTCTVVMTDGSASGKADTKILFIEEGKIVHTSTLSGSAQHVEECSCYPRYPGVRCVCRDNWKGSNRPIVDINIKDHSIVSSYVCSGLVGDTPRKNDSFSSSHCLDPNNEEGGHGVKGWAFDDGNDVWMGRTINETSRLGYETFKVIEGWSNPKSKLQINRQVIVDRGDRSGYSGIFSVEGKSCINRCFYVELIRGRKEETEVLWTSNSIVVFCGTSGTYGTGSWPDGADLNLMPI

SEQ ID NO: 23003 - protein, 469 aa, Artificial Sequence
  derived and/or modified protein sequence (wt) from neuraminidase__InfluenzaA__AFN19550
MNPNQKIITIGSVSLTISTICFFMQIAILITTVTLHFKQYEFNSPPNNQVMLCEPTIIERNITEIVYLTNTTIEKEICPKLAEYRNWSKPQCDITGFAPFSKDNSIRLSAGGDIWVTREPYVSCDPDKCYQFALGQGTTLNNVHSNNTVRDRTPYRTLLMNELGVPFHLGTKQVCIAWSSSSCHDGKAWLHVCITGDDKNATASFIYNGRLVDSVVSWSKEILRTQESECVCINGTCTVVMTDGSASGEADTKILFIEEGKIIHTSTLSGSAQHVEECSCYPRYPGVRCVCRDNWKGSNRPIVDINIKDHSIVSSYVCSGLVGDTPRKNDSSSSSHCLDPNNEEGGHGVKGWAFDDGNDVWMGRTINETSRLGYETFKVIEGWSNPKSKLQINRQVIVDRGNRSGYSGIFSVEGKSCINRCFYVELIRGRKEETEVLWTSNSIVVFCGTSGTYGTGSWPDGADLNLMPI

SEQ ID NO: 23004 - protein, 469 aa, Artificial Sequence; identical to SEQ ID NO: 22922
  derived and/or modified protein sequence (wt) from neuraminidase__InfluenzaA__AFN19552

SEQ ID NO: 23005 - protein, 469 aa, Artificial Sequence; identical to SEQ ID NO: 22146
  derived and/or modified protein sequence (wt) from neuraminidase__InfluenzaA__AFN19554

SEQ ID NO: 23006 - protein, 469 aa, Artificial Sequence; identical to SEQ ID NO: 22146
  derived and/or modified protein sequence (wt) from neuraminidase__InfluenzaA__AFN19556

SEQ ID NO: 23007 - protein, 469 aa, Artificial Sequence
  derived and/or modified protein sequence (wt) from neuraminidase__InfluenzaA__AFN19558
MNPNQKIITIGSVSLTISTICFFMQIAILITTVTLHFKQYEFNSPPNNQVMLCEPTIIERNITEIVYLTNTTIEKEICPKPAEYRNWSKPQCDITGFAPFSKDNSIRLSAGGDIWVTREPYVSCDPDKCYQFALGQGTTLNNVHSNNTVRDRTPYRTLLMNELGVPFHLGTKQVCIAWSSSSCHDGKAWLHVCITGDDKNATASFIYNGRLVDSVVSWSKEILRTQESECVCINGTCTVVMTDGSASGKADTKILFIEEGKIVHTSTLSGSAQHVEECSCYPRYPGVRCVCRDNWKGSNRPIVDINIKDHSIVSSYVCSGLVGDTPRKNDSSSSSHCLDPNNEEGGHGVKGWAFDDGNDVWMGRTINETSRLGYETFKVIEGWSNPKSKLQMNRQVIVDRGDRSGYSGIFSVEGKSCINRCFYVELIRGRKEETEVLWTSNSIVVFCGTSGTYGTGSWPDGADLNLMPI

SEQ ID NO: 23008 - protein, 469 aa, Artificial Sequence
  derived and/or modified protein sequence (wt) from neuraminidase__InfluenzaA__AFN19560
MNPNQKIITIGSVSLTISTICFFMQIAILITTVTLHFKQYEFNSPPNNQVMLCEPTIIERNITEIVYLTNTTIEKEICPKPAEYRNWSKPQCGITGFAPFSKDNSIRLSAGGDIWVTREPYVSCDPDKCYQFALGQGTTLNNVHSNNTVRDRTPYRTLLMNELGVPFHLGTKQVCIAWSSSSCHDGKAWLHVCITGDDKNATASFIYNGRLVDSVVSWSKEILRTQESECVCINGTCTVVMTDGSASGKADTKILFIEEGKIVHTSTLSGSAQHVEECSCYPRYPGVRCVCRDNWKGSNRPIVDINIKDHSIVSSYVCSGLVGDTPRKNDSSSSSHCLDPNNEGGGHGVKGWAFDDGNDVWMGRTINETSRLGYETFKVIEGWSNPKSKLQINRQVIVDRGDRSGYSGIFSVEGKSCINRCFYVELIRGRKEETEVLWTSNSIVVFCGTSGTYGTGSWPDGADLNLMPI

SEQ ID NO: 23009 - protein, 469 aa, Artificial Sequence; identical to SEQ ID NO: 22969
  derived and/or modified protein sequence (wt) from neuraminidase__InfluenzaA__AFN19562

SEQ ID NO: 23010 - protein, 469 aa, Artificial Sequence
  derived and/or modified protein sequence (wt) from neuraminidase__InfluenzaA__AFN19564
MNPNQKIITIGSVSLTISTICFFMQIAILITTVTLHFKQYEFNSPPNNQVMLCEPTIIERNITEIVYLTNTTIEKEICPKPAEYRNWSKPQCGITGFAPFSKDNSIRLSAGGDIWVTREPYVSCDPDKCYQFALGQGTTLNNVHSNNTVRDRTPYRTLLMNELGVPFHLGTKQVCIAWSSSSCHDGKAWLHVCITGDDKNATASFIYNGRLVDSVVSWSKEILRTQESECVCINGTCTVVMTDGSASGKADTKILFIEEGKIVHTSTLSGSAQHVEECSCYPRYPGVRCVCRDNWKGSNRPIVDINIKDHSIVSSYVCSGLVGDTPRKTDSSSSSHCLDPNNEEGGHGVKGWAFDDGNDVWMGRTINETSRLGYETFKVIEGWSNPKSKLQINRQVIVDRGDRSGYSGIFSVEGKSCINRCFYVELIRGRKEETEVLWTSNSIVVFCGTSGTYGTGSWPDGADLNLMPI

SEQ ID NO: 23011 - protein, 469 aa, Artificial Sequence
  derived and/or modified protein sequence (wt) from neuraminidase__InfluenzaA__AFN19566
MNPNQKIITIGSVSLTISTICFFMQIAILITTVTLHFKQYEFNSPPNNQVMLCEPTIIERNITEIVYLTNTTIEKEICPKPAEYRNWSKPQCGITGFAPFSKDNSIRLSAGGDIWVTREPYVSCDPDKCYQFALGQGTTLNNVHSNNTVRDRTPYRTLLMNELGVPFHLGTKQVCIAWSSSSCHDGKAWLHVCITGDDKNATASFIYNGRLVDSVVSWSNEILRTQESECVCINGTCTVVMTDGSASGKADTKILFIEEGKIVHTSTLSGSAQHVEECSCYPRYPGVRCVCRDNWKGSNRPIVDINIKDHSIVSSYVCSGLVGDTPRKNDSSSSSHCLDPNNEEGGHGVKGWAFDDGNDVWMGRTINETSRLGYETFKVIEGWSNPKSKLQINRQVIVDRGDRSGYSGIFSVEGKSCINRCFYVELIRGRKEENEVLWTSNSIVVFCGTSGTYGTGSWPDGADLNLMPI

SEQ ID NO: 23012 - protein, 469 aa, Artificial Sequence
  derived and/or modified protein sequence (wt) from neuraminidase__InfluenzaA__AFN19568
MNPNQKIITIGSVSLTISTICFFMQIAILITTVTLHFKQYEFNSPPNNQVMLCEPTIIERNITEIVYLTNTTIEKEICPKPAEYRNWSKPQCGITGFAPFSKDNSIRLSAGGDIWVTREPYVSCDPDKCYQFALGQGTTLNNVHSNNTVRDRTPYRTLLMNELGVPFHLGTKQVCIAWSSSSCHDGKAWLHVCITGDDKNATASFIYNGRLVDSVVSWSKEILRTQESECVCINGTCTVVMTDGSASGKADTKILFIEEGKIVHTSTLSGSAQHVEECSCYPRYPGVRCVCRDNWKGSNRPIVDINIKDHSIVSSYVCSGLVGDTPRKNDSSSSSHCLDPNNEEGGHGVKGWAFDDGNDVWMGRTINETSRLGYETFKVIEGWSNPKSKLQVNRQVIVDRGDRSGYSGIFSVEGKSCINRCFYVELIRGRKEEIEVLWTSNSIVVFCGTSGTYGTGSWPDGADLNLMPI

SEQ ID NO: 23013 - protein, 469 aa, Artificial Sequence
  derived and/or modified protein sequence (wt) from neuraminidase__InfluenzaA__AFN19570
MNPNQKIITIGSVSLTISTICFFMQIAILITTVTLHFKQYEFNYPPNNQVMLCEPTIIERNITEIVYLTNTTIEKEICPKPAEYRNWSKPQCGITGFAPFSKDNSIRLSAGGDIWVTREPYVSCDPDKCYQFALGQGTTLNNMHSNNTVRDRTPYRTLLMNELGVPFHLGTKQVCIAWSSSSCHDGKAWLHVCITGDDKNATASFIYNGRLVDSVVSWSNEILRTQESECVCINGTCTVVMTDGSASGKADTKILFIEEGKIVHTSTLSGSAQHVEECSCYPRYPGVRCVCRDNWKGSNRPIVDINIKDHSIVSSYVCSGLVGDTPRKNDSSSSSHCLDPNNEEGGHGVKGWAFDDGNDVWMGRTINETSRLGYETFKVIEGWSNPKSKLQINRQVIVDRGDRSGYSGIFSVEGKSCINRCFYVELIRGRKEENEVLWTSNSIVVFCGTSGTYGTGSWPDGADLNLMPI

SEQ ID NO: 23014 - protein, 469 aa, Artificial Sequence
  derived and/or modified protein sequence (wt) from neuraminidase__InfluenzaA__AFN19572
MNPNQKIITIGSVSLTISTICFFMQIAILITTVTLHFKQYEFNSPPNNQVMLCEPTIIERNITEIVYLTNTTIEKEICPKPAEYRNWSKPQCDITGFAPFSKDNSIRISAGGDIWVTREPYVSCDPDKCYQFALGQGTTLNNVHSNNTVRDRTPYRTLLMNELGVPFHLGTKQVCIAWSSSSCHDGKAWLHVCITGDDKNATASFIYNGKLVDSVVSWSKEILRTQESECVCINGTCTVVMTDGSASGKADTKILFIEEGKIVHTSTLSGSAQHVEECSCYPRYPGVRCVCRDNWKGSNRPIVDINIKDHSIVSSYVCSGLVGDTPRKNDSSSSSHCLDPNNEEGGHGVKGWAFDDGNDVWMGRTINETSRLGYETFKVIEGWSNPKSKLQINRQVIVDRGDRSGYSGIFSVEGKSCINRCFYVELIRGRKEETEVLWTSNSIVVFCGTSGTYGTGSWPDGADLNLMPI

SEQ ID NO: 23015 - protein, 469 aa, Artificial Sequence
  derived and/or modified protein sequence (wt) from neuraminidase__InfluenzaA__AFN19574
MNPNQKIITIGSVSLTISTICFFMQIAILITTVTLHFKQYEFNSPPNNQVMLCEPTIIERNITEIVYLTNTTIEKEICPKLAEYRNWSKPQCDITGFAPFSKDNSIRLSAGGDIWVTREPYVSCDPNKCYQFALGQGTTLNNVHSNNTVRDRTPYRTLLMNELGVPFHLGTKQVCIAWSSSSCHDGKAWLHVCITGDDKNATASFIYNGRLVDSVVSWSKKILRTQESECVCINGTCTVVMTDGSASGKADTKILFIEEGKIVHTSTLSGSAQHVEECSCYPRYPGVRCVCRDNWKGSNRPIVDINMKDHSIVSSYVCSGLVGDTPRKNDSSSSSHCFDPNDEEGGHGVKGWAFDDGNDVWMGRTISEKSRLGYETFKVIEGWSNPKSKLQINRQVIVDRGDRSGYSGIFSVEGKSCINRCFYVELIRGSKEETEVLWTSNSIVVFCGTSGTYGTGSWPDGADINLMPI

SEQ ID NO: 23016 - protein, 469 aa, Artificial Sequence
  derived and/or modified protein sequence (wt) from neuraminidase__InfluenzaA__AFN19576
MNPNQKIITIGSVSLTISTICFFMQIAILITTVTLHFKQYEFNSPPNNQMMLCEPTIIERNITEIVYLTNTTIEKEICPKPAEYRNWSKPQCDITGFAPFSKDNSIRLSAGGDIWVTREPYVSCDPDKCYQFALGQGTTLNNVHSNNTVRDRTPYRTLLMNELGVPFHLGTKQVCIAWSSSSCHDGKAWLHVCITGDDKNATASFIYNGRLVDSVVSWSKEILRTQESECVCINGTCTVVMTDGSASGKADTKILFIEEGKIVHTSTLSGSAQHVEECSCYPRYPGVRCVCRDNWKGSNRPIVDINIKDHSIVSSYVCSGLVGDTPRKNDSSSSSHCLDPNNEEGGHGVKGWAFDDGNDVWMGRTINETSRLGYETFKVIEGWSNPKSKLQINRQVIVDRGDRSGYSGIFSVEGKSCINRCFYVELIRGRKEETEVLWTSNSIVVFCGTSGTYGTGSWPDGADLNLMPI

SEQ ID NO: 23017 - protein, 469 aa, Artificial Sequence; identical to SEQ ID NO: 22922
  derived and/or modified protein sequence (wt) from neuraminidase__InfluenzaA__AFN19578

SEQ ID NO: 23018 - protein, 469 aa, Artificial Sequence; identical to SEQ ID NO: 22922
  derived and/or modified protein sequence (wt) from neuraminidase__InfluenzaA__AFN19582

SEQ ID NO: 23019 - protein, 469 aa, Artificial Sequence; identical to SEQ ID NO: 22922
  derived and/or modified protein sequence (wt) from neuraminidase__InfluenzaA__AFN19584

SEQ ID NO: 23020 - protein, 469 aa, Artificial Sequence; identical to SEQ ID NO: 22922
  derived and/or modified protein sequence (wt) from neuraminidase__InfluenzaA__AFN19588

SEQ ID NO: 23021 - protein, 469 aa, Artificial Sequence; identical to SEQ ID NO: 22922
  derived and/or modified protein sequence (wt) from neuraminidase__InfluenzaA__AFN19590

SEQ ID NO: 23022 - protein, 469 aa, Artificial Sequence; identical to SEQ ID NO: 22958
  derived and/or modified protein sequence (wt) from neuraminidase__InfluenzaA__AFN19592

SEQ ID NO: 23023 - protein, 469 aa, Artificial Sequence; identical to SEQ ID NO: 22922
  derived and/or modified protein sequence (wt) from neuraminidase__InfluenzaA__AFN19594

SEQ ID NO: 23024 - protein, 469 aa, Artificial Sequence; identical to SEQ ID NO: 22930
  derived and/or modified protein sequence (wt) from neuraminidase__InfluenzaA__AFN19596

SEQ ID NO: 23025 - protein, 469 aa, Artificial Sequence; identical to SEQ ID NO: 22930
  derived and/or modified protein sequence (wt) from neuraminidase__InfluenzaA__AFN19600

SEQ ID NO: 23026 - protein, 469 aa, Artificial Sequence
  derived and/or modified protein sequence (wt) from neuraminidase__InfluenzaA__AFN19602
MNPNQKIITIGSVSLTLSTICFFMQIAILITTVTLHFKQYEFNSPPNNQVMLCEPTIIERNMTEIVYLTNTTIEKEICPKPAEYRNWSKPQCDITGFAPFSKDNSIRLSAGGDIWVTREPYVSCDPDKCYQFALGQGTTLNNVHSNNTVRDRTPYRTLLMNELGVPFHLGTKQVCIAWSSSSCHDGKAWLHVCITGDDKNATASFIYNGRLVDSVVSWSKEILRTQESECVCINGTCTVVMTDGSASGKADTKILFIEEGKIVHTSTLSGSAQHVEECSCYPRYPGVRCVCRDNWKGSNRPIVDINIKDHSIVSSYVCSGLVGDTPRKNDSSSSSHCLDPNNEEGGHGVKGWAFDDGNDVWMGRTINETSRLGYETFKVIEGWSNPKSKLQINRQVIVDRSDRSGYSGIFSVEGKSCINRCFYVELIRGRKEETEVLWTSNSIVVFCGTSGTYGTGSWPDGADLNLMPI

SEQ ID NO: 23027 - protein, 469 aa, Artificial Sequence; identical to SEQ ID NO: 22922
  derived and/or modified protein sequence (wt) from neuraminidase__InfluenzaA__AFN19604

SEQ ID NO: 23028 - protein, 469 aa, Artificial Sequence; identical to SEQ ID NO: 22922
  derived and/or modified protein sequence (wt) from neuraminidase__InfluenzaA__AFN19606

SEQ ID NO: 23029 - protein, 469 aa, Artificial Sequence; identical to SEQ ID NO: 22922
  derived and/or modified protein sequence (wt) from neuraminidase__InfluenzaA__AFN19608

SEQ ID NO: 23030 - protein, 469 aa, Artificial Sequence; identical to SEQ ID NO: 22922
  derived and/or modified protein sequence (wt) from neuraminidase__InfluenzaA__AFN19610

SEQ ID NO: 23031 - protein, 469 aa, Artificial Sequence; identical to SEQ ID NO: 22930
  derived and/or modified protein sequence (wt) from neuraminidase__InfluenzaA__AFN19612

SEQ ID NO: 23032 - protein, 469 aa, Artificial Sequence; identical to SEQ ID NO: 22146
  derived and/or modified protein sequence (wt) from neuraminidase__InfluenzaA__AFN19614

SEQ ID NO: 23033 - protein, 469 aa, Artificial Sequence
  derived and/or modified protein sequence (wt) from neuraminidase__InfluenzaA__AFN19618
MNPNQKIITIGSVSLTISTICFFMQIAILITTVTLHFKQYEFNSPPNNQVMLCEPTIIERNITEIVYLTNTTIEKEICPKPAEYRNWSKPQCGITGFAPFSKDNSIRLSAGGDIWVTREPYVSCDPDKCYQFALGQGTTLNNVHSNNTVRDRTPYRTLLMNELGVPFHLGTKQVCIAWSSSSCHDGKAWLHVCITGDDKNATASFIYNGRLVDSVVSWSNEILRTQESECVCINGTCTVVMTDGSASGKADTKILFIEEGKIVHTSTLSGSAQHVEECSCYPRYPGVRCVCRDNWKGSNRPIVDINIKDHSIVSSYVCSGLVGDTPRKNDSSSSSHCLDPNNEEGGHGVKGWAFDDGNDVWMGRTINETSRLGYETFKVIEGWSNPKSKLQINRQVIVDRGDRSGYSGIFSVEGKSCINRCFYVELIRGRKEETEVLWTSNSIVVFCGTSGTYGTGSWPDGADLNLMPI

SEQ ID NO: 23034 - protein, 469 aa, Artificial Sequence; identical to SEQ ID NO: 22922
  derived and/or modified protein sequence (wt) from neuraminidase__InfluenzaA__AFN19620

SEQ ID NO: 23035 - protein, 469 aa, Artificial Sequence; identical to SEQ ID NO: 22958
  derived and/or modified protein sequence (wt) from neuraminidase__InfluenzaA__AFN19624

SEQ ID NO: 23036 - protein, 469 aa, Artificial Sequence; identical to SEQ ID NO: 22922
  derived and/or modified protein sequence (wt) from neuraminidase__InfluenzaA__AFN19630

SEQ ID NO: 23037 - protein, 469 aa, Artificial Sequence
  derived and/or modified protein sequence (wt) from neuraminidase__InfluenzaA__AFN19632
MNPNQKIITIGSVSLTISTICFFMQIAILITTVTLHFKQYEFNSPPNNQVMLCEPTIIERNITEIVYLTNTTIEKEICPKPTEYRNWSKPQCDITGFAPFSKDNSIRLSAGGDIWVTREPYVSCDPDKCYQFALGQGTTLNNVHSNNTVRDRTPYRTLLMNELGVPFHLGTKQVCIAWSSSSCHDGKAWLHVCITGDDKNATASFIYNGRLVDSVVSWSKEILRTQESECVCINGTCTVVMTDGSASGKADTKILFIEEGKIVHTSTLSGSAQHVEECSCYPRYPGVRCVCRDNWKGSNRPIVDINIKDHSIVSSYVCSGLVGDTPRKNDSSSSSHCLDPNNEEGGHGVKGWAFDDGNDVWMGRTINETSRLGYETFKVIEGWSNPKSKLQINRQVIVDRGDRSGYSGIFSVEGKSCINRCFYVELIRGRKEETEVLWTSNSIVVFCGTSGTYGTGSWPDGADLNLMPI

SEQ ID NO: 23038 - protein, 469 aa, Artificial Sequence
  derived and/or modified protein sequence (wt) from neuraminidase__InfluenzaA__AFN19634
MNPNQKIITIGSVSLTISTICFFMQIAILITTVTLHFKQYEFNSPPNNQVMLCEPTIIERNITEIVYLTNTTIEKEICPKPAEYRNWSKPQCDITGFAPFSKDNSIRLSAGGDIWVTREPYVSCDPDKCYQFALGQGTTLNNVHSNNTVRDRTSYRTLLMNELGVPFHLGTKQVCIAWSSSSCHDGKAWLHVCITGDDKNATASFIYNGRLVDSVVSWSKEILRTQESECVCINGTCTVVMTDGSASGKADTKILFIEEGKIVHTSTLSGSAQHVEECSCYPRYPGVRCVCRDNWKGSNRPIVDINIKDHSIVSSYVCSGLVGDTPRKNDSSSSSHCLDPNNEEGGHGVKGWAFDDGNDVWMGRTINETSRLGYETFKVIEGWSNPKSKLQINRQVIVDRGDRSGYSGIFSVEGKSCINRCFYVELIRGRKEETEVLWTSNSIVVFCGTSGTYGTGSWPDGADLNLMPI

SEQ ID NO: 23039 - protein, 469 aa, Artificial Sequence
  derived and/or modified protein sequence (wt) from neuraminidase__InfluenzaA__AFN19636
MNPNQKIITIGSVSLTISTICFFMQIAILITTVTLHFKQYEFNSPPNNQVMLCEPTIIERNITEIVYLTNTIIEKEICPKPTEYRNWSKPQCDITGFAPFSKDNSIRLSAGGDIWVTREPYVSCDPDKCYQFALGQGTTLNNVHSNNTVRDRTPYRTLLMNELGVPFHLGTKQVCIAWSSSSCHDGKAWLHVCITGDDKNATASFIYNGRLVDSVVSWSKEILRTQESECVCINGTCTVVMTDGSASGKADTKILFIEEGKIVHTSTLSGSAQHVEECSCYPRYPGVRCVCRDNWKGSNRPIVDINIKDHSIVSSYVCSGLVGDTPRKNDSSSSSHCLDPNNEEGGHGVKGWAFDDGNDVWMGRTINETSRLGYETFKVIEGWSNPKSKLQINRQVIVDRGDRSGYSGIFSVEGKSCINRCFYVELIRGRKEETEVLWTSNSIVVFCGTSGTYGTGSWPDGADLNLMPI

SEQ ID NO: 23040 - protein, 469 aa, Artificial Sequence; identical to SEQ ID NO: 23039
  derived and/or modified protein sequence (wt) from neuraminidase__InfluenzaA__AFN19638

SEQ ID NO: 23041 - protein, 469 aa, Artificial Sequence; identical to SEQ ID NO: 22922
  derived and/or modified protein sequence (wt) from neuraminidase__InfluenzaA__AFN19640

SEQ ID NO: 23042 - protein, 469 aa, Artificial Sequence
  derived and/or modified protein sequence (wt) from neuraminidase__InfluenzaA__AFN19642
MNPNQKIITIGSVSLTISTICFFMQIAILITTVTLHFKQYEFNSPPNNQVMLCEPTIIERNMTEIVYLTNTTIEKEICPKPAEYRNWSKPQCDITGFAPFSKDNSIRLSAGGDIWVTREPYVSCDPDKCYQFALGQGTTLNNVHSNNTVSDRTPYRTLLMNELGVPFHLGTKQVCIAWSSSSCHDGKAWLHVCITGDDKNATASFIYNGRLVDSVVSWSKEILRTQESECVCINGTCTVVMTDGSASGKADTKILFIEEGKIVHTSTLSGSAQHVEECSCYPRYPGVRCVCRDNWKGSNRPIVDINIKDHSIVSSYVCSGLVGDTPRKNDSSSSSHCLDPNNEEGGHGVKGWAFDDGNDVWMGRTINETSRLGYETFKVIEGWSNPKSKLQINRQVIVDRSDRSGYSGIFSVEGKSCINRCFYVELIRGRKEETEVLWTSNSIVVFCGTSGTYGTGSWPDGADLNLMPI

SEQ ID NO: 23043 - protein, 469 aa, Artificial Sequence; identical to SEQ ID NO: 23039
  derived and/or modified protein sequence (wt) from neuraminidase__InfluenzaA__AFN19644

SEQ ID NO: 23044 - protein, 469 aa, Artificial Sequence
  derived and/or modified protein sequence (wt) from neuraminidase__InfluenzaA__AFN19646
MNPNQKIITIGSVSLTISTICFFIQIAILITTVTLHFKQYEFNSPPNNQVMLCEPTIIERNITEIVYLTNTTIEKEICPKPAEYRNWSKPQCDITGFAPFSKDNSIRLSAGGDIWVTREPYVSCDPDKCYQFALGQGTTLNNVHSNNTVRDRTPYRTLLMNELGVPFHLGTKQVCIAWSSSSCHDGKAWLHVCITGDDKNATASFIYNGRLVDSVVSWSKEILRTQESECVCINGTCTVVMTDGSASGKADTKILFIEEGKIVHTSTLSGSAQHVEECSCYPRYPGVRCVCRDNWKGSNRPIVDINIKDHSIVSSYVCSGLVGDTPRKNDSSSSSHCLDPNNEEGGHGVKGWAFDDGNDVWMGRTINETSRLGYETFKVIEGWSNPKSKLQINRQVIVNRSDRSGYSGIFSVEGKSCINRCFYVELIRGRKEETEVLWTSNSIVVFCGTSGTYGTGSWPDGADLNLMPI

SEQ ID NO: 23045 - protein, 469 aa, Artificial Sequence; identical to SEQ ID NO: 22922
  derived and/or modified protein sequence (wt) from neuraminidase__InfluenzaA__AFN19648

SEQ ID NO: 23046 - protein, 469 aa, Artificial Sequence; identical to SEQ ID NO: 22958
  derived and/or modified protein sequence (wt) from neuraminidase__InfluenzaA__AFN19650

SEQ ID NO: 23047 - protein, 469 aa, Artificial Sequence
  derived and/or modified protein sequence (wt) from neuraminidase__InfluenzaA__AFN19652
MNPNQKIITIGSVSLTISTICFFMQIAILITTVTLHFKQYEFNSPPNNQVMLCEPTIIERNITEVVYLTNTTIEKEICPKPAEYRNWSKPQCDITGFAPFSKDNSIRLSAGGDIWVTREPYVSCDPDKCYQFALGQGTTLNNVHSNNTVRDRTPYRTLLMNELGVPFHLGTKQVCIAWSSSSCHDGKAWLHVCITGDDKNATASFIYNGRLVDSVVSWSKEILRTQESECVCINGTCTVVMTDGSASGKADTKILFIEEGKIVHTSTLSGSAQHVEECSCYPRYPGVRCVCRDNWKGSNRPIVDINIKDHSIVSSYVCSGLVGDTPRKNDSSSSSHCLDPNNEEGGHGVKGWAFDDGNDVWMGRTINETSRLGYETFKVIEGWSNPKSKLQINRQVIVDRGDRSGYSGIFSVEGKSCINRCFYVELIRGRKEETEVLWTSNSIVVFCGTSGTYGTGSWPDGADLNLMPI

SEQ ID NO: 23048 - protein, 469 aa, Artificial Sequence
  derived and/or modified protein sequence (wt) from neuraminidase__InfluenzaA__AFN19654
MNPNQKIITIGSVSLTISTICFFMQIAILITTVTLHFKQYEFNSPPNNQVMLCEPTIIERNITEIVYLTNTTIEKETCPKPTEYRNWSKPQCDITGFAPFSKDNSIRLSAGGDIWVTREPYVSCDPDKCYQFALGQGTTLNNVHSNNTVRDRTPYRTLLMNELGVPFHLGTKQVCIAWSSSSCHDGKAWLHVCITGDDKNATASFIYNGRLVDSVVSWSKEILRTQESECVCINGTCTVVMTDGSASGKADTKILFIEEGKIVHTSTLSGSAQHVEECSCYPRYPGVRCVCRDNWKGSNRPIVDINIKDHSIVSSYVCSGLVGDTPRKNDSSSSSHCLDPNNEEGGHGVKGWAFDDGNDVWMGRTINETSRLGYETFKVIEGWSNPKSKLQINRQVIVDRGDRSGYSGIFSVEGKSCINRCFYVELIRGRKEETEVLWTSNSIVVFCGTSGTYGTGSWPDGADLNLMPI

SEQ ID NO: 23049 - protein, 469 aa, Artificial Sequence; identical to SEQ ID NO: 22922
  derived and/or modified protein sequence (wt) from neuraminidase__InfluenzaA__AFN19656

SEQ ID NO: 23050 - protein, 469 aa, Artificial Sequence; identical to SEQ ID NO: 22146
  derived and/or modified protein sequence (wt) from neuraminidase__InfluenzaA__AFN19658

SEQ ID NO: 23051 - protein, 469 aa, Artificial Sequence; identical to SEQ ID NO: 23039
  derived and/or modified protein sequence (wt) from neuraminidase__InfluenzaA__AFN19660

SEQ ID NO: 23052 - protein, 469 aa, Artificial Sequence; identical to SEQ ID NO: 22146
  derived and/or modified protein sequence (wt) from neuraminidase__InfluenzaA__AFN19662

SEQ ID NO: 23053 - protein, 469 aa, Artificial Sequence
  derived and/or modified protein sequence (wt) from neuraminidase__InfluenzaA__AFN19664
MNPNQKIITIGSVSLTISTICFFMQIAILITTVTLHFKQYEFNSPPNNQVMLCEPTIIERNITEIVYLTNNTIEKEICPKPAEYRNWSKPQCGITGFAPFSKDNSIRLSAGGDIWVTREPYVSCDPDKCYQFALGQGTTLNNVHSNNTVRDRTPYRTLLMNELGVPFHLGTKQVCIAWSSSSCHDGKAWLHVCITGDDKNATASFIYNGRLVDSVVSWSKEILRTQESECVCINGTCTVVMTDGSASGKADTKILFIEEGKIVHTSTLSGSAQHVEECSCYPRYPGVRCVCRDNWKGSNRPIVDINIKDHSIVSSYVCSGLVGDTPRKNDSSSSSHCLDPNNEEGGHGVKGWAFDDGNDVWMGRTINETSRLGYETFKVIEGWSNPKSKLQINRQVIVDRGDRSGYSGIFSVEGKSCINRCFYVELIRGRKEETEVLWTSNSIVVFCGTSGTYGTGSWPDGADLNLMPI

SEQ ID NO: 23054 - protein, 469 aa, Artificial Sequence
  derived and/or modified protein sequence (wt) from neuraminidase__InfluenzaA__AFN19666
MNPNQKIITIGSVSLTISTICFFMQIAILITTVTLHFKQYEFNSPPNNQVMLCEPTIIERNMTEIVYLTNTTIEKEICPKPAEYRNWSKPQCDITGFAPFSKDNSIRLSAGGDIWVTREPYVSCDPDKCYQFALGQGTTLNNVHSNNTVRDRTPYRTLLMNELGVPFHLGTKQVCIAWSSSSCHDGKAWLHVCITGDDKNATASFIYNGRLVDSVVSWSKEILRTQESECVCINGTCTVVMTDGSASGKADTKILFIEEGKIVHTSTLSGSAQHVEECSCYPRYPGVRCVCRDNWKGSNRPIVDINIKDHSIVSSYVCSGLVGDTPRKNDSSSSSHCLDPNNEEGGHGVKGWAFDDGNDVWMGRTINETSRLGYETFKVIEGWSNPKSKLQINRQVIVNRSDRSGYSGIFSVEGKSCINRCFYVELIRGRKEETEVLWTSNSIVVFCGTSGTYGTGSWPDGADLNLMPI

SEQ ID NO: 23055 - protein, 469 aa, Artificial Sequence
  derived and/or modified protein sequence (wt) from neuraminidase__InfluenzaA__AFN19668
MNPNQKIITIGSVSLTISTICFFMQIAILITTVTLHFKQYEFNSPPNNQVMLCEPTIIERNMTEIVYLTNTTIEKEICPKPAEYRNWSKPQCDITGFAPFSKDNSIRLSAGGDIWVTREPYVSCDPDKCYQFALGQGTTLNNEHSNNTVRDRTPYRTLLMNELGVPFHLGTKQVCIAWSSSSCHDGKAWLHVCITGDDKNATASFIYNGRLVDSVVSWSKEILRTQESECVCINGTCTVVMTDGSASGKADTKILFIEEGKIVHTSTLSGSAQHVEECSCYPRYPGVRCVCRDNWKGSNRPIVDINIKDHSIVSSYVCSGLVGDTPRKNDSSSSSHCLDPNNEEGGHGVKGWAFDDGNDVWMGRTINETSRLGYETFKVIEGWSNPKSKLQINRQVIVDRSDRSGYSGIFSVEGKSCINRCFYVELIRGRKEETEVLWTSNSIVVFCGTSGTYGTGSWPDGADLNLMPI

SEQ ID NO: 23056 - protein, 469 aa, Artificial Sequence; identical to SEQ ID NO: 22958
  derived and/or modified protein sequence (wt) from neuraminidase__InfluenzaA__AFN19670

SEQ ID NO: 23057 - protein, 469 aa, Artificial Sequence; identical to SEQ ID NO: 22146
  derived and/or modified protein sequence (wt) from neuraminidase__InfluenzaA__AFN19673

SEQ ID NO: 23058 - protein, 469 aa, Artificial Sequence; identical to SEQ ID NO: 22922
  derived and/or modified protein sequence (wt) from neuraminidase__InfluenzaA__AFN19675

SEQ ID NO: 23059 - protein, 469 aa, Artificial Sequence
  derived and/or modified protein sequence (wt) from neuraminidase__InfluenzaA__AFN19677
MNPNQKIITIGSVSLTISIICFFMQIAILITTVTLHFKQYEFNSPPNNQVMLCEPTIIERNITEIVYLTNTTIEKEICPKPAEYRNWSKPQCDITGFAPFSKDNSIRLSAGGDIWVTREPYVSCDPDKCYQFALGQGTTLNNVHSNNTVRDRTPYRTLLMNELGVPFHLGTKQVCIAWSSSSCHDGKAWLHVCITGDDKNATASFIYNGRLVDSVVSWSKEILRTQESECVCINGTCTVVMTDGSASGKADTKILFIEEGKIVHTSTLSGSAQHVEECSCYPRYPGVRCVCRDNWKGSNRPIVDINIKDHSIVSSYVCSGLVGDTPRKNDSSSSSHCLDPNNEEGGHGVKGWAFDDGNDVWMGRTINETSRLGYETFKVIEGWSNPKSKLQINRQVIVDRGDRSGYSGIFSVEGKSCINRCFYVELIRGRKEETEVLWTSNSIVVFCGTSGTYGTGSWPDGADLNLMPI

SEQ ID NO: 23060 - protein, 469 aa, Artificial Sequence; identical to SEQ ID NO: 22958
  derived and/or modified protein sequence (wt) from neuraminidase__InfluenzaA__AFN19683

SEQ ID NO: 23061 - protein, 469 aa, Artificial Sequence; identical to SEQ ID NO: 22922
  derived and/or modified protein sequence (wt) from neuraminidase__InfluenzaA__AFN19685

SEQ ID NO: 23062 - protein, 469 aa, Artificial Sequence; identical to SEQ ID NO: 22922
  derived and/or modified protein sequence (wt) from neuraminidase__InfluenzaA__AFN19687

SEQ ID NO: 23063 - protein, 469 aa, Artificial Sequence; identical to SEQ ID NO: 22922
  derived and/or modified protein sequence (wt) from neuraminidase__InfluenzaA__AFN19689

SEQ ID NO: 23064 - protein, 469 aa, Artificial Sequence; identical to SEQ ID NO: 22146
  derived and/or modified protein sequence (wt) from neuraminidase__InfluenzaA__AFN19691

SEQ ID NO: 23065 - protein, 469 aa, Artificial Sequence
  derived and/or modified protein sequence (wt) from neuraminidase__InfluenzaA__AFN19693
MNPNQKIITIGSVSLTISTICFFMQIAILITTVTLHFKQYEFNSPPNNQVMLCEPTIIERNITEIVYLTNTTIEKEICPKLAEYRNWSKPQCDITGFAPFSKDNSIRLSAGGDIWVTREPYVSCDPDKCYQFALGQGTTLNNVHSNNTVRDRTPYRTLLMNELGVPFHLGTKQVCIAWSSSSCHDGKAWLHVCITGDDKNATASFIYNGRLVDSVVSWSKDILRTQESECVCINGTCAVVMTDGSASGKADTKILFIEEGKIVHTSTLSGSAQHVEECSCYPRYPGVRCVCRDNWKGSNRPIVDINIKDHSIVSSYVCSGLVGDTPRKNDSSSSSNCLDPNNEEGGHGVKGWAFDDGNDVWMGRTINETSRLGYETFKVIEGWSNPKSKLQINRQVIVDRGNRSGYSGIFSVEGKNCINRCFYVELIRGRKEETEVLWTSNSIVVFCGTSGTYGTGSWPDGADLNLMPI

SEQ ID NO: 23066 - protein, 469 aa, Artificial Sequence
  derived and/or modified protein sequence (wt) from neuraminidase__InfluenzaA__AFN19697
MNPNQKIITIGSVSLTISTICFFMQIAILITTVTLHFKQYEFNSPPNNQVMLCEPTIIERNITEIVYLTNTTIEKEICPKPAEYRNWSKPQCGITGFAPFSKDNSIRLSAGGDIWVTREPYVSCDPDKCYQFALGQGTTLNNVHSNNTVRDRTPYRTLLMNELGVPFHLGTKQVCIAWSSSSCHDGKAWLHVCITGDDKNATASFIYNGRLVDSVVSWSKETLRTQESECVCINGTCTVVMTDGSASGKADTKILFIEEGKIVHTSTLSGSAQHVEECSCYPRYPGVRCVCRDNWKGSNRPIVDINIKDHSIVSSYVCSGLVGDTPRKNDSSSSSHCLDPNNEEGGHGVKGWAFDDGNDVWMGRTINETSRLGYETFKVIEGWSNPKSKLQINRQVIVDRGDRSGYSGIFSVEGKSCINRCFYVELIRGRKEETEVLWTSNSIVVFCGTSGTYGTGSWPDGADLNLMPI

SEQ ID NO: 23067 - protein, 469 aa, Artificial Sequence; identical to SEQ ID NO: 22922
  derived and/or modified protein sequence (wt) from neuraminidase__InfluenzaA__AFN19699

SEQ ID NO: 23068 - protein, 469 aa, Artificial Sequence; identical to SEQ ID NO: 22958
  derived and/or modified protein sequence (wt) from neuraminidase__InfluenzaA__AFN19701

SEQ ID NO: 23069 - protein, 469 aa, Artificial Sequence
  derived and/or modified protein sequence (wt) from neuraminidase__InfluenzaA__AFN19703
MNPNQKIITIGSVSLTISTICFFMQIAILITTVTLHFKQYEFNSPPNNQVMLCEPTIIERNITEIVYLTNTTIEKEICPKPAEYRNWSKPQCGITGFAPFSKDNSIRLSAGGDIWVTREPYVSCDPDKCYQFALGQGTTLDNVHSNNTVRDRTPYRTLLMNELGVPFHLGTKQVCIAWSSSSCHDGKAWLHVCITGDDKNATASFIYNGRLVDSVVSWSKEILRTQESECVCINGTCTVVMTDGSASGKADTKILFIEEGKIVHTSTLSGSAQHVEECSCYPRYPGVRCVCRDNWKGSNRPIVDINIKDHSIVSSYVCSGLVGDTPRKNDSSSSSHCLDPNNEEGGHGVKGWAFDDGNDVWMGRTINETSRLGYETFKVIEGWSNPKSKLQINRQVIVDRGDRSGYSGIFSVEGKSCINRCFYVELIRGRKEETEVLWTSNSIVVFCGTSGTYGTGSWPDGADLNLMPI

SEQ ID NO: 23070 - protein, 469 aa, Artificial Sequence; identical to SEQ ID NO: 20257
  derived and/or modified protein sequence (wt) from neuraminidase__InfluenzaA__AFN19711

SEQ ID NO: 23071 - protein, 469 aa, Artificial Sequence
  derived and/or modified protein sequence (wt) from neuraminidase__InfluenzaA__AFN19721
MNPNQKIITIGSVCMTIGMANLILQIGNIISIWISHSIQLGNQSQIETCNQSVITYENNTWVNQTYVNISNTNFAAGQSVVSVKLAGNSSLCPVSGWAIYSKDNSIRIGSKGDVFVIREPFISCSPMECRTFFLTQGALLNDKHSNGTIKDRSPYRTLMSCPIGEVPSPYNSRFESVAWSASACHDGINWLTIGISGPDNGAVAVLKYNGIITDTIKSWRNNILRTQESECACVNGSCFTIMTDGPSDGQASYKIFRIEKGKIVKSVEMNAPNYHYEECSCYPDSSEITCVCRDNWHGSNRPWVSFNQNLEYQIGYICSGIFGDNPRPNDKTGSCGPVSSNGANGVKGFSFKYGNGVWIGRTKSISSRKGFEMIWDPNGWTGTDNNFSIKQDIVGINEWSGYSGSFVQHPELTGLDCIRPCFWVELIRGRPKENTIWTSGSSISFCGVNSDTVGWSWPDGAELPFTIDK

SEQ ID NO: 23072 - protein, 469 aa, Artificial Sequence; identical to SEQ ID NO: 21078
  derived and/or modified protein sequence (wt) from neuraminidase__InfluenzaA__AFN19731

SEQ ID NO: 23073 - protein, 469 aa, Artificial Sequence; identical to SEQ ID NO: 20257
  derived and/or modified protein sequence (wt) from neuraminidase__InfluenzaA__AFN19737

SEQ ID NO: 23074 - protein, 469 aa, Artificial Sequence
  derived and/or modified protein sequence (wt) from neuraminidase__InfluenzaA__AFN19747
MNPNQKIITIGSVCMTIGMANLILQIGNIISIWISHSIQLGNQNQIETCNQSVITHENNTWVNQTYVNISNTNFAAGQSVVSVKLAGNSSLCPVSGWAIYSKDNSIRIGSKGDVFVIREPFISCSPLECRTFFLTQGALLNDKHSNGTIKDRSPYRTLMSCPIGEVPSPYNSRFESVAWSASACHDGINWLTIGISGPDNGAVAVLKYNGIITDTIKSWRNNILRTQESECACVNGSCFTVMTDGPSDGQASYKIFRIEKGKIVKSVEMNAPNYHYEECSCYPDSSEITCVCRDNWHGANRPWVSFNQNLEYQIGYICSGIFGDNPRPNDKTGSCGPVSSNGANGVKGFSFKYGNGVWIGRTKSISSRNGFEMIWDPNGWTGTDNNFSIKQDIVGINEWSGYSGSFVQHPELTGLDCIRPCFWVELIRGRPKENTIWTSGSSISFCGVNSDTVGWSWPDGAELPFTIDK

SEQ ID NO: 23075 - protein, 469 aa, Artificial Sequence; identical to SEQ ID NO: 20257
  derived and/or modified protein sequence (wt) from neuraminidase__InfluenzaA__AFN19749

SEQ ID NO: 23076 - protein, 469 aa, Artificial Sequence; identical to SEQ ID NO: 20257
  derived and/or modified protein sequence (wt) from neuraminidase__InfluenzaA__AFN19759

SEQ ID NO: 23077 - protein, 469 aa, Artificial Sequence
  derived and/or modified protein sequence (wt) from neuraminidase__InfluenzaA__AFN19769
MNPNQKIITIGSVCMTIGMANLILQIGNIISIWISHSIQLGNQSQIETCNQSVITYENNTWVNQTYVNISNTNFAAGQSVVSVKLAGNSSLCPVSGWAIYSKDNSIRIGSKGDVFVIREPFISCSPLECRTFFLTQGALLNDKHSNGTIKDRSPYRTLMSCPIGEVPSPYNSRFESVAWSASACHDGINWLTIGISGPDNRAVAVLKYNGIITDTIKSWRNNILRTQESECACVNGSCFTIMTDGPSDGQASYKIFRIEKGKIVKSVEMNAPNYHYEECSCYPDSSEITCVCRDNWHGSNRPWVSFNQNLEYQIGYICSGIFGDNPRPNDKTGSCGPVSSNGANGVKGFSFKYGNGVWIGRTKSISSRKGFEMIWDPNGWTGTDNNFSIKQDIVGINEWSGYSGSFVQHPELTGLDCIRPCFWVELIRGRPKENTIWTSGSSISFCGVNSDTVGWSWPDGAELPFTIDK

SEQ ID NO: 23078 - protein, 469 aa, Artificial Sequence; identical to SEQ ID NO: 20257
  derived and/or modified protein sequence (wt) from neuraminidase__InfluenzaA__AFN19783

SEQ ID NO: 23079 - protein, 469 aa, Artificial Sequence; identical to SEQ ID NO: 20958
  derived and/or modified protein sequence (wt) from neuraminidase__InfluenzaA__AFN19793

SEQ ID NO: 23080 - protein, 469 aa, Artificial Sequence; identical to SEQ ID NO: 20257
  derived and/or modified protein sequence (wt) from neuraminidase__InfluenzaA__AFN19807

SEQ ID NO: 23081 - protein, 469 aa, Artificial Sequence
  derived and/or modified protein sequence (wt) from neuraminidase__InfluenzaA__AFN19809
MNPNQKIITIGSVCMIIGMANLMLQIGNIISIWISHSIQLGNQNQIETCNQSVITYENNTWVNQTYVNISNTNFAAGQSVISVKLAGNSSLCPVSGWAIYSKDNSIRIGSKGDVFVIREPFISCSPLECRTFFLTQGALLNDKHSNGTIKDRSPYRTLMSCPIGEVPSPYNSRFESVAWSASACHDGINWLTIGISGPDNGAVAVLKYNGIITDTIKSWRNNILRTQESECACVNGSCFTVMTDGPSDGQASYKIFRIEKGKIVKSVEMNAPNYHYEECSCYPDSSEITCVCRDNWHGSNRPWVSFNQNLEYQIGYICSGIFGDNPRPNDKTGSCGPVSTNGANGVKGFSFKYGNGVWIGRTKSISSRNGFEMIWDPNGWTGTDNKFSIKQDIVGINEWSGYSGSFVQHPELTGLDCIRPCFWVELIRGRPKENTIWTSGSSISFCGVNSDTVGWSWPDGAELPFTIDK

SEQ ID NO: 23082 - protein, 469 aa, Artificial Sequence; identical to SEQ ID NO: 21080
  derived and/or modified protein sequence (wt) from neuraminidase__InfluenzaA__AFN19815

SEQ ID NO: 23083 - protein, 469 aa, Artificial Sequence
  derived and/or modified protein sequence (wt) from neuraminidase__InfluenzaA__AFN19833
MNPNQKIITIGSVCMTIGMANLILQIGNIISIWISHSIQLGNQSQIETCNQSVITYENNTWVNQTYVNISNTNFAAGQSVVSVKLAGNSSLCPVSGWAIYSKDNSIRIGSKGDVFVIREPFISCSPLECRTFFLTQGALLNDKHSNGTIKDRSPYRTLMSCPIGEVPSPYNSRFESVAWSASACHDGINWLTIGISGPDNGAVAVLKYNGIITDTIKSWKNNILRTQESECACVNGSCFTIMTDGPSDGQASYKIFRIEKGKIVKSVEMNAPNYHYEECSCYPDSSEITCVCRDNWHGSNRPWVSFNQNLEYQIGYICSGIFGDNPRPNDKTGSCGPVSSNGANGVKGFSFKYGNGVWIGRTKSISSRKGFEMIWDPNGWTGTDNNFSIKQDIVGINEWSGYSGSFVQHPELTGLDCIRPCFWVELIRGRPKENTIWTSGSSISFCGVNSDTVGWSWPDGAELPFTIDK

SEQ ID NO: 23084 - protein, 469 aa, Artificial Sequence; identical to SEQ ID NO: 20716
  derived and/or modified protein sequence (wt) from neuraminidase__InfluenzaA__AFN19851

SEQ ID NO: 23085 - protein, 469 aa, Artificial Sequence; identical to SEQ ID NO: 20257
  derived and/or modified protein sequence (wt) from neuraminidase__InfluenzaA__AFN19857

SEQ ID NO: 23086 - protein, 469 aa, Artificial Sequence
  derived and/or modified protein sequence (wt) from neuraminidase__InfluenzaA__AFN19867
MNPNQKIITIGSVCMTIGMANLILQIGNIISIWISHSIQIGNQNQIETCNQSVITYENNTWVNQTYVNISNTNFAAGQSVVSVKLAGNSSLCPVSGWAIYSKDNSIRIGSKGDVFVIREPFISCSPLECRTFFLTQGALLNDKHSNGTIKDRSPYRTLMSCPIGEVPSPYNSRFESVAWSASACHDGINWLTIGISGPDNGAVAVLKYNGIITDTIKSWRNNILRTQESECACVNGSCFTIITDGPSDGQASYKIFRIEKGKIVKSVEMNAPNYHYEECSCYPDSSEITCVCRDNWHGSNRPWVSFNQNLEYQIGYICSGIFGDNPRPNDKTGSCGPVSSNGANGVKGFSFKYGNGVWIGRTKSISSRKGFEMIWDPNGWTGTDNNFSIKQDIVGINEWSGYSGSFVQHPELTGLDCIRPCFWVELIRGRPKENTIWTSGSSISFCGVNSDTVGWSWPDGAELPFTIDK

SEQ ID NO: 23087 - protein, 469 aa, Artificial Sequence; identical to SEQ ID NO: 20709
  derived and/or modified protein sequence (wt) from neuraminidase__InfluenzaA__AFN19877

SEQ ID NO: 23088 - protein, 469 aa, Artificial Sequence; identical to SEQ ID NO: 20257
  derived and/or modified protein sequence (wt) from neuraminidase__InfluenzaA__AFN19887

SEQ ID NO: 23089 - protein, 469 aa, Artificial Sequence
  derived and/or modified protein sequence (wt) from neuraminidase__InfluenzaA__AFN19897
MNPNQKIITIGSVCMTIGMANLILQIGNIISIWISHSIQLGNQSQIETCNQSVITYENNTWVNQTYVNISNTNFAAGQSVVSVKLAGNSSLCPVSGWAIYSKDNSIRIGSKGDVFVIREPFISCSPLECRTFFLTQGALLNDKHSNGTIKDRSPYRTLMSCPIGEVPSPCNSRFESVAWSASACHDGINWLTIGISGPDNGAVAVLKYNGIITDTIKSWRNNILRTQESECACVNGSCFTIMTDGPSDGQASYKIFRIEKGKIVKSVEMNAPNYHYEECSCYPDSSEITCVCRDNWHGSNRPWVSFNQNLEYQIGYICSGIFGDNPRPNDKTGSCGPVSSNGANGVKGFSFKYGNGVWIGRTKSISSRKGFEMIWDPNGWTGTDNNFSIKQDIVGINEWSGYSGSFVQHPELTGLDCIRPCFWVELIRGRPKENTIWTSGSSISFCGVNSDTVGWSWPDGAELPFTIDK

SEQ ID NO: 23090 - protein, 469 aa, Artificial Sequence; identical to SEQ ID NO: 20257
  derived and/or modified protein sequence (wt) from neuraminidase__InfluenzaA__AFN19907

SEQ ID NO: 23091 - protein, 469 aa, Artificial Sequence; identical to SEQ ID NO: 20716
  derived and/or modified protein sequence (wt) from neuraminidase__InfluenzaA__AFN19917

SEQ ID NO: 23092 - protein, 469 aa, Artificial Sequence
  derived and/or modified protein sequence (wt) from neuraminidase__InfluenzaA__AFN19923
MNPNQKIITIGSVCMTIGMANLILQIGNIISIWISHSIQLGNQSQIETCNQNVITYENNTWVNQTYVNISNTNFAAGQSVVSVKLAGNSSLCPVSGWAIYSKDNSIRIGSKGDVFVIREPFISCSPLECRTFFLTQGALLNDKHSNGTIKDRSPYRTLMSCPIGEVPSPYNSRFESVAWSASACHDGINWLTIGISGPDNGAVAVLKYNGIITDTIKSWRNNILRTQESECACVNGSCFTIMTDGPSDGQASYKIFRIEKGKIVKSVEMNAPNYHYEECSCYPDSSEITCVCRDNWHGSNRPWVSFNQNLEYQIGYICSGIFGDNPRPNDKTGSCGPVSSNGANGVKGFSFKYGNGVWIGRTKSISSRKGFEMIWDPNGWTGTDNNFSIKQDIVGINEWSGYSGSFVQHPELTGLDCIRPCFWVELIRGRPKENTIWTSGSSISFCGVNSDTVGWSWPDGAELPFTIDK

SEQ ID NO: 23093 - protein, 469 aa, Artificial Sequence; identical to SEQ ID NO: 20257
  derived and/or modified protein sequence (wt) from neuraminidase__InfluenzaA__AFN19933

SEQ ID NO: 23094 - protein, 469 aa, Artificial Sequence; identical to SEQ ID NO: 20716
  derived and/or modified protein sequence (wt) from neuraminidase__InfluenzaA__AFN19943

SEQ ID NO: 23095 - protein, 469 aa, Artificial Sequence
  derived and/or modified protein sequence (wt) from neuraminidase__InfluenzaA__AFN19953
MNPNQKIITIGSVCMTIGMANLILQIGNIISIWISHSIQLGNQSQIETCNQRVITYENNTWVNQTYVNISNTNFAAGQSVVSVKLAGNSSLCPVSGWAIYSKDNSIRIGSKGDVFVIREPFISCSPLECRTFFLTQGALLNDKHSNGTIKDRSPYRTLMSCPIGEVPSPYNSRFESVAWSASACHDGINWLTIGISGPDNGAVAVLKYNGIITDTIKSWRNNILRTQESECACVNGSCFTIMTDGPSDGQASYKIFRIEKGKIVKSVEMNAPNYHYEECSCYPDSSEITCVCRDNWHGSNRPWVSFNQNLEYQIGYICSGIFGDNPRPNDKTGSCGPVSSNGANGVKGFSFKYGNGVWIGRTKSISSRKGFEMIWDPNGWTGTDNNFSIKQDIVEINEWSGYSGSFVQHPELTGLDCIRPCFWVELIRGRPKENTIWTSGSSISFCGVNSDTVGWSWPDGAELPFTIDK

SEQ ID NO: 23096 - protein, 469 aa, Artificial Sequence
  derived and/or modified protein sequence (wt) from neuraminidase__InfluenzaA__AFN19967
MNPNQKIITIGSVCMTIGMANLILQIGNIISIWISHSIQLGNQSQIETCNQSVITYENNTWVNQTYVNISNTNFAAGQSVVSVKLAGNSSLCPVSGWAIYSKDNSIRIGSKGDVFVIREPFISCSPLECRTFFLTQGALLNDKHSNGTIKDRSPYRTLMSCPIGEVPSPYNSRFESVAWSASACHDGINWLTIGISGPDNGAVAVLKYNGIITDTIKSWRSNILRTQESECACVNGSCFTIMTDGPSDGQASYKIFRIEKGKIVKSVEMNAPNYHYEECSCYPDSSEITCVCRDNWHGSNRPWVSFNQNLEYQIGYICSGIFGDNPRPNDKTGSCGPVSSNGANGVKGFSFKYGNGVWIGRTKSISSRKGFEMIWDPNGWTGTDNNFSIKQDIVGINEWSGYSGSFVQHPELTGLDCIRPCFWVELIRGRPKENTIWTSGSSISFCGVNSDTVGWSWPDGAELPFTIDK

SEQ ID NO: 23097 - protein, 469 aa, Artificial Sequence
  derived and/or modified protein sequence (wt) from neuraminidase__InfluenzaA__AFN19973
MNPNQKIITIGSVCMTIGMANLILQIGNIISIWISHSIQLGNQSQIETCNQSVITYENNTWVNQTYVNISNTNFAAGQSVVSVKLAGNSSLCPVSGWAIYSKDNSIRIGSKGDVFVIREPFISCSPLECRTFFLTQGALLNDKHSNGTIKDRSPYRTLMSCPIGEVPSPYNSRFESVAWSASACHDGINWLTIGISGPDNGAVAVLKYNGIITDTIKSWRNNILRTQESECACVNGSCFTIMTDGSSDGQASYKIFRIEKGKIVKSVEMNAPNYHYEECSCYPDSSEITCVCRDNWHGSNRPWVSFNQNLEYQIGYICSGIFGDNPRPNDKTGSCGPVSSNGANGVKGFSFKYGNGVWIGRTKSISSRKGFEMIWDPNGWTGTDNNFSIKQDIVGINEWSGYSGSFVQHPELTGLDCIRPCFWVELIRGRPKENTIWTSGSSISFCGVNSDTVGWSWPDGAELPFTIDK

SEQ ID NO: 23098 - protein, 469 aa, Artificial Sequence; identical to SEQ ID NO: 20257
  derived and/or modified protein sequence (wt) from neuraminidase__InfluenzaA__AFN19979

SEQ ID NO: 23099 - protein, 469 aa, Artificial Sequence
  derived and/or modified protein sequence (wt) from neuraminidase__InfluenzaA__AFN19985
MNPNQKIITIGSVCMTIGMANLILQIGNIISIWISHSIQLGNQSQIETCNQSVITYENNTWVNQTYVNISNTNFAAGQSVVSVKLAGNSSLCPVSGWAIYSKDNSIRIGSKGDVFVIREPFISCSPLECRTFFLTQGALLNDKHSNGTIKDRSPYRTLMSCPIGEVPSPYNSRFESVAWSASACHDGINWLTIGISGPDNGAVAVLKYNGIITDTIKSWRNNILRTQESECACVNGSCFTIMTDGPSDGQASYKIFRIEKGKIVKSVEMNAPNYHYEECSCYPDSSEITCVCRDNWHGSNRPWVSFNQNLEYQIGYICSGIFGDNPRPNDKTGSCGPVSSNGANGVKGFSFKYGNGVWIGRTKSVSSRKGFEMIWDPNGWTGTDNNFSIKQDIVGINEWSGYSGSFVQHPELTGLDCIRPCFWVELIRGRPKENTIWTSGSSISFCGVNSDTVGWSWPDGAELPFTIDK

SEQ ID NO: 23100 - protein, 469 aa, Artificial Sequence
  derived and/or modified protein sequence (wt) from neuraminidase__InfluenzaA__AFN19995
MNPNQKIITIGSVCMTIGMANLILQIGNIISIWISHSIQLGNQSQTETCNQSVITYENNTWVNQTYVNISNTNFAAGQSVVSVKLAGNSSLCPVSGWAIYSKDNSIRIGSKGDVFVIREPFISCSPLECRTFFLTQGALLNDKHSNGTIKDRSPYRTLMSCPIGEVPSPYNSRFESVAWSASACHDGINWLTIGISGPDNGAVAVLKYNGIITDTIKSWRNNILRTQESECACVNGSCFTIMTDGPSDGQASYKIFRIEKGKIVKSVEMNAPNYHYEECSCYPDSSEITCVCRDNWHGSNRPWVSFNQNLEYQIGYICSGIFGDNPRPNDKTGSCGPVSSNGANGVKGFSFKYGNGVWIGRTKSISSRKGFEMIWDPNGWTGTDNNFSIKQDIVGINEWSGYSGSFVQHPELTGLDCIRPCFWVELIRGRPKENTIWTSGSSISFCGVNSDTVGWSWPDGAELPFTIDK

SEQ ID NO: 23101 - protein, 469 aa, Artificial Sequence; identical to SEQ ID NO: 20257
  derived and/or modified protein sequence (wt) from neuraminidase__InfluenzaA__AFN20001

SEQ ID NO: 23102 - protein, 469 aa, Artificial Sequence
  derived and/or modified protein sequence (wt) from neuraminidase__InfluenzaA__AFN20013
MNPNQKIITIGSVCMTIGMANLILQIGNIISIWISHSIQLGNQSQIETCNQSVITYENNTWVNQTYVNISNTNFAAGQSVVSVKLAGNSSLCPVSGWAIYSKDNSIRIGSKGDVFVIREPFISCSPLECRTFFLTQGALLNDKHSNGTIKDRSPYRTLMSCPIGEVPSPYNSRFESVAWSASACHDGINWLTIGISGPDNGAVAVLKYNGIITDTIKSWRNNILRTQESECACVNGSCFTIMTDGPSDGQASYKIFRIEKGKIVKSVEMNAPNYHYEECSCYPDSSEITCVCRDNWHGSNRPWVSFNQNLEYQIGYICSGIFGDNPRPNDKTGSCDPVSSNGANGVKGFSFKYGNGVWIGRTKSISSRKGFEMIWDPNGWTGTDNNFSIKQDIVGINEWSGYSGSFVQHPELTGLDCIRPCFWVELIRGRPKENTIWTSGSSISFCGVNSDTVGWSWPDGAELPFTIDK

SEQ ID NO: 23103 - protein, 469 aa, Artificial Sequence
  derived and/or modified protein sequence (wt) from neuraminidase__InfluenzaA__AFN20020
MNPNQKIITIGSVCMTIGMANLILQIGNIISIWISHSIQLGNQSQIETCNQSVITYENNTWVNQTYVNISNTNFAAGQSVVSVKLAGNSSLCPVSGWAIYSKDNSIRIGSKGDVFVIREPFISCSPLECRTFFLTQGALLNDKHSNGTIKDRSPYRTLMSCPIGEVPSPYNSRFESVAWSASACHDGINWLTIGISGPDNGAVAVLKYNGIITDTIKSWRNNILRTQESECACVNGSCFTIMTDGPSDGQASYKIFRIEKGKIVKSVEMNAPNYHYEECSCYPDSSEITCVCRDNWHGSNRPWVSFNQNLEYQIGYICSGIFGDNPRPNDKTGSCGPVSSNGANGVKGFSFKYGNGVWIGRTKSISSRKGFEMIWDPNGWTGTDNNFSIKQDIVGLNEWSGYSGSFVQHPELTGLDCIRPCFWVELIRGRPKENTIWTSGSSISFCGVNSDTVGWSWPDGAELPFTIDK

SEQ ID NO: 23104 - protein, 469 aa, Artificial Sequence; identical to SEQ ID NO: 20257
  derived and/or modified protein sequence (wt) from neuraminidase__InfluenzaA__AFN20022

SEQ ID NO: 23105 - protein, 469 aa, Artificial Sequence
  derived and/or modified protein sequence (wt) from neuraminidase__InfluenzaA__AFN20035
MNPNQKIITIGSVCMTIGIANLILQIGNIISIWISHSIQLGNQSQIETCNQSVITYENNTWVNQTYVNISNTNFAAGQSVVSVKLAGNSSLCPVSGWAIYSKDNSIRIGSKGDVFVIREPFISCSPLECRTFFLTQGALLNDKHSNGTIKDRSPYRTLMSCPIGEVPSPYNSRFESVAWSASACHDGINWLTIGISGPDNGAVAVLKYNGIITDTIKSWRNNILRTQESECACVNGSCFTIMTDGPSDGQASYKIFRIEKGKIVKSVEMNAPNYHYEECSCYPDSSEITCVCRDNWHGSNRPWVSFNQNLEYQIGYICSGIFGDNPRPNDKTGSCGPVSSNGANGVKGFSFKYGNGVWIGRTKSISSRKGFEMIWDPNGWTGTDNNFSIKQDIVGINEWSGYSGSFVQHPELTGLDCIRPCFWVELIRGRPKENTIWTSGSSISFCGVNSDTVGWSWPDGAELPFTIDK

SEQ ID NO: 23106 - protein, 469 aa, Artificial Sequence; identical to SEQ ID NO: 20257
  derived and/or modified protein sequence (wt) from neuraminidase__InfluenzaA__AFN20041

SEQ ID NO: 23107 - protein, 469 aa, Artificial Sequence; identical to SEQ ID NO: 20257
  derived and/or modified protein sequence (wt) from neuraminidase__InfluenzaA__AFN20047

SEQ ID NO: 23108 - protein, 469 aa, Artificial Sequence; identical to SEQ ID NO: 21080
  derived and/or modified protein sequence (wt) from neuraminidase__InfluenzaA__AFN20063

SEQ ID NO: 23109 - protein, 469 aa, Artificial Sequence
  derived and/or modified protein sequence (wt) from neuraminidase__InfluenzaA__AFN20077
MNPNQKIITIGSVCMTIGMANLILQIGNIISIWISHSIQLGNQSQIETCNQSVITYENNTWVNQTYVNISNTNFAAGQSVVSVKLAGNSSLCPVSGWAIYSKDNSIRIGSKGDVFVIREPFISCSPLECRTFFLTQGALLNDKHSNGTIKDRSPYRTLMSCPIGEVPSPYNSRFESVAWSASACHDGINWLTIGISGPDNGAVAVLKYNGIITDTIKSWRNNILRTQESECACVNGSCFTIMTDGPSDGQASYKIFKIEKGKIVKSVEMNAPNYHYEECSCYPDSSEITCVCRDNWHGSNRPWVSFNQNLEYQIGYICSGIFGDNPRPNDKTGSCGPVSSNGANGVKGFSFKYGNGVWIGRTKSISSRKGFEMIWDPNGWTGTDNNFSIKQDIVGINEWSGYSGSFVQHPELTGLDCIRPCFWVELIRGRPKENTIWTSGSSISFCGVNSDTVGWSWPDGAELPFTIDK

SEQ ID NO: 23110 - protein, 469 aa, Artificial Sequence; identical to SEQ ID NO: 20257
  derived and/or modified protein sequence (wt) from neuraminidase__InfluenzaA__AFN20083

SEQ ID NO: 23111 - protein, 469 aa, Artificial Sequence
  derived and/or modified protein sequence (wt) from neuraminidase__InfluenzaA__AFN20094
MNPNQKIITIGSVCMTIGMANLILQIGNIISIWISHSIQLGNQSQIETCNQSVIIYENNTWVNQTYVNISNTNFAAGQSVVSVKLAGNSSLCPVSGWAIYSKDNSIRIGSKGDVFVIREPFISCSPLECRTFFLTQGALLNDKHSNGTIKDRSPYRTLMSCPIGEVPSPYNSRFESVAWSASACHDGINWLTIGISGPDNGAVAVLKYNGIITDTIKSWRNNILRTQESECACVNGSCFTIMTDGPSDGQASYKIFRIEKGKIVKSVEMNAPNYHYEECSCYPDSSEITCVCRDNWHGSNRPWVSFNQNLEYQIGYICSGIFGDNPRPNDKAGSCGPVSSNGANGVKGFSFKYGNGVWIGRTKSISSRKGFEMIWDPNGWTGTDNNFSIKQDIVGINEWSGYSGSFVQHPELTGLDCIRPCFWVELIRGRPKENTIWTSGSSISFCGVNSDTMGWSWPDGAELPFTIDK

SEQ ID NO: 23112 - protein, 469 aa, Artificial Sequence; identical to SEQ ID NO: 20716
  derived and/or modified protein sequence (wt) from neuraminidase__InfluenzaA__AFN20100

SEQ ID NO: 23113 - protein, 469 aa, Artificial Sequence
  derived and/or modified protein sequence (wt) from neuraminidase__InfluenzaA__AFN20114
MNPNQKIITIGSVCMTIGMANLILQIGNIISIWISHSIQLGNQNQIETCNQSVITYENNTWVNQTYVNISNTNFAAGQSVVSVKLAGNSSLCPVSGWAIYSKDNSIRIGSKGDVFVIREPFISCSPLECRTFFLTQGALLNDKHSNGTIKDRSPYRTLMSCPIGEVPSPYNSRFESVAWSASACHDGINWLTIGISGPDNGAVAVLKYNGIITDTIKSWRNNILRTQESECACVNGSCFTVMTDGPSDGQASYKIFKIEKGKIVKSVEMNAPNYHYEECSCYPDSSEITCVCRDNWHGSNRPWVSFNQNLEYQIGYICSGIFGDNPRPNDKTGSCSPVSSNGANGVKGFSFKYGNGVWIGRTKSTSSRNGFEMIWDPNGWTGTDNSFSMKQDIVGINEWSGYSGSFVQHPELTGLDCIRPCFWVELIRGRPKENTVWTSGSSISFCGVNSDTVGWSWPDGAELPFTIDK

SEQ ID NO: 23114 - protein, 469 aa, Artificial Sequence
  derived and/or modified protein sequence (wt) from neuraminidase__InfluenzaA__AFN20128
MNPNQKIITIGSVCMTIGMANLILQIGNIISIWISHSIQLGNQSQIETCNQSVITYENNTWVNQTYVNISNTNFAAGQSVVSVKLAGNSSLCPVSGWAIYSKDNSIRIGSKGDVFVIREPFISCSPLECRTFFLTQGALLNDKHSNGTIKDRSPYRTLMSCPIGEVPSPYNSRFESVAWSASACHDGINWLTIGISGPDNGAVAVLKYNGIITDTIRSWRNNILRTQESECACVNGSCFTIMTDGPSDGQASYKIFRIEKGKIIKSVEMNAPNYHYEECSCYPDSSEITCVCRDNWHGSNRPWVSFNQNLEYQIGYICSGIFGDNPRSNDKTGSCGPVSSNGANGVKGFSFKYGNGVWIGRTKSISSRKGFEMIWDPNGWTGTDNNFSIKQDIVGINEWSGYSGSFVQHPELTGLDCIRPCFWVELIRGRPKENTIWTSGSSISFCGVNSDTVGWSWPDGAELPFTIDK

SEQ ID NO: 23115 - protein, 469 aa, Artificial Sequence; identical to SEQ ID NO: 20257
  derived and/or modified protein sequence (wt) from neuraminidase__InfluenzaA__AFN87935

SEQ ID NO: 23116 - protein, 469 aa, Artificial Sequence
  derived and/or modified protein sequence (wt) from neuraminidase__InfluenzaA__AFN87937
MNPNQKIITIGSVCMTIGMANLILQIGNIISIWISHSIQLGNQNQIETCNQSVITYENNTWVNQTYVNISNTNFAAGQSVVSVKLAGNSSLCPVSGWAIYSKDNSIRIGSKGDVFVIREPFISCSPLECRTFFLTQGALLNDKHSNGTIKDRSPYRTLMSCPIGEVPSPYNSRFESVAWSASACHDGINWLTIGISGPDNGAVAVLKYNGIITDTIKSWRNNILRTQESECACVNGSCFTVMTDGPSDGQASYKIFKIEKGKIVKSVEMNAPNYHYEECSCYPDSSEITCVCRDNWHGSNRPWVSFNQNLEYQIGYICSGIFGDNPRPNDKTGSCGPVSSNGANGVKGFSFKYGNGVWIGRTKSTSSRNGFEMIWDPNGWTGTDNSFSMKQDIVGINEWSGYSGSFVQHPELTGLDCIRPCFWVELIRGRPKENTVWTSGSSISFCGVNSDTVGWSWPDGAELPFTIDK

SEQ ID NO: 23117 - protein, 469 aa, Artificial Sequence
  derived and/or modified protein sequence (wt) from neuraminidase__InfluenzaA__AFN87940
MNPNQKIITIGSVCMTIGMANLILQIGNIISIWISHSIQLGNQNQIETCNQSVITYENNTWVNQTYVNISNTNFAAGQSVVSVKLAGNSSLCPVSGWAIYSKDNSIRIGSKGDVFVIREPFISCSPLECRTFFLTQGALLNDKHSNGTIKDRSPYRTLMSCPIGEVPSPYNSRFESVAWSASACHDGINWLTIGISGPDNGAVAVLKYNGIITDTIKSWRNNILRTQESECACVNGSCFTVMTDGPSDGQASYKIFKIEKGKIVKSVEMNAPNYHYEECSCYPDSSEITCVCRDNWHGSNRPWVSFNQNLEYQIGYICSGIFGDNPRPNDKTGSCGPVSSNGANGVKGFSFKYGNGVWIGRTKSTSSRNGFEMIWDPNGWTGTDNSFSIKQDIVGINEWSGYSGSFVQHPELTGLDCIRPCFWVELIRGRPKENTIWTSGSSISFCGVNSDTVGWSWPDGAELPFTIDK

SEQ ID NO: 23118 - protein, 469 aa, Artificial Sequence; identical to SEQ ID NO: 16738
  derived and/or modified protein sequence (wt) from neuraminidase__InfluenzaA__AFN87942

SEQ ID NO: 23119 - protein, 469 aa, Artificial Sequence; identical to SEQ ID NO: 23116
  derived and/or modified protein sequence (wt) from neuraminidase__InfluenzaA__AFN87944

SEQ ID NO: 23120 - protein, 469 aa, Artificial Sequence
  derived and/or modified protein sequence (wt) from neuraminidase__InfluenzaA__AFN87946
MNPNQKIITIGSVCMTIGMANLTLQIGNIISIWISHSIQLGNQNQIETCNQSVINYENNTWVNQTYVNISNTNFAAGQSVVSVKLAGNSSLCPVSGWAIYSKDNSIRIGSKGDVFVIREPFVSCSPLECRTFFLTQGALLNDKHSNGTIKDRSPYRTLMSCPIGEVPSPYNSRFESVAWSASACHDGINWLTIGISGPDNGAVAVLKYNGIITDTIKSWRNNILRTQESECACVNGSCFTVMTDGPSDGQASYKIFRIEKGKIVKSVEMNAPNYHYEECSCYPDSSEVTCVCRDNWHGSNRPWVSFNQNLEYQIGYICSGIFGDNPRPNDKTGSCGPVSSNGANGVKGFSFKYGNGVWIGRTKSISSRNGFEMIWDPNGWTGTDNNFSIKQDIVGINEWSGYSGSFVQHPELTGLDCIRPCFWVELIRGRPKENTIWTSGSSISFCGVNSDTVGWSWPDGAELPFTIDK

SEQ ID NO: 23121 - protein, 469 aa, Artificial Sequence
  derived and/or modified protein sequence (wt) from neuraminidase__InfluenzaA__AFN87948
MNPNQKIITIGSVCMTIGMANLILQIGNIISIWISHSIQLGNQNQIETCNQSVITYENNTWVNQTYVNISNTNFAAGQSVVSVKLAGNSSLCPVSGWAIYSKDNSIRIGSKGDVFVIREPFISCSPLECRTFFLTQGALLNDKHSNGTIKDRSPYRTLMSCPIGEVPSPYNSRFESVAWSASACHDGINWLTIGISGPDNGAVAVLKYNGIITDTIKSWRNNILRTQESECACVNGSCFTVMTDGPSDGQASYKIFKIEKGKIVKSVEMNAPNYHYEECSCYPDSSEITCVCRDNWHGSNRPWVSFNQNLEYQIGYICSGIFGDNPRPNDKTGSCGPVSSNGANGVKGFSFKYGNGVWIGRTKSTSSRNGFEMIWDPNGWTGTDNSFSIKQDIVGINEWSGYSGSFVQHPELTGLDCIRPCFWVELIRGRPKENTIWTSGSSISFCGVNSDIVGWSWPDGAELPFTIDK

SEQ ID NO: 23122 - protein, 469 aa, Artificial Sequence
  derived and/or modified protein sequence (wt) from neuraminidase__InfluenzaA__AFN87950
MNPNQKIITIGSVCMTIGMANLILQIGNIISIWISHSIQLGNQSQIETCNQSVITYENNTWVNQTYVNISNTNFAAGQSVVSVKLAGNSSLCPVSGWAIYSKDNSIRIGSKGDVFVIREPFISCSPLECRTFFLTQGALLNDKHSNGTIKDRSPYRTLMSCPIGEVPSPYNSRFESVAWSASACHDGINWLTIGISGPDNGAVAVLKYNGIITDTIKSWRNNILRTQESECACVNGSCFTVMTDGPSDGQASYKIFRIEKGKIVKSVEMNAPNYHYEECSCYPDSSEITCVCRDNWHGSNRPWVSFNQNLKYQIGYICSGIFGDNPRPNDKTGSCGPVSSNGANGVKGFSFKYGNGVWIGRTKSISSRKGFEMIWDPNGWTGTDNNFSIKQDIIGINEWSGYSGSFVQHPELTGLDCIRPCFWVELIRGRPKENTIWTSGSSISFCGVNSDTVGWSWPDGAELPFTIDK

SEQ ID NO: 23123 - protein, 469 aa, Artificial Sequence; identical to SEQ ID NO: 20709
  derived and/or modified protein sequence (wt) from neuraminidase__InfluenzaA__AFN87952

SEQ ID NO: 23124 - protein, 469 aa, Artificial Sequence
  derived and/or modified protein sequence (wt) from neuraminidase__InfluenzaA__AFN87954
MNPNQKIITIGSVCMTIGMANLILQIGNIISIWISHSIQLGNQNQIETCNQSVITYENNTWVNQTYVNISNTNFAAGQSVVSVKLAGNSSLCPVSGWAIYSKDNSIRIGSKGDVFVIREPFISCSPLECRTFFLTQGALLNDKHSNGTIKDRSPYRTLMSCPIGEVPSPYNSRFESVAWSASACHDGINWLTIGISGPDNGAVAVLKYNGIITDTIKSWRNNILRTQESECACVNGSCFTVMTDGPSDGQASYKIFRIEKGKIVKSVEMNAPNYHYEECSCYPDSSEITCVCRDNWHGSNRPWVSFNQNLEYQIGYICSGIFGDNPRPNDKTGSCGPVSSNGANGVKGFSFKYGNGVWIGRTKSISSRKGFEMIWDPNGWTGTDNNFSIKQDIVGINEWSGYSGSFVQHPELTGLDCIRPCFWVELIRGRPKENTIWTSGSSISFCGVNSDTMGWSWPDGAELPFTIDK

SEQ ID NO: 23125 - protein, 469 aa, Artificial Sequence
  derived and/or modified protein sequence (wt) from neuraminidase__InfluenzaA__AFN87956
MNPNQKIITIGSVCMTIGMANLILQIGNIISIWISHSIQLGNQSQIETCNQSVITYENNTWVNQTYVNISNTNFAAGQSVVSVKLVGNSSLCPVSGWAIYSKDNSIRIGSKGDVFVIREPFISCSPLECRTFFLTQGALLNDKHSNGTIKDRSPYRTLMSCPIGEVPSPYNSRFESVAWSASACHDGINWLTIGISGPDNGAVAVLKYNGIITDTIKSWRNNILRTQESECACVNGSCFTIMTDGPSDGQASYKIFRIEKGKIVKSVEMNAPNYHYEECSCYPDSSEITCVCRDNWHGSNRPWVSFNQNLEYQIGYICSGIFGDNPRPNDKTGSCGPVSSNGANGVKGFSFKYGNGVWIGRTKSISSRKGFEMIWDPNGWTGTDNNFSIKQDIVGTNEWSGYSGSFVQHPELTGLDCIRPCFWVELIRGRPKENTIWTSGSSISFCGVNSDTVGWSWPDGAELPFTIDN

SEQ ID NO: 23126 - protein, 469 aa, Artificial Sequence
  derived and/or modified protein sequence (wt) from neuraminidase__InfluenzaA__AFN87958
MNPNQKIITIGSVCMTIGMANLILQIGNIISIWISHSIQLGNQNQIETCNQSVITYENNTWVNQTYVNISNTNFAAGQSVVSVKLAGNSSLCPVSGWAIYSKDNSIRIGSKGDVFVIREPFISCSPLECRTFFLTQGALLNDKHSNGTIKDRSPYRTLMSCPIGEVPSPYNSRFESVAWSASACHDGINWLTIGISGPDNGAVAVLKYNGIITDTIKSWRNNILRTQESECACVNGSCFTVMTDGPSDGQASYKIFKIEKGKIVKSVEMNAPNYHYEECSCYPDSSEITCVCRDNWHGSNRPWVSFNQNLEYQIGYICSGIFGDNPRPNDKTGSCGPASSNGANGVKGFSFKYGNGVWIGRTKSTSSRNGFEMIWDPNGWTGTDNSFSMKQDIVGINEWSGYSGSFVQHPELTGLDCIRPCFWVELIRGRPKENTVWTSGSSISFCGVNSDTVGWSWPDGAELPFTIDK

SEQ ID NO: 23127 - protein, 469 aa, Artificial Sequence
  derived and/or modified protein sequence (wt) from neuraminidase__InfluenzaA__AFN87960
MNPNQKIITIGSVCMTIGMANLILQIGNIISIWISHSIQLGNQSQIETCNQSVITYENNTWVNQTYVNISNTNFAAGQSVVSVKLAGNSSLCPVSGWAIYSKDNSIRIGSKGDVFVIREPFISCSPLECRTFFLTQGALLNDKHSNGTIKDRSPYRTLMSCPIGEVPSPYNSRFESVAWSASACHDGINWLTIGISGPDNGAVAVLKYNGIITDTIKSWRNNILRTQESECACVNGSCFTIMTDGPSDGQASYKIFRIEKGKIVKSVEMNAPNYHYEECSCYPDSSEITCVCRDNWHGSNRPWVSFNQNLEYQIGYICSGIFGDNPRPNDKTGSCGPVSSNGANGVKGFSFKYGNGVWIGRTKSISSRKGFEMIWDPNGWTGTDNNFSIKQDIVGINEWSGYSGSFVQHPELTGLDCIRPCFWIELIRGRPKENTIWTSGSSISFCGVNSDTVGWSWPDGAELPFTIDK

SEQ ID NO: 23128 - protein, 470 aa, Artificial Sequence
  derived and/or modified protein sequence (wt) from neuraminidase__InfluenzaA__AFO64805
MNPNQKIITIGSISIAIGIISLMLQIGNIISIWASHSIQTGSQNHTGICNQRIITYENSTWVNHTYVNINNTNVVAGKDKTSVTLAGNSSLCSISGWAIYTKDNSIRIGSKGDVFVIREPFISCSHLECRTFFLTQGALLNDKHSNGTVKDRSPYRALMSCPLGEAPSPYNSKFESVAWSASACHDGMGWLTIGISGPDNGAVAVLKYNGIITETIKSWKKRILRTQESECVCVNGSCFTIMTDGPNNGAASYKIFKIEKGKVTKSIELNAPNSHYEECSCYPDTGTVMCVCRDNWHGSNRPWVSFNQNLDYQIGYICSGVFGDNPRPKDGEGSCNPVTVDGADGVKGFSYKYGNGVWIGRTKSNRLRKGFEMIWDPNGWTDTDSDFSVKQDVVAITDWSGYSGSFVQHPELTGLDCIRPCFWVELVRGLPRENTTIWTSGSSISFCGVNSDTANWSWPDGAELPFTIDK

SEQ ID NO: 23129 - protein, 470 aa, Artificial Sequence
  derived and/or modified protein sequence (wt) from neuraminidase__InfluenzaA__AFO64816
MNPNQKIITIGSICMAIGIISLILQIGNIVSIWISHSIQTGSQNYTGICNQRIITYENSTWVNQTYVNINNTNVVAGQDTTSVALAGNSSLCPISGWAIYSKDNSIRIGSKGDVFVIREPFISCSHLECRTFFLTQGALLNDKHSNGTVKDRSPYRALMSCPIGEAPSPYNSRFESVAWSASACHDGMGWLTIGISGPDDGAVAVLKYNGIITETIKSWRRRILRTQESECVCVNGSCFTIMTDGPNNGPASYKIFKIEKGKVTKSIELDAPNSHYEECSCYPDAGTVMCVCRDNWHGSNRPWVSFNQNLDYQIGYICSGVFGDNPRPKDGKGSCDPVTVDGADGVKGFSYRYGNGVWIGRTKSNSSRRGFEMIWDPNGWTDTDSKFLVKQDVVAMTDWSGYSGSFVQHPELTGLDCMRPCFWVELIRGRPRENTTIWTSGSSISFCGVNGDTANWSWPDGAELPFTIDK

SEQ ID NO: 23130 - protein, 470 aa, Artificial Sequence
  derived and/or modified protein sequence (wt) from neuraminidase__InfluenzaA__AFO64827
MNPNQKIITIGSISMAIGIISLILQIGNIISIWVSHSIQTGSQNHTGICNQRIITYENSTWVNQTYVNINNTNVIAGKDKTSVTLAGNSSLCPIRGWAIYTKDNSIRIGSKGDVFVIREPFISCSHLECRTFFLTQGALLNDKHSNGTVKDRSPYRALMSCPLGEAPSPYNSRFESVAWSASACHDGMGWLTIGISGPDDGAVAVLKYNGIITETIKSWKKRILRTQESECVCVNGSCFTIMTDGPSNGAASYRIFKIEKGKVTKSIELDAPNSHYEECSCYPDTGTVMCVCRDNWHGSNRPWVSFNQNLDYQIGYICSGVFGDNPRPKDGKGSCDPVTVDGADGVKGFSYRYGNGVWIGRTKSNRFRKGFEMIWDPNGWTDTDSDFLVKQDVVAMTDWSGYSGSFVQHPELTGLDCMRPCFWVELVRGRPRENTTIWTSGSSISFCGVNSDTANWSWPDGAELPFTIDK

SEQ ID NO: 23131 - protein, 470 aa, Artificial Sequence
  derived and/or modified protein sequence (wt) from neuraminidase__InfluenzaA__AFO64838
MNPNQKIITIGSISMAIGIISLILQIGNIISIWASHSIQTGSQNHTGICNQRIITYENSTWVNQTYVNINNTNVVAGKDKTSVTLAGNSSLCPIRGWAIYTKDNSIRIGSKGDVFVIREPFISCSHLECRTFFLTQGALLNDKHSNGTVKDRSPYRALMSCPLGEAPSPYNSRFESVAWSASACHDGMGWLTIGISGPDNGAVAVLKYNGIITETIKSWKKRILRTQESECVCVNGSCFTIMTDGPSNGAASYRIFKIEKGRVTKSIELDAPNYHYEECSCYPDTGTVMCVCRDNWHGSNRPWVSFNQNLDYQIGYICSGVFGDNPRPKDGEGSCNPVTVDGADGVKGFSYRYGNGVWIGRTKSNRLRKGFEMIWDPNGWTDTDSDFSMKQDVVAMTDWSGYSGSFVQHPELTGLDCMRPCFWVELVRGLPRENTTIWTSGSSISFCGVNSDTANWSWPDGAELPFTIDK

SEQ ID NO: 23132 - protein, 470 aa, Artificial Sequence
  derived and/or modified protein sequence (wt) from neuraminidase__InfluenzaA__AFO64849
MNPNQKIITIGSISMAIGIISLILQIGNIISIWASHSIQTGSQNHTGICNQRIITYENSTWVNQTYVNINNTNVVAGKDKTSVTLAGNSSLCPIRGWAIYTKDNSIRIGSKGDVFVIREPFISCSHLECRTFFLTQGALLNDKHSNGTVKDRSPYRALMSCPLGEAPSPYNSRFESVAWSASACHDGMGWLTIGISGPDNGAVAVLKYNGIITETIKSWKKQILRTQESECVCVNGSCFTIMTDGPSNGAASYRIFKIEKGKITKSIELDAPNSHYEECSCYPDTGTVMCVCRDNWHGSNRPWVSFNQNLDYQIGYICSGVFGDNPRPKDGEGSCNPVTVDGADGVKGFSYRYGNGVWIGRTKSNRLRKGFEMIWDPNGWTDTDSDFSVKQDVVAMTDWSGYSGSFVQHPELTGLDCMRPCFWVELVRGRPRENATIWTSGSSISFCGVNSDTANWSWPDGAELPFTIDK

SEQ ID NO: 23133 - protein, 470 aa, Artificial Sequence; identical to SEQ ID NO: 14968
  derived and/or modified protein sequence (wt) from neuraminidase__InfluenzaA__AFO64860

SEQ ID NO: 23134 - protein, 470 aa, Artificial Sequence
  derived and/or modified protein sequence (wt) from neuraminidase__InfluenzaA__AFO64871
MNPNQKIITIGSISIAIGIISLILQIGNIISIWASHSIQTGSQNHTGVCNQRIITYENSTWVNQTYVNINNTNVVAGKDKTSMTLAGNSSLCPIRGWAIYTKDNSIRIGSKGDVFVIREPFISCSHLECRTFFLTQGALLNDKHSNGTVKDRSPYRALMSCPLGEAPSPYNSRFESVAWSASACHDGLGWLTIGISGPDNGAVAVLKYNGIITETIKSWKKRILRTQESECVCMNGSCFTIMTDGPSNGAASYRIFKIEKGRVTKSIELDAPNYHYEECSCYPDTGTVMCVCRDNWHGSNRPWVSFNQNLDYQIGYICSGVFGDNPRPKDGEGSCNPVTVDGADGVKGFSYRYGNGVWIGRTKSNRLRKGFEMIWDPNGWTDTDSDFSMRQDIVAMTDWSGYSGSFVQHPELTGLDCMRPCFWVELVRGLPRENTTIWTSGSSISFCGVNSDTANWSWPDGAELPFTIDK

SEQ ID NO: 23135 - protein, 470 aa, Artificial Sequence
  derived and/or modified protein sequence (wt) from neuraminidase__InfluenzaA__AFO64882
MNPNQKIITIGSISIAIGIISLMLQIGNIISIWASHSIQTGSQNHTGICNQRIITYENSTWVNHTYVNINNTNVVAGKDKTSVTLAGNSSLCSISGWAIYTKDNSIRIGSKGDVFVIREPFISCSHLECRTFFLTQGALLNDKHSNGTVKDRSPYRALMSCPLGEAPSPYNSKFESVAWSASACHDGMGWLTIGISGPDNGAVAVLKYNGIITETIKSWKKRILRTQESECVCVNGSCFTIMTDGPSNGAASYKIFKIEKGKVTKSIELNAPNSHYEECSCYPDTGTVMCVCRDNWHGSNRPWVSFNQNLDYQIGYICSGVFGDNPRPKDGEGSCNPVTVDGADGVKGFSYKYGNGVWIGRTKSNRLRKGFEMIWDPNGWTDTDSDFSVKQDVVAITDWSGYSGSFVQHPELTGLDCIRPCFWVELVRGRPRENTTIWTSGSSISFCGVNSDTANWSWPDGAELPFTIDK

SEQ ID NO: 23136 - protein, 470 aa, Artificial Sequence
  derived and/or modified protein sequence (wt) from neuraminidase__InfluenzaA__AFO64893
MNPNQKIITIGSISVAIGIISLMLQIGNIISIWASHSIQTGSQNHTGICNQRIITYENSTWVNHTYVNINNTNVVAGKDKTSVTLAGNSSLCSISGWAIYTKDNSIRIGSKGDVFVIREPFISCSHLECRTFFLTQGALLNDKHSNGTVKDRSPYRALMSCPLGEAPSPYNSKFESVAWSASACHDGMGWLTIGISGPDNGAVAVLKYNGIITETIKSWKKRILRTQESECVCVNGSCFTIMTDGPSDGAASYKIFKIEKGKVTKSIELNAPNSHYEECSCYPDTGTVMCVCRDNWHGSNRPWVSFNQNLDYQIGYICSGVFGDNPRPKDGEGSCNPVTVDGADGVKGFSYKYGNGVWIGRTKSNRFRKGFEMIWDPNGWTDTDSDFSVKQDVVAITDWSGYSGSFVQHPELTGLDCIRPCFWVELVRGRPRENTTIWTSGSSISFCGVNSDTANWSWPDGAELPFTIDK

SEQ ID NO: 23137 - protein, 470 aa, Artificial Sequence
  derived and/or modified protein sequence (wt) from neuraminidase__InfluenzaA__AFO64904
MNPNQKIITIGSISVAIGIISLILQIGNIISMWASHSIQTGSQNYTGICNQRIITYENNTWVNQTYVNINNTNVVAGKDKISMTLAGNSSLCPIRGWAIYTKDNSIRIGSKGDVFVIREPFISCSHLECRTFFLTQGALLNDKHSNGTVKDRSPYRALMSCPLGEAPSPYNSRFESVAWSASACHDGLGWLTIGISGPDNGAVAVLKYNGIITETIKSWKKQILRTQESECVCVNGSCFTIMTDGPSNRAASYRIFKIEKGRVTKSIELDAPNYHYEECSCYPDTGTVMCVCRDNWHGSNRPWVSFNQNLDYQIGYICSGVFGDNPRPKDGEGSCNPVTVDGADGVKGFSYKYGNGVWIGRTKSNRLRKGFEMIWDPNGWTDTDSDFSMKQDVVAMTDWSGYSGSFVQHPELTGLDCMRPCFWVELVRGLPRENTTIWTSGSSISFCGVNSETANWSWPDGAELPFTIDK

SEQ ID NO: 23138 - protein, 470 aa, Artificial Sequence
  derived and/or modified protein sequence (wt) from neuraminidase__InfluenzaA__AFO65019
MNPNQKIITIGSISIAIGIISLMLQIGNIISIWASHSIQTGSQNHTGICNQRIITYENSTWVNHTYVNINNTNVVAGKDKTSVTLAGNSSLCSISGWAIYTKDNSIRIGSKGDVFVIREPFISCSHLECRTFFLTQGALLNDKHSNGTVKDRSPYRALMSCPLGEAPSPYNSKFESVAWSASACHDGMGWLTIGISGPDNGAVAVLKYNGIITETIKSWKKRILRTQESECVCVNGSCFTIMTDGPSNGAASYKIFKIEKGKVTKSIELNAPNSHYEECSCYPDTGTVMCVCRDNWHGSNRPWVSFNQNLDYQIGYICSGVFGDNPRPKDGEGSCNPVTADGADGVKGFSYKYGNGVWIGRTKSNRLRKGFEMIWDPNGWTDTDSDFSVKQDVVAITDWSGYSGSFVQHPELTGLDCIRPCFWVELVRGRPRENTTIWTSGSSISFCGVNSDTANWSWPDGAELPFTIDK

SEQ ID NO: 23139 - protein, 470 aa, Artificial Sequence; identical to SEQ ID NO: 16453
  derived and/or modified protein sequence (wt) from neuraminidase__InfluenzaA__AFO65030

SEQ ID NO: 23140 - protein, 470 aa, Artificial Sequence
  derived and/or modified protein sequence (wt) from neuraminidase__InfluenzaA__AFO65041
MNPNQKIITIGSISIAIGIISLMLQIGNIISIWASHSIQTGSQNHTGVCNQRIITYENSTWVNHTYVNINNTNVVAGKDKTSVTLAGNSSLCSISGWAIYTKDNSIRIGSKGDVFVIREPFISCSHLECRTFFLTQGALLNDKHSNGTVKDRSPYRALMSCPLGEAPSPYNSKFESVAWSASACHDGMGWLTIGISGPDNGAVAVLKYNGIITETIKSWKKQILRTQESECVCVNGSCFTIMTDGPSNGAASYKIFKIEKGKVTKSIELNAPNFHYEECSCYPDTGTVMCVCRDNWHGSNRPWVSFNQNLDYQIGYICSGVFGDNPRPKDGEGSCNPVTVDGANGVKGFSYKYGNGVWIGRTKSNRLRKGFEMIWDPNGWTDTDSDFSVKQDVVAITDWSGYSGSFVQHPELTGLDCIRPCFWVELVRGLPRENTTIWTSGSSISFCGVNSDTANWSWPDGAELPFTIDK

SEQ ID NO: 23141 - protein, 470 aa, Artificial Sequence
  derived and/or modified protein sequence (wt) from neuraminidase__InfluenzaA__AFO65052
MNPNQKIITIGSISIAIGIISLMLQIGNIISIWASHSIQTGSQNHTGVCNQRIITYENSTWVNHTYVNINNTNVIAGKDKTSMTLAGNSSLCSISGWAIYTKDNSIRIGSKGDVFVIREPFISCSHLECRTFFLTQGALLNDKHSNGTVKDRSPYRALMSCPLGEAPSPYNSKFESVAWSASACNDGMGWLTIGISGPDNGAVAVLKYNGIITETIKSWKKQILRTQESECVCVNGSCFTIMTDGPSNGAASYKIFKIEKGKVTKSIELNAPNFHYEECSCYPDTGTVMCVCRDNWHGSNRPWVSFNQNLDYQIGYICSGVFGDNPRPKDGEGSCNPVTVDGANGVKGFSYKYGNGVWIGRTKSNRLRKGFEMIWDPNGWTDTDSDFSVKQDVVAITDWSGYSGSFVQHPELTGLDCIRPCFWVELVRGLPRENTTIWTSGSSISFCGVNSDTANWSWPDGAELPFTIDK

SEQ ID NO: 23142 - protein, 470 aa, Artificial Sequence; identical to SEQ ID NO: 14828
  derived and/or modified protein sequence (wt) from neuraminidase__InfluenzaA__AFO66139

SEQ ID NO: 23143 - protein, 470 aa, Artificial Sequence
  derived and/or modified protein sequence (wt) from neuraminidase__InfluenzaA__AFO66150
MNPNQKIITIGSISVAIGIISLILQIGNIISIWASHSIQTGSQNYTGICNQRIITYENRTWVNQTYVNINNTNVVAGKDKTSMTLAGNSSLCPIRGWAIYTKDNSIRIGSKGDVFVIREPFISCSHLECRTFFLTQGALLNDKHSNGTIKDRSPFRALMSCPLGEAPSPYNSRFESVAWSASACHDGLGWLTIGISGPDNGAVAVLKYNGIITETIKSWKKQILRTQESECVCVNGSCFTIMTDGPSNRAASYRIFKIEKGRVTKSIELDAPNYHYEECSCYPDTGTVMCVCRDNWHGSNRPWVSFNQNLDYQIGYICSGVFGDNPRPKDGEGSCNPVTVDGADGVKGFSYRYGNGVWIGRTKSNRIRKGFEMIWDPNGWTDTDSDFSMKQDVVAMTDWSGYSGSFVQHPELTGLDCMRPCFWVELVRGLPRENTTIWTSGSSISFCGVNSETANWSWPDGAELPFTIDK

SEQ ID NO: 23144 - protein, 470 aa, Artificial Sequence
  derived and/or modified protein sequence (wt) from neuraminidase__InfluenzaA__AFO66161
MNPNQKIITIGSISIAIGIISLMLQIGNIISIWASHSIQTGSQNHTGVCNQRIITYENSTWVNHTYVNINNTNVIAGKDKTSVTLAGNSSLCSISGWAIYTKDNSIRIGSKGDVFVIREPFISCSHLECRTFFLTQGALLNDKHSNGTVKDRSPYRALMSCPLGEAPSPYNSKFESVAWSASACHDGMGWLTIGISGPDNGAVAVLKYNGIITETIKSWKKQILRTQESECVCVNGSCFTIMTDGPSNGAASYKIFKIEKGKVTKSIELNAPNFHYEECSCYPDTGTVICVCRDNWHGSNRPWVSFNQNLDYQIGYICSGVFGDNPRPKDGEGSCNPVTVDGANGVKGFSYKYGNGVWIGRTKSNRLRKGFEMIWDPNGWTDTDSDFSVKQDVVAITDWSGYSGSFVQHPELTGLDCIRPCFWVELVRGLPKENTTIWTSGSSISFCGVNSDTANWSWPDGAELPFTIDK

SEQ ID NO: 23145 - protein, 470 aa, Artificial Sequence
  derived and/or modified protein sequence (wt) from neuraminidase__InfluenzaA__AFO66172
MNPNQKIITIGSISIAIGIISLMLQIGNIISIWASHSIQTGSQNHTGICNQRIITYENSTWVNHTYVNINNTNVVAGKDKTSVTLAGNSSLCSISGWAIYTKDNSIRIGSKGDVFVIREPFISCSHLECRTFFLTQGALLNDKHSNGTVKDRSPYRALMSCPLGEAPSPYNSKFESVAWSASACHDGMGWLTIGISGPDNGAVAVLKYNGIITETIKSWKKRILRTQESECVCMNGSCFTIMTDGPSNGAASYKIFKIEKGKVTKSIELNAPNFHYEECSCYPDTGTVMCVCRDNWHGSNRPWVSFNQNLDYQIGYICSGVFGDNPRPKDGEGSCNPVTVDGADGVKGFSYKYGNGVWIGRTKSNRLRKGFEMIWDPNGWTDTDSDFSVKQDVVAITDWSGYSGSFVQHPELTGLDCIRPCFWVELVRGLPRENTTIWTSGSSISFCGVNSDTANWSWPDGAELPFTIDK

SEQ ID NO: 23146 - protein, 470 aa, Artificial Sequence; identical to SEQ ID NO: 14930
  derived and/or modified protein sequence (wt) from neuraminidase__InfluenzaA__AFO66183

SEQ ID NO: 23147 - protein, 470 aa, Artificial Sequence
  derived and/or modified protein sequence (wt) from neuraminidase__InfluenzaA__AFO66194
MNPNQKIITIGSISIAIGIISLMLQIGNIISIWASHSIQTGSQNHTGVCNQRIITYENSTWVNHTYVNINNTNVIAGKDKTSVTLAGNSSLCSISGWAIYTKDNSIRIGSKGDVFVIREPFISCSHLECRTFFLTQGALLNDKHSNGTVKDRSPYRALMSCPLGEAPSPYNSKFESVAWSASACHDGMGWLTIGISGPDNGAVAVLKYNGIITETIKSWKKQILRTQESECVCVNGSCFTIMTDGPSNGAASYKIFKIEKGKVTKSIELNAPNFHYEECSCYPDTGTVMCVCRDNWHGSNRPWVSFNQNLDYQIGYICSGVFGDNPRPKDGEGSCNPVTVDGANGVKGFSYKYGNGVWIGRTKSNRLRKGFEMIWDPNGWTDTDSDFSVKQDIVAITDWSGYSGSFVQHPELTGLDCIRPCFWVELVRGLPKENTTIWTSGSSISFCGVNSDTANWSWPDGAELPFTIDK

SEQ ID NO: 23148 - protein, 469 aa, Artificial Sequence; identical to SEQ ID NO: 16555
  derived and/or modified protein sequence (wt) from neuraminidase__InfluenzaA__AFO66205

SEQ ID NO: 23149 - protein, 470 aa, Artificial Sequence; identical to SEQ ID NO: 14415
  derived and/or modified protein sequence (wt) from neuraminidase__InfluenzaA__AFO66216

SEQ ID NO: 23150 - protein, 470 aa, Artificial Sequence; identical to SEQ ID NO: 14386
  derived and/or modified protein sequence (wt) from neuraminidase__InfluenzaA__AFO66227

SEQ ID NO: 23151 - protein, 470 aa, Artificial Sequence
  derived and/or modified protein sequence (wt) from neuraminidase__InfluenzaA__AFO66238
MNPNQKIITIGSISIAIGIISLMLQIGNIISIWASHSIQTGSQNHTGICNQRIITYENSTWVNHTYVNINNTNVVAGKDKTSVTLAGNSSLCSISGWAIYTKDNSIRIGSKGDVFVIREPFISCSHLECRTFFLTQGALLNDKHSNGTVKDRSPYRALMSCPLGEAPSPYNSKFESVAWSASACHDGMGWLTIGISGPDNGAVAVLKYNGIITETIKSWKKQILRTQESECVCMNGSCFTIMTDGPSNGAASYKIFKIEKGKVTKSIELNAPNFHYEECSCYPDTGTVMCVCRDNWHGSNRPWVSFNQNLDYQIGYICSGVFGDNPRPKDGEGSCNPVTVDGADGVKGFSYKYGNGVWIGRTKSNRLRKGFEMIWDPNGWTNTDSDFSVKQDVVAITDWSGYSGSFVQHPELTGLDCIRPCFWVELVRGLPRENTTIWTSGSSISFCGVNSDTANWSWPDGAELPFTIDK

SEQ ID NO: 23152 - protein, 470 aa, Artificial Sequence
  derived and/or modified protein sequence (wt) from neuraminidase__InfluenzaA__AFO66249
MNPNQKIITIGSISIAIGIISLMLQIGNIISIWASHSIQTGSQNHTGICNQRIITYENSTWVNHTYVNINNTNVVAGKDKTSVTLAGNSSLCSISGWAIYTKDNSIRIGSKGDVFVIREPFISCSHLECRTFFLTQGALLNDKHSNGTVKDRSPYRALMSCPLGEAPSPYNSKFESVAWSASACHDGMGWLTIGISGPDNGAVAVLKYNGIITGTIKSWKKQILRTQESECVCMNGSCFTIMTDGPSNGAASYKIFKIEKGKVTKSIELNAPNFHYEECSCYPDTGTVMCVCRDNWHGSNRPWVSFNQNLDYQIGYICSGVFGDNPRPKDGEGSCNPVTVDGADGVKGFSYKYGNGVWIGRTKSNRLRKGFEMIWDPNGWTNTDSDFSVKQDVVAITDWSGYSGSFVQHPELTGLDCIRPCFWVELVRGLPRENTTIWTSGSSISFCGVNSDTANWSWPDGAELPFTIDK

SEQ ID NO: 23153 - protein, 470 aa, Artificial Sequence
  derived and/or modified protein sequence (wt) from neuraminidase__InfluenzaA__AFP33330
MNPNQKIITIGSISVAIGIISLILQIGNIISIWASHSIQAGSQNYTGICNQKIITYENRTWVNQTYVNINNTNVVAGKDKTSMTLAGNSSLCPIRGWAIYTKDNSIRIGSKGDVFVIREPFISCSHLECRTFFLTQGALLNDKHSNGTIKDRSPFRALMSCPLGEAPSPYNSRFESVAWSASACHDGLGWLTIGISGPDNGAVAVLKYNGIITETIKSWKKQILRTQESECVCVNGSCFTIMTDGPSNRAASYRIFKIEKGRVTKSIELDAPNYHYEECSCYPDTGTVMCVCRDNWHGSNRPWVSFNQNLDYQIGYICSGVFGDNPRPKDGEGSCNPVTVDGADGVKGFSYRYGNGVWIGRTKSNRLRKGFEMIWDPNGWTDTDSDFSMKQDVVAMTDWSGYSGSFVQHPELTGLDCMRPCFWVELVRGLPRENTTIWTSGSSISFCGVNSETANWSWPDGAELPFTIDK

SEQ ID NO: 23154 - protein, 470 aa, Artificial Sequence
  derived and/or modified protein sequence (wt) from neuraminidase__InfluenzaA__AFP33331
MNPNQKIITIGSISIAIGIISLMLQIGNIISIWASHSIQTGSQNHTGICNQRIITYENSTWVNHTYVNINNTNVIAGKDKTSVTLAGNSSLCSISGWAIYTKDNSIRIGSKGDVFVIREPFISCSHLECRTFFLTQGALLNDKHSNGTVKDRSPYRALMSCPLGEAPSPYNSKFESVAWSASACHDGMGWLTIGISGPDNGAVAVLKYNGIITETIKSWKKRILRTQESECVCVNGSCFTIMTDGPSNGAASYKIFKIEKGKVTKSIELNAPNFHYEECSCYPDTGTVMCVCRDNWHGSNRPWVSFNQNLDYQIGYICSGVFGDNPRPKDGEGSCNPVTVDGADGVKGFSYKYGNGVWIGRTKSNRLRKGFEMIWDPNGWTDTDSDFSVKQDVVAITDWSGYSGSFVQHPELTGLDCIRPCFWVELVRGLPRENTTIWTSGSSISFCGVNSDTANWSWPDGAELPFTIDK

SEQ ID NO: 23155 - protein, 469 aa, Artificial Sequence; identical to SEQ ID NO: 21143
  derived and/or modified protein sequence (wt) from neuraminidase__InfluenzaA__AFQ32576

SEQ ID NO: 23156 - protein, 469 aa, Artificial Sequence
  derived and/or modified protein sequence (wt) from neuraminidase__InfluenzaA__AFQ37282
MNPNQKIITIGSVCMTIGMANLILQIGNIISIWISHSIQLGNQNQIETCNQSVITYENNTWVNQTYVNISNTNFAAGQSVVSVKLAGNSSLCPVSGWAIYSKDNSIRIGSKGDVFVIREPFISCSPLECRTFFLTQGALLNDKHSNGTIKDRSPYRTLMSCPIGEVPSPYNSRFESVAWSASACHDGINWLTIGISGPDNGAVAVLKYNGIITDTIKSWRNNILRTQESECACVNGSCFTVMTDGPSDGQASYKIFRIEKGKIVKSVEMNAPNYHYEECSCYPDSSEITCVCRDNWHGSNRPWVSFNQNLEYQIGYICSGIFGDNPRPNDKTGSCGPVSSNGANGVKGFSFKYGNGVWIGRTKSISSRNGFEMIWDPNGWTGTDNNFSIKQDIVGINEWSGYSGSFVQHPELTGLDCIRPCFWVELIRGRPKENTIWTGGSSISFCGVNSDTVGWSWPDGAELPFTIDK

SEQ ID NO: 23157 - protein, 469 aa, Artificial Sequence
  derived and/or modified protein sequence (wt) from neuraminidase__InfluenzaA__AFQ55691
MNPNQKIITIGVVNTTLSTIALLIGVGNLVFNTVIHEKIGDHQTVTHPTTTTPAIPNCSDTIITYNNTIINNITTTIITEAERPFKSPLPLCPFRGFFPFHKDNAIRLGENKDVIVTREPYVSCDNDNCWSFALAQGALLGTKHSNGTIKDRTPYRSLIRFPIGTAPVLGNYKEICIAWSSSSCFDGKEWMHVCMTGNDNDASAQIIYAGKMTDSIKSWRKDILRTQESECQCIDGTCVVAVTDGPAASSADHRIYWIREGKIIKYEDVPKTKIQHLEECSCYVDVDVYCICRDNWKGSNRPWMRINNETILETGYVCSKFHSDTPRPADPSTVSCDSPSNVNGGPGVKGFGFKAGNDVWLGRTVSTSGRSGFEIIKVTEGWINSPNHAKSITQTLMSNNDWSGYSGSFIIKTKDCFQPCFYVELIRGRPNKNDDVSWTSNSIVTFCGLDNEPGSGNWPDGSNIGFMPK

SEQ ID NO: 23158 - protein, 469 aa, Artificial Sequence
  derived and/or modified protein sequence (wt) from neuraminidase__InfluenzaA__AFR68156
MNPNQKIITIGSVCMTIGMANLILQIGNIISIWISHSIQLRNQSQIETCNQSVITYENNTWVNQTYVNISNTNFAAGQSVVSVKLAGNSSLCPVSGWAIYSKDNSIRIGSKGDVFVIREPFISCSPLECRTFFLTQGALLNDKHSNGTIKDRSPYRTLMSCPIGEVPSPYNSRFESVAWSASACHDGINWLTIGISGPDNGAVAVLKYNGIITDTIKSWRNNILRTQESECACVNGSCFTIMTDGPSDGQASYKIFRIEKGKIVKSVEMNAPNYHYEECSCYPDSSEITCVCRDNWHGSNRPWVSFNQNLEYQIGYICSGIFGDNPRPNDKTGSCGPVSSNGANGVKGFSFKYGNGVWIGRTKSISSRKGFEMIWDPNGWTGTDNNFSIKQDIVGINEWSGYSGSFVQHPELTGLDCIRPCFWVELIRGRPKENTIWTSGSSISFCGVNSDTVGWSWPDGAELPFTIDK

SEQ ID NO: 23159 - protein, 469 aa, Artificial Sequence; identical to SEQ ID NO: 23158
  derived and/or modified protein sequence (wt) from neuraminidase__InfluenzaA__AFR68166

SEQ ID NO: 23160 - protein, 469 aa, Artificial Sequence
  derived and/or modified protein sequence (wt) from neuraminidase__InfluenzaA__AFR68176
MNPNQKIITIGSVSLTISTICFFMQIAILITTVTLHFKQYEFNSPPNNQVMLCEPTIIERNITEIVYLTNTTIEKEICPKLAEYRNWSKPQCDITGFAPFSKDNSIRLSAGGDIWVTREPYVSCDPDKCYQFALGQGTTLNNVHSNNTVRDRTPYRTLLMNELGVPFHLGTKQVCIAWSSSSCHDGKAWLHVCITGDDKNATASFIYNGRLVDSVASWSKDILRTQESECVCINGTCAVVMTDGSASGKADTKILFIKEGKIVHTSTLSGSAQHVEECSCYPRYPGVRCVCRDNWKGSNRPIVDINIKDHSIVSSYVCSGLVGDTPRKNDSSSSGHCLDPNNEEGGHGVKGWAFDDGNDVWMGRTINETSRLGYETFKVIEGWSNPKSKLQINRQVIVDRGNRSGYSGIFSVEGKNCINRCFYVELIRGRKEETEVLWTSNSIVVFCGTSGTYGTGSWPDGADLNLMPI

SEQ ID NO: 23161 - protein, 469 aa, Artificial Sequence; identical to SEQ ID NO: 16738
  derived and/or modified protein sequence (wt) from neuraminidase__InfluenzaA__AFR84677

SEQ ID NO: 23162 - protein, 469 aa, Artificial Sequence; identical to SEQ ID NO: 17625
  derived and/or modified protein sequence (wt) from neuraminidase__InfluenzaA__AFR84687

SEQ ID NO: 23163 - protein, 469 aa, Artificial Sequence; identical to SEQ ID NO: 16728
  derived and/or modified protein sequence (wt) from neuraminidase__InfluenzaA__AFR84696

SEQ ID NO: 23164 - protein, 469 aa, Artificial Sequence; identical to SEQ ID NO: 16738
  derived and/or modified protein sequence (wt) from neuraminidase__InfluenzaA__AFR84706

SEQ ID NO: 23165 - protein, 469 aa, Artificial Sequence; identical to SEQ ID NO: 16728
  derived and/or modified protein sequence (wt) from neuraminidase__InfluenzaA__AFR84716

SEQ ID NO: 23166 - protein, 469 aa, Artificial Sequence; identical to SEQ ID NO: 16728
  derived and/or modified protein sequence (wt) from neuraminidase__InfluenzaA__AFR84726

SEQ ID NO: 23167 - protein, 469 aa, Artificial Sequence; identical to SEQ ID NO: 16728
  derived and/or modified protein sequence (wt) from neuraminidase__InfluenzaA__AFR84736

SEQ ID NO: 23168 - protein, 469 aa, Artificial Sequence; identical to SEQ ID NO: 16728
  derived and/or modified protein sequence (wt) from neuraminidase__InfluenzaA__AFR84746

SEQ ID NO: 23169 - protein, 469 aa, Artificial Sequence; identical to SEQ ID NO: 16728
  derived and/or modified protein sequence (wt) from neuraminidase__InfluenzaA__AFR84756

SEQ ID NO: 23170 - protein, 469 aa, Artificial Sequence; identical to SEQ ID NO: 16728
  derived and/or modified protein sequence (wt) from neuraminidase__InfluenzaA__AFR84766

SEQ ID NO: 23171 - protein, 469 aa, Artificial Sequence; identical to SEQ ID NO: 16728
  derived and/or modified protein sequence (wt) from neuraminidase__InfluenzaA__AFR84776

SEQ ID NO: 23172 - protein, 469 aa, Artificial Sequence; identical to SEQ ID NO: 16728
  derived and/or modified protein sequence (wt) from neuraminidase__InfluenzaA__AFR84786

SEQ ID NO: 23173 - protein, 469 aa, Artificial Sequence; identical to SEQ ID NO: 16728
  derived and/or modified protein sequence (wt) from neuraminidase__InfluenzaA__AFR84796

SEQ ID NO: 23174 - protein, 469 aa, Artificial Sequence; identical to SEQ ID NO: 16738
  derived and/or modified protein sequence (wt) from neuraminidase__InfluenzaA__AFR84806

SEQ ID NO: 23175 - protein, 469 aa, Artificial Sequence; identical to SEQ ID NO: 16728
  derived and/or modified protein sequence (wt) from neuraminidase__InfluenzaA__AFR84816

SEQ ID NO: 23176 - protein, 469 aa, Artificial Sequence; identical to SEQ ID NO: 16738
  derived and/or modified protein sequence (wt) from neuraminidase__InfluenzaA__AFR84826

SEQ ID NO: 23177 - protein, 469 aa, Artificial Sequence
  derived and/or modified protein sequence (wt) from neuraminidase__InfluenzaA__AFR84836
MNPNQKIITIGSVCMTIGMANLILQIGNIISIWISHSIQLGNQNQIETCNQSVITYENNTWVNQTYVNISNTNFAAGQSVVSVKLAGNSSLCPVGGWAIYSKDNSVRIGSKGDVFVIREPFISCSPLECRTFFLTQGALLNDKHSNGTIKDRSPYRTLMSCPIGEVPSPYNSRFESVAWSASACHDGINWLTIGISGPDNGAVAVLKYNGIITDTIKSWRNNILRTQESECACVNGSCFTVMTDGPSNGQASYKIFRIEKGKIVKSVEMNAPNYHYEECSCYPDSSEITCVCRDNWHGSNRPWVSFNQNLEYQIGYICSGIFGDNPRPNDKTGSCGPVSSNGANGVKGFSFKYGNGVWIGRTKSISSRNGFEMIWDPNGWTETDNNFSIKQDIVGINEWSGYSGSFVQHPELTGLDCIRPCFWVELIRGRPKENTIWTSGSSISFCGVNSDTVGWSWPDGAELPFTIDK

SEQ ID NO: 23178 - protein, 469 aa, Artificial Sequence; identical to SEQ ID NO: 17542
  derived and/or modified protein sequence (wt) from neuraminidase__InfluenzaA__AFR84846

SEQ ID NO: 23179 - protein, 469 aa, Artificial Sequence; identical to SEQ ID NO: 16738
  derived and/or modified protein sequence (wt) from neuraminidase__InfluenzaA__AFR84856

SEQ ID NO: 23180 - protein, 469 aa, Artificial Sequence
  derived and/or modified protein sequence (wt) from neuraminidase__InfluenzaA__AFR84866
MNPNQKIITIGSVCMTIGMANLILQIGNIISIWISHSIQLGNQNQIETCNQSVITYENNTWVNQTYVNISNTNFAAGQSVVSVKLAGNSSLCPVSGWAIYSKDNSIRIGSKGDVFVIREPFISCSPLECRTFFLTQGALLNDKHSNGTIKDRSPFRTLMSCPIGEVPSPYNSRFESVAWSASACHDGINWLTIGISGPDNGAVAVLKYNGIITDTIKSWRNNILRTQESECACVNGSCFTVMTDGPSDGQASYKIFRIEKGKIVKSVEMNAPNYHYEECSCYPDSSEITCVCRDNWHGSNRPWVSFNQNLEYQIGYICSGIFGDNPRPNDKTGSCGPVSSNGANGVKGFSFKYGNGVWIGRTKSISSRNGFEMIWDPNGWTGTDNNFSIKQDIVGINEWSGYSGSFVQHPELTGLDCIRPCFWVELIRGRPKENTIWTSGSSISFCGVNSDTVGWSWPDGAELPFTIDK

SEQ ID NO: 23181 - protein, 469 aa, Artificial Sequence; identical to SEQ ID NO: 17446
  derived and/or modified protein sequence (wt) from neuraminidase__InfluenzaA__AFR84876

SEQ ID NO: 23182 - protein, 469 aa, Artificial Sequence; identical to SEQ ID NO: 17542
  derived and/or modified protein sequence (wt) from neuraminidase__InfluenzaA__AFR84895

SEQ ID NO: 23183 - protein, 469 aa, Artificial Sequence; identical to SEQ ID NO: 17542
  derived and/or modified protein sequence (wt) from neuraminidase__InfluenzaA__AFR84905

SEQ ID NO: 23184 - protein, 469 aa, Artificial Sequence; identical to SEQ ID NO: 17542
  derived and/or modified protein sequence (wt) from neuraminidase__InfluenzaA__AFR84915

SEQ ID NO: 23185 - protein, 469 aa, Artificial Sequence; identical to SEQ ID NO: 17542
  derived and/or modified protein sequence (wt) from neuraminidase__InfluenzaA__AFR84925

SEQ ID NO: 23186 - protein, 450 aa, Artificial Sequence
  derived and/or modified protein sequence (wt) from neuraminidase__InfluenzaA__AFU83119
MNPNQKIITIGSVSLTIATVCFLMQIAILATTVTLHFKQNECSIPSSNQVVPCEPIIVERNVTEYRDWSKPQCQITGFAPFSKDNSIRLSAGGDIWVTREPYVSCSPDKCYQFALGQGTTLDNKHSNGTIHDRIPHRTLLMNELGVPFHLGTKQVCIAWSSSSCHDGRAWLHVCVTGDDRNATASFIYDGVLVDSIGSWSQNILRTQESECVCINGTCTVVMTDGSASGRADTRILFIKEGKIVHVSPLSGSAQHIEECSCYPRYPDVRCVCRDNWKGSNRPIIDISMADYGIDSSYVCSGLVGDTPRNDDSSSNSNCKDPNNERGNPGVKGWAFDYGNDVWMGRTISKDSRSGYETFRVIGGWTIANSKSQVNRQVIVDNNNWSGYSGIFSVEGKSCINRCFYVELIRGRPQETRVWWTSNSIVAFCGTSGTYGTGSWPDGANINFMPI

SEQ ID NO: 23187 - protein, 469 aa, Artificial Sequence
  derived and/or modified protein sequence (wt) from neuraminidase__InfluenzaA__AFV53208
MNPNQKIITIGSVSLTIATVCFLIQIAILVTTVTLHFKQHECDSPASNQVMPCEPIIIERNITEIVYLNNTTIEKEICPKVVEYRNWSKPQCQITGFAPFSKDNSIRLSAGGDIWVTREPYVSCDPGKCYQFALGQGTTLDNKHSNDTIHDRIPHRTLLMNELGVPFHLGTRQVCIAWSSSSCHDGKAWLHVCITGDDKNATASFIYDGRLMDSIGSWSQNILRTQESECVCINGTCTVVMTDGSASGRADTRILFIEEGKIVHISPLSGSAQHVEECSCYPRYPGVRCICRDNWKGSNRPVIDINMEDYSIDSSYVCSGLVGDTPRNDDRSSNSNCRNPNNERGNQGVKGWAFDNGDDVWMGRTISKDLRSGYETFKVIGGWSTPNSKSQINRQVIVDSDNRSGYSGIFSVEGKSCINRCFYVELIRGRKQETRVWWTSNSIVVFCGTSGTYGTGSWPDGANINFMPI

SEQ ID NO: 23188 - protein, 469 aa, Artificial Sequence
  derived and/or modified protein sequence (wt) from neuraminidase__InfluenzaA__AFV53219
MNPNQKTITIGSVSLTIATVCFLMQIAILATTVTLHFKQHECDSPASNQVMPCEPIIIERNITEIVYLNNTTIEKEICPEVVEYRNWSKPQCQITGFAPFSKDNSIRLSAGGDIWVTREPYVSCDPGKCYQFALGQGTTLDNKHSNGTIHDRIPHRTLLMNELGVPFHLGTKQVCVAWSSSSCHDGKAWLHVCVTGDDRNATASFIYDGRLVDSIGSWSQNILRTQESECVCINGTCTVVMTDGSASGRADTRILFIKEGKIVHISPLSGSAQHIEECSCYPRYPDVRCICRDNWKGSNRPVIDINMEDYSIDSSYVCSGLVGDTPRNDDSSSNSNCRDPNNERGNPGVKGWAFDNGDDVWMGRTINKESRSGYETFKVIGGWSTPNSKSQVNRQVIVDNNNWSGYSGIFSVEGKSCINRCFYVELIRGRPQETRVWWTSNSIVVFCGTSGTYGTGSWPDGANINFMPI

SEQ ID NO: 23189 - protein, 469 aa, Artificial Sequence
  derived and/or modified protein sequence (wt) from neuraminidase__InfluenzaA__AFV53230
MNPNQKIITIGSVSLTIATVCFLMQIAILVTTVTLHFKQHECDSPASNQVMPCEPIIIERNITEIVYLNNTTIEKEICPKVVEYRNWSKPQCKITGFAPFSKDNSIRLSAGGDIWVTREPYVSCDPGKCYQFALGQGTTLDNKHSNDTIHDRIPHRTLLMNELGVPFHLGTRQVCIAWSSSSCHDGKAWLHVCVTGDDKNATASFIYDGRLVDSIGSWSQNILRTQESECVCINGTCTVVMTDGSASGRADTKILFIEEGKIVHISPLSGSAQHVEECSCYPRYPDVRCICRDNWKGSNRPVVDISMEDYSIDSSYVCSGLVGDTPRNDDRSSNSNCRNPNNERGNQGVKGWAFDNGDDVWMGRTISKDLRSGYETFKVIGGWSTPNSKSQINRQVIVDSDNRSGYSGIFSVEGKSCINRCFYVELIRGRKQETRVWWTSNSIVVFCGTSGTYGTGSWPDGANINLMPI

SEQ ID NO: 23190 - protein, 469 aa, Artificial Sequence; identical to SEQ ID NO: 16405
  derived and/or modified protein sequence (wt) from neuraminidase__InfluenzaA__AFV53241

SEQ ID NO: 23191 - protein, 469 aa, Artificial Sequence; identical to SEQ ID NO: 14091
  derived and/or modified protein sequence (wt) from neuraminidase__InfluenzaA__AFV53252

SEQ ID NO: 23192 - protein, 470 aa, Artificial Sequence
  derived and/or modified protein sequence (wt) from neuraminidase__InfluenzaA__AFV53263
MNPNQKIITIGSICMAIGTISLILQIGNIISIWISHSIQTGSQNHTGICNQRIITYENNTWVNQTYVNISNTNVVAGKDTTSMILAGNSSLCPIRGWAIYSKDNSIRIGSKGDVFVIREPFISCSHLECRTFFLTQGALLNDKHSNGTVKDRSPYRALMSCPIGEAPSPYNSRFESVAWSASACHDGMGWLTIGISGPDDGAVAVLKYNGIITEIIKSWRKQILRTQESECVCVNGSCFTIMTDGPSNRPASYRIFKIEKGKITKSIELDAPNSHYEECSCYPDTGKVMCVCRDNWHGSNRPWVSFNQNLDYQIGYICSGVFGDNPRPKDGKGSCDPVNVDGADGVKGFSYRYGNGVWIGRTKSNSSRKGFEMIWDPNGWTNTDGNFSVKQDVVAMTDWSGYSGSFVQHPELTGLDCIRPCFWVELIRGRPREETTIWTSGSSISFCGVNSDTVNWSWPDGAELPFTIDK

SEQ ID NO: 23193 - protein, 469 aa, Artificial Sequence
  derived and/or modified protein sequence (wt) from neuraminidase__InfluenzaA__AFV53274
MNPNQKIITIGSVSLIIATVCFLMQIAILVTTVTLHFKQHECDSPASNQVMPCEPIIIERNITEIVYLNNTTIEKEICPKVVEYRNWSKPQCQITGFAPFSKDNSIRLSAGGDIWVTREPYVSCDPGKCYQFALGQGTTLDNKHSNDTIHDRIPHRTLLMNELGVPFHLGTRQVCVAWSSSSCHDGKAWLHVCVTGDDKNATASFIYDGRLVDSIGSWSQNILRTQESECVCINGTCTVVMTDGSASGRADTRILFIEEGKIVHISPLSGSAQHVEECSCYPRYPDVRCICRDNWKGSNRPVIDINMEDYSIDSSYVCSGLVGDTPRNDDRSSNSNCRNPNNERGNPGVKGWAFDNGDDVWMGRTISKDLRSGYETFKVIGGWSTPNSKSQINRQVIVDSNNWSGYSGIFSVEGKSCINRCFYVELIRGRQQETRVWWTSNSIVVFCGTSGTYGTGSWPDGANINFMPI

SEQ ID NO: 23194 - protein, 469 aa, Artificial Sequence
  derived and/or modified protein sequence (wt) from neuraminidase__InfluenzaA__AFV53285
MNPNQKIITIGSVSLTIATVCFLMQIAILATTVTLHFKQHECDSPASNQVMPCEPIIIERNITEIVYLNNTTIEKEICPEVVEYRNWSKPQCQITGFAPFSKDNSIRLSAGGDIWVTREPYVSCDPGKCYQFALGQGTTLDNKHSNGTIHDRIPHRTLLMNELGVPFHLGTKQVCVAWSSSSCHDGKAWLHVCVTGDDRNATASFIYDGRLVDSIGSWSQNILRTQESECVCINGTCTVVMTDGSASGRADTRILFIKEGKIVHISPLSGSAQHIEECSCYPRHPDVRCICRDNWKGSNRPVININMEDYSIDSSYVCSGLVGDTPRNDDSSSNSNCRDPNNERGNPGVKGWAFDNGDDVWMGRTINKDSRSGYETFKVIGGWSTPNSKSQVNRQVIVDNNNWSGYSGIFSVEGKSCINRCFYVELIRGRPQETRVWWTSNSIVVFCGTSGTYGTGSWPDGANINFMPI

SEQ ID NO: 23195 - protein, 469 aa, Artificial Sequence
  derived and/or modified protein sequence (wt) from neuraminidase__InfluenzaA__AFV53296
MNPNQKIIIIGSVSLTIATVCFLMQIAILVTTVTLHFKQHECDSPASNQVMPCEPIIIERNITEIVYLNNTTIEKEICPEVVEYRNWSKPQCQITGFAPFSKDNSIRLSAGGDIWVTREPYVSCDPSKCYQFALGQGTTLDNKHSNDTIHDRIPHRTLLMNELGVPFHLGTRQVCVAWSSSSCHDGKAWLHVCVTGDDKNATASFIYDGRLVDSIGSWSQNILRTQESECVCINGTCTVVMTDGSASGRADTRILFIEEGKIVHISPLSGSAQHVEECSCYPRYPDVRCICRDNWKGSNRPVIDINMEDYSIDSSYVCSGLVGDTPRNDDRSSNSNCRDPNNERGNPGVKGWAFDNGDDVWMGRTISKDLRSGYETFKVIGGWSTPNSKSQINRQVIVDSNNWSGYSGIFSVEGKSCINRCFYVELIRGRQQETRVWWTSNSIVVFCGTSGTYGTGSWPDGANINFMPI

SEQ ID NO: 23196 - protein, 469 aa, Artificial Sequence
  derived and/or modified protein sequence (wt) from neuraminidase__InfluenzaA__AFV53307
MNPNQKIITIGSVSLTIATVCFLMQIAILATTVTLHFKQHECDSPASNQVMPCEPIIIERNITEIVYLNNTTIEKEICPEVVEYRNWSKPQCQITGFAPFSKDNSIRLSAGGDIWVTREPYVSCDPGKCYQFALGQGTTLDNKHSNGTIHDRIPHRTLLMNELGVPFHLGTKQVCVAWSSSSCHDGKAWLHVCVTGDDRNATASFIYDGRLVDSIGSWSQNILRTQESECVCINGTCTVVMTDGSASGRADTRILFIKEGKIVHISPLSGSAQHVEECSCYPRYPDVRCICRDNWKGSNRPVIDINMEDYSIDSSYVCSGLVGDTPRNDDSSSNSNCRDPNNERGNPGVKGWAFDNGDDVWMGRTINKDSRSGYETFKVIGGWSTPNSKSQVNRQVIVDNNNWSGYSGIFSVEGKSCINRCFYVELIRGRPQETRVWWTSNSIVVFCGTSGTYGTGSWPDGANINFMPI

SEQ ID NO: 23197 - protein, 469 aa, Artificial Sequence
  derived and/or modified protein sequence (wt) from neuraminidase__InfluenzaA__AFV53317
MNPNQKIITIGSVSLTIATVCFLMQIAILATTVTLHFKQHECDSPASNQVMPCEPIIIERNITEIVYLNNTTIEKEICPEVVEYRNWSKPQCQITGFAPFSKDNSIRLSAGGDIWVTREPYVSCDPGKCYQFALGQGTTLDNKHSNGTIHDRSPHRTLLMNELGVPFHLGTKQVCAAWSSSSCHDGKAWLHVCVTGDDRNATASFIYDGRLVDSIGSWSQNILRTQESECVCINGTCTVVMTDGSASGRADTRILFIKEGKIVHIGPLSGSAQHIEECSCYPRYPDVRCICRDNWKGSNRPVIDINMEDYSIDSSYVCSGLVGDTPRNDDSSSNSNCRDPNNERGNPGVKGWAFDNGDDVWMGRTISKDLRSGYETFKVIGGWSTPNSKSQVNRQVIVDNNNWSGYSGIFSVEGKSCINRCFYVELIRGRPQETRVWWTSNSIVVFCGTSGTYGTGSWPDGANINFMPI

SEQ ID NO: 23198 - protein, 469 aa, Artificial Sequence
  derived and/or modified protein sequence (wt) from neuraminidase__InfluenzaA__AFV53328
MNPNQKIITIGSVSLTIATVCFLMHIAILATTVTLHFKQHECDSPASNQAMPCEPIIIERNITEIVYLNNTTIEKEICPEVVEYRNWSKPQCQITGFAPFSKDNSIRLSAGGDIWVTREPYVSCDPGKCYQFALGQGTTLDNKHSNGTIHDRIPHRTLLMNELGVPFHLGTKQVCVAWSSSSCHDGKAWLHVCITGDDRNATASFIYDGRLVDSIGSWSQNILRTQESECVCINGTCTVVMTDGSASGRADTRILFIKEGKIVHISPLSGSAQHIEECSCYPRYPDVRCICRDNWKGSNRPVIDINMEDYSIDSSYVCSGLVGDTPRNDDSSSNSNCRDPNNERGNPGVKGWAFDNGDDVWMGRTISKDLRSGYETFKVIGGWSTPNSKSQVNRQVIVDNNNWSGYSGIFSVEGKSCINRCFYVELIRGRPQETRVWWTSNSIVVFCGTSGTYGTGSWPDGANINFMPI

SEQ ID NO: 23199 - protein, 469 aa, Artificial Sequence
  derived and/or modified protein sequence (wt) from neuraminidase__InfluenzaA__AFV53339
MNPNQKIITIGSASLTIATVCFLMQIAILVTTVTLHFKQHECDSPASNQVMPCEPIIIERNITEIVYLNNTTIEKEICPKVVEYRNWSKPQCKITGFAPFSKDNSIRLSAGGDIWVTREPYVSCDPGKCYQFALGQGTTLDNKHSNDTIHDRIPHRTLLMNELGVPFHLGTRQVCIAWSSSSCHDGKAWLHVCVTGDDKNATASFIYDGRLVDSIGSWSQNILRTQESECVCINGTCTVVMTDGSASGRADTRILFIEEGKIVHMSPLSGSAQHVEECSCYPRYPDVRCICRDNWKGSNRPVVDINMEDYSIDSSYVCSGLVGDTPRNDDRSSNSNCRNPNNEKGNQGVKGWAFDNGDDVWMGRTISKDLRSGYETFKVIGGWSTPNSKSQINRQVIVDSDNRSGYSGIFSVEGKSCINRCFYVELIRGRKQETRVWWTSNSIVVFCGTSGTYGTGSWPDGANINLMPI

SEQ ID NO: 23200 - protein, 469 aa, Artificial Sequence; identical to SEQ ID NO: 16738
  derived and/or modified protein sequence (wt) from neuraminidase__InfluenzaA__AFX96367

SEQ ID NO: 23201 - protein, 469 aa, Artificial Sequence; identical to SEQ ID NO: 16738
  derived and/or modified protein sequence (wt) from neuraminidase__InfluenzaA__AFX96386

SEQ ID NO: 23202 - protein, 469 aa, Artificial Sequence; identical to SEQ ID NO: 17092
  derived and/or modified protein sequence (wt) from neuraminidase__InfluenzaA__AFX96401

SEQ ID NO: 23203 - protein, 469 aa, Artificial Sequence; identical to SEQ ID NO: 17092
  derived and/or modified protein sequence (wt) from neuraminidase__InfluenzaA__AFX96411

SEQ ID NO: 23204 - protein, 469 aa, Artificial Sequence; identical to SEQ ID NO: 17092
  derived and/or modified protein sequence (wt) from neuraminidase__InfluenzaA__AFX96421

SEQ ID NO: 23205 - protein, 469 aa, Artificial Sequence; identical to SEQ ID NO: 17092
  derived and/or modified protein sequence (wt) from neuraminidase__InfluenzaA__AFX96431

SEQ ID NO: 23206 - protein, 469 aa, Artificial Sequence; identical to SEQ ID NO: 17092
  derived and/or modified protein sequence (wt) from neuraminidase__InfluenzaA__AFX96441

SEQ ID NO: 23207 - protein, 469 aa, Artificial Sequence; identical to SEQ ID NO: 17092
  derived and/or modified protein sequence (wt) from neuraminidase__InfluenzaA__AFX96451

SEQ ID NO: 23208 - protein, 469 aa, Artificial Sequence; identical to SEQ ID NO: 17092
  derived and/or modified protein sequence (wt) from neuraminidase__InfluenzaA__AFX96461

SEQ ID NO: 23209 - protein, 469 aa, Artificial Sequence; identical to SEQ ID NO: 16738
  derived and/or modified protein sequence (wt) from neuraminidase__InfluenzaA__AFX96471

SEQ ID NO: 23210 - protein, 469 aa, Artificial Sequence; identical to SEQ ID NO: 16738
  derived and/or modified protein sequence (wt) from neuraminidase__InfluenzaA__AFX96481

SEQ ID NO: 23211 - protein, 469 aa, Artificial Sequence; identical to SEQ ID NO: 16738
  derived and/or modified protein sequence (wt) from neuraminidase__InfluenzaA__AFX96491

SEQ ID NO: 23212 - protein, 469 aa, Artificial Sequence; identical to SEQ ID NO: 16738
  derived and/or modified protein sequence (wt) from neuraminidase__InfluenzaA__AFX96501

SEQ ID NO: 23213 - protein, 469 aa, Artificial Sequence; identical to SEQ ID NO: 16738
  derived and/or modified protein sequence (wt) from neuraminidase__InfluenzaA__AFX96511

SEQ ID NO: 23214 - protein, 469 aa, Artificial Sequence
  derived and/or modified protein sequence (wt) from neuraminidase__InfluenzaA__AFX96521
MNPNQKIITIGSVCMTIGMANLILQIGNIISIWISHSIQLGNQNQIETCNQSVITYENNTWVNQTYVNISNTNFAARQSVVSVKLAGNSSLCPVSGWAIYSKDNSIRIGSKGDVFVIREPFISCSPLECRTFFLTQGALLNDKHSNGTIKDRSPYRTLMSCPIGEVPSPYNSRFESVAWSASACHDGINWLTIGISGPDNGAVAVLKYNGIITDTIKSWRNNILRTQESECACVNGSCFTVMTDGPSDGQASYKIFRIEKGKIVKSVEMNAPNYHYEECSCYPDSSEITCVCRDNWHGSNRPWVSFNQNLEYQIGYICSGIFGDNPRPNDKTGSCGPVSSNGANGVKGFSFKYGNGVWIGRTKSISSRNGFEMIWDPNGWTGTDNNFSIKQDIVGINEWSGYSGSFVQHPELTGLDCIRPCFWVELIRGRPKENTIWTSGSSISFCGVNSDTVGWSWPDGAELPFTIDK

SEQ ID NO: 23215 - protein, 469 aa, Artificial Sequence; identical to SEQ ID NO: 16738
  derived and/or modified protein sequence (wt) from neuraminidase__InfluenzaA__AFX96531

SEQ ID NO: 23216 - protein, 469 aa, Artificial Sequence; identical to SEQ ID NO: 16738
  derived and/or modified protein sequence (wt) from neuraminidase__InfluenzaA__AFX96541

SEQ ID NO: 23217 - protein, 469 aa, Artificial Sequence; identical to SEQ ID NO: 16738
  derived and/or modified protein sequence (wt) from neuraminidase__InfluenzaA__AFX96551

SEQ ID NO: 23218 - protein, 469 aa, Artificial Sequence; identical to SEQ ID NO: 21262
  derived and/or modified protein sequence (wt) from neuraminidase__InfluenzaA__AFX96561

SEQ ID NO: 23219 - protein, 469 aa, Artificial Sequence; identical to SEQ ID NO: 16738
  derived and/or modified protein sequence (wt) from neuraminidase__InfluenzaA__AFX96571

SEQ ID NO: 23220 - protein, 469 aa, Artificial Sequence; identical to SEQ ID NO: 16738
  derived and/or modified protein sequence (wt) from neuraminidase__InfluenzaA__AFX96581

SEQ ID NO: 23221 - protein, 469 aa, Artificial Sequence; identical to SEQ ID NO: 16738
  derived and/or modified protein sequence (wt) from neuraminidase__InfluenzaA__AFX96591

SEQ ID NO: 23222 - protein, 469 aa, Artificial Sequence; identical to SEQ ID NO: 16738
  derived and/or modified protein sequence (wt) from neuraminidase__InfluenzaA__AFX96601

SEQ ID NO: 23223 - protein, 469 aa, Artificial Sequence; identical to SEQ ID NO: 16738
  derived and/or modified protein sequence (wt) from neuraminidase__InfluenzaA__AFX96611

SEQ ID NO: 23224 - protein, 469 aa, Artificial Sequence; identical to SEQ ID NO: 16738
  derived and/or modified protein sequence (wt) from neuraminidase__InfluenzaA__AFX96621

SEQ ID NO: 23225 - protein, 469 aa, Artificial Sequence; identical to SEQ ID NO: 16738
  derived and/or modified protein sequence (wt) from neuraminidase__InfluenzaA__AFX96631

SEQ ID NO: 23226 - protein, 469 aa, Artificial Sequence
  derived and/or modified protein sequence (wt) from neuraminidase__InfluenzaA__AFX96641
MNPNQKIITIGSVCMTIGMANLILQIGNIISIWISHSIQLGNQNQIETCNQSVITYENNTWVNQTYVNISNTNFAAGQSVVSVKLAGNSSLCPVSGWAIYSKDNSIRIGSKGDVFVIREPFISCSPLECRTFFLTQGALLNDKHSNGTIKDRSPYRTLMSCPIGEVPSPYNSKFESVAWSASACHDGINWLTIGISGPDNGAVAVLKYNGIITDTIKSWRNNILRTQESECACVNGSCFTVMTDGPSDGQASYKIFRIEKGKIVKSVEMNAPNYHYEECSCYPDSSEITCVCRDNWHGSNRPWVSFNQNLEYQIGYICSGIFGDNPRPNDKTGSCGPVSSNGANGVKGFSFKYGNGVWIGRTKSISSRNGFEMIWDPNGWTGTDNNFSIKQDIVGINEWSGYSGSFVQHPELTGLDCIRPCFWVELIRGRPKENTIWTSGSSISFCGVNSDTVGWSWPDGAELPFTIDK

SEQ ID NO: 23227 - protein, 469 aa, Artificial Sequence; identical to SEQ ID NO: 16738
  derived and/or modified protein sequence (wt) from neuraminidase__InfluenzaA__AFX96651

SEQ ID NO: 23228 - protein, 469 aa, Artificial Sequence; identical to SEQ ID NO: 16738
  derived and/or modified protein sequence (wt) from neuraminidase__InfluenzaA__AFX96661

SEQ ID NO: 23229 - protein, 469 aa, Artificial Sequence; identical to SEQ ID NO: 16738
  derived and/or modified protein sequence (wt) from neuraminidase__InfluenzaA__AFX96671

SEQ ID NO: 23230 - protein, 469 aa, Artificial Sequence; identical to SEQ ID NO: 16738
  derived and/or modified protein sequence (wt) from neuraminidase__InfluenzaA__AFX96681

SEQ ID NO: 23231 - protein, 469 aa, Artificial Sequence; identical to SEQ ID NO: 16738
  derived and/or modified protein sequence (wt) from neuraminidase__InfluenzaA__AFX96691

SEQ ID NO: 23232 - protein, 469 aa, Artificial Sequence
  derived and/or modified protein sequence (wt) from neuraminidase__InfluenzaA__AFX96701
MNPNQKIITIGSVCMTIGMANLILQIGNIISIWISHSIQLGNQNQIETCNQSIITYENNTWVNQTYVNISNTNFAAGQSVVSVKLAGNSSLCPVSGWAIYSKDNSIRIGSKGDVFVIREPFISCSPLECRTFFLTQGALLNDKHSNGTIKDRSPYRTLMSCPIGEVPSPYNSRFESVAWSASACHDGINWLTIGISGPDNGAVAVLKYNGIITDTIKSWRNNILRTQESECACVNGSCFTVMTDGPSDGQASYKIFRIEKGKIVKSVEMNAPNYHYEECSCYPDSSEITCVCRDNWHGSNRPWVSFNQNLEYQIGYICSGIFGDNPRPNDKTGSCGPVSFNGANGVKGFSFKYGNGVWIGRTKSISSRNGFEMIWDPNGWTGTDNNFSIKQDIVGINEWSGYSGSFVQHPELTGLDCIRPCFWVELIRGRPKENTIWTSGSIISFCGVNSDTVGWSWPDGAELPFTIDK

SEQ ID NO: 23233 - protein, 469 aa, Artificial Sequence; identical to SEQ ID NO: 16738
  derived and/or modified protein sequence (wt) from neuraminidase__InfluenzaA__AFX96711

SEQ ID NO: 23234 - protein, 469 aa, Artificial Sequence
  derived and/or modified protein sequence (wt) from neuraminidase__InfluenzaA__AFX96721
MNPNQKIITIGSVCMTIGMANLILQIGNIISIWISHSIQLGNQNQIETCNQSVITYENNTWVNQTYVNISNTNFAAGQSVVSVKLAGNSSLCPVSGWAIYSKDNSIRIGSKGDVFVIREPFISCSPLECRTFFLTQGALLNDKHSNGTIKDRSPYRTLMSCPIGEVPSPYNSRFESVAWSASACHDGINWLTIGISGPDNGAVAVLKYNGIITDTIKSWRNNILRTQESECACVNGSCFTVMTDGPSDGQASYKIFRIEKGKIVKSVEMNAPNYHYEECSCYPDSSEITCVCRDNWHGSNRPWVSFNQNLEYQIGYICSGIFGDNPRPNDKTGSCGPVSSNGANGVKGFSFKYGNGVWIGRTKSISSRNGFEMIWDPNGWTGTDNNFSIKQDIVGINEWSGYSGSFVQHPELTGLDCIRPCFWVELIRGRPKENTVWTSGSSISFCGVNSDTVGWSWPDGAELPFTIDK

SEQ ID NO: 23235 - protein, 469 aa, Artificial Sequence; identical to SEQ ID NO: 23234
  derived and/or modified protein sequence (wt) from neuraminidase__InfluenzaA__AFX96731

SEQ ID NO: 23236 - protein, 469 aa, Artificial Sequence; identical to SEQ ID NO: 16738
  derived and/or modified protein sequence (wt) from neuraminidase__InfluenzaA__AFX96741

SEQ ID NO: 23237 - protein, 469 aa, Artificial Sequence; identical to SEQ ID NO: 16738
  derived and/or modified protein sequence (wt) from neuraminidase__InfluenzaA__AFX96751

SEQ ID NO: 23238 - protein, 469 aa, Artificial Sequence; identical to SEQ ID NO: 17756
  derived and/or modified protein sequence (wt) from neuraminidase__InfluenzaA__AFX96761

SEQ ID NO: 23239 - protein, 469 aa, Artificial Sequence; identical to SEQ ID NO: 16738
  derived and/or modified protein sequence (wt) from neuraminidase__InfluenzaA__AFX96771

SEQ ID NO: 23240 - protein, 469 aa, Artificial Sequence
  derived and/or modified protein sequence (wt) from neuraminidase__InfluenzaA__AFX96791
MNPNQKIITIGSVCMTIGMANLILQVGNIISIWISHSIQLGNQNQIETCNQSVITYENNTWVNQTYVNISNTNFAAGQSVVSVKLAGNSSLCPVSGWAIYSKDNSIRIGSKGDVFVIREPFISCSPLECRTFFLTQGALLNDKHSNGTIKDRSPYRTLMSCPIGEVPSPYNSRFESVAWSASACHDGINWLTIGISGPDNGAVAVLKYNGIITDTIKSWRNNILRTQESECACINGSCFTVMTDGPSDGQASYKIFRIEKGKIVKSVEMNAPNYHYEECSCYPDSSEITCVCRDNWHGSNRPWVSFNQNLEYQIGYICSGIFGDNPRPNDKTGSCGPVSSNGANGVKGFSFKYGNGVWIGRTKSISSRNGFEMIWDPNGWTGTDNNFSIKQDIVGINEWSGYSGSFVQHPELTGLDCIRPCFWVELIRGRPKENTIWTSGSSISFCGVNSDTVGWSWPDGAELPFTIDK

SEQ ID NO: 23241 - protein, 469 aa, Artificial Sequence; identical to SEQ ID NO: 23240
  derived and/or modified protein sequence (wt) from neuraminidase__InfluenzaA__AFX96801

SEQ ID NO: 23242 - protein, 469 aa, Artificial Sequence
  derived and/or modified protein sequence (wt) from neuraminidase__InfluenzaA__AFX96811
MNPNQKIITIGSVCMTIGMANLILQIGNIISIWISHSIQLGNQNQIETCNQSVITYENNTWVNQTYVNISNTNFAAGQSVVSVRLAGNSSLCPVSGWAIYSKDNSIRIGSKGDVFVIREPFISCSPLECRTFFLTQGALLNDKHSNGTIKDRSPYRTLMSCPIGEVPSPYNSRFESVAWSASACHDGINWLTIGISGPDNGAVAVLKYNGIITDTIKSWRNNILRTQESECACVNGSCFTVMTDGPSDGQASYKIFRIEKGKIVKSVEMNAPNYHYEECSCYPDSSEITCVCRDNWHGSNRPWVSFNQNLEYQIGYICSGIFGDNPRPNDKTGSCGPVSSNGANGVKGFSFKYGNGVWIGRTKSISSRNGFEMIWDPNGWTGTDNNFSIKQDIVGINEWSGYSGSFVQHPELTGLDCIRPCFWVELIRGRPKENTIWTSGSSISFCGVNSDTVGWSWPDGAELPFTIDK

SEQ ID NO: 23243 - protein, 469 aa, Artificial Sequence; identical to SEQ ID NO: 16738
  derived and/or modified protein sequence (wt) from neuraminidase__InfluenzaA__AFX96821

SEQ ID NO: 23244 - protein, 469 aa, Artificial Sequence; identical to SEQ ID NO: 23240
  derived and/or modified protein sequence (wt) from neuraminidase__InfluenzaA__AFX96831

SEQ ID NO: 23245 - protein, 469 aa, Artificial Sequence
  derived and/or modified protein sequence (wt) from neuraminidase__InfluenzaA__AFX96841
MNPNQKIITIGSVCMTIGMANLILQIGNIISIWISHSIQLGNQNQIETCNQSVITYENNTWVNQTYVNISNTNFAAGQSVVSVRLAGNSSLCPVSGWAIYSKDNSIRIGSKGDVFVIREPFISCSPLECRTFFLTQGALLNDKHSNGTIKDRSPYRTLMSCPIGEVPSPYNSRFESVAWSASACHDGINWLTIGISGPDNGAVAVLKYNGIITDTIKSWRNNILRTQESECACVNGSCFTVMTDGPSDGQASYKIFRIEKGKIVKSVEMNAPNYYYEECSCYPDSSEITCVCRDNWHGSNRPWVSFNQNLEYQIGYICSGIFGDNPRPNDKTGSCGPVSSNGANGVKGFSFKYGNGVWIGRTKSISSRNGFEMIWDPNGWTGTDNNFSIKQDIVGINEWSGYSGSFVQHPELTGLDCIRPCFWVELIRGRPKENTIWTSGSSISFCGVNSDTVGWSWPDGAELPFTIDK

SEQ ID NO: 23246 - protein, 469 aa, Artificial Sequence; identical to SEQ ID NO: 16738
  derived and/or modified protein sequence (wt) from neuraminidase__InfluenzaA__AFX96859

SEQ ID NO: 23247 - protein, 469 aa, Artificial Sequence; identical to SEQ ID NO: 16738
  derived and/or modified protein sequence (wt) from neuraminidase__InfluenzaA__AFX96907

SEQ ID NO: 23248 - protein, 469 aa, Artificial Sequence; identical to SEQ ID NO: 16738
  derived and/or modified protein sequence (wt) from neuraminidase__InfluenzaA__AFX96917

SEQ ID NO: 23249 - protein, 469 aa, Artificial Sequence; identical to SEQ ID NO: 16738
  derived and/or modified protein sequence (wt) from neuraminidase__InfluenzaA__AFX96927

SEQ ID NO: 23250 - protein, 469 aa, Artificial Sequence
  derived and/or modified protein sequence (wt) from neuraminidase__InfluenzaA__AFX96937
MNPNQKIITIGSVCMTIGMANLILQIGNIISIWISHSIQLGNQNQIETCNQSVITYENNTWVNQTYVNISSTNFAAGQSVVSVKLAGNSSLCPVSGWAIYSKDNSIRIGSKGDVFVIREPFISCSPLECRTFFLTQGALLNDKHSNGTIKDRSPYRTLMSCPIGEVPSPYNSRFESVAWSASACHDGINWLTIGISGPDNGAVAVLKYNGIITDTIKSWRNNILRTQESECACVNGSCFTVMTDGPSDGQASYKIFRIEKGKIVKSVEMNAPNYHYEECSCYPDSSEITCVCRDNWHGSNRPWVSFNQNLEYQIGYICSGIFGDNPRPNDKTGSCGPVSSNGANGVKGFSFKYGNGVWIGRTKSISSRNGFEMIWDPNGWTGTDNNFSIKQDIVGINEWSGYSGSFVQHPELTGLDCIRPCFWVELIRGRPKENTIWTSGSSISFCGVNSDTVGWSWPDGAELPFTIDK

SEQ ID NO: 23251 - protein, 469 aa, Artificial Sequence; identical to SEQ ID NO: 16728
  derived and/or modified protein sequence (wt) from neuraminidase__InfluenzaA__AFY23991

SEQ ID NO: 23252 - protein, 469 aa, Artificial Sequence; identical to SEQ ID NO: 16738
  derived and/or modified protein sequence (wt) from neuraminidase__InfluenzaA__AFY24001

SEQ ID NO: 23253 - protein, 469 aa, Artificial Sequence; identical to SEQ ID NO: 16738
  derived and/or modified protein sequence (wt) from neuraminidase__InfluenzaA__AFY24022

SEQ ID NO: 23254 - protein, 469 aa, Artificial Sequence; identical to SEQ ID NO: 16738
  derived and/or modified protein sequence (wt) from neuraminidase__InfluenzaA__AFY24043

SEQ ID NO: 23255 - protein, 469 aa, Artificial Sequence
  derived and/or modified protein sequence (wt) from neuraminidase__InfluenzaA__AFY24153
MNPNQKIITIGSVSLTISTICFFMQIAILITTVTLHFKQYEFNSPPNNQVMLCEPTIIERNITEIVYLTNTTIEKEICPKLAEYRNWSKPQCNITGFAPFSKDNSIRLSAGGDIWVTREPYVSCDPDKCYQFALGQGTTLNNVHSNDTVHDRTPYRTLLMNELGVPFHLGTKQVCIAWSSSSCHDGKAWLHVCVTGDDKNATASFIYNGRLVDSIVSWSKEILRTQESECVCINGTCTVVMTDGSASGKADTKILFIEEGKIVHTSTLSGSAQHVEECSCYPRYPGVRCVCRDNWKGSNRPIVDINITDYSIVSSYVCSGLVGDTPRKNDSSSSSHCLDPNNEEGGHGVKGWAFDDGNDVWMGRTISEKLRSGYETFKVIEGWSNPNSKLQINRQVIVDRGNRSGYSGIFSVEGKSCINRCFYVELIRGRKEETEVLWTSNSIVVFCGTSGTYGTGSWPDGADINLMPI

SEQ ID NO: 23256 - protein, 469 aa, Artificial Sequence
  derived and/or modified protein sequence (wt) from neuraminidase__InfluenzaA__AFY24208
MNPNQKIITIGSVSLTISTICFFMQIAILITTVTLHFKQYEFNSPPNNQVMLCEPTIIERNITEIVYLTNTTIEKEICPKLAEYRNWSKPQCNITGFAPFSKDNSIRLSAGGDIWVTREPYVSCDPDKCYQFALGQGTTLNNVHSNDTVHNRTPYRTLLMNELGVPFHLGTKQVCIAWSSSSCHDGKAWLHVCVTGDDENATASFIYNGRLVDSIVSWSKKILRTQESECVCINGTCTVVMTDGSASGKADTKILFIEEGKIVHTSTLSGSAQHVEECSCYPRYPGVRCVCRDNWKGSNRPIVDINIKDYSIVSSYVCSGLVGDTPRKNDSSSSSHCLDPNNEEGGHGVKGWAFDDGNDVWMGRTISERLRSGYETFKVIEGWSNPNSKLQINRQVIVDRGNRSGYSGIFSVEGKSCINRCFYVELIRGRKQETEVLWTSNSIVVFCGTSGTYGTGSWPDGADINLMPI

SEQ ID NO: 23257 - protein, 469 aa, Artificial Sequence; identical to SEQ ID NO: 15929
  derived and/or modified protein sequence (wt) from neuraminidase__InfluenzaA__AFY24219

SEQ ID NO: 23258 - protein, 469 aa, Artificial Sequence
  derived and/or modified protein sequence (wt) from neuraminidase__InfluenzaA__AGB12978
MNPNQRIITIGSVCMTIGMANLILQIGNIISIWISHSIQLGNQNQIETCNQSVITYENNTWVNQTYVNISNTNFAARQSVVSVKLAGNSSLCPVSGWAIYSKDNSIRIGSKGDVFVIREPFISCSPLECRTFFLTQGALLNDKHSNGTIKDRSPYRTLMSCPIGEVPSPYNSRFESVAWSASACHDGINWLTIGISGPDNGAVAVLKYNGIITDTIKSWRNNILRTQESECACVNGSCFTIMTDGPSDGQASYKIFRIEKGKIVKSVEMNAPNYHYEECSCYPDSSEITCVCRDNWHGSNRPWVSFNQNLEYQIGYICSGIFGDNPRPNDKTGSCGPVSSNGANGVKGFSFKYGNGVWIGRTKSISSRKGFEMIWDPNGWTGTDNNFSIKQDIVGINEWSGYSGSFVQHPELTGLDCIRPCFWVELIRGRPKENTIWTSGSSISFCGVNSDTVGWSWPDGAELPFTIDK

SEQ ID NO: 23259 - protein, 469 aa, Artificial Sequence; identical to SEQ ID NO: 20257
  derived and/or modified protein sequence (wt) from neuraminidase__InfluenzaA__AGB12989

SEQ ID NO: 23260 - protein, 469 aa, Artificial Sequence; identical to SEQ ID NO: 20709
  derived and/or modified protein sequence (wt) from neuraminidase__InfluenzaA__AGB13009

SEQ ID NO: 23261 - protein, 469 aa, Artificial Sequence; identical to SEQ ID NO: 20709
  derived and/or modified protein sequence (wt) from neuraminidase__InfluenzaA__AGB13019

SEQ ID NO: 23262 - protein, 469 aa, Artificial Sequence; identical to SEQ ID NO: 20709
  derived and/or modified protein sequence (wt) from neuraminidase__InfluenzaA__AGB13029

SEQ ID NO: 23263 - protein, 469 aa, Artificial Sequence; identical to SEQ ID NO: 20958
  derived and/or modified protein sequence (wt) from neuraminidase__InfluenzaA__AGB13039

SEQ ID NO: 23264 - protein, 469 aa, Artificial Sequence; identical to SEQ ID NO: 20709
  derived and/or modified protein sequence (wt) from neuraminidase__InfluenzaA__AGB13051

SEQ ID NO: 23265 - protein, 469 aa, Artificial Sequence
  derived and/or modified protein sequence (wt) from neuraminidase__InfluenzaA__AGB13069
MNPNQKIITIGSICMTIGMANLILQIGNIISIWISHSIQLGNQNQIETCNQSVITYENNTWVNQTYVNISNTNFAAGQSVVSVKLAGNSSLCPVSGWAIYSKDNSIRIGSKGDVFVIREPFISCSPLECRTFFLTQGALLNDKHSNGTIKDRSPYRTLMSCPIGEVPSPYNSRFESVAWSASACHDGINWLTIGISGPDNGAVAVLKYNGIITDTIKSWRNNILRTQESECACVNGSCFTVMTDGPSDGQASYKIFRIEKGKIVKSVEMNAPNYHYEECSCYPDSSEITCVCRDNWHGSNRPWISFNQNLEYQIGYICSGIFGDNPRPNDKTGSCGPVSSNGANGVKGFSFKYGNGVWIGRTKSISSRNGFEMIWDPNGWTGTDNNFSIKQDIVGINEWSGYSGSFVQHPELTGLDCIRPCFWVELIRGRPKENTIWTSGSSISFCGVNSDTVGWSWPDGAELPFTIDK

SEQ ID NO: 23266 - protein, 469 aa, Artificial Sequence
  derived and/or modified protein sequence (wt) from neuraminidase__InfluenzaA__AGB13074
MNPNQKIITIGSVCMTIGMANLILQIGNIISIWISHSIQLGNQNQIETCNQSVITYENNTWVNQTYVNISNTNFAAGQSVASVKLAGNSSLCPVSGWAIYSKDNSVRIGSKGDVFVIREPFISCSPLECRTFFLTQGALLNDKHSNGTIKDRSPYRTLMSCPIGEVPSPYNSRFESVAWSASACHDGINWLTIGISGPDNGAVAVLKYNGIITDTIKSWRNNILRTQESECACVNGSCFTVMTDGPSDGQASYKIFRIEKGKIVKSVEMNAPNYHYEECSCYPDSSEITCVCRDNWHGSNRPWVSFNQNLEYQIGYICSGIFGDNPRPNDKTGSCGPVSSNGANGVKGFSFKYGNGVWIGRTKSISSRNGFEMIWDPNGWTGTDNNFSIKQDIVGINEWSGYSGSFVQHPELTGLDCIRPCFWVELIRGRPKENTIWTSGSSISFCGVNSDTVGWSWPDGAELPFTIDK

SEQ ID NO: 23267 - protein, 469 aa, Artificial Sequence
  derived and/or modified protein sequence (wt) from neuraminidase__InfluenzaA__AGB13115
MNPNQKIITIGSVCMTIGMANLILQIGNIISIWISHSIQLGNQNQIETCNQSVITYENNTWVNQTYVNISNTNFAAGQSVVSVKLAGNSSLCPVSGWAIYSKDNSIRIGSKGDVFVLREPFISCSPLECRTFFLTQGALLNDKHSNGTIKDRSPYRTLMSCPIGEVPSPYNSRFESVAWSASACHDGINWLTIGISGPDNGAVAVLKYNGIITDTIKSWRNNILRTQESECACVNGSCFTIMTDGPSDGQASYKIFRIEKGKIVKSVEMNAPNYHYEECSCYPDSSEITCVCRDNWRGSNRPWVSFNQNLEYQIGYICSGIFGDNPRPNDKTGSCGPVSSNGANGVKGFSFKYGNGVWIGRTKSISSRKGFEMIWDPNGWTGTDNNFSIKQDIVGINEWSGYSGSFVQHPELTGLDCIRPCFWVELIRGRPKENTIWTSGSSISFCGVNSDTVGWSWPDGAELPFTIDK

SEQ ID NO: 23268 - protein, 469 aa, Artificial Sequence; identical to SEQ ID NO: 20709
  derived and/or modified protein sequence (wt) from neuraminidase__InfluenzaA__AGB13133

SEQ ID NO: 23269 - protein, 469 aa, Artificial Sequence; identical to SEQ ID NO: 20257
  derived and/or modified protein sequence (wt) from neuraminidase__InfluenzaA__AGB13152

SEQ ID NO: 23270 - protein, 469 aa, Artificial Sequence; identical to SEQ ID NO: 20257
  derived and/or modified protein sequence (wt) from neuraminidase__InfluenzaA__AGB13162

SEQ ID NO: 23271 - protein, 469 aa, Artificial Sequence; identical to SEQ ID NO: 21080
  derived and/or modified protein sequence (wt) from neuraminidase__InfluenzaA__AGB13173

SEQ ID NO: 23272 - protein, 469 aa, Artificial Sequence
  derived and/or modified protein sequence (wt) from neuraminidase__InfluenzaA__AGB13183
MNPNQKIITIGSVCMTIGMANLILQIGNIISIWISHSIQLGNQNQIETCNQSVITYENNTWVNQTYVNISNTNFAAGQSVVSVKLAGNSSLCPVSGWAIYSKDNSIRIGSKGDVFVIREPFISCSPLECRTFFLTQGALLNDKHSNGTIKDRSPYRTLMSCPIGEVPSPYNSRFESVAWSASACHDGINWLTIGISGQDNGAVAVLKYNGIITDTIKSWRNNILRTQESECACVNGSCFTIMTDGPSDGQASYKIFRIEKGKIVKSVEMNAPNYHYEECSCYPDSSEITCVCRDNWHGSNRPWVSFNQNLEYQIGYICSGIFGDNPRPNDKTGSCGPVSSNGANGVKGFSFKYGNGVWIGRTKSISSRKGFEMIWDPNGWTGTDNNFSIKQDIVGINEWSGYSGSFVQHPELTGLDCIRPCFWVELIRGRPKENTIWTSGSSISFCGVNSDTVGWSWPDGAELPFTIDK

SEQ ID NO: 23273 - protein, 469 aa, Artificial Sequence; identical to SEQ ID NO: 20709
  derived and/or modified protein sequence (wt) from neuraminidase__InfluenzaA__AGB13193

SEQ ID NO: 23274 - protein, 469 aa, Artificial Sequence; identical to SEQ ID NO: 20776
  derived and/or modified protein sequence (wt) from neuraminidase__InfluenzaA__AGB13203

SEQ ID NO: 23275 - protein, 469 aa, Artificial Sequence; identical to SEQ ID NO: 20709
  derived and/or modified protein sequence (wt) from neuraminidase__InfluenzaA__AGB13213

SEQ ID NO: 23276 - protein, 469 aa, Artificial Sequence; identical to SEQ ID NO: 20709
  derived and/or modified protein sequence (wt) from neuraminidase__InfluenzaA__AGB13223

SEQ ID NO: 23277 - protein, 469 aa, Artificial Sequence; identical to SEQ ID NO: 20709
  derived and/or modified protein sequence (wt) from neuraminidase__InfluenzaA__AGB13233

SEQ ID NO: 23278 - protein, 469 aa, Artificial Sequence
  derived and/or modified protein sequence (wt) from neuraminidase__InfluenzaA__AGB13243
MNPNQKIITIGSVCMTIGMANLILQIGNIISIWISHSIQLGNQNQIETCNQSVITYENNTWVNQTYVNISNTNFAAGQSVVSVKLAGNSSLCPVSGWAIYSKDNSIRIGSKGDVFVIREPFISCSPLECRTFFLTQGALLNDKHSNGTIKDRSPYRTLMSCPIGEVPSPYNSRFESVAWSASACHDGINWLTIGISGPDNGAVAVLKYNGIITDTIKSWRNNILRTQESECACVNGSCFTIMTDGPSDGQASYKIFRIERGKIVKSVEMNAPNYYYEECSCYPDSSEITCVCRDNWHGSNRPWVSFNQNLEYQIGYICSGVFGDNPRPNDKTGSCGPVSSNGANGVKGFSFKYGNGVWIGRTKSISSRKGFEMIWDPNGWTGTDNNFSIKQDIVGINEWSGYSGSFVQHPELTGLDCIRPCFWVELIRGRPKENTIWTSGSSISFCGVNSDTVGWSWPDGAELPFTIDK

SEQ ID NO: 23279 - protein, 469 aa, Artificial Sequence; identical to SEQ ID NO: 20776
  derived and/or modified protein sequence (wt) from neuraminidase__InfluenzaA__AGB13253

SEQ ID NO: 23280 - protein, 469 aa, Artificial Sequence
  derived and/or modified protein sequence (wt) from neuraminidase__InfluenzaA__AGB13263
MNPNQKIITIGSVCMTIGMANLILQIGNIISIWISHSIQLGNQNQTETCNQSVITYENNTWVNQTYVNISNTNFAAGQSVVSVKLAGNSSLCPVSGWAIYSKDNSIRIGSKGDVFVIREPFISCSPLECRTFFLTQGALLNDKHSNGTIKDRSPYRTLMSCPIGEVPSPYNSRFESVAWSASACHDGINWLTIGISGPDNGAVAVLKYNGIITDTIKSWRNNILRTQESECACVNGSCFTVMTDGPSDGQASYKIFRIEKGKIVKSVEMKAPNYHYEECSCYPDSSEITCVCRDNWHGSNRPWVSFNQNLEYRIGYICSGIFGDNPRPNDKTGSCGPVSSNGANGVKGFSFKYGNGVWIGRTKSISSRNGFEMIWDPNGWTGTDNNFSIKQDIIGINEWSGYSGSFVQHPELTGLDCIRPCFWVELIRGRPKENTIWTSGSSISFCGVNSDTVGWSWPDGAELPFTVDK

SEQ ID NO: 23281 - protein, 469 aa, Artificial Sequence; identical to SEQ ID NO: 20709
  derived and/or modified protein sequence (wt) from neuraminidase__InfluenzaA__AGB13273

SEQ ID NO: 23282 - protein, 469 aa, Artificial Sequence
  derived and/or modified protein sequence (wt) from neuraminidase__InfluenzaA__AGB13283
MNPNQKIITIGSVCMTIGMANLILQIGNIISIWISHSIQLGNQNQIETCNQSVITYENNTWVNQTYVNISNTNFAAGQSVVSVKLAGNSSLCPVSGWAIYSKDNSIRIGSKGDVFVIREPFISCSPLECRTFFLTQGALLNDKHSNGTIKDRSPYRTLMSCPIGEVPSPYNSRFESVAWSASACHDGINWLTIGISGPDNGAVAVLKYNGIITDTIKSWRNNILRTQESECACVNGSCFTIMTDGPSDGQASYKIFRIEKGKIVKSVEMNAPNYHYEECSCYPDSSEITCVCRDNWHGSNRPWVSFNQNLEYQIGYICSGIFGDNPRPNDKTGSCGPVSSNGANGVKGFSFKYGNGVWIGRTKSISSRRGFEMIWDPNGWTGTDNNFSIKQDIVGINEWSGYSGSFVQHPELTGLDCIRPCFWVELIRGRPKENTIWTSGSSISFCGVNSDTVGWSWPDGAELPFTIDK

SEQ ID NO: 23283 - protein, 469 aa, Artificial Sequence; identical to SEQ ID NO: 20709
  derived and/or modified protein sequence (wt) from neuraminidase__InfluenzaA__AGB13293

SEQ ID NO: 23284 - protein, 469 aa, Artificial Sequence; identical to SEQ ID NO: 20709
  derived and/or modified protein sequence (wt) from neuraminidase__InfluenzaA__AGB13303

SEQ ID NO: 23285 - protein, 469 aa, Artificial Sequence
  derived and/or modified protein sequence (wt) from neuraminidase__InfluenzaA__AGB13313
MNPNQKIITIGSVCMTIGMANLILQIGNIISIWISHSIQLGNQNQIETCNQSVITYENNTWVNQTYVNISNTNFAAGQSVVSAKLAGNSSLCPVSGWAIYSKDNSIRIGSKGDVFVIREPFISCSPLECRTFFLTQGALLNDKHSNGTIKDRSPYRTLMSCPIGEVPSPYNSRFESVAWSASACHDGINWLTIGISGPDNGAVAVLKYNGIITDTIKSWRNNILRTQESECACVNGSCFTVMTDGPSDGQASYKIFRIEKGKIVKSVEMNAPNYHYEECSCYPDSSEITCVCRDNWHGSNRPWVSFNQNLEYQIGYICSGIFGDNPRPNDKKGSCGPVSSNGANGVKGFSFKYGNGVWIGRTKSISSRNGFEMIWDPNGWTGTDNNFSIKQDIVGINEWSGYSGSFVQHPELTGLDCIRPCFWVELIRGRPKENTIWTSGSSISFCGVNSDTVGWSWPDGAELPFTIDK

SEQ ID NO: 23286 - protein, 469 aa, Artificial Sequence; identical to SEQ ID NO: 20709
  derived and/or modified protein sequence (wt) from neuraminidase__InfluenzaA__AGB13323

SEQ ID NO: 23287 - protein, 469 aa, Artificial Sequence
  derived and/or modified protein sequence (wt) from neuraminidase__InfluenzaA__AGB13333
MNPNQKIITIGSVCMTIGMANLILQIGNIISIWISHSIQLGNQSQIETCNQSVITYENNTWVNQTYVNISNTNFAAGQSAVSVKLAGNSSLCPVSGWAIYSKDNSIRIGSKGDVFVIREPFISCSPLECRTFFLTQGALLNDKHSNGTIKDRSPYRTLMSCPIGEVPSPYNSRFESVAWSASACHDGINWLTIGISGPDNGAVAVLKYNGIITDTIKSWRNNILRTQESECACVNGSCFTIMTDGPSDGQASYKIFRIEKGKIVKSVEMNAPNYHYEECSCYPDSSEITCVCRDNWHGSNRPWVSFNQNLEYQIGYICSGIFGDNPRPNDKTGSCGPVSSNGANGVKGFSFKYGNGVWIGRTKSISSRKGFEMIWDPNGWTGTDNNFSIKQDIVGINEWSGYSGSFVQHPELTGLDCIRPCFWVELIRGRPKENTIWTSGSSISFCGVNSDTVGWSWPDGAELPFTIDK

SEQ ID NO: 23288 - protein, 469 aa, Artificial Sequence; identical to SEQ ID NO: 20709
  derived and/or modified protein sequence (wt) from neuraminidase__InfluenzaA__AGB13343

SEQ ID NO: 23289 - protein, 469 aa, Artificial Sequence; identical to SEQ ID NO: 20958
  derived and/or modified protein sequence (wt) from neuraminidase__InfluenzaA__AGB13353

SEQ ID NO: 23290 - protein, 469 aa, Artificial Sequence
  derived and/or modified protein sequence (wt) from neuraminidase__InfluenzaA__AGB13363
MNPNQKIITIGSVCMTIGMANLILQIGNIISIWISHSIQLGNQNQIETCNQSVITYENNTWVNQTYVNISNTNFAAGQSVASVKLAGNSSLCSVSGWAIYSKDNSIRIGSKGDVFVIREPFISCSPLECRTFFLTQGALLNDKHSNGTIKDRSPYRTLMSCPIGEVPSPYNSRFESVAWSASACHDGINWLTIGISGPDNGAVAVLKYNGIITDTIKSWRNNILRTQESECACVNGSCFTIMTDGPSDGQASYKIFRIEKGKIVKSVEMNAPNYHYEECSCYPDSSEITCVCRDNWHGSNRPWVSFNQNLEYQIGYICSGIFGDNPRPNDKTGSCGPVSSNGANGVKGFSFKYGNGVWIGRTKSISSRKGFEMIWDPNGWTGTDNNFSIKQDIVGINEWSGYSGSFVQHPELTGLDCIRPCFWVELIRGRPKENTIWTSGSSISFCGVNSDTVGWSWPDGAELPFTIDK

SEQ ID NO: 23291 - protein, 469 aa, Artificial Sequence
  derived and/or modified protein sequence (wt) from neuraminidase__InfluenzaA__AGB13383
MNPNQKIITIGSVCMTIGMANLILQIGNIISIWISHSIQLGNQNQIETCNQSVITYENNTWVNQTYVNISNTNFAAGQSVVSVKLAGNSSLCPVSGWAIYSKDNSIRIGSKGDVFVIREPFISCSPLECRTFFLTQGALLNDKHSNGTIKDRSPYRTLMSCPIGEVPSPYNSRFESVAWSASACHDGINWLTIGISGPDNGAVAVLKYNGIITDTIKSWRNNILRTQESECACVNGSCFTIMTDGPSDGQASYKIFRIEKGKIVKSVEMNAPNYHYEECSCYPDSSEITCVCRDNWHGSNRPWVSFNQNLEYQIGYICSGIFGDNPRPNDKTGSCGPVSSNGANGVKGFSFKYGSGVWIGRTKSISSRKGFEMIWDPNGWTGTDNNFSIKQDIVGINEWSGYSGSFVQHPELTGLDCIRPCFWVELIRGRPKENTIWTSGSSISFCGVNSDTVGWSWPDGAELPFTIDK

SEQ ID NO: 23292 - protein, 469 aa, Artificial Sequence; identical to SEQ ID NO: 20257
  derived and/or modified protein sequence (wt) from neuraminidase__InfluenzaA__AGB13393

SEQ ID NO: 23293 - protein, 469 aa, Artificial Sequence; identical to SEQ ID NO: 20957
  derived and/or modified protein sequence (wt) from neuraminidase__InfluenzaA__AGB13403

SEQ ID NO: 23294 - protein, 469 aa, Artificial Sequence; identical to SEQ ID NO: 20257
  derived and/or modified protein sequence (wt) from neuraminidase__InfluenzaA__AGB13413

SEQ ID NO: 23295 - protein, 469 aa, Artificial Sequence; identical to SEQ ID NO: 20257
  derived and/or modified protein sequence (wt) from neuraminidase__InfluenzaA__AGB13423

SEQ ID NO: 23296 - protein, 469 aa, Artificial Sequence; identical to SEQ ID NO: 20957
  derived and/or modified protein sequence (wt) from neuraminidase__InfluenzaA__AGB13433

SEQ ID NO: 23297 - protein, 469 aa, Artificial Sequence; identical to SEQ ID NO: 20957
  derived and/or modified protein sequence (wt) from neuraminidase__InfluenzaA__AGB13443

SEQ ID NO: 23298 - protein, 469 aa, Artificial Sequence
  derived and/or modified protein sequence (wt) from neuraminidase__InfluenzaA__AGB13453
MNPNQKIITIGSVCMTIGMANLILQIGNIISIWISHSIQLGNQSQIETCNQSVITYENNTWVNQTYVNISNTNFAAGQSVVSVKLAGNSSLCPVSGWAIYSKDNSIRIGSKGDVFVIREPFISCSPLECRTFFLTQGALLNDKHSNGTIKDRSPYRTLMSCPIGEVPSPYNSRFESVAWSASACHDGINWLTIGISGPDNGAVAVLKYNGIITDTIKSWRNNILRTQESECACVNGSCFTIMTDGPSDGQASYKIFRIEKGKIVKSVEMNAPNYHYEECSCYPDSSEITCVCRDNWHGSNRPWVSFNQNLEYQIGYICSGIFGDNPRPNDKTGSCGPVSSNGANGVKGFSFKYGNGVWIGRTKSFSSRKGFEMIWDPNGWTGTDNNFSIKQDIVGINEWSGYSGSFVQHPELTGLDCIRPCFWVELIRGRPKENTIWTSGSSISFCGVNSDTVGWSWPDGAELPFTIDK

SEQ ID NO: 23299 - protein, 469 aa, Artificial Sequence; identical to SEQ ID NO: 20257
  derived and/or modified protein sequence (wt) from neuraminidase__InfluenzaA__AGB13463

SEQ ID NO: 23300 - protein, 469 aa, Artificial Sequence; identical to SEQ ID NO: 20709
  derived and/or modified protein sequence (wt) from neuraminidase__InfluenzaA__AGB13473

SEQ ID NO: 23301 - protein, 469 aa, Artificial Sequence
  derived and/or modified protein sequence (wt) from neuraminidase__InfluenzaA__AGB13483
MNPNQKIITIGSVCMTIGMANLILQIGNIISIWISHSIQLGNQSQIETCNQSVITYENNTWVNQTYVNISNTNFAAGQSVVSVKLAGNSSLCPVSGWAIYSKDNSIRIGSKGDVFVIREPFISCSPLECRTFFLTQGALLNDKHSNGTIKDRSPYRTLMSCPIGEVPSPYNSRFESVAWSASACHDGINWLTIGISGPDNGAVAVLKYNGIITDTIKSWRNNILRTQESECACVNGSCFTIMTDGPSDGQASYKIFRIEKGKIVKSVEMNAPNYHYEECSCYPDSSEITCVCRDNWHGSNRPWVSFNQNLEYQIGYICSGIFGDNPRPNDKTGSCGPVSSNGANGVKGFSFKYGNGVWIGRTKSISSRKGFEMIWDPNGWTGTDNNFSIKQDIVGINEWSGYSGSFVQHPELTGLDCIRPCFWVELIRGQPKENTIWTSGSSISFCGVNSDTVGWSWPDGAELPFTIDK

SEQ ID NO: 23302 - protein, 469 aa, Artificial Sequence; identical to SEQ ID NO: 20994
  derived and/or modified protein sequence (wt) from neuraminidase__InfluenzaA__AGB13493

SEQ ID NO: 23303 - protein, 469 aa, Artificial Sequence; identical to SEQ ID NO: 20786
  derived and/or modified protein sequence (wt) from neuraminidase__InfluenzaA__AGB13503

SEQ ID NO: 23304 - protein, 469 aa, Artificial Sequence; identical to SEQ ID NO: 18200
  derived and/or modified protein sequence (wt) from neuraminidase__InfluenzaA__AGB13513

SEQ ID NO: 23305 - protein, 469 aa, Artificial Sequence; identical to SEQ ID NO: 20992
  derived and/or modified protein sequence (wt) from neuraminidase__InfluenzaA__AGB13523

SEQ ID NO: 23306 - protein, 469 aa, Artificial Sequence; identical to SEQ ID NO: 20992
  derived and/or modified protein sequence (wt) from neuraminidase__InfluenzaA__AGB13533

SEQ ID NO: 23307 - protein, 469 aa, Artificial Sequence; identical to SEQ ID NO: 20709
  derived and/or modified protein sequence (wt) from neuraminidase__InfluenzaA__AGB13543

SEQ ID NO: 23308 - protein, 469 aa, Artificial Sequence; identical to SEQ ID NO: 20709
  derived and/or modified protein sequence (wt) from neuraminidase__InfluenzaA__AGB13553

SEQ ID NO: 23309 - protein, 469 aa, Artificial Sequence
  derived and/or modified protein sequence (wt) from neuraminidase__InfluenzaA__AGB13563
MNPNQKIITIGSVCMTIGVANLILQIGNIISIWISHSIQLGNQNQIETCNQSVITYENNTWVNQTYVNISNTNFAAGQSVVSVNLAGNSSLCPVSGWAIYSKDNSIRIGSKGDVFVIREPFISCSPLECRTFFLTQGALLNDKHSNGTIKDRSPYRTLMSCPIGEVPSPYNSRFESVAWSASACHDGINWLTIGISGPDNGAVAVLKYNGIITDTIKSWRNNILRTQESECACVNGSCFTIMTDGPSDGQASYKIFRIEKGKIVKSVEMNAPNYHYEECSCYPDSSEITCVCRDNWHGSNRPWVSFNQNLEYQIGYICSGIFGDNPRPNDKTGSCGPVSSNGANGVKGFSFKYGNGVWIGRTKNISSRKGFEMIWDPNGWTGTDNNFSIKQDIVGINEWSGYSGSFVQHPELTGLDCIRPCFWVELIRGRPKENTIWTSGSSISFCGVNSDTVGWSWPDGAELPFTIDK

SEQ ID NO: 23310 - protein, 469 aa, Artificial Sequence; identical to SEQ ID NO: 20709
  derived and/or modified protein sequence (wt) from neuraminidase__InfluenzaA__AGB13573

SEQ ID NO: 23311 - protein, 469 aa, Artificial Sequence
  derived and/or modified protein sequence (wt) from neuraminidase__InfluenzaA__AGB13583
MNPNQKIITIGSVCMTIGMANLILQIGNIISIWISHSIQLGNQNQIETCNQSVITYENNTWVNQTYVNISNTNFAAGQSVGSVKLAGNSSLCPVSGWAIYSKDNSIRIGSKGDVFVIREPFISCSPLECRTFFLTQGALLNDKHSNGTIKDRSPYRTLMSCPIGEVPSPYNSRFESVAWSASACHDGINWLTIGISGPDNGAVAVLKYNGIITDTIKSWRNNILRTQESECACVNGSCFTIMTDGPSDGQASYKIFRIEKGKIVKSVEMNAPNYHYEECSCYPDSSEITCVCRDNWHGSNRPWVSFNQNLEYQIGYICSGIFGDNPRPNDKTGSCGPVSSNGANGVKGFSFKYGNGVWIGRTKSISSRKGFEMIWDPNGWTGTDNNFSIKQDIVGINEWSGYSGSFVQHPELTGLDCIRPCFWVELIRGRPKENTIWTSGSSISFCGVNSDTVGWSWPDGAELPFTIDK

SEQ ID NO: 23312 - protein, 469 aa, Artificial Sequence; identical to SEQ ID NO: 20709
  derived and/or modified protein sequence (wt) from neuraminidase__InfluenzaA__AGB13593

SEQ ID NO: 23313 - protein, 469 aa, Artificial Sequence; identical to SEQ ID NO: 20709
  derived and/or modified protein sequence (wt) from neuraminidase__InfluenzaA__AGB13603

SEQ ID NO: 23314 - protein, 469 aa, Artificial Sequence; identical to SEQ ID NO: 20709
  derived and/or modified protein sequence (wt) from neuraminidase__InfluenzaA__AGB13613

SEQ ID NO: 23315 - protein, 469 aa, Artificial Sequence; identical to SEQ ID NO: 20709
  derived and/or modified protein sequence (wt) from neuraminidase__InfluenzaA__AGB13623

SEQ ID NO: 23316 - protein, 469 aa, Artificial Sequence
  derived and/or modified protein sequence (wt) from neuraminidase__InfluenzaA__AGB13633
MNPNQKIITIGSVCMTIGMANLILQIGNIISIWISHSIQLGNQSQIETCNQSVITYENNTWVNQTYVNISNTNFAAGQSVVSVKLAGNSSLCPVSGWAIYSKDNSIRIGSKGDVFVIREPFISCSPLECRTFFLTQGALLNDKHSNGTIKDRSPYRTLMSCPIGEVPSPYNSRFESVAWSASACHDGINWLTIGISGPDNGAVAVLKYNGIITDTIKSWRNNILRTQESECACVNGSCFTIMTDGPSDGQASYKIFRIEKGKIVKSVEMNAPNYHYEECSCYPDSSEITCVCRDNWHGSNRPWVSFNQNLEYQIGYICSGIFGDNPRPNDKTGSCGPVSSNGANGVKGFSFKYGNGVWIGRTKSISSRKGFEMIWDPNGWTGTDNNFSIKQDIVGINEWSGYSGSFVQHPELTGLDCIRPCFWVELIRGRPKENTIWTSGSIISFCGVNSDTVGWSWPDGAELPFTIDK

SEQ ID NO: 23317 - protein, 469 aa, Artificial Sequence
  derived and/or modified protein sequence (wt) from neuraminidase__InfluenzaA__AGB13643
MNPNQKIITIGSVCMTIGMANLILQIGNIISIWISHSIQLGNQNQIETCNQSVITYENNTWVNQTYVNISNTNFAAGQSVVSVKLAGNSSLCPVSGWAIYSKDNGIRIGSKGDVFVIREPFISCSPLECRTFFLTQGALLNDKHSNGTIKDRSPYRTLMSCPIGEVPSPYNSRFESVAWSASACHDGINWLTIGISGPDNGAVAVLKYNGIITDTIKSWRNNILRTQESECVCVNGSCFTVMTDGPSDGQASYKIFRIEKGKIVKSVEMNAPNYHYEECSCYPDSSEITCVCRDNWHGSNRPWVSFNQNLEYQIGYICSGIFGDNPRPNDKTGSCGPVSSNGANGVKGFSFKYGNGVWIGRTKSISSRNGFEMIWDPNGWTGTDNNFSVKQDIIGINEWSGYSGSFVQHPELTGLDCIRPCFWVELIRGRPKENTIWTSGSSISFCGVNSDTVGWSWPDGAELPFTIDK

SEQ ID NO: 23318 - protein, 469 aa, Artificial Sequence
  derived and/or modified protein sequence (wt) from neuraminidase__InfluenzaA__AGB13653
MNPNQKIITIGSVCMTIGMANLILQIGNIISIWISHSIQLGNQNQIETCNQSVITYENNTWVNQTYVNISNTNFAAGQSVVSVKLAGNSSLCPVSGWAIYSKDNSIRIGSKGDVFVIREPFISCSPLECRTFFLTQGALLNDKHSNGTIKDRSPYRTLMSCPIGEVPSPYNSRFESVAWSASACHDGINWLTIGISGPDNGAVAVLKYNGIITDTIKSWRNNILRTQESECVCVNGSCFTVMTDGPSDGQASYKIFRIEKGKIVKSVEMNAPNYHYEECSCYPDSSEITCVCRDNWHGSNRPWVSFNQNLEYQIGYICSGIFGDNPRPNDKTGSCGPVSSNGANGVKGFSFKYGNGVWIGRTKSISSRNGFEMIWDPNGWTGTDNNFSVKQDIIGINEWSGYSGSFVQHPELTGLDCIRPCFWVELIRGRPKENTIWTSGSSISFCGVNSDTVGWSWPDGAELPFTIDK

SEQ ID NO: 23319 - protein, 469 aa, Artificial Sequence; identical to SEQ ID NO: 20257
  derived and/or modified protein sequence (wt) from neuraminidase__InfluenzaA__AGB13663

SEQ ID NO: 23320 - protein, 469 aa, Artificial Sequence; identical to SEQ ID NO: 20257
  derived and/or modified protein sequence (wt) from neuraminidase__InfluenzaA__AGB13724

SEQ ID NO: 23321 - protein, 469 aa, Artificial Sequence; identical to SEQ ID NO: 20709
  derived and/or modified protein sequence (wt) from neuraminidase__InfluenzaA__AGB13734

SEQ ID NO: 23322 - protein, 469 aa, Artificial Sequence; identical to SEQ ID NO: 17214
  derived and/or modified protein sequence (wt) from neuraminidase__InfluenzaA__AGB51359

SEQ ID NO: 23323 - protein, 469 aa, Artificial Sequence
  derived and/or modified protein sequence (wt) from neuraminidase__InfluenzaA__AGB97270
MNPNQKIITIGSVCMTIGMANLILQIGNIISIWISHSIQLRNQNQIETCNQSVITYENNTWVNQTYVNISNTNFAAGQSVVSVKLAGNSSLCPVSGWAIYSKDNSIRIGSKGDVFVIREPFISCSPLECRTFFLTQGALLNDKHSNGTIKDRSPYRTLMSCPIGEVPSPYNSRFESVAWSASACHDGINWLTIGISGPDNGAMAVLKYNGIITDTIKSWRNNILRTQESECACVNGSCFTIMTDGPSDGQASYKIFRIEKGKIVKSVEMNAPNYHYEECSCYPDSSEITCVCRDNWHGSNRPWVSFNQNLEYQIGYICSGIFGDNPRPNDKTGSCGPVSSNGANGVKGFSFKYGNGVWIGRTKSISSRKGFEMIWDPNGWTGTDNNFSIKQDIVGINEWSGYSGSFVQHPELTGLDCIRPCFWVELIRGRPKENTIWTSGSSISFCGVNSDTVGWSWPDGAELPFTIDK

SEQ ID NO: 23324 - protein, 469 aa, Artificial Sequence
  derived and/or modified protein sequence (wt) from neuraminidase__InfluenzaA__AGB97274
MNPNQKIITIGSVCMTIGMANLILQIGNIISIWISHSIQLRNQNQIETCNQSVITYENNTWVNQTYVNISNTNFAAGQSVVSVKLAGNSSLCPVSGWAIYSKDNSIRIGSKGDVFVIREPFISCSPLECRTFFLTQGALLNDKHSNGTIKDRSPYRTLMSCPIGEVPSPYNSRFESVAWSASACHDGINWLTIGISGPDNGAVAVLKYNGIITDTIKSWRNNILRTQESECACVNGSCFTIMTDGPSDGQASYKIFRIEKGKIVKSVEMNAPNYHYEECSCYPDSSEITCVCRDNWHGSNRPWVSFNQNLEYQIGYICSGIFGDNPRPNDKTGSCGPVSSNGANGVKGFSFKYGNGVWIGRTKSISSRKGFEMIWDPNGWTGTDNNFSIKQDIVGINEWSGYSGSFVQHPELTGLDCIRPCFWVELIRGRPKENTIWTSGSSISFCGVNSDTVGWSWPDGAELPFTIDK

SEQ ID NO: 23325 - protein, 469 aa, Artificial Sequence; identical to SEQ ID NO: 22146
  derived and/or modified protein sequence (wt) from neuraminidase__InfluenzaA__AGB97289

SEQ ID NO: 23326 - protein, 469 aa, Artificial Sequence
  derived and/or modified protein sequence (wt) from neuraminidase__InfluenzaA__AGE15475
MNPNQKIITIGSVCMTIGMANLILQIGNIISIWISHSIQLGNQSQIETCNQSVITYENNTWVNQTYVNISNTNFAAGQSVVSVKLAGNSSLCPVSGWAIYSKDNSIRIGSKGDVFVIREPFISCSPLECRTFFLTQGSLLNDKHSNGTIKDRSPYRTLMSCPIGEVPSPYNSRFESVAWSASACHDGINWLTIGISGPDNGAVAVLKYNGIITDTIKSWRNNILRTQESECACVNGSCFTIMTDGPSDGQASYKIFRIEKGKIVKSVEMNAPNYHYEECSCYPDSSEITCVCRDNWHGSNRPWVSFNQNLEYQIGYICSGIFGDNPRPNDKTGSCGPVSSNGANGVKGFSFKYGNGVWIGRTKSISSRKGFEMIWDPNGWTGTDNYFSIKQDIVGINEWSGYSGSFVQHPELTGLDCIRPCFWVELIRGRPKENTIWTSGSSISFCGVNSDTVGWSWPDGAELPFSIDK

SEQ ID NO: 23327 - protein, 469 aa, Artificial Sequence
  derived and/or modified protein sequence (wt) from neuraminidase__InfluenzaA__AGE15476
MNPNQKIITIGSVCMTIGMANLILQIGNIISIWISHSIQLGNQSQIETCNQSVITYENNTWVNQTYVNISNTNFAAGQSVVSVKLAGNSSLCPVSGWAIYSKDNSIRIGSKGDVFVIREPFISCSPLECRTFFLTQGSLLNDKHSNGTIKDRSPYRTLMSCPIGEVPSPYNSRFESVAWSASACHDGINWLTIGISGPDNGAVAVLKYNGIITDTIKSWRNNILRTQESECACVNGSCFTIMTDGPSDGQASYKIFRIEKGKIVKSVEMNAPNYHYEECSCYPDSSEITCVCRDNWHGSNRPWVSFNQNLEYQIGYICSGIFGDNPRPNDKTGSCGPVSSNGANGVKGFSFKYGNGVWIGRTKSISSRKGFEMIWDPNGWTGTDNYFSIKQDIVGINEWSGYSGSFVQHPELTGLDCIRPCFWVELIRGRPKENTIWTSGSSISFCGVNSDTVGWSWPDGAELPFTIDK

SEQ ID NO: 23328 - protein, 469 aa, Artificial Sequence; identical to SEQ ID NO: 23158
  derived and/or modified protein sequence (wt) from neuraminidase__InfluenzaA__AGE15477

SEQ ID NO: 23329 - protein, 469 aa, Artificial Sequence
  derived and/or modified protein sequence (wt) from neuraminidase__InfluenzaA__AGE15478
MNPNQKIITIGSVCMTIGMANLILQIGNIISIWISHSIQLGNQSQIETCNQSVITYENNTWVNQTYVNISNTNFAAGQSVVSVKLAGNSSLCPVSGWAIYSKDNSIRIGSKGDVFVIREPFISCSPLECRTFFLTQGSLLNDKHSNGTIKDRSPYRTLMSCPIGEVPSPYNSRFESVAWSASACHDGINWLTIGISGPDNGAVAVLKYNGIITDTIKSWRNNILRTQESECACVNGSCFTIMTDGPSDGQASYKIFRIEKGKIVKSVEMNAPNYHYEECSCYPDSSEITCVCRDNWHGSNRPWVSFNQNLEYQIGYICSGIFGDNPRPNDKTGSCGPVSSNGANGVKGFSFKYGNGVWIGRTKSISSRKGFEMIWDPNGWTGTDNYFSIKQDIVGINEWSGYSGSFVQHPELTGLDCIRPCFWVELIRGRPKENTIWTSGSSISFCGVKSDTVGWSWPDGAELPFTIDK

SEQ ID NO: 23330 - protein, 469 aa, Artificial Sequence
  derived and/or modified protein sequence (wt) from neuraminidase__InfluenzaA__AGE15479
MNPNQKIITIGSVCMTIGMANLILQIGNIISIWISHSIQLGNQSQIETCNQSVITYENNTWVNQTYVNISNTNFAAGQSVVSVKLAGNSSLCPVSGWAIYSKDNSIRIGSKGDVFVIREPFISCSPLECRTFFLTQGSLLNDKHSNGTIKDRSPYRTLMSCPIGEVPSPYNSRFESVAWSASACHDGINWLTIGISGPDNGAVAVLKYNGIITDTIKSWRNNILRTQESECACVNGSCFTIMTDGPIDGQASYKIFRIEKGKIVKSVEMNAPNYHYEECSCYPDSSEITCVCRDNWHGSNRPWVSFNQNLEYQIGYICSGIFGDNPRPNDKTGSCGPVSSNGANGVKGFSFKYGNGVWIGRTKSISSRKGFEMIWDPNGWTGTDNYFSIKQDIVGINEWSGYSGSFVQHPELTGLDCIRPCFWVELIRGRPKENTIWTSGSSISFCGVNSDTVGWSWPDGAELPFTIDK

SEQ ID NO: 23331 - protein, 469 aa, Artificial Sequence; identical to SEQ ID NO: 23158
  derived and/or modified protein sequence (wt) from neuraminidase__InfluenzaA__AGE15480

SEQ ID NO: 23332 - protein, 469 aa, Artificial Sequence; identical to SEQ ID NO: 18200
  derived and/or modified protein sequence (wt) from neuraminidase__InfluenzaA__AGE89270

SEQ ID NO: 23333 - protein, 469 aa, Artificial Sequence; identical to SEQ ID NO: 18200
  derived and/or modified protein sequence (wt) from neuraminidase__InfluenzaA__AGE89280

SEQ ID NO: 23334 - protein, 469 aa, Artificial Sequence
  derived and/or modified protein sequence (wt) from neuraminidase__InfluenzaA__AGE89290
MNPNQKIITIGSVSLTISTICFFMQIAILITTVTLHFKQYEFNSPPNNQVMLCEPTIIERNITEIVYLTNTTIEKEICPKLAEYRNWSKPQCDITGFAPFSKDNSIRLSAGGDIWVTREPYVSCDPDKCYQFALGQGTTLNNVHSNNTVRDRTPYRTLLMNELGVPFHLGTKQVCIAWSSSSCHDGKAWLHVCITGDDKNATASFIYNGKLVDSVVSWSKEILRTQESECVCINGTCIVVMTDGSASGKADTKILFVEEGKIVHTSTLSGSAQHVEECSCYPRYPGVRCVCRDNWKGSNRPIVDINIKDHSIISSYVCSGLVGDTPRKNDSSSSSHCLDPNNEEGGHGVKGWAFDDGNDVWMGRTINETSRLGYETFKVIEGWSNPKSKLQINRQVIVDRGNRSGYSGIFSVEGKSCINRCFYVELIRGRKEETEVLWTSNSIVVFCGTSGTYGTGSWPDGADLNLMPI

SEQ ID NO: 23335 - protein, 469 aa, Artificial Sequence; identical to SEQ ID NO: 20257
  derived and/or modified protein sequence (wt) from neuraminidase__InfluenzaA__AGE89301

SEQ ID NO: 23336 - protein, 469 aa, Artificial Sequence
  derived and/or modified protein sequence (wt) from neuraminidase__InfluenzaA__AGE89311
MNPNQKIITIGSVCMTIGMANLILQIGNIISIWISHSIQLGNQNQIETCNQSVITYENNTWVNQTYVNISNTNFAAGQSVVSVKLAGNSSLCPVSGWAIYSKDNSIRIGSKGDVFVIREPFISCSPLECRTFFLTQGALLNDKHSNGTIKDRSPYRTLMSCPIGEVPSPYNSRFESVAWSASACHDGINWLTIGISGPDNGAVAVLKYNGIITDTIKSWKNNILRTQESECACVNGSCFTVMTDGPSDGQASYKIFRIEKGKIVKSVEMNAPNYHYEECSCYPDSSEITCVCRDNWHGSNRPWVSFNQNLEYRIGYICSGIFGDNPRPNDKTGSCGPVSSNGANGVKGFSFKYGNGVWIGRTKSISSRNGFEMIWDPNGWTGTDNNFSKKQDIIGINEWSGYSGSFVQHPELTGLDCIRPCFWVELIRGRPKENTIWTSGSSMSFCGVNSDTVGWSWPDGAELPFTIDK

SEQ ID NO: 23337 - protein, 469 aa, Artificial Sequence; identical to SEQ ID NO: 21787
  derived and/or modified protein sequence (wt) from neuraminidase__InfluenzaA__AGE89321

SEQ ID NO: 23338 - protein, 469 aa, Artificial Sequence; identical to SEQ ID NO: 21143
  derived and/or modified protein sequence (wt) from neuraminidase__InfluenzaA__AGE89332

SEQ ID NO: 23339 - protein, 469 aa, Artificial Sequence; identical to SEQ ID NO: 20257
  derived and/or modified protein sequence (wt) from neuraminidase__InfluenzaA__AGE89343

SEQ ID NO: 23340 - protein, 469 aa, Artificial Sequence
  derived and/or modified protein sequence (wt) from neuraminidase__InfluenzaA__AGE89353
MNPNQKIITIGSVSLTISTICFFMQIAILITTVTLHFKQYEFNSPPNNQVMLCEPTIIERNITEIVYLTNITIEKEICPKLAEYRNWSKPQCDITGFAPFSKDNSIRLSAGGDIWVTREPYVSCDPDKCYQFALGQGTTLNNVHSNNTVRDRTPYRTLLMNELGVPFHLGTKQVCIAWSSSSCHDGKAWLHVCITGDDKNATASFIYNGRLVDSVVSWSKEILRTQESECVCINGTCTVVMTDGSASGKADTKILFIEEGKIVHTSTLSGSAQHVEECSCYPRYPGVRCVCRDNWKGSNRPIVDINIKDHSIVSSYVCSGLVGDTPRKNDSSSSSHCLDPNNEEGGHGVKGWAFDDGNDVWMGRTINETSRLGYETFKVIEGWSNPKSKLQINRQVIVDKGNRSGYSGIFSVEGKSCINRCFYVELIRGRKEETEVLWTSNSIVVFCGTSGTYGTGSWPDGADLNLMPI

SEQ ID NO: 23341 - protein, 469 aa, Artificial Sequence; identical to SEQ ID NO: 20994
  derived and/or modified protein sequence (wt) from neuraminidase__InfluenzaA__AGE89364

SEQ ID NO: 23342 - protein, 469 aa, Artificial Sequence; identical to SEQ ID NO: 21787
  derived and/or modified protein sequence (wt) from neuraminidase__InfluenzaA__AGE89374

SEQ ID NO: 23343 - protein, 469 aa, Artificial Sequence
  derived and/or modified protein sequence (wt) from neuraminidase__InfluenzaA__AGE89385
MNPNQKIITIGSVCMTIGMANLILQIGNIISIWISHSIQLGNQNQIETCNQSVITYENNTWVNQTYVNISNTNFAAGQSVASVKLAGNSSLCPVSGWAIYSKDNSIRIGSKGDVFVIREPFISCSPLECRTFFLTQGALLNDKHSNGTIKDRSPYRTLMSCPIGEVPSPYNSRFESVAWSASACHDGINWLTIGISGPDNGAVAVLKYNGIITDTIKSWRNNILRTQESECACVNGSCFTIMTDGPSDGQASYKIFRIEKGKIVKSVEMNAPNYHYEECSCYPDSSEITCVCRDNWHGSNRPWVSFNQNLEYQIGYICSGIFGDNPRPNDKTGSCGPVSSNGANGVKGFSFKYGNGVWIGRTKSISSRKGFEMIWDPNGWTGTDNNFSIKQDIVGINEWSGYSGSFVQHPELTGLDCIRPCFWVELIRGRPKENTIWTSGSSISFCGVNSDTVGWSWPDGAELPFTIDK

SEQ ID NO: 23344 - protein, 469 aa, Artificial Sequence
  derived and/or modified protein sequence (wt) from neuraminidase__InfluenzaA__AGE89395
MNPNQKIITIGSVSLTISTICFFMQIAILITTVTLHFKQYEFNSPPNNQVMLCEPTIIERNITEIVYLTNTTIEKEICPKPAEYRNWSKPQCDITGFAPFSKDNSIRLSAGGDIWVTREPYVSCDPDKCYQFALGQGTTLNNVHSNNTVRDRTPYRTLLMNELGVPFHLGTKQVCIAWSSSSCHDGKAWLHVCITGDDKNATASFIYNGRLVDSVVSWSKEILRTQESECVCINGTCTVVMTDGSASGKADTKILFIEEGKIVHTSTLSGSAQHVEECSCYPRYPGVRCVCRDNWKGSNRPIVDINIKDHSIVSSYVCSGLVGDTPRKNDSSSSSHCLDPNNEEGGHGVKGWAFDDGNDVWMGRTINETSRLGYETFKVIEGWSNPKSKLQINRQVIVDRGNRSGYSGIFSVEGKSCINRCFYVELIRGRKEETEVLWTSNSIVVFCGTSGTYGTGSWPDGADLNLMPI

SEQ ID NO: 23345 - protein, 469 aa, Artificial Sequence; identical to SEQ ID NO: 18200
  derived and/or modified protein sequence (wt) from neuraminidase__InfluenzaA__AGE89425

SEQ ID NO: 23346 - protein, 469 aa, Artificial Sequence; identical to SEQ ID NO: 19518
  derived and/or modified protein sequence (wt) from neuraminidase__InfluenzaA__AGE89722

SEQ ID NO: 23347 - protein, 469 aa, Artificial Sequence
  derived and/or modified protein sequence (wt) from neuraminidase__InfluenzaA__AGE89733
MNPNQKIITIGSVCMTIGMANLILQIGNIISIWISHSIQLGNQNQIETCNQSVITYENNTWVNQTYVNISNTNFAAGQSVVSVKLAGNSSLCPVSGWAIYSKDNSIRIGSKGDVFVIREPFISCSPLECRTFFLTQGALLNDKHSNGTIKDRSPYRTLMSCPIGEVPSPYNSRFESVAWSASACHDGINWLTIGISGPDNGAVAVLKYNGIITDTIKSWRNNILRTQESECACVNGSCFTIMTDGPNDGQASYKIFRIEKGKIVKSVEMNAPNYHYEECSCYPDSSEITCVCRDNWHGSNRPWVSFNQNLEYQIGYICSGIFGDNPRPNDKTGSCGPVSSNGANGVKGFSFKYGNGVWIGRTKSISSRKGFEMIWDPNGWTGTDNNFSIKQDIVGINEWSGYSGSFVQHPELTGLDCIRPCFWVELIRGRPKENTIWTSGSSISFCGVNSDTVGWSWPDGAELPFTIDK

SEQ ID NO: 23348 - protein, 469 aa, Artificial Sequence
  derived and/or modified protein sequence (wt) from neuraminidase__InfluenzaA__AGE89743
MNPNQKIITIGSVSLTISTICFFMQIAILITTVTLHFKQYEFNSPPNNQVMLCEPTIIERNITEIVYLTNTTIEKEICPKLAEYRNWSKPQCDITGFAPFSKDNSIRLSAGGDIWVTREPYVSCDPDKCYQFALGQGTTLNNVHSNNTVRDRTPYRTLLMNELGVPFHLGTKQVCIAWSSSSCHDGKAWLHVCITGDDKNATASFIYNGRLVDSVVSWSKEILRTQESECVCINGTCTVVMTDGSASGKADTKILFIEEGKIVHTSTLSGSAQHVEECSCYPRYPGVRCVCRDNWKGSNRPIVDINIKDHSIVSSYVCSGLVGDTPRKNDSSSSSHCLDPNNEEGGHGVKGWAFDDGNDVWMGRTINETSRLGYETFKVIEGWSNPKSKLQINRQVIVDKDNRSGYSGIFSVEGKSCINRCFYVELIRGRKEETEVLWTSNSIVVFCGTSGTYGTGSWPDGADLNLMPI

SEQ ID NO: 23349 - protein, 469 aa, Artificial Sequence; identical to SEQ ID NO: 21787
  derived and/or modified protein sequence (wt) from neuraminidase__InfluenzaA__AGE89754

SEQ ID NO: 23350 - protein, 469 aa, Artificial Sequence; identical to SEQ ID NO: 21787
  derived and/or modified protein sequence (wt) from neuraminidase__InfluenzaA__AGE89765

SEQ ID NO: 23351 - protein, 469 aa, Artificial Sequence
  derived and/or modified protein sequence (wt) from neuraminidase__InfluenzaA__AGG13414
MNPNQKIITIGSVSLTISTICFFMQIAILITTVTLHFKQYEFNSPPNNQVMLCEPTIIERNITEIVYLTNTTIEKEICPKPAEYRNWSKPQCDITGFAPFSKDNSIRLSAGGDIWVTREPYVSCDPDKCYQFALGQGTTLNSVHSNNTVRDRTPYRTLLMNELGVPFHLGTKQVCIAWSSSSCHDGKAWLHVCITGDDKNATASFIYNGRLVDSVVSWSKEILRTQESECVCINGTCTVVMTDGSASGKADTKILFIEEGKIVHTSTLSGSAQHVEECSCYPRYPGVRCVCRDNWKGSNRPIVDINIKDHSIVSRYVCSGLVGDTPRKNDSSSSSHCLDPNNEEGGHGVKGWAFDDGNDVWMGRTINETSRLGYETFKVIEGWSNPKSKLQINKQVIVDRGDRSGYSGIFSVEGKSCINRCFYVELIRGRKEETEVLWTSNSIVVFCGTSGTYGTGSWPDGADLNLMPI

SEQ ID NO: 23352 - protein, 469 aa, Artificial Sequence; identical to SEQ ID NO: 22146
  derived and/or modified protein sequence (wt) from neuraminidase__InfluenzaA__AGG13426

SEQ ID NO: 23353 - protein, 469 aa, Artificial Sequence; identical to SEQ ID NO: 22146
  derived and/or modified protein sequence (wt) from neuraminidase__InfluenzaA__AGG13438

SEQ ID NO: 23354 - protein, 469 aa, Artificial Sequence
  derived and/or modified protein sequence (wt) from neuraminidase__InfluenzaA__AGG13498
MNPNQKIITIGSVSLTISTICFFMQIAILITTVTLHFKQYEFNSPPNNQVMLCEPTIIERNITEIVYLTNTTIEKEICPKLAEYRNWSKPQCDITGFAPFSKDNSIRLSAGGDIWVTREPYVSCDPDKCYQFALGQGTTLNNVHSNNTVRDRTPYRTLLMNELGVPFHLGTKQVCIAWSSSSCHDGKAWLHVCITGDDKNATASFIYNGRLVDSVVSWSKDILRTQESECVCINGTCAVVMTDGSASGKADTKILFIEEGKIVHTSTLSGSAQHVEECSCYPRYPGVRCVCRDNWKGSNRPIVDINIKDHSIVSSYVCSGLVGDTPRKNDSSSSGHCLDPNNEEGGHGVKGWAFDDGNDVWMGRTINETSRLGYETFKVIEGWSNPKSKLQINRQVIVDRGNRSGYSGIFSVEGKNCINRCFYVELIRGRKEETEVLWTSNSIVVFCGTSGTYGTGSWPDGADLNLMPI

SEQ ID NO: 23355 - protein, 469 aa, Artificial Sequence; identical to SEQ ID NO: 22146
  derived and/or modified protein sequence (wt) from neuraminidase__InfluenzaA__AGG13510

SEQ ID NO: 23356 - protein, 469 aa, Artificial Sequence; identical to SEQ ID NO: 23354
  derived and/or modified protein sequence (wt) from neuraminidase__InfluenzaA__AGG13522

SEQ ID NO: 23357 - protein, 469 aa, Artificial Sequence
  derived and/or modified protein sequence (wt) from neuraminidase__InfluenzaA__AGG13534
MNPNQKIITIGSVSLTISTVCFFMQIAILITTVTLHFKQYEFNSPPNNQVMLCEPTIIERNITEIVYLTNTTIEKEICPKPAEYRNWSKPQCGITGFAPFSKDNSIRLSAGGDIWVTREPYVSCDPDKCYQFALGQGTTLNNVHSNNTVRDRTPYRTLLMNELGVPFHLGTKQVCIAWSSSSCHDGKAWLHVCITGDDKNATASFIYNGRLVDSVVSWSKEILRTQESECVCINGTCTVVMTDGSASGKADTKILFIEEGKIVHTSTLSGSAQHVEECSCYPRYPGVRCVCRDNWKGSNRPIVDINIKDHSIVSSYVCSGLVGDTPRKNDSSSSSHCLDPNNEEGGHGVKGWAFDDGNDVWMGRTINETSRLGYETFKVIEGWSNPKSKLQINRQVIVDRGDRSGYSGIFSVEGKSCINRCFYVELIRGRKEETEVLWTSNSIVVFCGTSGTYGTGSWPDGADLNLMPI

SEQ ID NO: 23358 - protein, 469 aa, Artificial Sequence
  derived and/or modified protein sequence (wt) from neuraminidase__InfluenzaA__AGG13546
MNPNQKIITIGSVSLTISTICFFMQIAILITTVTLHFKQYEFNSPPNNQVMLCEPTIIERNITEIVYLTNTTIEKEICPKPAEYRNWSKPQCGITGFAPFSKDNSIRLSAGGDIWVTREPYVSCDPDKCYQFALGQGTTLNNVHSNNTVRDRTPYRTLLMNELGVPFHLGTKQVCIAWSSSSCHDGKAWLHVCITGDDKNATASFIYNGRLVDSVVSWSKEILRTQESECVCINGTCTVVMTDGSASGKADTKILFIEEGKIVHTSTLSGSAQHVEECSCYPRYPGVRCVCRDNWRGSNRPIVDINIKDHSIVSSYVCSGLVGDTPRKNDSSSSSHCLDPNNEEGGHGVKGWAFDDGNDVWMGRTINETSRLGYETFKVIEGWSNPKSKLQINRQVIVDRSDRSGYSGIFSVEGKSCINRCFYVELIRGRKEETEVLWTSNSIVVFCGTSGTYGTGSWPDGADLNLMPI

SEQ ID NO: 23359 - protein, 469 aa, Artificial Sequence; identical to SEQ ID NO: 22146
  derived and/or modified protein sequence (wt) from neuraminidase__InfluenzaA__AGG13558

SEQ ID NO: 23360 - protein, 469 aa, Artificial Sequence; identical to SEQ ID NO: 22146
  derived and/or modified protein sequence (wt) from neuraminidase__InfluenzaA__AGG13570

SEQ ID NO: 23361 - protein, 469 aa, Artificial Sequence
  derived and/or modified protein sequence (wt) from neuraminidase__InfluenzaA__AGG13582
MNPNQKIITIGSVSLTISTICFFMQIAILITTVTLHFKQYEFNSPPNNQVMLCEPTIIERNITEIVYLTNTTIEKEICPKPAEYRNWSKPQCGITGFAPFSKDNSIRLSAGGDIWVTREPYVSCDPDKCYQFALGQGTTLNNVHSNNTVRDRTPYRTLLMNELGVPFHLGTKQVCIAWSSSSCHDGKAWLHVCITGEDKNATASFIYNGRLVDSVVSWSKETLRTQESECVCINGTCTVVMTDGSASGKADTKILFIEEGKIVHTSTLSGSAQHVEECSCYPRYPGVRCVCRDNWKGSNRPIVDINIKDHSIVSSYVCSGLVGDTPRKNDSSSSSHCLDPNNEEGGHGVKGWAFDDGNDVWMGRTINETSRLGYETFKVIEGWSNPKSKLQINRQVIVDRGDRSGYSGIFSVEGKSCINRCFYVELIRGRKEETEVLWTSNSIVVFCGTSGTYGTGSWPDGADLNLMPI

SEQ ID NO: 23362 - protein, 469 aa, Artificial Sequence; identical to SEQ ID NO: 22146
  derived and/or modified protein sequence (wt) from neuraminidase__InfluenzaA__AGG13606

SEQ ID NO: 23363 - protein, 469 aa, Artificial Sequence
  derived and/or modified protein sequence (wt) from neuraminidase__InfluenzaA__AGG13618
MNPNQKIITIGSVSLTISTICFFMQIAILITTVTLHFKQYEFNSPPNNQVMLCEPTIIERNITEIVYLTNTTIEKEICPKPAEYRNWSKPQCGITGFAPFSKDNSIRLSAGGDIWVTREPYVSCDPDKCYQFALGQGTTLNNVHSNNTVRDRTPYRTLLMNELGVPFHLGTKQVCIAWSSSSCHDGKAWLHVCITGDDKNATASFIYNGRLVDSVVSWSKEILRTQESECVCINGTCTVVMTDGSASGKADTKILFIEEGKIVHTSTLSGSAQHVEECSCYPRYPGVRCVCRDNWKGSNRPIVDINIKDHSIVSSYLCSGLVGDTPRKNDGSSSSHCLDPNNEEGGHGVKGWAFDDGNDVWMGRTINETSRLGYETFKVIEGWSNPKSKLQINRQIIVDRGDRSGYSGIFSVEGKSCINRCFYVELIRGRKEETEVLWTSNSIVVFCGTSGTYGTGSWPDGADLNLMPI

SEQ ID NO: 23364 - protein, 469 aa, Artificial Sequence
  derived and/or modified protein sequence (wt) from neuraminidase__InfluenzaA__AGG13630
MNPNQKIITIGSVSLTISTICFFMQIAILITTVTLHFKQYEFNSPPNNQVMLCEPTIIERNITEIVYLTNTTIEKEICPKPAEYRNWSKPQCGITGFAPFSKDNSIRLSAGGDIWVTREPYVSCDPDKCYQFALGQGTTLNNVHSNNTVRDRTPYRTLLMNELGVPFHLGTKQVCIAWSSSSCHDGKAWLHVCITGEDKNATASFIYNGRLVDSVVSWSKEILRTQESECVCINGTCTVVMTDGSASGKADTKILFIEEGKIVHTSTLSGSAQHVEECSCYPRYPGVRCVCRDNWKGSNRPIVDINIKDHSIVSSYVCSGLVGDTPRKNDSSSSSHCLDPNNEEGGHGVKGWAFDDGNDVWMGRTINETSRLGYETFKVIEGWSNPKSKLQINRQVIVDRGDRSGYSGIFSVEGKSCINRCFYVELIRGRKEETEVLWTSNSIVVFCGTSGTYGTGSWPDGADLNLMPI

SEQ ID NO: 23365 - protein, 469 aa, Artificial Sequence; identical to SEQ ID NO: 22146
  derived and/or modified protein sequence (wt) from neuraminidase__InfluenzaA__AGG13642

SEQ ID NO: 23366 - protein, 469 aa, Artificial Sequence
  derived and/or modified protein sequence (wt) from neuraminidase__InfluenzaA__AGG13654
MNPNQKIITIGSVSLTISTICFFMQIAILITTVTLHFKQYEFNSPPNNQVMLCEPTIIERNITEIVYLTNTTIEKEICPKLAEYRNWSKPQCDITGFAPFSKDNSIRLSAGGDIWVTREPYVSCDPDKCYQFALGQGTTLNNVHSNNTVRDRTPYRTLLMNELGVPFHLGTKQVCIAWSSSSCHDGKAWLHVCITGDDKNATASFIYNGRLVDSVVSWSKDILRTQESECVCINGTCAVVMTDGSASGKADTKILFIEEGKIVQTSTLSGSAQHVEECSCYPRYPGVRCVCRDNWKGSNRPIVDINIKDHSIVSSYVCSGLVGDTPRKNDSSSSGHCLDPNNEEGGHGVKGWAFDDGNDVWMGRTINETSRLGYETFKVIEGWSNPKSKLQINRQVIVDRGNRSGYSGIFSVEGKNCINRCFYVELIRGRKEEIEVLWTSNSIVVFCGTSGTYGTGSWPDGADLNLMPI

SEQ ID NO: 23367 - protein, 469 aa, Artificial Sequence; identical to SEQ ID NO: 23357
  derived and/or modified protein sequence (wt) from neuraminidase__InfluenzaA__AGG13666

SEQ ID NO: 23368 - protein, 469 aa, Artificial Sequence
  derived and/or modified protein sequence (wt) from neuraminidase__InfluenzaA__AGG13678
MNPNQKIITIGSVSLTISTICFFMQIAILITTVTLHFKQYEFNSPPNNQVMLCEPTIIERNITEIVYLTNTTIEKEICPKPAEYRNWSKPQCGITGFAPLSKDNSIRLSAGGDIWVTREPYVSCDPDKCYQFALGQGTTLNNVHSNNTVRDRTPYRTLLMNELGVPFHLGTKQVCIAWSSSSCHDGKAWLHVCITGDDKNATASFIYNGRLVDSVVSWSKEILRTQESECVCINGTCTVVMTDGSASGKADTKILFIEEGKIVHTSTLSGSAQHVEECSCYPRYPGVRCVCRDNWKGSNRPIVDINIKDHSIVSSYVCSGLVGDTPRKNDSSSSSHCLGPNNEEGGHGVKGWAFDDGNDVWMGRTINETSRLGYETFKVIEGWSNPKSKLQINRQVIVDRGDRSGYSGIFSVEGKSCINRCFYVELIRGRKEETEVLWTSNSIVVFCGTAGTYGTGSWPDGADLNLMPI

SEQ ID NO: 23369 - protein, 469 aa, Artificial Sequence; identical to SEQ ID NO: 22146
  derived and/or modified protein sequence (wt) from neuraminidase__InfluenzaA__AGG13690

SEQ ID NO: 23370 - protein, 469 aa, Artificial Sequence
  derived and/or modified protein sequence (wt) from neuraminidase__InfluenzaA__AGG13702
MNPNQKIITIGSVSLTISTICFFMQIAILITTVTLHFKQYEFNSPPNNQVMLCEPTIIERNITEIVYLTNTTIEKEICPKPAEYRNWSKPQCDITGFAPFSKDNSIRLSAGGDIWVTREPYVSCDPDKCYQFALGQGTTLNNVHSNNTVRDRTPYRTLLMNELGVPFHLGTKQVCIAWSSSSCHDGKAWLHVCITGDDKNATASFIYNGRLVDSVVSWSKEILRTQESECVCINGTCTVVMTDGSASGKADTKILFIEEGKIVHTSTLSGNAQHVEECSCYPRYPGVRCVCRDNWKGSNRPIVDINIKDHSIVSRYVCSGLVGDTPRKNDSSSSSHCLDPNNEEGGHGVKGWAFDDGNDVWMGRTINETSRLGYETFKVIEGWSNPKSKLQINRQVIVDRGDRSGYSGIFSVEGKSCINRCFYVELIRGRKEETEVLWTSNSIVVFCGTSGTYGTGSWPDGADLNLMPI

SEQ ID NO: 23371 - protein, 469 aa, Artificial Sequence; identical to SEQ ID NO: 23354
  derived and/or modified protein sequence (wt) from neuraminidase__InfluenzaA__AGG13714

SEQ ID NO: 23372 - protein, 469 aa, Artificial Sequence; identical to SEQ ID NO: 22146
  derived and/or modified protein sequence (wt) from neuraminidase__InfluenzaA__AGG13726

SEQ ID NO: 23373 - protein, 469 aa, Artificial Sequence; identical to SEQ ID NO: 22146
  derived and/or modified protein sequence (wt) from neuraminidase__InfluenzaA__AGG13738

SEQ ID NO: 23374 - protein, 469 aa, Artificial Sequence; identical to SEQ ID NO: 22146
  derived and/or modified protein sequence (wt) from neuraminidase__InfluenzaA__AGG13750

SEQ ID NO: 23375 - protein, 469 aa, Artificial Sequence
  derived and/or modified protein sequence (wt) from neuraminidase__InfluenzaA__AGG13762
MNPNQKIITIGSVSLTISTICFFMQIAILITTVTLHFKQYEFNSPPNNQVMLCEPTIIERNITEIVYLTNTTIEKEICPKPAEYRNWSKPQCDITGFAPFSKDNSIRLSAGGDIWVTREPYVSCDPDKCYQFALGQGTTLNNVHSNNTVRDRTPYRTLLMNELGVPFHLGTKQVCIAWSSSSCHDGKAWLHVCITGDDKNATASFIYNGRLVDSVVSWSKEILRTQESECVCINGTCTVVMTDGSASGKADTKILFIEEGKIVHTSTLSGSAQHVEECSCYPRYPGVRCVCRDNWKGSNRPIVDINIKDHSIVSRYVCSGLVGDTPRKNDSSSSSHCLDPNNEEGGHGVKGWAFDDGNDVWMGRTINETSRLGYETFKVIEGWSNPKSKLQINRQVIVDRGDRSGYSGIFSVEGKSCINRCFYVELIRGRKEETEVLWTSNSIVVFCGTSGTYGTGSWPDGADLNLMPI

SEQ ID NO: 23376 - protein, 469 aa, Artificial Sequence
  derived and/or modified protein sequence (wt) from neuraminidase__InfluenzaA__AGG13774
MNPNQKIITIGSVSLTISTICFFMQIAILITTVTLHFKQYEFNSPPNNQVMLCEPTTIERNITEIVYLTNTTIEKEICPKLAEYRNWSKPQCDITGFAPFSKDNSIRLSAGGDIWVTREPYVSCDPDKCYQFALGQGTTLNNVHSNNTVRDRTPYRTLLMNELGVPFHLGTKQVCIAWSSSSCHDGKAWLHVCITGDDKNATASFIYNGRLVDSVVSWSKDILRTQESECVCINGTCAVVMTDGSASGKADTKILFIEEGKIVHTSTLSGSAQHVEECSCYPRYPGVRCVCRDNWKGSNRPIVDINIKDHSIVSSYVCSGLVGDTPRKNDSSSSGHCLDPNNEEGGHGVKGWAFDDGNDVWMGRTINETSRLGYETFKVIEGWSNPKSKLQINRQVIVDRGNRSGYSGIFSVEGKNCINRCFYVELIRGRKEETEVLWTSNSIVVFCGTSGTYGTGSWPDGADLNLMPI

SEQ ID NO: 23377 - protein, 469 aa, Artificial Sequence
  derived and/or modified protein sequence (wt) from neuraminidase__InfluenzaA__AGG13786
MNPNQKIITIGSVSLTISTICFFMQIAILITTVTLHFKQYEFNSPPNNQVMLCEPTIIERNITEIVYLTNTTIEKEICPKPAEYRNWSKPQCGITGFAPFSKDNSIRLSAGGDIWVTREPYVSCDPDKCYQFALGQGTTLNNLHSNNTVRDRTPYRTLLMNELGVPFHLGTKQVCIAWSSSSCHDGKAWLHVCITGDDKNATASFIYNGRLVDSVVSWSKEILRTQESECVCINGTCTVVMTDGSASGKADTKILFIEEGKIVHTSTLSGSAQHVEECSCYPRYPGVRCVCRDNWKGSNRPIVDINIKDHSIVSSYVCSGLVGDTPRKNDSSSSSHCLDPNNEEGGHGVKGWAFDDGNDVWMGRTINETSRLGYETFKVIEGWSNPKSKLQINRQVIVDRGDRSGYSGIFSVEGKSCINRCFYVELIRGRKEETEVLWTSNSIVVFCGTSGTYGTGSWPDGADLNLMPI

SEQ ID NO: 23378 - protein, 469 aa, Artificial Sequence; identical to SEQ ID NO: 23354
  derived and/or modified protein sequence (wt) from neuraminidase__InfluenzaA__AGG13798

SEQ ID NO: 23379 - protein, 469 aa, Artificial Sequence
  derived and/or modified protein sequence (wt) from neuraminidase__InfluenzaA__AGG13810
MNPNQKIITIGSVSLTISTICFFMQIAILITTVTLHFKQYEFNSPPNNQVMLCEPTIIERNITEIVYLTNTTIEKEICPKPAEYRNWSKPQCDITGFAPFSKDNSIRLSAGGDIWVTREPYVSCDPDKCYQFALGQGTTLNNVHSNNTVRDRTPYRTLLMNELGVPFHLGTKQVCIAWSSSSCHDGKAWLHVCITGDDKNATASFIYNGRLVDSVVSWSKEILRTQESECVCINGTCTVVMTDGSASGKADTKILFIEEGKIVHTSTLSGSAQHVEECSCYPRYPGVRCVCRDNWKGSNRPIVDINIKDHSIVSRYVCSGLVGDTPRKNDSSSSSHCLGPNNEEGGHGVKGWAFDDGNDVWMGRTINETSRLGYETFKVIEGWSNPKSKLQINRQVIVDRGDRSGYSGIFSVEGKSCINRCFYVELIRGRKEETEVLWTSNSIVVFCGTSGTYGTGSWPDGADLNLMPI

SEQ ID NO: 23380 - protein, 469 aa, Artificial Sequence; identical to SEQ ID NO: 23354
  derived and/or modified protein sequence (wt) from neuraminidase__InfluenzaA__AGG13822

SEQ ID NO: 23381 - protein, 469 aa, Artificial Sequence; identical to SEQ ID NO: 23354
  derived and/or modified protein sequence (wt) from neuraminidase__InfluenzaA__AGG13834

SEQ ID NO: 23382 - protein, 469 aa, Artificial Sequence; identical to SEQ ID NO: 23375
  derived and/or modified protein sequence (wt) from neuraminidase__InfluenzaA__AGG13846

SEQ ID NO: 23383 - protein, 469 aa, Artificial Sequence; identical to SEQ ID NO: 22146
  derived and/or modified protein sequence (wt) from neuraminidase__InfluenzaA__AGG13858

SEQ ID NO: 23384 - protein, 469 aa, Artificial Sequence
  derived and/or modified protein sequence (wt) from neuraminidase__InfluenzaA__AGG13870
MNPNQKIITIGSVSLTISTICFFMQIAILITTVTLHFKQYEFNSPPNNQVMLCEPTIIERNITEIVYLTNTTIEKEICPKPAEYRNWSKPQCGITGFAPFSKDNSIRLSAGGDIWVTREPYVSCDPDRCYQFALGQGTTLNNMHSNNTVRDRTPYRTLLMNELGVPFHLGTKQVCIAWSSSSCHDGKAWLHVCITGDDKNATASFIYNGRLVDSVVSWSKEILRTQESECVCINGTCTVVMTDGSASGKADTKILFIEEGKIVHTSTLSGSAQHVEECSCYPRYPGVRCVCRDNWKGSNRPIVDINIKDHSIVSSYVCSGLVGDTPRKNDSSSSSHCLDPNNEEGGHGVKGWAFDDGNDVWMGRTINETSRLGYETFKVIEGWSNPKSKLQINRQVIVDRGDRSGYSGIFSVEGTSCINRCFYVELIRGRKEETEVLWTSNSIVVFCGTSGTYGTGSWPDGADLNLMPI

SEQ ID NO: 23385 - protein, 469 aa, Artificial Sequence
  derived and/or modified protein sequence (wt) from neuraminidase__InfluenzaA__AGG13894
MNPNQKIITIGSVSLTISTVCFFMQIAILITTVTLHFKQYEFNSPPNNQVMLCEPTIIERNVTEIVYLTNTTIEKEICPKPAEYRNWSKPQCGITGFAPFSKDNSIRLSAGGDIWVTREPYVSCDPDKCYQFALGQGTTLNNVHSNNTVRDRTPYRTLLMNELGVPFHLGTKQVCIAWSSSSCHDGKAWLHVCITGDDKNATASFIYNGRLVDSVVSWSKEILRTQESECVCINGTCTVVMTDGSASGKADTKILFIEEGKIVHTSTLSGSAQHVEECSCYPRYPGVRCVCRDNWKGSNRPIVDINIKDHSIVSSYVCSGLVGDTPRKNDSSSSSHCLDPNNEEGGHGVKGWAFDDGNDVWMGRTINETSRLGYETFKVIEGWSNPKSKLQINRQVIVDRGDRSGYSGIFSVEGKSCINRCFYVELIRGRKEETEVLWTSNSIVVFCGTSGTYGTGSWPDGADLNLMPI

SEQ ID NO: 23386 - protein, 469 aa, Artificial Sequence; identical to SEQ ID NO: 23354
  derived and/or modified protein sequence (wt) from neuraminidase__InfluenzaA__AGG13906

SEQ ID NO: 23387 - protein, 469 aa, Artificial Sequence
  derived and/or modified protein sequence (wt) from neuraminidase__InfluenzaA__AGG13930
MNPNQKIITIGSVSLTISTICFFMQIAILITTVTLHFKQYEFNSPPNNQVMLCEPTIIERNITEIVYLTNTTIEKEICPKPAEYRNWSKPQCGITGFAPFSKDNSIRLSAGGDIWVTREPYVSCDPDKCYQFALGQGTTLNNVHSNNTVRDRTPYRTLLMNELGVPFHLGTKQVCIAWSSSSCHDGKAWLHVCITGDDKNATASFIYNGRLVDSVVSWSKEILRTQESECVCINGTCTVVMTDGSASGKADTKILFIEEGKIVHTSTLSGSAQHVEECSCYPRYPGVRCVCRDNWKGSNRPIVDINIKDHSIVSSYVCSGLVGDTPRKNDRSSSSHCLDPNNEEGGHGVKGWAFDDGNDVWMGRTINETSRLGYETFKVIEGWSNPKSKLQINRQVIVDRGDRSGYSGIFSVEGKSCINRCFYVELIRGRKEETEVLWTSNSIVVFCGTSGTYGTGSWPDGADLNLMPI

SEQ ID NO: 23388 - protein, 469 aa, Artificial Sequence; identical to SEQ ID NO: 23364
  derived and/or modified protein sequence (wt) from neuraminidase__InfluenzaA__AGG13942

SEQ ID NO: 23389 - protein, 469 aa, Artificial Sequence
  derived and/or modified protein sequence (wt) from neuraminidase__InfluenzaA__AGG13965
MNPNQKIITIGSVCMTIGMANLILQIGNIISIWISHSIQLGNQSQIETCNQSVITYENNTWVNQTYVNISNTNFAAGQSVVSVKLAGNSSLCPVSGWAIYSKDNSVRIGSKGDVFVIREPFISCSPLECRTFFLTQGALLNDKHSNGTIKDRSPYRTLMSCPIGEVPSPYNSRFESVAWSASACHDGINWLTIGISGPDSGAVAVLKYNGIITDTIKSWRNNILRTQESECACVNGSCFTIMTDGPSDGQASYKIFRIEKGKIVKSVEMNAPNYHYEECSCYPDSSEITCVCRDNWHGSNRPWVSFNQNLEYQIGYICSGIFGDNPRPNDKTGSCGPVSSNGANGVKGFSFKYGNGVWIGRTKSISSRKGFEMIWDPNGWTGTDNNFSIKQDIVGINEWSGYSGSFVQHPELTGLDCIRPCFWVELIRGRPKENTIWTSGSSISFCGVNSDTVGWSWPDGAELPFTIDK

SEQ ID NO: 23390 - protein, 469 aa, Artificial Sequence; identical to SEQ ID NO: 23357
  derived and/or modified protein sequence (wt) from neuraminidase__InfluenzaA__AGG13976

SEQ ID NO: 23391 - protein, 469 aa, Artificial Sequence; identical to SEQ ID NO: 23357
  derived and/or modified protein sequence (wt) from neuraminidase__InfluenzaA__AGG13988

SEQ ID NO: 23392 - protein, 469 aa, Artificial Sequence; identical to SEQ ID NO: 23357
  derived and/or modified protein sequence (wt) from neuraminidase__InfluenzaA__AGG14000

SEQ ID NO: 23393 - protein, 469 aa, Artificial Sequence; identical to SEQ ID NO: 23357
  derived and/or modified protein sequence (wt) from neuraminidase__InfluenzaA__AGG14012

SEQ ID NO: 23394 - protein, 469 aa, Artificial Sequence; identical to SEQ ID NO: 23375
  derived and/or modified protein sequence (wt) from neuraminidase__InfluenzaA__AGG14024

SEQ ID NO: 23395 - protein, 469 aa, Artificial Sequence
  derived and/or modified protein sequence (wt) from neuraminidase__InfluenzaA__AGG14036
MNPNQKIITIGSVSLTISTICFFMQIAILITTVTLHFKQYEFNSPPNNQVMLCEPTIIERNITEIVYLTNTTIEKEICPKLAEYRNWSKPQCDITGFAPFSKDNSIRLSAGGDIWVTREPYVSCDPDKCYQFALGQGTTLNNVHSNNTVRDRTPYRTLLMNELGVPFHLGTKQVCIAWSSSSCHDGKAWLHVCITGDDKNATASFIYNGRLVDSVVSWSKDILRTQESECVCINGTCAVVMTDGSASGKADTKILFIEEGKIVHTSTLSGSAQHVEECSCYPRYPGVRCVCRDNWKGSNRPIVDINIKDHSIVSSYMCSGLVGDTPRKNDSSSSGHCLDPNNEEGGHGVKGWAFDDGNDVWMGRTINETSRLGYETFKVIEGWSNPKSKLQINRQVIVDRGNRSGYSGIFSVEGKNCINRCFYVELIRGRKEETEVLWTSNSIVVFCGTSGTYGTGSWPDGADLNLMPI

SEQ ID NO: 23396 - protein, 469 aa, Artificial Sequence; identical to SEQ ID NO: 23375
  derived and/or modified protein sequence (wt) from neuraminidase__InfluenzaA__AGG14321

SEQ ID NO: 23397 - protein, 469 aa, Artificial Sequence; identical to SEQ ID NO: 22146
  derived and/or modified protein sequence (wt) from neuraminidase__InfluenzaA__AGG14333

SEQ ID NO: 23398 - protein, 469 aa, Artificial Sequence; identical to SEQ ID NO: 21787
  derived and/or modified protein sequence (wt) from neuraminidase__InfluenzaA__AGG84182

SEQ ID NO: 23399 - protein, 465 aa, Artificial Sequence
  derived and/or modified protein sequence (wt) from neuraminidase__InfluenzaA__AGJ51955
MNPNQKILCTSATAIIIGAIAVLIGIANLGLNIGLHLKPGCNCSHSQPETTNTSQTIINNYYNETNITNIQMEERTSRNFNNLTKGLCTINSWHIYGKDNAVRIGESSDVLVTREPYVSCDPDECRFYALSQGTTIRGKHSNGTIHDRSQYRALISWPLSSPPTVYNSRVECIGWSSTSCHDGKSRMSICISGPNNNASAVVWYNRRPVAEINTWARNILRTQESECVCHNGVCPVVFTDGSATGPADTRIYYFKEGKILKWESLTGTAKHIEECSCYGERTGITCTCRDNWQGSNRPVIQIDPVAMTHTSQYICSPVLTDNPRPNDPNIGKCNDPYPGNNNNGVKGFSYLDGANTWLGRTISTASRSGYEMLKVPNALTDDRSKPIQGQTIVLNADWSGYSGSFMDYWAEGDCYRACFYVELIRGRPKEDKVLWTGDSIVSMCSSTEFLGQWNWPDGAKIEYFL

SEQ ID NO: 23400 - protein, 465 aa, Artificial Sequence
  derived and/or modified protein sequence (wt) from neuraminidase__InfluenzaA__AGJ72863
MNPNQKILCTSATAIIIGAIAVLIGIANLGLNIGLHLKPGCNCSHSQPETTNTSQTIINNYYNETNITNIQMEERTSRNFNNLTKGLCTINSWHIYGKDNAVRIGESSDVLVTREPYVSCDPDECRFYALSQGTTIRGKHSNGTIHDRSQYRALISWPLSSPPTVYNSRVECIGWSSTSCHDGKSRMSICISGPNNNASAVVWYNRRPVAEINTWARNILRTQESECVCHNGVCPVVFTDGSATGPADTRIYYFKEGKILKWESLTGTAKHIEECSCYGERTGITCTCRDNWQGSNRPVIQIDPVAMTHTSQYICSPVLTDNPRPNDPNIGKCNDPYPGNNNNGVKGFSYLDGANTWLGRTISTASRSGYEMLKVPNALTDDRSKPIQGQTIVLNADWSGYSGSFMDYWAEGDCYRACFYVEVIRGRPKEDKVWWAGNSIVSMCSSTEFLGQWNWPDGAKIEYFL

SEQ ID NO: 23401 - protein, 469 aa, Artificial Sequence
  derived and/or modified protein sequence (wt) from neuraminidase__InfluenzaA__AGJ73328
MNPNQKIITIGSVCMTIGMANLILQIGNIISIWISHSIQLGNQSQIETCNQSVITYENNTWVNQTYVNISNTNFAAGQSVVSVKLAGNSSLCPVSGWAIYSKDNSVRIGSKGDVFVIREPFISCSPLECRTFFLTQGALLNDKHSNGTIKDRSPYRTLMSCPIGEVPSPYNSRFESVAWSASACHDGINWLTIGISGPDSGAVAVLKYNGIITDTIKSWRNNILRTQESECACVNGSCFTIMTDGPSDGQASYKIFRIEKGKIVKSVEMNAPNYHYEECSCYPDSSEITCVCRDNWHGSNRPWVSFNQNLEYQIGYICSGIFGDNPRPNDKTGSCGPVSSNGANGVKGFSFKYGNGVWIGRTKSISSRKGFEMIWDPNGWNGTDNNFSIKQDIVGINEWSGYSGSFVQHPELTGLDCIRPCFWVELIRGRPKENTIWTSGSSISFCGVNSDTVGWSWPDGAELPFTIDK

SEQ ID NO: 23402 - protein, 469 aa, Artificial Sequence; identical to SEQ ID NO: 20257
  derived and/or modified protein sequence (wt) from neuraminidase__InfluenzaA__AGJ73330

SEQ ID NO: 23403 - protein, 469 aa, Artificial Sequence
  derived and/or modified protein sequence (wt) from neuraminidase__InfluenzaA__AGJ73332
MNPNQKIITIGSVCMTIGMANLILQIGNIISIWISHSIQLGNQNQIETCNQSVITYENNTWVNQTYVNISNTNFAAGQSVVSVKLAGNSSLCPVSGWAIYSKDNSIRIGSKGDVFVIREPFISCSPLECRTFFLTQGALLNDKHSNGTIKDRSPYRTLMSCPIGEVPSPYNSRFESVAWSASACHDGINWLTIGISGPDNGAVAVLKYNGIITDTIKSWRNNILRTQESECACVNGSCFTVMTDGPSDGQASYKIFRIEKGKIVKSVEMNAPNYHYEECSCYPDSSEITCVCRDNWHGSNRPWVSFNHNLEYQIGYICSGIFGDNPRPNDKTGSCGPVSSNGANGVKGFSFKYGNGVWIGRTKSISSRNGFEMIWDPNGWTGTDNNFSIKQDIIGINEWSGYSGSFVQHPELTGLDCIRPCFWVELIRGRPKENTIWTSGSSISFCGVNSDTVGWSWPDGAELPFTIDK

SEQ ID NO: 23404 - protein, 469 aa, Artificial Sequence; identical to SEQ ID NO: 20257
  derived and/or modified protein sequence (wt) from neuraminidase__InfluenzaA__AGJ73334

SEQ ID NO: 23405 - protein, 469 aa, Artificial Sequence; identical to SEQ ID NO: 20257
  derived and/or modified protein sequence (wt) from neuraminidase__InfluenzaA__AGJ73336

SEQ ID NO: 23406 - protein, 469 aa, Artificial Sequence; identical to SEQ ID NO: 20257
  derived and/or modified protein sequence (wt) from neuraminidase__InfluenzaA__AGJ73338

SEQ ID NO: 23407 - protein, 469 aa, Artificial Sequence
  derived and/or modified protein sequence (wt) from neuraminidase__InfluenzaA__AGJ73340
MNPNQKIITIGSVCMTIGMANLILQIGNIISIWISHSIQLGNQSQIETCNQSVITYENNTWVNQTYVNISNTNFAAGQSVVSVKLAGNSSLCPASGWAIYSKDNSIRIGSKGDVFVIREPFISCSPLECRTFFLTQGALLNDKHSNGTIKDRSPYRTLMSCPIGEVPSPYNSRFESVAWSASACHDGINWLTIGISGPDNGAVAVLKYNGIITDTIKSWRNNILRTQESECACVNGSCFTIMTDGPSDGQASYKIFRIEKGKIVKSVEMNAPNYHYEECSCYPDSSEITCVCRDNWHGSNRPWVSFNQNLEYQIGYICSGIFGDNPRPNDKTGSCGPVSSNGANGVKGFSFKYGNGVWIGRTKSISSRKGFEMIWDPNGWTGTDNNFSIKQDIVGINEWSGYSGSFVQHPELTGLDCIRPCFWVELIRGRPKENTIWTSGSSISFCGVNSDTVGWSWPDGAELPFTIDK

SEQ ID NO: 23408 - protein, 469 aa, Artificial Sequence
  derived and/or modified protein sequence (wt) from neuraminidase__InfluenzaA__AGJ73342
MNPNQKIITIGSVCMTIGMANLILQIGNIISIWISHSIQLGNQSQIETCNQSVITYENNTWVNQTYVNISNTNFAAGQSVVSVKLAGNSSLCPVSGWAIYSKDNSIRIGSKGDVFVIREPFISCSPLECRTFFLTQGALLNDKHSNGTIKDRSPYRTLMSCPIGEVPSPYNSRFESVAWSASACHDGINWLTIGISGPDNGAVAVLKYNGIITDTIKSWRNNILRTQESECACVNGSCFTIMTDGPSDGQASYKIFRIEKGKIVKSVEMNAPNYHYEECSCYPDSSEITCVCRDNWHGSNRPWVSFNQNLEYQIGYICSGIFGDNPRPNDKTGSCGPVSSNGANGVKGFSFKYGNGVWIGRTKSISSRKGFEMIWDPNGWTGTDNNFSIKQDIVGINEWSGYSGSFVQHPELTGLDCIRPCFWVELIRGRPKENTIWTSGSSISFCGVNSGTVGWSWPDGAELPFTIDK

SEQ ID NO: 23409 - protein, 469 aa, Artificial Sequence; identical to SEQ ID NO: 20709
  derived and/or modified protein sequence (wt) from neuraminidase__InfluenzaA__AGJ73344

SEQ ID NO: 23410 - protein, 469 aa, Artificial Sequence
  derived and/or modified protein sequence (wt) from neuraminidase__InfluenzaA__AGJ73346
MNPNQKIITIGSVCMTIGMANLILQIGNIISIWISHSIQLGNQNQIEKCNQSVITYENNTWVNQTYVNISNTNFAAGQSVVSVKLAGNSSLCPVSGWAIYSKDNSIRIGSKGDVFVIREPFISCSPLECRTFFLTQGALLNDKHSNGTIKDRSPYRTLMSCPIGEVPSPYNSRFESVAWSASACHDGINWLTIGISGPDNGAVAVLKYNGIITDTIKSWRNNILRTQESECACVNGSCFTIMTDGPSDGQASYKIFRIEKGKIVKSVEMNAPNYHYEECSCYPDSSEITCVCRDNWHGSNRPWVSFNQNLEYQIGYICSGIFGDNPRPNDKTGSCGPVSSNGANGVKGFSFKYGNGVWIGRTKSISSRKGFEMIWDPNGWTGTDNNFSIKQDIVGINEWSGYSGSFVQHPELTGLDCIRPCFWVELIRGRPKESTIWTSGSSISFCGVNSDTVGWSWPDGAELPFTIDK

SEQ ID NO: 23411 - protein, 469 aa, Artificial Sequence
  derived and/or modified protein sequence (wt) from neuraminidase__InfluenzaA__AGJ73348
MNPNQKIITIGSVCMTIGMANLILQIGNIISIWISHSIQLGNQNQIETCNQSVITYENNTWVNQTYVNISNTNFAAGQSVISVKLAGNSSLCPVSGWAIYSKDNSIRIGSKGDVFVIREPFISCSPLECRTFFLTQGALLNDKHSNGTIKDRSPYRTLMSCPIGEVPSPYNSRFESVAWSASACHDGINWLTIGISGPDNGAVAVLKYNGIITDTIKSWRNNILRTQESECACVNGSCFTIMTDGPSDGQASYKIFRIEKGKIVKSVEMNAPNYHYEECSCYPDSSEITCVCRDNWHGSNRPWVSFNQNLEYQIGYICSGIFGDNPRPNDKTGSCGPVSSNGANGVKGFSFKYGNGVWIGRTKSISSRKGFEMIWDPNGWTGTDNNFSIKQDIVGINEWSGYSGSFVQHPELTGLDCIRPCFWVELIRGRPKENTIWTSGSSISFCGVNSDTVGWSWPDGAELPFTIDK

SEQ ID NO: 23412 - protein, 469 aa, Artificial Sequence
  derived and/or modified protein sequence (wt) from neuraminidase__InfluenzaA__AGJ73350
MNPNQKIITIGSVCMTIGMANLILQIGNIISIWISHSIQLGNQNQIETCNQSVITYENNTWVNQTYVNISNTNFAAGQSVVSVKLAGNSSLCPVSGWAIYSKDNSIRIGSKGDVFVIREPFISCSPLECRTFFLTQGALLNDEHSNGTIKDRSPYRTLMSCPIGEVPSPYNSRFESVAWSASACHDGINWLTIGISGPDNGAVAVLKYNGIITDTIKSWRNNILRTQESECACVNGSCFTIMTDGPSDGQASYKIFRIEKGKIVKSVVMNAPNYHYEECSCYPDSSEITCVCRDNWHGSNRPWVSFNQNLEYQIGYICSGIFGDNPRPNDKTGSCGPVSSNGANGVKGFSFKYGNGVWIGRTKSISSRKGFEMIWDPNGWTGTDNNFSIKQDIVGINEWSGYSGSFVQHPELTGLDCIRPCFWVELIRGRPKENTIWTSGSSISFCGVNSDTVGWSWPDGAELPFTIDK

SEQ ID NO: 23413 - protein, 469 aa, Artificial Sequence
  derived and/or modified protein sequence (wt) from neuraminidase__InfluenzaA__AGJ73352
MNPNQKIITIGSVCMTIGMANLILQIGNIISIWISHSIQLGNQSQIETCNQSVITYENNTWVNQTYVNISNTNFAAGQSVVSVKLVGNSSLCPVSGWAIYSKDNSIRIGSKGDVFVIREPFISCSPLECRTFFLTQGALLNDKHSNGTIKDRSPYRTLMSCPIGEVPSPYNSRFESVAWSASACHDGINWLTIGISGPDNGAVAVLKYNGIITDTIKSWRNNILRTQESECACVNGSCFTIMTDGPSDGQASYKIFRIEKGKIVKSVEMNAPNYHYEECSCYPDSSEITCVCRDNWHGSNRPWVSFNQNLEYQIGYICSGIFGDSPRPNDKTGSCGPVSSNGANGVKGFSFKYGNGVWIGRTKSISSRKGFEMIWDPNGWTGTDNNFSIKQDIVGINEWSGYSGSFVQHPELTGLDCIRPCFWVELIRGRPKENTIWTSGSSISFCGVNSDTVGWSWPDGAELPFTIDK

SEQ ID NO: 23414 - protein, 469 aa, Artificial Sequence; identical to SEQ ID NO: 20709
  derived and/or modified protein sequence (wt) from neuraminidase__InfluenzaA__AGJ73354

SEQ ID NO: 23415 - protein, 469 aa, Artificial Sequence
  derived and/or modified protein sequence (wt) from neuraminidase__InfluenzaA__AGJ73356
MNPNQKIITIGSVCMTIGMANLILQIGNIISIWISHSIQLGNQSQIETCNQSVITYENNTWVNQTYFNISNTNFAAGQSVVSVKLAGNSSLCPVSGWAIYSKDNSIRIGSKGDVFVIREPFISCSPLECRTFFLTQGALLNDKHSNGTIKDRSPYRTLMSCPIGEVPSPYNSRFESVAWSASACHDGINWLTIGISGPDNGAVAVLKYNGIITDTIKSWRNNILRTQESECACVNGSCFTIMTDGPSDGQASYKIFRIEKGKIVKSVEMNAPNYHYEECSCYPDSSEITCVCRDNWHGSNRPWVSFNQNLEYQIGYICSGIFGDNPRPNDKTGSCGPVSSNGANGVKGFSFKYGNGVWIGRTKSISSRKGFEMIWDPNGWTGTDNNFSIKQDIVGINEWSGYSGSFVQHPELTGLDCIRPCFWVELIRGRPKENTIWTSGSSISFCGVNSDTVGWSWPDGAELPFTIDK

SEQ ID NO: 23416 - protein, 469 aa, Artificial Sequence; identical to SEQ ID NO: 20709
  derived and/or modified protein sequence (wt) from neuraminidase__InfluenzaA__AGJ73358

SEQ ID NO: 23417 - protein, 469 aa, Artificial Sequence; identical to SEQ ID NO: 20709
  derived and/or modified protein sequence (wt) from neuraminidase__InfluenzaA__AGJ73360

SEQ ID NO: 23418 - protein, 469 aa, Artificial Sequence
  derived and/or modified protein sequence (wt) from neuraminidase__InfluenzaA__AGJ73362
MNPNQKIITIGSVCMTIGMANLILQIGNIISIWISHSIQLGNQSQIETCNQSVITYENNTWVNQTYVNISNTNFADGQSVVSVKLAGNSSLCPVSGWAIYSKDNSIRIGSKGDVFVIREPFISCSPLECRTFFLTQGALLNDKHSNGTIKDRSPYRTLMSCPIGEVPSPYNSRFESVAWSASACHDGINWLTIGISGPDNGAVAVLKYNGIITDTIKSWRNNILRTQESECACVNGSCFTIMTDGPSDGQASYKIFRIEKGKIVKSVEMNAPNYHYEECSCYPDSSEITCVCRDNWHGSNRPWVSFNQNLEYQIGYICSGIFGDNPRPNDKTGSCGPVSSNGANGVKGFSFKYGNGVWIGRTKSISSRKGFEMIWDPNGWTGTDNNFSIKQDIVGINEWSGYSGSFVQHPELTGLDCIRPCFWVELIRGRPKENTIWTSGSSISFCGVNSDTVGWSWPDGAELPFTIDK

SEQ ID NO: 23419 - protein, 469 aa, Artificial Sequence; identical to SEQ ID NO: 21832
  derived and/or modified protein sequence (wt) from neuraminidase__InfluenzaA__AGJ73364

SEQ ID NO: 23420 - protein, 469 aa, Artificial Sequence; identical to SEQ ID NO: 20709
  derived and/or modified protein sequence (wt) from neuraminidase__InfluenzaA__AGJ73366

SEQ ID NO: 23421 - protein, 469 aa, Artificial Sequence; identical to SEQ ID NO: 20257
  derived and/or modified protein sequence (wt) from neuraminidase__InfluenzaA__AGJ73370

SEQ ID NO: 23422 - protein, 469 aa, Artificial Sequence
  derived and/or modified protein sequence (wt) from neuraminidase__InfluenzaA__AGJ73372
MNPNQKIITIGSVCMTIGMANLILQIGNIISIWISHSIQLGNQNQIETCNQSVITYENNTWVNQTYVNISNTNFAAGQSVVSVKLAGNSSLCPVSGWAIYSKDNSIRIGSKGDVFVIREPFISCSPLECRTFFLTQGALLNDKHSNGTIKDRSPYRTLMSCPIGEVPSPYNSRFESVAWSASACHDGINWLTIGISGPDNGAVAVLKYNGIITDTIKSWRNNILRTQESECACVNGSCFTIMTDGPSDGQASYKIFRIEKGKIVKSVEMNAPNYHYEECSCYPDSSEITCVCRDNWHGSNRPWVSFNHNLEYQIGYICSGIFGDNPRPNDKTGSCGPVSSNGANGVKGFSFKYGNGVWIGRTKSISSRKGFEMIWDPNGWTGTDNNFSIKQDIVGINEWSGYSGSFVQHPELTGLDCIRPCFWVELIRGRPKENTIWTSGSSISFCGVNSDTVGWSWPDGAELPFTIDK

SEQ ID NO: 23423 - protein, 469 aa, Artificial Sequence; identical to SEQ ID NO: 20257
  derived and/or modified protein sequence (wt) from neuraminidase__InfluenzaA__AGJ73374

SEQ ID NO: 23424 - protein, 469 aa, Artificial Sequence
  derived and/or modified protein sequence (wt) from neuraminidase__InfluenzaA__AGJ73376
MNPNQKIITIGSVCMTIGMANLILQIGNIISIWISHSIQLGNQSQIETCNQSVITYENNTWVNQTYVNISNTNFAAGQSVVSVKLAGNSSLCPVSGWAIYSKDNSVRIGSKGDVFVIREPFISCSPLECRTFFLTQGALLNDKHSNGTIKDRSPYRTLMSCPIGEVPSPYNSRFESVAWSASACHDGINWLTIGISGPDSGAVAVLKYNGIITDTIKSWRNNILRTQESECACVNGSCFTIMTDGPSDGQASYKILRIEKGKIVKSVEMNAPNYHYEECSCYPDSSEITCVCRDNWHGSNRPWVSFNQNLEYQIGYICSGIFGDNPRPNDKTGSCGPVSSNGANGVKGFSFKYGNGVWIGRTKSISSRKGFEMIWDPNGWTGTDNNFSTKQDIVGINEWSGYSGSFVQHPELTGLDCIRPCFWVELIRGRPKENTIWTSGSSISFCGVNSDTVGWSWPDGAELPFTIDK

SEQ ID NO: 23425 - protein, 469 aa, Artificial Sequence
  derived and/or modified protein sequence (wt) from neuraminidase__InfluenzaA__AGJ73379
MNPNQKIITIGSVCMTIGMANLILQIGNIISIWISHSIQLGNQSQIETCNQSVITYENNTWVNQTYVNISNTNFAAGQSVVSVKLAGNSSLCPVSGWAIYSKDNSVRIGSKGDVFVIREPFISCSPLECRTFFLTQGALLNDKHSNGTIKDRSPYRTLMSCPIGEVPSPYNSRFESVAWSASACHDGINWLTIGISGPDSGAVAVLKYNGIITDTIKSWRNNILRTQESECACVNGSCFTIMTDGPSDGQASYKIFRIEKGKIVKSVEMNAPNYHYEECSCYPDSSEITCVCRDNWHGSNRPWVSFNQNLEYQIGYICSGIFGDNPRPNDKTGSCGPVSSNGANGVKGFSFKYGNGVWIGRTKSISSRKGFEMIWDPNGWTGTDNNFSIKQDIIGINEWSGYSGSFVQHPELTGLDCIRPCFWVELIRGRPKENTIWTSGSSISFCGVNSDTVGWSWPDGAELPFTIDK

SEQ ID NO: 23426 - protein, 469 aa, Artificial Sequence
  derived and/or modified protein sequence (wt) from neuraminidase__InfluenzaA__AGJ73381
MNPNQKIITIGSVCMTIGMANLILQIGNIISIWISHSIQLGNQSQIETCNQSVITYENNTWVNQTYVNISNTNFAAGQSVVSVKLAGNSSLCPVSGWAIYSKDNSVRIGSKGDVFVIREPFISCSPLECRTFFLTQGALLNDEHSNGTIKDRSPYRTLMSCPIGEVPSPYNSRFESVAWSASACHDGINWLTIGISGPDSGAVAVLKYNGIITDTIKSWRNNILRTQESECACVNGSCFTIMTDGPSDGQASYKIFRIEKGKIVKSVEMNAPNYHYEECSCYPDSSEITCVCRDNWHGSNRPWVSFNQNLEYQIGYICSGIFGDNPRPNDKTGSCGPVSSNGANGVKGFSFKYGNGVWIGRTKSISSRKGFEMIWDPNGWTGTDNNFSIKQDIVGINEWSGYSGSFVQHPELTGLDCIRPCFWVELIRGRPKENTIWTSGSSISFCGVNSDTVGWSWPDGAELPFTIDK

SEQ ID NO: 23427 - protein, 469 aa, Artificial Sequence
  derived and/or modified protein sequence (wt) from neuraminidase__InfluenzaA__AGK62992
MNPNQKIITIGSVSLTISTICFFMQIAILITTVTLHFKQYEFNSPPNNQVMLCEPTIIERNITEIVYLTNTTIEKEICPKPAEYRNWSKPQCDITGFAPFSKDNSIRLSAGGDIWVTREPYVSCDPDKCYQFALGQGTTLNNVHSNNTVRDRTPYRTLLMNELGVPFHLGTKQVCIAWSSSSCHDGKAWLHVCITGDDKNATASFIYNGRLVDSVVSWSKEILRTQESECVCINGTCTVVMTDGSASGKADTKILFIEEGKIVHTSTLSGSAQHVEECSCYPRYPGVRCVCRDNWKGSNRPIVDINIKDHSIVSSYVCSGLVGDTPRKNDSSSSSHCLDPNNEEGGHGVKGWAFDDGNDVWMGRTINETSRLGYETFKVIEGWSNPKSKLQINRQVIVDRGDRSGYSGIFSVEVKSCINRCFYVELIRGRKEETEVLWTSNSIVVFCGTSGTYGTGSWPDGADINLMPI

SEQ ID NO: 23428 - protein, 469 aa, Artificial Sequence
  derived and/or modified protein sequence (wt) from neuraminidase__InfluenzaA__AGK62996
MNPNQKIITIGSVSLIISTICFFMQIAILITTVTLHFKQYEFNSPPNNQVMLCEPTIIERNITEIVYLTNTTIEKEICPKPAEYRNWSKPQCDITGFAPFSKDNSIRLSAGGDIWVTREPYVSCDPDKCYQFALGQGTTLNNVHSNNTVRDRTPYRTLLMNELGVPFHLGTKQVCIAWSSSSCHDGKAWLHVCITGDDKNATASFIYNGRLVDSVVSWSKEILRTQESECVCINGTCTVVMTDGSASGKADTKILFIEEGKIVHTSTLSGSAQHVEECSCYPRYPGVRCVCRDNWKGSNRPIVDINIKDHSIVSSYVCSGLVGDTPRKNDSSSSSHCLDPNNEEGGHGVKGWAFDDGNDVWMGRTINETSRLGYETFKVIEGWSNPKSKLQINRQVIVDRGDRSGYSGIFSVESKSCINRCFYVELIRGRKEETEVLWTSNSIVVFCGTSGTYGTGSWPDGADINLMPI

SEQ ID NO: 23429 - protein, 469 aa, Artificial Sequence
  derived and/or modified protein sequence (wt) from neuraminidase__InfluenzaA__AGK62998
MNPNQKIITIGSVSLTIATICFFMQIAILITTVTLHFKQCEFNSPPNNQVMLCEPTIIERNITEIVYLTNTTIEKEICPKLAEYRNWSKPQCDITGFAPFSKDNSIRLSAGGDIWVTREPYVSCDPDKCYQFALGQGTTLNNVHSNNTVRDRTPYRTLLMNELGVPFHLGTKQVCMAWSSSSCHDGKAWLHVCITGDDKNATASFIYNGRLVDSVVSWSKEILRTQESECVCINGTCTVVMTDGSASGKADTKILFIEEGKIVHTSTLSGSAQHVEECSCYPRYPGVRCVCRDNWKGSNRPIVDINIKDHSIVSSYVCSGLLGDTPRKNDSSSSSHCLDPNNEEGGHGVKGWAFDDGNDVWMGRTISEKSRLGYETFKVIEGWSNPKSKLQINRQVIVDRGDRSGYSGIFSVESKSCINRCFYVELIRGRKEETEVLWTSNSIVVFCGTSGTYGTGSWPDGADINLMPI

SEQ ID NO: 23430 - protein, 469 aa, Artificial Sequence
  derived and/or modified protein sequence (wt) from neuraminidase__InfluenzaA__AGK63000
MNPNQKIITIGSVSLTIATICFFMQIAILITTVTLHFKQCDFNSPPNNQVMLCEPTIIERNITEIVYLTNTTIEKEICPKLAEYRNWSKPQCDITGFAPFSKDNSIRLSAGGDIWVTREPYVSCDPDKCYQFALGQGTTLNNVHSNNTVRDRTPYRTLLMNELGVPFHLGTKQVCMAWSSSSCHDGKAWLHVCITGDDKNATASFIYNGKLVDSVVSWSKEILRTQESECVCINGTCTVVMTDGSASGKADTKILFIEEGKIVHTSTLSGSAQHVEECSCYPRYPGVRCVCRDNWKGSNRPIVDINIKDHSIVSSYVCSGLVGDTPRKNDSSSSSHCLDPNNEEGGHGVKGWAFDDGNDVWMGRTINETSRLGYETFKVIEGWSNPKSKLQINRQVIVDRGDRSGYSGIFSVEGKSCINRCFYVELIRGRKEETEVLWTSNSIVVFCGTSGTYGTGSWPDGADINLMPI

SEQ ID NO: 23431 - protein, 469 aa, Artificial Sequence
  derived and/or modified protein sequence (wt) from neuraminidase__InfluenzaA__AGK63002
MNPNQKIITIGSVSLTISTICFFMQIAILMTTVTLHFKQCEFNSPPNNQVMLCEPTIIERNITEIVYLTNTTIEKEICPKLAEYRNWSKPQCDITGFAPFSKDNSIRLSAGGDIWVTREPYVSCDPDKCYQFALGQGTTLNNVHSNNTVRDRTPYRTLLMNELGVPFHLGTKQVCMAWSSSSCHDGKAWLHVCITGNDKNATASFIYNGRLVDSVVSWSKEILRTQESECVCINGTCTVVMTDGSASGKADTKILFIEEGKIVHTSTLSGSAQHVEECSCYPRYPGVRCVCRDNWKGSNRPIVDINIKDHSIVSSYVCSGLVGDTPRKNDSSSSSHCLDPNNEEGGHGVKGWAFDDGNDVWMGRTITETSRLGYETFKVIEGWSNPKSKLQINRQVIVDRGDRSGYSGIFSVEGKSCINRCFYVELIRGRKEETEVLWTSNSIVVFCGTSGTYGTGSWPDGADINLMPI

SEQ ID NO: 23432 - protein, 469 aa, Artificial Sequence
  derived and/or modified protein sequence (wt) from neuraminidase__InfluenzaA__AGK63004
MNPNQKIITIGSVSLTISTICFFMQIAILITTVTLHFKQYEFNSPPNNQVMLCEPTIIERNITEIVYLTNTTIEKEICPKPAEYRNWSKPQCDITGFAPFSKDNSIRLSAGGDIWVTREPYVSCDPDKCYQFALGQGTTLNNVHSNNTVRDRTPYRTLLMNELGVPFHLGTKQVCIAWSSSSCHDGKAWLHVCITGDDKNATASFIYNGRLVDSVVSWSKEILRTQESECVCINGTCTVVMTDGSASGKADTKILFIEEGKIVHTSTLSGSSQHVEECSCYPRYPGVRCVCRDNWKGSNRPIVDINIKDHSIVSSYVCSGLVGDTPRKNDSSSSSHCLDPNNEEGGHGVKGWAFDDGNDVWMGRTINETSRLGYETFKVIEGWSNPKSKLQINRQVIVDRGDRSGYSGIFSVEGKSCINRCFYVELIRGRKEETEVLWTSNSIVVFCGTSGTYGTGSWPDGADINLMPI

SEQ ID NO: 23433 - protein, 469 aa, Artificial Sequence
  derived and/or modified protein sequence (wt) from neuraminidase__InfluenzaA__AGK63006
MNPNQKIITIGSVSLTIATICFFMQIAILITTVTLHFKQYEFNSPPNNQVMLCEPTIIERNITEIVYLTNTTIEKEICPKPAEYRNWSKPQCDITGFAPFSKDNSIRLSAGGDIWVTREPYVSCDPDKCYQFALGQGTTLNNVHSNNTVRDRTPYRTLLMNELGVPFHLGTKQVCIAWSSSSCHDGKAWLHVCITGDDKNATASFIYNGRLVDSVVSWSKEILRTQESECVCINGTCTVVMTDGSASAKADTKILFIEEGKIVHTSTLSGSAQHVEECSCYPRYSGVRCVCRDNWKGSNRPIVDINIKDHSIVSSYVCSGLVGDTPRKNDSSSSSHCLDPNNEEGGHGVKGWAFDDGNDVWMGRTINETSRLGYETFKVIEGWSNPKSQLQINRQVIVDRGDRSGYSGIFSVESKSCINRCFYVELIRGRKEETEVLWTSNSIVVFCGTSGTYGTGSWPDGADINLMPI

SEQ ID NO: 23434 - protein, 469 aa, Artificial Sequence
  derived and/or modified protein sequence (wt) from neuraminidase__InfluenzaA__AGK63008
MNPNQKIITIGSVSLTIATICFFMQIAILITTVTLHFKQCEFNSPPNNQVMLCEPTIIERNITEIVYLTNTTIEKEICPKLAEYRNWSKPQCDITGFAPFSKDNSIRLSAGGDIWVTREPYVSCDPDKCYQFALGQGTTLNNVHSNNTVRDRTPYRTLLMNELGVPFHLGTKQVCMAWSSSSCHDGKAWLHVCITGDDKNATASFIYNGKLVDSVVSWSKEILRTQESECVCINGTCTVVMTDGSASGKADTKILFIEEGKIVHTSTLSGSAQHVEECSCYPRYPGVRCVCRDNWKGSNRPIVDINIKDHSIVSSYVCSGLVGDTPRKNDSSSSSHCLDPNNEEGGHGVKGWAFDDGNDVWMGRTINETSRLGYETFKVIEGWSNPKSKLQMNRQVIVDRGDRSGYSGIFSVEGKSCINRCFYVELIRGRKEETEVLWTSNSIVVFCGTSGTYGTGSWPDGADINLMPI

SEQ ID NO: 23435 - protein, 469 aa, Artificial Sequence
  derived and/or modified protein sequence (wt) from neuraminidase__InfluenzaA__AGK63010
MNPNQKIITIGSVSLTIATICFFMQIAILITTVTLHFKQCEFNSPPNNQVMLCEPTIIERNITEIVYLTNTTIEKEICPKLAEYRNWSKPQCDITGFAPFSKDNSIRLSAGGDIWVTREPYVSCDPDKCYQFALGQGTTLNNVHSNNTVRDRTPYRTLLMNELGVPFHLGTKQVCMAWSSSSCHDGKAWLHVCITGDDKNATASFIYNGKLVDSVVSWSKEILRTQESECVCINGTCTVVMTDGSASGKADTKILFIEEGKIVHTSTLSGSAQHVEECSCYPRYPGVRCVCRDNWKGSNRPIVDINIKDHSIVSSYVCSGLVGDTPRKNDSSSSSHCLDPNNEEGGHGVKGWAFDDGNDVWMGRTINETSRLGYETFKVIEGWSDPKSKLQINRQVIVDRGDRSGYSGIFSVEGKSCINRCFYVELIRGRKEETEVLWTSNSIVVFCGTSGTYGTGSWPDGADINLMPI

SEQ ID NO: 23436 - protein, 469 aa, Artificial Sequence
  derived and/or modified protein sequence (wt) from neuraminidase__InfluenzaA__AGK63012
MNPNQKIITIGSVSLTISTICFFMQIAILITTVTLHFKQYEFNSPPNNQVMLCEPTIIERNITEIVYLTNTTIEKEICPKPAEYRNWSKPQCDITGFAPFSKDNSIRLSAGGDIWVTREPYVSCDPDKCYQFALGQGTTLNNVHSNNTVRDRTPYRTLLMNELGVPFHLGTKQVCIAWSSSSCHDGKAWLHVCITGDDKNATASFIYNGRLVDSVVSWSKEILRTQESECVCINGTCTVVMTDGSASGKADTKILFIEEGKIVHTSTLSGSAQHVEECSCYPRYPGVRCVCRDNWKGSNRPIVDINIKDHSIVSSYVCSGLVGDTPRKNDSSSSSHCLDPNNEEGGHGVKGWAFDDGNDVWMGRTINETSRLGYETFKVIEGWSNPKSKLQINRQVIVDRGYRSGYSGIFSVEGKSCINRCFYVDLIRGRKEETEVLWTSNSIVVFCGTSGTYGTGSWPDGADINLMPI

SEQ ID NO: 23437 - protein, 469 aa, Artificial Sequence
  derived and/or modified protein sequence (wt) from neuraminidase__InfluenzaA__AGK63014
MNPNQKIITIGSVSLTISTICFFMQIAILITTVTLHFKQYEFNSPPNNQVMLCEPTIIERNITEIVYLTNTTIEKEICPKPAEYRNWSKPQCDITGFAPFSKDNSIRLSAGGDIWVTREPYVSCDPDKCYQFALGQGTTLNNVHSNNTVRDRTPYRTLLMNELGVPFPLGTKQVCIAWSSSSCHDGKAWLHVCITGDDKNATASFIYNGRLVDSVVSWSKEIHRTQESECVCINGTCTVVMTDGSASGKADTKILFIEEGKIVHTSTLSGSAQHVEECSCYPRYPGVRCVCRDNWKGSNRPIVDINIKDHSIVSSYVCSGLVGDTPRKNDSSSSSHCLDPNNEEGGHGVKGWAFDDGNDVWMGRTISEKSRLGYETFKVIEGWSNPKSKLQINRQVIVDRGNRSGYSGIFSVEGKSCINRCFYVELIRGRKEETEVLWTSNSIVVFCGTSGTYGTGSWPDGADINLMPI

SEQ ID NO: 23438 - protein, 469 aa, Artificial Sequence
  derived and/or modified protein sequence (wt) from neuraminidase__InfluenzaA__AGK63018
MNPNQKIITIGSVSLTISTICFFMQIAILITTVTLHFKQCEFNSPPNNQVMLCEPTIIERNITEIVYLTNTTIEKEICPKLAEYRNWSKPQCDITGFAPFSKDNSIRLSAGGDIWVTREPYVSCDPDKCYQFALGQGTTLNNVHSNNTVRDRTPYRTLLMNELGVPFHLGTKQVCMAWSSSSCHDGKAWLHVCITGDDKNATASFIYNGKLVDSVVSWSKEILRTQESECVCINGTCTVVMTDGSASGKADTKILFIEEGKIVHTSTLSGSAQHVEECSCYPRYPGVRCVCRDNWKGSNRPIVDINIKDHSIVSSYVCSGLVGDTPRKNDSSSSSHCLDPNNEEGGHGVKGWAFDDGNDVWMGRTINETSRLGYETFKVIEGWSNPKSKLQINRQVIVDRGDRSGYSGIFSVEGKSCINRCFYVELIRGRKEETEVLWTSNSIVVFCGTSGTYGTGSWPDGADINLMPI

SEQ ID NO: 23439 - protein, 469 aa, Artificial Sequence
  derived and/or modified protein sequence (wt) from neuraminidase__InfluenzaA__AGK63020
MNPNQKIITIGSVSLTISTICFFMQIAILITTVTLHFKQYEFNSPPNNQVMLCEPTIIERNITEIVYLTNTTIEKEICPKPAEYRNWSKPQCDITGFAPFSKDNSIRLSAGGDIWVTREPYVSCDPDKCYQFALGQGTTLNNVHSNNTVRDRTPYRTLLMNELGVPFHLGTKQVCIAWSSSSCHDGKAWLHVCITGDDKNATASFIYNGRLVDSVVSWSKEILRTQESECVCINGTCTVVMTDGSASGKADTKILFIEEGKIVHTSTLSGSAQHVEECSCYPRYPGVRCVCRDNWKGSNRPIVDINIKDHSIVSSYVCSGLVGDTPRKNDSSSSSHCLDPNNEEGGHGVKGWAFDDGNDVWMGRTINETSRLGYETFKVIEGWSNPKSKLQINRQVIVDRGDRSGYSGIFSVEGKSCINRCFYVELIRGRKEETEVLWTSNSIVVFCGTSGTYGTGSWPDGADINLMPI

SEQ ID NO: 23440 - protein, 469 aa, Artificial Sequence
  derived and/or modified protein sequence (wt) from neuraminidase__InfluenzaA__AGK63022
MNPNQKIITIGSVSLTISTICFFMQIAILITTVTLHFKQCEFNSPPNNQVMLCEPTIIERNITEIVYLTNTTIEKEICPKLAEYRNWSKPQCDITGFAPFSKDNSIRLSAGGDIWVTREPYVSCDPDKCYQFALGQGTTLNNVHSNNTVRDRTPYRTLLMNELGVPFHLGTKQVCMAWSSSSCHDGKAWLHVCITGDDKNATASFIYNGKLVDSVVSWSKEILRTQESECVCINGTCTVVMTDGSASGKADTKILFIEEGKIVHTSTLSGSAQHVEECSCYPRYPGVRCVCRDNWKGSNRPIVDINIKDHSIVSSYVCSGLVGDTPRKNDSSSSSHCLDPNNEEGGHGVKGWAFDDGNDVWMGRTINETSRLGYETFKVIEGWSNPKSKLQINRQVIVDRGDRSGYSGIFSVEGKSCINRCFYVDLIRGRKEETEVLWTSNSIVVFCGTSGTYGTGSWPDGADINLMPI

SEQ ID NO: 23441 - protein, 469 aa, Artificial Sequence; identical to SEQ ID NO: 23439
  derived and/or modified protein sequence (wt) from neuraminidase__InfluenzaA__AGK63024

SEQ ID NO: 23442 - protein, 469 aa, Artificial Sequence; identical to SEQ ID NO: 23439
  derived and/or modified protein sequence (wt) from neuraminidase__InfluenzaA__AGK63026

SEQ ID NO: 23443 - protein, 469 aa, Artificial Sequence
  derived and/or modified protein sequence (wt) from neuraminidase__InfluenzaA__AGK63028
MNPNQKIITIGSVSLTISTICFFMQIAILITTVTLHFKQYEFNSPPNNQVMLCEPTIIERNKTEIVYLTNTTIEKEICPKPAEYRNWSKPQCDITGFAPFSKDNSIRLSAGGDIWVTREPYVSCDPDKCYQFALGQGTTLNNVHSNNTVRDRTPYRTLLMNELGVPFHLGTKQVCIAWSSSSCHDGKAWLHVCITGDDKNATASFIYNGRLVDSVVSWSKEILRTQESECVCINGTCTVVMTDGSASGKADTKILFIEEGKVVHTSTLSGSAQHVEECSCYPRYPGVRCVCRDNWKGSNRPIVDINIKDHSIVSSYVCSGLVGDTPRKNDSSSSSHCLDPNNEEGGHGVKGWAFDDGNDVWMGRTINETSRLGYETFKVIEGWSNPKSKLQINRQVIVDRGDRSGYSGIFSVEAKSCIIRCFYVELIRGRKEETEVLWTSNSIVVFCGTSGTYGTGSWPDGADINLMPI

SEQ ID NO: 23444 - protein, 469 aa, Artificial Sequence; identical to SEQ ID NO: 23438
  derived and/or modified protein sequence (wt) from neuraminidase__InfluenzaA__AGK63030

SEQ ID NO: 23445 - protein, 469 aa, Artificial Sequence
  derived and/or modified protein sequence (wt) from neuraminidase__InfluenzaA__AGK63032
MNPNQKIITIGSVSLTISTICFFMQIAILITTVTLHFKQYEFNSPPNNQVMLCEPTIIERNITEIVYLTNTTIEKEICPKLAEYRNWSKPQCDITGFAPFSKDNSIRLSAGGDIWVTREPYVSCDPDKCYQFALGQGTTLNNVHSNNTVRDRTPYRTLLMNELGVPFHLGTKQVCMAWSSSSCHDGKAWLHVCITGDDKNATASFIYNGKLVDSVVSWSKEILRTQESECVCINGTCTVVMTDGSASGKADTKILFIEEGKIVHTSTLSGSAQHVEECSCYPRYPGVRCVCRDNWKGSNRPIVDINIKDHSIVSSYVCSGLVGDTPRKNDSSSSSHCLDPNNEEGGHGVKGWAFDDGNDVWMGRTITETSRLGYETFKVIEGWSNPKSKLQINRQVIVDRGNRSGYSGIFSVEGKSCINRCFYVELIRGRKEETEVLWTSNSIVVFCGTSGTYGTGSWPDGADINLMPI

SEQ ID NO: 23446 - protein, 469 aa, Artificial Sequence
  derived and/or modified protein sequence (wt) from neuraminidase__InfluenzaA__AGK63034
MNPNQKIITIGSVSLTISTICFFMQIAILITTVTLHFKQCEFNSPPNNQVMLCEPTIIERNITEIVYLTNTTIEKEICPKLAEYRNWSKPQCDITGFAPFSKDNSIRLSAGGDIWVTREPYVSCDPDKCYQFALGQGTTLNNVHSNNTVRDRTPYRTLLMNELGVPFHLGTKQVCMAWSSSSCHDGKAWLHVCITGDDKNATASFIYNGKLVDSVVSWSKEILRTQESECVCINGTCTVVMTDGSASGKADTKILFIEEGKIVHTSTLSGSAQHVEECSCYPRYPGVRCVCRDNWKGSNRPIVDINIKVHSIVSSYVCSGLVGDTPRKNDSSSSSHCLDPNNEEGGHGVKGWAFDDGNDVWMGRTINETSRLGYETFKVIEGWSNPKSKLQINRQVIVDRGDRSGYSGIFSVEGKSCINRCFYVELIRGRKKETEVLWTSNSIVVFCGTSGTYGTGSWPDGADINLMPI

SEQ ID NO: 23447 - protein, 469 aa, Artificial Sequence
  derived and/or modified protein sequence (wt) from neuraminidase__InfluenzaA__AGK63036
MNPNQKIITIGSVSLTISTICFFMQIAILITTVTLHFKQYEFNSPPNNQVMLCEPTIIERNITEIVYLTNTTIEKEICPKPAEYRNWSKPQCDITGFAPFSKDNSIRLSAGGDIWVTREPYVSCDPDKCYQFALGQGTTLNNVHSNNTVRDRTPYRTLLMNELGVPFHLGTKQVCIAWSSSSCHDGKAWLHVCITGDDKNATASFIYNGRLVDSVVSWSKEILRTQESECVCINGTCTVVMTDGSASGKADTKILFIEEGKIVHTSTLSGSAQHVEECSCYPRYPGVRCVCRDNWKGSNRPIVDINIKDHSIVSSYVCSGLVGDTPRKNDSSSSSHCLDPNNEEGGHGVKGWAFDDGNDVWMGRTINETSRFGYETIKVIEGWSNPKSNLQINRQVIVDRGNRSGYSGIFSVEGKSCINRCFYVELIRGRKEETEVLWTSNSIVVFCGTSGTYGTGSWPDGADINLMPI

SEQ ID NO: 23448 - protein, 469 aa, Artificial Sequence
  derived and/or modified protein sequence (wt) from neuraminidase__InfluenzaA__AGK63038
MNPNQKIITIGSVSLTISTICFFMQIAILITTVTLHFKQYEFNSPPNNQVMLCEPTIIERNITEIVYLTNTTIEKEICPKLAEYRNWSKPQCDITGFAPFSKDNSIRLSAGGDIWVTREPYVSCDPDKCYQFALGQGTTLNNVHSNNTVRDRTPYRTLLMNELGVPFHLGTKQVCMAWSSSSCHDGKAWLHVCITGDDKNATASFIYNGKLVDSVVSWSKEILRTQESECVCINGTCTVVMTDGSASGKADTKILFIEEGKIVHTSTLSGSAQHVEECSCYPRYPGVRCVCRDNWKGSNRPIVDINIKDHSIVSSYVCSGLVGDTPRKNDSSSSSHCLDPNNEEGDHGVKGWAFDDGNDVWMGRTINETSRLGYETFKVIEGWSNPKSKLQINRQVIVDRGNRSGYSGIFSVESKSCINRCFYVELIRGRKEETEVLWTSNSIVVFCGTSGTYGTGSWPDGADINLMPI

SEQ ID NO: 23449 - protein, 469 aa, Artificial Sequence
  derived and/or modified protein sequence (wt) from neuraminidase__InfluenzaA__AGK63040
MNPNQKIITIGSVSLTISTICFFMQIAILITTVTLHFKQCEFNSPPNNQVMLCEPTIIERNITEIVYLTNTTIEKEICPKLAEYRNWSKPQCNITGFAPFSKDNSIRLSAGGDIWVTREPYVSCDPDKCYQFALGQGTTLNNVHSNNTVRDRTPYRTLLMNELGVPFHLGTKQVCMAWSSSSCHDGKAWLHVCITGDDKNATASFIYNGKLVDSVVSWSKEILRTQESECVCINGTCTVVMTDGSASGKADTKILFIEEGKIVHTSTLSGSAQHVEECSCYPRYPGVRCVCRDNWKGSNRPIVDINIKDHSIVSSYVCSGLVGDTPRKNDSSSSSHCLDPNNEEGGHGVKGWAFDDGNDVWMGRTINETSRLGYETFKVIEGWSNPKSKLQINRQVIVDRGDRSGYSGIFSVEGKSCINRCFYVELIRGRKEETEVLWTSNSIVVFCGTSGTYGTGSWPDGADINLMPI

SEQ ID NO: 23450 - protein, 469 aa, Artificial Sequence
  derived and/or modified protein sequence (wt) from neuraminidase__InfluenzaA__AGK63042
MNPNQKIITIGSVSLTISTICFFMQIAILITTVTLHFKQCEFNPPPNNQVMLCEPTIIERNITEIVYLTNTTIEKEICPKLAEYRNWSKPQCDITGFAPFSKDNSIRLSAGGDIWVTREPYVSCDPDKCYQFALGQGTTLNNVHSNNTVRDRTPYRTLLMNELGVPFHLGTKQVCMAWSSSSCHDGKAWLHVCITGDDKNATASFIYNGKLVDSVVSWSKEILRTQESECVCINGTCTVVMTDGSASGKADTKILFIEEGKIVHTSTLSGSAQHVEECSCYPRYPGVRCVCRDNWKGSNRPIVDINIKDHSIVSSYVCSGLVGDTPRKNDSSSSSHCLDPNNEEGGHGVKGWAFDDGNDVWMGRTINETSRLGYETFKVIEGWSNPKSKLQINRQVIVDRGDRSGYSGIFSVEGKSCINRCFYVELIRGRKEETEVLWTSNSIVVFCGTSGTYGTGSWPDGADINLMPI

SEQ ID NO: 23451 - protein, 469 aa, Artificial Sequence
  derived and/or modified protein sequence (wt) from neuraminidase__InfluenzaA__AGK63044
MNPNQKIITIGSVSLTISTICFFMQIAILITTVTLHFKQCEFNSPPNNQVMLCEPTIIERNITEIVYLTNTTIEKEICPKLAEYRNWSKPQCDITGFAPFSKDNSIRLSAGGDIWVTREPYVSCDPDKCYQFALGQGTTLNNVHSNNTVRDRTPYRTLLMNELGVPFHLGTKQVCMAWSSSSCHDGKAWLHVCITGDDKNATASFIYNGKLVDSVVSWSKEILRTQESECVCINGTCTVVMTDGSASGKADTKILFIEEGKIVHTSTLSGSAQHVEECSCYPRYPGVRCVCRDNWKGSNRPIVDINIKDHSIVSSYVCSGLVGDTPRKNDSSSSSHCLDPNNEEGGHGVKGWAFDDGNDVWMGRTINETSRLGYETFKVIEGWSNPKSKLQINRQVIVDRGYRSGYSGIFSVESKSCINRCFYVELLRGRKEETEVLWTSNSIVVFCGTSGTYGTGSWPDGADINLMPI

SEQ ID NO: 23452 - protein, 469 aa, Artificial Sequence
  derived and/or modified protein sequence (wt) from neuraminidase__InfluenzaA__AGK63046
MNPNQKIITIGSVSLTISTICFFMQIAILITTVTLHFKHYEFNSPPNNQVMLCEPTIIERNITEIVYLTNTTIEKEICPKPAEYRNWSKPQCDITGFAPFSKDNSIRLSAGGDIWVTREPYVSCDPDKCYQFALGQGTTLNNVHSNNTVRDRTPYRTLLMNELGVPFHLGTKQVCIAWSSSSCHDGKAWLHVCITGDDKNATASFIYNGRLVDSVVSWSKEILRTQESECVCINGTCTVVMTDGSASGKADTKILFIEEGKIVHTSTLSGSAQHVEECSCYPRYPGVRCVCRDNWKGSNRPIVDINIKDHSIVSSYVCSGLVGDTPRKNDSSSSSHCLDPNNEEGGHGVKGWAFDDGNDVWMGRTINETSRLGYETFKVIEGWSNPKSKLQINRQVIVDRGDRSGYSGIFSVEGKSCINRCFYVDLIRGRKEETEVLWTSNSIVVFCGTSGTYGTGSWPDGADINLMPI

SEQ ID NO: 23453 - protein, 465 aa, Artificial Sequence
  derived and/or modified protein sequence (wt) from neuraminidase__InfluenzaA__AGK82159
MNPNQKILCTSATAIIIGAIAVLIGIANLGLNIGLHLKPGCNCSHSQPETTNTSQTIINNYYNETNITNIQMEERTSRNFNNLTKGLCTINSWHIYGKDNAVRIGESSDVLVTREPYVSCDPDECRFYALSQGTTIRGKHSNETIHDRSQYRALISWPLSSPPTVYNSRVECIGWSSTSCHDGKSRMSICISGPNNNASAVVWYNRRPVAEINTWARNILRTQESECVCHNGVCPVVFTDGSATGPADTRIYYFKEGKILKWESLTGTAKHIEECSCYGERTGITCTCRDNWQGSNRPVIQIDPVAMTHTSQYICSPVLTDNPRPNDPNIGKCNDPYPGNNNNGVKGFSYLDGANTWLGRTISTASRSGYEMLKVPNALTDDRSKPIQGQTIVLNADWSGYSGSFMDYWAEGDCYRACFYVELIRGRPKEDKVWWTSNSIVSMCSSTEFLGQWNWPDGAKIEYFL

SEQ ID NO: 23454 - protein, 465 aa, Artificial Sequence
  derived and/or modified protein sequence (wt) from neuraminidase__InfluenzaA__AGK84858
MNPNQKILCTSATAIIIGAIAVLIGIANLGLNIGLHLKPGCNCSHSQPETTNTSQTIINNYYNETNITNIQMEERTSRNFNNLTKGLCTINSWHIYGKDNAVRIGESSDVLVTREPYVSCDPDECRFYALSQGTTIRGKHSNGTIHDRSQYRALISWPLSSPPTVYNSRVECIGWSSTSCHDGKSRMSICISGPNNNASAVVWYNRRPVAEINTWARNILRTQESECVCHNGVCPVVFTDGSATGPADTRIYYFKEGKILKWESLTGTAKHIEECSCYGERTGITCTCRDNWQGSNRPVIQIDPVAMTHTSQYICSPVLTDNPRPNDPNIGKCNDPYPGNNNNGVKGFSYLDGANTWLGRTISTASRSGYEMLKVPNALTDDRSKPIQGQTIVLNADWSGYSGSFMDYWAEGDCYRACFYVELIRGRPKEDKVWWTSNSIVSMCSSTEFLGQWNWPDGAKIEYFL

SEQ ID NO: 23455 - protein, 465 aa, Artificial Sequence
  derived and/or modified protein sequence (wt) from neuraminidase__InfluenzaA__AGK84861
MNPNQKILCTSATAIIIGAIAVLIGIANLGLNIGLHLKPSCNCSHSQPETTNTSQTIINNYYNETNITNIQMEERTSRNFNNLTKGLCTINSWHIYGKDNAVRIGESSDVLVTREPYVSCDPDECRFYALSQGTTIRGKHSNGTIHDRSQYRALISWPLSSPPTVYNSRVECIGWSSTSCHDGKSRMSICISGPNNNASAVVWYNRRPVAEINTWARNILRTQESECVCHNGVCPVVFTDGSATGPADTRIYYFKEGKILKWESLTGTAKHIEECSCYGERTGITCTCRDNWQGSNRPVVQIDPVAMTHTSQYICSPVLTDNPRPNDPNIGKCNDPYPGINNNGVKGFSYLDGANTWLGRTISTASRSGYEMLKVPNALTDDRSKPIQGQTIVLNADWSGYSGSFMDYWAEGDCYRACFYVELIRGRPKEDKVWWTSNSIVSMCSSTEFLGQWNWPDGAKIEYFL

SEQ ID NO: 23456 - protein, 465 aa, Artificial Sequence; identical to SEQ ID NO: 23454
  derived and/or modified protein sequence (wt) from neuraminidase__InfluenzaA__AGK84864

SEQ ID NO: 23457 - protein, 465 aa, Artificial Sequence
  derived and/or modified protein sequence (wt) from neuraminidase__InfluenzaA__AGL95090
MNPNQKILCTSATAIIIGAIAVLIGIANLGLNIGLHLKPGCNCSHSQPETTNTSQTIINNYYNETNINNIQMEERTSRNFNNLTKGLCTINSWHIYGKDNAVRIGESSDVLVTREPYVSCDPDECRFYALSQGTTIRGKHSNGTIHDRSQYRALISWPLSSPPTVYNSRVECIGWSSTSCHDGKSRMSICISGPNNNASAVVWYNRRPVAEINTWARNILRTQESECVCHNGVCPVVFTDGSATGPADTRIYYFKEGKILKWESLTGTAKHIEECSCYGERTGITCTCKDNWQGSNRPVIQIDPVAMTHTSQYICSPVLTDNPRPNDPNIGKCNDPYPGNNNNGVKGFSYLDGANTWLGRTISTASRSGYEMLKVPNALTDDRSKPIQGQTIVLNADWSGYSGSFMDYWAEGDCYRACFYVELIRGRPKEDKVWWTSNSIVSMCSSTEFLGQWNWPDGAKIEYFL

SEQ ID NO: 23458 - protein, 470 aa, Artificial Sequence; identical to SEQ ID NO: 16632
  derived and/or modified protein sequence (wt) from neuraminidase__InfluenzaA__AGL96802

SEQ ID NO: 23459 - protein, 470 aa, Artificial Sequence; identical to SEQ ID NO: 16632
  derived and/or modified protein sequence (wt) from neuraminidase__InfluenzaA__AGL96807

SEQ ID NO: 23460 - protein, 470 aa, Artificial Sequence
  derived and/or modified protein sequence (wt) from neuraminidase__InfluenzaA__AGL96808
MNPNQKIITIGSISIAIGIISLMLQIGNIISIWASHSIQTGSQNNTGICNQRIITYENSTWVNHTYVNINNTNVVAGEDKTSVTLAGNSSLCSISGWAIYTKDNSIRIGSKGDVFVIREPFISCSHLECRTFFLTQGALLNDKHSNGTVKDRSPYRALMSCPLGEAPSPYNSKFESVAWSASACHDGMGWLTIGISGPDNGAVAVLKYNGIITGTIKSWKKQILRTQESECVCMNGSCFTIMTDGPSNKAASYKIFKIEKGKVTKSIELNAPNFHYEECSCYPDTGIVMCVCRDNWHGSNRPWVSFNQNLDYQIGYICSGVFGDNPRPEDGEGSCNPVTVDGANGVKGFSYKYDNGVWIGRTKSNRLRKGFEMIWDPNGWTNTDSFFSVKQDVVAITDWSGYSGSFVQHPELTGLDCIRPCFWVELVRGLPRENTTIWTSGSSISFCGVNSDTANWSWPDGAELPFTIDK

SEQ ID NO: 23461 - protein, 470 aa, Artificial Sequence
  derived and/or modified protein sequence (wt) from neuraminidase__InfluenzaA__AGL96809
MNPNQKIITIGSISIAIGIISLMLQIGNIISIWASHSIQTGSQNNTGICNQRIITYENSTWVNHTYVNINNTNVVAGEDKTSVTLAGNSSLCSISGWAIYTKDNSIRIGSKGDVFVIREPFISCSHLECRTFFLTQGALLNDKHSNGTVKDRSPYRALMSCPLGEAPSPYNSKFESVAWSASACHDGMGWLTIGISGPDNGAVAVLKYNGIITGTIKSWKKQILRTQESECVCMNGSCFTIMTDGPSNKTASYKIFKIEKGKVTKSIELNAPNFHYEECSCYPDTGIVMCVCRDNWHGSNRPWVSFNQNLDYQIGYICSGVFGDNPRPEDGEGSCNPVTVDGANGVKGFSYKYDNGVWIGRTKSNRLRKGFEMIWDPNGWTNTDSDFSVKQDVVAITDWSGYSGSFVQHPELTGLDCIRPCFWVELVRGLPRENTTIWTSGSSISFCGVNSDTANWSWPDGAELPFTIDK

SEQ ID NO: 23462 - protein, 470 aa, Artificial Sequence; identical to SEQ ID NO: 16632
  derived and/or modified protein sequence (wt) from neuraminidase__InfluenzaA__AGL96818

SEQ ID NO: 23463 - protein, 470 aa, Artificial Sequence
  derived and/or modified protein sequence (wt) from neuraminidase__InfluenzaA__AGL96820
MNPNQKIITTGSISIAIGIISLMLQIGNIISIWASHSIQTGSQNNTGICNQRIITYENSTWVNHTYVNINNTNVVAGEDKTSVTLAGNSSLCSISGWAIYTKDNSIRIGSKGDVFVIREPFISCSHLECRTFFLTQGALLNDKHSNGTVKDRSPYRALMSCPLGEAPSPYNSKFESVAWSASACHDGMGWLTIGISGPDNGAVAVLKYNGIITGTIKSWKKQILRTQESECVCMNGSCFTIMTDGPSNKAASYKIFKIEKGKVTKSIELNAPNFHYEECSCYPDTGIVMCVCRDNWHGSNRPWVSFNQNLDYQIGYICSGVFGDNPRPEDGEGSCNPVTVDGANGVKGFSYKYDNGVWIGRTKSNRLRKGFEMIWDPNGWTNTDSDFSVKQDVVAITDWSGYSGSFVQHPELTGLDCIRPCFWVELVRGLPRENTTIWTSGSSISFCGVNSDTANWSWPDGAELPFTIDK

SEQ ID NO: 23464 - protein, 470 aa, Artificial Sequence
  derived and/or modified protein sequence (wt) from neuraminidase__InfluenzaA__AGL96821
MNPNQKIITIGSISIAIGIISLMLQIGNIISIWASHSIQTGSQNNTGICNQRIITYENSTWVNHTYVNINNTNVVAGEDKTSVTLAGNSSLCSISGWAIYTKDNSIRIGSKGDVFVIREPFISCSHLECRTFFLTQGALLNDKHSNGTVKDRSPYRALMSCPLGEAPSPYNSKFESVAWSASACHDGMGWLTIGISGPDNGAVAVLKYNGIITGTIKSWKKQILRTQESECVCMNGSCFTIMTDGPSNKAASYKIFKIEKGKVTKSIELNAPNFHYEECSCYPDTGIVMCVCRDNWHGSNRPWVSFNQNLDYQIGYICSGVFGDNPRPEDGEGSCNPVSVDGANGVKGFSYKYDNGVWIGRTKSNRLRKGFEMIWDPNGWTNTDSDFSVKQDVVAITDWSGYSGSFVQHPELTGLDCIRPCFWVELVRGLPRENTTIWTSGSSISFCGVNSDTANWSWPDGAELPFTIDK

SEQ ID NO: 23465 - protein, 469 aa, Artificial Sequence
  derived and/or modified protein sequence (wt) from neuraminidase__InfluenzaA__AGN69269
MITNQRIITIGTVCLIVGIVSLLLQIGNIVSLWISHSIQTGEKNHSEICNQNTITYENNTWVNQTYVNISNTNIADGQGVTSIILAGNSSLCPISGWAIYSKDNSIRIGSKGDIFVIREPFISCSHLECRTFFLTQGALLNDRHSNGTVKDRSPYRTLMSCPIGEAPSPYNSRFESVAWSASACHDGMGWITIGISGPDNGAVAVLKYNGIITDTIKSWRNKILRTQESECVCINGSCFTIMTDGPSNGQASYKIFKMEKGKIIKSVELDAPNYHYEECSCYPDTGKVVCVCRDNWHASNRPWVSFDQNLDYQIGYICSGVFGDNPRSNDGKGNCGPALSNGANGVKGFSFRYGNGVWIGRTKSISSRSGFEMIWDPNGWTETDSSFSMKQDIIALTDWSGYSGSFVQHPELTGMNCIRPCFWVELIRGQPKESTIWTSGSSISFCGVDSETASWSWPDGADLPFTIDK

SEQ ID NO: 23466 - protein, 469 aa, Artificial Sequence
  derived and/or modified protein sequence (wt) from neuraminidase__InfluenzaA__AGN69280
MNTNQRIITIGTVCLIVGIVSLLLQIGNIVSLWISHSIQTGEKNHSEICNQNTITYENNTWVNQTYVNISNTNIADGQGVTSIILAGNSSLCPISGWAIYSKDNSIRIGSKGDIFVIREPFISCSHLECRTFFLTQGALLNDRHSNGTVKDRSPYRTLMSCPIGEAPSPYNSRFESVAWSASACHDGMGWLTIGISGPDNGAVAVLKYNGIITDTIKSWRNKILRTQESECVCINGSCFTIMTDGPSNGQASYKIFKMEKGKIIKSVELDAPNYHYEECSCYPDTGKVVCVCRDNWHASNRPWVSFDQNLDYQIGYICSGVFGDNPRSNDGKGNCGPVLSNGANGVKGFSFRYGNGVWIGRTKSISSRSGFEMIWDPNGWTETDSSFSMKQDIIALTDWSGYSGSFVQHPELTGMNCIRPCFWVELIRGQPKESTIWTGGSSISFCGVDSETASWSWPDGADLPFTIDK

SEQ ID NO: 23467 - protein, 469 aa, Artificial Sequence
  derived and/or modified protein sequence (wt) from neuraminidase__InfluenzaA__AGN69292
MNPNQKIITIGSICMTIGIASLILQIGNIISIWISHSIQTENQNQPEICNQNVITYENNTWVNQTYVNISNTNFVAEQAVASVKLAGNSSLCPVSGWAIYSKDNSVRIGSKGDVFVIREPFISCSHLECRTFFLTQGALLNDKHSNGTIKDRSPYRTLMSCPIGEVPSPYNSRFESVAWSASACHDGTSWLTIGISGPDNGAVAVLKYNGIITDTIKSWRKNILRTQESECACVNGSCFTVMTDGPSNGQASYKVFKIEKGKVVKSVELNAPNYHYEECSCYPESGEITCVCRDNWHGSNRPWVSFNQNLEYQMGYICSGIFGDNPRPNDKTGSCGPVFSNGANGVKGFSFKYGNGVWIGRTKSISSRMGFEMIWDPDGWTKTDDKFSVKQDIIGINDWSGYSGSFVQHPELTGLDCMRPCFWVELIRGRPKENTIWTSGSSISFCGVNSDTVGWSWPDGAELPFTIDK

SEQ ID NO: 23468 - protein, 469 aa, Artificial Sequence
  derived and/or modified protein sequence (wt) from neuraminidase__InfluenzaA__AGN69316
MNPNQKIITIGSICMTIGIASLILQIGNIISIWISHSIQTENQNQPEICNQNVITYENNTWVNQTYVNISNTNFVAEQAVASVKLAGNSSLCPVSGWAIYSKDNSVRIGSKGDVFVIREPFISCSHLECRTFFLTQGALLNDKHSNGTIKDRSPYRTLMSCPIGEVPSPYNSRFESVAWSASACHDGTSWLTIGISGPDNGAVAVLKYNGIITDTIKSWRKNILRTQESECACVNGSCFTVMTDGPSNGQASYKVFKIEKGKVVKTVELNAPNYHYEECSCYPESGEITCVCRDNWHGSNRPWVSFNQNLEYQMGYICSGIFGDNPRPNDKTGSCGPVFSNGANGVKGFSFKYGNGVWIGRTKSISSRMGFEMIWDPDGWTKTDDKFSVKQDIIGINDWSGYSGSFVQHPELTGLDCMRPCFWVELIRGRPKENTIWTSGSSISFCGVNSDTVGWSWPDGAELPFTIDK

SEQ ID NO: 23469 - protein, 469 aa, Artificial Sequence; identical to SEQ ID NO: 23468
  derived and/or modified protein sequence (wt) from neuraminidase__InfluenzaA__AGN69328

SEQ ID NO: 23470 - protein, 469 aa, Artificial Sequence
  derived and/or modified protein sequence (wt) from neuraminidase__InfluenzaA__AGN69340
MNPNQKIITIGLICMTIGIASLILQIGNIISIWISHSIQTENQNKPEICNQNVITYENNTWVNQTYVNVSNTNFVAEQAVASVKLVGNSSLCPVSGWAIYSKDNSVRIGSKGDVFVIREPFISCSHLECRTFFLTQGALLNDKHSNGTIKDRSPYRTLMSCPIGEVPSPYNSRFESVAWSASACHDGTSWLTIGISGPDNGAVAVLKYNGIITDTIKSWRKNILRTQESECACVNGSCFTVMTDGPSNGQASYKVFKIERGKVVKSVELNAPNYHYEECSCYPESSEITCVCRDNWHGSNRPWVSFNQNLEYQMGYICSGVFGDNPRPNDKTGSCGPVFSNGANGVKGFSFKYGNGVWIGRTKSTSSRMGFEMIWDPDGWTKTDDKFSVKQDIIGITDWSGYSGSFVQHPELTGLDCMRPCFWVELIRGRPKENTIWTSGSSISFCGVNSDTVGWSWPDGAELPFTIDK

SEQ ID NO: 23471 - protein, 469 aa, Artificial Sequence
  derived and/or modified protein sequence (wt) from neuraminidase__InfluenzaA__AGO00268
MNPNQKIITIGSICMVVGIISLILQIGNIISIWISHSIQTGSQNHTGICNQSIITYKNSTWVNQTYVNISNTNVVAGKDTTSMILAGNSSLCPIRGWAIYSKDNGIRIGSKGDVFVIREPFISCSHLECRTFFLTQGALLNDKHSNGTVKDRSPYRALMSCPVGEAPSPYNSRFESVAWSASACHDGMGWLTIGISGPDDGAVAVLKYNGIITETIKSWKKKILRTQESECVCVNGSCFTIMTDGPSDGPASYKIFKIEKGKVTKSIELDAPNSHYEECSCYPDTGKVMCVCRDNWHGSNRPWVSFDQNLDYQIGYICSGVFGDNPRPKDGKGSCGPVYVDGANGVKGFSYRYGDGVWIGRTKSNSSRQGFEMIWDPNGWTETDSSFFVKQDVVAMTDWSGYSGSFVQHPELTGLNCMRPCFWVELIRGRPKEKTIWTSGSSISFCGVNSDTVDWSWPDGAELPFTIDK

SEQ ID NO: 23472 - protein, 469 aa, Artificial Sequence
  derived and/or modified protein sequence (wt) from neuraminidase__InfluenzaA__AGO00280
MNPNQKIITIGSICMVVGIISLILQIGNIVSIWISHSIQTGNQNHTGTCNQSIITYKNSTWVNQTYVNISNTNVVAGKDTTSVILAGNSSLCPIRGWAIYSKDNGVRIGSKGDVFVIREPFISCSHLECRTFFLTQGALLNDKHSNGTVKDRSPYRALMSCPVGEAPSPYNSRFESVAWSASACHDGMGWLTIGISGPDDGAVAVLKYNGIITETIKSWRKEILRTQESECVCVNGSCFTIMTDGPSGGPASYKIFKIEKGKVTKSIELDAPNSHYEECSCYPDTSKVMCVCRDNWHGSNRPWVSFDQNLDYQMGYICSGVFGDNPRPKDGKGSCGPVYVDGANGVKGFSYRYGNGVWIGRTKSNSSRQGFEMIWDPNGWTETDSNFFMKQDVVAVTDWSGYSGSFVQHPELTGLDCMRPCFWVELIRGRPKENTIWTSGSSISFCGVNSDTVDWSWPDGAELPFTIDK

SEQ ID NO: 23473 - protein, 470 aa, Artificial Sequence
  derived and/or modified protein sequence (wt) from neuraminidase__InfluenzaA__AGO00292
MNPNQKIITIGSICMTIGTISLILQIGNIISIWISHSIQTGSQNHTGICNQRIITYENNTWVNQTYVNISNTNVVAGKDTTSMILAGNSSLCPIRGWAIYSKDNSIRIGSKGDVFVIREPFISCSHLECRTFFLTQGALLNDKHSNGTVKDRSPYRALMSCPIGEAPSPYNSRFESVAWSASACHDGMGWLTIGISGPDDGAVAVLKYNGIITEIIKSWRKQILRTQESECVCVNGSCFTIMTDGPSDGPASYRIFKIEKGKITKSIELDAPNSHYEECSCYPDTGKVMCVCRDNWHGSNRPWVSFNQNLDYQIGYICSGVFGDNPRPKDGKGSCDPVNVDGADGVKGFSYRYGDGVWIGRTKSNSSRKGFEMIWDPNGWTDTDDNFLVKQDVVAMTDWSGYSGSFVQHPELTGLDCIRPCFWVELIRGRPREKTTIWTSGSSISFCGVNSDTVNWSWPDGAELPFTIDM

SEQ ID NO: 23474 - protein, 470 aa, Artificial Sequence
  derived and/or modified protein sequence (wt) from neuraminidase__InfluenzaA__AGO00304
MNPNQKIITIGSICMAIGTISLILQIGNIISIWISHSIQTGSQNHTGICNQRIITYENNTWVNQTYVNISNTNVVAGKDTTSMILAGNTSLCPIRGWAIYSKDNSIRIGSKGDVFVIREPFISCSHLECRTFFLTQGALLNDKHSNGTVKDRSPYRALMSCPIGEAPSPYNSRFESVAWSASACHDGMGWLTIGISGPDDGAVAVLKYNGIITEIIKSWRKQILRTQESECVCVNGSCFTIMTDGPSNGPASYRIFKIEKGKITKSIELDAPNSHYEECSCYPDTGKVMCVCRDNWHGSNRPWVSFNQNLDYQIGYICSGVFGDNPRPKDGKGSCDPVNVDGADGVKGFSYRYGNGVWIGRTKSNSSRKGFEMIWDPNGWTNTDGNFSVKQDVVAMTDWSGYSGSFVQHPELTGLDCMRPCFWVELIRGRPREKTTIWTSGSSISFCGVNSDTVNWSWPDGAELPFTIDK

SEQ ID NO: 23475 - protein, 469 aa, Artificial Sequence; identical to SEQ ID NO: 22544
  derived and/or modified protein sequence (wt) from neuraminidase__InfluenzaA__AGO00316

SEQ ID NO: 23476 - protein, 469 aa, Artificial Sequence; identical to SEQ ID NO: 21988
  derived and/or modified protein sequence (wt) from neuraminidase__InfluenzaA__AGO00328

SEQ ID NO: 23477 - protein, 469 aa, Artificial Sequence; identical to SEQ ID NO: 14095
  derived and/or modified protein sequence (wt) from neuraminidase__InfluenzaA__AGO00340

SEQ ID NO: 23478 - protein, 454 aa, Artificial Sequence; identical to SEQ ID NO: 15719
  derived and/or modified protein sequence (wt) from neuraminidase__InfluenzaA__AGO00352

SEQ ID NO: 23479 - protein, 454 aa, Artificial Sequence; identical to SEQ ID NO: 15719
  derived and/or modified protein sequence (wt) from neuraminidase__InfluenzaA__AGO00376

SEQ ID NO: 23480 - protein, 454 aa, Artificial Sequence; identical to SEQ ID NO: 15719
  derived and/or modified protein sequence (wt) from neuraminidase__InfluenzaA__AGO00388

SEQ ID NO: 23481 - protein, 454 aa, Artificial Sequence; identical to SEQ ID NO: 15719
  derived and/or modified protein sequence (wt) from neuraminidase__InfluenzaA__AGO00400

SEQ ID NO: 23482 - protein, 454 aa, Artificial Sequence; identical to SEQ ID NO: 15719
  derived and/or modified protein sequence (wt) from neuraminidase__InfluenzaA__AGO00412

SEQ ID NO: 23483 - protein, 454 aa, Artificial Sequence; identical to SEQ ID NO: 15719
  derived and/or modified protein sequence (wt) from neuraminidase__InfluenzaA__AGO00424

SEQ ID NO: 23484 - protein, 454 aa, Artificial Sequence
  derived and/or modified protein sequence (wt) from neuraminidase__InfluenzaA__AGO00436
MNPNQKIITIGSICLVVGLISLILQIGNIISIWISHSIQTGSQNHTGICNQNIITYKNSTWVKDTTSVILTGNSSLCPIRGWAIYSKDNSIRIGSKGDVFVIREPFISCSHLECRTFFLTQGALLNDKHSSGTVKDRSPYRALMSCPVGEAPSPYNSRFESVAWSASACHDGMGWLTIGISGPDNGAVAVLKYNGIITETIKSWRKKILRTQESECACVNGSCFTIMTDGPSDGLASYKIFKIEKGKVTKSIELNAPNSNYEECSCYPDTGKVMCVCRDNWHGSNRPWVSFDQNLDYQIGYICSGVFGDNPRPEDGTGSCGPVYVDGANGVKGFSYRYGNGVWIGRTKSHSSRHGFEMIWDPNGWTETDSKFSVRQDVVAMTDWSGYSGSFVQHPELTGLDCMRPCFWVELIRGRPKEKTIWTSASSISFCGVNSDTVDWSWPDGAELPFSIDK

SEQ ID NO: 23485 - protein, 454 aa, Artificial Sequence
  derived and/or modified protein sequence (wt) from neuraminidase__InfluenzaA__AGO00448
MNPNQKIITIGSICLVVGLISLILQIGNIISIWISHSIQTGSQNHTGICNQNIITYKNSTWVKDTTSVILTGNSSLCPIRGWAIYSKDNSIRIGSKGDVFVIREPFISCSHLECRTFFLTQGALLNDKHSSGTVKDRSPYRALMSCPVGEAPSPYNSRFESVAWSASACHDGMGWLTIGISGPDNGAVAVLKYNGIITETIKSWRKKILRTQESECACVNGSCFTIMTDGPSDGLASYRIFKIEKGKVTKSIELNAPNSHYEECSCYPDTGKVMCVCRDNWHGSNRPWVSFDQNLDYQIGYICSGVFGDNPRPEDGTGSCGPVYVDGANGVKGFSYRYGNGVWIGRTKSHSSRHGFEMIWDPNGWTETDSKFSVRQDVVAMTDWSGYSGSFVQHPELTGLDCMRPCFWVELIRGRPKEKTIWTSASSISFCGVNSDTVDWSWPDGAELPFSIDK

SEQ ID NO: 23486 - protein, 469 aa, Artificial Sequence
  derived and/or modified protein sequence (wt) from neuraminidase__InfluenzaA__AGQ47722
MNTNQRIITIGTICLIVGIISLLLQIGNIISLWISHSIQTGEKSHPEICNQSVITYENNTWVNQTYVNISNTNIAAGQGVTPIILAGNSSLCPISGWAIYSKDNSIRIGSKGDIFVMREPFISCSHLECRTFFLTQGALLNDRHSNGTVKDRSPYRTLMSCPIGEAPSPYNSRFESVAWSASACHDGMGWLTIGISGPDNGAVAVLKYNGIITDTIKSWRNKILRTQESECVCINGSCFTIMTDGPSNGQASYKIFKMEKGKIIKSIELDAPNYHYEECSCYPDTGKVMCVCRDNWHASNRPWVSFDQNLDYQIGYICSGVFGDNPRSNDGKGNCGPVLSNGANGVKGFSFRYGNGVWIGRTKSISSRSGFEMVWDPNGWTETDSSFSMKQDIIALTDWSGYSGSFVQHPELTGMNCIRPCFWVELIRGQPKESTIWTSGSSISFCGVNSGTASWSWPDGADLPFTIDK

SEQ ID NO: 23487 - protein, 470 aa, Artificial Sequence; identical to SEQ ID NO: 16453
  derived and/or modified protein sequence (wt) from neuraminidase__InfluenzaA__AGQ47731

SEQ ID NO: 23488 - protein, 458 aa, Artificial Sequence
  derived and/or modified protein sequence (wt) from neuraminidase__InfluenzaA__AGQ47743
MNPNQKIITIGSICMVVGIISLILQIGNIISIWISHSIQTGNQNHKNSTWMNQTYINISNTNVVAGQDSTSVILTGNSSLCPIRGWAINSKDNGIRIGSKGDVFVIREPFISCSHLECRTFFLTQGALLNDKHSNGTVKDRSPYRALMSCPVGEAPSPYNSRFESVAWSASACHDGMGWLTIGISGPDNGAVAVLKYNGIITETIKSWRKKILRTQESECTCVNGSCFTIMTDGPSNGLASYKIFKIEKGKVTKSIELNAPNSHYEECSCYPDTGKVMCVCRDNWHGSNRPWVSFDQNLDYQIGYICSGVFGDNPRPKDGTGSCGPVSADGANGVKGFSYRYGNGVWIGRTKSNSSRHGFEMIWDPNGWTETDSRFSVRQDVVAMTDRSGYSGSFVQHPELTGLDCMRPCFWVELIRGRPEEETIWTSGSIISFCGVNSDTVDWSWPDGAELPFTIDK

SEQ ID NO: 23489 - protein, 470 aa, Artificial Sequence
  derived and/or modified protein sequence (wt) from neuraminidase__InfluenzaA__AGQ47755
MNPNQKIITIGSICMAIGTISLILQIGNIISIWISHSIQTGSQNHTGICNRRIVTYENNTWVNQTYVNISNTNVVAEKDTTSMILAGNSSLCPIRGWAIYSKDNSIRIGSKGDVFVIREPFISCSHLECRTFFLTQGALLNDKHSNGTVKDRSPYRALMSCPIGEAPSPYNSRFESVAWSASACHDGMGWLTIGISGPDDGAVAVLKYNGIITEIIKSWRKQILRTQESECVCVNGSCFTIMTDGPSNGPASYRIFKIKKGKITKSIELDAPNSHYEECSCYPDTGKVMCVCRDNWHGSNRPWVSFNQNLDYQIGYICSGVFGDNPRPKDGKGSCDPVNVDGADGVKGFSYRYGNGVWIGRTKSTSSRKGFEMIWDPNGWTDTDGNFLVKQDVVAMTDWSGYSGSFVQHPELTGLDCMRPCFWVELIRGRPREKTTIWTSGSSISFCGVNSDTVNWSWPDGAELPFTIDK

SEQ ID NO: 23490 - protein, 469 aa, Artificial Sequence
  derived and/or modified protein sequence (wt) from neuraminidase__InfluenzaA__AGQ47767
MNPNQKIITIGSICMVVGIISLILQIGNIVSIWISHSIQTGNQNHTGTCDQSIITYKNSTWVNQTYVNISNTNVVAGKDTTSVILAGNSSLCPIRGWAIYSKDNGVRIGSKGDVFVIREPFISCSHLECRTFFLTQGALLNDKHSNGTVKDRSPYRALMSCPVGEAPSPYNSRFESVAWSASACHDGMGWLTIGISGPDDGAVAVLKYNGIITETIKSWRKEILRTQESECVCVNGSCFTIMTDGPSGGPASYKIFKIEKGKVTKSIELDAPNSHYEECSCYPDTSKVMCVCRDNWHGSNRPWVSFDQNLDYQMGYICSGVFGDNPRPKDGKGSCGPVYVDGANGVKGFSYKYGNGVWIGRTKSNSSRQGFEMIWDPNGWTETDSNFFTKQDVVAVTDWSGYSGSFVQHPELTGLDCMRPCFWVELIRGRPKENTIWTSGSSISFCGVNSDTVDWSWPDGAELPFTIDK

SEQ ID NO: 23491 - protein, 469 aa, Artificial Sequence; identical to SEQ ID NO: 23472
  derived and/or modified protein sequence (wt) from neuraminidase__InfluenzaA__AGQ47779

SEQ ID NO: 23492 - protein, 470 aa, Artificial Sequence
  derived and/or modified protein sequence (wt) from neuraminidase__InfluenzaA__AGQ47791
MNPNQKIITIGSICMAIGIISLILQIGNIISIWVSHSIQTGSQNHTGICNQRIITYENNTWVNQTHVNISNTNVVAGKDTTSMILAGNSSLCPIRGWAIYSKDNSIRIGSKGDVFVIREPFISCSHLECRTFFLTQGALLNDKHSNGTVKDRSPYRALMSCPIGEAPSPYNSRFESVAWSASACHDGMGWLTIGISGPDDGAVAVLKYNGIITETIKSWKKQILRTQESECVCVNGSCFTIMTDGPSDGPASYRIFKIEKGKITKSIELDAPNSHYEECSCYPDTGTVMCVCRDNWHGSNRPWVSFNQNLDYQIGYICSGVFGDNPRPKDGKGSCDPVNVDGADGVKGFSYRYGNGVWIGRTKSNSSRKGFEMIWDPNGWTDTDGNFLVKQDVVAMTDWSGYSGSFVQHPELTGLDCMRPCFWVELIRGRPREKTTIWTSGSSISFCGVNSDTVNWSWPDGAELPFTIDK

SEQ ID NO: 23493 - protein, 469 aa, Artificial Sequence
  derived and/or modified protein sequence (wt) from neuraminidase__InfluenzaA__AGQ47803
MNPNQKIITIGSICMVVGIISLILQIGNIISIWISHSIQTGSQNHTGICNQSIITYKNSTWVNQTYVNISNTNVVAGKGTTSVILAGNSSLCPIRGWAIYSKDNGIRIGSKGDVFVIREPFISCSHLECRTFFLTQGALLNDKHSNGTVKDRSPYRALMSCPVGEAPSPYNSRFESVAWSACACHDGMGWLTIGISGPDDEAVAVLKYNGIITETIKSWRKKILRTQESECVCVNGSCFTIMTDGPSDGPASYKIFKIEKGKVTKSIELDAPNSHYEECSCYPDTGKVMCVCRDNWHGSNRPWVSFDQNLDYQIGYICSGVFGDNPRPKDGKGSCGPVYVDGANGVKGFSYRYGNGVWIGRTKSDSSRQGFEMIWDPNGWTETDSNFFVKQDIVAMTDWSGYSGSFVQHPELTGLDCMRPCFWVELIRGRPKEKTIWTSGSSISFCGVNSDTVDWSWPDGAELPFTIDK

SEQ ID NO: 23494 - protein, 455 aa, Artificial Sequence
  derived and/or modified protein sequence (wt) from neuraminidase__InfluenzaA__AGQ47814
MNPNQKIITIGSICMAIGIISLILQIGNIISIWVSHSIQTGSQNHTGICNQRIITYENNTWVKDTTSMTLAGNSSLCPIRGWAIYSKDNSIRIGSKGDVFVIREPFISCSHLECRTFFLTQGALLNDKHSNGTVKDRSPYRALMSCPIGEAPSPYNSRFESVAWSASACHDGMGWLTIGISGPDDGAVAVLKYNGIITETIKSWKKQILRTQESECVCVNGSCFTIMTDGPSDGPASYRIFKIEKGKITKSIELDAPNSHYEECSCYPDTGTVMCVCRDNWHGSNRPWVSFNQNLDYQIGYICSGVFGDNPRPKDGKGSCDPVNVDGADGVKGFSYRYGNGVWIGRTKSNSSRKGFEMIWDPNGWTDTDGNFLVKQDVVAMTDWSGYSGSFVQHPELTGLDCMRPCFWVELIRGRPREKTTIWTSGSSISFCGVNSDTVNWSWPDGAELPFTIDK

SEQ ID NO: 23495 - protein, 470 aa, Artificial Sequence; identical to SEQ ID NO: 16457
  derived and/or modified protein sequence (wt) from neuraminidase__InfluenzaA__AGQ47826

SEQ ID NO: 23496 - protein, 469 aa, Artificial Sequence
  derived and/or modified protein sequence (wt) from neuraminidase__InfluenzaA__AGQ47838
MNPNQKIITIGSVSLTIATICFLMQIAILVTTVTLHFKQYECDSPANNQVMPCEPIIIERNITEIVYLTNTTIEKEICPKLVGYRNWSKPQCKITGFAPFSKDNSIRLSAGGDIWVTREPYVSCDPGKCYQFALGQGTTLDNKHSNDTIHDRTPHRTLLMNELGVPFHLGTKQVCIAWSSSSCHDGKAWLHVCVTGYDKNATASFIYDGRLVDSIGSWSQNILRTQESECVCINGTCTVVMTDGSASGRADTKILFIEEGKIVHISPLSGSAQHVEECSCYPRYPGVRCICRDNWKGSNRPVVDINVKDYSIDSSYVCSGLVGDTPRNNDRSSSSYCRNPNNEKGNHGVKGWAFDDGNDVWMGRTISEDSRSGYETFKVIGGWSTPNSKLQINRQVIVDSDNRSGYSGIFSVEGKSCINRCFYVELIRGREQETRVWWTSNSIVVFCGTSGTYGTGSWPDGADINLMPI

SEQ ID NO: 23497 - protein, 453 aa, Artificial Sequence
  derived and/or modified protein sequence (wt) from neuraminidase__InfluenzaA__AGQ47850
MNPNQKIITIGSICMVVGIISLILQIGNIISIWISHSIQAGSSTWVNQTYVNISNTNVVAGPDATSVILTGNSSLCPIRGWAIYSKDNGIRIGSKGDIFVIREPFISCSHLECRAFFLTQGALLNDKHSNGTVKDRSPYRALMSCPVGEAPSPYNSRFESVAWSASACHDGMGWLTIGISGPDNGAVAVLKYNGIITETIKSWRKKILRTQESECACVNGSCFTIMTDGPSDGPASYKIFKIEKGKVTKSIELDAPNSHYEECSCYPDTGKVMCVCRDNWHGSNRPWVSFDQNLDYQIGYICSGVFGDSPRPKDGTGSCGPVSVDGANGVKGFSYRYGNGVWIGRTKSKSSRHGFEMIWDPNGWTETDSRFSVRQDVVAMTDWSGYSGSFVQHPELTGLDCMRPCFWVELIRGQPKEKTIWTSGSSISFCGVNSDTVDWSWPDGAELPFTIDK

SEQ ID NO: 23498 - protein, 469 aa, Artificial Sequence
  derived and/or modified protein sequence (wt) from neuraminidase__InfluenzaA__AGQ47873
MNTNQRTITIGTICLIVGIISLLLQIGNIILLWMSHSIQTGEKSHPKVCNQSVITYENNTWVNQTYVNISNTNIAAGQGVTPIILAGNSSLCPISGWAIYSKDNSIRIGSKGDIFVMREPFISCSHLECRTFFLTQGALLNDRHSNGTVKDRSPYRTLMSCPIGEAPSPYNSRFESVAWSASACHDGMGWLTIGISGPDNGAVAVLKYNGIITDTIKSWRNKILRTQESECVCINGSCFTIMTDGPSNGQASYKLFKMEKGKIIKSIELDAPNYHYEECSCYPDTGKVVCVCRDNWHASNRPWVSFDQNLDYQIGYICSGVFGDNPRSNDGKGNCGPVLSNGANGVKGFSFRYGNGVWIGRTKSISSRSGFEMIWDPNGWTETDSSFSMKQDIIALTDWSGYSGSFVQHPELTGMNCIRPCFWVELIRGQPKESTIWTSGSSISFCGVNSGTASWSWPDGADLPFTIDK

SEQ ID NO: 23499 - protein, 469 aa, Artificial Sequence; identical to SEQ ID NO: 17214
  derived and/or modified protein sequence (wt) from neuraminidase__InfluenzaA__AGQ47885

SEQ ID NO: 23500 - protein, 469 aa, Artificial Sequence; identical to SEQ ID NO: 21980
  derived and/or modified protein sequence (wt) from neuraminidase__InfluenzaA__AGQ47897

SEQ ID NO: 23501 - protein, 469 aa, Artificial Sequence; identical to SEQ ID NO: 14095
  derived and/or modified protein sequence (wt) from neuraminidase__InfluenzaA__AGQ47909

SEQ ID NO: 23502 - protein, 469 aa, Artificial Sequence
  derived and/or modified protein sequence (wt) from neuraminidase__InfluenzaA__AGQ47921
MNPNQKIITIGSVSLTIATVCFLMQTAILVTTVTLHFKQYECDSPASNQVMPCEPIIIERNITEIVYLNNTTIEKEICPKVVEYRNWSKPQCQITGFAPFSKDNSIRLSAGGDIWVTREPYVSCDHGKCYQFALGQGTTLDNKHSNDTIHDRIPHRTLLMNELGVPFHLGTRQVCIAWSSSSCHDGKAWLHVCITGDDKNATASFIYDGRLVDSIGSWSQNILRTQESECVCINGTCTVVMTDGSASGRADTRILFIEEGKIVHISPLSGSAQHVEECSCYPRYPGVRCICRDNWKGSNRPVVDINMEDYSIDSSYVCSGLVGDTPRNDDRSSNSNCRNPNNERGNQGVKGWAFDNGDDVWMGRTISKDLRSGYETFKVIGGWSTPNSKSQINRQVIVDSDNRSGYSGIFSVEGKSCINRCFYVELIRGRKQEARVWWTSNSIVVFCGTSGTYGTGSWPDGANINFMPI

SEQ ID NO: 23503 - protein, 454 aa, Artificial Sequence
  derived and/or modified protein sequence (wt) from neuraminidase__InfluenzaA__AGQ47933
MNPNQKIITIGSICMVVGLISLILQIGNIISIWISHSIQTGSQNHTGICNQNIITYKNSTWVKDTTSVILTGNSSLCPIRGWAIYSKDNSIRIGSKGDVFVIREPFISCSHLECRTFFLTQGALLNDRHSNGTVKDRSPYRALMSCPVGEAPSPYNSRFESVAWSASACHDGMGWLTIGISGPDNGAVAVLKYNGIITETIKSWRKKILRTQESECACVNGSCFTIMTDGPSDGLASYKIFKIEKGKVTKSIELNAPNSHYEECSCYPDTGKVMCVCRDNWHGSNRPWVSFDQNLDYQIGYICSGVFGDNPRPKDGTGSCGPVYVDGANGVKGFSYRYGNGVWIGRTKSHSSRHGFEMIWDPNGWTETDSKFSVRQDVVAMTDWSGYSGSFVQHPELTGLDCIRPCFWVELIRGRPKEKTIWTSASSISFCGVNSDTVNWSWPDGAELPFTIDK

SEQ ID NO: 23504 - protein, 454 aa, Artificial Sequence; identical to SEQ ID NO: 15719
  derived and/or modified protein sequence (wt) from neuraminidase__InfluenzaA__AGQ47945

SEQ ID NO: 23505 - protein, 454 aa, Artificial Sequence; identical to SEQ ID NO: 15719
  derived and/or modified protein sequence (wt) from neuraminidase__InfluenzaA__AGQ47957

SEQ ID NO: 23506 - protein, 454 aa, Artificial Sequence; identical to SEQ ID NO: 15719
  derived and/or modified protein sequence (wt) from neuraminidase__InfluenzaA__AGQ47969

SEQ ID NO: 23507 - protein, 454 aa, Artificial Sequence; identical to SEQ ID NO: 15719
  derived and/or modified protein sequence (wt) from neuraminidase__InfluenzaA__AGQ47981

SEQ ID NO: 23508 - protein, 454 aa, Artificial Sequence
  derived and/or modified protein sequence (wt) from neuraminidase__InfluenzaA__AGQ48005
MNPNQKIITIGSICLVVGLISLILQIGNIISIWISHSIQTGSQNHTGICNQNIITYKNSTWVKDTTSVILTGNSSLCPIRGWAIYSKDNSIRIGSKGDVFVIREPFISCSHLECRTFFLTQGALLNDKHSSGTVKDRSPYRALMSCPVGEAPSPYNSRFESVAWSASACHDGMGWLTIGISGPDNGAVAVLKYNGIITETIKSWRKKILRTQESECACVNGSCFTIMTDGPSDGLASYKIFKIEKGKVTKSIELNAPNSHYEECSCYPDTGKVMCVCRDNWHGSNRPWVSFDQNLDYQIGYICSGVFGDNPRPEDGTGSCGPVYVDGANGVKGFSYRYSNGVWIGRTKSHSSRHGFEMIWDPNGWTETDSKFSVRQDVVAMTDWSGYSGSFVQHPELTGLDCMRPCFWVELIRGRPKEKTIWTSASSISFCGVNSDTVDWSWPDGAELPFSIDK

SEQ ID NO: 23509 - protein, 454 aa, Artificial Sequence; identical to SEQ ID NO: 23508
  derived and/or modified protein sequence (wt) from neuraminidase__InfluenzaA__AGQ48017

SEQ ID NO: 23510 - protein, 454 aa, Artificial Sequence; identical to SEQ ID NO: 15719
  derived and/or modified protein sequence (wt) from neuraminidase__InfluenzaA__AGQ48029

SEQ ID NO: 23511 - protein, 454 aa, Artificial Sequence
  derived and/or modified protein sequence (wt) from neuraminidase__InfluenzaA__AGQ48041
MNPNQKIITIGSICLVVGLISLILQIGNIISIWISHSIQTGSQNHTGICNQNIITYKNSTWIKDTTSVILTGNSSLCPIRGWAIYSKDNSIRIGSKGDVFVIREPFISCSHLECRTFFLTQGALLNDKHSSGTVKDRSPYRALMSCPVGEAPSPYNSRFESVAWSASACHDGMGWLTIGISGPDNGAVAVLKYNGIITETIKSWRKKILRTQESECACVNGSCFTIMTDGPSDGLASYKIFKIEKGKVTKSIELNAPNSHYEECSCYPDTGKVMCVCRDNWHGSNRPWVSFDQNLDYQIGYICSGVFGDNPRPEDGTGSCGPVYVDGANGVKGFSYRYGNGVWIGRTKSHSSRHGFEMIWDPNGWTETDSKFSVRQDVVAMTDWSGYSGSFVQHPELTGLDCMRPCFWVELIRGRPKEKTIWTSASSISFCGVNSDTVDWSWPDGAELPFSIDK

SEQ ID NO: 23512 - protein, 454 aa, Artificial Sequence
  derived and/or modified protein sequence (wt) from neuraminidase__InfluenzaA__AGQ48053
MNPNQKIITIGSICLVVGLISLILQIGNIISIWISHSIQTGSQNHTGICNQNIITYKNSTWIKDTTSVILTGNSSLCPIRGWAIYSKDNSIRIGSKGDVFVIREPFISCSHLECRTFFLTQGALLNDKHSSGTVKDRSPYRALMSCPVGEAPSPYNSRFESVAWSASACHDGMGWLTIGISGPDNGAVAVLKYNGIITETIKSWRKKILRTQESECACVNGSCFTIMTDGPSDGLASYKIFKIEKGKVTKSIELNAPNSHYEECSCYPDTGKVMCVCRDNWHGSNRPWVSFDQNLDYQIGYICSGVFGDNPRPEDGTGSCGPVYVDGANGVKGFSYRYGNGVWIGRTKSHSSRHGFEMIWDPNGWTETDSKFSVRQDVVAMADWSGYSGSFVQHPELTGLDCMRPCFWVELIRGRPKEKTIWTSASSISFCGVNSDTVDWSWPDGAELPFSIDK

SEQ ID NO: 23513 - protein, 469 aa, Artificial Sequence
  derived and/or modified protein sequence (wt) from neuraminidase__InfluenzaA__AGQ81707
MNPNQKIITIGSICMVIGIASLMLQIGNMISIWVSHSIQTGNQYQPEPCNQSIITYENNTWVNQTYVNISNTNFLTEQAVTSVALAGNSSLCPISGWAIYSKDNGIRIGSKGDVFVIREPFISCSHLECRTFFLTQGALLNDKHSNGTVKDRSPYRTLMSCPVGEAPSPYNSRFESVAWSASACHDGISWLTIGISGPDNGAVAVLKYNGIITDTIKSWRNNILRTQESECACVNGSCFTVMTDGPSNGQASYKIFKIEKGKVVKSVELNAPNYHYEECSCYPDAGKIMCVCRDNWHGSNRPWVSFNQNLEYQIGYICSGVFGDNPRPNDGTGSCGPVSSNGAYGVKGFSFKYGNGVWIGRTKSTSSRSGFEMIWDPNGWTETDSSFSVKQDIVAITDWSGYSGSFVQHPELTGLDCMRPCFWVELIRGRPKENTIWTSGSSISFCGVDSDTVGWSWPDGAELPFTIDK

SEQ ID NO: 23514 - protein, 469 aa, Artificial Sequence
  derived and/or modified protein sequence (wt) from neuraminidase__InfluenzaA__AGQ81715
MNPNQKIIAIGSVSLTIATICLLMQIAILVTTMTLHFKHNECTNSSNNQAVPCGPIIIERNVTEIVHLNSTTLEKEICPKAAGYRDWSKPQCQITGFAPFSKDNSIRLSASGDIWVTREPYVSCGLGKCYQFALGQGTTLDNRHSNGTSHDRTPYRTLLMNELGVPFHLATKQVCIAWSSSSCHDGKAWLHVCVTGDDRNATASIIYDGILVDSIGSWSKNILRTQESECVCINGTCTVVMTDGSASGKADTRILFIREGKIVHISPLSGSAQHVEECSCYPQYPEVRCVCRDNWRGSNRPVLYINMADYSIDSGYVCSGLVGDTPRNDDISSSSNCKDPNNERGAPGVKGWAFDSGNDIWMGRTIEKDSRSGYETFRVIGGWNTANSKSQTSRQVIVDSGNSSGYSGIFSIEGKSCINRCFYVELIRGRPKETRVWWTSNSIIVFCGTSGTYGTGSWPDGANINFMAI

SEQ ID NO: 23515 - protein, 469 aa, Artificial Sequence
  derived and/or modified protein sequence (wt) from neuraminidase__InfluenzaA__AGQ81717
MNPNQKIIAIGSVSLTIATICLLMQIAILVTTMTPHFKHDECTNSSNNQAVPCGPIIIERNVTEIVHINSTILEKEICPKAAGYRNWSKPQCQIIGFAPFSKDNSIRLSASGDIWVTREPYVSCGLGKCYQFALGQGTTLDNRHSNGTSHDRTPHRTLLMNELGVPFHLATKQVCIAWSSSSCHDGKAWLHVCVTGDDRNATASIIYDGMLVDSIGSWSKNILRTQESECVCINGTCTVVMTDGSASGKADTRILFIREGKIVHISPLSGSAQHVEECSCYPQYPEVRCVCRDNWRGSNRPVLYINMADYSIDSGYVCSGLVGDTPRNDDISSSSNCKDPNNERGAPGVKGWAFDSGNDIWMGRTIEKDSRSGYETFRVIGGWNTANSKSQTSRQVIVDSDNSSGYSGIFSVEGKSCINRCFYVELIRGRPKETRVWWTSNSIIVFCGTSGTYGTGSWPDGANINFMAI

SEQ ID NO: 23516 - protein, 469 aa, Artificial Sequence
  derived and/or modified protein sequence (wt) from neuraminidase__InfluenzaA__AGQ81718
MNPNQKIIAIGSVSLTIATICLLMQIAILVTTMTLHFKHNECTNSSNNQAVPCGPIIIERNLTEIVHLNSTILEKEICPKAAGYRNWSKPQCQITGFAPFSKDNSIRLSASGDIWVTREPYVSCGLGKCYQFALGQGTTLDNRHSNGTSHDRTPHRTLLMNELGVPFHLSTKQVCIAWSSSSCHDGKAWLHVCVTGDDRNATASIIYDGILVDSIVSWSKNILRTQESECVCINGTCTVVMTDGSASGKADTRILFIREGKIVHISPLSGSAQHVEECSCYPRYPEVRCVCRDNWRGSNRPVLYINMADYSIDSGYVCSGLVGDTPRNDDTSSSSNCRDPNNERGAPGVKGWAFDSGNDIWMGRTIEKDSRSGYETFRVIGGWNTANSKSQTSRQVIVDSDNSSGYSGVFSVEGKSCINRCFYVELIRGRPKETRVWWTSNSIIVFCGTSGTYGTGSWPDGANINFMAI

SEQ ID NO: 23517 - protein, 469 aa, Artificial Sequence
  derived and/or modified protein sequence (wt) from neuraminidase__InfluenzaA__AGQ81719
MNPNQKIIAIGSVSLTIATICLLMQIAILVTTMTLHFKHNECTNSSNNQAVPCGPIIIERNVTEIVHLNSTTLEKEICTKAAGYRDWSKPQCQITGFAPFSKDNSIRLSASGDIWVTREPYVSCGLGKCYQFALGQGTTLDNRHSNGTTHDRTPHRTLLMNELGVPFHLATKQVCIAWSSSSCHDGKAWLHVCVTGDDRNATASIIYDGILVDSIGSWSKNILRTQESECVCINGTCTVVMTDGSASGKADTRILFIREGKIVHISPLSGSAQHVEECSCYPQYPEVRCVCRDNWRGSNRPVLYINMADYSIDSGYVCSGLVGDTPRNDDISSNSNCKDPNNESGAPGVKGWAFDSGNDIWMGRTIEKDSRSGYETFRVIGGWNTANSKSQTSRQVIVDSDNSSGYSGIFSIEGKSCINRCFYVELIRGRPKETRVWWTSNSIIVFCGTSGTYGTGSWPDGANINFMAI

SEQ ID NO: 23518 - protein, 469 aa, Artificial Sequence
  derived and/or modified protein sequence (wt) from neuraminidase__InfluenzaA__AGQ81722
MNPNQKIIAIGSVSLTIATICLLMQIAILVTTMTPHFKHDECTNSSNNQAVPCGPIIIERNVTEIVHINSTILEKGICPKAAGYRNWSKPQCQIIGFAPFSKDNSIRLSASGDIWVTREPYVSCGLGKCYQFALGQGTTLDNRHSNGTSHDRTPHRTLLMNELGVPFHLATKQVCIAWSSSSCHDGKAWLHVCVTGDDRNATASIIYDGMLVDSIGSWSKNILRTQESECVCINGTCTVVMTDGSASGKADTRILFIREGKIVHISPLSGSAQHVEECSCYPQYPEVRCVCRDNWRGSNRPVLYINMADYSIDSGYVCSGLVGDTPRNDDTSSSSNCKDPNNERGAPGVKGWAFDSGNDIWMGRTIEKDSRSGYETFRVIGGWNTANSKSQTSRQVIVDSDNSSGYSGIFSVEGKSCINRCFYVELIRGRPKETRVWWTSNSIIVFCGTSGTYGTGSWPDGANINFMAI

SEQ ID NO: 23519 - protein, 469 aa, Artificial Sequence
  derived and/or modified protein sequence (wt) from neuraminidase__InfluenzaA__AGQ81724
MNPNQKIIAIGSVSLTIATICLLMQIAILVTTMTLHFKHNECSNSSNNQAVPCGPIIIERNVTEIVHLNSTTLEKEICPKAAGYRDWSKPQCQITGFAPFSKDNSIRLSASGDIWVTREPYVSCGLGKCYQFALGQGTTLDNRHSNGTSHDRTPHRTLLMNELGVPFHLATKQVCIAWSSSSCHDGKAWLHVCVTGDDRNATASIIYDGILVDSIGSWSKNILRTQESECVCINGTCTVVMTDGSASGKADTRILFIREGKIVHISPLSGSAQHVEECSCYPQYPEVRCVCRDNWRGSNRPVLYINMEDYSIDSGYVCSGLVGDTPRNDDISSSSNCKDPNNERGAPGVKGWAFDSGNDLWMGRTIEKDSRSGYETFRVIGGWNTANSKSQTSRQVIVDSDNSSGYSGIFSVEGKSCINRCFYVELIRGRPKETRVWWTSNSIIVFCGTSGTYGTGSWPDGANINFMAI

SEQ ID NO: 23520 - protein, 469 aa, Artificial Sequence
  derived and/or modified protein sequence (wt) from neuraminidase__InfluenzaA__AGQ81726
MNPNQKIIAIGSVSLTIATICLLMQIAILVTTMTLHFKHNECSNSSNNQAVPCGPIIIERNITEIVHLNSTTLEKEICPKAAGYRDWSKPQCQITGFAPFSKDNSIRLSASGDIWVTREPYVSCGLGKCYQFALGQGTTLDNRHSNGTSHDRTPHRTLLMNELGVPFHLATKQVCIAWSSSSCHDGKAWLHVCVTGDDRNATASIIYDGILVDSIGSWSKNILRTQESECVCIKRTCTVVMTDGSASGKADTRILFIREGKIVHISPLSGSAQHVEECSCYPQYPEVRCVCRDNWRGSNRPVLYINMADYSIDSGYVCSGLVGDTPRNDDISSSSNCKDPNNERGAPGVKGWAFDSGNDLWMGRTIEKESRSGYETFRVIGGWNTANSKSQTSRQVIVDSDNSSGYSGIFSVEGKSCINRCFYVELIRGRPKETRVWWTSNSIIVFCGTSGTYGTGSWPDGANINFMAI

SEQ ID NO: 23521 - protein, 469 aa, Artificial Sequence
  derived and/or modified protein sequence (wt) from neuraminidase__InfluenzaA__AGQ81727
MNPNQKIIAIGSVSLTIATICLLMQVAILVTTMTLHFKHNECSNSSNNQAVPCGPIIIERNITEIVHLNSTTLEKEICPKAAGYRDWSKPQCQITGFAPFSKDNSIRLSASGDIWVTREPYVSCGLGKCYQFALGQGTTLDNRHSNGTSHDRTPHRTLLMNELGVPFHLATKQVCIAWSSSSCHDGRAWLHVCVTGDDRNATASIIYDGILVDSIGSWSKNILRTQESECVCINGTCTVVMTDGSASGKADTRILFIREGKIVHISPLSGSAQHVEECSCYPQYPEVRCVCRDNWRGSNRPVLYINMADYSIDSGYVCSGLVGDTPRNDDISSSSNCKDPNNERGAPGVKGWAFDSGNDLWMGRTIEKESRSGYETFRVIGGWNTANSKSQTSRQVIVDSDNSSGYSGIFSVEGKSCINRCFYVELIRGRPKETRVWWTSNSIIVFCGTSGTYGTGSWPDGANINFMPI

SEQ ID NO: 23522 - protein, 469 aa, Artificial Sequence
  derived and/or modified protein sequence (wt) from neuraminidase__InfluenzaA__AGQ81728
MNPNQKIVAIGSVSLTIATMCLLMQIALFATTMTLHFKQTGSTNSSDNQAVPCGPIIIERNITEIVHLNSTTLEKETCPKSAGYRNWSKPQCQITGFAPFSKDNSIRLSAGGDIWVTREPYVSCGLGKCYQFALGQGTTLDNKHSNGTTYDRTPHRTLLMNELGVPFHLATKQVCIAWSSSSCHDGKAWLHVCVTGDDKNATASIIYDGILVDSIASWSKNILRTQESECVCINGTCTVVMTDGSASGRADTRILFIREGKIVHISPLSGSAQHVEECSCYPRYPEVRCVCRDNWKGSNRPVLYINMADYSIDSSYVCSGIVGDTPRNDDRSSSSNCRDPNNEIGAPGVKGWAFDSGNDIWMGRTIEKDSRSGYETFRVIGGWSTANSKSQINRQVIVDRDNSSGYSGIFSVEGKSCINRCFYVELIRGRPKENRVWWTSNSIIVFCGTSGTYGTGSWPDGANINLMPI

SEQ ID NO: 23523 - protein, 469 aa, Artificial Sequence
  derived and/or modified protein sequence (wt) from neuraminidase__InfluenzaA__AGQ81729
MNPNQKIIAIGSVSLTIATICLLMQIAILVATMTLHSKHGECTNSSNNQAVPCGPIIIERNVTEIVHLNSTTLEKEICPKAAGYRDWSKPQCQITGFAPFSKDNSIRLSASGDIWVTREPYVSCGLGKCYQFALGQGTTLDNRHSNGTSHDRTPHRTLLMNELGIPFHLATKQVCIAWSSSSCHDGKAWLHVCVTGDDRNATASIIYDGMLVDSIGSWSKNILRTQESECVCINGTCTVVMTDGSASGKADTRILFIREGKIVHISPLLGSAQHVEECSCYPQYPEVRCVCRDNWRGSNRPVLYINMADYSVDSGYVCSGLVGDTPRNDDTSSSSNCKDPNNERGAPGVKGWAFDSGNDIWMGRTIEKDSRSGYETFRVIGGWNTANSKSQTSRQVIVDSDNSSGYSGIFSVEGKSCINRCFYVELIRGRPKETRVWWTSNSIIVFCGTSGTYGTGSWPDGANINFMPI

SEQ ID NO: 23524 - protein, 469 aa, Artificial Sequence
  derived and/or modified protein sequence (wt) from neuraminidase__InfluenzaA__AGQ81730
MNPNQKIIAIGSVSLTIATICLLMQIAILVTTMTLHFKHNECINSSNNQSVPCGPIIIERNVTEIVHLNSTTLEKEICPKAAGYRDWSKPQCQITGFAPFSKDNSIRLSASGDIWVTREPYVSCGLGKCYQFALGQGTTLDNRHSNGTSHDRTPHRTLLMNELGVPFHLASKQVCIAWSSSSCHDGKAWLHVCVTGDDRNATASIIYDGMLVDSIGSWSKNILRTQESECVCINGTCTVVMTDGSASGEADTRILFIREGKIVHISPLSGSAQHVEECSCYPQYPEVRCVCRDNWRGSNRPVLYINMADYSIDSGYVCSGLVGDTPRNDDISSSSNCKDPNNERGAPGVKGWAFDSGNDIWMGRTIEKDSRSGYETFRVIGGWNTANSKSQTSRQVIVDSDNSSGYSGIFSVEGKSCINRCFYVELIRGRPKETRVWWTSNSIIVFCGTSGTYGTGSWPDGANINFMAI

SEQ ID NO: 23525 - protein, 469 aa, Artificial Sequence
  derived and/or modified protein sequence (wt) from neuraminidase__InfluenzaA__AGQ81731
MNPNQKIIAIGSVSLTIATICLLMQIAILVTTMTLHFKHNECSNSSNNQAVPCGPIIIERNITEIVHLNSTTLEKEICPKTAGYRDWSKPQCQITGFAPFSKDNSIRLSASGDIWVTREPYVSCGFGKCYQFALGQGTTLDNRHSNGTSHDRTPHRTLLMNELGVPFHLATKQVCIAWSSSSCHDGKAWLHVCVTGDDRNATASIIYDGILVDSIGSWSKNILRTQESECVCINGTCTVVMTDGSASGKADTRILFIREGKIVHISPLSGSAQHVEECSCYPQYPEVRCVCRDNWRGSNRPVLYINMTDYSIDSGYVCSGLVGDTPRNDDISSSSNCKDPNNERGAPGVKGWAFDSGNDLWMGRTIEKESRSGYETFRVIGGWNTANSKSQTSRQVIVDSDNSSGYSGIFSVEGKSCINRCFYVELIRGRPKETRVWWTSNSIIVFCGTSGTYGTGSWPDGANINFMAI

SEQ ID NO: 23526 - protein, 469 aa, Artificial Sequence
  derived and/or modified protein sequence (wt) from neuraminidase__InfluenzaA__AGQ81732
MNPNQKIIAIGSVSLTIATICLLMQVAILVTTMTLHFKHNECSNSSNNQAVPCGPIIIERNITEIVHLNSTTLEKEICPKAAGYRDWSKPQCQITGFAPFSKDNSIRLSASGDIWVTREPYVSCGLGKCYQFALGQGTTLDNRHSNGTSHDRTPHRTLLMNELGVPFHLATKQVCIAWSSSSCHDGKAWLHVCVTGDDRNATASIIYDGILVDSIGSWSKNILRTQESECVCINGTCTVVMTDGSASGKADTRILFIREGKIVHISPLSGSAQHVEECSCYPQYPEVRCVCRDNWRGSNRPVLYINMADYSIDSGYVCSGLVGDTPRNDDISSSSNCKDPNNERGAPGVKGWAFDSGNDLWMGRTIEKESRSGYETFRVIGGWNTANSKSQTSRQVIVDSDNSSGYSGIFSVEGKSCINRCFYVELIRGRPKETRVWWTSNSIIVFCGTSGTYGTGSWPDGANINFMPI

SEQ ID NO: 23527 - protein, 469 aa, Artificial Sequence
  derived and/or modified protein sequence (wt) from neuraminidase__InfluenzaA__AGQ81733
MNPNQKIIAIGSVSLTIATICLLMQIAILVTTMTLHFKHNECSNSSNSQAVPCGPIIIERNVTEIVHLNSTTLEKEICPKAAEYRDWSKPQCQITGFAPFSKDNSIRLSASGDIWVTREPYVSCGLGKCYQFALGQGTTLDNRHSNGTSHDRTPHRTLLMNELGVPFHLATKQVCIAWSSSSCHDGKAWLHVCVTGDDRNATASIIYDGILVDSIGSWSKNILRTQESECVCINGTCTVVMTDGSASGKADTRILFIREGKIVHISPLSGSAQHVEECSCYPQYPEVRCVCRDNWRGSNRPVLYINMADYSIDSGYVCSGLVGDTPRNDDISSSSNCKDPNNERGAPGVKGWAFDSGNDLWMGRTIEKDSRSGYETFRVIGGWNTANSKSQTSRQVIVDSDNSSGYSGIFSVEGKSCINRCFYVELIRGRPKETRVWWTSNSIIVFCGTSGTYGTGSWPDGANINFMPI

SEQ ID NO: 23528 - protein, 469 aa, Artificial Sequence
  derived and/or modified protein sequence (wt) from neuraminidase__InfluenzaA__AGQ81734
MNPNQKIIAIGSVSLTIATICLLMQIAILVTTMTLHFKHNEYSNSSNNQAVPCGPIIIERNITEIVHLNSTTLEKEICPKAAGYRDWSKPQCQITGFAPFSKDNSIRLSASGDIWVTREPYVSCGLGKCYQFALGQGTTLDNRHSNGTSHDRTPHRTLLMNELGVPFHLATKQVCIAWSSSSCHDGKAWLHVCVTGDDRNATASIIYDGILVDSIGSWSKNILRTQESKCVCIKRTCTVVKTDGSASGKADTRILFIREGKIVHISPLSGSAQHVEECSCYPQYPEVRCVCRDNWRGSNRPVLYINMADYSIDSGYVCSGLVGDTPRNDDISSSSNCKDPNNERGAPGVKGWAFDSGNDLWMGRTIEKESRSGYETFRVIGGWNTANSKSQTSRQVIVDSDNSSGYSGIFSVEGKSCINRCFYVELIRGRPKETRVWWTSNSIIVFCGTSGTYGTGSWPDGANINFMAI

SEQ ID NO: 23529 - protein, 469 aa, Artificial Sequence; identical to SEQ ID NO: 23527
  derived and/or modified protein sequence (wt) from neuraminidase__InfluenzaA__AGQ81735

SEQ ID NO: 23530 - protein, 469 aa, Artificial Sequence
  derived and/or modified protein sequence (wt) from neuraminidase__InfluenzaA__AGQ81736
MNPNQKIIAIGSVSLTIATICLLMQIAILVATMTLHSKHGECTDSSNNQAVPCGPIIIERNVTEIVHLNSTTLEKEICPKAAGYKDWSKPQCQITGFAPFSKDNSIRLSASGDIWVTREPYVSCGLGKCYQFALGQGTTLDNRHSNGTSHDRTPHRTLLMNELGVPFHLATKQVCIAWSSSSCHDGKAWLHVCVTGDDRNATASIIYDGMLVDSIGSWSKNILRTQESECVCINGTCTVVMTDGSASGKADTRILFIREGKIAHISPLSGSAQHVEECSCYPQYPEVRCVCRDNWRGSNRPVLYINMADYSVDSGYVCSGLVGDTPRNDDTSSSSNCKDPNNERGAPGVKGWAFDSGNDIWMGRTIEKDSRSGYETFRVIGGWNTANSKSQTSRQVIVDSDNSSGYSGIFSVEGKSCINRCFYVELIRGRPKETRVWWTSNSIIVFCGTSGTYGTGSWPDGANINFMPI

SEQ ID NO: 23531 - protein, 469 aa, Artificial Sequence
  derived and/or modified protein sequence (wt) from neuraminidase__InfluenzaA__AGQ81737
MNPNQKIIAIGSVSLTIATICLLMQIAILVTTMTLHFKHNECSNSSNNQAVPCGPIIIERNITEIVHLNSTTLEKEICPKAAGYRDWSKPQCQITGFAPFSKDNSIRLSASGDIWVTREPYVSCGLGKCYQFALGQGTTLDNRHSNGTSHDRTPHRTLLMNELGVPFHLATKQVCIAWSSSSCHDGKAWLHVCVTGDDRNATASIIYDGILVDSIGSWSKNILRTQESECVCINGTCTVVMTDGSASGKADTRILFIREGKIVHISPLSGSAQHVEECSCYPQYPEVRCVCRDNWRGSNRPVLYINMADYSIDSGYVCSGLVGDTPRNDDISSSSNCKDPNNERGAPGVKGWAFDSGNDLWMGRTIEKESRSGYETFRVIGGWNTANSKSQTSRQVIVDSDNSSGYSGIFSVEGKSCINRCFYVELIRGRPKETRVWWTSNSIIVFCGTSGTYGTGSWPDGANINFMAI

SEQ ID NO: 23532 - protein, 469 aa, Artificial Sequence
  derived and/or modified protein sequence (wt) from neuraminidase__InfluenzaA__AGQ81738
MNPNQKIIAIGSVSLTIATICLLMQVAILVTTMTLHFKHNECSNSSNNQAVPCGPIIIERNITEIVHLNSTTLEKEICPKAAGYRDWSKPQCQITGFAPFSKDNSIRLSASGDIWVTREPYVSCGLGKCYQFALGQGTTLDNRHSNGTSHDRTPHRTLLMNELGVPFHLATKQVCIAWSSSSCHDGKAWLHVCVTGDDRNATASIIYDGILVDSIGSWSKNILRTQESECVCINGTCTVVMTDGSASGKADTRILFIREGKIIHISPLSGSAQHVEECSCYPQYPEVRCVCRDNWRGSNRPVLYINMADYSIDSGYVCSGLVGDTPRNDDISSSSNCKDPNNERGAPGVKGWAFDSGNDLWMGRTIEKESRSGYETFRVIGGWNTANSKSQTSRQVIVDSDNSSGYSGIFSVEGKSCINRCFYVELIRGRPKETRVWWTSNSIIVFCGTSGTYGTGSWPDGANINFMPI

SEQ ID NO: 23533 - protein, 469 aa, Artificial Sequence
  derived and/or modified protein sequence (wt) from neuraminidase__InfluenzaA__AGQ81739
MNPNQKIIAIGSVSLTIATICLLMQIAILVTTMTLHFKHDECTNSSNNQAVPCEPIIIERNVTEIVHINSTILEKEICPKAAGYRNWSKPQCQITGFAPFSKDNSIRLSASGDIWVTREPYVSCGLGKCYQFALGQGTTLDNRHSNGTLNDRTPHRTLLMNELGVPFHLATKQVCIAWSSSSCHDGKAWLHVCVTGDDRNATASIIYDDMLVDSIGSWSKNILRTQESECVCINGTCTVVMTDGSASGKADTRILFIREGKIVHISPLSGSAQHVEECSCYPQYPEVRCVCRDNWRGSNRPVLYINMADYSIDSGYVCSGLVGDTPRNDDISSSSNCKDPNNERGAPGVKGWAFDSGNDIWMGRTIEKDSRSGYETFRVIGGWNTANSKSQTSRQVIVDSDNSSGYSGIFSVEGKSCINRCFYVELIRGRPKETRVWWTSNSIIVFCGTSGTYGTGSWPDGANINFMAI

SEQ ID NO: 23534 - protein, 469 aa, Artificial Sequence
  derived and/or modified protein sequence (wt) from neuraminidase__InfluenzaA__AGQ81740
MNPNQKIVAIGSVSLTIATICLLMQIAILVTTMTLHFKHGECTNSSNNQAVPCGPIIIERNITEIVHLNSTTLEKEICPKAAGYRDWSKPQCQITGFAPFSKDNSIRLSASGDIWVTREPYVSCGLGKCYQFALGQGTTLDNRHSNGTSHDRTPHRTLLMNELGVPFHLATKQVCIAWSSSSCHDGKAWLHVCVTGDDRNATASIIYNGILVDSIGSWSKNILRTQESECVCINGTCTVVMTDGSASGKADTRILFIREGKIVHISPLSGSAQHVEECSCYPQYPEVRCVCRDNWRGSNRPVLYINMADYSVDSGYVCSGLVGDTPRNDDTSSSSNCKDPNNERGAPGVKGWAFDSGNDIWMGRTIEKDLRSGYETFRVIGGWNTANSKSQTSRQVIVDSDNSSGYSGIFSVEGKSCINRCFYVELIRGRPKETRVWWTSNSIIVFCGTSGTYGTGSWPDGANINFMPI

SEQ ID NO: 23535 - protein, 469 aa, Artificial Sequence
  derived and/or modified protein sequence (wt) from neuraminidase__InfluenzaA__AGQ81741
MNPNQKIVAIGSVSLTIATICLLMQIAILVTTMTLHFKHGECTNSSNNQAVPCGPIIIERNITEIVHLNSTTLDKEICPKAAGYRDWSKPQCQITGFAPFSKDNSIRLSASGDIWVTREPYVSCGLGKCYQFALGQGTTLDNRHSNGTSHDRTPHRTLLMNELGVPFHLATKQVCIAWSSSSCHDGKAWLHVCVTGDDRNATASIIYDGMLVDSIGSWSKNILRTQESECVCINGTCTVVMTDGSASGKADTRILFIREGKIVHISPLSGSAQHVEECSCYPQYPEVRCVCRDNWRGSNRPVLYINMADYSVDSGYVCSGLVGDTPRNDDTSSSSNCKDPNNERGAPGVKGWAFDSGNDIWMGRTIEKDLRSGYETFRVIGGWNTANSKSQTSRQVIVDSDNSSGYSGIFSVEGKSCINRCFYVELIRGRPKETRVWWTSNSIIVFCGTSGTYGTGSWPDGANINFMPI

SEQ ID NO: 23536 - protein, 469 aa, Artificial Sequence
  derived and/or modified protein sequence (wt) from neuraminidase__InfluenzaA__AGQ81742
MNPNQKIVAIGSVSLTIATICLLMQIAILVTTMTLHFKHGECTNSSNNQAVPCGPIIIERNITEIVHLNSTTLEKEICPKAAEYRDWSKPQCQITGFAPFSKDNSIRLSASGDIWVTREPYVSCGLGKCYQFALGQGTTLDNRHSNGTSHDRTPHRTLLMNELGVPFHLATKQVCIAWSSSSCHDGKAWLHVCVTGDDRNATASIIYDGMLVDSIGSWSKNILRTQESECVCINGTCTVVMTDGSASGKADTRILFIREGKIVHISPLSGSAQHVEECSCYPQYPEVRCVCRDNWRGSNRPVLYINMADYSVDSGYVCSGLVGDTPRNDDTSSSSNCKDPNNERGAPGVKGWAFDSGNDIWMGRTIEKDLRSGYETFRVIGGWNTANSKSQTSRQVIVDSDNSSGYSGIFSVEGKSCINRCFYVELIRGRPKETRVWWTSNSIIVFCGTSGTYGTGSWPDGANINFMPI

SEQ ID NO: 23537 - protein, 469 aa, Artificial Sequence
  derived and/or modified protein sequence (wt) from neuraminidase__InfluenzaA__AGQ81744
MNPNQKIIAIGSVSLTIATICLLMQIAILVTTMTLHFRHDECTNSSNNQAVPCGPIIIERNVTEIVHLNSTTLEKEICPKAAEYRDWSKPQCQITGFVPFSKDNSIRLSAGGDIWVTREPYVSCGLGKCYQFALGQGTTLDNRHSNGTSHDRTPHRTLLMNELGVPFHLATKQVCIAWSSSSCHDGKAWLHVCVTGDDRNATASIIYDGMLVDSIGSWSKNILRTQESECVCINGTCTVVMTDGSASGKADTRILFIREGKIVHISPLSGSAQHVEECSCYPQYPEVRCVCRDNWRGSNRPVLYINVADYSVDSGYVCSGLVGDTPRNDDISSSSNCKDPNNERGAPGVKGWAFDSGNDIWMGRTIEKDSRSGYETFRVIGGWNTANSKSQTSRQVIVDSDNPSGYSGIFSVEGKSCINRCFYVELIRGRPKETRVWWTSNSIIVFCGTSGTYGTGSWPDGANINFMPI

SEQ ID NO: 23538 - protein, 469 aa, Artificial Sequence
  derived and/or modified protein sequence (wt) from neuraminidase__InfluenzaA__AGQ81746
MNPNQKIIAIGSVSLTIATICLLMQIAILVTTMTLHFKHNECSNSSNSQAVPCGPIIIERNVTEIVHLNSTTLEKEICPKAAEYRGWSKPQCQITGFAPFSKDNSIRLSASGDIWVTREPYVSCDLGKCYQFALGQGTTLDNRHSNGTSHDRTPHRTLLMNELGVPFHLATKQVCIAWSSSSCHDGKAWLHVCVTGDDRNATASIIYDGILVDSIGSWSKNILRTQESECVCINGTCTVVMTDGSASGKADTRILFIREGKIVHISPLSGSAQHVEECSCYPQYPEVRCVCRDNWRGSNRPVLYINMADYSIDSGYVCSGLVGDTPRNDDISSSSNCKDPNNERGAPGVKGWAFDSGNDLWMGRTIEKDSRSGYETFRVIGGWNTANSKSQTSRQVIVDSDNSSGYSGIFSVEGKSCINRCFYVELIRGRPKETRVWWTSNSIIVFCGTSGTYGTGSWPDGANINFMPI

SEQ ID NO: 23539 - protein, 469 aa, Artificial Sequence
  derived and/or modified protein sequence (wt) from neuraminidase__InfluenzaA__AGQ81747
MNPNQKIVAIGSVSLTIATICLLMQIAILVTTMTLHFKHGECTNSSNNQAVPCGPIIIERNITEIVHLNSTTLEKEICPKAAGYRDWSKPQCQITGFAPFSKDNSIRLSASGDIWVTREPYVSCGLGKCYQFALGQGTTLDNRHSNGTSHDRTPHRTLLMNELGVPFHLATKQVCIAWSSSSCHDGKAWLHVCVTGDDRNATASIIYDGMLVDSIGSWSKNILRTQESECVCINGTCTVVMTDGSASGKADTRILFIREGKIVHISPLSGSAQHVEECSCYPQYPEVRCVCRDNWRGSNRPVLYINMADYSVDSGYVCSGLVGDTPRNDDTSSSSNCKDPNNERGAPGVKGWAFDSGNDIWMGRTIEKDLRSGYETFRVIGGWNTANSKSQTSRQVIVDSDNSSGYSGIFSVEGKSCINRCFYVELIRGRPKETRVWWTSNSIIVFCGTSGTYGTGSWPDGANINFMPI

SEQ ID NO: 23540 - protein, 466 aa, Artificial Sequence
  derived and/or modified protein sequence (wt) from neuraminidase__InfluenzaA__AGQ81749
MNPNQKIIAIGSVSLTTAIICFLMQIAILTTTMTLHFKQNECSNPSNNQVVPCEPIIIERNTVHLNSTTIEKEICSKVAEYKNWSKPQCQITGFAPFSKDNSIRLSAGGDIWVTREPYVSCSLGKCYQFALGQGTTLKNKHSNGTTHDRIPHRTLLMNELGVPFHLGTKQVCIAWSSSSCYDGKAWLHICVTGDDKNATASIIYDGMLADSIGSWSKNILRTQESECVCINGTCAVVMTDGSASGKADTRILFIREGRIINISPLSGSAQHVEECSCYPRYPEVRCVCRDNWKGSNRPVLYINMADYSVESSYVCSGLVGDTPRNDDSSSSSNCRDPNNERGAPGVKGWAFDDGNDVWMGRTIKKDSRSGYETFRVINGWTTANSKSQINRQVIVDSDNWSGYSGIFSVEGKNCINRCFYVELIRGRPQEPKVWWTSNSIIAFCGTSGTYGTGSWPDGANINFMPI

SEQ ID NO: 23541 - protein, 466 aa, Artificial Sequence; identical to SEQ ID NO: 23540
  derived and/or modified protein sequence (wt) from neuraminidase__InfluenzaA__AGQ81750

SEQ ID NO: 23542 - protein, 469 aa, Artificial Sequence
  derived and/or modified protein sequence (wt) from neuraminidase__InfluenzaA__AGQ81751
MNPNQKIIAIGSVSLTIATICLLMQIAILVTTMTLYFKHNECSNSSNNQAVPCGPIIIERNITEIVHLNSTTLEKEICPKAAGYRDWSKPQCQITGFAPFSKDNSIRLSASGDIWVTREPYVSCGLGKCYQFALGQGTTLDNRHSNGTSHDRTPHRTLLMNELGVPFHLATKQVCIAWSSSSCHDGKAWLHVCVTGDDRNATASIIYDGILVDSIGSWSKNILRTQESECVCINGTCTVVMTDGSASGKADTRILFIREGKIVHISPLSGSAQHVEECSCYPQYPEVRCVCRDNWRGSNRPVLYINMADYSIDSGYVCSGLVGDTPRNDDISSSSNCKDPNNERGAPGVKGWAFDSGNDLWMGRTIEKESRSGYETFRVIGGWNTANSKSQTSRQVIVDSDNSSGYSGIFSVEGKSCINRCFYVELIRGRPKETRVWWTSNSIIVFCGTSGTYGTGSWPDGANINFMPI

SEQ ID NO: 23543 - protein, 469 aa, Artificial Sequence
  derived and/or modified protein sequence (wt) from neuraminidase__InfluenzaA__AGQ81753
MNPNQKIVAIGSVSLTIATICLLMQIAILVTTMTLHFKHGECTNSSNNQAVPCGPIIIERNITGIVHLNSTTLEKEICPKAAGYRDWSKPQCQITGFAPFSKDNSIRLSASGDIWVTREPYVSCGLGKCYQFALGQGTTLDNRHSNGTSHDRTPHRTLLMNELGVPFHLATKQVCIAWSSSSCHDGKAWLHICVTGDDRNATASIIYDGMLVDSIGSWSKNILRTQESECVCINGTCTVVMTDGSASGKADTRILFIREGKIVHISPLSGSAQHVEECSCYPQYPEVRCVCRDNWRGSNRPVLYINMADYSVDSGYVCSGLVGDTPRNDDTSSSSNCKDPNNERGAPGVKGWAFDSGNDIWMGRTIEKDLRSGYETFRVIGGWNTANSKSQTNRQVIVDSDNSSGYSGIFSVEGKSCINRCFYVELIRGRPKETRVWWTSNSIIVFCGTSGTYGTGSWPDGANINFMPI

SEQ ID NO: 23544 - protein, 469 aa, Artificial Sequence; identical to SEQ ID NO: 23543
  derived and/or modified protein sequence (wt) from neuraminidase__InfluenzaA__AGQ81754

SEQ ID NO: 23545 - protein, 469 aa, Artificial Sequence
  derived and/or modified protein sequence (wt) from neuraminidase__InfluenzaA__AGQ81756
MNPNQKIIAIGSISLTIATICLLIQIAILVTTMTLHFKHGECTNSSNNQAVPCGPIIIERNVTEIVHLNSTTLEKEICPKAAGYRDWSKPQCQITGFAPFSKDNSIRLSASGDIWVTREPYVSCGLGKCYQFALGQGTTLDNRHSNGTSHDRTPHRTLLMNELGVPFHLATKQVCIAWSSSSCHDGKAWLHVCVTGDDRNATASIIYDGLLVDSIGSWSKNILRTQESECVCINGTCTVVMTDGSASGKADTRILFIREGKIIHISPLSGSAQHVEECSCYPQYPEVRCVCRDNWRGSNRPVLYINMADYSVDSGYVCSGLVGDTPRNDDTSSSSNCKDPNNERGAPGVKGWAFDSGNDIWMGRTIEKDSRSGYETFRVIGGWNTANSKSQTSRQVIVDSDNSSGYSGIFSVEGKSCINRCFYVELIRGRPKETRVWWTSNSIIVFCGTSGTYGTGSWPDGANINFMPI

SEQ ID NO: 23546 - protein, 469 aa, Artificial Sequence
  derived and/or modified protein sequence (wt) from neuraminidase__InfluenzaA__AGQ81757
MNPNQKIIAIGSVSLTIATICLLIQIAILVTTMTLHFKHGECTNSSNNQAVPCGPIIIERNVTEIVHLNSTTLEKEICPKAAGYRDWSKPQCQITGFAPFSKDNSIRLSASGDIWVTREPYVSCGLGKCYQFALGQGTTLDNRHSNGTSHDRTPHRTLLMNELGVPFHLATKQVCIAWSSSSCHDGKAWLHVCVTGDDRNATASIIYDGLLVDSIGSWSKNILRTQESECVCINGTCTVVMTDGSASGKADTRILFIREGKIIHISPLSGSAQHVEECSCYPQYPEVRCVCRDNWRGSNRPVLYINMADYSVDSGYVCSGLVGDTPRNDDTSSSSNCKDPNNERGAPGVKGWAFDSGNDIWMGRTIEKDSRSGYETFRVIGGWNTANSKSQTSRQVIVDSDNSSGYSGIFSVEGKSCINRCFYVELIRGRPKETRVWWTSNSIIVFCGTSGTYGTGSWPDGANINFMPI

SEQ ID NO: 23547 - protein, 466 aa, Artificial Sequence
  derived and/or modified protein sequence (wt) from neuraminidase__InfluenzaA__AGQ81758
MNPNQKIIAIGSVSLIIAIICLLMQIAILTTTMTLHFRQNECSNPSNNQVVPCEPTIIERNTVHLNSTTIEREICPKVAEYKNWSKPQCQITGFAPFSKDNSIRLSAGGDIWVTREPYVSCSLGKCYQFALGQGTTLKNKHSNGTTHDRTPHRTLLMNELGVPFHLGTKQVCIAWSSSSCYDGKAWLHICVTGDDENATASIIYDGMLVDSIGSWSKNILRTQESECVCINGTCAVVMTDGSASGKADTRVLFIREGKIINISPLSGSAQHVEECSCYPRYPEVRCVCRDNWKGSNRPVLYINMADYSIESSYVCSGLVGDTPRNDDSSSSSNCRDPNNERGAPGVKGWAFDDGNDVWMGRTIKNDSRSGYETFRVVNGWTMANSKSQINRQVIVDSDNWSGYSGIFSVEGKKCINRCFYVELIRGRPQEPRVWWTSNSIIVFCGTSGTYGTGSWPDGANINFMPI

SEQ ID NO: 23548 - protein, 466 aa, Artificial Sequence
  derived and/or modified protein sequence (wt) from neuraminidase__InfluenzaA__AGQ81759
MNPNQKIIAIGSVSLTIAIICFLIQIAILTTTMTLHFRQSECSNPSNNQVVPCEPIIIERNTVHLNSTIIEKEICPKVAEYKNWSKPQCQITGFAPFSKDNSIRLSAGGDIWVTREPYVSCSLGKCYQFALGQGTTLKNKHSNGTTHDRIPHRTLLMNELGVPFHLGTKQVCIAWSSSSCHDGKAWLHICVTGDDKNATASIIYDGMLVDSIGSWSKNILRTQESECVCINGTCAVVMTDGSASGKADTRILFIREGKIINISPLSGSAQHVEECSCYPRYPEVRCVCRDNWKGSNRPVLYINMADYSIESSYVCSGLVGDTPRDDDSSSSSNCRDPNNERGAPGVKGWAFDDGNDIWMGRTIKSDSRSGYETFRVINGWTTANSKSQINRQVIVDSDSWSGYSGIFSVEGKNCINRCFYVELIRGRPRETRVWWTSNSIIVFCGTSGTYGTGSWPDGANINFMPI

SEQ ID NO: 23549 - protein, 466 aa, Artificial Sequence
  derived and/or modified protein sequence (wt) from neuraminidase__InfluenzaA__AGQ81760
MNPNQKIIAIGSVSLTIAIICFLMQIAILTTTMTLHFRQNECSNPSNNQVVPCEPIIIERNTVHLNSTTIEKEICPKVAEYKNWSKPQCQITGFAPFSKDNSIRLSAGGDIWVTREPYVSCSLGKCYQFALGQGTTLKNKHSNGTTHDRIPHRTLLMNELGVPFHLGTKQVCIAWSSSSCHDGKAWLHICVTGDDKNATASIIYDGMLVDSIGSWSKNILRTQESECVCINGTCAVVMTDGSASGKADTRVLFIREGKIINISPLSGSAQHVEECSCYPRYPEVRCVCRDNWKGSNRPVLYINMADYSIESSYVCSGLVGDTPRDDDSSSSSNCRDPNNERGAPGVKGWAFDDGNDIWMGRTIKSDSRSGYETFRVVNGWITANSKSQINRQVIVDSDSWSGYSGIFSVEGKNCINRCFYVELIRGRPQETRVWWTSNSIIVFCGTSGTYGTGSWPDGANINFMPI

SEQ ID NO: 23550 - protein, 466 aa, Artificial Sequence
  derived and/or modified protein sequence (wt) from neuraminidase__InfluenzaA__AGQ81761
MNPNQKIIAIGSVSLTIAIICFLMQIAILTTTMTLHFRQNECSNPSNNQVVPCEPIIIERNTVHLNSTTIEKEICPKVAEYKNWSKPQCQITGFAPFSKDNSIRLSAGGDIWVTREPYVSCSLGKCYQFALGQGTTLKNKHSNGTTHDRIPHRTLLMNELGVPFHLGTKQVCIAWSSSSCHDGKAWLHICVTGDDKNATASIIYDGMLVDSIGSWSKNILRTQESECVCINGTCAVVMTDGSASGKADTRILFIKEGKIINISPLSGSAQHVEECSCYPRYPEVRCVCRDNWKGSNRPVLYINMADYSIESSYVCSGLVGDTPRDDDSSSSSNCRDPNNERGAPGVKGWAFDDGNDIWMGRTIKSDSRSGYETFRVVNGWTTANSKSQINRQVIVDSDSWSGYSGIFSVEGKNCINRCFYVELIRGRPQETRVWWTSNSIIVFCGTSGTYGTGSWPDGANINFMPI

SEQ ID NO: 23551 - protein, 466 aa, Artificial Sequence
  derived and/or modified protein sequence (wt) from neuraminidase__InfluenzaA__AGQ81763
MNPNQKIIAIGSVSLIIAIICLLMQIAILTTTMTLHFRQNECSNPSNNQVVPCEPIIIERNTVHLNSTTIEREICPKVAEYKNWSKPQCQITGFAPFSKDNSIRLSAGGDIWVTREPYVSCSLGKCYQFALGQGTTLKNKHSNGTTHDRTPHRTLLMNELGVPFHLGTKQVCIAWSSSSCYDGKAWLHICVTGDDKNATASIIYDGMLVDSIGSWSKNILRTQESECVCINGTCAVVMTDGSASGKADTRVLFIREGKIINISPLSGSAQHVEECSCYPRYPEVRCVCRDNWKGSNRPVLYINMADYSIESSYVCSGLVGDTPRNDDSSSSSNCRDPNNERGAPGVKGWAFDDGNDVWMGRTIKNGSRSGYETFRVVNGWTMANSKSQINRQVIVDSDNWSGYSGIFSVEGKKCINRCFYVELIRGRPQEPRVWWTSNSIIVFCGTSGTYGTGSWPDGANINFMPI

SEQ ID NO: 23552 - protein, 466 aa, Artificial Sequence
  derived and/or modified protein sequence (wt) from neuraminidase__InfluenzaA__AGQ81766
MNPNQKIIAIGSVSLTIAIICFLMQIAILTTTMTLHFRQNECSNPSNNQVVPCEPIIIERNTVHLNSTTIEKEICPKVAEYKNWSKPQCQITGFAPFSKDNSIRLSAGGDIWVTREPYVSCSLGKCYQFALGQGTTLKNKHSNGTTHDRIPHRTLLMNELGVPFHLGTKQVCIAWSSSSCHDGKAWLHICVTGDDKNATASIIYDGMLVDSIGSWSKNILRTQESECVCINGTCAVVMTDGSASGKADTRILFIREGKIINISPLSGSAQHVEECSCYPRYPEVRCVCRDNWKGSNRPVLYINMADYSIESSYVCSGLVGDTPRDDDSFSSSNCRDPNNERGAPGVKGWAFDDGNDIWMGRTIKSDSRSGYETFRVVNGWTTANSKSQINRQVIVDSDSWSGYSGIFSVEGKNCINRCFYVELIRGRPQETIVWWTSNSIIVFCGTSGTYGTGSWPDGANINFMPI

SEQ ID NO: 23553 - protein, 466 aa, Artificial Sequence; identical to SEQ ID NO: 23552
  derived and/or modified protein sequence (wt) from neuraminidase__InfluenzaA__AGQ81767

SEQ ID NO: 23554 - protein, 469 aa, Artificial Sequence
  derived and/or modified protein sequence (wt) from neuraminidase__InfluenzaA__AGQ81768
MNPNQKIVAIGSVSLTIATICLLMQIAILVTTMTLHFKHGECTNSSNNQAVPCGPIIIERNITEIVHLNSTTLEKEICPKAAGYRDWSKPQCQITGFAPFSKDNSIRLSASGDIWVTREPYVSCGLGKCYQFALGQGTTLDNRHSNGTSHDRTPHRTLLMSELGVPFHLATKQVCIAWSSSSCHDGEAWLHICVTGDDRNATASIIYDGMLVDSIGSWSKNILRTQESECVCINGTCTVVMTDGSASGKADTRILFIREGKIVHISPLSGSAQHVEECSCYPQYPEVRCVCRDNWRGSNRPVLYINMADYSVDSGYVCSGLVGDTPRNDDTSSSSNCKDPNNERGAPGVKGWAFDSGNDIWMGRTIEKDLRSGYETFRVIGGWNTANSKSQTNRQVIVDSDNSSGYSGIFSVEGKSCINRCFYVELIRGRPKETRVWWTSNSIIVFCGTSGTYGTGSWPDGANINFMPI

SEQ ID NO: 23555 - protein, 469 aa, Artificial Sequence
  derived and/or modified protein sequence (wt) from neuraminidase__InfluenzaA__AGQ81769
MNPNQKIVAIGSVSLTIATICLLMQIAILVTTMTLHFKHGECTNSSNNQAVPCGPIIIERNITEIVHLNSTTLEKEICPKAAGYRDWSKPQCQITGFAPFSKDNSIRLSASGDIWVTREPYVSCGLGKCYQFALGQGTTLDNRHSNGTSHDRTPHRTLLMSELGVPFHLATKQVCIAWSSSSCHDGEAWLHICVTGDDRNATASIIYGGMLVDSIGSWSKNILRTQESECVCINGTCTVVMTDGSASGKADTRILFIREGKIVHISPLSGSAQHVEECSCYPQYPEVRCVCRDNWRGSNRPVLYINMADYSVDSGYVCSGLVGDTPRNDDTSSSSNCKDPNNERGAPGVKGWAFDSGNDIWMGRTIEKDLRSGYETFRVIGGWNTANSKSQTNRQVIVDSDNSSGYSGIFSVEGKSCINRCFYVELIRGRPKETRVWWTSNSIIVFCGTSGTYGTGSWPDGANINFMPI

SEQ ID NO: 23556 - protein, 466 aa, Artificial Sequence
  derived and/or modified protein sequence (wt) from neuraminidase__InfluenzaA__AGQ81770
MNPNQKIIAIGSVSITIAIICFIMQIAILTTTMTLHFRQNECSNPSNNQVVPCEPIIIERNTVHLNSTTIEKETCPKVAEYKNWSKPQCQITGFAPFSKDNSIRLSAGGDIWVTREPYVSCSLGKCYQFALGQGTTLKNKHSNGTTHDRIPHRTLLMNELGVPFHLGTKQVCIAWSSSSCHDGKAWLHICVTGDDKNATASIIYDGMLVDSIGSWSKNILRTQESECVCINGTCAVVMTDGSASGKADTRVLFIREGKIINISPLSGSAQHVEECSCYPRYPEVRCVCRDNWKGSNRPVLYINMADYSVESSYVCSGLVGDTPRDDDSSSSSNCRDPNNERGAPGVKGWAFDDGNDIWMGRTIKSDSRSGYETFRVVNGWTTANSKSQINRQVIVDSDSWSGYSGIFSVEGKNCINRCFYVELIRGRPQETRVWWTSNSIIVFCGTSGTYGTGSWPDGANINFMPI

SEQ ID NO: 23557 - protein, 469 aa, Artificial Sequence
  derived and/or modified protein sequence (wt) from neuraminidase__InfluenzaA__AGQ81772
MNPNQKIVAIGSASLTIATMCLLLQIALFATTMTLHFKQTGCTNSSDNQAVPCGPIIIERNITEIVHLNSTTLEKETCPKSAGYRNWSKPQCQITGFAPFSKDNSIRLAAAGDIWVTREPYVSCGLGKCYQFALGQGTTLDNKHSNGTTHDRTPHRTLLMSELGVPFHLATKQVCIAWSSSSCHDGKAWLHVCVTGDDKNATASIIYDGILVDSIASWSKNILRTQESECVCINGTCTVVMTDGSASGRADTRILFIREGKIVHISPLSGSAQHVEECSCYPRYPEVRCVCRDNWKGSNRPVLFINMADYSIDSSYVCPGLVGDTPRNDDRSSSSNCRDPNNERGAPGVKGWAFDSGNDIWMGRTIEKDSRSGYETFRVISGWSTANSKSQINRQVIVDRDNSSGYSGIFSVEGKSCINRCFYVELIRGRPKENRVWWTSNSIIVFCGTSGTYGTGSWPDGANINLMPI

SEQ ID NO: 23558 - protein, 466 aa, Artificial Sequence
  derived and/or modified protein sequence (wt) from neuraminidase__InfluenzaA__AGQ81773
MNPNQKIIAIGSVSLTIAIICFLMQIAILTTTMTLHFRQNECSNPSNNQVVPCEPIIIERKTVHLNSTTIEKEICPKVAEYKNWSKPQCQITGFAPFSKDNSIRLSAGGDIWVTREPYVSCSLGKCYQFALGQGTTLKNKHSNGTTHDRIPHRTLLMNELGVPLHWGTKQVCIAWSSSSCHDGKAWLHICVTGDDKNATASIIYDGMLVDSIGSWSKNILRTQESECVCINGTCAVVMTDGSASGKADTRVLFIREGKIINISPLSGSAQHVEECSCYPRYPEVRCVCRDNWKGSNRPVLYINMADYSIESSYVCSGLVGDTPRDDDSSSSSNCRDPNNERGAPGVKGWGFDDGNDIWMGRTIKSDSRSGYETFRVVNGWTTANSKSQINRQVIVDSDSWSGYSGIFSVEGKNCINRCFYVELIRGRPQETRVWWTSNSIIVFCGTSGTYGTGSWPDGANINFMPI

SEQ ID NO: 23559 - protein, 466 aa, Artificial Sequence
  derived and/or modified protein sequence (wt) from neuraminidase__InfluenzaA__AGQ81774
MNPNQKIIAIGSVSLIIAIICLLMQIAILTTTMTLHFRQNECSNPSNNQVMPCEPIIIERNTVHLNSTTIEREICPKVAEYKNWSKPQCQITGFAPFSKDNSIRLSAGGDIWVTREPYVSCSLDKCYQFALGQGTTLKNKHSNGTTHDRTPHRTLLMNELGVPFHLGTKQVCIAWSSSSCYDGKAWLHICVTGDDKNATASIIYDGMLVDSIGSWSKNILRTQESECVCINGTCAVVMTDGSASGKADTRVLFIREGKIINISPLSGSAQHVEECSCYPRYPEVRCVCRDNWKGSNRPILYINMADYSIESSYVCSGLVGDTPRNDDSSSSSNCRDPNNERGAPGVKGWAFDDGNDVWMGRTIKNGSRSGYETFRVVNGWTIANSKSQINRQVIVDSDDWSGYSGIFSVEGKKCINRCFYVELIRGRPQEPRVWWTSNSIIVFCGTSGTYGTGSWPDGANINFMPI

SEQ ID NO: 23560 - protein, 466 aa, Artificial Sequence
  derived and/or modified protein sequence (wt) from neuraminidase__InfluenzaA__AGQ81776
MNPNQKIIAIGSVSLTIAIICFLMQIAILTTTMTLHFRQNECSNPSNNQVVPCEPIIIERNTVHLNSTTIEKEICPKVAEYKNWSKPQCQITGFAPFSKDNSIRLSAGGDIWVTREPYVSCSLGKCYQFALGQGTTLKNKHSNGTTHDRIPHRTLLMNELGVPFHLGTKQVCIAWSSSSCHDGKAWLHICVTGDDKNATASIIYDGMLVDSIGSWSKNILRTQESECVCINGTCAVVMTDGSASGKADTRVLFIREGKIINISPLSGSAQHVEECSCYPRYPEVRCVCRDNWKGSNRPVLYINMADYSIESSYVCSGLVGDTPRDDDSSSSSNCRDPNNERGAPGVKGWAFDDGNDIWMGRTIKSDSRSGYETFRVIDGWTTADSKSQINRQVIVDSDSWSGYSGIFSVEGKNCINRCFYVELIRGRPQETRVWWTSNSIIVFCGTSGTYGTGSWPDGANINFMPI

SEQ ID NO: 23561 - protein, 469 aa, Artificial Sequence
  derived and/or modified protein sequence (wt) from neuraminidase__InfluenzaA__AGQ81777
MNPNQKIVTIGSASLTIATMCLLLQIALFATTMTLHFKQTGCTNSSDNQAVPCGPIIIERNITEIVHLNSTTLEKETCPKSAGYRNWSKPQCQITGFAPFSKDNSIRLAAAGDIWVTREPYVSCGLGKCYQFALGQGTTLDNKHSNGTTHDRTPHRTLLMNELGVPFHLATKQVCIAWSSSSCHDGKAWLHVCVTGDDKNATASIIYDGILVDSIASWSKNILRTQESECVCINGTCTVVMTDGSASGRADTRILFIREGKIVHISPLSGSAQHVEECSCYPRYPEVRCVCRDNWNGSNRPVLFINMADYSIDSSYVCSGLVGDTPRNDDRSSSSNCRDPNNERGAPGVKGWAFDSGNDIWMGRTIEKDSRSGYETFRVISGWSTANSKSQINRQVIVDRDNSSGYSGIFSVEGKSCINRCFYVELIRGRPKENRVWWTSNSIIVFCGTSGTYGTGSWPDGANINLMPI

SEQ ID NO: 23562 - protein, 469 aa, Artificial Sequence
  derived and/or modified protein sequence (wt) from neuraminidase__InfluenzaA__AGQ81778
MNPNQKIVTIGSASLTIATMCLLLQIALFATTMTLHFKQTGCTNSSDNQAVPCGPIIIERNITEIVHLNSTTLEKETCPKSAGYRNWSKPQCQITGFAPFSKDNSIRLAAAGDIWVTREPYVSCGLGKCYQFALGQGTTLDNKHSNGTTHDRTPHRTLLMNELGVPFHLATKQVCIAWSSSSCHDGKAWLHVCVTGDDKNATASIIYDGILVDSIASWSKNILRTQESECVCINGTCTVVMTDGSASGRADTRILFIREGKIVHISPLSGSAQHVEECSCYPRYPEVRCVCRDNWKGSNRPVLFINMADYSIDSSYVCSGLVGDTPRNDDRSSSSNCRDPNNERGAPGVKGWAFDSGNDIWMGRTIEKDSRSGYETFRVISGWSTANSKSQINRQVIVDRDNSSGYSGIFSVEGKSCINRCFYVELIRGRPKENRVWWTSNSIIVFCGTSGTYGTGSWPDGANINLMPI

SEQ ID NO: 23563 - protein, 469 aa, Artificial Sequence
  derived and/or modified protein sequence (wt) from neuraminidase__InfluenzaA__AGQ81779
MNPNQKIVAIGSASLTIATMCLLLQIALFATTMTLHFKQTGCTNSSDNQAVPCGPIIIERNITEIVHLNSTTLEKETCPKSAGYRNWSKPQCQITGFAPFSKDNSIRLAAAGDIWVTREPYVSCGLGKCYQFALGQGTTLDNKHSNGTTHDRTPHRTLLMNELGVPFHLATKQVCIAWSSSSCHDGKAWLHVCVTGDDKNATASIIYDGILVDSIASWSKNILRTQESECVCINGTCTVVMTDGSASGRADTRILFIREGKIVHISPLSGSAQHVEECSCYPRYPEIRCVCRDNWKGSNRPVLFINMADYSIDSSYVCSGLVGDTPRNDDRSSSSNCRDPNNERGAPGVKGWAFDSGNDIWMGRTIEKDSRSGYETFRVISGWSTANSKSQINRQVIVDRDNSSGYSGIFSVEGKSCINRCFYVELIRGRPKENRVWWTSNSIIVFCGTSGTYGTGSWPDGANINLMPI

SEQ ID NO: 23564 - protein, 469 aa, Artificial Sequence
  derived and/or modified protein sequence (wt) from neuraminidase__InfluenzaA__AGQ81780
MNPNQKIVAIGSASLTIATMCLLLQIALFATTMTLHFKQTGCTNSSDNQAVPCGPIIIERNITEIVHLNSTTLEKETCPKSAGYRNWSKPQCQITGFAPFSKDNSIRLAAAGDIWVTREPYVSCGLGKCYQFALGQGTTLDNKHSNGTTHDRTPHRTLLMNELGVPFHLATKQVCIAWSSSSCHDGKAWLHVCVTGDDKNATASIIYDGILVDSIASWSKNILRTQESECVCINGTCTVVMTDGSASGRADTRILFIREGKIVHISPLSGSAQHVEECSCYPRYPEVRCVCRDNWKGSNRPVLFINMADYSIDSSYVCSGLVGDTPRNDDRSSSSNCRDPNNERGASGVKGWAFDSGNDIWMGRTIEKDSRSGYETFRVISGWSTANSKSQINRQVIVDRDNSSGYSGIFSVEGKSCINRCFYVELIRGRPKENRVWWTSNSIIVFCGTSGTYGTGSWPDGANINLMPI

SEQ ID NO: 23565 - protein, 466 aa, Artificial Sequence
  derived and/or modified protein sequence (wt) from neuraminidase__InfluenzaA__AGQ81781
MNPNQKIIAIGSVSLTIAIICFLMQIAILTTTMTPHFRQNECSNPSNNQVVPCEPIIIERNTVHLNSTTIEKEICPKVAEYKNWSKPQCQITGFAPFSKDNSIRLSAGGDIWVTREPYVSCSLGKCYQFALGQGTTLKNKHSNGTTHDRIPHRTLLMNELGVPFHLGTKQVCIAWSSSSCHDGKAWLHICVTGDDKNATASIIYDGMLVDSIGSWSKNILRTQESECVCINGTCAVVMTDGSASGKADTRILFIREGKIINISPLSGSAQHVEECSCYPRYPEVRCVCRDNWKGSNRPVLYINMADYSIESSYVCSGLVGDTPRDDDSSSSSNCRDPNNERGAPGVKGWAFDDGNDIWMGRTIKSDSRSGYETFRVVNGWTTANSKSQINRQVIVDSDSWSGYSGIFSVEGKNCINRCFYVELIRGRPQETRVWWTSNSIIVFCGTSGTYGTGSWPDGADINLMPI

SEQ ID NO: 23566 - protein, 469 aa, Artificial Sequence
  derived and/or modified protein sequence (wt) from neuraminidase__InfluenzaA__AGQ81783
MNPNQKIVTIGSASLTIATMCLLLQIALFATTMTLHFKQTGCTNSSDNQAVPCGPIIIERNITEIVHLNSTTLEKETCPKSAGYRNWSKPQCQITGFAPFSKDNSIRLAAAGDIWVTREPYVSCGLGKCYQFALGQGTTLDNKHSNGTTHDRTPHRTLLMNELGVPFHLATKQVCIAWSSSSCHDGKAWLHVCVTGDDKNATASIIYNGILVDSIASWSKNILRTQESECVCINGTCTVVMTDGSASGRADTRILFIREGKIVHISPLSGSAQHVEECSCYPRYPEVRCVCRDNWKGSNRPVLFINMADYSIDSSYVCSGLVGDTPRNDDRSSSSNCRDPNNERGAPGVKGWAFDSGNDIWMGRTIEKDSRSGYETFRVISGWSTANSKSQINRQVIVDRDNSSGYSGIFSVEGKSCINRCFYVELIRGRPKENRVWWTSNSIIVFCGTSGTYGTGSWPDGANINLMPI

SEQ ID NO: 23567 - protein, 466 aa, Artificial Sequence
  derived and/or modified protein sequence (wt) from neuraminidase__InfluenzaA__AGQ81784
MNPNQKIIAIGSVSLTIAIICFLMQIAILTTTMTLHFRQNECSNPSNNQVVPCEPIIIERNTVHLNSTTIEKEICPKVAEYKNWSKPQCQITGFAPFSKDNSIRLSAGGDIWVTREPYVSCSLGKCYQFALGQGTTLRNKHSNGTTHDRIPHRTLLMNELGVPFHLGTKQVCIAWSSSSCHDGKAWLHICVTGDDKNATASIIYDGMLVDSIGSWSKNILRTQESECVCINGTCAVVMTDGNASGKADTRVLFIREGKIINISPLSGSAQHVEECSCYPRYPEVRCVCRDNWKGSNRPVLYINMADYSIESSYVCSGLVGDTPRDDDSSSSSNCRDPNNERGAPGVKGWAFDDGNDIWMGRTIKSDSRSGYETFRVVNGWTTANSKSQINRQVIVDSDSWSGYSGIFSVEGKNCINRCFYVELIRGRPQETRVWWTSNSIIVFCGTSGTYGTGSWPDGADINFMPI

SEQ ID NO: 23568 - protein, 466 aa, Artificial Sequence
  derived and/or modified protein sequence (wt) from neuraminidase__InfluenzaA__AGQ81785
MNPNQKIIAIGSVSLTIAIICFIMQIAILTTTMTPHFRQNECSNPSNNQVVPCEPIIIERNTVHLNSTTIEKEICPKVAEYKNWSKPQCQITGFAPFSKDNSIRLSAGGDIWVTREPYVSCSLGKCYQFALGQGTTLKNKHSNGTTHDRIPHRTLLMNELGVPFHLGTKQVCIAWSSSSCHDGKAWLHICVTGDDKNATASIIYDGMLVDSIGSWSKNILRTQESECVCINGTCAVVMTDGSASGKADTRILFIREGKIINISPLSGSAQHVEECSCYPRYPEVRCVCRDNWKGSNRPVLYINMADYSIESSYVCSGLVGDTPRDDDSSSSSNCRDPNNERGAPGVKGWAFDDGNDIWMGRTIKSDSRSGYETFRVVNGWTTANSKSQINRQVIVDSDSWSGYSGIFSVEGKNCINRCFYVELIRGRPQETRVWWTSNSIIVFCGTSGTYGTGSWPDGADINLMPI

SEQ ID NO: 23569 - protein, 466 aa, Artificial Sequence
  derived and/or modified protein sequence (wt) from neuraminidase__InfluenzaA__AGQ81787
MNPNQKIIAIGSVSLIIAIICLLMQIAILTTTMTLHFRQNECSNPSNNQVVPCEPIIIERNTVHLNSTTIEREICPKVAEYKNWSKPQCQITGFAPFSKDNSIRLSAGGDIWVTREPYVSCSLDKCYQFALGQGTTLKNKHSNGTTHDRTPHRTLLMNELGVPFHLGTKQVCIAWSSSSCYDGKAWLHICVTGDDKNATASIIYDGMLVDSIGSWSKNILRTQESECVCINGTCAVVMTDGSASGKADTRVLFIREGKIINISPLSGSAQHVEECSCYPRYPEVRCVCRDNWKGSNRPILYINMADYSIESSYVCSGLVGDTPRNDDSSSSSNCRDPNNERGAPGVKGWAFDDGNDVWMGRTIKNGSRSGYETFRVVNGWTMANSKSQINRQVIVDSDDWSGYSGIFSVEGKKCINRCFYVELIRGRPQEPRVWWTSNSIIVFCGTSGTYGTGSWPDGANINFMPI

SEQ ID NO: 23570 - protein, 466 aa, Artificial Sequence
  derived and/or modified protein sequence (wt) from neuraminidase__InfluenzaA__AGQ81789
MNPNQKIIAIGSVSLTIAIICLLMQIAILTTTMTPHFRQNECSNPSNNQVVPCEPIIIERNTVHLNSTTIEKEICPKVAEYKNWSKPQCQITGFAPFSKDNSIRLSAGGDIWVTREPYVSCSLGKCYQFALGQGTTLKNKHSNGTTHDRIPHRTLLMNELGVPFHLGTKQVCIAWSSSSCHDGKAWLHICVTGDDKNATASIIYDGMLVDSIGSWSKNILRTQESECVCINGTCAVVMTDGSASGKADTRILFIREGKIINISPLSGSAQHVEECSCYPRYPEVRCVCRDNWKGSNRPVLYINMADYSIESSYVCSGLVGDTPRDDDSSSSSNCRDPNNERGAPGVKGWAFDDGNDIWMGRTIKSDSRSGYETFRVVNGWTTANSKSQINRQVIVDSDSWSGYSGIFSVEGKNCINRCFYVELIRGRPQETRVWWTSNSIIVFCGTSGTYGTGSWPDGADINLMPI

SEQ ID NO: 23571 - protein, 466 aa, Artificial Sequence
  derived and/or modified protein sequence (wt) from neuraminidase__InfluenzaA__AGQ81790
MNPNQKIIAIGSVSLIIAIICLLMQIAILTTTMTLHFRQNECSNPSNNQAMPCEPIIIERNTVHLNSTTIEREICPKVTEYKNWSKPQCQITGFAPFSKDNSIRLSAGGDIWVTREPYVSCSLDKCYQFALGQGTTLKNKHSNGTTHDRTPHRTLLMNELGVPFHLGTKQVCIAWSSSSCYDGKAWLHICVTGDDKNATASIIYDGMLVDSIGSWSKNILRTQESECVCINGTCAVVMTDGSASGRADTRVLFIREGKIINISPLSGNAQHVEECSCYPRYPEVRCVCRDNWKGSNRPILYINMADYSIESSYVCSGLVGDTPRNDDSSSSSNCRDPNNERGAPGVKGWAFDDGNDVWMGRTIKNGSRSGYETFRVVNGWTMANSKSQINRQVIVDSDEWSGYSGIFSVEGKKCINRCFYVELIRGRPQEPRVWWTSNSIIVFCGTSGTYGTGSWPDGANINFMPI

SEQ ID NO: 23572 - protein, 466 aa, Artificial Sequence
  derived and/or modified protein sequence (wt) from neuraminidase__InfluenzaA__AGQ81792
MNPNQKIIAIGSVSLIIAIICLLMQIAILTTTMTLHFRQNECSNPSNNQVMPCEPIIIERNTVHLNSTTIEREICPKVAEYKNWSKPQCQITGFAPFSKDNSIRLSAGGDIWVTREPYVSCSLNKCYQFALGQGTTLENKHSNGTTHDRTPHRTLLMNELGVPFHLGTKQVCMAWSSSSCYDGKAWLHICVTGDDKNATASVIYDGMLVDSIGSWSQNILRTQESECVCINGTCAVVMTDGSASGKADTRVLFIREGKIINISPLSGSAQHVEECSCYPRYPEVRCVCRDNWKGSNRPILYINMADYSIESSYVCSGLVGDTPRNDDSSSSSNCRDPNNERGAPGVKGWAFDDGNDVWMGRTIKNGSRSGYETFRVVNGWTMANSKSQINRQVIVDSDDWSGYSGIFSVEGKKCINRCFYVELIRGRPQEPRVWWTSNSIIVFCGTSGTYGTGSWPDGANINFMPI

SEQ ID NO: 23573 - protein, 466 aa, Artificial Sequence
  derived and/or modified protein sequence (wt) from neuraminidase__InfluenzaA__AGQ81793
MNPNQKIIAIGSVSLIIAIICLLMQIAILTTTMTLHFRQNECSNPSNNQVMPCEPIIIERNTVHLNSTTIEREICPKVAEYKNWSKPQCQITGFAPFSKDNSIRLSAGGDIWVTREPYVSCSLNKCYQFALGQGTTLENKHSNGTTHDRTPHRTLLMNELGVPFHLGTKQVCMAWSSSSCYDGKAWLHICVTGDDKNATASVIYDGMLVDSIGSWSKNILRTQESECVCINGTCAVVMTDGSASGKADTRVLFIREGKIINISPLSGSAQHVEECSCYPRYPEVRCVCRDNWKGSNRPILYINMADYSIESSYVCSGLVGDTPRNDDSSSSSNCRDPNNERGAPGVKGWAFDDGNDVWMGRTIKNGSRSGYETFRVVNGWTMANSKSQINRQVIVDSDDWSGYSGIFSVEGKKCINRCFYVELIRGRPQEPRVWWTSNSIIVFCGTSGTYGTGSWPDGANINFMPI

SEQ ID NO: 23574 - protein, 466 aa, Artificial Sequence; identical to SEQ ID NO: 23573
  derived and/or modified protein sequence (wt) from neuraminidase__InfluenzaA__AGQ81794

SEQ ID NO: 23575 - protein, 466 aa, Artificial Sequence
  derived and/or modified protein sequence (wt) from neuraminidase__InfluenzaA__AGQ81795
MNPNQKIIAIGSVSLIIAIICLLMQIAILTTTMTLHFRQNECNNPSNNQVMPCEPIIIERNTVHLNSTTIEREICPKVAEYKNWSKPQCQITGFAPFSKDNSIRLSAGGDIWVTREPYVSCSLDKCYQFALGQGTTLKNKHSNGTTHDRTPHRTLLMNELGVPFHLGTKQVCIAWSSSSCYDGKAWLHICVTGDDKNATASIIYDGMLVDSIGSWSKNILRTQESECVCINGTCAVVMTDGSASGKADTRVLFIREGKIINISPLSGSAQHVEECSCYPRYPEVRCVCRDNWKGSNRPILYINMADYSIESSYVCSGLVGDTPRNDDSSSSSNCRDPNNERGAPGVKGWAFDDGNDVWMGRTIKNGSRSGYETFRVVNGWTIANSKSQINRQIIVDSDDWSGYSGIFSVEGKKCINRCFYVELIRGRPQEPRVWWTSNSIIVFCGTSGTYGTGSWPDGANINFMPI

SEQ ID NO: 23576 - protein, 466 aa, Artificial Sequence
  derived and/or modified protein sequence (wt) from neuraminidase__InfluenzaA__AGQ81796
MNPNQKIIAIGSVSLIIAIICLLMQIAILTTTMTLHFRQNECSNPSNNQVMPCEPIIIERNTVHLNSTTIEREICPKVAEYKNWSKPQCQITGFAPFSKDNSIRLSAGGDIWVTREPYVSCSLDKCYQFALGQGTTLKNKHSNGTTHDRTPHRTLLMNELGVPFHLGTKQVCIAWSSSSCYDGKAWLHICVTGDDKNATASIIYDGMLVDSIGSWSKNILRTQESECVCINGTCAVVMTDGSASGKADTRVLFIREGKIINISPLSGSAQHVEECSCYPRYPEVRCVCRDNWKGSNRPILYINMADYSIESSYVCSGLVGDTPRNDDSSSSSNCRDPNNERGAPGVKGWAFDDGNDIWMGRTIKNGSRSGYETFRVVNGWTMANSKSQINRQVIVDSDDWSGYSGIFSVEGKKCINRCFYVELIRGRPQEPRVWWTSNSIIVFCGTSGTYGTGSWPDGANINFMPI

SEQ ID NO: 23577 - protein, 466 aa, Artificial Sequence
  derived and/or modified protein sequence (wt) from neuraminidase__InfluenzaA__AGQ81798
MNPNQKIISIGSVSLIIAIICLLMQIAILTTTMTLHFRQNECSNPSNNQVMPCEPIIIERNTVHLNSTTIEREICPKVAEYKNWSKPQCQITGFAPFSKDNSIRLSAGGDIWVTREPYVSCSLDKCYQFALGQGTTLKNKHSNGTTHDRTPHRTLLMNELGVPFHLGTKQVCIAWSSSSCYDGKAWLHICVTGDDKNATASIIYDGMLVDSIGSWSKNILRTQESECVCINGTCAVVMTDGSASGKADTRVLFIREGKIINISPLSGSAQHVEECSCYPRYPEVRCVCRDNWKGSNRPILYINMADYSIESSYVCSGLVGDTPRNDDSSSSSNCRDPNNERGAPGVKGWAFDDGNDVWMGRTIKNGSRSGYETFRVVNGWTMANSKSQINRQVIVDSDDWSGYSGIFSVEGKKCINRCFYVELIRGRPQEPRVWWTSNSIIVFCGTSGTYGTGSWPDGANINFMPI

SEQ ID NO: 23578 - protein, 466 aa, Artificial Sequence
  derived and/or modified protein sequence (wt) from neuraminidase__InfluenzaA__AGQ81799
MNPNQKIIAIGSVSLIIAIICLLMQIAILTTTMTLHFRQNECSNPSNNQVMPCEPIIIERNTVHLNSTTIEREICPKVAEYKNWSKPQCQITGFAPFSKDNSIRLSAGGDIWVTREPYVSCSLDKCYQFALGQGTTLKNKHSNGTTHDRTPHRTLLMNELGVPFHLGTKQVCIAWSSSSCYDGKAWLHICVTGDDKNATASIIYDGMLVDSIGSWSKNILRTQESECVCINGTCAVVMTDGSASGKADTRVLFIREGKIINISPLSGSAQHVEECSCYPRYPEVRCVCRDNWKGSNRPILYINMADYSIESSYVCSGLVGDTPRNDDSSSSSNCRDPNNERGAPGVKGWAFDDGNDVWMGRTIKNGSRSGYETFRVVNGWTMANSKSQINRQVIVDSDDWSGYSGIFSVEGKKCINRCFYVELIRGRPQEPRVWWTSNSIIVFCGTSGTYGTGSWPDGANINFMPI

SEQ ID NO: 23579 - protein, 466 aa, Artificial Sequence; identical to SEQ ID NO: 23578
  derived and/or modified protein sequence (wt) from neuraminidase__InfluenzaA__AGQ81800

SEQ ID NO: 23580 - protein, 466 aa, Artificial Sequence
  derived and/or modified protein sequence (wt) from neuraminidase__InfluenzaA__AGQ81801
MNPNQKIIAIGSVSLIIAIICLLMQIAILTTTMTLHFRQNECSNPSNNQVMPCEPIIIERNTVHLNSTTIEREICPKVAEYKNWSKPQCQITGFAPFSKDNSIRLSASGDIWVTREPYVSCSLDKCYQFALGQGTTLKNKHSNGTTHDRTPHRTLLMNELGVPFHLGTKQVCIAWSSSSCYDGKAWLHICVTGDDKNATASIIYDGMLVDSIGSWSKNILRTQESECVCINGTCAVVMTDGSASGKADTRVLFIREGKIINISPLSGSAQHVEECSCYPRYPEVRCVCRDNWKGSNRPILYINMADYSIESSYVCSGLVGDTPRNDDSSSSSNCRDPNNERGAPGVKGWAFDDGNDVWMGRTIKNGSRSGYETFRVVNGWTMANSKSQINRQVIVDSDDWSGYSGIFSVEGKKCINRCFYVELIRGRPQEPRVWWTSNSIIVFCGTSGTYGTGSWPDGANINFMPI

SEQ ID NO: 23581 - protein, 466 aa, Artificial Sequence
  derived and/or modified protein sequence (wt) from neuraminidase__InfluenzaA__AGQ81802
MNPNQKIIAIGSVSLIIAIICLLMQIALLTTTMTLHFRQNECSNPSNNQVMPCEPIIIERNTVHLNSTTIEREICPKVAEYKNWSKPQCQITGFAPFSKDNSIRLSAGGDIWVTREPYVSCSLDKCYQFALGQGTTLKNKHSNGTTHDRTPHRTLLMNELGVPFHLGTKQVCIAWSSSSCYDGKAWLHICVTGDDKNATASIIYNGMLVDSIGSWSKNILRTQESECVCINGTCAVVMTDGSASGKADTRVLFIREGEIINISPLSGSAQHVEECSCYPRYPEVRCVCRDNWKGSNRPILYINMADYSIESSYVCSGLVGDTPRNDDSSSSSNCRDPNNERGAPGVKGWAFDDGNDVWMGRTIKNGSRSGYETFRVVNGWTMANSKSQINRQVIVDSDDWSGYSGIFSVEGKKCINRCFYVELIRGRPQEPRVWWTSNSIIVFCGTSGTYGTGSWPDGANINFMPI

SEQ ID NO: 23582 - protein, 466 aa, Artificial Sequence
  derived and/or modified protein sequence (wt) from neuraminidase__InfluenzaA__AGQ81803
MNPNQKIIAIGSVSLIIAIICLLMQIAILTTTMTLHFRQNECSNPSNNQVMPCEPIIIERNTVHLNSTTIEREICPKVAEYKNWSKPQCQITGFAPFSKDNSIRLSASGDIWVTREPYVSCSLDKCYQFALGQGTTLKNEHSNGTTHDRTPHRTLLMNELGVPFHLGTKQVCIAWSSSSCYDGKAWLHICVTGDDKNATASIIYDGMLVDSIGSWSKNILRTQESECVCINGTCAVVMTDGSASGKADTRVLFIREGKIINISPLSGSAQHVEECSCYPRYPEVRCVCRDNWKGSNRPILYINMADYSIESSYVCSGLVGDTPRNDDSSSSSNCRDPNNERGAPGVKGWAFDDGNDVWMGRTIKNGSRSGYETFRVVNGWIMANSKSQINRQVIVDSDDWSGYSGIFSVEGKKCINRCFYVELIRGRPQEPRVWWTSNSIIVFCGTSGTYGTGSWPDGANINFMPI

SEQ ID NO: 23583 - protein, 469 aa, Artificial Sequence
  derived and/or modified protein sequence (wt) from neuraminidase__InfluenzaA__AGQ81804
MNPNQKMIAIGAVSLTIAIICLLMQTAILVTTMTLHFKHNECTNSSNNQAAPCGPIIIERNVTEVVHLNSTTLEKEICPKAAGYRNWSKPQCQITGFAPFSKDNSIRLSAGGDIWVTREPYVSCGLGKCYQFALGQGTTLDNSHSNGTSHDRTPHRTLLMNELGVPFHLMTKQVCIAWSSSSCHDGKAWLHVCVTGDDRNATASIIYGGILVDSIGSWSKNILRTQESECVCINGTCAVVMTDGSASGKADTRILFIREGKIVHISPLSGSAQHVEECSCYPQYPEVRCVCRDNWRGSNRPVLYINMADYSIDSGYVCSGLVGDTPRNDDVSSSSNCKDPNNERGAPGVKGWAFDNGNDIWMGRTIDKDSRSGYETFRVIDGWNTANSKSQTSRQVIVGSDNSSGYSGIFSVEGKSCINRCFYVELIRGRPKETRVWWTSNSIIVFCGTSGTYGTGSWPDGANINFMPI

SEQ ID NO: 23584 - protein, 466 aa, Artificial Sequence
  derived and/or modified protein sequence (wt) from neuraminidase__InfluenzaA__AGQ81805
MNPNQKIIAIGSVSLIIAIICLLMQIALLTTTMTLHFRQNECSNPSNNQVMPCEPIIIERNTVHLNSTTIEREICPKVAEYKNWSKPQCQITGFAPFSKDNSIRLSAGGDIWVTREPYVSCSLDKCYQFALGQGTTMKNKHSNGTTHDRTPHRTLLMNELGVPFHLGTKQVCIAWSSSSCYDGKAWLHICVTGDDKNATASIIYDGMLVDSIGSWSKNILRTQESECVCINGTCAVVMTDGSASGKADTRVLFIREGKIINISPLSGSAQHVEECSCYPRYPEVRCVCRDNWKGSNRPILYINMADYSIESSYVCSGLVGDTPRNDDSSSSSNCRGPNNERGAPGVKGWAFDDGNDVWMGRTIKNGSRSGYETFRVVNGWTMANSKSQINRQVIVDSDDWSGYSGIFSVEGKKCINRCFYVELIRGRPQEPRVWWTSNSIIVFCGTSGTYGTGSWPDGANINFMPI

SEQ ID NO: 23585 - protein, 466 aa, Artificial Sequence
  derived and/or modified protein sequence (wt) from neuraminidase__InfluenzaA__AGQ81807
MNPNQKITAIGSISLIIAIICLLMQIAILTTTMTLHFRQNECRNPSNNQVMPCEPVIIERNTVHLNSTTIEREICPKVAEYKNWSKPQCQITGFAPFSKDNSIRLSASGDIWVTREPYVSCSLNKCYQFALGQGTTLKNKHSNGTTHDRTPHRTLLMNELGVPFHLGTKQVCIAWSSSSCYDGKAWLHICVTGDDKNATASIIYDGMLVDSIGSWSKNILRTQESECVCINGTCAVVMTDGSASGKADTRVLFIKEGKIINISPLSGSAQHVEECSCYPRYPEVRCVCRDNWKGSNRPILYINMADYSIESSYVCSGLVGDTPRNDDSSSSSNCRDPNNERGAPGVKGWAFDDGNDVWMGRTIKNGSRSGYETFRVVNGWIMANSKSQINRQVIVDSDDWSGYSGIFSVEGKKCINRCFYVELIRGRPQEPRVWWTSNSIIVFCGTSGTYGTGSWPDGANINFMPI

SEQ ID NO: 23586 - protein, 466 aa, Artificial Sequence
  derived and/or modified protein sequence (wt) from neuraminidase__InfluenzaA__AGQ81808
MNPNQKIIAIGSVSLTIAIICFLMQIAILTTTMTLHFKQNECSNPSNNQVVPCEPILIERNTVHLNSTTIEKEVCPKVAEYKNWSKPQCQITGFAPFSKDNSIRLSAGGDIWVTREPYVSCSLGKCYQFALGQGTTLKNNHSNGTTHDRTPHRTLLMNELGVPFHLGTKQVCIAWSSSSCYDGKAWLHICVTGDDKNATASIIYDGMLVDSIGSWSKNILRTQESECVCINGTCAVVMTDGSASGKADTRILFIREGKIINISPLSGSAQHVEECSCYPRYPEVRCVCRDNWKGSNRPVLYINMADYSVESSYVCSGLVGDTPRNDDSSSSSNCRDPNNERGAPGVKGWAFDDGNDVWMGRTIRNNSRSGYETFRVVNGWTTANSKSQINRQIIVDSENWSGYSGIFSVEGKNCINRCFYVELIRGRPQEPRVWWTSNSIIVFCGTSGTYGTGSWPDGANINFMPI

SEQ ID NO: 23587 - protein, 466 aa, Artificial Sequence
  derived and/or modified protein sequence (wt) from neuraminidase__InfluenzaA__AGQ81809
MNPNQKITAIGSVSLIIAIICLLMQIAILTTTMTLHFRQNECSNPSNNQVMPCEPIIIERNTVHLNSTTIEREICPKVAEYKNWSKPQCQITGFAPFSKDNSIRLSAGGDIWVTREPYVSCSPDKCYQFALGQGTTLKNKHSNGTTHDRTPHRTLLMNELGVPFHLGTKQVCIAWSSSSCYDGKAWLHICVTGDDKNATASIIYDGMLVDSIGSWSKNILRTQESECVCINGTCAVVMTDGSASGEADTRILFIREGKIINISPLSGSAQHVEECSCYPRYPEVRCVCRDNWKGSNRPIIYINMVDYSIGSRYVCSGLVGDTPRNDDSTSSSNCRDPNNERGAPGVKGWAFDDGNDVWMGRTIKNGSRSGYETFRVINGWTMANSKSQINRQVIVDSDNWSGYSGIFSVEGKKCINRCFYVELIRGRPQEPRVWWTSNSIIVFCGTSGTYGTGSWPDGADINFMPI

SEQ ID NO: 23588 - protein, 466 aa, Artificial Sequence
  derived and/or modified protein sequence (wt) from neuraminidase__InfluenzaA__AGQ81810
MNPNQKILAIGSVSLTIAIICFLMQIAILTTTMTLHFKQNECSNPSNNQVVPCEPILIERNTVHLNSTTIEKEVCPKVAEYKNWSKPQCQITGFAPFSKDNSIRLSAGGDIWVTREPYVSCSLGKCYQFALGQGTTLKNNHSNGTTHDRTPHRTLLMNELGVPFHLGTKQVCIAWSSSSCYDGKAWLHICVTGDDKNATASIIYDGMLVDSIGSWSKNILRTQESECVCINGTCAVVMTDGSASGKADTRILFIREGKIINISPLSGSAQHVEECSCYPRYPEVRCVCRDNWKGSNRPVLYINMADYSIESSYVCSGLVGDTPRNDDSSSSSNCRDPNNERGAPGVKGWAFDDGNDVWMGRTIRNNSRSGYETFRVVNGWTTANSKSQINRQVIVDSENWSGYSGIFSVEGKNCINRCFYVELIRGRPQEPRVWWTSNSIIVFCGTSGTYGTGSWPDGANINFMPI

SEQ ID NO: 23589 - protein, 466 aa, Artificial Sequence
  derived and/or modified protein sequence (wt) from neuraminidase__InfluenzaA__AGQ81811
MNPNQKIIAIGSVSLTIAIICFLMQIAILTTTMTLHFKQNECSNPSNNQVVPCEPILIERNTVHLNSTTIEKEVCPKVAEYKNWSKPQCQITGFAPFSKDNSIRLSAGGDIWVTREPYVSCSLGKCYQFALGQGTTLKNKHSNGTTHDRTPHRTLLMNELGVPFHLGTKQVCIAWSSSSCYDGKAWLHICVTGDDKNATASIIYDGMLVDSIGSWSKNILRTQESECVCINGTCAVVMTDGSASGKADTRILFIREGKIVNISPLSGSAQHVEECSCYPRYPEVRCVCRDNWKGSNRPVLYINMADYSVESSYVCSGLVGDTPRNDDSFSSSNCRDPNNERGAPGVKGWAFDDGNDVWMGRTIRNDSRSGYETFRVVNGWTTANSKSQINRQVIVDSESWSGYSGIFSVEGKNCINRCFYVELIRGRPQEPRVWWTSNSIIVFCGTSGTYGTGSWPDGANINFMPI

SEQ ID NO: 23590 - protein, 469 aa, Artificial Sequence
  derived and/or modified protein sequence (wt) from neuraminidase__InfluenzaA__AGQ81812
MNPNQKIITIGSVSLTIATICFLMQIAILVTTITLHFKQNECSIPSNNQVVPCEPIIVERNITEIVYLNNTTIEKELCPKLTEYRDWSKPQCQITGFAPFSKDNSIRLSAGGDIWVTREPYVSCSPNKCYQFALGQGTTLDNKHSNGTIHDRIPHRTLLMNELGVPFHLGTKQVCIAWSSSSCHDGKAWLHVCVTGDDRNATASFIYDGMLVDSIGSWSQNILRTQESECVCINGTCTVVMTDGSASGRADTRILFIKEGKIVHVSPLSGSAQHIEECSCYPRYPDVRCVCRDNWKGSNRPIIDINVADYSIDSSYVCSGLVGDTPRNDDSSSNSNCKDPNNERGNPGVKGWAFDYGNDVWMGRTISKDSRSGYETFRVIGGWTTANSKSQVNRQVIVDNNNWSGYSGIFSVEGKSCINRCFYVELIRGRPQETRVWWTSNSIVVFCGTSGTYGTGSWPDGANINFMPI

SEQ ID NO: 23591 - protein, 466 aa, Artificial Sequence
  derived and/or modified protein sequence (wt) from neuraminidase__InfluenzaA__AGQ81814
MNPNQKIIAIGSVSLTIAIMCFLMQIAILTTTMTLHFKQNECSNPSNNQVVPCEPILIERNTVHLNSTTIEKEVCPKVAEYKNWSKPQCQITGFAPFSKDNSIRLSAGGDIWVTREPYVSCSLGKCYQFALGQGTTLKNNHSNGTTHDRTPHRTLLMNELGVPFHLGTKQVCIAWSSSSCYDGKAWLHICVTGDDKNATASIIYDGMLVDSIGSWSKNILRTQESECVCINGTCAVVMTDGSASGKADTRILFIREGKIINISPLSGSAQHVEECSCYPRYPEVRCVCRDNWKGSNRPVLYINMADYSVESSYVCSGLVGDTPRNDDSSSSSNCRDPNNERGAPGVKGWAFDDGNDVWMGRTIRNNSRSGYETFRVVNGWTTANSKSQINRQVIVDSENWSGYSGIFSVEGKNCINRCFYVELIRGRPQEPRVWWTSNSIIVFCGTSGTYGTGSWPDGANINFMPI

SEQ ID NO: 23592 - protein, 466 aa, Artificial Sequence
  derived and/or modified protein sequence (wt) from neuraminidase__InfluenzaA__AGQ81815
MNPNQKIIAIGSVSLTIAIICFLMQIAILTTTMTLHFKQNECSNPSNNQVVPCEPILIERNTVHLNSTTIEKEVCPKVAEYKNWSKPQCQITGFAPFSKDNSIRLSAGGDIWVTREPYVSCSLGKCYQFALGQGTTLKNKHSNGTTHDRTPHRTLLMNELGVPFHLGTKQVCIAWSSSSCYDGKAWLHICVTGDDKNATASIIYDGMLVDSIGSWSKNILRTQESECVCINGTCAVVMTDGSASGKADTRILFIREGKIINISPLSGSAQHVEECSCYPRYPEVRCVCRDNWKGSNRPVLYINMADYSVESSYVCSGLVGDTPRNDDSSSSSNCRDPNNERGTPGVKGWAFDDGNDVWMGRTIRNDSRSGYETFRVINGWTTANSKSQINRQVIVDSENWSGYSGIFSVEGKNCINRCFYVELIRGRPQEPRVWWTSNSIIVFCGTSGTYGTGSWPDGANINYMPI

SEQ ID NO: 23593 - protein, 466 aa, Artificial Sequence
  derived and/or modified protein sequence (wt) from neuraminidase__InfluenzaA__AGQ81816
MNPNQKIIAIGSVSLTIAIICFLMQIAILTTTMTLHFKQNGCSNPSNNQVVPCEPILIERNTVHLNSTTIEKEVCPKVAEYKNWSKPQCQITGFAPFSKDNSIRLSAGGDIWVTREPYVSCSLGKCYQFALGQGTTLKNKHSNGTTHDRTPHRTLLMNELGVPFHLGTKQVCIAWSSSSCYDGKAWLHICVTGDDKNATASIIYDGMLVDSIGSWSKNILRTQESECVCINGTCAVVMTDGSASGKADTRILFIREGKIINISPLSGSAQHVEECSCYPRYPEVRCVCRDNWKGSNRPVLYINMADYSVESSYVCSGLVGDTPRNDDSSSSSNCRDPNNERGTPGVKGWAFDDGNDVWMGRTIRNDSRSGYETFRVINGWTTANSKSQINRQVIVDSENWSGYSGIFSVEGKNCINRCFYVELIRGRPQEPRVWWTSNSIIVFCGTSGTYGTGSWPDGANINYMPI

SEQ ID NO: 23594 - protein, 466 aa, Artificial Sequence; identical to SEQ ID NO: 23592
  derived and/or modified protein sequence (wt) from neuraminidase__InfluenzaA__AGQ81817

SEQ ID NO: 23595 - protein, 466 aa, Artificial Sequence; identical to SEQ ID NO: 23592
  derived and/or modified protein sequence (wt) from neuraminidase__InfluenzaA__AGQ81818

SEQ ID NO: 23596 - protein, 466 aa, Artificial Sequence; identical to SEQ ID NO: 23592
  derived and/or modified protein sequence (wt) from neuraminidase__InfluenzaA__AGQ81819

SEQ ID NO: 23597 - protein, 466 aa, Artificial Sequence
  derived and/or modified protein sequence (wt) from neuraminidase__InfluenzaA__AGQ81820
MNPNQKIIAIGSVSLTIAIICFLMQIAILTTTMTLHFKQNECSNPSNNQVVPCEPILIERNTVHLNSTTIEKEVCPKVAEYKNWSKPQCQITGFAPFSKDNSIRLSAGGDIWVTREPYVSCSLGKCYQFALGQGTTLKNKHSNGTTHDRTPHRTLLMNELGVPFHLGTKQVCIAWSSSSCYDGKAWLHICVTGDDKNATASIIYDGMLVDSIGSWSKNILRTQESECVCINGTCAVVMTDGSASGKADTRILFIREGKIINISPLSGSAQHVEECSCYPRYPEVRCVCRDNWKGSNRPVLYINMADYSIESSYVCSGLVGDTPRNDDSSSSSNCRDPNNERGTPGVKGWAFDDGNDVWMGRTIRNDSRSGYETFRVINGWTTANSKSQINRQVIVDSENWSGYSGIFSVEGKNCINRCFYVELIRGRPQEPKVWWTSNSIIVFCGTSGTYGTGSWPDGANINFMPI

SEQ ID NO: 23598 - protein, 466 aa, Artificial Sequence
  derived and/or modified protein sequence (wt) from neuraminidase__InfluenzaA__AGQ81822
MNPNQKIIAIGSVSLTIAIICFLMQIAILTTTMTLHFKQNECSNPSNNQVVPCEPILIERNTVHLNSTTIEKKVCPKVAEYKNWSKPQCQITGFAPFSKDNSIRLSAGGDIWVTREPYVSCSLGKCYQFALGQGTTLKNKHSNGTTHDRTPHRTLLMNELGVPFHLGTKQVCIAWSSSSCYDGKAWLHICVTGDDKNATASIIYDGMLVDSIGSWSKNILRTQESECVCINGTCAVVMTDGSASGKADTRILFIREGKIINISPLSGSAQHVEECSCYPRYPEVRCVCRDNWKGSNRPVLYINMADYSVESSYVCSGLVGDTPRNDDSSSSSNCRDPNNERGTPGVKGWAFDDGNDVWMGRTIRNDSRSGYETFRVINGWTTANSKSQINRQVIVDSENWSGYSGIFSVEGKNCINRCFYVELIRGRPQEPRVWWTSNSIIVFCGTSGTYGTGSWPDGANINYMPI

SEQ ID NO: 23599 - protein, 466 aa, Artificial Sequence
  derived and/or modified protein sequence (wt) from neuraminidase__InfluenzaA__AGQ81823
MNPNQKIIAIGSVSLTIAIICFLMQIAILTTTMTLHFKQNECSNPSNNQVVPCEPILIERNTVHLNSTTIEKEVCPKVAEYKNWSKPQCQITGFAPFSKDNSIRLSAGGDIWVTREPYVSCSLGKCYQFALGQGTTLKNKHSNGTTHDRTPHRTLLMNELGVPFHLGTKQVCIAWSSSSCYDGKAWLHICVTGDDKNATASIIYDGMLVDSIGSWSKNILRTQESECVCINGTCAVVMTDGSASGKADTRILFIREGKIINISPLSGSAQHVEECSCYPRYPEVRCVCRDNWKGSNRPVLYINMADYSVESSYVCSGLVGDTPRNDDSSSSSNCRDPNNERGAPGVKGWAFDDGNDVWMGRTIRNDSRSGYETFRVVNGWTTANSKSQINRQVIVDSENWSGYSGIFSVEGKNCINRCFYVELIRGRPQEPRVWWTSNSIIVFCGTSGTYGTGSWPDGANINFMPI

SEQ ID NO: 23600 - protein, 466 aa, Artificial Sequence; identical to SEQ ID NO: 23599
  derived and/or modified protein sequence (wt) from neuraminidase__InfluenzaA__AGQ81824

SEQ ID NO: 23601 - protein, 466 aa, Artificial Sequence; identical to SEQ ID NO: 23599
  derived and/or modified protein sequence (wt) from neuraminidase__InfluenzaA__AGQ81825

SEQ ID NO: 23602 - protein, 466 aa, Artificial Sequence
  derived and/or modified protein sequence (wt) from neuraminidase__InfluenzaA__AGQ81831
MNPNQKILAIGSVSLTIAIICFLMQIAILTTTMTLHFKQNECSNPSNNQVVPCEPILIERNTVHLNSTTIEKEVCPKVAEYKNWSKPQCQITGFAPFSKDNSIRLSAGGDIWVTREPYVSCSLGKCYQFALGQGTTLKNKHSNGTTHDRTPHRTLLMNELGVPFHLGTKQVCIAWSSSSCYDGKAWLHICVTGDDKNATASIIYDGMLVDSIGSWSKNILRTQESECVCINGTCAVVMTDGSASGKADTRILFIREGKIVNISPLSGSAQHVEECSCYPRYPEVRCVCRDNWKGSNRPVLYINMADYSVESSYVCSGLVGDTPRNDDSFSSSNCRDPNNERGAPGVKGWAFDDGNDVWMGRTIRNDSRSGYETFRVVNGWTTANSKSQINRQVIVDSESWSGYSGIFSVEGKNCINRCFYVELIRGRPQEPRVWWTSNSIIVFCGTSGTYGTGSWPDGANINFMPI

SEQ ID NO: 23603 - protein, 466 aa, Artificial Sequence; identical to SEQ ID NO: 23592
  derived and/or modified protein sequence (wt) from neuraminidase__InfluenzaA__AGQ81837

SEQ ID NO: 23604 - protein, 466 aa, Artificial Sequence; identical to SEQ ID NO: 23592
  derived and/or modified protein sequence (wt) from neuraminidase__InfluenzaA__AGQ81838

SEQ ID NO: 23605 - protein, 466 aa, Artificial Sequence; identical to SEQ ID NO: 23599
  derived and/or modified protein sequence (wt) from neuraminidase__InfluenzaA__AGQ81839

SEQ ID NO: 23606 - protein, 466 aa, Artificial Sequence; identical to SEQ ID NO: 23599
  derived and/or modified protein sequence (wt) from neuraminidase__InfluenzaA__AGQ81840

SEQ ID NO: 23607 - protein, 466 aa, Artificial Sequence; identical to SEQ ID NO: 23592
  derived and/or modified protein sequence (wt) from neuraminidase__InfluenzaA__AGQ81841

SEQ ID NO: 23608 - protein, 469 aa, Artificial Sequence
  derived and/or modified protein sequence (wt) from neuraminidase__InfluenzaA__AGQ81843
MNPNQKIITIGVVNTTLSTIALLIGIGNLIFNTVIHEKIGVHQTVVYPTITPPVIPNCSDTTITYNNTVVNNITTTIINKAEKQFKPSLPLCPFRGFFPFHKDNAIRLGENKDVIVTREPYVSCDNDDCWSFALAQGALLGTKHSNGTIKDRTPYRSLIRFPIGTAPVLGNYKEICVAWSSSSCFDGKEWMHVCMTGNDNDASGQIIYAGKMTDSIKSWRRDILRTQESECQCIDGTCIVAVTDGPAASSADHRIYWIREGKIIKYEDIPKTKIQHLEECSCYVDTDVYCICRDNWKGSNRPWMRINNETILETGYVCSKFHSDTPRPADPSTVSCDSPSNINGGPGVKGFGFRAGNDVWLGRTVSTTGRSGFEVIKVTEGWINSLNHAKSVTQTLVSNNDWSGYSGSFIVENNGCFQPCFYIELIRGRPNRNDDVSWTSNSIVTFCGLDNEPGSGNWPDGSNIGFMPK

SEQ ID NO: 23609 - protein, 469 aa, Artificial Sequence
  derived and/or modified protein sequence (wt) from neuraminidase__InfluenzaA__AGQ81845
MNPNQKIITIGVVNTTLSTIALLIGIGNLIFNTVIHEKIGVHQTVIYPTITSPVVPNCSDTTITYNNTVVNNITTTVINKAEKHFKPSLPLCPFKGFFPFHKDNAIRLGENKDVIVTREPYVSCDNDDCWSFALAQGALLGTKHSNGTIKDRTPYRSLIRFPIGTAPVLGNYKEICVAWSSSSCFDGKEWMHVCMTGNDNDASGQIIYAGKMTDSIKSWRRDILRTQESECQCIDGTCIVAVTDGPAANSADHRIYWIREGKIIKYENIPKTKIQHLEECSCYVDTDVYCICRDNWKGSNRPWMRINNETILETGYVCSKFHSDTPRPADPSTVSCDSPSNINGGPGVKGFGFRTGNDVWLGRTVSTTGRSGFEVIKVTEGWINSLNHAKSVTQTLVSNSDWSGYSGSFIVENNGCFQPCFYIELIRGRPNKNDDVSWTSNSIVTFCGLDNEPGSGNWPDGSNIGFMPK

SEQ ID NO: 23610 - protein, 469 aa, Artificial Sequence; identical to SEQ ID NO: 23609
  derived and/or modified protein sequence (wt) from neuraminidase__InfluenzaA__AGQ81846

SEQ ID NO: 23611 - protein, 469 aa, Artificial Sequence; identical to SEQ ID NO: 23609
  derived and/or modified protein sequence (wt) from neuraminidase__InfluenzaA__AGQ81847

SEQ ID NO: 23612 - protein, 469 aa, Artificial Sequence
  derived and/or modified protein sequence (wt) from neuraminidase__InfluenzaA__AGQ81848
MNPNQKIITIGVVNTTLSTIALLIGIGNLIFNTVIHEKIGVHQTVIYPTITSPVVPNCSDTTITYNNTVVNNITTTVINKAEKHFKPSLPLCPFKGFFPFHKDNAIRLGENKDVIVTREPYVSCDNDDCWSFALAQGALLGTKHSNGTIKDRTPYRSLIRFPIGTAPVLGNYKEICVAWSSSSCFDGKEWMHVCMTGNDNDASGQIIYAGKMTDSIKSWRRDILRTQESECQCIDGICIVAVTDGPAANSADHRIYWIREGKIIKYENIPKTKIQHLEECSCYVDTDVYCICRDNWKGSNRPWMRINNETILETGYVCSKFHSDTPRPADPSTVSCDSPSNINGGPGVKGFGFRTGNDVWLGRTVSTTGRSGFEVIKVTEGWINSLNHAKSVTQTLVSNSDWSGYSGSFIVENNGCFQPCFYIELIRGRPNKNDDVSWTSNSIVTFCGLDNEPGSGNWPDGSNIGFMPK

SEQ ID NO: 23613 - protein, 469 aa, Artificial Sequence
  derived and/or modified protein sequence (wt) from neuraminidase__InfluenzaA__AGQ81850
MNPNQKIITIGVVNTTLSTIALLIGIGNLIFNTVIHEKIGVHQTVIYPTITSPVVPNCSDTTITYNNTVVNNITTTVINKAEKHFKPSLPLCPFKGFFPFHKDNAIRLGENKDVIVTREPYVSCDNDDCWSFALAQGALLGTKHSNGTIKDRTPYRSLIRFPIGTAPVLGNYKEICVAWSSSSCFDGKEWMHVCMTGNDNDATGQIIYAGKMTDSIKSWRRDILRTQESECQCIDGTCIVAVTDGPAANSADHRIYWIREGKIIKYENIPKTKIQHLEECSCYVDTDVYCICRDNWKGSNRPWMRINNETILETGYVCSKFHSDTPRPADPSTVSCDSPSNINGGPGVKGFGFRTGNDVWLGRTVSTTGRSGFEVIKVTEGWINSLNHAKSVTQTLVSNSDWSGYSGSFIVENNGCFQPCFYIELIRGRPNKNDDVSWTSNSIVTFCGLDNEPGSGNWPDGSNIGFMPK

SEQ ID NO: 23614 - protein, 469 aa, Artificial Sequence
  derived and/or modified protein sequence (wt) from neuraminidase__InfluenzaA__AGQ81852
MNPNQKIITIGVVNTTLSTIALLIGIGNLIFNTVIHEKIGVHQTVTYPTITSPVVPNCSDTTITYNNTVVNNITTTVINKAEKHFKPSLPLCPFKGFFPFHKDNAIRLGENKDVIVTREPYVSCDNDDCWSFALAQGALLGTKHSNGTIKDRTPYRSLIRFPIGTAPVLGNYKEICVAWSSSSCFDGKEWMHVCMTGNDNDATGQIIYAGKMTDSIKSWRRDILRTQESECQCIDGTCIVAVTDGPAANSADHRIYWIREGKIIKYENIPKTKIQHLEECSCYVDTDVYCICRDNWKGSNRPWMRINNETILETGYVCSKFHSDTPRPADPSTVSCDSPSNINGGPGVKGFGFRTGNDVWLGRTVSTTGRSGFEVIKVTEGWINSLNHAKSVTQTLVSNSDWSGYSGSFIVENNGCFQPCFYIELIRGRPNRNDDVSWTSNSIVTFCGLDNEPGSGNWPDGSNIGFMPK

SEQ ID NO: 23615 - protein, 469 aa, Artificial Sequence
  derived and/or modified protein sequence (wt) from neuraminidase__InfluenzaA__AGQ81853
MNPNQKIITIGVVNTTLSTIALLIGIGNLIFNTVIHEKIGVHQTVTYPTITSPVVPNCSDTTITYNNTVVNNITTTVINKAEKHFKPSLPLCPFKGFFPFHKDNAIRLGENKDVIVTREPYVSCDNDDCWSFALAQGALLGTKHSNGTIKDRTPYRSLIRFPIGTAPVLGNYKEICVAWSSSSCFDGKEWMHVCMTGNDNDATGQIIYAGKMTDSIKSWRRDILRTQESECQCIDGTCIVAVTDGPAANSADHRIYWIREGKIIKYENIPKTKIQHLEECSCYVDTDVYCICRDNWKGSNRPWMRINNETILETGYVCSKFHSDTPRPADPSTVSCDSPSNINGGPGVKGFGFRTGNDVWLGRTVSTTGRSGFEVIKVTEGWINSLNHAKSVTQTLVSNSDWSGYSGSFIVENNGCFQPCFYIELIRGRPNKNDDVSWTSNSIVTFCGLDNEPGSGNWPDGSNIGFMPK

SEQ ID NO: 23616 - protein, 469 aa, Artificial Sequence; identical to SEQ ID NO: 23615
  derived and/or modified protein sequence (wt) from neuraminidase__InfluenzaA__AGQ81854

SEQ ID NO: 23617 - protein, 469 aa, Artificial Sequence; identical to SEQ ID NO: 23615
  derived and/or modified protein sequence (wt) from neuraminidase__InfluenzaA__AGQ81855

SEQ ID NO: 23618 - protein, 469 aa, Artificial Sequence; identical to SEQ ID NO: 23608
  derived and/or modified protein sequence (wt) from neuraminidase__InfluenzaA__AGQ81856

SEQ ID NO: 23619 - protein, 469 aa, Artificial Sequence
  derived and/or modified protein sequence (wt) from neuraminidase__InfluenzaA__AGQ81857
MNPNQKIITIGVVNTTLSTIALLIGIGNLIFNTVIHEKIGVHQTVVYPTITPPVIPNCSDTTITYNNTVVNNITTTIINKAEKQFKPSLPLCPFRGFFPFHKDNAIRLGENKDVIVTREPYVSCDNDDCWSFALAQGALLGTKHSNGTIKDRTPYRSLIRFPIGTAPVLGNYKEICVAWSSSSCFDGKEWMHVCMTGNDNDASGQIIYAGKMTDSIKSWRRDILRTQESECQCIDGTCIVAVTDGPAASSADHRIYWIREGKIIKYEDIPKTKIQHLEECSCYVDTDVYCICRDNWKGSNRPWMRINNETILETGYVCSKFHSDTPRPADPSTVSCDSPSNINGGPGVKGFGFRAGNDVWLGRTVSTTGRSGFEVIKVTEGWINSLNHAKSVTQTLVSNNDWSGYSGSFIVESNGCFQPCFYIELIRGRPNRNDDVSWTSNSIVTFCGLDNEPGSGNWPDGSNIGFMPK

SEQ ID NO: 23620 - protein, 469 aa, Artificial Sequence
  derived and/or modified protein sequence (wt) from neuraminidase__InfluenzaA__AGQ81858
MNPNQKIITIGVVNTTLSTIALLIGVGNLIFNTVIHEKIGDHQIVVYPTTTASVVPNCSDTIITYNNTVVNNITTTIITKEETHFKSSLPLCPFRGFFPFHKDNAIRLGENKDVIVTREPYVSCDNDDCWSFALAQGALLGTKHSNGTIKDRTPYRSLIRFPIGTAPVLGNYKEICVAWSSSSCFDGKEWMHVCMTGNDNDASGQIMYAGKMTDSIKSWRKDILRTQESECQCIDGTCIVAVTDGPATNSADHRIYWIREGKIIKYENIPKTKIQHLEECSCYVDIDVYCVCRDNWKGSNRPWMRINNETILETGYVCSKFHSDTPRPADPSTVSCDSPSNVNGGPGVKGFGFKTGNDVWLGRTVSTSGRSGFEIIKVTEGWINSPNHAKSVTQTLVSNNDWSGYSGSFIVENNGCFQPCFYIELIRGRPNKNDDVSWTSNSIVTFCGLDNEPGSGNWPDGSNIGFMPK

SEQ ID NO: 23621 - protein, 469 aa, Artificial Sequence
  derived and/or modified protein sequence (wt) from neuraminidase__InfluenzaA__AGQ81859
MNPNQKIITIGVVNTTLSTIALLIGIGNLIFNTVIHEKIGVHQTVVCPTITPPVVPNCSDTTITYNNTVVNNITTTIINKAEKQFKSSLPLCPFRGFFPFHKDNAIRLGENKDVIVTREPYVSCDNDDCWSFALAQGALLGTKHSNGTIKDRTPYRSLIRFPIGTAPVLGNYKEICVAWSSSSCFDGKEWMHICMTGNDNDASGQIIYAGKMTDSIKSWRRDILRTQESECQCIDGTCIVAITDGPAASSADHRIYWIREGKIIKYENIPKTKIQHLEECSCYVDIDVYCICRDNWKGSNRPWMRINNETILETGYVCSKFHSDTPRPADPSTVSCDSPSNINGGPGVKGFGFRAGNDVWLGRTVSTTGRSGFEVIKVTEGWINSLNHAKSVTQTLVSNSDWSGYSGSFIVENNGCFQPCFYIELIRGRPNRNDDVSWTSNSIVTFCGLDNEPGSGNWPDGSNIGFMPK

SEQ ID NO: 23622 - protein, 470 aa, Artificial Sequence
  derived and/or modified protein sequence (wt) from neuraminidase__InfluenzaA__AGQ81860
MNPNQKIICISATGMTLSVVSLLIGIANLGLNIGLHYKVGDTPDVSIPNMNETNSTTTIINNNTQNNFTNITNIIVNKNEEKTFLNLTKPLCEVNSWHILSKDNAIRIGEDAHILVTREPYLSCDPQGCRMFALSQGTTLRGRHANGTIHDRSPFRALVSWEMGQAPSPYNVKVECVGWSSTSCHDGISRMSICMSGPNNNASAVVWYGGRPVTEIPSWAGNILRTQESECVCHKGICPVVMTDGPANNRAATKIIYFKEGKIQKIEELAGSAQHIEECSCYGAVEVIKCICRDNWKGANRPVITINPEMMTHTSKYLCSKVLTDTSRPNDPTNGNCDAPITGGSPDPGVKGFAFLDGENSWLGRTISKDSRSGYEMLKVPNAETDTQSGPTSHQVIVNNQNWSGYSGAFIDYWANKECFNPCFYVELIRGRPKESSVLWTSNSIVALCGSKERLGSWSWHDGAEIIYFK

SEQ ID NO: 23623 - protein, 470 aa, Artificial Sequence
  derived and/or modified protein sequence (wt) from neuraminidase__InfluenzaA__AGQ81861
MNPNQKIICISATGMTLSVVSLLIGIANLGLNIGLHYKVGDTPDVSIPNMNETNSTTTIINNNTQNNFTNTTNIIVNKNEEKTFLNLTKPLCEVNSWHILSKDNAIRIGEDAHILVTREPYLSCDPQGCRMFALSQGTTLRGRHANGTIHDRSPFRALVSWEMGQAPSPYNVKVECVGWSSTSCHDGISRMSICMSGPNNNASAVVWYGGRPVTEIPSWAGNILRTQESECVCHKGICPVVMTDGPANNRAATKIIYFKEGKIQKIEELAGSAQHIEECSCYGAVEVIKCICRDNWKGANRPVITINPEMMTHTSKYLCSKVLTDTSRPNDPTNGNCDAPITGGSPDPGVKGFAFLDGENSWLGRTISKDSRSGYEMLKVPNAETDTQSGPTSHQVIVNNQNWSGYSGAFIDYWANKECFNPCFYVELIRGRPKESSVLWTSNSIVALCGSKERLGSWSWHDGAEIIYFK

SEQ ID NO: 23624 - protein, 470 aa, Artificial Sequence
  derived and/or modified protein sequence (wt) from neuraminidase__InfluenzaA__AGQ81862
MNPNQKIICISATGMTLSVVSLLIGIANLGLNIGLHYKVGDTPDVNIPSMNETNSTTTIINNNTQNNFTNITNIIVNKEEGRTFLNLTKPLCEVNSWHILSKDNAIRIGEDAHILVTREPYLSCDPQGCRMFALSQGTTLRGRHANGTIHDRSPFRALVSWEMGQAPSPYNVRVECIGWSSTSCHDGISRMSICMSGPNNNASAVVWYGGRPVTEIPSWAGNILRTQESECVCHKGICPVVMTDGPANNRAATKIIYFKEGKIQKIEELEGNAQHIEECSCYGAAGVIKCICRDNWKGANRPVIIIDPEMMTHTSKYLCSRVLTDTSRPNDPTSGNCDAPITGGSPDPGVKGFAFLDGENSWLGRTISKDSRSGYEMLKVPNAETDTQSGPTSHQVIVNNQNWSGYSGAFIDYWANKECFNPCFYVELIRGRPKESSVLWTSNSIVALCGSKERLGSWSWHDGAEIIYFK

SEQ ID NO: 23625 - protein, 470 aa, Artificial Sequence
  derived and/or modified protein sequence (wt) from neuraminidase__InfluenzaA__AGQ81863
MNPNQKIICISATGMTLSVVSLLIGIANLGLNIGLHYKVGDTPDVNIPSMNETNSTTTIINNNTQNNFTNITNIIVNKEEERTFLNLTKPLCEVNSWHILSKDNAIRIGEDAHILVTREPYLSCDPQGCRMFALSQGTTLRGRHANGTIHDRSPFRALVSWEMGQAPSPYNVRVECIGWSSTSCHDGISRMSICMSGPNNNASAVVWYGGRPVTEIPSWAGNILRTQESECVCHKGICPVVMTDGPANNRAATKIIYFKEGKIQKIEELEGNAQHIEECSCYGAAGVIKCICRDNWKGANRPVIIIDPEMMTHTSKYLCSRVLTDTSRPNDPISGNCDAPITGGSPDPGVKGFAFLDGENSWLGRTISKDSRSGYEMLKVPNAETDTQSGPTSHQVIVNNQNWSGYSGAFIDYWANKECFNPCFYVELIRGRPKESSVLWTSNSIVALCGSKERLGSWSWHDGAEIIYFK

SEQ ID NO: 23626 - protein, 471 aa, Artificial Sequence
  derived and/or modified protein sequence (wt) from neuraminidase__InfluenzaA__AGQ81864
MNPNQKLFALSGVAIALSVLNLLIGISNVGLNVSLHLKEKGPKQEENSTCTTINQNNTTIVENTYVNNTTIISKETELKPPNYLLLNKSLCNVEGWVVIAKDNAVRFGESEQIIVTREPYVSCDPTGCKMYALHQGTTIRNKHSNGTIHDRTAFRGLISTPLGTPPTVSNSDFICVGWSSTTCHDGIGRMTICIQGNNDNATATVYYNRRLTTTIKTWARNILRTQESECVCHNGTCAVVMTDGSASSQAYTKVMYFHKGLVIKEEALKGSARHIEECSCYGHSQKATCVCRDNWQGANRPIIEIDMNTLEHTSRYVCTGILTDTSRPGDKSSGDCSNPITGSPGAPGVKGFGFLNGDNTWLGRTISPKSRSGFEMLKIPNAGTDPNSRIAERQEIVDNNNWSGYSGSFIDYWDNDSECYNPCFYVELIRGRPEEAKYVWWTSNSLIALCGSPFPVGSGSFPDGAQIQYFS

SEQ ID NO: 23627 - protein, 471 aa, Artificial Sequence
  derived and/or modified protein sequence (wt) from neuraminidase__InfluenzaA__AGQ81865
MNPNQKLFALSGVAIALSVLNLLIGLSNVGLNVSLHLKETGPKQEGNLTCMTINQNNTTVVENTYVNNTTIITKETESETPNYLLLNKSLCNVEGWVVIAKDNAVRFGESEQIIVTREPYVSCDPNGCKMYALHQGTTIRNKHSNGTIHDRTAFRGLISTPLGTPPTVSNSDFICVGWSSTTCHDGIGRMTICIQGNNDNATATVYYNRRLTTTIKTWARNILRTQESECVCHNGTCAVVMTDGSASSQAHTKVMYFHKGLVVKEEALKGSARHIEECSCYGHNQKVTCVCRDNWQGANRPIIEIDMNTLEHTSRYVCTGILTDTSRPGDKPTGDCSNPITGSPGAPGVKGFGFLNGGNTWLGRTISPRSRSGFEMLKIPNAGTDPNSRIAERQEIVDNSNWSGYSGSFIDYWNDNSECYNPCFYVELIRGRPEEAKYVWWTSNSLIALCGSPFPVGSGSFPDGAQIQYFS

SEQ ID NO: 23628 - protein, 471 aa, Artificial Sequence
  derived and/or modified protein sequence (wt) from neuraminidase__InfluenzaA__AGQ81868
MNPNQKLFALSGVAIALSVLNLLIGISNVGLNVSLHLKEKGPKQEENSTCTTINQNNTTVVENTYVNNTTIITKETELKTPSYLLLNKSLCNVEGWVVIAKDNAVRFGESEQIIVTREPYVSCDPTGCKMYALHQGTTIRNKHSNGTIHDRTAFRGLISTSLGTPPTISNSDFMCVGWSSTTCHDGIGRMTICIQGNNDNATATVYYNRRLTTTIKTWARNILRTQESECVCHNGICAVVMTDGSASSQAYTKVMYFHKGLVVKEEALKGSARHIEECSCYGHSQKVTCVCRDNWQGANRPIIEIDMNTLEHTSRYVCTGILTDTSRPGDKSSGDCSNPIAGSPGAPGVKGFGFLNGDNTWLGRTISPRSRSGFEMLKIPNAGTDPNSRIAGRQEIVDNNNWSGYSGSFIDYWNDNSECYNPCFYVELIRGRPEEAKYVWWTSNSLIALCGSPFPVGSGSFPDGAQIQYFS

SEQ ID NO: 23629 - protein, 471 aa, Artificial Sequence
  derived and/or modified protein sequence (wt) from neuraminidase__InfluenzaA__AGQ81869
MNPNQKLFALSGVAIALSVLNLLIGISNVGLNVSLHLKEKGPKQEENSTCTTINQNNTTIVENTYVNNTTIISKETELKTPSYLLLNKSLCNVEGWVVIAKDNAVRFGESEQIIVTREPYVSCDPTGCKMYALHQGTTIRNKHSNGTIHDRTAFRGLISTPLGTPPTVSNSDFICVGWSSTTCHDGIGRMTICIQGNNDNATATVYYNRRLTTTIRTWARNILRTQESECVCHNGTCAVVMTDGSASSQAYTKVMYFHKGLVIKEEALKGSARHIEECSCYGHSQKATCVCRDNWQGANRPIIEIDMNTLEHTSRYVCTGILTDTSRPGDKSSGDCSNPITGSPGAPGVKGFGFLNGDNTWLGRTISPRSRSGFEMLKIPNAGTDPNSRIAERQEIVDNNNWSGYSGSFIDYWNNDSECYNPCFYVELIRGRPEEAKYVWWTSNSLIALCGSPFPVGSGSFPDGAQIQYFS

SEQ ID NO: 23630 - protein, 471 aa, Artificial Sequence
  derived and/or modified protein sequence (wt) from neuraminidase__InfluenzaA__AGQ81870
MNPNQKLFALSGVAIALSVLNLLIGISNVGLNVSLHLKEKGPKQEENSTCTTINQNNTTIVENTYVNNTTIISKETELKPPSYLLLNKSLCNVEGWVVIAKDNAVRFGESEQIIVTREPYVSCDPTGCKMYALHQGTTIRNKHSNGTIHDRTAFRGLISTPLGTPPTVSNSDFICVGWSSTTCHDGIGRMTICIQGNNDNATATVYYNRRLTTTIRTWARNILRTQESECVCHNGTCAVVMTDGSASSQAYTKVMYFHKGLVIKEEALKGSARHIEECSCYGHSQKATCVCRDNWQGANRPIIEIDMNTLEHTSRYVCTGILTDTSRPGDKSSGDCSNPITGSPGAPGVKGFGFLNGDNTWLGRTISPRSRSGFEMLKIPNAGTDPNSRIAERQEIVDNNNWSGYSGSFIDYWNNDSECYNPCFYVELIRGRPEEAKYVWWTSNSLIALCGSPFPVGSGSFPDGAQIQYFS

SEQ ID NO: 23631 - protein, 471 aa, Artificial Sequence
  derived and/or modified protein sequence (wt) from neuraminidase__InfluenzaA__AGQ81871
MNPNQKLFALSGVAIALSVLNLLIGISNVGLNVSLHLKEKGPKQEENSTCTTINQNNTTIVENTYVNNTTIISKETELKTPSYLLLNKSLCNVEGWVVIAKDNAVRFGESEQIIVTREPYVSCDPTGCKMYALHQGTTIRNKHSNGTIHDRTAFRGLISTPLGTPPTVSNSDFICIGWSSTTCHDGIGRMTICIQGNNDNATATVYYNRRLTTTIRTWARNILRTQESECVCHNGTCAVVMTDGSASSQAYTKVMYFHKGLVIKEEALKGSARHIEECSCYGHSQKATCVCRDNWQGANRPIIEIDMNTLEHTSRYVCTGILTDTSRPGDKSSGDCSNPITGSPGAPGVKGFGFLNGDNTWLGRTISPRSRSGFEMLKIPNAGTDPNSRIAERQEIVDNNNWSGYSGSFIDYWNNDSECYNPCFYVELIRGRPEEAKYVWWTSNSLIALCGSPFPVGSGSFPDGAQIQYFS

SEQ ID NO: 23632 - protein, 471 aa, Artificial Sequence
  derived and/or modified protein sequence (wt) from neuraminidase__InfluenzaA__AGQ81872
MNPNQKLFALSGVAIALSVLNLLIGISNVGLNVSLHLKEKGPKQEENSTCTTINQNNTTIVENTYVNNTTIISKETELKTPSYLLLNKSLCNVEGWVVIAKDNAVRFGESEQIIVTREPYVSCDPTGCKMYALHQGTTIRNKHSNGTIHDRTAFRGLISTPLGTPPSVSNSDFICVGWSSTTCHDGIGRMTICIQGNNDNATATVYYNRRLTTTIRTWARNILRTQESECVCHNGTCAVVMTDGSASSQAYTKVMYFHKGLVIKEEALKGSARHIEECSCYGHSQKATCVCRDNWQGANRPIIEIDMNTLEHTSRYVCTGILTDTSRPGDKSSGDCSNPITGSPGAPGVKGFGFLNGDNTWLGRTISPRSRSGFEMLKIPNAGTDPNSRIAERQEIVDNNNWSGYSGSFIDYWNNDSECYNPCFYVELIRGRPEEAKYVWWTSNSLIALCGSPFPVGSGSFPDGAQIQYFS

SEQ ID NO: 23633 - protein, 471 aa, Artificial Sequence
  derived and/or modified protein sequence (wt) from neuraminidase__InfluenzaA__AGQ81875
MNPNQKLFALSGVAIALSVLNLLIGISNVGLNVSLHLKEKGPKQEENSTCMTINQNNTTVVENTYVNNTTIITKETELETPSYLLLNKGLCNVEGWVVIAKDNAVRFGETEQIIVTREPYVSCDPNGCKMYALHQGTTIRNKHSNGTIHDRTAFRGLISTPLGTPPTVSNSDFICVGWSSTTCHDGIGRMTICIQGNNDNATATVYYNRRLTTTIKTWARNILRTQESECVCHNGTCAVVMTDGSASSQAHTKVIYFHKGLIVKEEALKGSARHIEECSCYGHSQKVTCVCRDNWQGANRPIIEIDMNTLEHTSRYVCTGILTDTSRPGDKSTGDCSNPITGSPGAPGVKGFGYLNGDNTWLGRTISPRSRSGFEMLKIPNAGTDPNSRITERQEIVDNNNWSGYSGSFVDYWNDNSECYNPCFYVELIRGRPEEAKYVWWTSNSIIALCGSPFPVGSGSFPDGAQIQYFS

SEQ ID NO: 23634 - protein, 471 aa, Artificial Sequence
  derived and/or modified protein sequence (wt) from neuraminidase__InfluenzaA__AGQ81876
MNPNQKLFALSGVAIALSVLNLLIGISNVGLNVSLHLKEKGPKQEENSTCMTINQNNTTVVENTYVNNTTIITKETELETPSYLLLNKGLCNVEGWVVIAKDNAVRFGETEQIIVTREPYVSCDPNGCKMYALHQGTTIRNKHSNGTIHDRTAFRGLISTPLGTPPTVSNSDFICVGWSSTTCHDGIGRMTICIQGDNDNATATVYYNRRLTTTIKTWARNILRTQESECVCHNGTCAVVMTDGSASSQAHTKVIYFHKGLIVKEEALKGSARHIEECSCYGHSQKVTCVCRDNWQGANRPIIEIDMNTLEHTSRYVCTGILTDTSRPGDKSTGDCSNPITGSPGAPGVKGFGYLNGDNTWLGRTISPRSRSGFEMLKIPNAGTDPNSRITERQEIVDNNNWSGYSGSFVDYWNDNSECYNPCFYVELIRGRPEEAKYVWWTSNSIIALCGSPFPVGSGSFPDGAQIQYFS

SEQ ID NO: 23635 - protein, 471 aa, Artificial Sequence
  derived and/or modified protein sequence (wt) from neuraminidase__InfluenzaA__AGQ81877
MNPNQKLFALSGVAIALSVLNLLIGISNVGLNVSLHLKEKGPKQEENSTCTTINQNNTTVVENTYVNNTTIITKETELKTPSYLLLNKSLCNVEGWVVIAKDNAVRFGESEQIIVTREPYVSCDPTGCKMYALHQGTTIRNKHSNGTIHDRTAFRGLISTSLGTPPTISNSDFMCVGWSSTTCHDGIGRMTICIQGNNDNATATVYYNRRLTTTIKTWARNILRTQESECVCHNGICAVVMTDGSASSQAYTKVMYFHKGLVVKEEALKGSARHIEECSCYGHSQKVTCVCRDNWQGANRPIIEIDMNTLEHTSRYVCTGILTDTSRPGDKSSGDCSNPITGSPGAPGVKGFGFLNGDNTWLGRTISPRSRSGFEMLKIPNAGTDPNSRIAGRQEIVDNNNWSGYSGSFIDYWNDNSECYNPCFYVELIRGRPEEAKYVWWTSNSLIALCGSPFPVGSGSFPDGAQIQYFS

SEQ ID NO: 23636 - protein, 471 aa, Artificial Sequence
  derived and/or modified protein sequence (wt) from neuraminidase__InfluenzaA__AGQ81878
MNPNQKLFALSGVAIALSVLNLLIGISNVGLNVSLHLKEKGPKQEENLTCTTINQNNTTVVENTYVNNTTIITKETDLKAPSYLLLNKSLCNVEGWVVIAKDNAVRFGESEQIIVTREPYVSCDPTGCKMYALHQGTTIRNKHSNGTIHDRTAFRGLISTPLGTPPTVSNSDFMCVGWSSTTCHDGIGRMTICIQGNNDNATATVYYNRRLTTTIKTWARNILRTQESECVCHNGTCAVVMTDGSASSQAYTKVMYFHKGLVVKEEALKGSARHIEECSCYGHSQKVTCVCRDNWQGANRPIIEIDMNTLEHTSRYVCTGILTDTSRPGDKSSGDCSNPITGSPGAPGVKGFGFLNGDNTWLGRTISPRSRSGFEMLKIPNAGTDPNSRIAERQEIVDNNNWSGYSGSFIDYWNDNSECYNPCFYVELIRGRPEEAKYVWWTSNSLIALCGSPFPIGSGSFPDGAQIQYFS

SEQ ID NO: 23637 - protein, 471 aa, Artificial Sequence
  derived and/or modified protein sequence (wt) from neuraminidase__InfluenzaA__AGQ81882
MNPNQKLFALSGVAIALSVLNLLIGISNVGLNVSLHLKEKGAKQEENLTCTTINQNNTTVVENTYVNNTTVITKEADWKTPSYLLLNKSLCNVEGWVVIAKDNAIRFGESEQIIVTREPYVSCDPTGCKMYALHQGTTIRNKHSNGTIHDRTAFRGLISTPLGTPPTVSNSDFMCVGWSSTTCHDGIGRMTICIQGNNDNATATVYYNGRLTTTIKTWARNILRTQESECVCHNGTCAVVMTDGSASSQAYTKVMYFHKGLVIKEEALKGSARHIEECSCYGHSQKVTCVCRDNWQGANRPIIEIDMNTLEHTSRYVCTGILTDTSRPGDKSSGDCSNPITGSPGAPGVKGFGFLNGDNTWLGRTISPRSRSGFEMLKIPNAGIDPNSRIAERQEIVDNNNWSGYSGSFIDYWNDNSECYNPCFYVELIRGRPEEAKYVWWTSNSLIALCGSPFPVGSGSFPDGAQIQYFS

SEQ ID NO: 23638 - protein, 471 aa, Artificial Sequence
  derived and/or modified protein sequence (wt) from neuraminidase__InfluenzaA__AGQ81883
MNPNQKLFALSGVAIALSVLNLLIGISNVGLNVSLHLKEKGPKQEENLTCTTINQNNTTVVENTYVNNTTVITKEADWKTPSYLLLNKSLCNVEGWVVIAKDNAIRFGESEQIIVTREPYVSCDPTGCKMYALHQGTTIRNKHSNGTIHDRTAFRGLISTPLGTPPTVSNSDFMCVGWSSTTCHDGIGRMTICIQGNNDNATATVYYNGRLTTTIKTWARNILRTQESECVCHNGTCAVVMTDGSASSQAYTKVMYFHKGLVIKEEALKGSARHIEECSCYGHSQKVTCVCRDNWQGANRPIIEIDMNTLEHTSRYVCTGILTDTSRPGDKSSGDCSNPITGSPGAPGVKGFGFLNGDNTWLGRTISPRSRSGFEMLKIPNAGIDPNSRIAERQEIVDNNNWSGYSGSFIDYWNDNSECYNPCFYVELIRGRPEEAKYVWWTSNSLIALCGSPFPVGSGSFPDGAQIQYFS

SEQ ID NO: 23639 - protein, 471 aa, Artificial Sequence; identical to SEQ ID NO: 23638
  derived and/or modified protein sequence (wt) from neuraminidase__InfluenzaA__AGQ81884

SEQ ID NO: 23640 - protein, 471 aa, Artificial Sequence; identical to SEQ ID NO: 23638
  derived and/or modified protein sequence (wt) from neuraminidase__InfluenzaA__AGQ81885

SEQ ID NO: 23641 - protein, 471 aa, Artificial Sequence; identical to SEQ ID NO: 23638
  derived and/or modified protein sequence (wt) from neuraminidase__InfluenzaA__AGQ81886

SEQ ID NO: 23642 - protein, 451 aa, Artificial Sequence
  derived and/or modified protein sequence (wt) from neuraminidase__InfluenzaA__AGQ81888
MNPNQKLFALSGVAIALSVLNLLIGLSNVGLNVSLHLKEAGPKQEENLTCMTTKETELGTPSYLLLNKSLCNVEGWVVIAKDNAVRFGESEQIIITREPYVSCDPNGCKMYALHQGTTIRNKHSNGTIHDRTAFRGLISTPLGTPPTVSNSDFICVGWSSTTCHDGIGRMTICIQGNNDNATATVYYNRRLTTTIKTWARNILRTQESECVCHNGTCAVVMTDGSASSQAHTKVMYFHKGLVVKEEALKGSAKHIEECSCYGHNQKVTCVCRDNWQGANRPIIEIDMNTLEHTSRYVCTGILTDTSRPGDKPTGDCSNPITGSPGAPGVKGFGFLNGDNTWLGRTISPRSRSGFEMLKIPNAGIDPNSRIAERQEIVDNSNWSGYSGSFIDYWNDNSECYNPCFYVELIRGRPEEAKYVWWTSNSLIALCGSPFPVGSGSFPDGAQIQYFS

SEQ ID NO: 23643 - protein, 451 aa, Artificial Sequence
  derived and/or modified protein sequence (wt) from neuraminidase__InfluenzaA__AGQ81889
MNPNQKLFALSGVAIALSVLNLLIGLSNVGLNVSLHLKETGPKQEENLTCMTTKETELGTPSYLLLNKSLCNVEGWVVIAKDNAVRFGESEQIIITREPYVSCDPNGCKMYALHQGTTIRNKHSNGTIHDRTAFRGLISTPLGTPPTVSNSDFICVGWSSTTCHDGIGRMTICIQGNNDNATATVYYNRRLTTTIKTWARNILRTQESECVCHNGTCAVVMTDGSASSQAHTKVMYFHKGLVVKEEALKGSAKHIEECSCYGHNQKVTCVCRDNWQGANRPIIEIDMNTLEHTSRYVCTGILTDTSRPGDKPTGDCSNPITGSPGAPGVKGFGFLNGDNTWLGRTISPRSRSGFEMLKIPNAGIDPNSRIAERQEIVDNSNWSGYSGSFIDYWNDNSECYNPCFYVELIRGRPEEAKYVWWTSNSLIALCGSPFPVGSGSFPDGAQIQYFS

SEQ ID NO: 23644 - protein, 451 aa, Artificial Sequence; identical to SEQ ID NO: 23643
  derived and/or modified protein sequence (wt) from neuraminidase__InfluenzaA__AGQ81890

SEQ ID NO: 23645 - protein, 451 aa, Artificial Sequence; identical to SEQ ID NO: 23643
  derived and/or modified protein sequence (wt) from neuraminidase__InfluenzaA__AGQ81891

SEQ ID NO: 23646 - protein, 451 aa, Artificial Sequence
  derived and/or modified protein sequence (wt) from neuraminidase__InfluenzaA__AGQ81893
MNPNQKLFALSGVAIALSVLNLLIGLSNVGLNVSLHLKETGPKQEENLTCMTTKETELGTPSYLLLNKSLCNVEGWVVIAKDNAVRFGESEQIIITREPYVSCDPNGCKMYALHQGTTIRNKHSNGTIHDRTAFRGLISTPLGTPPTVSNSDFICVGWSSTTCHDGIGRMTICIQGNNDNATATVYYNRRLTTTIKTWARNILRTQESECVCHNGTCAVVMTDGSASSQAHTKVMYFHKGLVVKEEALKGSAKHIEECSCYGHNQKVTCVCRDNWQGANRPIIEIDMNTLEHTSRYVCTGILTDTSRPGDKPTGDCSNPITGSPGAPGVKGFGFLNGDNTWLGRTISPRSRSGFEMLKIPNAGIDPNSRIAERQEIVDNSNWSGYSGSFIDYWNDNSECYNPCFYVELIRGRPEEAEYVWWTSNSLIALCGSPFPVGSGSFPDGAQIQYFS

SEQ ID NO: 23647 - protein, 451 aa, Artificial Sequence; identical to SEQ ID NO: 23643
  derived and/or modified protein sequence (wt) from neuraminidase__InfluenzaA__AGQ81894

SEQ ID NO: 23648 - protein, 451 aa, Artificial Sequence; identical to SEQ ID NO: 23643
  derived and/or modified protein sequence (wt) from neuraminidase__InfluenzaA__AGQ81895

SEQ ID NO: 23649 - protein, 451 aa, Artificial Sequence; identical to SEQ ID NO: 23643
  derived and/or modified protein sequence (wt) from neuraminidase__InfluenzaA__AGQ81896

SEQ ID NO: 23650 - protein, 451 aa, Artificial Sequence; identical to SEQ ID NO: 23643
  derived and/or modified protein sequence (wt) from neuraminidase__InfluenzaA__AGQ81897

SEQ ID NO: 23651 - protein, 451 aa, Artificial Sequence; identical to SEQ ID NO: 23643
  derived and/or modified protein sequence (wt) from neuraminidase__InfluenzaA__AGQ81898

SEQ ID NO: 23652 - protein, 451 aa, Artificial Sequence; identical to SEQ ID NO: 23643
  derived and/or modified protein sequence (wt) from neuraminidase__InfluenzaA__AGQ81899

SEQ ID NO: 23653 - protein, 451 aa, Artificial Sequence; identical to SEQ ID NO: 23643
  derived and/or modified protein sequence (wt) from neuraminidase__InfluenzaA__AGQ81900

SEQ ID NO: 23654 - protein, 451 aa, Artificial Sequence; identical to SEQ ID NO: 23643
  derived and/or modified protein sequence (wt) from neuraminidase__InfluenzaA__AGQ81901

SEQ ID NO: 23655 - protein, 451 aa, Artificial Sequence; identical to SEQ ID NO: 23643
  derived and/or modified protein sequence (wt) from neuraminidase__InfluenzaA__AGQ81902

SEQ ID NO: 23656 - protein, 451 aa, Artificial Sequence; identical to SEQ ID NO: 23643
  derived and/or modified protein sequence (wt) from neuraminidase__InfluenzaA__AGQ81903

SEQ ID NO: 23657 - protein, 451 aa, Artificial Sequence
  derived and/or modified protein sequence (wt) from neuraminidase__InfluenzaA__AGQ81904
MNPNQKLFALSGVAIALSVLNLLIGLSNVGLNVSLHLKETGPKQEENLTCMTTKETELGTPSYLLLNKSLCNVEGWVVIAKDNAVRFGESEQIIITREPYVSCDPNGCKMYALHQGTTIRNKHSNGTIHDRTAFRGLISTPLGTPPTVSNSDFICVGWSSTTCHDGIGRMTICIQGNNDNATATVYYNRRLTTTIKTWARNILRTQESECVCHNGTCAVVMTDGSASSQAHTKVMYFHKGLVVKEEALKGSAKHIEECSCYGHNQKVTCVCRDNWQGANRPIIEIDMNTLEHTSRYVCTGILTDTSRPGDKPTGDCSNPITGSPGAPGVKGFGFLNGDNTWLGRTISPRSRSGFEMLKIPNAGIDPNSRITERQEIVDNSNWSGYSGSFIDYWNDNSECYNPCFYVELIRGRPEEAKYVWWTSNSLIALCGSPFPVGSGSFPDGAQIQYFS

SEQ ID NO: 23658 - protein, 451 aa, Artificial Sequence; identical to SEQ ID NO: 23643
  derived and/or modified protein sequence (wt) from neuraminidase__InfluenzaA__AGQ81905

SEQ ID NO: 23659 - protein, 451 aa, Artificial Sequence
  derived and/or modified protein sequence (wt) from neuraminidase__InfluenzaA__AGQ81906
MNPNQKLFALSGVAIALSVLNLLIGLSNVGLNVSLHLKETGPKQEENLTCMTTKETELGTPSYLLLNKSLCNVEGWVVIAKDNAVRFGESEQIIITREPYVSCDPNGCKMYALHQGTTIRNKHSNGTIHDRTAFRGLISTPLGTPPTVSNSDFICVGWSSTTCHDGIGRMTICIQGNNDNATATVYYNRRLTTTIKTWARNILRTQESECVCHNGTCAVVMTDGSASSQAHTKVMYFHKGLVVKEEALKGSARHIEECSCYGHNQKVTCVCRDNWQGANRPIIEIDMNTLEHTSRYVCTGILTDTSRPGDKPTGDCSNPITGSPGAPGVKGFGFLNGDNTWLGRTISPRSRSGFEMLKIPNAGIDPNSRIAERQEIVDNSNWSGYSGSFIDYWNDNSECYNPCFYVELIRGRPEEAKYVWWTSNSLIALCGSPFPVGSGSFPDGAQIQYFS

SEQ ID NO: 23660 - protein, 451 aa, Artificial Sequence; identical to SEQ ID NO: 23643
  derived and/or modified protein sequence (wt) from neuraminidase__InfluenzaA__AGQ81907

SEQ ID NO: 23661 - protein, 451 aa, Artificial Sequence
  derived and/or modified protein sequence (wt) from neuraminidase__InfluenzaA__AGQ81908
MNPNQKLFALSGVAIALSVLNLLIGLSNVGLNVSLHLKETGPKQEENLTCMTTKETELGTPSYLLLNKSLCNVEGWVVIAKDNAVRFGESEQIIITREPYVSCDPNGCKMYALHQGTTIRNKHSNGTIHDRTAFRGLISTPLGTPPTVSNSDFICVGWSSTTCHDGIGRMTICIQGNNDNATATVYYNRRLTTTIKTWARNILRTQESECVCHNGTCAVVMTDGSASNQAHTKVMYFHKGLVVKEEALKGSAKHIEECSCYGHNQKVTCVCRDNWQGANRPIIEIDMNTLEHTSRYVCTGILTDTSRPGDKPTGDCSNPITGSPGAPGVKGFGFLNGDNTWLGRTISPRSRSGFEMLKIPNAGIDPNSRITERQEIVDNSNWSGYSGSFIDYWNDNSECYNPCFYVELIRGRPEEAKYVWWTSNSLIALCGSPFPVGSGSFPDGAQIQYFS

SEQ ID NO: 23662 - protein, 451 aa, Artificial Sequence; identical to SEQ ID NO: 23643
  derived and/or modified protein sequence (wt) from neuraminidase__InfluenzaA__AGQ81909

SEQ ID NO: 23663 - protein, 451 aa, Artificial Sequence
  derived and/or modified protein sequence (wt) from neuraminidase__InfluenzaA__AGQ81910
MNPNQKLFALSGVAIALSVLNLLIGLSNVGLNVSLHLKETGPKQEENLTCMTTKETELGTPSYLLLNKSLCNVEGWVVIAKDNAVRFGESEQIIITREPYVSCDPNGCKMYALHQGTTIRNKHSNGTIHDRTAFRGLISTPLGTPPTVSNSDFICVGWSSTTCHDGIGRMTICIQGNNDNATATVYYNRRLTTTIKTWARNILRTQESECVCHNGTCAVVMTDGSASGQAHTKVMYFHKGLVVKEEALKGSAKHIEECSCYGHNQKVTCVCRDNWQGANRPIIEIDMNTLEHTSSYVCTGILTDTSRPGDKPTGDCSNPITGSPGAPGVKGFGFLNGDNTWLGRTISPRSRSGFEMLKIPNAGIDPNSRIAERQEIVDNSNWSGYSGSFIDYWNDNSECYNPCFYVELIRGRPEEAKYVWWTSNSLIALCGSPFPVGSGSFPDGAQIQYFS

SEQ ID NO: 23664 - protein, 451 aa, Artificial Sequence
  derived and/or modified protein sequence (wt) from neuraminidase__InfluenzaA__AGQ81911
MNPNQKLFALSGVAIALSVLNLLIGLSNVGLNVSLHLKETGPKQEENLTCMTTKETELGTPSYLLLNKSLCNVEGWVVIAKDNAVRFGESEQIIITREPYVSCDPNGCKMYALHQGTTIRNKHSNGTIHDRTAFRGLISTPLGTPPTVSNSDFICVGWSSTTCHDGIGRMTICIQGNNDNATATVYYNRRLTTTIKTWARNILRTQESECVCHNGTCAVVMTDGSASGQAHTKVMYFHKGLVVKEEALKGSAKHIEECSCYGHNQNVTCVCRDNWQGANRPIIEIDMNTLEHTSRYVCTGILTDTSRPGDKPTGDCSNPITGSPGAPGVKGFGFLNGDNTWLGRTISPRSRSGFEMLKIPNAGIDPNSRIAERQEIVDNSNWSGYSGSFIDYWNDNSECYNPCFYVELIRGRPEEAKYVWWTSNSLIALCGSPFPVGSGSFPDGAQIQYFS

SEQ ID NO: 23665 - protein, 451 aa, Artificial Sequence; identical to SEQ ID NO: 23643
  derived and/or modified protein sequence (wt) from neuraminidase__InfluenzaA__AGQ81912

SEQ ID NO: 23666 - protein, 451 aa, Artificial Sequence
  derived and/or modified protein sequence (wt) from neuraminidase__InfluenzaA__AGQ81913
MNPNQKLFALSGVAITLSVLNLLIGLSNVGLNVSLHLKETGPKQEENLTCMTTKETELGTPSYLLLNKSLCNVEGWVVIAKDNAVRFGESEQIIITREPYVSCDPNGCKMYALHQGTTIRNKHSNGTIHDRTAFRGLISTPLGTPPTVSNSDFICVGWSSTTCHDGIGRMTICIQGNNDNATATVYYNRRLTTTIKTWARNILRTQESECVCHNGTCAVVMTDGSASGQAHTKVMYFHKGLVVKEEALKGSAKHIEECSCYGHNQKVTCVCRDNWQGANRPIIEIDMNTLEHTSRYVCTGILTDTSRPGDKPTGDCSNPITGSPGAPGVKGFGFLNGDNTWLGRTISPRSRSGFEMLKIPNAGIDPNSRIAERQEIVDNSNWSGYSGSFIDYWNDNSECYNPCFYVELIRGRPEEAKYVWWTSNSLIALCGSPFPVGSGSFPDGAQIQYFS

SEQ ID NO: 23667 - protein, 451 aa, Artificial Sequence; identical to SEQ ID NO: 23643
  derived and/or modified protein sequence (wt) from neuraminidase__InfluenzaA__AGQ81914

SEQ ID NO: 23668 - protein, 451 aa, Artificial Sequence; identical to SEQ ID NO: 23643
  derived and/or modified protein sequence (wt) from neuraminidase__InfluenzaA__AGQ81915

SEQ ID NO: 23669 - protein, 471 aa, Artificial Sequence
  derived and/or modified protein sequence (wt) from neuraminidase__InfluenzaA__AGQ81917
MNPNQKLFALSGVAIALSVLNLLIGLSNVGLNVSLHLKETGPKQEENLTCMTINQNNTTVVENTYVNNTTIITKETELETPNYLLLNKSLCNVEGWVVVAKDNAVRFGESEQIIVTREPYVSCDPNGCKMYALHQGTTIRNKHSNGTIHDRTAFRGLISTPLGTPPTVSNSDFICVGWSSTTCHDGIGRMTICIQGNNDNATATVYYNRRLTTTIKTWARNILRTQESECVCHNGTCAVVMTDGSASSQAHTKVMYFHKGLVIKEEALKGSAKHIEECSCYGHNQKVTCVCRDNWQGANRPIIEIDMNTLEHTSRYVCTGILTDTSRPGDKPTGDCSNPITGSPGAPGVKGFGFLNGDNTWLGRTISPRSRSGFEMLKIPNAGIDPNSRIAERQEIVDNSNWSGYSGSFIDYWNDNSECYNPCFYVELIRGRPEEAKYVWWTSNSLIALCGSPFPVGSGSFPDGAQIQYFS

SEQ ID NO: 23670 - protein, 451 aa, Artificial Sequence
  derived and/or modified protein sequence (wt) from neuraminidase__InfluenzaA__AGQ81918
MNPNQKLFALSGVAIALSVLNLLIGLSNVGLNVSLHLKETGPKQEENLTCMTTKETELGTPSYLLLNKGLCNVEGWVVIAKDNAVRFGESEQIIITREPYVSCDPNGCKMYALHQGTTIRNKHSNGTIHDRTAFRGLISTPLGTPPTVSNSDFICVGWSSTTCHDGIGRMTICIQGNNDNATATVYYNRRLTTTIKTWARNILRTQESECVCHNGTCAVVMTDGSASSQAHTKVMYFHKGLVVKEEALKGSAKHIEECSCYGHNQKVTCVCRDNWQGANRPIIEIDMNTLEHTSRYVCTGILTDTSRPGDKPTGDCSNPITGSPGAPGVKGFGFLNGDNTWLGRTISPRSRSGFEMLKIPNAGIDPNSRIAERQEIVDNSNWSGYSGSFIDYWNDNSECYNPCFYVELIRGRPEEAKYVWWTSNSLIALCGSPFPVGSGSFPDGAQIQYFS

SEQ ID NO: 23671 - protein, 451 aa, Artificial Sequence; identical to SEQ ID NO: 23643
  derived and/or modified protein sequence (wt) from neuraminidase__InfluenzaA__AGQ81919

SEQ ID NO: 23672 - protein, 451 aa, Artificial Sequence; identical to SEQ ID NO: 23643
  derived and/or modified protein sequence (wt) from neuraminidase__InfluenzaA__AGQ81920

SEQ ID NO: 23673 - protein, 451 aa, Artificial Sequence
  derived and/or modified protein sequence (wt) from neuraminidase__InfluenzaA__AGQ81921
MNPNQKLFALSGVAIALSVLNLLIGLSNVGLNVSLHLKETGPKQEENLTCMTTKETELGTPSYLLLNKSLCNVEGWVVIAKDNAVRFGESEQIIITREPYVSCDPNGCKMYALHQGTTIRNKHSNGTIHDRTAFRGLISTPLGTPPTVSNSDFICVGWSSTTCHDGIGRMTICIQGNNDNATATVYYNRRLTTTIKTWARNILRTQESECVCHNGTCAVVMTDGSASGQAHTKVMYFHKGLVVKEEALKGSAKHIEECSCYGHNQKVTCVCRDNWQGANRPIIEIDMNTLEHTSRYVCTGILTDTSRPGDKPTGDCSNPITGSPGAPGVKGFGFLNGDNTWLGRTISPRSRSGFEMLKIPNAGIDPNSRIAERQEIVDNSNWSGYSGSFIDYWNDNSECYNPCFYVELIRGRPEEAKYVWWTSNSLIALCGSPFPVGSGSFPDGAQIQYFS

SEQ ID NO: 23674 - protein, 451 aa, Artificial Sequence; identical to SEQ ID NO: 23643
  derived and/or modified protein sequence (wt) from neuraminidase__InfluenzaA__AGQ81922

SEQ ID NO: 23675 - protein, 451 aa, Artificial Sequence; identical to SEQ ID NO: 23673
  derived and/or modified protein sequence (wt) from neuraminidase__InfluenzaA__AGQ81923

SEQ ID NO: 23676 - protein, 451 aa, Artificial Sequence
  derived and/or modified protein sequence (wt) from neuraminidase__InfluenzaA__AGQ81924
MNPNQKLFALSGVAIALSVLNLLIGLSNVGLNVSLHLKETGPKQEENLTCMTTKETELGTPSYLLLNKSLCNVEGWVVIAKDNAVRFGESEQIIITREPYVSCDPNGCKMYALHQGTTIRNKHSNGTIHDRTAFRGLISTPLGTPPTVSNSDFICVGWSSTTCHDGIGRMTICIQGNNDNATATVYYNRRLTTTIKTWARNILRTQESECVCHNGTCAVVMTDGSANSQAHTKVMYFHKGLVVKEEALKGSAKHIEECSCYGHNQKVTCVCRDNWQGANRPIIEIDMNTLEHTSRYVCTGILTDTSRPGDKPTGDCSNPITGSPGAPGVKGFGFLNGDNTWLGRTISPRSRSGFEMLKIPNAGIDPNSRIAERQEIVDNSNWSGYSGSFIDYWNDNSECYNPCFYVELIRGRPEEAKYVWWTSNSLIALCGSPFPVGSGSFPDGAQIQYFS

SEQ ID NO: 23677 - protein, 451 aa, Artificial Sequence; identical to SEQ ID NO: 23643
  derived and/or modified protein sequence (wt) from neuraminidase__InfluenzaA__AGQ81925

SEQ ID NO: 23678 - protein, 451 aa, Artificial Sequence; identical to SEQ ID NO: 23643
  derived and/or modified protein sequence (wt) from neuraminidase__InfluenzaA__AGQ81926

SEQ ID NO: 23679 - protein, 451 aa, Artificial Sequence; identical to SEQ ID NO: 23643
  derived and/or modified protein sequence (wt) from neuraminidase__InfluenzaA__AGQ81927

SEQ ID NO: 23680 - protein, 451 aa, Artificial Sequence; identical to SEQ ID NO: 23643
  derived and/or modified protein sequence (wt) from neuraminidase__InfluenzaA__AGQ81928

SEQ ID NO: 23681 - protein, 451 aa, Artificial Sequence; identical to SEQ ID NO: 23643
  derived and/or modified protein sequence (wt) from neuraminidase__InfluenzaA__AGQ81929

SEQ ID NO: 23682 - protein, 470 aa, Artificial Sequence
  derived and/or modified protein sequence (wt) from neuraminidase__InfluenzaA__AGQ81930
MNPNQKIITIGSISLGLVVFNVLLHVVSIIVTVLVLGRGGNSGICNETVVREYNETVRIEKITQWHNTSVVEYVPYWSEGNYMNNTEAICDVKGFAPFSKDNGIRIGSRGHVFVIREPFVSCSPTECRTFFLTQGSLLNDKHSNGTVKDRSPFRTLMSVEVGQSPNVYQARFEAVAWSATACHDGKKWMTIGVTGPDSKAVAVVHYGGVPTDVVNSWAGDILRTQESSCTCIQGNCYWVMTDGPANRQAQYRIYKANQGKIVGQTDISFNGGHIEECSCYPNDGKVECVCRDNWTGTNRPVLVISPDLSYRVGYLCAGLPSDTPRGEDAQFTGSCTSPMGNQGYGVKGFGFRQGTDVWMGRTISRTSRSGFEILRIKNGWTQTSKEQVRKQVVVDNLNWSGYSGSFTLPVELSGKDCLVPCFWVEMIRGKPEEKTIWTSSSSIVMCGVDYEVADWSWHDGAILPFDIDKM

SEQ ID NO: 23683 - protein, 470 aa, Artificial Sequence
  derived and/or modified protein sequence (wt) from neuraminidase__InfluenzaA__AGQ81931
MNPNQKIITIGSLSLGLVVLNILLHIISITITVLVIPRNGNTGSCNETVIREYNETVRIEKITQWHNTNIIEYIEKPENDLFMNNTGPLCDAKGFAPFSKDNGIRIGSKGHVFVIREPFVSCSPTECRTFFLTQGSLLNDKHSNGTVKDRSPYRTLMSVEIGQSPNVYQARFEAVAWSATACHDGKKWMTIGVTGPDAKAVAVVHYGGIPTDVINSWAGDILRTQESSCTCIQGECYWVMTDGPANRQAQYRAFKAKQGKIIGQTEISFNGGHIEECSCYPNEGKVECVCRDNWTGTNRPVLVISSDLSYRVGYLCAGLPSDTPRGEDSQFTGSCTSPMGNQGYGVKGFGFRQGNDVWMGRTISRTSRSGFEILKIRNGWIQNSKEQIKRQVVVDNSNWSGYSGSFTLPVELTRRNCLVPCFWVEMIRGKPEEKTIWTSSSSIVMCGVDHEIANWSWHDGAILPFDIDKM

SEQ ID NO: 23684 - protein, 470 aa, Artificial Sequence
  derived and/or modified protein sequence (wt) from neuraminidase__InfluenzaA__AGQ81932
MNPNQKIITIGSISLGLVVFNVLLHVVSIIVTVLILGRGGNNGICNETVVREYNETVRIEKITQWHNTSVVEYVPYWNEGTYMNNTEAICDVKGFAPFSKDNGIRIGSRGHVFVIREPFVSCSPTECRTFFLTQGSLLNDKHSNGTVKDRSPFRTLMSVEVGQSPNVYQARFEAVAWSATACHDGKKWMTIGVTGSDSKAVAVVHYGGVPTDVVNSWAGDILRTQESSCTCIQGNCYWVMTDGPANRQAQYRIYKANQGKVIGQTDISFNGGHIEECSCYPNDGKVECVCRDNWTGTNRPVLVISPDLSYRVGYLCAGLPSDTPRGEDAQFTGSCTSPMGNQGYGVKGFGFRQGTDVWMGRTISQTSRSGFEILRVKNGWTQTSKEQVRKQVVVDNLNWSGYSGSFTLPIELSGKDCLVPCFWVEMIRGKPEEKSIWTSSSSIVMCGVDYEVADWSWHDGAILPFDIDKM

SEQ ID NO: 23685 - protein, 470 aa, Artificial Sequence
  derived and/or modified protein sequence (wt) from neuraminidase__InfluenzaA__AGQ81934
MNPNQKILCTSATAIVIGTIAVLIGIANLGLNIGLHLKPSCNCSHSQPETTNTSQTIINNYYNETNITQISNTNIQMEERASRDFNNLTKGLCTINSWHIYGKDNAVRIGENSDVLVTREPYVSCDPDECRFYALSQGTTIRGKHSNGTIHDRSQYRALISWPLSSPPTVYNSRVECIGWSSTSCHDGKSRMSICISGPNNNASAVVWYNRRPVAEINTWARNILRTQESECVCHNGVCPVVFTDGSATGPADTRIYYFKEGRILKWESLTGTAKHIEECSCYGERTGITCTCRDNWQGSNRPVIRIDPVAMTHTSQYICSPVLTDNPRPNDPNVGKCNDPYPGNNNNGVKGFSYLDGVNTWLGRTISTASRSGYEMLKVPNALTDDRSKPIQGQTIVLNTDWSGYSGSFMDYWAEGDCYRACFYVELIRGRPKEDKVWWTSNSIVSMCSSTEFLGQWDWPDGAKIEYFL

SEQ ID NO: 23686 - protein, 470 aa, Artificial Sequence; identical to SEQ ID NO: 23685
  derived and/or modified protein sequence (wt) from neuraminidase__InfluenzaA__AGQ81935

SEQ ID NO: 23687 - protein, 470 aa, Artificial Sequence; identical to SEQ ID NO: 23685
  derived and/or modified protein sequence (wt) from neuraminidase__InfluenzaA__AGQ81936

SEQ ID NO: 23688 - protein, 470 aa, Artificial Sequence; identical to SEQ ID NO: 23685
  derived and/or modified protein sequence (wt) from neuraminidase__InfluenzaA__AGQ81937

SEQ ID NO: 23689 - protein, 470 aa, Artificial Sequence; identical to SEQ ID NO: 23685
  derived and/or modified protein sequence (wt) from neuraminidase__InfluenzaA__AGQ81938

SEQ ID NO: 23690 - protein, 470 aa, Artificial Sequence; identical to SEQ ID NO: 23685
  derived and/or modified protein sequence (wt) from neuraminidase__InfluenzaA__AGQ81939

SEQ ID NO: 23691 - protein, 470 aa, Artificial Sequence
  derived and/or modified protein sequence (wt) from neuraminidase__InfluenzaA__AGQ81940
MNPNQKILCTSATAIIIGAIAVLIGIANLGLNIGLHLKPSCNCSHSQPETTNTSQTIINNYYNETNITQISNTNIQMEERASKGFNNLTKGLCTINSWHIYGKDNAVRIGESSDVLVTREPYVSCDPDECRFYALSQGTTIRGKHSNGTIHDRSQYRALISWPLSSPPTVYNSRVECIGWSSTSCHDGKSRMSICISGPNNNASAVVWYNRRPVAEINTWARNILRTQESECVCHNGVCPVVFTDGSATGPADTRIYYFKEGKILKWESLAGTAKHIEECSCYGERTGITCTCRDNWQGSNRPVIQIDPVAMTHTSQYICSPVLTDNPRPNDPNIGKCNDPYPGNNNNGVKGFSYLDGANTWLGRTISTASRSGYEMLKVPNALTDDRSKPIQGQTIVLNTDWSGYSGSFMDYWAEGDCYRACFYVELIRGRPKEDKVWWTSNSIVSMCSSTEFLGQWNWPDGAKIEYFL

SEQ ID NO: 23692 - protein, 470 aa, Artificial Sequence
  derived and/or modified protein sequence (wt) from neuraminidase__InfluenzaA__AGQ81941
MNPNQKILCTSATAIIIGTIAVLIGVANLGLNIGLHLKPGCNCSHSQPEATNTSQTIINNYYNETNITQISNTNIQMEERPNRGFNNLTKGLCTINSWHIYGKDNAVRIGENSDVLVTREPYVSCDPDECRFYALSQGTTIRGKHSNGTIHDRSQYRALISWPLSSPPTVYNSRVECIGWSSTSCHDGKSRMSICISGPNNNASAVVWYNRRPVAEINTWARNILRTQESECVCHNGVCPVVFTDGSATGPADTRVYYFREGKILKWESLTGTARHIEECSCYGERTGITCTCRDNWQGSNRPVIQIDPVAMTHTSQYICSPVLTDNPRPNDPNVGKCNDPYPGNNNNGVKGFSYLDGVNTWLGRTISTASRSGYEMLKVPNALTDDRSKPIQGQTIVLNTDWSGYSGSFMDYWAEGDCYRACFYVELIRGRPKEDKVWWTSNSIVSMCSSTEFLGQWDWPDGAKIEYFL

SEQ ID NO: 23693 - protein, 470 aa, Artificial Sequence
  derived and/or modified protein sequence (wt) from neuraminidase__InfluenzaA__AGQ81942
MNPNQKILCTSATAIIIGTIAVLIGVANLGLNIGLHLKPGCNCSHSQPEATNTSQTIINNYYNETNITQISNTNIQMEERPSRGFNNLTKGLCTINSWHIYGKDNAVRIGENSDVLVTREPYVSCDPDECRFYALSQGTTIRGKHSNGTIHDRSQYRALISWPLSSPPTVYNSRVECIGWSSTSCHDGKSRMSICISGPNNNASAIVWYNRRPVAEINTWARNILRTQESECVCHNGVCPVVFTDGSATGPADTRVYYFREGKILKWESLTGTARHIEECSCYGERTGITCTCRDNWQGSNRPVIQIDPVAMTHTSQYICSPVLTDNPRPNDPNVGKCNDPYPGNNNNGVKGFSYLDGVNTWLGRTISTASRSGYEMLKVPNALTDDRSKPIQGQTIILNTDWSGYSGSFMDYWAEGDCYRACFYVELIRGRPKEDKVWWTSNSIVSMCSSTEFLGQWDWPDGAKIEYFL

SEQ ID NO: 23694 - protein, 470 aa, Artificial Sequence
  derived and/or modified protein sequence (wt) from neuraminidase__InfluenzaA__AGQ81943
MNPNQKILCTSATAIIIGAIAVLIGIANLGLNIGLHLKPSCNCSHSQPETTNTSQTIINNYYNETNITQISNTNIQMEERTSRGFNNLTKGLCTINSWHIYGKDNAIRIGESSDVLVTREPYVSCDPDECRFYALSQGTTIRGKHSNGTIHDRSQYRALISWPLSSPPTVYNSRVECIGWSSTSCHDGKSRMSICISGPNNNASAVVWYNRRPVAEINTWARNILRTQESECVCHNGVCPVVFTDGSATGPADTRIYYFKEGRILKWESLTGTAKHIEECSCYGERTGITCTCRDNWQGSNRPVIQIDPVAMTHTSQYICSPVLTDNPRPNDPNIGKCNDPYPGNNNNGVKGFSYLDGANTWLGRTISTASRSGYEMLKVPNALTDDRSKPIQGQTIVLNTDWSGYSGSFMDYWAEGDCYRACFYVELIRGRPKEDKVWWTSNSIVSMCSSTEFLGQWNWPDGAKIEYFL

SEQ ID NO: 23695 - protein, 470 aa, Artificial Sequence; identical to SEQ ID NO: 23685
  derived and/or modified protein sequence (wt) from neuraminidase__InfluenzaA__AGQ81944

SEQ ID NO: 23696 - protein, 470 aa, Artificial Sequence
  derived and/or modified protein sequence (wt) from neuraminidase__InfluenzaA__AGQ81947
MNPNQKILCTSATALVIGTIAVLIGIANLGLNIGLHLKPSCNCSHSQPEATNTSQTIINNYYNETNITQISNTNIQMEERASRSFNNLTKGLCTINSWHIYGKDNAIRIGENSDVLVTREPYVSCDPDECRFYALSQGTTIRGKHSNGTIHDRSQYRALISWPLSSPPTVYNSRVECIGWSSTSCHDGKSRMSICISGPNNNASAVVWYNRRPVAEINTWARNILRTQESECVCHNGVCPVVFTDGSATGPADTRIYYFKEGKILKWESLTGTAKHIEECSCYGERTGITCTCRDNWQGSNRPVIQIDPVAMTHTSQYICSPVLTDNPRPNDPNVGKCNDPYPGNNNNGVKGFSYLDGVNTWLGRTISTASRSGYEMLKVPNALTDDRSKPIQGQTIVLNTDWSGYSGSFMDYWAEGDCYRACFYVELIRGRPKEDKVWWTSNSIVSMCSSTEFLGQWNWPDGAKIEYFL

SEQ ID NO: 23697 - protein, 470 aa, Artificial Sequence
  derived and/or modified protein sequence (wt) from neuraminidase__InfluenzaA__AGQ81948
MNPNQKILCTSATAIIIGAIAVLIGIANLGLNIGLHLKPSCNCSHSQPETTNTSQTIINNYYNETNITQISNTNIQMEERTSRGFNNLTKGLCTINSWHIYGKDNAIRIGESSDVLVTREPYVSCDPDECRFYALSQGTTIRGKHSNGTIHDRSQYRALISWPLSSPPTVYNSRVECIGWSSTSCHDGKSRMSICISGPNNNASAVVWYNRRPVAEINTWARNILRTQESECVCHNGVCPVVFTDGSATGPADTRIYYFKEGRILKWESLTGTAKHIEECSCYGERTGITCTCRDNWQGSNRPVIQIDPVAMTHTSQYICSPVLTDNPRPNDPNIGKCNDPYPGNNNNGVKGFSYLDGANTWLGRTISTASRSGYEMLKVPNALTDDRSKPIQGQTIVLNTDWSGYSGSFMDYWAEGECYRACFYVELIRGRPKEDKVWWTSNSIVSMCSSTEFLGQWNWPDGAKIEYFL

SEQ ID NO: 23698 - protein, 470 aa, Artificial Sequence
  derived and/or modified protein sequence (wt) from neuraminidase__InfluenzaA__AGQ81951
MNPNQKILCTSATAIVIGTIAVLIGVANLGLNIGLHLKPGCNCSQSQPEATNTSQTIINNYYNETNITQISNTNIQMEERANRGFNNLTKGLCTINSWHIYGKDNAVRIGENSDVLVTREPYVSCDPDECRFYALSQGTTIRGKHSNGTIHDRSQYRALISWPLSSPPTVYNSRVECIGWSSTSCHDGKSRMSICISGPNNNASAVVWYNRRPVAEINTWARNILRTQESECVCHNGVCPVVFTDGSATGPADTRVYYFREGKILKWESLTGTAKHIEECSCYGERTGITCTCRDNWQGSNRPVIQIDPVAMTHTSQYICSPVLTDNPRPNDPNVGKCNDPYPGNNNNGVKGFSYLDGVNTWLGRTISTASRSGYEMLKVPNALTDDRSKPIQGQTIVLNTDWSGYSGSFMDYWAEGDCYRACFYVELIRGRPKEDKVWWTSNSIVSMCSSTEFLGQWNWPDGAKIEYFL

SEQ ID NO: 23699 - protein, 470 aa, Artificial Sequence
  derived and/or modified protein sequence (wt) from neuraminidase__InfluenzaA__AGQ81952
MNPNQKILCTSATAIVIGTIAVLIGVANLGLNIGLHLKPGCNCSHSQPEATNTSQTIINNYYNETNITQISNTNIQMEERANRGFNNLTKGLCTINSWHIYGKDNAVRIGENSDVLVTREPYVSCDPDECRFYALSQGTTIRGKHSNGTIHDRSQYRALISWPLSSPPTVYNSRVECIGWSSTSCHDGKSRMSICISGPNNNASAVVWYNRRPVAEINTWARNILRTQESECVCHNGVCPVVFTDGSATGPADTRVYYFREGKILKWESLTGTAKHIEECSCYGERTGITCTCRDNWQGSNRPVIQIDPVAMTHTSQYICSPVLTDNPRPNDPNVGKCNDPYPGNNNNGVKGFSYLDGVNTWLGRTISTASRSGYEMLKVPNALTDDRSKPIQGQTIVLNTDWSGYSGSFMDYWAEGDCYRACFYVELIRGRPKEDKVWWTSNSIVSMCSSTEFLGQWNWPDGAKIEYFL

SEQ ID NO: 23700 - protein, 470 aa, Artificial Sequence
  derived and/or modified protein sequence (wt) from neuraminidase__InfluenzaA__AGQ81954
MNPNQKILCTSATAIVIGTIAVLIGVANLGLNIGLHLKPSCNCSHSQPEATNTSQTIINNYYNETNITQISNTNIQMEERASRGFNNLTKGLCTINSWHIYGKDNAVRIGENSDVLVTREPYVSCDPDECRFYALSQGTTIRGKHSNGTIHDRSQYRALISWPLSSPPTVYNSRVECIGWSSTSCHDGKSRMSICISGPNNNASAVVWYNRRPVAEINTWARNILRTQESECVCHNGVCPVVFTDGSATGPADTRVYYFKEGKILKWESLTGTAKHIEECSCYGERTGITCTCRDNWQGSNRPVIQIDPVAMTHTSQYICSPVLTDNPRPNDPNVGKCNDPYPGNNNNGVKGFSYLDGVNTWLGRTISTASRSGYEMLKVPNALTDDRSKPIQGQTIVLNTDWSGYSGSFMDYWAEGDCYRACFYVELIRGRPKEDKVWWTSNSIVSMCSSTEFLGQWNWPDGAKIEYFL

SEQ ID NO: 23701 - protein, 470 aa, Artificial Sequence
  derived and/or modified protein sequence (wt) from neuraminidase__InfluenzaA__AGQ81956
MNPNQKILCTSATAIVIGTIAVLIGVANLGLNIGLHLKPSCNCSHSQPEATNTSQTIINNYYNETNITQISNTNIQMEERASRGFNNLTKGLCTINSWHIYGKDNAVRIGENSDVLVTREPYVSCDPDECRFYALSQGTTIRGKHSNGTIHDRSQYRALISWPLSSPPTVYNSRVECIGWSSTSCHDGKSRMSICISGPNNNASAIVWYNRRPVAEINTWARNILRTQESECVCHNGVCPVVFTDGSATGPADTRVYYFKEGKILKWESLTGTAKHIEECSCYGERTGITCTCRDNWQGSNRPVIQIDPVAMTHTSQYICSPVLTDNPRPNDPNVGKCNDPYPGNNNNGVKGFSYLDGVNTWLGRTISTASRSGYEMLKVPNALTDDRSKPIQGQTIVLNTDWSGYSGSFMDYWAEGDCYRACFYVELIRGRPKEDKVWWTSNSIVSMCSSTEFLGQWNWPDGAKIEYFL

SEQ ID NO: 23702 - protein, 470 aa, Artificial Sequence
  derived and/or modified protein sequence (wt) from neuraminidase__InfluenzaA__AGQ81957
MNPNQKILCTSATAIVIGTIAVLIGIANLGLNIGLHLKPSCNCSHSQPEATNTSQIIINNYYNETNITQVSNTNIQMEERASRGFNNLTKGLCTINSWHIYGKDNAVRIGENSDVLVTREPYVSCDPDECRFYALSQGTTIRGKHSNGTIHDRSQYRALISWPLSSPPTVYNSRVECIGWSSTSCHDGKSRMSICISGPNNNASAVVWYNRRPVAEINTWARNILRTQESECVCHNGVCPVVFTDGSATGPADTRIYYFKEGKILKWESLTGTAKHIEECSCYGERTGITCTCRDNWQGSNRPVIQIDPVAMTHTSQYICSPVLTDNPRPNDPNVGKCNDPYPGNNNNGVKGFSYLDGVNTWLGRTISTASRSGYEMLKVPNALTDDRSKPVQGQTIVLNTDWSGYSGSFMDYWAEGDCYRACFYVELIRGRPKEDKVWWTSNSIVSMCSSTEFLGQWNWPDGAKIEYFL

SEQ ID NO: 23703 - protein, 470 aa, Artificial Sequence; identical to SEQ ID NO: 23685
  derived and/or modified protein sequence (wt) from neuraminidase__InfluenzaA__AGQ81958

SEQ ID NO: 23704 - protein, 470 aa, Artificial Sequence; identical to SEQ ID NO: 23685
  derived and/or modified protein sequence (wt) from neuraminidase__InfluenzaA__AGQ81959

SEQ ID NO: 23705 - protein, 470 aa, Artificial Sequence
  derived and/or modified protein sequence (wt) from neuraminidase__InfluenzaA__AGQ81960
MNPNQKILCTSATAIVIGTIAVLIGIANLGLNIGLHLKPNCNCSRSQPETTNTSQTIINNYYNETNITQISNTNIQMEERASRDFNNLTKGLCTINSWHIYGKDNAVRIGENSDVLVTREPYVSCDPNECRFYALSQGTTIRGKHSNGTIHDRSQYRALISWPLSSPPTVYNSRVECIGWSSTSCHDGKSRMSICISGPNNNASAVVWYNRRPVAEINTWARNILRTQESECVCHNGVCPVVFTDGSATGPADTRIYYFKEGKILKWESLTGTAKHIEECSCYGERTEITCTCRDNWQGSNRPVIQIDPVAMTHTSQYICSPVLTDNPRPNDPNVGKCNDPYPGNNNNGVKGFSYLDGVNTWLGRTISTASRSGYEMLKVPNALTDDRSKPIQGQTIVLNTDWSGYSGSFMDYWAEGDCYRACFYVELIRGRPKEDKVWWTSNSIVSMCSSTEFLGQWDWPDGAKIEYFL

SEQ ID NO: 23706 - protein, 470 aa, Artificial Sequence; identical to SEQ ID NO: 23698
  derived and/or modified protein sequence (wt) from neuraminidase__InfluenzaA__AGQ81961

SEQ ID NO: 23707 - protein, 470 aa, Artificial Sequence; identical to SEQ ID NO: 23698
  derived and/or modified protein sequence (wt) from neuraminidase__InfluenzaA__AGQ81962

SEQ ID NO: 23708 - protein, 470 aa, Artificial Sequence
  derived and/or modified protein sequence (wt) from neuraminidase__InfluenzaA__AGQ81963
MNPNQKILCTSATAIVIGTIAVLIGIANLGLNIGLHLKPSCNCSHSQPEETNTSQTIINNYYNETNITQISNTNIQMEERASRGFNNLTKGLCTINSWHIYGKDNAVRIGENSDVLVTREPYVSCDPNECRFYALSQGTTIRGKHSNGTIHDRSQYRALISWPLSSPPTVYNSRVECIGWSSTSCHDGKSRMSVCISGPNDNASAVVWYNRRPVAEINTWARNILRTQESECVCHNGVCPVVFTDGSATGPAHTRIYYFKEGKILKWESLTGTAKHIEECSCYGERTGITCTCRDNWQGSNRPVIQIDPVAMTHTSQYICSPVLTDNPRPNDPNVGKCNDPYPGNNNNGVKGFSYLDGVNTWLGRTISTASRSGYEMLKVPNALTDDRSKPIQGQTIVLNTDWSGYSGSFMDYWTEGDCYRACFYVELIRGRPKEDKVWWTSNSIVSMCSSTEFLGQWDWPDGAKIEYFL

SEQ ID NO: 23709 - protein, 470 aa, Artificial Sequence
  derived and/or modified protein sequence (wt) from neuraminidase__InfluenzaA__AGQ81964
MNPNQKILCTSATAIVIGTIAVLIGIANLGLNIGLHLKPSCNCSHSKPEETNASQTIINNYYNETNITQISNTNIQMEERASRGFNNLTKGLCTINSWHIYGKDNAVRIGESSDVLVTREPYVSCDPDECRFYALSQGTTIRGKHSNGTIHDRSQYRALISWPLSSPPTVYNSRVECIGWSSTSCHDGKSRMSICISGPNNNASAVVWYNRRPVAEINTWARNILRTQESECVCHNGVCPVVFTDGSATGPADTRIYYFKEGKILKWESLTGTAKHIEECSCYGERTGITCTCRDNWQGSNRPVIQIDPVAMTHTSQYICSPVLTDNPRPNDPNVGKCNDPYPGNNNNGVKGFSYLDGVNTWLGRTTSTTSRSGYEMLKVPNALTDDRSKPIQGQTIVLNTDWSGYSGSFMDYWAEGDCYRACFYVELIRGRPKEDKVWWTSNSIVSMCSSTEFLGQWNWPDGAKIEYFL

SEQ ID NO: 23710 - protein, 470 aa, Artificial Sequence
  derived and/or modified protein sequence (wt) from neuraminidase__InfluenzaA__AGQ81966
MNPNQRILCTSATAIVIGTIAVLIGVANLGLNIGLHLKPGCNCSHSQPEATNTSQTIINNYYNETNITQISNTNIQMEERANRGFNNLTKGLCTINSWHIYGKDNAVRIGENSDVLVTREPYVSCDPDECRFYALSQGTTIRGKHSNGTIHDRSQYRALISWPLSSPPTVYNSRVECIGWSSTSCHDGKSRMSICISGPNNNASAVVWYNRRPVAEINTWARNILRTQESECVCHNGVCPVVFTDGSATGPADTRVYYFREGKILKWESLTGTAKHIEECSCYGERTGITCTCRDNWQGSNRPVIQIDPVAMTHTSQYICSPVLTDNPRPNDPNVGKCNDPYPGNNNNGVKGFSYLDGVNTWLGRTISTASRSGYEMLKVPNALTDDRSKPIQGQTIVLNTDWSGYSGSFMDYWAEGDCYRACFYVELIRGRPKEDKVWWTSNSIVSMCSSTEFLGQWNWPDGAKIEYFL

SEQ ID NO: 23711 - protein, 470 aa, Artificial Sequence
  derived and/or modified protein sequence (wt) from neuraminidase__InfluenzaA__AGQ81967
MNPNQKILCTSATAIVIGIIAVLIGIANLGLNIGLHLKPSCNCSHSQPEATNASQTIINNYYNETNITQISNTNIQMEERASRGFNNLTKGLCTINSWHIYGKDNAVRIGENSDVLVTREPYVSCDPDECRFYALSQGTTIRGKHSNGTIHDRSQYRALISWPLSSPPTVYNSRVECIGWSSTSCHDGKSRMSICISGPNNNASAVVWYNRRPVAEINTWARNILRTQESECVCHNGVCPVVFTDGSATGPAETRIYYFKEGKILKWESLTGTAKHIEECSCYGERTGITCTCRDNWQGSNRPVIQIDPVAMTHTSQYICSPVLTDNPRPNDPNVGKCNDPYPGNNNNGVKGFSYLDGVNTWLGRTISTASRSGYEMLKVPNALTDDRSKPIQGQIIVLNTDWSGYSGSFMDYWAEGDCYRACFYVELIRGRPKEDKVWWTSNSIVSMCSSTEFLGQWNWPDGAKIEYFL

SEQ ID NO: 23712 - protein, 470 aa, Artificial Sequence
  derived and/or modified protein sequence (wt) from neuraminidase__InfluenzaA__AGQ81968
MNPNQKILCTSATAIVIGIIAVLIGIANLGLNIGLHLKPSCNCSHSQPEATNASQTIINNYYNETNITQISNTNIQMEERASRGFNNLTKGLCTINSWHIYGKDNAVRIGENSDILVTREPYVSCDPDECRFYALSQGTTIRGKHSNGTIHDRSQYRSLISWPLSSPPTVYNSRVECIGWSSTSCHDGKSRMSICISGPNNNASAVVWYNRRPVAEINTWARNILRTQESECVCHNGVCPVVFTDGSATGPAETRIYYFKEGKILKWESLTGTAKHIEECSCYGERTGITCTCRDNWQGSNRPVIQIDPVAMTHTSQYICSPVLTDNPRPNDPNVGKCNDPYPGNNNNGVKGFSYLDGVNTWLGRTISTASRSGYEMLKVPNALTDDRSKPIQGQTIVLNTDWSGYSGSFIDYWAEGDCYRACFYVELIRGRPKEDKVWWTSNSIVSMCSSTEFLGQWNWPDGAKIEYFL

SEQ ID NO: 23713 - protein, 470 aa, Artificial Sequence
  derived and/or modified protein sequence (wt) from neuraminidase__InfluenzaA__AGQ81969
MNPNQKILCTSATAIVIGIIAVLIGIANLGLNIGLHLKPSCNCSHSQPEETNASQTIINNYYNETNITQISNTNIQMEERASRGFNNLTKGLCTINSWHIYGKDNAVRIGENSDVLVTREPYVSCDPDECRFYALSQGTTIRGKHSNGTIHDRSQYRALISWPLSSPPTVYNSRVECIGWSSTSCHDGKSRMSICISGPNNNASAVVWYNRRPVAEINTWARNILRTQESECVCHNGVCPVVFTDGSATGPAETRIYYFKEGKILKWESLTGTAKHIEECSCYGERTGITCTCRDNWQGSNRPVIQIDPVAMTHTSQYICSPVLTDNPRPNDPNVGKCNDPYPGNNNNGVKGFSYLDGVNTWLGRTISTASRSGYEMLKVPNALTDDRSKPIQGQIIVLNTDWSGYSGSFMDYWAEGDCYRACFYVELIRGRPKEDKVWWTSNSIVSMCSSTEFLGQWNWPDGAKIEYFL

SEQ ID NO: 23714 - protein, 470 aa, Artificial Sequence
  derived and/or modified protein sequence (wt) from neuraminidase__InfluenzaA__AGQ81970
MNPNQKILCTSATAIVIGTIAVLIGIANLGLNIGLHLKPSCNCSHSQPEETNASQTIINNYYNETNITQISNTNIQMEERASRGFNNLTKGLCTINSWHIYGKDNAVRIGENSDVLVTREPYVSCDPDECRFYALSQGTTIRGKHSNGTIHDRSQYRALISWPLSSPPTVYNSRVECIGWSSTSCHDGKSRMSICISGPNNNASAVVWYNKRPVAEINTWARNILRTQESECVCHNGVCPVVFTDGSATGPADTRIYYFKEGKILKWEPLTGTAKHIEECSCYGERTGITCTCRDNWQGSNRPVIQIDPVAMTHTSQYICSPVLTDNPRPNDPNVGKCNDPYPGNSNNGVKGFSYLDGVNTWLGRTISTASRSGYEMLKVPNALTDDRSKPIQGQTIVLNTDWSGYSGSFMDYWAEGDCYRACFYVELIRGRPKEDKVWWTSNSIVSMCSSTEFLGQWNWPDGAKIEYFL

SEQ ID NO: 23715 - protein, 470 aa, Artificial Sequence
  derived and/or modified protein sequence (wt) from neuraminidase__InfluenzaA__AGQ81971
MNPNQKILCTSATAIIIGAIAVLIGIANLGLNIGLHLKPSCNCSHSQPETTNTSQTIINNYYNETNITQISNTNIQMEERTSRGFNNLTKGLCTINSWHIYGKDNAVRIGESSDVLVTREPYVSCDPDECRFYALSQGTTIRGKHSNGTIHDRSQYRALISWPLSSPPTVYSSRVECIGWSSTSCHDGKSRMSICISGPNNNASAVVWYNRRPVAEINTWARNILRTQESECVCHNGVCPVVFTDGSATGPADTRIYYFKEGKILKWESLTGTAKHIEECSCYGERTGITCTCRDNWQGSNRPVIQIDPVAMTHTSQYICSPVLTDNPRPNDPNIGKCNDPYPGNNNNGVKGFSYLDGANTWLGRTISTASRSGYEMLKVPNALTDDRSKPIQGQTIVLNTDWSGYSGSFMDYWAEGDCYRACFYVELIRGRPKEDKVWWTSNSIVSMCSSTEFLGQWNWPDGAKIEYFL

SEQ ID NO: 23716 - protein, 470 aa, Artificial Sequence
  derived and/or modified protein sequence (wt) from neuraminidase__InfluenzaA__AGQ81972
MNPNQKILCTSATAIIIGAIAVLIGIANLGLNIGLHLKPSCNCSHSQPETTNTSQTIINNYYNETNITQISNTNIQMEERASRGFNNLTKGLCTINSWHIYGKDNAVRIGESSDVLVTREPYVSCDPDECRFYALSQGTTIRGKHSNGTIHDRSQYRALISWPLSSPPTVYNSRVECIGWSSTSCHDGKSRMSICISGPNNNASAVVWYNRRPVAEINTWARNILRTQESECVCHNGVCPVVFTDGSATGPADTRIYYFKEGKILKWESLTGTAKHIEECSCYGERTGITCTCRDNWQGSNRPVIQIDPVAMTHTSQYICSPVLTDNPRPNDPNIGKCNDPYPGNNNNGVKGFSYLDGANTWLGRTISTASRSGYEMLKVPNALTDDRSKPIQGQTIVLNTDWSGYSGSFMDYWAEGDCYRACFYVELIRGRPKEDKVWWTSNSIVSMCSSTEFLGQWNWPDGAKIEYFL

SEQ ID NO: 23717 - protein, 470 aa, Artificial Sequence
  derived and/or modified protein sequence (wt) from neuraminidase__InfluenzaA__AGQ81973
MNPNQKILCTSATAIIIGAIAVLIGIANLGLNIGLHLKPSCNCSHSQPETTNTSQTIINNYYNETNITQISNTNIQMEERTSRGFNNLTKGLCTINSWHIYGKDNAVRIGESSDVLVTREPYVSCDPDECRFYALSQGTTIRGKHSNGTIHDRSQYRALISWPLSSPPTVYNSRVECIGWSSTSCHDGKSRMSICISGPNNNASAVVWYNRRPVAEINTWARNILRTQESECVCHNGVCPVVFTDGSATGPADTRIYYFKEGKILKWESLTGTAKHIEECSCYGERTGITCTCRDNWQGSNRPVIQIDPVAMTHTSQYICSPVLTDNPRPNDPNIGKCNDPYPGNNNNGVKGFSYLDGANTWLGRTISTASRSGYEMLKVPNALTDDRSKPIQGQTIVLNTDWSGYSGSFMDYWAEGDCYRACFYVELIRGRPKEDKVWWTSNSIVSMCSSTEFLGQWNWPDGAKIEYFL

SEQ ID NO: 23718 - protein, 470 aa, Artificial Sequence; identical to SEQ ID NO: 23698
  derived and/or modified protein sequence (wt) from neuraminidase__InfluenzaA__AGQ81974

SEQ ID NO: 23719 - protein, 465 aa, Artificial Sequence
  derived and/or modified protein sequence (wt) from neuraminidase__InfluenzaA__AGQ81975
MNPNQKILCTSATAIIIGAIAVLIGIANLGLNIGLHLKPGCNCSHSQPETTNTSQTIINNYYNETNITNIQMEERTSRNFNNLTKWLCTINSWHIYGKDNAVRIGENSDVLVTREPYVSCDPDECRFYALSQGTTIRGKHSNGTIHDRSQYRALISWPLSSPPTVYNSRVECIGWSSTSCHDGKSRMSICISGPNNNASAVVWYNRRPVAEINTWARNILRTQESECVCHNGVCPVVFTDGSATGPADTRIYYFKEGKILKWESLTGTAKHIEECSCYGERTGITCTCRDNWQGSNRPVIQIDPVAMTHTSQYICSPVLTDNPRPDDPNIGKCNDPYPGNNNNGVKGFSYLDGANTWLGRTISTASRSGYEMLKVPNALTDDRSKPIQGQTIVLNADWSGYSGSFMDYWADGDCYRACFYVELIRGRPKEDKVWWTSNSIVSMCSSTEFLGQWNWPDGAKIEYFL

SEQ ID NO: 23720 - protein, 465 aa, Artificial Sequence
  derived and/or modified protein sequence (wt) from neuraminidase__InfluenzaA__AGQ81977
MNPNQKILCTSATAIIIGAIAVLIGIANLGLNIGLHLKPGCNCSHSQPETTNTSQTIINNYYNETNITNIQMEERTSRNFNNLTKGLCTINSWHIYGKDNAVRIGESSDVLVTREPYVSCDPDECRFYALSQGTTIRGKHSNGTIHDRSQYRALISWPLSSPPTVYNSRVECIGWSSTSCHDGKSRMSICISGPNNNASAVVWYNRRPVAEINTWARNILRTQESECVCHNGVCPVVFTDGSATGPADTRIYYFKEGKILKWESLTGTAKHIEECSCYGERTGITCTCRDNWQGSNRPVIQIDPVAMTHTSQYICSPVLTDNPRPDDPNIGKCNDPYPGNNNNGVKGFSYLDGANTWLGRTISTASRSGYEMLKVPNALTDDRSKPIQGQTIVLNADWSGYSGSFMDYWADGDCYRACFYVELIRGRPKEDKVWWTSNSIVSMCSSTEFLGQWNWPDGAKIEYFL

SEQ ID NO: 23721 - protein, 465 aa, Artificial Sequence
  derived and/or modified protein sequence (wt) from neuraminidase__InfluenzaA__AGQ81979
MNPNQKILCTSATAIIIGAIAALIGIANLGLNIGLHLKPGCNCSHSQPETTNTSQTIINNYYNETNITNIQMEERTSRNFNNLTKGLCTINSWHIYGKDNAVRIGESSDVLVTREPYVSCDPDECRFYALSQGTTIRGKHSNGTIHDRSQYRALISWPLSSPPTVYNSRVECIGWSSTSCHDGKSRMSICISGPNNNASAVVWYNRRPVAEINTWARNILRTQESECVCHNGVCPVVFTDGSATGPADTRIYYFKEGKILKWESLTGTAKHIEECSCYGERTGITCTCRDNWQGSNRPVIQIDPVAMTHTSQYICSPVLTDNPRPDDPNIGKCNDPYPGNNNNGVKGFSYLDGANTWLGRTISTASRSGYEMLKVPNALTDDRSKPIQGQTIVLNADWSGYSGSFMDYWADGDCYRACFYVELIRGRPKEDKVWWTSNSIVSMCSSTEFLGQWNWPDGAKIEYFL

SEQ ID NO: 23722 - protein, 465 aa, Artificial Sequence; identical to SEQ ID NO: 23720
  derived and/or modified protein sequence (wt) from neuraminidase__InfluenzaA__AGQ81980

SEQ ID NO: 23723 - protein, 449 aa, Artificial Sequence
  derived and/or modified protein sequence (wt) from neuraminidase__InfluenzaA__AGQ88501
MNPNQKIVTIGSICMVIGIVSLMLQIGNMISIWVSHSIQTGNQHQTEPIRNTNFLTENAVASVALSGNSSLCPIRGWAVHSKDNSIRIGSKGDVFVIREPFISCSNLECRTFFLTQGALLNDKHSNGTVKDRSPHRTLMSCPIGEAPSPYNSRFESVAWSASACHDGISWLTIGISGPDNGAVAVLKYNGIITDTIKSWRNNILRTQESECTCVNGSCFTVMTDGPSNGQASYKIFKIEKGKVVKSVELNAPNYHYEECSCYPDAGEIICVCRDNWHGSNRPWVSFNQNLEYQIGYICSGVFGDNPRPNDGEGSCGPVSPNGAYGVKGFSFKYGNGVWIGRTKSTHSRSGFEMIWDPNGWTGTDSEFSMKQDIVAITDWSGYSGSFVQHPELTGLDCIRPCFWVELIRGRPKESTIWTSGSSISFCGVNSDTVSWSWPDGAELPFTIDK

SEQ ID NO: 23724 - protein, 466 aa, Artificial Sequence; identical to SEQ ID NO: 23602
  derived and/or modified protein sequence (wt) from neuraminidase__InfluenzaA__AGR33906

SEQ ID NO: 23725 - protein, 466 aa, Artificial Sequence
  derived and/or modified protein sequence (wt) from neuraminidase__InfluenzaA__AGR33908
MNPNQKITAIGSVSLIIAIICLLMQIAILTTTMTLHFRQNECSNPSNNQVMPCEPIIIERNTVHLNSTTIEREICPKVAEYKNWSKPQCQITGFAPFSKDNSIRLSAGGDIWVTREPYVSCSPDKCYQFALGQGTTLKNKHSNGTTHDRTPHRTLLMNELGVPFHLGTKQVCIAWSSSSCYDGKAWLHICVTGDDKNATASIIYDGMLVDSIGSWSKNILRTQESECVCINGTCAVVMTDGSASGEADTRILFIREGKIINISPLSGSAQHVEECSCYPRYPEVRCVCRDNWKGSNRPIIYINMVDYSIESRYVCSGLVGDTPRNDDSTSSSNCRDPNNERGAPGVKGWAFDDGNDVWMGRTIKNGSRSGYETFRVINGWTMANSKSQINRQVIVDSDNWSGYSGIFSVEGKKCINRCFYVELIRGRPQEPRVWWTSNSIIVFCGTSGTYGTGSWPDGADINFMPI

SEQ ID NO: 23726 - protein, 466 aa, Artificial Sequence
  derived and/or modified protein sequence (wt) from neuraminidase__InfluenzaA__AGR33910
MNPNQKIIAIGSVSLTIAIICFLMQIAILTTTMTLHFKQNECSKPSNNQVVPCEPILIERNTVHLNSTTIEKEVCPKVAEYKNWSKPQCQITGFAPFSKDNSIRLSAGGDIWVTREPYVSCSFGKCYQFALGQGTTLKNKHSNGTTHDRTPHRTLLMNELGVPFHLGTKQVCIAWSSSSCYDGKAWLHICVTGDDKNATASIIYDGMLVDSIGSWSKNILRTQESECVCINGTCAVVMTDGSASGKADTRILFIREGKIINIRPLSGSAQHVEECSCYPRYPEVRCVCRDNWKGSNRPVLYINMADYSVESSYVCSGLVGDTPRNDDSSSSSNCRDPNNERGAPGVKGWAFDDGNDVWMGRTIRNDSRSGYETFRVVNGWTTANSKSQINRQVIVDSENWSGYSGIFSVEGKNCINRCFYVELIRGRPQEPRVWWTSNSIIVFCGTSGTYGTGSWPDGANINFMPI

SEQ ID NO: 23727 - protein, 466 aa, Artificial Sequence
  derived and/or modified protein sequence (wt) from neuraminidase__InfluenzaA__AGR33911
MNPNQKIIAIGSVSLTIAIICFLMQIAILTTTMTLHFKQNECSNPSNNQVVPCEPILIERNTVHLNSTTIEKEVCPKVAEYKNWSKPQCQITGFAPFSKDNSIRLSAGGDIWVTREPYVSCSLGKCYQFALGQGTTLKNNHSNGTTHDRTPHRTLLMNELGVPFHLGTKQVCIAWSSSSCYDGKAWLHICVTGDDKNATASIIYDGMLVDSIGSWSKNILRTQESECVCINGTCAVVMTDGSASGKADTRILFIREGKIINISPLSGSAQHVEECSCYPRYPEVRCVCRDNWKGSNRPVLYINMADYSIESSYVCSGLVGDTPRNDDSSSSSNCRDPNNERGAPGVKGWAFDDGNDVWMGRTIRNNSRSGYETFRVVNGWTTANSKSQINRQVIVDSENWSGYSGIFSVEGKNCINRCFYVELIRGRPQEPRVWWTSNSIIVFCGTSGTYGTGSWPDGANINFMPI

SEQ ID NO: 23728 - protein, 451 aa, Artificial Sequence; identical to SEQ ID NO: 23643
  derived and/or modified protein sequence (wt) from neuraminidase__InfluenzaA__AGR33912

SEQ ID NO: 23729 - protein, 451 aa, Artificial Sequence; identical to SEQ ID NO: 23673
  derived and/or modified protein sequence (wt) from neuraminidase__InfluenzaA__AGR33913

SEQ ID NO: 23730 - protein, 451 aa, Artificial Sequence; identical to SEQ ID NO: 23643
  derived and/or modified protein sequence (wt) from neuraminidase__InfluenzaA__AGR33915

SEQ ID NO: 23731 - protein, 451 aa, Artificial Sequence
  derived and/or modified protein sequence (wt) from neuraminidase__InfluenzaA__AGR33916
MNPNQKLFASSGVAIALSVLNLLIGLSNVGLNVSLHLKETGPKQEENLTCMTTKETELGTPSYLLLNKSLCNVEGWVVIAKDNAVRFGESEQIIITREPYVSCDPNGCKMYALHQGTTIRNKHSNGTIHDRTAFRGLISTPLGTPPTVSNSDFICVGWSSTTCHDGIGRMTICIQGNNDNATATVYYNRRLTTTIKTWARNILRTQESECVCHNGTCAVVMTDGSASSQAHTKVMYFHKGLVVKEEALKGSAKHIEECSCYGHNQKVTCVCRDNWQGANRPIIEIDMNTLEHTSRYVCTGILTDTSRPGDKPTGDCSNPITGSPGAPGVKGFGFLNGDNTWLGRTISPRSRSGFEMLKIPNAGIDPNSRIAERQEIVDNSNWSGYSGSFIDYWNDNSECYNPCFYVELIRGRPEEAKYVWWTSNSLIALCGSPFPVGSGSFPDGAQIQYFS

SEQ ID NO: 23732 - protein, 451 aa, Artificial Sequence; identical to SEQ ID NO: 23673
  derived and/or modified protein sequence (wt) from neuraminidase__InfluenzaA__AGR33917

SEQ ID NO: 23733 - protein, 451 aa, Artificial Sequence; identical to SEQ ID NO: 23643
  derived and/or modified protein sequence (wt) from neuraminidase__InfluenzaA__AGR33918

SEQ ID NO: 23734 - protein, 465 aa, Artificial Sequence; identical to SEQ ID NO: 23720
  derived and/or modified protein sequence (wt) from neuraminidase__InfluenzaA__AGR33919

SEQ ID NO: 23735 - protein, 470 aa, Artificial Sequence
  derived and/or modified protein sequence (wt) from neuraminidase__InfluenzaA__AGR45094
MNPNQKIITIGSISMAIGIISLILQIGNIISIWASHSIQTGSQNHTGICNQRIITYENSTWVNQTYVNINNTNVVAGKDKTSVTLAGNSSLCPIRGWAIYTKDNSIRIGSKGDVFVIREPFISCSHLECRTFFLTQGALLNDKHSNGTVKDRSPYRALMSCPLGEAPSPYNSRFESVAWSASACHDGMGWLTIGISGPDNGAVAVLKYNGIITETIKSWKKRILRTQESECVCVNGSCFTIMTDGPSNGPASYRIFKIEKGKITKSIELDAPNYHYEECSCYPDTGTVMCVCRDNWHGSNRPWVSFNQNLDYQIGYICSGVFGDNPRPKDGEGSCNPVTVDGADGVKGFSYRYGNGVWIGRTKSNSSRKGFEMIWDPNGWTDTDSDFSVKQDVVPMTDWSGYSGSFVQHPELTGLDCMRPCFWVELIRGRPRENTTIWTSGSSISFCGVNSDTANWSWPDDAELPLTIDK

SEQ ID NO: 23736 - protein, 470 aa, Artificial Sequence; identical to SEQ ID NO: 18930
  derived and/or modified protein sequence (wt) from neuraminidase__InfluenzaA__AGR49780

SEQ ID NO: 23737 - protein, 469 aa, Artificial Sequence
  derived and/or modified protein sequence (wt) from neuraminidase__InfluenzaA__AGR49804
MNPNQKIITIGSVCMTIGMANLILQIGNIISIWISHSIQLGNQNQIETCNQSVITYENNTWVNQTYVNISNTNFAAGQSVVSVKLTGNSSLCPVSGWAIYSKDNSVRIGSKGDVFVIREPFISCSPLECRTFFLTQGALLNDKHSNGTIKDRSPYRTLMSCPIGEVPSPYNSRFESVAWSASACHDGINWLTIGISGPDNGAVAVLKYNGIITDTIKSWRNNILRTQESECACVNGSCFTVMTDGPSNGQASYKIFRIEKGKIVKSVEMNAPNYHYEECSCYPDSSEITCVCRDNWHGSNRPWVSFNQNLEYQIGYICSGIFGDNPRPNDKTGSCGPVSSNGANGVKGFSFKYGNGVWIGRTKSISSRNGFEMIWDPNGWTGTDNNFSIKQDIVGINEWSGYSGSFVQHPELTGLDCIRPCFWVELIRGRPKENTIWTSGSSISFCGVNSDTVGWSWPDGAELPFTIDK

SEQ ID NO: 23738 - protein, 470 aa, Artificial Sequence; identical to SEQ ID NO: 18930
  derived and/or modified protein sequence (wt) from neuraminidase__InfluenzaA__AGR49820

SEQ ID NO: 23739 - protein, 469 aa, Artificial Sequence; identical to SEQ ID NO: 16090
  derived and/or modified protein sequence (wt) from neuraminidase__InfluenzaA__AGR49832

SEQ ID NO: 23740 - protein, 470 aa, Artificial Sequence; identical to SEQ ID NO: 18930
  derived and/or modified protein sequence (wt) from neuraminidase__InfluenzaA__AGR49844

SEQ ID NO: 23741 - protein, 470 aa, Artificial Sequence; identical to SEQ ID NO: 18930
  derived and/or modified protein sequence (wt) from neuraminidase__InfluenzaA__AGR49856

SEQ ID NO: 23742 - protein, 470 aa, Artificial Sequence; identical to SEQ ID NO: 18930
  derived and/or modified protein sequence (wt) from neuraminidase__InfluenzaA__AGR49868

SEQ ID NO: 23743 - protein, 469 aa, Artificial Sequence; identical to SEQ ID NO: 16728
  derived and/or modified protein sequence (wt) from neuraminidase__InfluenzaA__AGR49880

SEQ ID NO: 23744 - protein, 469 aa, Artificial Sequence; identical to SEQ ID NO: 18484
  derived and/or modified protein sequence (wt) from neuraminidase__InfluenzaA__AGR49891

SEQ ID NO: 23745 - protein, 469 aa, Artificial Sequence
  derived and/or modified protein sequence (wt) from neuraminidase__InfluenzaA__AGR49903
MNPNQKIITIGSVSLTISTICFFMQIAILITTVTLHFKQYEFNSPPNNQVMLCEPTIIERNITEIVYLTNTTIEKEICPKLAEYRNWSKPQCDITGFAPFSKDNSIRLSAGGDIWVTREPYVSCDPDKCYQFALGQGTTLNNVHSNDTVHDRTPYRTLLMNELGVPFHLGTKQVCIAWSSSSCHDGKAWLHVCITGDDKNATASFIYNGRLVDSIVSWSKEILRTQESECVCINGTCTVVMTDGSASGKADTKILFIEEGKIVHTSTLSGSAQHVEECSCYPRYPGVRCVCRDNWKGSNRPIVDINIKDHSIVSSYVCSGLVGDTPRKNDSSSSGHCLDPNNEEGGHGVKGWAFDDGNDVWMGRTISEKSRLGYETFKVIEGWSNPKSKLQINRQVIVDRGNRSGYSGIFSVEGKSCINRCFYVELIRGRKEETEVLWTSNSIVVFCGTSGTYGTGSWPDGADINLMPI

SEQ ID NO: 23746 - protein, 469 aa, Artificial Sequence; identical to SEQ ID NO: 16090
  derived and/or modified protein sequence (wt) from neuraminidase__InfluenzaA__AGR49915

SEQ ID NO: 23747 - protein, 469 aa, Artificial Sequence; identical to SEQ ID NO: 16090
  derived and/or modified protein sequence (wt) from neuraminidase__InfluenzaA__AGR49927

SEQ ID NO: 23748 - protein, 469 aa, Artificial Sequence
  derived and/or modified protein sequence (wt) from neuraminidase__InfluenzaA__AGR49939
MNPNKKIITIGSVSLTISTICFFMQIAILITTVTLHFKQYEFNSPPNNQVMLCEPTIIERNITEIVYLTNTTIEKEICPKLAEYRNWSKPQCDITGFAPFSKDNSIRLSAGGDIWVTREPYVSCDPDKCYQFALGQGTTLNNVHSNDTVRDRTPYRTLLMNELGVPFHLGTKQVCIAWSSSSCHDGKAWLHVCITGDDKNATASFIYNGRLVDSIVSWSKEILRTQESECVCINGTCTVVMTDGSASGKADTKILFIEEGKIVHTSTLSGSAQHVEECSCYPRYPGVRCVCRDNWKGSNRPIVDINIKDHSIVSSYVCSGLVGDTPRKNDSSSSGHCLDPNNEEGGHGVKGWAFDDGNDVWMGRTISEKSRLGYETFKVIEGWSNPKSKLQINRQVIVDRGNRSGYSGIFSVEGKSCINRCFYVELIRGRKEETEVLWTSNSIVVFCGTSGTYGTGSWPDGADINLMPI

SEQ ID NO: 23749 - protein, 469 aa, Artificial Sequence; identical to SEQ ID NO: 16685
  derived and/or modified protein sequence (wt) from neuraminidase__InfluenzaA__AGR49951

SEQ ID NO: 23750 - protein, 469 aa, Artificial Sequence
  derived and/or modified protein sequence (wt) from neuraminidase__InfluenzaA__AGR49963
MNPNKKIITIGSVSLTISTICFFMQIAILITTVTLHFKQYEFNSPPNNQVMLCEPTIIERNITEIVYLTNTTIEKEICPKLAEYRNWSKPQCDITGFAPFSKDNSIRLSAGGDIWVTREPYVSCDPDKCYQFALGQGTTLNNVHSNDTVRDRTPYRTLLMNELGVPFHLGTKQVCIAWSSSSCHDGKAWLHVCITGDDKNATASFIYNGRLVDSIVSWSKEILRTQESECVCINGTCTVVMTDGSASGKADTKILFIEEGKIVHTSTLSGSAQHVEECSCYPRYPGVRCVCRDNWKGSNRPIVDINIKDHSIVSSYVCSGLVGDTPRKNDSSSSGHCLDPNNEEGGHGVKGWAFDDGNDVWMGRTISKKSRLGYETFKVIEGWSNPKSKLQINRQVIVDRGNRSGYSGIFSVEGKSCINRCFYVELIRGRKEETEVLWTSNSIVVFCGTSGTYGTGSWPDGADINLMPI

SEQ ID NO: 23751 - protein, 469 aa, Artificial Sequence; identical to SEQ ID NO: 16728
  derived and/or modified protein sequence (wt) from neuraminidase__InfluenzaA__AGR49975

SEQ ID NO: 23752 - protein, 470 aa, Artificial Sequence; identical to SEQ ID NO: 18930
  derived and/or modified protein sequence (wt) from neuraminidase__InfluenzaA__AGR49986

SEQ ID NO: 23753 - protein, 470 aa, Artificial Sequence; identical to SEQ ID NO: 18930
  derived and/or modified protein sequence (wt) from neuraminidase__InfluenzaA__AGR49998

SEQ ID NO: 23754 - protein, 469 aa, Artificial Sequence; identical to SEQ ID NO: 16728
  derived and/or modified protein sequence (wt) from neuraminidase__InfluenzaA__AGR50010

SEQ ID NO: 23755 - protein, 469 aa, Artificial Sequence; identical to SEQ ID NO: 16728
  derived and/or modified protein sequence (wt) from neuraminidase__InfluenzaA__AGR50021

SEQ ID NO: 23756 - protein, 469 aa, Artificial Sequence; identical to SEQ ID NO: 16738
  derived and/or modified protein sequence (wt) from neuraminidase__InfluenzaA__AGR50032

SEQ ID NO: 23757 - protein, 469 aa, Artificial Sequence
  derived and/or modified protein sequence (wt) from neuraminidase__InfluenzaA__AGR50043
MNPNQKIITIGSVSLTISTICFFMQIAILITTVTLHFKQYEFNSPPNNQVMLCEPTIIERNITEIVYLTNTTIEKEICPKLAEYRNWSKPQCDITGFAPFSKDNSIRLSAGGDIWVTREPYVSCDPDKCYQFALGQGTTLNNVHSNNTVRDRTPYRTLLMNELGVPFHLGTKQVCIAWSSSSCHDGKAWLHVCITGDDKNATASFIYNGRLVDSVVSWSKDILRTQESECVCINGTCTVVMTDGSASGKADTKILFIEEGKIVHTSTLSGSAQHVEECSCYPRYPGVRCVCRDNWKGSNRPIVDINIKDHSIVSSYVCSGLVGDTPRKNDSSSSSHCLDPNNEEGGHGVKGWAFDDGNDVWMGRTISEKSRLGYETFKVIEGWSNPKSKLQINRQVIVDRGNRSGYSGIFSVEGKSCINRCFYVELIRGRKEETEVLWTSNSIVVFCGTSGTYGTGSWPDGADLNLMPI

SEQ ID NO: 23758 - protein, 469 aa, Artificial Sequence; identical to SEQ ID NO: 16728
  derived and/or modified protein sequence (wt) from neuraminidase__InfluenzaA__AGR50055

SEQ ID NO: 23759 - protein, 469 aa, Artificial Sequence
  derived and/or modified protein sequence (wt) from neuraminidase__InfluenzaA__AGR50066
MNPNQKIITIGSVCMTIGMANLILQIGNIISIWISHSIQLGNQNQIETCNQSVITYENNTWVNQTYVNISNTNFAAGQSVVSVKLAGNSSLCPVSGWAIYSKDNSVRIGSKGDVFVIREPFISCSPLECRTFFLTQGALLNDKHSNGTIKDRSPYRTLMSCPIGEVPSPYNSRFESVAWSASACHDGINWLTIGISGPDNGAVAVLKYNGIITDTIKSWRNNILRTQESECACVNGSCFTVMTDGPSNGQASYKIFKIEKGKIVKSVEMNAPNYHYEECSCYPDSSEITCVCRDNWHGSNRPWVSFNQNLEYQIGYICSGIFGDNPRPNDKTGSCGPVSSNGANGVKGFSFKYGNGVWIGRTKSISSRNGFEMIWDPNGWTGTDNNFSIKQDIVGINEWSGYSGSFVQHPELTGLDCIRPCFWVELIRGRPKENTIWTSGSSISFCGVNSDTVGWSWPDGAELPFTIDK

SEQ ID NO: 23760 - protein, 469 aa, Artificial Sequence; identical to SEQ ID NO: 16728
  derived and/or modified protein sequence (wt) from neuraminidase__InfluenzaA__AGR50077

SEQ ID NO: 23761 - protein, 469 aa, Artificial Sequence; identical to SEQ ID NO: 16728
  derived and/or modified protein sequence (wt) from neuraminidase__InfluenzaA__AGR50088

SEQ ID NO: 23762 - protein, 469 aa, Artificial Sequence; identical to SEQ ID NO: 16728
  derived and/or modified protein sequence (wt) from neuraminidase__InfluenzaA__AGR50099

SEQ ID NO: 23763 - protein, 469 aa, Artificial Sequence; identical to SEQ ID NO: 16728
  derived and/or modified protein sequence (wt) from neuraminidase__InfluenzaA__AGR50110

SEQ ID NO: 23764 - protein, 469 aa, Artificial Sequence
  derived and/or modified protein sequence (wt) from neuraminidase__InfluenzaA__AGR50121
MNPNQKIITIGSVCMTIGMANLILQIGNIISIWISHSIQLGNQNQIETCNQSVITYENNTWVNQTYVNISNTNFAAGQSVVSVKLAGNSSLCPVSGWAIYSKDNSVRIGSKGDVFVIREPFISCSPLECRTFFLTQGALLNDKHSNGTIKDRSPYRTLMSCPIGEVPSPYNSRFESVAWSASACHDGINWLTIGISGPDNGAVAVLKYNGIITDTIKSWRNNILRTQESECACVNGSCFTVMTDGPSNGQASYKIFRIEKGKIVKSVEMNAPNYHYEECSCYPDSSEITCVCRDNWHGSNRPWVSFNQNLEYQIGYICSGIFGDNPRPNDKTGSCGPVPSNGANGVKGFSFKYGNGVWIGRTKSISSRNGFEMIWDPNGWTGTDNNFSIKQDIVGINEWSGYSGSFVQHPELTGLDCIRPCFWVELIRGRPKENTIWTSGSSISFCGVNSDTVGWSWPDGAELPFTIDK

SEQ ID NO: 23765 - protein, 469 aa, Artificial Sequence
  derived and/or modified protein sequence (wt) from neuraminidase__InfluenzaA__AGR50132
MNPNQKIITIGSVCMTIGMANLILQIGNIISIWISHSIQLGNQNQIETCNQSVITYENNTWVNQTYVNISNTNFAAGQSVVSVKLAGNSSLCPVSGWAIYSKDNSVRIGSKGDVFVIREPFISCSPLECRTFFLTQGALLNDKHSNGTIKDRSPYRTLMSCPIGEVPSPYNSRFESVAWSASACHDGINWLTIGISGPDNGAVAVLKYNGIITDTIKSWRNNILRTQESECACANGSCFTVMTDGPSNGQASYKIFRIEKGKIVKSVEMNAPNYHYEECSCYPDSSEITCVCRDNWHGSNRPWVSFNQNLEYQIGYICSGIFGDNPRPNDKTGSCGPVSSNGANGVKGFSFKYGNGVWIGRTKSISSRNGFEMIWDPNGWTGTDNNFSIKQDIVGINEWSGYSGSFVQHPELTGLDCIRPCFWVELIRGRPKENTIWTSGSSISFCGVNSDTVGWSWPDGAELPFTIDK

SEQ ID NO: 23766 - protein, 469 aa, Artificial Sequence; identical to SEQ ID NO: 16728
  derived and/or modified protein sequence (wt) from neuraminidase__InfluenzaA__AGR50143

SEQ ID NO: 23767 - protein, 469 aa, Artificial Sequence; identical to SEQ ID NO: 16728
  derived and/or modified protein sequence (wt) from neuraminidase__InfluenzaA__AGR50154

SEQ ID NO: 23768 - protein, 470 aa, Artificial Sequence; identical to SEQ ID NO: 18930
  derived and/or modified protein sequence (wt) from neuraminidase__InfluenzaA__AGR50165

SEQ ID NO: 23769 - protein, 469 aa, Artificial Sequence; identical to SEQ ID NO: 16728
  derived and/or modified protein sequence (wt) from neuraminidase__InfluenzaA__AGR50177

SEQ ID NO: 23770 - protein, 469 aa, Artificial Sequence; identical to SEQ ID NO: 16728
  derived and/or modified protein sequence (wt) from neuraminidase__InfluenzaA__AGR50188

SEQ ID NO: 23771 - protein, 469 aa, Artificial Sequence; identical to SEQ ID NO: 16728
  derived and/or modified protein sequence (wt) from neuraminidase__InfluenzaA__AGR50199

SEQ ID NO: 23772 - protein, 469 aa, Artificial Sequence; identical to SEQ ID NO: 16728
  derived and/or modified protein sequence (wt) from neuraminidase__InfluenzaA__AGR50210

SEQ ID NO: 23773 - protein, 469 aa, Artificial Sequence; identical to SEQ ID NO: 16728
  derived and/or modified protein sequence (wt) from neuraminidase__InfluenzaA__AGR50221

SEQ ID NO: 23774 - protein, 469 aa, Artificial Sequence
  derived and/or modified protein sequence (wt) from neuraminidase__InfluenzaA__AGR50232
MNPNQKIITIGSVCMTIGMANLILQIGNIISIWISHSIQLGNQNQIETCNQSVITYENNTWVNQTYVNISNTNFAAGQSVVSVKLAGNSSLCPVSGWAIYSKDNSVRIGSKGDVFVIREPFISCSPLECRTFFLTQGALLNDKHSNGTIKDRSPYRTLMSCPIGEVPSPYNSRFESVAWSASACHDGINWLTIGISGPDNGAVAVLKYNGIITDTIKSWRNNILRTQESECACVNGSCFTVMTDGPNNGQASYKIFRIEKGKIVKSVEMNAPNYHYEECSCYPDSSEITCVCRDNWHGSNRPWVSFNQNLEYQIGYICSGIFGDNPRPNDKTGSCGPVSSNGANGVKGFSFKYGNGVWIGRTKSISSRNGFEMIWDPNGWTGTDNNFSIKQDIVGINEWSGYSGSFVQHPELTGLDCIRPCFWVELIRGRPKENTIWTSGSSISFCGVNSDTVGWSWPDGAELPFTIDK

SEQ ID NO: 23775 - protein, 469 aa, Artificial Sequence; identical to SEQ ID NO: 16728
  derived and/or modified protein sequence (wt) from neuraminidase__InfluenzaA__AGR50243

SEQ ID NO: 23776 - protein, 469 aa, Artificial Sequence; identical to SEQ ID NO: 16728
  derived and/or modified protein sequence (wt) from neuraminidase__InfluenzaA__AGR50254

SEQ ID NO: 23777 - protein, 469 aa, Artificial Sequence; identical to SEQ ID NO: 16728
  derived and/or modified protein sequence (wt) from neuraminidase__InfluenzaA__AGR50265

SEQ ID NO: 23778 - protein, 469 aa, Artificial Sequence
  derived and/or modified protein sequence (wt) from neuraminidase__InfluenzaA__AGR50276
MNPNQKIITIGSVCMTIGMANLILQIGNIISIWISHSIQLGNQNQIETCNQSVITYENNTWVNQTYVNISNTNFAAEQSVVSVKLAGNSSLCPVSGWAIYSKDNSVRIGSKGDVFVIREPFISCSPLECRTFFLTQGALLNDKHSNGTIKDRSPYRTLMSCPIGEVPSPYNSRFESVAWSASACHDGINWLTIGISGPDNGAVAVLKYNGIITDTIKSWRNNILRTQESECACVNGSCFTVMTDGPSNGQASYKIFRIEKGKIVKSVEMNAPNYHYEECSCYPDSSEITCVCRDNWHGSNRPWVSFNQNLEYQIGYICSGIFGDNPRPNDKTGSCGPVSSNGANGVKGFSFKYGNGVWIGRTKSISSRNGFEMIWDPNGWTGTDNNFSIKQDIVGINEWSGYSGSFVQHPELTGLDCIRPCFWVELIRGRPKENTIWTSGSSISFCGVNSDTVGWSWPDGAELPFTIDK

SEQ ID NO: 23779 - protein, 469 aa, Artificial Sequence; identical to SEQ ID NO: 16728
  derived and/or modified protein sequence (wt) from neuraminidase__InfluenzaA__AGR50287

SEQ ID NO: 23780 - protein, 469 aa, Artificial Sequence
  derived and/or modified protein sequence (wt) from neuraminidase__InfluenzaA__AGR50298
MNPNQKIITIGSVCMTIGMANLILQIGNTISIWISHSIQPGNQNQIETCNQSVITYENNTWVNQTYVNISNTNFAAGQSVVSVKLAGNSSLCPVSGWAIYSKDNSIRIGSKGDVFVIREPFISCSPLECRTFFLTQGALLNDKHSNGTIKDRSPYRTLMSCPIGEVPSPYNSRFESVAWSASACHDGINWLTIGISGPDNGAVAVLKYNGIITDTIKSWRNNILRTQESECACVNGSCFTVMTDGPSDGQASYKIFRIEKGKIVKSVEMNAPNYHYEECSCYPDSSEITCVCRDNWHGSNRPWVSFNQNLEYQIGYICSGIFGDNPRPNDKTGSCGPVSSNGANGVKGFSFKYGNGVWIGRTKSISSRNGFEMIWDPNGWTGTDNNFSIKQDIVGINEWSGYSGSFVQHPELTGLDCIRPCFWVELIRGRPKENTIWTSGSSISFCGVNSDTVGWSWPDGAELPFTIDK

SEQ ID NO: 23781 - protein, 469 aa, Artificial Sequence; identical to SEQ ID NO: 16728
  derived and/or modified protein sequence (wt) from neuraminidase__InfluenzaA__AGR50309

SEQ ID NO: 23782 - protein, 469 aa, Artificial Sequence; identical to SEQ ID NO: 16728
  derived and/or modified protein sequence (wt) from neuraminidase__InfluenzaA__AGR50320

SEQ ID NO: 23783 - protein, 469 aa, Artificial Sequence; identical to SEQ ID NO: 16728
  derived and/or modified protein sequence (wt) from neuraminidase__InfluenzaA__AGR50331

SEQ ID NO: 23784 - protein, 469 aa, Artificial Sequence
  derived and/or modified protein sequence (wt) from neuraminidase__InfluenzaA__AGR50342
MNPNQKIITIGSVCMTIGMANLILQIGNIISIWISHSIQLGNQNQIETCNQSVITYENNTWVNQTYVNISNTNFAAGQSVISVKLAGNSSLCPVSGWAIYSKDNSVRIGSKGDVFVIREPFISCSPLECRTFFLTQGALLNDKHSNGTIKDRSPYRTLMSCPIGEVPSPYNSRFESVAWSASACHDGINWLTIGISGPDNGAVAVLKYNGIITDTIKSWRNNILRTQESECACVNGSCFTVMTDGPSNGQASYKIFRIEKGKIVKSVEMNAPNYHYEECSCYPDSSEITCVCRDNWHGSNRPWVSFNQNLEYQIGYICSGIFGDNPRPNDKTGSCGPVSSNGANGVKGFSFKYGNGVWIGRTKSISSRNGFEMIWDPNGWTGTDNNFSIKQDIVGINEWSGYSGSFVQHPELTGLDCIRPCFWVELIRGRPKENTIWTSGSSISFCGVNSDTVGWSWPDGAELPFTIDK

SEQ ID NO: 23785 - protein, 469 aa, Artificial Sequence; identical to SEQ ID NO: 16728
  derived and/or modified protein sequence (wt) from neuraminidase__InfluenzaA__AGR50353

SEQ ID NO: 23786 - protein, 470 aa, Artificial Sequence; identical to SEQ ID NO: 18930
  derived and/or modified protein sequence (wt) from neuraminidase__InfluenzaA__AGR50364

SEQ ID NO: 23787 - protein, 469 aa, Artificial Sequence
  derived and/or modified protein sequence (wt) from neuraminidase__InfluenzaA__AGR55170
MNPNQKIITIGSVSLTISTICFFMQIAILITTVTLHFKQYEFNSPPNNQVMLCEPTIIERNITEIVYLTNTTIEKEICPKLAEYRNWSKPQCDITGFAPFSKDNSIRLSAGGDIWVTREPYVSCDPDKCYQFALGQGTTLNNVHSNDTVRDRTPYRTLLMNELGVPFHLGTKQVCIAWSSSSCHDGKAWLHVCITGDDKNATASFIYNGRLVDSIVSWSKEILRTQESECVCINGTCTVVMTDGSASGKADTKILFIEEGKIVHTSTLSGSAQHVEECSCYPRYPGVRCVCRDNWKGSNRPIVDINIKDHSIVSSYVCSGLVGDTPRKNDSSSSSHCLDPNNEEGGHGVKGWAFDDGNDVWMGRTISEKSRLGYETFKVIEGWSNPNSKLQINRQIIVDRGNRSGYSGIFSVEGKSCINRCFYVELIRGRKEETEVLWTSNSIVVFCGTSGTYGTGSWPDGADINLMPI

SEQ ID NO: 23788 - protein, 469 aa, Artificial Sequence; identical to SEQ ID NO: 14145
  derived and/or modified protein sequence (wt) from neuraminidase__InfluenzaA__AGR55180

SEQ ID NO: 23789 - protein, 469 aa, Artificial Sequence; identical to SEQ ID NO: 14145
  derived and/or modified protein sequence (wt) from neuraminidase__InfluenzaA__AGR55181

SEQ ID NO: 23790 - protein, 469 aa, Artificial Sequence; identical to SEQ ID NO: 14145
  derived and/or modified protein sequence (wt) from neuraminidase__InfluenzaA__AGR55183

SEQ ID NO: 23791 - protein, 469 aa, Artificial Sequence
  derived and/or modified protein sequence (wt) from neuraminidase__InfluenzaA__AGR55184
MNPNQKIITIGSVSLTIATICFLMQIAILVTTVTLHFKQHECNSPPKNQVMLCEPTIIERNITEIVYLTNTTIEKEICPKLAEYRNWSKPQCNITGFAPFSKDNSIRLSAGGDIWVTREPYVSCDPDKCYQFALGQGTTLNNGHSNDTVHDRTPYRTLLMNELGVPFHLGTRQVCIAWSSSSCHDGKAWLHVCVTGDDKNATASFIYNGRLVDSIGSWSKKILRTQESECVCINGTCTVVMTDGSASGKADTKILFIEEGKIVHISTLSGSAQHVEECSCYPRYPGVRCVCRDNWKGSNRPIVDINVKDYSIVSSYVCSGLVGDTPRKNDSFSSSHCLDPNNEEGGHGVKGWAFDDGNDVWMGRTISEKLRSGYETFKVIEGWSKPNSKLQINRQVIVERGNRSGYSGIFSVEGKSCINRCFYVELIRGRKEETEVWWTSNSIVVFCGTSGTYGTGSWPDGADINLMPI

SEQ ID NO: 23792 - protein, 469 aa, Artificial Sequence
  derived and/or modified protein sequence (wt) from neuraminidase__InfluenzaA__AGR55185
MNPNQKIITIGSVSLTIATICFLMQIAILVTTVTLHFKQHECNSPPKNQVMLCEPTIIERNITEIVYLTNTTIEKEICPKLAEYRNWSKPQCNITGFAPFSKDNSIRLSAGGDIWVTREPYVSCDPDKCYQFALGQGTTLNNGHSNDTVHDRTPYRTLLMNELGVPFHLGTRQVCIAWSSSSCHDGKAWLHVCVTGDDKNATASFIYNGRLVDSIGSWSKKILRTQESECVCINGTCTVVMTDGSASGKADTKILFIEEGKIVHISTLSGSAQHVEECSCYPRYPGVRCVCRDNWKGSNRPIVDINVKDYSIVSSYVCSGLVGDTPRKNDSFSSSHCLDPNNEEGGHGVKGWAFDDGNDVWMGRTISEKLRSGYETFKVIEGWSKPNSKLQINRQVIVERGNRSGYSGIFSVEGKSCINRCFYVELIRGRKEETEVWWTSNSIVVFCGTSRTYGTGSWPDGADINLMPI

SEQ ID NO: 23793 - protein, 469 aa, Artificial Sequence
  derived and/or modified protein sequence (wt) from neuraminidase__InfluenzaA__AGR55186
MNPNQKIITIGSVSLTISTICFFMQIAILITTVTLHFKQYEFNSPPNNQVMLCEPTIIERNITEIVYLTNTTIEKEICPKLAEYRNWSKPQCDITGFAPFSKDNSIRLSAGGDIWVTREPYVSCDPDKCYQFALGQGTTLNNVHSNDTVHDRTPYRTLLMNELGVPFHLGTKQVCIAWSSSSCHDGKAWLHVCVTGDDKNATASFIYNGRLVDSIVSWSKKILRTQESECVCINGTCTVVMTDGSASGKADTKILFIEEGKIVHTSTLSGSAQHVEECSCYPRYPGVRCVCRDNWKGSNRPIVDINIKDYSIVSSYVCSGLVGDTPRKNDSSSSSHCLEPNNEEGGHGVKGWAFDDGNDVWMGRTISEKLRSGYETFKVIEGWSNPNSKLQINRQVIVDRGNRSGYSGIFSVEGKSCINRCFYVELIRGRKQETEVLWTSNSIVVFCGTSGTYGTGSWPDGADINLMPI

SEQ ID NO: 23794 - protein, 469 aa, Artificial Sequence; identical to SEQ ID NO: 14145
  derived and/or modified protein sequence (wt) from neuraminidase__InfluenzaA__AGR55187

SEQ ID NO: 23795 - protein, 469 aa, Artificial Sequence; identical to SEQ ID NO: 14714
  derived and/or modified protein sequence (wt) from neuraminidase__InfluenzaA__AGR55192

SEQ ID NO: 23796 - protein, 469 aa, Artificial Sequence
  derived and/or modified protein sequence (wt) from neuraminidase__InfluenzaA__AGR55195
MNPNQKIITIGSVSLTISTICFFMQIAILITTVTLHFKQYEFNSPPNNQVMLCEPTIIERNITEIVYLTNTTIEKEICPKLAEYRNWSKPQCDITGFAPFSKDNSIRLSAGGDIWVTREPYVSCDPDKCYQFALGQGTTLNNVHSNDTVHDRTPYRTLLMNELGVPFHLGTKQVCIAWSSSSCHDGKAWLHVCVTGDDKNATASFIYNGRLVDSIVSWSKEILRTQESECVCINGTCTVVMTDGSASGKADTKILFIEEGKIVHTSTLSGSAQHVEECSCYPRYPGVRCVCRDHWKGSNRPIVDINIKDYSIVSSYVCSGLVGDTPRKNDSSSSSHCLDPNNEEGGHGVKGWAFDDGNDVWMGRTISEKLRLGYETFKVIEGWSNPNSKLQINRQVIVDRGNRSGYSGIFSVEGKSCINRCFYVELIRGRKEETEVLWTSNSIVVFCGTSGTYGTGSWPDGADINLMPI

SEQ ID NO: 23797 - protein, 469 aa, Artificial Sequence
  derived and/or modified protein sequence (wt) from neuraminidase__InfluenzaA__AGR55204
MNPNQKIITIGSVSLTISTICFFMQIAILITTVTLHFKQYEFNSPPNNQVMLCEPTIIERNITEIVYLTNTTIEKEICPKLAEYRNWSKPQCDITGFAPFSKDNSIRLSAGGDIWVTREPYVSCDPDKCYQFALGQGTTLNNVHSNDTVRDRTPYRTLLMNELGVPFHLGTKQVCIAWSSSSCHDGKAWLHVCITGDDKNATASFIYNGRLVDSIVSWSKEILRTQESECVCINGTCTVVMTDGSASGEADTKILFIEEGKIVHTSTLSGSAQHVEECSCYPRYPGVRCVCRDNWKGSNRPIVDINIKDHSIVSSYVCSGLVGDTPRKNDSSSSSHCLDPNNEEGGHGVKGWAFDDGNDVWMGRTISEKSRLGYETFKVIEGWSNPKSKLQINRQVIVDRGNRSGYSGIFSVEGKSCINRCFYVELIRGRKEETEVLWTSNSIVVFCGTSRTYGTGSWPDGADINLMPI

SEQ ID NO: 23798 - protein, 469 aa, Artificial Sequence
  derived and/or modified protein sequence (wt) from neuraminidase__InfluenzaA__AGR55218
MNPNQKIITIGSVSLTISTICFFMQIAILITTVTLHFKQYEFNSPPNNQVVLCEPTIIERNITEIVYLTNTTIEKEICPKLAEYRNWSKPQCDITGFAPFSKDNSIRLSAGGDIWVTREPYVSCDPDKCYQFALGQGTTLNNVHSNNTVRDRTPYRTLLMNELGVPFHLGTKQVCIAWSSSSCHDGKAWLHVCITGDDKNATASFIYNGRLVDSIVSWSKEILRTQESECVCINGTCTVVMTDGSASGKADTKILFIEEGKIVHTSTLSGSAQHVEECSCYPRYPGVRCVCRDNWKGSNRPIVDINIKDHSIVSSYVCSGLVGDTPRKNDSSSSSHCLDPNNEEGGHGVKGWAFDDGNDVWMGRTISEKSRLGYETFKVIEGWSNPKSKLQINRQVIVDRGNRSGYSGIFSVEGKSCINRCFYVELIRGRKEETEVLWTSNSIVVFCGTSGTYGTGSWPDGADINLMPI

SEQ ID NO: 23799 - protein, 469 aa, Artificial Sequence; identical to SEQ ID NO: 23389
  derived and/or modified protein sequence (wt) from neuraminidase__InfluenzaA__AGT18726

SEQ ID NO: 23800 - protein, 469 aa, Artificial Sequence
  derived and/or modified protein sequence (wt) from neuraminidase__InfluenzaA__AGT18727
MNPNQKIITIGSVCMTIGMANLILQIGNIISIWISHSIQLGSQNQIETCNQSVITYENNTWVNQTYVNISNTNFAAGQSVVSVKLAGNSSLCPVSGWAIYSKDNSVRIGSKGDVFVIREPFISCSPLECRTFFLTQGALLNDKHSNGTIKDRSPYRTLMSCPIGEVPSPYNSRFESVAWSASACHDGINWLTIGISGPDSGAVAVLKYNGIITDTIKSWRNNILRTQESECACVNGSCFTIMTDGPSDGQASYKIFRIEKGKIVKSVEMNAPNYHYEECSCYPDSSEITCVCRDNWHGSNRPWVSFNQNLEYQIGYICSGIFGDNPRPNDKTGSCGPVSSNGANGVKGFSFKYGNGVWIGRTKSISSRKGFEMIWDPNGWSGTDNNFSIKQDIVGINEWSGYSGSFVQHPELTGLDCIRPCFWVELIRGRPKENTIWTSGSSISFCGVNSDTVGWSWPDGAELPFTIDK

SEQ ID NO: 23801 - protein, 469 aa, Artificial Sequence; identical to SEQ ID NO: 23389
  derived and/or modified protein sequence (wt) from neuraminidase__InfluenzaA__AGT18728

SEQ ID NO: 23802 - protein, 469 aa, Artificial Sequence
  derived and/or modified protein sequence (wt) from neuraminidase__InfluenzaA__AGT18729
MNPNQKIITIGQVCMTIGMANLILQIGNIISIWISHSIQLGSQNQIETCNQSVITYENNTWVNQTYVNISNTNFAAGQSVVSVKLAGNSSLCPVSGWAIYSKDNSVRIGSKGDVFVIREPFISCSPLECRTFFLTQGALLNDKHSNGTIKDRSPYRTLMSCPIGEVPSPYNSRFESVAWSASACHDGINWLTIGISGPDSGAVAVLKYNGIITDTIKSWRNNILRTQESECACVNGSCFTIMTDGPSDGQASYKIFRIEKGKIVKSVEMNAPNYHYEECSCYPDSSEITCVCRDNWHGSNRPWVSFNQNLEYQIGYICSGIFGDNPRPNDKTGSCGPVSSNGANGVKGFSFKYGNGVWIGRTKSISSRKGFEMIWDPNGWTGTDNNFSIKQDIVGINEWSGYSGSFVQHPELTGLDCIRPCFWVELIRGRPKENTIWTSGSSISFCGVNSDTVGWSWPDGAELPFTIDK

SEQ ID NO: 23803 - protein, 469 aa, Artificial Sequence
  derived and/or modified protein sequence (wt) from neuraminidase__InfluenzaA__AGT18730
MNPNQKIITIGSVCMTIGMANLILQIGNIISIWISHSIQLGNQSQIETCNQSVITYENNTWVNQTYVNISNTNFAAGQSVVSVKLAGNSSLCPVSGWAIYSKDNSVRIGSKGDVFVIREPFISCSPLECRTFFLTQGALLNDKHSNGTIKDRSPYRTLMSCPIGEVPSPYNSRFESVAWSASACHDGINWLTIGISGPDSGAVAVLKYNGIITDTIKSWRNNILRTQESECACVNGSCFTIMTDGPSDGQASYKIFRIEKGKIVKSVEINAPNYHYEECSCYPDSSEITCVCRDNWHGSNRPWVSFNQNLEYQIGYICSGIFGDNPRPNDKTGSCGPVSSNGANGVKGFSFKYGNGVWIGRTKSISSRKGFEMIWDPNGWTGTDNNFSIKQDIVGINEWSGYSGSFVQHPELTGLDCIRPCFWVELIRGRPKENTIWTSGSSISFCGVNSDTVGWSWPDGAELPFTIDK

SEQ ID NO: 23804 - protein, 469 aa, Artificial Sequence; identical to SEQ ID NO: 23389
  derived and/or modified protein sequence (wt) from neuraminidase__InfluenzaA__AGT18731

SEQ ID NO: 23805 - protein, 469 aa, Artificial Sequence
  derived and/or modified protein sequence (wt) from neuraminidase__InfluenzaA__AGT18732
MNPNQKIITIGSVCMTIGMANLILQIGNIISIWISHSIQLGNQSQIETCNQSVITYENNTWVNQTYVNISNTNFAAGQSVVSVKLAGNSSLCPVSGWAIYSKDNSVRIGSKGDVFVIREPFISCSPLECRTFFLTQGALLNDKHSNGTIKDRSPYRTLMSCPIGEVPSPYNSRFESVAWSASACHDGINWLTIGISGPDSGAVAVLKYNGIITDTIKSWRNNILRTQESECACVNGSCFTIMTDGPSDGQASYKIFRIEKGKIVKSVEMNAPNYHYEECSCYPDSSEITCVCRDNWHGSNRPWVSFNQNLEYQIGYICSGIFGDNPRPNDKTGSCGPVSSNGANGVKGFSFKYGNGVWIGRTKSISSRKGFEMIWDPNGWTGTDNNFSIKQDIVGINEWSGYSGSFVQHPELTGLDCIRPCFWVELIRGRPKENTIWTRGSSISFCGVNSDTVGWSWPDGAELPFTIDK

SEQ ID NO: 23806 - protein, 469 aa, Artificial Sequence
  derived and/or modified protein sequence (wt) from neuraminidase__InfluenzaA__AGT18733
MNPNQKIITIGSVCMTIGMANLILQIGNIISIWISHSIQLGNQSQIETCNQSVITYENNTWVNQTYVNISNTNFAAGQSVVSVKLAGNSSLCPVSGWAIYSKDNSVRIGSKGDVFVIREPFISCSPLECRTFFLTQGALLNDKHSNGTIKDRSPYRTLMSCPIGEVPSPYNSRFESVAWSASACHDGINWLTIGISGPDSGAVAVLKYNGIITDTIKSWRNNILRTQESECACVNGSCFTIMTDGPSDGQASYKIFRIEKGKIVKSVEMNAPNYHYEECSCYPDSSESTCVCRDNWHGSNRPWVSFNQNLEYQIGYICSGIFGDNPRPNDKTGSCGPVSSNGANGVKGFSFKYGNGVWIGRTKSISSRKGFEMIWDPNGWTGTDNNFSIKQDIVGINEWSGYSGSFVQHPELTGLDCIRPCFWVELIRGRPKENTIWTSGSSRSFCGVNSDTVGWSWPDGAELPFTIDK

SEQ ID NO: 23807 - protein, 469 aa, Artificial Sequence
  derived and/or modified protein sequence (wt) from neuraminidase__InfluenzaA__AGT18762
MNPNQKIITIGSVSLTISTICFFMQIAILITTVTLHFKQYEFNSPPNNQVTLCEPIIIERNITEIVYLTNTTIEKEICPKPAEYRNWSKPQCGITGFAPFSKDNSIRLSAGGDIWVTREPYVSCDPDKCYQFALGQGTTLNNVHSNNTVRDRTPYRTLLMNELGVPFHLGTKQVCIAWSSSSCHDGKAWLHVCITGDDKNATASFIYNGRLVDSVVSWSKEILRTQESECVCINGTCTVVMTDGSASGKADTKILFIEEGKIVHTSTLSGSAQHVEECSCYPRYPGVRCVCRDNWKGSNRPIVDINIKDHSIVSSYVCSGLVGDTPRKNDSSSSSHCLDPNNEEGGHGVKGWAFDDGNDVWMGRTINETSRLGYETFKVIEGWSNPKSKLQINRQVIVDRGDRSGYSGIFSVEGKSCINRCFYVELIRGRKEETEVLWTSNSIVVFCGTSGTYGTGSWPDGADLNLMPI

SEQ ID NO: 23808 - protein, 469 aa, Artificial Sequence
  derived and/or modified protein sequence (wt) from neuraminidase__InfluenzaA__AGT18764
MNPNQMIITIGSVSLTSSTICFFMQTASFITTVTLHIKQHEFHSPPNNQVMLCEPTIIERNITEIVYLTNTTIEKEICPKLAEYRNWSKPQCDITGFAPFSKDNSIRLSAGGDIWVTREPYVSCDPDKCYQFALGQGTTLNNVHSNNTVRDRTPYRTLLMNELGVPFHLGTKQVCIAWSSSSCHDGKAWLHVCITGDDKNATASFIYNGKLVDSVVSWSKEILRTQESECVCINGTCTVVMTDGSASGKADTKILFIEEGKIVHTSTLSGSAQHVEECSCYPRYPGVRCVCRDNWKGSNRPIVDINMKDHSIVSSYVCSGLVGDTPRKNDRSSNSHCLDPNNEEGGHGVKGWAFDDGNDVWMGRTINETSRLGYETFKVIEGWSNPKSKLQINRQVIVDRGNRSGYSGIFSVEGKSCINRCFYVELIRGRKEETEVLWTSNSIVVFCGTSGTYGTGSWPDGADLNLMPI

SEQ ID NO: 23809 - protein, 469 aa, Artificial Sequence
  derived and/or modified protein sequence (wt) from neuraminidase__InfluenzaA__AGT18765
MNPNQKIITIGSVSLTISTICFFMQIAILITTVTLHFKQHEFHSPPNNQVMLCEPTIIERNITEIVYLTNTTIEKEICPKLAEYRNWSKPQCDITGFAPFSKDNSIRLSAGGDIWVTREPYVSCDPDKCYQFALGQGTTLNNVHSNNTVRDRTPYRTLLMNELGVPFHLGTKQVCIAWSSSSCHDGKAWLHVCITGDDKNATASFIYNGRLVDSVVSWSKEILRTQESECVCINGTCTVVMTDGSASGKADTKILFIEEGKIVHTSTLSGSAQHVEECSCYPRYPGVRCVCRDNWKGSNRPIVDINMKDHSIVSSYVCSGLVGDTPRKNDRSSNSHCLDPNNEEGGHGVKGWAFDDGNDVWMGRTINETSRLGYETFKVIEGWSNPKSKLQINRQVIVDRGNRSGYSGIFSVEGKSCINRCFYVELIRGRKEETEVLWTSNSIVVFCGTSGTYGTGSWPDGADLNLMPI

SEQ ID NO: 23810 - protein, 469 aa, Artificial Sequence
  derived and/or modified protein sequence (wt) from neuraminidase__InfluenzaA__AGT18766
MNPNQKIITIGSVSLTISTICLFMQIAILITTVTLHFKQHEFHSPPNNQVMLCEPTIIERNITEIVYLTNTTIEKEICPKLAEYRNWSKPQCDITGFAPFSKDNSIRLSAGGDIWVTREPYVSCDPDKCYQFALGQGTTLNNVHSNNTVRDRTPYRTLLMNELGVPFHLGTKQVCIAWSSSSCHDGKAWLHVCITGDDKNATASFIYNGRLVDSVVSWSKEILRTQESECVCINGTCTVVMTDGSASGKADTKILFIEEGKIVHTSTLSGSAQHVEECSCYPRYPGVRCVCRDNWKGSNRPIVDINMKDHSIVSSYVCSGLVGDTPRKNDRSSNSHCLDPNNEEGGHGVKGWAFDDGNDVWMGRTINETSRLGYETFKVIEGWSNPKSKLQINRQVIVDRGNRSGYSGIFSVEGKSCINRCFYVELIRGRKEETEVLWTSNSIVVFCGTSGTYGTGSWPDGADLNLKPI

SEQ ID NO: 23811 - protein, 469 aa, Artificial Sequence
  derived and/or modified protein sequence (wt) from neuraminidase__InfluenzaA__AGT18767
MNPNQKIITIGSVSLTISTICFFMQTASLITTVTLHFKQHEFHSPPNNQVMLCEPTIIERNITEIVYLTNTTIEKEICPKLAEYRNWSKPQCDITGFAPFSKDNSIRLSAGGDIWVTREPYVSCDPDKCYQFALGQGTTLNNVHSNNTVRDRTPYRTLLMNELGVPFHLGTKQVCIAWSSSSCHDGKAWLHVCITGDDKNATASFIYNGRLVDSVVSWSKEILRTQESECVCINGTCTVVMTDGSASGKADTKILFIEEGKIVHTSTLSGSAQHVEECSCYPRYPGVRCVCRDNWKGSNRPIVDINMKDHSIVSSYVCSGLVGDTPRKNDRSSNSHCLDPNNEEGGHGVKGWAFDDGNDVWMGRTINETSRLGYETFKVIEGWSNPKSKLQINRQVIVDRGNRSGYSGIFSVEGKSCINRCFYVELIRGRKEETEVLWTSNSIVVFCGTSGTYGTGSWPDGADLNLMPI

SEQ ID NO: 23812 - protein, 469 aa, Artificial Sequence
  derived and/or modified protein sequence (wt) from neuraminidase__InfluenzaA__AGT18768
MNPNQKIITIGSVSLTISTICFFMQTASFITTVTLHFKQYEFNSPPNNQVMLCEPTIIERNITEIVYLTNTTIEKEICPKLAEYRNWSKPQCDITGFAPFSKDNSIRLSAGGDIWVTREPYVSCDPDKCYQFALGQGTTLNNVHSNNTVRDRTPYRTLLMNELGVPFHLGTKQVCIAWSSSSCHDGKAWLHVCITGDDKNATASFIYNGRLVDSVVSWSKEILRTQESECVCINGTCTVVMTDGSASGKADTKILFIEEGKIVHTSTLSGSAQHVEECSCYPRYPGVRCVCRDNWKGSNRPIVDINMKDHSIVSSYVCSGLVGDTPRKNDRSSNSHCLDPNNEEGGHGVKGWAFDDGNDVWMGRTINETSRLGYETFKVIEGWSNPKSKLQINRQVIVDRGNRSGYSGIFSVEGKSCINRCFYVELIRGRKEETEVLWTSNSIVVFCGTSGTYGTGSWPDGADLNLMPI

SEQ ID NO: 23813 - protein, 469 aa, Artificial Sequence; identical to SEQ ID NO: 22146
  derived and/or modified protein sequence (wt) from neuraminidase__InfluenzaA__AGT18769

SEQ ID NO: 23814 - protein, 469 aa, Artificial Sequence
  derived and/or modified protein sequence (wt) from neuraminidase__InfluenzaA__AGT18770
MNPNQKIITIGSVSLTISTICFFMQIAILITTVTLHFKQYEFNSPPNNKVMLCEPTIIERNITEIVYLTNTTIEKEICPKPAEYRNWSKPQCGITGFAPFSKDNSIRLSAGGDIWVTREPYVSCDPDKCYQFALGQGTTLNNVHSNNTVRDRTPYRTLLMNELGVPFHLGTKQVCIAWSSSSCHDGKAWLHVCITGDDKNATASFIYNGRLVDSVVSWSKEILRTQESECVCINGTCTVVMTDGSASGKADTKILFIEEGKIVHTSTLSGSAQHVEECSCYPRYPGVRCVCRDNWKGSNRPIVDINIKDHSIVSSYVCSGLVGDTPRKNDSSSSSHCLDPNNEEGGHGVKGWAFDDGNDVWMGRTINETSRLGYETFKVIEGWSNPKSKLQINRQVIVDRGDRSGYSGIFSVEGKSCINRCFYVELIRGRKEETEVLWTSNSIVVFCGTSGTYGTGSWPDGADLNLMPI

SEQ ID NO: 23815 - protein, 469 aa, Artificial Sequence
  derived and/or modified protein sequence (wt) from neuraminidase__InfluenzaA__AGT18771
MNPNQKIITIGSVSLTISTICFFMQIAILITTVTLHFKQYKFNSPPNNQVMLCEPTIIERNITEIVYLTNTTIEKEICPKPAEYRNWSKPQCGITGFAPFSKDNSIRLSAGGDIWVTREPYVSCDPDKCYQFALGQGTTLNNVHSNNTVRDRTPYRTLLMNELGVPFHLGTKQVCIAWSSSSCHDGKAWLHVCITGDDKNATASFIYNGRLVDSVVSWSKEILRTQESECVCINGTCTVVMTDGSASGKADTKILFIEEGKIVHTSTLSGSAQHVEECSCYPRYPGVRCVCRDNWKGSNRPIVDINIKDHSIVSSYVCSGLVGDTPRKNDSSSSSHCLDPNNEEGGHGVKGWAFDDGNDVWMGRTINETSRLGYETFKVIEGWSNPKSKLQINRQVIVDRGDRSGYSGIFSVEGKSCINRCFYVELIRGRKEETEVLWTSNSIVVFCGTSGTYGTGSWPDGADLNLMPI

SEQ ID NO: 23816 - protein, 469 aa, Artificial Sequence; identical to SEQ ID NO: 22146
  derived and/or modified protein sequence (wt) from neuraminidase__InfluenzaA__AGT18772

SEQ ID NO: 23817 - protein, 469 aa, Artificial Sequence
  derived and/or modified protein sequence (wt) from neuraminidase__InfluenzaA__AGT37104
MNPNQKIITIGSVSLTIATICLLMQIAILVTTVTLHFKQYECSSPPNNQVMPCEPTIIERNITKIVYLTNTTIEREACPELAEYRHWSKPQCKIRGFAPFSKDNSIRLSAGGDIWVTREPYVSCDPGKCYQFALGQGTTLNNRHSNDTVHDRTPYRTLLMNELGVPFHLGTKQVCIAWSSSSCHDGKAWLHVCITGHDKNATASFIYDGRLVDSIGSWSQNILRTQESECVCINGTCTVVMTDGSASGRADTKIMFVEEGKIVHISPLAGSAQHVEECSCYPKYPGVRCVCRDNWKGSNRPIVDINMKDYSIVSSYVCSGLVGDTPRRNDSSSTSYCLNPNNEEGGHGVKGWAFDDGDDVWMGRTISEKLRLGYETFKVIGGWSKPNSKLQINRQVVVDISNRSGYSGIFSVEGKSCINRCFYVELIRGRKQENEVWWTSNSIVVFCGTSGTYGTGSWPDGADINLMPI

SEQ ID NO: 23818 - protein, 469 aa, Artificial Sequence
  derived and/or modified protein sequence (wt) from neuraminidase__InfluenzaA__AGU69973
MNPNQKIITIGSVSLTIATICFLMQIAILVTTVTLHFKQYECNSPPNNQVMLCEPTIIERNITEIVYLTNTTIEKEICPKLAEYRNWSKPQCNITGFAPFSKDNSIRLSAGGDIWVTREPYVSCDPDKCYQFALGQGTTLNNGHSNDTVHDRTPYRTLLMNELGVPFHLGTKQVCIAWSSSSCHDGKAWLHVCVTGDDENATASFIYNGRLVDSIGSWSKKILRTQESECVCINGTCTVVMTDGSASGKADTKILFIEEGKIVHTSPLSGSAQHVEECSCYPRYPGVRCVCRDNWKGSNRPIVDINVKDYSIVSSYVRSGLVGDTPRKNDSSSSSHCLDPNNEEGGHGVKGWAFDDGNDVWMGRTISEKSRSGYETFKVIEGWSKPNSKLQINRQVIVDRGNRSGYSGIFSVEGKSCINRCFYVELIRGGKQETEVLWTSNSIVVFCGTSGTYGTGSWPDGADLNLMPI

SEQ ID NO: 23819 - protein, 469 aa, Artificial Sequence
  derived and/or modified protein sequence (wt) from neuraminidase__InfluenzaA__AGU92648
MNPNQKIITIGSVCMTIGMANLILQIGNIISIWISHSIQLRNQSQIETCNQSVITYENNTWVNQTYVNISNTNFAAGQSVVSVKLAGNSSLCPVSGWAIYSKDNSIRIGSKGDVFVIREPFISCSPLECRTFFLTQGALLNDKHSNGTIKDRSPYRTLMSCPIGEVPSPYNSRFESVAWSASACHDGINWLTIGISGPDNGAVAVLKYNGIITDTIKSWRNNILRTQESECACVNGSCFTIMTDGPSDGQASYKIFRIEKGKIVKSVEMNAPNYHYEECSCYPDSSEIICVCRDNWHGSNRPWVSFNQNLEYQIGYICSGIFGDNPRPNDKTGSCGPVSSNGANGVKGFSFKYGNGVWIGRTKSISSRKGFEMIWDPNGWTGTDNNFSIKQDIVGINEWSGYSGSFVQHPELTGLDCIRPCFWVELIRGRPKENTIWTSGSSISFCGVNSDTVGWSWPDGAELPFTIDK

SEQ ID NO: 23820 - protein, 469 aa, Artificial Sequence
  derived and/or modified protein sequence (wt) from neuraminidase__InfluenzaA__AGU92670
MNPNQKIITIGSVCMTIGMANLILQIGNIISIWISHSIQLRNQSQIETCNQSVITYENNTWVNQTYVNISNTNFAAGQSVVSVKLAGNSSLCPVSGWAIYSKDNSIRIGSKGDVFVIREPFISCSPLECRTFFLTQGALLNDKHSNGTIKDRSPYRTLMSCPIGEVPSPYNSRFESVAWSASACHDGINWLTIGISGPDNGAVAVLKYNGIITDTIKSWRNNILRTQESECACVNGSCFTIMTDGPSDGQASYKIFRIEKGKIVKSVEMNAPNYHYEECSCYPDSSEIICVCRDNWHGSNRPWVSFNQNLEYQIGYICSGIFGDNPRPDDKTGSCGPVSSNGANGVKGFSFKYGNGVWIGRTKSISSRKGFEMIWDPNGWTGTDNNFSIKQDIVGINEWSGYSGSFVQHPELTGLDCIRPCFWVELIRGRPKENTIWTSGSSISFCGVNSDTVGWSWPDGAELPFTIDK

SEQ ID NO: 23821 - protein, 469 aa, Artificial Sequence
  derived and/or modified protein sequence (wt) from neuraminidase__InfluenzaA__AGU92681
MNPNQKIITIGSVCMTIGMANLILQIGNIISIWISHSIQLRNQSQIETCNQSVITYENNTWVNQTYVNISNTNFAAGQSVVSVKLAGNSSLCPVSGWATYSKDNSIRIGSKGDVFVIREPFISCSPLECRTFFLTQGALLNDKHSNGTIKDRSPYRTLMSCPIGEVPSPYNSRFESVAWSASACHDGINWLTIGISGPDNGAVAVLKYNGIITDTIKSWRNNILRTQESECACVNGSCFTIMTDGPSDGQASYKIFRIEKGKIVKSVEMNAPNYHYEECSCYPDSSEIICVCRDNWHGSNRPWVSFNQNLEYQIGYICSGIFGDNPRPNDKTGSCGPVSSNGANGVKGFSFKYGNGVWIGRTKSISSRKGFEMIWDPNGWTGTDNNFSIKQDIVGINEWSGYSGSFVQHPELTGLDCIRPCFWVELIRGRPKENTIWTSGSSISFCGVNSDTVGWSWPDGAELPFTIDK

SEQ ID NO: 23822 - protein, 469 aa, Artificial Sequence
  derived and/or modified protein sequence (wt) from neuraminidase__InfluenzaA__AGU92692
MNPNQKIITIGSVCMTIGMANLILQIGNIISIWISHSIQLGNQNQIETCNQSVITYENNTWVNQTYVNISNTNFAAGQSVVSVKLAGNSSLCPVSGWAIYSKDNSVRVGSKGDVFVIREPFISCSPLECRTFFLTQGALLNDKHSNGTIKDRSPYRTLMSCPIGEVPSPYNSRFESVAWSASACHDGINWLTIGISGPDNGAVAVLKYNGIITDTIKSWRNNILRTQESECACVNGSCFTVMTDGPSNGQASYKIFRIEKGKIVKSVEMNAPNYHYEECSCYPDSSEITCVCRDNWHGSNRPWVSFNQNLEYQIGYICSGIFGDNPRPNDKTGSCGPVSSNGANGVKGFSFKYGNGVWIGRTKSISSRNGFEMIWDPNGWTGTDNNFSIKQDIVGINEWSGYSGSFIQHPELTGLDCIRPCFWVELIRGRPKENTIWTSGSSISFCGVNSDTVGWSWPDGAELPFTIDK

SEQ ID NO: 23823 - protein, 469 aa, Artificial Sequence; identical to SEQ ID NO: 23822
  derived and/or modified protein sequence (wt) from neuraminidase__InfluenzaA__AGU92703

SEQ ID NO: 23824 - protein, 469 aa, Artificial Sequence; identical to SEQ ID NO: 23822
  derived and/or modified protein sequence (wt) from neuraminidase__InfluenzaA__AGU92714

SEQ ID NO: 23825 - protein, 469 aa, Artificial Sequence; identical to SEQ ID NO: 23822
  derived and/or modified protein sequence (wt) from neuraminidase__InfluenzaA__AGU92725

SEQ ID NO: 23826 - protein, 469 aa, Artificial Sequence; identical to SEQ ID NO: 23822
  derived and/or modified protein sequence (wt) from neuraminidase__InfluenzaA__AGU92736

SEQ ID NO: 23827 - protein, 469 aa, Artificial Sequence; identical to SEQ ID NO: 23822
  derived and/or modified protein sequence (wt) from neuraminidase__InfluenzaA__AGU92747

SEQ ID NO: 23828 - protein, 469 aa, Artificial Sequence; identical to SEQ ID NO: 23822
  derived and/or modified protein sequence (wt) from neuraminidase__InfluenzaA__AGU92758

SEQ ID NO: 23829 - protein, 469 aa, Artificial Sequence; identical to SEQ ID NO: 23819
  derived and/or modified protein sequence (wt) from neuraminidase__InfluenzaA__AGU92769

SEQ ID NO: 23830 - protein, 469 aa, Artificial Sequence; identical to SEQ ID NO: 23819
  derived and/or modified protein sequence (wt) from neuraminidase__InfluenzaA__AGU92780

SEQ ID NO: 23831 - protein, 469 aa, Artificial Sequence
  derived and/or modified protein sequence (wt) from neuraminidase__InfluenzaA__AGU92791
MNPNQKIITIGSVCMTIGMANLILQIGNIISIWISHSIQLRNQSQIETCNQSVITYENNTWVNQTYVNISNTNFAAGQSVVSVKLAGNSSLCPVSGWAIYSKDNSIRIGSKGDVFVIREPFISCSPLECRIFFLTQGALLNDKHSNGTIKDRSPYRTLMSCPIGEVPSPYNSRFESVAWSASACHDGINWLTIGISGPDNGAVAVLKYNGIITDTIKSWRNNILRTQESECACVNGSCFTIMTDGPSDGQASYKIFRIEKGKIVKSVEMNAPNYHYEECSCYPDSSEIICVCRDNWHGSNRPWVSFNQNLEYQIGYICSGIFGDNPRPNDKTGSCGPVSSNGANGVKGFSFKYGNGVWIGRTKSISSRKGFEMIWDPNGWTGTDNNFSIKQDIVGINEWSGYSGSFVQHPELTGLDCIRPCFWVELIRGRPKENTIWTSGSSISFCGVNSDTVGWSWPDGAELPFTIDK

SEQ ID NO: 23832 - protein, 469 aa, Artificial Sequence; identical to SEQ ID NO: 23819
  derived and/or modified protein sequence (wt) from neuraminidase__InfluenzaA__AGU92802

SEQ ID NO: 23833 - protein, 469 aa, Artificial Sequence; identical to SEQ ID NO: 23819
  derived and/or modified protein sequence (wt) from neuraminidase__InfluenzaA__AGU92813

SEQ ID NO: 23834 - protein, 469 aa, Artificial Sequence; identical to SEQ ID NO: 23819
  derived and/or modified protein sequence (wt) from neuraminidase__InfluenzaA__AGU92824

SEQ ID NO: 23835 - protein, 469 aa, Artificial Sequence
  derived and/or modified protein sequence (wt) from neuraminidase__InfluenzaA__AGU92846
MNPNQKIITIGSVCMTIGMANLILQIGNIISIWISHSIQLGNQNQIETCNQSVITYENNTWVNQTYVNISNTNFAAGQSVVSVKLAGNSSLCPVSGWAIYSKDNSVRVGSKGDVFVIREPFISCSPLECRTFFLTQGALLNDKHSNGTIKDRSPYRTLMSCPIGEVPSPYNSRFESVAWSASACHDGINWLTIGISGPDNGAVAVLKYNGIITDTIKSWRNNILRTQESECACVNGSCFTVMTDGPSNGQASYKIFRIEKGKIVKSVEMNAPNYHYEECSCYPDSSEITCVCRDNWHGSNRPWVSFNQNLEYQIGYICSGIFGDNPRPNDKTGSCGPVSSNGANGVKGFAFKYGNGVWIGRTKSISSRNGFEMIWDPNGWTGTDNNFSIKQDIVGINEWSGYSGSFIQHPELTGLDCIRPCFWVELIRGRPKENTIWTSGSSISFCGVNSDTVGWSWPDGAELPFTIDK

SEQ ID NO: 23836 - protein, 469 aa, Artificial Sequence
  derived and/or modified protein sequence (wt) from neuraminidase__InfluenzaA__AGU92868
MNPNQKIITIGSVCMTIGMANLILQIGNIISIWISHSIQLGNQNQIETCNQSVITYENNTWVNQTYVNISNTNFAAGQSVVSVKFAGNSSLCPVSGWAIYSKDNSVRVGSKGDVFVIREPFISCSPLECRTFFLTQGALLNDKHSNGTIKDRSPYRTLMSCPIGEVPSPYNSRFESVAWSASACHDGINWLTIGISGPDNGAVAVLKYNGIITDTIKSWRNNILRTQESECACVNGSCFTVMTDGPSNGQASYKIFRIEKGKIVKSVEMNAPNYHYEECSCYPDSSEITCVCRDNWHGSNRPWVSFNQNLEYQIGYICSGIFGDNPRPNDKTGSCGPVSSNGANGVKGFSFKYGNGVWIGRTKSISSRNGFEMIWDPNGWTGTDNNFSIKQDIVGINEWSGYSGSFIQHPELTGLDCIRPCFWVELIRGRPKENTIWTSGSSISFCGVNSDTVGWSWPDGAELPFTIDK

SEQ ID NO: 23837 - protein, 469 aa, Artificial Sequence
  derived and/or modified protein sequence (wt) from neuraminidase__InfluenzaA__AGU92890
MNPNQKIITIGSVCMTIGMANLILQIGNIISIWISHSIQLGNQNQIETCNQSVITYENNTWVNQTYVNISNTNFAAGQSVVSVKLAGNSSLCPVSGWAIYSKDNSVRVGSKGDVFVIREPFISCSPLECRTFFLTQGALLNDKHSNGTIKDRSPYRTLMSCPIGEVPSPYNSRFESVAWSASACHDGINWLTIGISGPDNGAVAVLKYNGIITDTIKSWRNNILRTQESECACVNGSCFTVMTDGPSNGQASYKIFRIEKGKIVKSVEMNAPNYHYEECSCYPDSSEITCVCRDNWHGSNRPWVSFNQNLEYQIGYICSGIFGDNPRPNDKTGSCGPVSSNGANGVKGFSFKYGNGVWIGRTKSISSRNGFEMIWDPNGWTETDNNFSIKQDIVGINEWSGYSGSFIQHPELTGLDCIRPCFWVELIRGRPKENTIWTSGSSISFCGVNSDTVGWSWPDGAELPFTIDK

SEQ ID NO: 23838 - protein, 469 aa, Artificial Sequence; identical to SEQ ID NO: 23819
  derived and/or modified protein sequence (wt) from neuraminidase__InfluenzaA__AGU92901

SEQ ID NO: 23839 - protein, 469 aa, Artificial Sequence; identical to SEQ ID NO: 23819
  derived and/or modified protein sequence (wt) from neuraminidase__InfluenzaA__AGU92912

SEQ ID NO: 23840 - protein, 469 aa, Artificial Sequence; identical to SEQ ID NO: 23819
  derived and/or modified protein sequence (wt) from neuraminidase__InfluenzaA__AGU92923

SEQ ID NO: 23841 - protein, 469 aa, Artificial Sequence; identical to SEQ ID NO: 23822
  derived and/or modified protein sequence (wt) from neuraminidase__InfluenzaA__AGU92934

SEQ ID NO: 23842 - protein, 469 aa, Artificial Sequence; identical to SEQ ID NO: 23822
  derived and/or modified protein sequence (wt) from neuraminidase__InfluenzaA__AGU92945

SEQ ID NO: 23843 - protein, 469 aa, Artificial Sequence; identical to SEQ ID NO: 23822
  derived and/or modified protein sequence (wt) from neuraminidase__InfluenzaA__AGU92956

SEQ ID NO: 23844 - protein, 469 aa, Artificial Sequence; identical to SEQ ID NO: 23819
  derived and/or modified protein sequence (wt) from neuraminidase__InfluenzaA__AGU92967

SEQ ID NO: 23845 - protein, 469 aa, Artificial Sequence; identical to SEQ ID NO: 23819
  derived and/or modified protein sequence (wt) from neuraminidase__InfluenzaA__AGU92978

SEQ ID NO: 23846 - protein, 469 aa, Artificial Sequence
  derived and/or modified protein sequence (wt) from neuraminidase__InfluenzaA__AGU92989
MNPNQKIITIGSVCMTIGMANLILQIGNIISIWISHSIQLGNQNQIETCNQSVITYENNTWVNQTYVNISNTNFAAGQSVVSVKLAGNSSLCPVSGWAIYSKDNSVRVGSKGDVFVIREPFISCSPLECRTFFLTQGALLNDKHSNGTIKDRSPYRTLMSCPIGEVPSPYNSRFESVAWSASACHDGINWLTIGISGPDNGAVAVLKYNGIITDTIKSWRNNILRTQESECACVNGSCFTVMTDGPSNGQASYKIFRIEKGKIVKSVEMNAPNYHYEECSCYPDSSEITCVCRDNWHGSNRPWVSFNQNLEYQIGYICSGIFGDNPRPNDKTGSCGPVSSNGANGVKGFSFKYGNGVWIGRTKSISSRNGFEMIWDPNGWTGTDNNFSIKQDIVGINEWSGYSGSFVQHPELTGLDCIRPCFWVELIRGRPKENTIWTSGSSISFCGVNSDTVGWSWPDGAELPFTIDK

SEQ ID NO: 23847 - protein, 469 aa, Artificial Sequence; identical to SEQ ID NO: 23836
  derived and/or modified protein sequence (wt) from neuraminidase__InfluenzaA__AGU93000

SEQ ID NO: 23848 - protein, 469 aa, Artificial Sequence; identical to SEQ ID NO: 23837
  derived and/or modified protein sequence (wt) from neuraminidase__InfluenzaA__AGU93011

SEQ ID NO: 23849 - protein, 454 aa, Artificial Sequence; identical to SEQ ID NO: 20390
  derived and/or modified protein sequence (wt) from neuraminidase__InfluenzaA__AGU93022

SEQ ID NO: 23850 - protein, 469 aa, Artificial Sequence
  derived and/or modified protein sequence (wt) from neuraminidase__InfluenzaA__AGU93034
MNPTQKIITIGSVCMTIGMANLILQIGNIISIWISHSIQLGNQNQIETCNQSVITYENNTWVNQTYVNISNTNFAAGQSVASVKLAGNSSLCPVSGWAIYSKDNSIRIGSKGDVFVIREPFISCSPLECRTFFLTQGALLNDKHSNGTIKDRSPYRTLMSCPIGEVPSPYNSRFESVAWSASACHDGINWLTIGISGPDNGAVAVLKYNGIITDTIKSWRNNILRTQESECACVNGSCFTIMTDGPSDGQASYKIFRIEKGKIVKSVEMNAPNYHYEECSCYPDSSEITCVCRDNWHGSNRPWVSFNQNLEYQIGYICSGIFGDNPRPNDKTGSCGPVSSNGANGVKGFSFKYGNGVWIGRTKSISSRKGFEMIWDPNGWTGTDNNFSIKQDIVGINEWSGYSGSFVQHPELTGLDCIRPCFWVELIRGRPKENTIWTSGSSISFCGVNSDTVGWSWPDGAELPFTIDK

SEQ ID NO: 23851 - protein, 469 aa, Artificial Sequence; identical to SEQ ID NO: 23158
  derived and/or modified protein sequence (wt) from neuraminidase__InfluenzaA__AGU93045

SEQ ID NO: 23852 - protein, 469 aa, Artificial Sequence; identical to SEQ ID NO: 23819
  derived and/or modified protein sequence (wt) from neuraminidase__InfluenzaA__AGU93056

SEQ ID NO: 23853 - protein, 469 aa, Artificial Sequence; identical to SEQ ID NO: 22146
  derived and/or modified protein sequence (wt) from neuraminidase__InfluenzaA__AGV98980

SEQ ID NO: 23854 - protein, 469 aa, Artificial Sequence; identical to SEQ ID NO: 22146
  derived and/or modified protein sequence (wt) from neuraminidase__InfluenzaA__AGV98993

SEQ ID NO: 23855 - protein, 469 aa, Artificial Sequence; identical to SEQ ID NO: 22146
  derived and/or modified protein sequence (wt) from neuraminidase__InfluenzaA__AGV99005

SEQ ID NO: 23856 - protein, 469 aa, Artificial Sequence; identical to SEQ ID NO: 22146
  derived and/or modified protein sequence (wt) from neuraminidase__InfluenzaA__AGV99017

SEQ ID NO: 23857 - protein, 469 aa, Artificial Sequence; identical to SEQ ID NO: 22146
  derived and/or modified protein sequence (wt) from neuraminidase__InfluenzaA__AGV99040

SEQ ID NO: 23858 - protein, 469 aa, Artificial Sequence
  derived and/or modified protein sequence (wt) from neuraminidase__InfluenzaA__AGV99052
MNPNQKIITIGSVSLTISTICFFMQIAILITTVTLHFKQYEFNSPPNNQVMLCEPTIIERNITEIVYLTNTTIEKEICPKPAEYRNWSKPQCGITGFAPFSKDNSIRLSAGGDIWVTREPYVSCDPDKCYQFALGQGTTLNNVHSNNTVRDRTPYRTLLMNELGVPFHLGTKQVCIAWSSSSCHDGKAWLHVCITGDDKNATASFIYNGRLVDSVVSWSKEILRTQESECVCINGTCTVVMTDGSASGKADTKILFIEEGKIVHTSTLSGSAQHVEECSCYPRYPGVRCVCRDNWKGSNRPIVDINIKDHSVISSYVCSGLVGDTPRKNDSSSSSHCLDPNNEEGGHGVKGWAFDDGNDVWMGRTINETSRLGYETFKVIEGWSNPKSKLQINRQVIVDRGDRSGYSGIFSVEGKSCINRCFYVELIRGRKEETEVLWTSNSIVVFCGTSGTYGTGSWPDGADLNLMPI

SEQ ID NO: 23859 - protein, 469 aa, Artificial Sequence
  derived and/or modified protein sequence (wt) from neuraminidase__InfluenzaA__AGV99100
MNPNQKIITIGSVSLTISTICFFMQIAILITTVTLHFKQYEFNSPPNNQVMLCEPTIIERNITEIVYLTNTTIEKEICPKPAEYRNWSKPQCGITGFAPFSKDNSIRLSAGGDIWVTREPYVSCDPDKCYQFALGQGTTLNNVHSNNTVRDRTPYRTLLMNELGVPFHLGTKQVCIAWSSSSCHDGKAWLHVCITGDDKNATASFIYNGRLVDSVVSWSKEILRTQESECVCINGTCTVVMTDGSASGKADTKILFIEEGKIVHTSTLSGSAQHVEECSCYPRYPGVRCVCRDNWKGSNRPIVDINIKDHSIVSSYVCSGLVGDTPRKNDSSSSSHCLDPNNEEGGHGVKGWAFDDGNDVWMGRTINETSRLGYETFKVIEGWSNPKSKLQINRQVIVDRGDRSGYSGIFSVEGKSCVNRCFYVELIRGRKEETEVLWTSNSIVVFCGTSGTYGTGSWPDGADLNLMPI

SEQ ID NO: 23860 - protein, 469 aa, Artificial Sequence; identical to SEQ ID NO: 22146
  derived and/or modified protein sequence (wt) from neuraminidase__InfluenzaA__AGV99112

SEQ ID NO: 23861 - protein, 469 aa, Artificial Sequence; identical to SEQ ID NO: 22146
  derived and/or modified protein sequence (wt) from neuraminidase__InfluenzaA__AGV99124

SEQ ID NO: 23862 - protein, 469 aa, Artificial Sequence; identical to SEQ ID NO: 22146
  derived and/or modified protein sequence (wt) from neuraminidase__InfluenzaA__AGV99136

SEQ ID NO: 23863 - protein, 469 aa, Artificial Sequence; identical to SEQ ID NO: 22146
  derived and/or modified protein sequence (wt) from neuraminidase__InfluenzaA__AGV99148

SEQ ID NO: 23864 - protein, 469 aa, Artificial Sequence; identical to SEQ ID NO: 22146
  derived and/or modified protein sequence (wt) from neuraminidase__InfluenzaA__AGV99160

SEQ ID NO: 23865 - protein, 469 aa, Artificial Sequence; identical to SEQ ID NO: 22146
  derived and/or modified protein sequence (wt) from neuraminidase__InfluenzaA__AGV99172

SEQ ID NO: 23866 - protein, 469 aa, Artificial Sequence; identical to SEQ ID NO: 22146
  derived and/or modified protein sequence (wt) from neuraminidase__InfluenzaA__AGV99196

SEQ ID NO: 23867 - protein, 469 aa, Artificial Sequence; identical to SEQ ID NO: 22146
  derived and/or modified protein sequence (wt) from neuraminidase__InfluenzaA__AGV99208

SEQ ID NO: 23868 - protein, 469 aa, Artificial Sequence; identical to SEQ ID NO: 22146
  derived and/or modified protein sequence (wt) from neuraminidase__InfluenzaA__AGV99959

SEQ ID NO: 23869 - protein, 469 aa, Artificial Sequence; identical to SEQ ID NO: 23357
  derived and/or modified protein sequence (wt) from neuraminidase__InfluenzaA__AGW00005

SEQ ID NO: 23870 - protein, 469 aa, Artificial Sequence; identical to SEQ ID NO: 22146
  derived and/or modified protein sequence (wt) from neuraminidase__InfluenzaA__AGW00068

SEQ ID NO: 23871 - protein, 469 aa, Artificial Sequence
  derived and/or modified protein sequence (wt) from neuraminidase__InfluenzaA__AGW00080
MNPNQKIITIGSVSLTISTICFFMQIAILITTVTLHFKQYEFDSPPNNQVMLCEPTIIERNITEIVYLTNTTIEKEICPKPAEYRNWSKPQCGITGFAPFSKDNSIRLSAGGDIWVTREPYVSCDPDKCYQFALGQGTTLNNVHSNNTVRDRTPYRTLLMNELGVPFHLGTKQVCIAWSSSSCHDGKAWLHVCITGDDKNATASFIYNGRLVDSVVSWSKEILRTQESECVCINGTCTVVMTDGSASGKADTKILFIEEGKIVHTSTLSGSAQHVEECSCYPRYPGVRCVCRDNWKGSNRPIVDINIKDHSIVSSYVCSGLVGDTPRKNDSSSSSHCLDPNNEEGGHGVKGWAFDDGNDVWMGRTINETSRLGYETFKVIEGWSNPKSKLQINRQVIVDRGDRSGYSGIFSVEGKSCINRCFYVELIRGRKEETEVLWTSNSIVVFCGTSGTYGTGSWPDGADLNLMPI

SEQ ID NO: 23872 - protein, 469 aa, Artificial Sequence
  derived and/or modified protein sequence (wt) from neuraminidase__InfluenzaA__AGW00104
MNPNQKIITIGSVSLTISTICFFMQIAILITTVTLHFKQYEFNSPPNNQVMLCEPTIIERNITEIVYLTNTTIEKEICPKPAEYRNWSKPQCGITGFAPFSKDNSIRLSAGGDIWVTREPYVSCDPDKCYQFALGQGTTLNNVHSNNTVRDRTPYRTLLMNELGVPFHLGTKQVCIAWSSSSCHDGKAWLHVCITGDDKNATASFIYNGRLVDSVVSWSKEILRTQESECVCINGTCTVVMTDGSASGEADTKILFIEEGKIVHTSTLSGSAQHVEECSCYPRYPGVRCVCRDNWKGSNRPIVDINIKDHSIVSSYVCSGLVGDTPRKNDSSSSSHCLDPNNEEGGHGVKGWAFDDGNDVWMGRTINETSRLGYETFKVIEGWSNPKSKLQINRQVIVDRGDRSGYSGIFSVEGKSCINRCFYVELIRGRKEETEVLWTSNSIVVFCGTSGTYGTGSWPDGADLNLMPI

SEQ ID NO: 23873 - protein, 469 aa, Artificial Sequence; identical to SEQ ID NO: 23871
  derived and/or modified protein sequence (wt) from neuraminidase__InfluenzaA__AGW00116

SEQ ID NO: 23874 - protein, 469 aa, Artificial Sequence; identical to SEQ ID NO: 23871
  derived and/or modified protein sequence (wt) from neuraminidase__InfluenzaA__AGW00128

SEQ ID NO: 23875 - protein, 469 aa, Artificial Sequence; identical to SEQ ID NO: 22146
  derived and/or modified protein sequence (wt) from neuraminidase__InfluenzaA__AGW00140

SEQ ID NO: 23876 - protein, 469 aa, Artificial Sequence; identical to SEQ ID NO: 22146
  derived and/or modified protein sequence (wt) from neuraminidase__InfluenzaA__AGW00152

SEQ ID NO: 23877 - protein, 469 aa, Artificial Sequence; identical to SEQ ID NO: 23871
  derived and/or modified protein sequence (wt) from neuraminidase__InfluenzaA__AGW00164

SEQ ID NO: 23878 - protein, 469 aa, Artificial Sequence; identical to SEQ ID NO: 22146
  derived and/or modified protein sequence (wt) from neuraminidase__InfluenzaA__AGW00176

SEQ ID NO: 23879 - protein, 469 aa, Artificial Sequence; identical to SEQ ID NO: 22146
  derived and/or modified protein sequence (wt) from neuraminidase__InfluenzaA__AGW00188

SEQ ID NO: 23880 - protein, 469 aa, Artificial Sequence; identical to SEQ ID NO: 22146
  derived and/or modified protein sequence (wt) from neuraminidase__InfluenzaA__AGW00712

SEQ ID NO: 23881 - protein, 469 aa, Artificial Sequence; identical to SEQ ID NO: 22146
  derived and/or modified protein sequence (wt) from neuraminidase__InfluenzaA__AGW00724

SEQ ID NO: 23882 - protein, 469 aa, Artificial Sequence
  derived and/or modified protein sequence (wt) from neuraminidase__InfluenzaA__AGW00736
MNPNQKIITIGSVSLTISTICFFMQIAILITTVTLHFKQYEFNSPPNNQMMLCEPTIIERNITEIVYLTNTTIEKEICPKPAEYRNWSKPQCGITGFAPFSKDNSIRLSAGGDIWVTREPYVSCDPDKCYQFALGQGTTLNNVHSNNTVRDRTPYRTLLMNELGVPFHLGTKQVCIAWSSSSCHDGKAWLHVCITGDDKNATASFIYNGRLVDSVVSWSKEILRTQESECVCINGTCTVVMTDGSASGKADTKILFIEEGKIVHTSTLSGSAQHVEECSCYPRYPGVRCVCRDNWKGSNRPIVDINIKDHSIVSSYVCSGLVGDTPRKNDSSSSSHCLDPNNEEGGHGVKGWAFDDGNDVWMGRTINETSRLGYETFKVIEGWSDPKSKLQINRQVIVDRGDRSGYSGIFSVEGKSCINRCFYVELIRGRKEETEVLWTSNSIVVFCGTSGTYGTGSWPDGADLNLMPI

SEQ ID NO: 23883 - protein, 469 aa, Artificial Sequence
  derived and/or modified protein sequence (wt) from neuraminidase__InfluenzaA__AGW00748
MNPNQKIITIGSVSLTISTICFFMQIAILITTVTLHFKQYEFNSPPNNQVMLCEPTIIERNITEIVYLTNTTIEKEICPKPAEYRNWSKPQCGITGFAPFSKDNSIRLSAGGDIWVTREPYVSCDPDKCYQFALGQGTTLNNMHSNNTVRDRTPYRTLLMNELGVPFHLGTKQVCIAWSSSSCHDGKAWLHVCITGDDKNATASFIYNGRLVDSVVSWSKEILRTQESECVCINGTCTVVMTDGSASGKADTKILFIEEGKIVHTSTLSGSAQHVEECSCYPRYPGVRCVCRDNWKGSNRPIVDINIKDHSIVSSYVCSGLVGDTPRKNDSSSSSHCLDPNNEEGGHGVKGWAFDDGNDVWMGRTINETSRLGYETFKVIEGWSNPKSKLQINRQVIVDRGDRSGYSGIFSVEGKSCINRCFYVELIRGRKEETEVLWTSNSIVVFCGTSGTYGTGSWPDGADLNLMPI

SEQ ID NO: 23884 - protein, 469 aa, Artificial Sequence
  derived and/or modified protein sequence (wt) from neuraminidase__InfluenzaA__AGW00760
MNPNQKIITIGSVSLTISTICFFMQIAILITTVTLHFKQYEFNSPPNNQVMLCEPTIIERNITEIVYLTNTTIEKEICPKPAEYRNWSKPQCGITGFAPFSKDNSIRLSAGGDIWVTREPYVSCDPDKCYQFALGQGTTLNNVHSNNTVRDRTPYRTLLMNELGVPFHLGTKQVCIAWSSSSCHDGKAWLHVCITGDDKNATASFIYNGRLVDSVVSWSKEILRTQESECVCINGTCTVVMTDGSASGKADTKILFIEEGKIVHTSTLSGSAQHVEECSCYPRYPGVRCVCRDNWKGSNRPIVDINIKDHSIVSSYVCSGLVGDTPRKNDSSSSSHCLDPNNEEGGHGVKGWAFDDGNDVWMGRTINETSRLGYETFKVIEGWSNPKSKLQVNRQVIVDRGDRSGYSGIFSVEGKSCINRCFYVELIRGRKEETEVLWTSNSIVVFCGTSGTYGTGSWPDGADLNLMPI

SEQ ID NO: 23885 - protein, 469 aa, Artificial Sequence; identical to SEQ ID NO: 22146
  derived and/or modified protein sequence (wt) from neuraminidase__InfluenzaA__AGW00784

SEQ ID NO: 23886 - protein, 469 aa, Artificial Sequence; identical to SEQ ID NO: 22146
  derived and/or modified protein sequence (wt) from neuraminidase__InfluenzaA__AGW00796

SEQ ID NO: 23887 - protein, 469 aa, Artificial Sequence; identical to SEQ ID NO: 23871
  derived and/or modified protein sequence (wt) from neuraminidase__InfluenzaA__AGW00808

SEQ ID NO: 23888 - protein, 469 aa, Artificial Sequence; identical to SEQ ID NO: 23375
  derived and/or modified protein sequence (wt) from neuraminidase__InfluenzaA__AGW00820

SEQ ID NO: 23889 - protein, 469 aa, Artificial Sequence; identical to SEQ ID NO: 22146
  derived and/or modified protein sequence (wt) from neuraminidase__InfluenzaA__AGW00832

SEQ ID NO: 23890 - protein, 469 aa, Artificial Sequence
  derived and/or modified protein sequence (wt) from neuraminidase__InfluenzaA__AGW00844
MNPNQKIITIGSVSLTISTICFFMQIAILITTVTLHFKQYEFNFPPNNQVMLCEPTIIERNITEIVYLTNTTIEKEICPKPAEYRNWSKPQCGITGFAPFSKDNSIRLSAGGDIWVTREPYVSCDPDKCYQFALGQGTTLNNVHSNNTVRDRTPYRTLLMNELGVPFHLGTKQVCIAWSSSSCHDGKAWLHVCITGDDKNATASFIYNGRLVDSVVSWSKEILRTQESECVCINGTCTVVMTDGSASGKADTKILFIEEGKIVHTSTLSGSAQHVEECSCYPRYPGVRCVCRDNWKGSNRPIVDINIKDHSIVSSYVCSGLVGDTPRKNDSSSSSHCLDPNNEEGGHGVKGWAFDDGNDVWMGRTINETSRLGYETFKVIEGWSNPKSKLQINRQVIVDRGDRSGYSGIFSVEGKSCINRCFYVELIRGRKEETEVLWTSNSIVVFCGTSGTYGTGSWPDGADLNLMPI

SEQ ID NO: 23891 - protein, 469 aa, Artificial Sequence; identical to SEQ ID NO: 23883
  derived and/or modified protein sequence (wt) from neuraminidase__InfluenzaA__AGW00868

SEQ ID NO: 23892 - protein, 469 aa, Artificial Sequence
  derived and/or modified protein sequence (wt) from neuraminidase__InfluenzaA__AGW00880
MNPNQKIITIGSVSLTISTICFFMQIAILITTVTLHFKQYEFNSPPNNQVMLCEPTIIERNITEIVYLTNTTIEKEICPKPAEYRNWSKPQCDITGFAPFSKDNSIRLSAGGDVWVTREPYVSCDPDKCYQFALGQGTTLNNVHSNNTVRDRTPYRTLLMNELGVPFHLGTKQVCIAWSSSSCHDGKAWLHVCITGDDKNATASFIYNGKLVDSVVSWSKEILRTQESECVCINGTCTVVMTDGSASGKADTKILFIEEGKIVHTSTLSGSAQHVEECSCYPRYPDVRCVCRDNWKGSNRPIVDINIKDHSIVSRYVCSGLVGDTPRKNDSSSSSHCLDPNNEEGGHGVKGWAFDDGNDVWMGRTINETSRLGYETFKVIEGWSNPKSKLQINRQVIVDRGDRSGYSGIFSVEGKSCINRCFYVELIRGRKEETEVLWTSNSIVVFCGTSGTYGTGSWPDGADLNLMPI

SEQ ID NO: 23893 - protein, 469 aa, Artificial Sequence
  derived and/or modified protein sequence (wt) from neuraminidase__InfluenzaA__AGW00892
MNPNQKIITIGSVSLTISTICFFMQIAILITTVTLHFKQYEFNPPPNNQVMLCEPTIIERNITEIVYLTNTTIEKEICPKPAEYRNWSKPQCGITGFAPFSKDNSIRLSAGGDIWVTREPYVSCDPDKCYQFALGQGTTLNNVHSNNTVRDRTPYRTLLMNELGVPFHLGTKQVCIAWSSSSCHDGKAWLHVCITGDDKNATASFIYNGRLVDSVVSWSKEILRTQESECVCINGTCTVVMTDGSASGKADTKILFIEEGKIVHTSTLSGSAQHVEECSCYPRYPGVRCVCRDNWKGSNRPIVDINIKDHSIVSSYVCSGLVGDTPRKNDSSSSSHCLDPNNEEGGHGVKGWAFDDGNDVWMGRTINETSRLGYETFKVIEGWSNPKSKLQMNRQVIVDRGDRSGYSGIFSVEGKSCINRCFYVELIRGRKEETEVLWTSNSIVVFCGTSGTYGTGSWPDGADLNLMPI

SEQ ID NO: 23894 - protein, 469 aa, Artificial Sequence
  derived and/or modified protein sequence (wt) from neuraminidase__InfluenzaA__AGW00904
MNPNQKIITIGSVSLTISTICFFMQIAILITTVTLHFKQYEFNSPPNNQVMLCEPTIIERNITEIVYLTNTTIEKEICPKPAEYRNWSKPQCGITGFAPFSKDNSIRLSAGGDIWVTREPYVSCGPDKCYQFALGQGTTLNNMHSNNTVRDRTPYRTLLMNELGVPFHLGTKQVCIAWSSSSCHDGKAWLHVCITGDDKNATASFIYNGRLVDSVVSWSKEILRTQESECVCINGTCTVVMTDGSASGKADTKILFIEEGKIVHTSTLSGSAQHVEECSCYPRYPGVRCVCRDNWKGSNRPIVDINIKDHSIVSSYVCSGLVGDTPRKNDSSSSSHCLDPNNEEGGHGVKGWAFDDGNDVWMGRTINETSRLGYETFKVIEGWSNPKSKLQINRQVIVDRGDRSGYSGIFSVEGKSCINRCFYVELIRGRKEETEVLWTSNSIVVFCGTSGTYGTGSWPDGADLNLMPI

SEQ ID NO: 23895 - protein, 469 aa, Artificial Sequence
  derived and/or modified protein sequence (wt) from neuraminidase__InfluenzaA__AGW00916
MNPNQKIITIGSVSLTISTICFFMQIAILITTVTLHFKQYEFNSPPNNQVMLCEPTIIERNITEIVYLTNTTIEKEICPKPAEYRNWSKPQCGITGFAPFSKDNSIRLSAGGDIWVTREPYVSCDPDKCYQFALGQGTTLNNMHSNNTVCDRTPYRTLLMNELGVPFHLGTKQVCIAWSSSSCHDGKAWLHVCITGDDKNATASFIYNGRLVDSVVSWSKEILRTQESECVCINGTCTVVMTDGSASGKADTKILFIEEGKIVHTSTLSGSAQHVEECSCYPRYPGVRCVCRDNWKGSNRPIVDINIKDHSIVSSYVCSGLVGDTPRKNDSSSSSHCLDPNNEEGGHGVKGWAFDDGNDVWMGRTINETSRLGYETFKVIEGWSNPKSKLQINRQVIVDRGDRSGYSGIFSVEGKSCINRCFYVELIRGRKEETEVLWTSNSIVVFCGTSGTYGTGSWPDGADLNLMPI

SEQ ID NO: 23896 - protein, 469 aa, Artificial Sequence; identical to SEQ ID NO: 23871
  derived and/or modified protein sequence (wt) from neuraminidase__InfluenzaA__AGW00934

SEQ ID NO: 23897 - protein, 469 aa, Artificial Sequence
  derived and/or modified protein sequence (wt) from neuraminidase__InfluenzaA__AGW01247
MNPNQKIITIGSVSLTISTICFFMQIAILITTVTLHFKQYEFNSPPNNQVMLCEPTIIERNITEIVYLTNTTIEKEICPKPAEYRNWSKPQCGITGFAPFSKDNSIRLSAGGDIWVTREPYVSCDPDKCYQFALGQGTTLNNVHSNNTVRDRTPYRTLLMNELGVPFHLGTKQVCIAWSSSSCHDGKAWLHVCITGDDKNATASFIYNGRLVDSVVSWSKEILRTQESECVCINGTCTVVMTDGSASGKADTKILFIEEGKIVHTSTLSGSAQHVEECSCYPRYPGVRCVCRDNWKGSNRPIVDINIKDHSIVSSYVCSGLVGDTPRKKDSSSSSHCLDPNNEEGGHGVKGWAFDDGNDVWMGRTINETSRLGYETFKVIEGWSNPKSKLQINRQVIVDRGDRSGYSGIFSVEGKSCINRCFYVELIRGRKEETEVLWTSNSIVVFCGTSGTYGTGSWPDGADLNLMPI

SEQ ID NO: 23898 - protein, 469 aa, Artificial Sequence; identical to SEQ ID NO: 22146
  derived and/or modified protein sequence (wt) from neuraminidase__InfluenzaA__AGW01259

SEQ ID NO: 23899 - protein, 469 aa, Artificial Sequence; identical to SEQ ID NO: 23883
  derived and/or modified protein sequence (wt) from neuraminidase__InfluenzaA__AGW01298

SEQ ID NO: 23900 - protein, 469 aa, Artificial Sequence; identical to SEQ ID NO: 23375
  derived and/or modified protein sequence (wt) from neuraminidase__InfluenzaA__AGW01322

SEQ ID NO: 23901 - protein, 469 aa, Artificial Sequence
  derived and/or modified protein sequence (wt) from neuraminidase__InfluenzaA__AGW01334
MNPNQKIITIGSVSLTISTICFFMQIAILITTVTLHFKQYEFNSPPNNQVMLCEPTIIERNITEIVYLTNTTIEKEICPKPAEYRNWSKPQCGITGFAPFSKDNSIRLSAGGDIWVTREPYVSCDPDKCYQFALGQGTTLNNVHSNNTVRDRTPYRTLLMNELGVPFHLGTKQVCIAWSSSSCHDGKAWLHVCITGDDKNATASFIYNGRLVDSVVSWSKEILRTQESECVCINGTCTVVMTDGSASGKADTKILFIEEGKIVHTSTLSGSAQHVEECSCYPRYPGVRCVCRDNWKGSNRPIVDINIKDHSIVSSYVCSGLVGDTPRKNDSSSSSHCLDPNNEEGGHGVKGWAFDDGNDVWMGRTINETSRLGYETFKVIEGWSNPKSKLQINRQVIVDRGDRSGYSGIFSVEGKSCINRCFYVELIRGRKEEAEVLWTSNSIVVFCGTSGTYGTGSWPDGADLNLMPI

SEQ ID NO: 23902 - protein, 469 aa, Artificial Sequence; identical to SEQ ID NO: 22146
  derived and/or modified protein sequence (wt) from neuraminidase__InfluenzaA__AGW01346

SEQ ID NO: 23903 - protein, 469 aa, Artificial Sequence
  derived and/or modified protein sequence (wt) from neuraminidase__InfluenzaA__AGW01358
MNPNQKIITIGSVSLTISTICFFMQIAILITTVTLHFKQYEFNSPPNNQVMLCEPTIIERNITEIVYLTNTTIEKEICPKPTEYRNWSKPQCGITGFAPFSKDNSIRLSAGGDIWVTREPYVSCDPDKCYQFALGQGTTLNNVHSNNTVRDRTPYRTLLMNELGVPFHLGTKQVCIAWSSSSCHDGKAWLHVCITGDDKNATASFIYNGRLVDSVVSWSKEILRTQESECVCINGTCTVVMTDGSASGKADTKILFIEEGKIVHTSTLSGSAQHVEECSCYPRYPGVRCVCRDNWKGSNRPIVDINIKDHSIVSSYVCSGLVGDTPRKNDSSSSSHCLDPNNEEGGHGVKGWAFDDGNDVWMGRTINETSRLGYETFKVIEGWSNPKSKLQINRQVIVDRGDRSGYSGIFSVEGKSCINRCFYVELIRGRKEETEVLWTSNSIVVFCGTSGTYGTGSWPDGADLNLMPI

SEQ ID NO: 23904 - protein, 469 aa, Artificial Sequence; identical to SEQ ID NO: 22146
  derived and/or modified protein sequence (wt) from neuraminidase__InfluenzaA__AGW01370

SEQ ID NO: 23905 - protein, 469 aa, Artificial Sequence; identical to SEQ ID NO: 22146
  derived and/or modified protein sequence (wt) from neuraminidase__InfluenzaA__AGW01382

SEQ ID NO: 23906 - protein, 469 aa, Artificial Sequence
  derived and/or modified protein sequence (wt) from neuraminidase__InfluenzaA__AGW01394
MNPNQKIITIGSVSLTISTICFFMQIAILITTVTLHFKQYEFDSPPNNQVMLCEPTIIERNITEIVYLTNTTIEKEICPKPAEYRNWSKPQCGITGFAPFSKDNSIRLSAGGDIWVTREPYVSCDPDKCYQFALGQGTTLNNVHSNNTVRDRTPYRTLLMNELGVPFHLGTKQVCIAWSSSSCHDGKAWLHVCITGDDKNATASFIYNGRLVDSIVSWSKDILRTQESECVCINGTCTVVMTDGSASGKADTKILFIEEGKIVHTSTLSGSAQHVEECSCYPRYPGVRCVCRDNWKGSNRPIVDINIKDHSIVSSYVCSGLVGDTPRKNDSSSSSHCLDPNNEEGGHGVKGWAFDDGNDVWMGRTINETSRLGYETFKVIEGWSNPKSKLQINRQVIVDRGDRSGYSGIFSVEGKSCINRCFYVELIRGRKEETEVLWTSNSIVVFCGTSGTYGTGSWPDGADLNLMPI

SEQ ID NO: 23907 - protein, 469 aa, Artificial Sequence
  derived and/or modified protein sequence (wt) from neuraminidase__InfluenzaA__AGW01406
MNPNQKIITIGSVSLTISTICFFMQIAILITTVTLHFKQYEFNSPPNNQVMLCEPTIIERNITEIVYLTNTTIEKEICPKPAEYRNWSKPQCDITGFAPFSKDNSIRLSAGGDIWVTREPYVSCDPDKCYQFALGQGTTLNNMHSNNTVRDRTPYRTLLMNELGVPFHLGTKQVCIAWSSSSCHDGKAWLHVCITGDDKNATASFIYNGRLVDSVVSWSKEILRTQESECVCINGTCTVVITDGSASGKADTKILFIEEGKIVHTSTLSGSAQHVEECSCYPRYPGVRCVCRDNWKGSNRPIVDINIKDHSIVSSYVCSGLVGDTPRKNDSSSSSHCLDPNNEEGGHGVKGWAFDDGNDVWMGRTINETSRLGYETFKVIEGWSNPKSKLQINRQVIVDRGDRSGYSGIFSVEGKSCINRCFYVELIRGRKEETEVLWTSNSIVVFCGTSGTYGTGSWPDGADLNLMPI

SEQ ID NO: 23908 - protein, 469 aa, Artificial Sequence
  derived and/or modified protein sequence (wt) from neuraminidase__InfluenzaA__AGW01418
MNPNQKIITIGSVSLTISTICFFMQIAILITTVTLHFKQYEFNSPPNNQVMLCEPTIIERNITEIVYLTNTTIEKEICPKPAEYRNWSKPQCGITGFAPFSKDNSIRLSAGGDIWVTREPYVSCDPDKCYQFALGQGTTLNNMHSNNTVRDRTPYRTLLMNELGVPFHLGTKQVCIAWSSSSCHDGKAWLHVCITGDDKNATASFIYNGRLVDSVVSWSKEILRTQESECVCINGTCTVVMTDGSASGKADTKILFIEEGKIVHTSTLSGSAQHVEECSCYPRYPGVRCVCRDNWKGSNRPIVDINIKDHSIVSSYVCSGLVGDTPRKNDSSSSSHCLDPNNEEGGHGVKGWAFDDGNDVWMGRTINETSRLGYETFKVIEGWSNPKSKLQINRQVIVDRGDRSGYSGIFSVEGKSCINRCFYVELIRGRKEETGVLWTSNSIVVFCGTSGTYGTGSWPDGADLNLMPI

SEQ ID NO: 23909 - protein, 469 aa, Artificial Sequence; identical to SEQ ID NO: 22146
  derived and/or modified protein sequence (wt) from neuraminidase__InfluenzaA__AGW01430

SEQ ID NO: 23910 - protein, 469 aa, Artificial Sequence; identical to SEQ ID NO: 22146
  derived and/or modified protein sequence (wt) from neuraminidase__InfluenzaA__AGW01442

SEQ ID NO: 23911 - protein, 469 aa, Artificial Sequence; identical to SEQ ID NO: 22146
  derived and/or modified protein sequence (wt) from neuraminidase__InfluenzaA__AGW01454

SEQ ID NO: 23912 - protein, 469 aa, Artificial Sequence; identical to SEQ ID NO: 23871
  derived and/or modified protein sequence (wt) from neuraminidase__InfluenzaA__AGW01466

SEQ ID NO: 23913 - protein, 469 aa, Artificial Sequence; identical to SEQ ID NO: 22146
  derived and/or modified protein sequence (wt) from neuraminidase__InfluenzaA__AGW01478

SEQ ID NO: 23914 - protein, 469 aa, Artificial Sequence
  derived and/or modified protein sequence (wt) from neuraminidase__InfluenzaA__AGW01490
MNPNQKIITISSVSLTISTICFFMQIAILITTVTLHFKQYEFNSPPNNQVMLCEPTIIERNITEIVYLTNTTIEKEICPKPAEYRNWSKPQCGITGFAPFSKDNSIRLSAGGDIWVTREPYVSCDPDKCYQFALGQGTTLNNVHSNNTVRDRTPYRTLLMNELGVPFHLGTKQVCIAWSSSSCHDGKAWLHVCITGDDKNATASFIYNGRLVDSVVSWSKEILRTQESECVCINGTCTVVMTDGSASGKADTKILFIEEGKIVHTSTLSGSAQHVEECSCYPRYPGVRCVCRDNWKGSNRPIVDINIKDHSIVSSYVCSGLVGDTPRKNDSSSSSHCLDPNNEEGGHGVKGWAFDDGNDVWMGRTINETSRLGYETFKVIEGWSNSKSKLQINRQVIVDRGDRSGYSGIFSVEGKSCINRCFYVELIRGRKEETEVLWTSNSIVVFCGTSGTYGTGSWPDGADLNLMPI

SEQ ID NO: 23915 - protein, 469 aa, Artificial Sequence; identical to SEQ ID NO: 22146
  derived and/or modified protein sequence (wt) from neuraminidase__InfluenzaA__AGW01538

SEQ ID NO: 23916 - protein, 469 aa, Artificial Sequence; identical to SEQ ID NO: 23871
  derived and/or modified protein sequence (wt) from neuraminidase__InfluenzaA__AGW01562

SEQ ID NO: 23917 - protein, 469 aa, Artificial Sequence; identical to SEQ ID NO: 22146
  derived and/or modified protein sequence (wt) from neuraminidase__InfluenzaA__AGW01574

SEQ ID NO: 23918 - protein, 469 aa, Artificial Sequence; identical to SEQ ID NO: 22146
  derived and/or modified protein sequence (wt) from neuraminidase__InfluenzaA__AGW01586

SEQ ID NO: 23919 - protein, 469 aa, Artificial Sequence; identical to SEQ ID NO: 22146
  derived and/or modified protein sequence (wt) from neuraminidase__InfluenzaA__AGW01598

SEQ ID NO: 23920 - protein, 469 aa, Artificial Sequence; identical to SEQ ID NO: 23871
  derived and/or modified protein sequence (wt) from neuraminidase__InfluenzaA__AGW01610

SEQ ID NO: 23921 - protein, 469 aa, Artificial Sequence; identical to SEQ ID NO: 22146
  derived and/or modified protein sequence (wt) from neuraminidase__InfluenzaA__AGW01622

SEQ ID NO: 23922 - protein, 469 aa, Artificial Sequence; identical to SEQ ID NO: 22146
  derived and/or modified protein sequence (wt) from neuraminidase__InfluenzaA__AGW01634

SEQ ID NO: 23923 - protein, 469 aa, Artificial Sequence
  derived and/or modified protein sequence (wt) from neuraminidase__InfluenzaA__AGW01646
MNPNQKIITIGSVSLTISTICFFMQIAILITTVTLHFKQYEFNSPPNNQVMLCEPTIIERNITEIVYLTNTTIEKEICPKPAEYRNWSKPQCGITGFAPFSKDNSIRLSAGGDIWVTREPYVSCDPDKCYQFALGQGTTLNNVHSNNTVRDRTPYRTLLMNELGVPFHLGTKQVCIAWSSSSCHDGKAWLHVCITGDDKNATASFIYNGRLVDSVVSWSKEILRTQESECVCIDGTCTVVMTDGSASGKADTKILFIEEGKIVHTSTLSGSAQHVEECSCYPRYPGVRCVCRDNWKGSNRPIVDINIKDHSIVSSYVCSGLVGDTPRKNDSSSSSHCLDPNNEEGGHGVKGWAFDDGNDVWMGRTINETSRLGYETFKVIEGWSNPKSKLQINRQVIVDRGDRSGYSGIFSVEGKSCINRCFYVELIRGRKEETEVLWTSNSIVVFCGTSGTYGTGSWPDGADLNLMPI

SEQ ID NO: 23924 - protein, 469 aa, Artificial Sequence; identical to SEQ ID NO: 22146
  derived and/or modified protein sequence (wt) from neuraminidase__InfluenzaA__AGW01670

SEQ ID NO: 23925 - protein, 469 aa, Artificial Sequence; identical to SEQ ID NO: 22146
  derived and/or modified protein sequence (wt) from neuraminidase__InfluenzaA__AGW01682

SEQ ID NO: 23926 - protein, 469 aa, Artificial Sequence; identical to SEQ ID NO: 23883
  derived and/or modified protein sequence (wt) from neuraminidase__InfluenzaA__AGW01704

SEQ ID NO: 23927 - protein, 469 aa, Artificial Sequence
  derived and/or modified protein sequence (wt) from neuraminidase__InfluenzaA__AGW01716
MNPNQKIITIGSVSLTISTICFFMQIAILITTVTLHFKQYEFNSPPNNQVMLCEPTIIERNITEIVYLTNTTIEKEICPKPAEYRNWSKPQCGITGFAPFSKDNSIRLSAGGDIWVTREPYVSCDPDKCYQFALGQGTTLNNMHSNNTVRDRTPYRTLLMNELGVPFHLGTKQVCIAWSSSSCHDGKAWLHVCITGDDKNATASFIYNGRLVDSVVSWSKEILRTQESECVCINGTCTVVMTDGSASGKADTKILFIEEGKIVHTSTLSGSAQHVEECSCYPRYPGVRCVCRDNWKGSNRPIVDINIKDHSIVSSYVCSGLVGDTPRKNDSSSSSHCLDPNNEEGGHGVKGWAFDDGNDVWMGRTINETSRLGYETFKVIEGWSNPKSKLQINRQVIVDRGDRSGYSGIFSVEGRSCINRCFYVELIRGRKEETEVLWTSNSIVVFCGTSGTYGTGSWPDGADLNLMPI

SEQ ID NO: 23928 - protein, 469 aa, Artificial Sequence
  derived and/or modified protein sequence (wt) from neuraminidase__InfluenzaA__AGW01728
MNPNQKIITIGSVSLTISTICFFMQIAILITTVTLHFKQYEFNSPPNNQVMLCEPTIIERNITEIVYLTNTTIEKEICPKPAEYRNWSKPQCGITGFAPFSKDNSIRLSAGGDIWVTREPYVSCDPDKCYQFALGQGTTLNNMHSNNTVRDRTPYRTLLMNELGVPFHLGTKQVCIAWSSSSCHDGKAWLHVCITGDDKNATASFIYNGRLVDSVVSWSKEILRTQESECVCINGTCTVVMTDGSASGKADTKILFIEEGKIVHTSTLSGSAQHVEECSCYPRYPGVRCVCRDNWKGSNRPIVDINIKDHSIVSSYVCSGLVGDTPRKNDSSSSSHCLDPNNEEGGHGVKGWAFDDGNDVWMGRTINETSRLGYETFKVIEGWSNPKSKLQINRQVIVDRGDRSGYSGIFSVEGKSCINRCFYVELIRGRKEETEVLWTSNSVVVFCGTSGTYGTGSWPDGADLNLMPI

SEQ ID NO: 23929 - protein, 469 aa, Artificial Sequence; identical to SEQ ID NO: 22146
  derived and/or modified protein sequence (wt) from neuraminidase__InfluenzaA__AGW01740

SEQ ID NO: 23930 - protein, 469 aa, Artificial Sequence
  derived and/or modified protein sequence (wt) from neuraminidase__InfluenzaA__AGW01752
MNPNQKIITIGSVSLTISTICFFMQIAILITTVTLHFKQYEFNSPPNNQVMLCEPTIIERNITEIVYLTNTTIEKEICPKPAEYRNWSKPQCGITGFAPFSKDNSIRLSAGGDIWVTREPYVSCDPDKCYQFALGQGTTLNNVHSNNTVRDRTPYRTLLMNELGVPFHLGTKQVCIAWSSSSCHDGKAWLHVCITGDDKNATASFIYNGRLVDSVVSWSKEILRTQESECVCINGTCTVVMTDGSASGKADTKILFIEEGKIVHTSTLSGSAQHVEECSCYPRYPGVRCVCRDNWKGSNRPIVDINIKDHSIVSSYVCSGLVGDTPRKNDSSSSSHCLDPNNEEGGHGVKGWAFDDGNDVWMGRTINETSRLGYETFKVIGGWSNPKSKLQINRQVIVDRGDRSGYSGIFSVEGKSCINRCFYVELIRGRKEETEVLWTSNSIVVFCGTSGTYGTGSWPDGADLNLMPI

SEQ ID NO: 23931 - protein, 469 aa, Artificial Sequence; identical to SEQ ID NO: 22146
  derived and/or modified protein sequence (wt) from neuraminidase__InfluenzaA__AGW01764

SEQ ID NO: 23932 - protein, 469 aa, Artificial Sequence; identical to SEQ ID NO: 23883
  derived and/or modified protein sequence (wt) from neuraminidase__InfluenzaA__AGW01776

SEQ ID NO: 23933 - protein, 469 aa, Artificial Sequence; identical to SEQ ID NO: 23871
  derived and/or modified protein sequence (wt) from neuraminidase__InfluenzaA__AGW01788

SEQ ID NO: 23934 - protein, 469 aa, Artificial Sequence; identical to SEQ ID NO: 23883
  derived and/or modified protein sequence (wt) from neuraminidase__InfluenzaA__AGW01800

SEQ ID NO: 23935 - protein, 469 aa, Artificial Sequence; identical to SEQ ID NO: 23871
  derived and/or modified protein sequence (wt) from neuraminidase__InfluenzaA__AGW01812

SEQ ID NO: 23936 - protein, 469 aa, Artificial Sequence; identical to SEQ ID NO: 23871
  derived and/or modified protein sequence (wt) from neuraminidase__InfluenzaA__AGW01824

SEQ ID NO: 23937 - protein, 469 aa, Artificial Sequence; identical to SEQ ID NO: 23894
  derived and/or modified protein sequence (wt) from neuraminidase__InfluenzaA__AGW01848

SEQ ID NO: 23938 - protein, 469 aa, Artificial Sequence
  derived and/or modified protein sequence (wt) from neuraminidase__InfluenzaA__AGW01860
MNPNQKIITIGSVSLTISTICFFMQIAILITTVTLHFKQYEFNSLPNNQVMLCEPTIIERNITEIVYLTNTTIEKEICPKPAEYRNWSKPQCGITGFAPFSKDNSIRLSAGGDIWVTREPYVSCDPDKCYQFALGQGTTLNNVHSNNTVRDRTPYRTLLMNELGVPFHLGTKQVCIAWSSSSCHDGKAWLHVCITGDDKNATASFIYNGRLVDSVVSWSKEILRTQESECVCINGTCTVVMTDGSASGKADTKILFIEEGKIVHTSTLSGSAQHVEECSCYPRYPGVRCVCRDNWKGSNRPIVDINIKDHSIVSSYVCSGLVGDTPRKNDSSSSSHCFDPNNEEGGHGVKGWAFDDGNDVWMGRTINETSRLGYETFKVIGGWSNPKSKLQINRQVIVDRGDRSGYSGIFSVEGKSCINRCFYVELIRGRKEETEVLWTSNSIIVFCGTSGTYGTGSWPDGADLNLMPI

SEQ ID NO: 23939 - protein, 469 aa, Artificial Sequence
  derived and/or modified protein sequence (wt) from neuraminidase__InfluenzaA__AGW01884
MNPNQKIITIGSVSLTISTICFFMQIAILITTVTLHFKQYEFNSPPNNQVMLCEPTIIERNITKIVYLTNTTIEKEICPKPAEYRNWSKPQCGITGFAPFSKDNSIRLSAGGDIWVTREPYVSCDPDKCYQFALGQGTTLNNVHSNNTVRDRTPYRTLLMNELGVPFHLGTKQVCIAWSSSSCHDGKAWLHVCITGDDKNATASFIYNGRLVDSVVSWSKEILRTQESECVCINGTCTVVMTDGSASGKADTKILFIEEGKIVHTSTLSGSAQHVEECSCYPRYPGVRCVCRDNWKGSNRPIVDINIKDHSIVSSYVCSGLVGDTPRKNDSSSSSHCLDPNNEEGGHGVKGWAFDDGNDVWMGRTINETSRLGYETFKVIEGWSNPKSKLQINRQVIVDRGDRSGYSGIFSVEGKSCINRCFYVELIRGRKEETEVLWTSNSIVVFCGTSGTYGTGSWPDGADLNLMPI

SEQ ID NO: 23940 - protein, 469 aa, Artificial Sequence; identical to SEQ ID NO: 22146
  derived and/or modified protein sequence (wt) from neuraminidase__InfluenzaA__AGW01896

SEQ ID NO: 23941 - protein, 469 aa, Artificial Sequence; identical to SEQ ID NO: 22146
  derived and/or modified protein sequence (wt) from neuraminidase__InfluenzaA__AGW01908

SEQ ID NO: 23942 - protein, 469 aa, Artificial Sequence; identical to SEQ ID NO: 22146
  derived and/or modified protein sequence (wt) from neuraminidase__InfluenzaA__AGW01920

SEQ ID NO: 23943 - protein, 469 aa, Artificial Sequence; identical to SEQ ID NO: 22146
  derived and/or modified protein sequence (wt) from neuraminidase__InfluenzaA__AGW01932

SEQ ID NO: 23944 - protein, 469 aa, Artificial Sequence
  derived and/or modified protein sequence (wt) from neuraminidase__InfluenzaA__AGW01944
MNPNQKIITIGSVSLTISTICFFMQIAILITTVTLHFKQYEFNFPPNNQVMLCEPTIIERNITEIVYLTNTTIEKEICPKPAEYRNWSKPQCGITGFAPFSKDNSIRLSAGGDIWVTREPYVSCDPDKCYQFALGQGTTLNNVHSNNTVRDRTPYRTLLMNELGVPFHLGTKQVCIAWSSSSCHDGKAWLHVCITGDDKNATASFIYNGRLVDSVVSWSKEILRTQESECVCINGTCTVVMTDGSASGKADTKILFIEEGKIVHTSTLSGSAQHVEECSCYPRYPGVRCVCRDNWKGSNRPIVDINIKDHSIVSSYVCSGLVGDTPRKNDSSSSSHCLAPNNEEGGHGVKGWAFDDGNDVWMGRTINETSRLGYETFKVIEGWSNPKSKLQINRQVIVDRGDRSGYSGIFSVEGKSCINRCFYVELIRGRKEETEVLWTSNSIVVFCGTSGTYGTGSWPDGADLNLMPI

SEQ ID NO: 23945 - protein, 469 aa, Artificial Sequence; identical to SEQ ID NO: 22146
  derived and/or modified protein sequence (wt) from neuraminidase__InfluenzaA__AGW01956

SEQ ID NO: 23946 - protein, 469 aa, Artificial Sequence
  derived and/or modified protein sequence (wt) from neuraminidase__InfluenzaA__AGW01968
MNPNQKIITIGSVSLTISTICFFMQIAILITTVTLHFKQYEFNSPPNNQVMLCEPTIIERNITEIVYLTNTTIEKEICPKPAEYRNWSKPQCDITGFAPFSKDNSIRLSAGGDIWVTREPYVSCDPDKCYQFALGQGTTLNNVHSNNTIRDRTPYRTLLMNELGVPFHLGTKQVCIAWSSSSCHDGKAWLHVCITGDDENATASFIYNGRLVDSVVSWSKEILRTQESECVCINGTCTVVMTDGSASGKADTKILFIEEGKIVHTSTLSGSAQHVEECSCYPRYPGVRCVCRDNWKGSNRPIVDINIKDHSIVSRYVCSGLVGDTPRKNDSSSSSHCLDPNNEEGGHGVKGWAFDDGNDVWMGRTINETSRLGYETFKVIEGWSNPKSKLQINRQVIVDRGDRSGYSGIFSVEGKSCINRCFYVELIRGRKEETEVLWTSNSIVVFCGTSGTYGTGSWPDGADLNLMPI

SEQ ID NO: 23947 - protein, 469 aa, Artificial Sequence; identical to SEQ ID NO: 23871
  derived and/or modified protein sequence (wt) from neuraminidase__InfluenzaA__AGW01980

SEQ ID NO: 23948 - protein, 469 aa, Artificial Sequence; identical to SEQ ID NO: 22146
  derived and/or modified protein sequence (wt) from neuraminidase__InfluenzaA__AGW01992

SEQ ID NO: 23949 - protein, 469 aa, Artificial Sequence; identical to SEQ ID NO: 22146
  derived and/or modified protein sequence (wt) from neuraminidase__InfluenzaA__AGW02004

SEQ ID NO: 23950 - protein, 469 aa, Artificial Sequence; identical to SEQ ID NO: 22146
  derived and/or modified protein sequence (wt) from neuraminidase__InfluenzaA__AGW02016

SEQ ID NO: 23951 - protein, 469 aa, Artificial Sequence; identical to SEQ ID NO: 22146
  derived and/or modified protein sequence (wt) from neuraminidase__InfluenzaA__AGW02040

SEQ ID NO: 23952 - protein, 469 aa, Artificial Sequence
  derived and/or modified protein sequence (wt) from neuraminidase__InfluenzaA__AGW02064
MNPNQKIITIGSVSLTISTICFFMQIAILITTVTLHFKQYEFDSPPNNQVMLCEPTIIERNITEIVYLTNTTIEKEICPKPAEYRNWSKPQCGITGFAPFSKDNSIRLSAGGDIWVTREPYVSCDPDKCYQFALGQGTTLNNVHSNNTVRDRTPYRTLLMNELGVPFHLGTKQVCIAWSSSSCHDGKAWLHVCITGDDKNATASFIYNGRLVDSVVSWSKEILRTQESECVCINGTCTVVMTDGSASGKADTKILFIEEGKIVHTSTLSGSAQHVEECSCYPRYPGVRCVCRDNWKGSNRPIVDINIKDHSIVSSYVCSGLVGDTPRKNDSSSSGHCLDPNNEEGGHGVKGWAFDDGNDVWMGRTINETSRLGYETFKVIEGWSNPKSKLQINRQVIVDRGDRSGYSGIFSVEGKSCINRCFYVELIRGRKEETEVLWTSNSIVVFCGTSGTYGTGSWPDGADLNLMPI

SEQ ID NO: 23953 - protein, 469 aa, Artificial Sequence; identical to SEQ ID NO: 22146
  derived and/or modified protein sequence (wt) from neuraminidase__InfluenzaA__AGW02076

SEQ ID NO: 23954 - protein, 469 aa, Artificial Sequence; identical to SEQ ID NO: 22146
  derived and/or modified protein sequence (wt) from neuraminidase__InfluenzaA__AGW02088

SEQ ID NO: 23955 - protein, 469 aa, Artificial Sequence
  derived and/or modified protein sequence (wt) from neuraminidase__InfluenzaA__AGW02100
MNPNQKIITIGSVSLTISTICFFMQIAILITTVTLHFKQYESNSPPNNQVMLCEPTIIERNITEIVYLTNTTIEKEICPKPAEYRNWSKPQCGITGFAPFSKDNSIRLSAGGDIWVTREPYVSCDPDKCYQFALGQGTTLNNVHSNNTVRDRTPYRTLLMNELGVPFHLGTKQVCIAWSSSSCHDGKAWLHVCITGDDKNATASFIYNGRLVDSVVSWSKEILRTQESECVCINGTCTVVMTDGSASGKADTKILFIEEGKIVHTSTLSGSAQHVEECSCYPRYPGVRCVCRDNWKGSNRPIVDINIKDHSIVSSYVCSGLVGDTPRKNDSSSSSHCLDPNNEEGGHGVKGWAFDDGNDVWMGRTINETSRLGYETFKVIEGWSNPKSKLQINRQVIVDRGDRSGYSGIFSVEGKSCINRCFYVELIRGRKEETEVLWTSNSIVVFCGTSGTYGTGSWPDGADLNLMPI

SEQ ID NO: 23956 - protein, 469 aa, Artificial Sequence; identical to SEQ ID NO: 23883
  derived and/or modified protein sequence (wt) from neuraminidase__InfluenzaA__AGW02112

SEQ ID NO: 23957 - protein, 469 aa, Artificial Sequence
  derived and/or modified protein sequence (wt) from neuraminidase__InfluenzaA__AGW02124
MNPNQKIITIGSVSLTISTICFFMQIAILITTVTLHFKQYEFNSPPNNQVMLCEPTIIERNITEIVYLTNTTIEKEICPKPAEYRNWSKPQCGITGFAPFSKDNSIRLSAGGDIWVTREPYVSCDPDKCYQFALGQGTTLNNVHSNNTVSDRTPYRTLLMNELGVPFHLGTKQVCIAWSSSSCHDGKAWLHVCITGDDKNATASFIYNGRLVDSVVSWSKEILRTQESECVCINGTCTVVMTDGSASGKADTKILFIEEGKIVHTSTLSGSAQHVEECSCYPRYPGVRCVCRDNWKGSNRPIVDINIKDHSIVSSYVCSGLVGDTPRKNDSSSSSHCLDPNNEEGGHGVKGWAFDDGNDVWMGRTINETSRLGYETFKVIEGWSNPKSKLQINRQVIVDRGDRSGYSGIFSVEGKSCINRCFYVELIRGRKEETEVLWTSNSIVVFCGTSGTYGTGSWPDGADLNLMPI

SEQ ID NO: 23958 - protein, 469 aa, Artificial Sequence; identical to SEQ ID NO: 23871
  derived and/or modified protein sequence (wt) from neuraminidase__InfluenzaA__AGW02136

SEQ ID NO: 23959 - protein, 469 aa, Artificial Sequence; identical to SEQ ID NO: 23883
  derived and/or modified protein sequence (wt) from neuraminidase__InfluenzaA__AGW02148

SEQ ID NO: 23960 - protein, 469 aa, Artificial Sequence
  derived and/or modified protein sequence (wt) from neuraminidase__InfluenzaA__AGW02160
MNPNQKIITIGSVSLTISTICFFMQIAILITTVTLHFKQYEFDSPPNNQVMLCEPTIIERNITEIVYLTNTTIEKEICPKPAEYRNWSKPQCGITGFAPFSKDNSIRLSAGGDIWVTREPYVSCDPDKCYQFALGQGTTLNNVHSNNTVRDRTPYRTLLMNELGVPFHLGTKQVCIAWSSSSCHDGKAWLHVCITGDDKNATASFIYNGRLVDSVVSWSKEILRTQESECVCINGTCTVVMTDGSASGKADTKILFIEEGKIVHTSTLSGSAQHVEECSCYPRYPGVRCVCRDNWKGSNRPIVDINIKDHSIVSSYVCSGLVGDTPRKNDSSSSSHCLDPNNEEGGHGVKGWAFDDGNDVWMGRTINETSRLGYETFKVIEGWSNPKSKLQINRQVIVDRSDRSGYSGIFSVEGKSCINRCFYVELIRGRKEETEVLWTSNSIVVFCGTSGTYGTGSWPDGADLNLMPI

SEQ ID NO: 23961 - protein, 469 aa, Artificial Sequence; identical to SEQ ID NO: 22146
  derived and/or modified protein sequence (wt) from neuraminidase__InfluenzaA__AGW02172

SEQ ID NO: 23962 - protein, 469 aa, Artificial Sequence; identical to SEQ ID NO: 22146
  derived and/or modified protein sequence (wt) from neuraminidase__InfluenzaA__AGW02184

SEQ ID NO: 23963 - protein, 469 aa, Artificial Sequence
  derived and/or modified protein sequence (wt) from neuraminidase__InfluenzaA__AGW02196
MNPNQKIITIGSVSLTISTICFFMQIAILITTVTLHFKQYEFNSPPNNQVMLCEPTIIERNITEIVYLINTTIEKEICPKPAEYRNWSKPQCGITGFAPFSKDNSIRLSAGGDIWVTREPYVSCDPYKCYQFALGQGTTLNNVHSNNTVRDRTPYRTLLMNELGVPFHLGTKQVCIAWSSSSCHDGKAWLHVCITGDDKNATASFIYNGRLVDSVVSWSKEILRTQESECVCINGTCTVVMTDGSASGKADTKILFIEEGKIVHTSTLSGSAQHVEECSCYPRYPGVRCVCRDNWKGSNRPIVDINIKDHSIVSSYVCSGLVGDTPRKNDSSSSSHCLDPNNEEGGHGVKGWAFDDGNDVWMGRTINETSRLGYETFKVIEGWSNPKSKLQINRQVIVDRGDRSGYSGIFSVEGKSCINRCFYVELIRGRKEETEVLWTSNSIVVFCGTSGTYGTGSWPDGADLNLMPI

SEQ ID NO: 23964 - protein, 469 aa, Artificial Sequence; identical to SEQ ID NO: 23375
  derived and/or modified protein sequence (wt) from neuraminidase__InfluenzaA__AGW04174

SEQ ID NO: 23965 - protein, 469 aa, Artificial Sequence
  derived and/or modified protein sequence (wt) from neuraminidase__InfluenzaA__AGW25784
MNPNQKIITIGSVSLIIATICFLMQIAILVTTVTLHFKQYGYNSLPNNQVMLCEPTIIERNITEIVYLTNTTIEKEICPKLAEYRNWSKPQCKITGFAPFSKDNSIRLSAGGDIWVTREPYVSCDPYKCYQFALGQGTTLNNKHSNDTVHDRTPYRTLLMNELGVPFHLGTKQVCIAWSSSSCHDGKAWLHICVTGHDENATASFIYDGKLVDSIGSWSKKILRTQESECVCINGTCTVVMTDGSASGRADTKILFIEEGKIIHISQLSGSAQHVEECSCYPRYPGIRCVCRDNWKGSNRPIVDINVKDYSITSSYVCSGLVGDTPRKTDNSSSSHCLNPNNEEGGHGVKGWAFDDGNDVWMGRTISEKFRSGYETFKVIKGWSKPNSKLQINRQVIVDRDNRSGYSGIFSVEGKSCINRCFYVELIRGRKREAEVWWTSNSIVVFCGTSGTYGTGSWPDGADINLMPI

SEQ ID NO: 23966 - protein, 449 aa, Artificial Sequence
  derived and/or modified protein sequence (wt) from neuraminidase__InfluenzaA__AGW27062
MNPNQKIVTIGSICMVIGTISLMLQIGNIISIWVSHSIQTGNQHQTEPIRNTNFLTENAVASVTLAGNSSLCPIRGWAVHSKDNSIRIGSKGDVFVIREPFISCSHLECRTFFLTQGALLNDKHSNGTVKDRSPHRTLMSCPIGEAPSPYNSRFESVAWSASACHDGTSWLVIGISGPDNGAVAVLKYNGIITDTIRSWRNNILRTQESECACVNGSCFTVMTDGPSNGQASYKIFKIEKGKVVKSVELNAPNYHYEECSCYPDAGEITCVCRDNWHGSNRPWVSFNQNLEYQIGYICSGVFGDNPRPNDGTGSCGPVSSNGAYGVKGFSFKYGNGVWIGRTKSTHSRSGFEMIWDPNGWTGTDSEFSMKQDIVAITDWSGYSGSFVQHPELTGLDCIRPCFWVELIRGRPKESTIWTSGSSISFCGVNSDTVSWSWPDGAELPFTIDK

SEQ ID NO: 23967 - protein, 469 aa, Artificial Sequence
  derived and/or modified protein sequence (wt) from neuraminidase__InfluenzaA__AGY14472
MNPNQKIITIGSVSLTLATICFLMQIAILVTTVTLHFKQYECNSTPNNQVMLCEPTVIERNITKIVYLTNTTVEKEICPKPAEYRNWSKPQCKITGFAPFSKDNSIRLSAGGDIWVTREPYVSCDPNKCYQFALGQGTTLNNRHSNDTVHDRTPYRTLLMNELGIPFHLGTKQVCIAWSSSSCHDGKAWLHVCVTGHDKNATASFIYDGKLVDSIGSWSKKILRTQESECVCINGTCTVVMTDGSASGRADTKILFIEEGKIIHISQLSGSAQHVEECSCYPRYPGIRCVCRDNWKGSNRPIVDINVKDYSITSSYVCSGLVGDTPRKTDNSSSSHCLNPNNEEGGHGVKGWAFDDGNDVWMGRTISEKFRSGYETFKVIKGWSKPNSKLQINRQVIVDRDNRSGYSGIFSVEGKSCINRCFYVELIRGRKREAEVWWTSNSIVVFCGTSGTYGTGSWPDGADINLMPI

SEQ ID NO: 23968 - protein, 465 aa, Artificial Sequence
  derived and/or modified protein sequence (wt) from neuraminidase__InfluenzaA__AHA11501
MNPNQKILCTSATAIIIGAIAVLIGIANLGLNIGLHLKPGCNCSHSQPETTNTSQTIINNYYNETNITNIQMEERTSRNFNNLTKGLCTINSWHIYGKDNAVRIGESSDVLVTREPYVSCDPDECRFYALSQGTTIRGKHSNGTIHDRSQYRALISWPLSSPPTVYNSRVECIGWSSTSCHDGKSRMSICISGPNNNASAVVWYNRRPVAEINTWARNILRTQESECVCHNGVCPIVFTDGSATGPADTRIYYFKEGKILEWESLTGTAKHIEECSCYGERTGITCTCRDNWQGSNRPVIQIDPVAMTHTSQYICSPVLTDTPRPNDPNIGKCNDPYPGNDNNGVKGFSYLDGANTWLGRTISTASRSGYEMLKVPNALTDDRSKPIQGQTIVLNADWSGYSGSFMDYWAEGDCYRACFYVELIRGRPKEDKVWWTSNSIVSMCSSTEFLGQWNWPDGARIEYFL

SEQ ID NO: 23969 - protein, 469 aa, Artificial Sequence
  derived and/or modified protein sequence (wt) from neuraminidase__InfluenzaA__AHC57462
MNPNQKIITIGSVSLTISTICFFMQIAILITTVTLHFKQYEFNSPPNNQVMLCEPTIIERNITEIVYLTNTTIEKEICPKLAEYRNWSKPQCDITGFAPFSKDNSIRLSAGGDIWVTREPYVSCDPDKCYQFALGQGTTLNNVHSNNTVRDRTPYRTLLMNELGVPFHLGTKQVCIAWSSSSCHDGKAWLHVCITGDDKNATASFIYNGRLVDSVVSWSKEILRTQESECVCINGTCTVVMTDGSASGKADTKILFIEEGKIVHTSTLSGSAQHVEECSCYPRYPGVRCVCRDNWKGSNRPIVDINIKDHSIVSSYVCSGLVGDTPRKNDSSSSSHCWDPNNEEGGHGVKGWAFDDGNDVWMGRTINETSRLGYETFKVIEGWSNPKSKLQVNRQVIVDRGDRSGYSGIFSVEGKSCINRCFYVELIRGRKEETEVLWTSNSIVVFCGTSGTYGTGSWPDGADLNLMPI

SEQ ID NO: 23970 - protein, 469 aa, Artificial Sequence; identical to SEQ ID NO: 19518
  derived and/or modified protein sequence (wt) from neuraminidase__InfluenzaA__AHC57490

SEQ ID NO: 23971 - protein, 469 aa, Artificial Sequence
  derived and/or modified protein sequence (wt) from neuraminidase__InfluenzaA__AHC57514
MNPNQKIITIGSVSLTISTICFFMQIAILITTVTLHFKQYEFYSPPNNQVMLCEPTIIERNITEIVYLTNTTIEKEICPKLAEYRNWSKPQCDITGFAPFSKDNSIRLSAGGDIWVTREPYVSCDPDKCYQFALGQGTTLNNVHSNNTVRDRTPYRTLLMNELGVPFHLGTKQVCIAWSSSSCHDGKAWLHVCITGDDKNATASFIYNGRLVDSVVSWSKEILRTQESECVCINGTCTVVMTDGSASGKADTKILFIEEGKIVHTSTLSGSAQHVEECSCYPRYPGVRCVCRDNWKGSNRPIVDINIKDHSIVSSYVCSGLVGDTPRKNDSSSSSHCLDPNNEEGGHGVKGWAFDDGNDVWMGRTINETSRLGYETFKVIEGWSNPKSKLQINRQVIVDRGNRSGYSGIFSVEGKSCINRCFYVELIRGRKEETEVLWTSNSIVVFCGTSGTYGTGSWPDGADLNLMPI

SEQ ID NO: 23972 - protein, 469 aa, Artificial Sequence; identical to SEQ ID NO: 23971
  derived and/or modified protein sequence (wt) from neuraminidase__InfluenzaA__AHC57526

SEQ ID NO: 23973 - protein, 469 aa, Artificial Sequence; identical to SEQ ID NO: 23971
  derived and/or modified protein sequence (wt) from neuraminidase__InfluenzaA__AHC57806

SEQ ID NO: 23974 - protein, 469 aa, Artificial Sequence; identical to SEQ ID NO: 23971
  derived and/or modified protein sequence (wt) from neuraminidase__InfluenzaA__AHC57818

SEQ ID NO: 23975 - protein, 469 aa, Artificial Sequence
  derived and/or modified protein sequence (wt) from neuraminidase__InfluenzaA__AHC57830
MNPNQKIITIGSVSLTISTICFFMQIAILITTVTLHFKQYEFNSPPNNQVMLCEPTIIERNITEIVYLTNTTIEKEICPKLAEYRNWSKPQCDITGFAPFSKDNSIRLSAGGDIWVTREPYVSCDPNKCYQFALGQGTTLNNVHSNNTVRDRTPYRTLLMNELGVPFHLGTKQVCIAWSSSSCHDGKAWLHVCITGDDKNATASFIYNGKLVDSVVSWSKEILRTQESECVCINGTCTVVMTDGSASGKADTKILFIEEGKIVHTSTLSGSAQHVEECSCYPRYPGVRCVCRDNWKGSNRPIVDINIKDHSIVSSYVCSGLVGDTPRKNDSSSSSHCLDPNNEEGGHGVKGWAFDDGNDVWMGRTINETSRLGYETFKVIEGWSNPKSKLQINRQVIVDRGNRSGYSGIFSVEGKSCINRCFYVELIRGRKEETEVLWTSNSIVVFCGTSGTYGTGSWPDGADLNLMPI

SEQ ID NO: 23976 - protein, 469 aa, Artificial Sequence; identical to SEQ ID NO: 23975
  derived and/or modified protein sequence (wt) from neuraminidase__InfluenzaA__AHC57971

SEQ ID NO: 23977 - protein, 469 aa, Artificial Sequence; identical to SEQ ID NO: 23971
  derived and/or modified protein sequence (wt) from neuraminidase__InfluenzaA__AHC57984

SEQ ID NO: 23978 - protein, 469 aa, Artificial Sequence
  derived and/or modified protein sequence (wt) from neuraminidase__InfluenzaA__AHC57996
MNPNQKIITIGSVSLTISTICFFMQIAILITTVTLHFKQYEFYSPPNNQVMLCEPTIIERNITEIVYLTNTTIEKEICPKLAEYRNWSKPQCDITGFAPFSKDNSIRLSAGGDIWVTREPYVSCDPDKCYQFALGQGTTLNNVHSNNTVRDRTPHRTLLMNELGVPFHLGTKQVCIAWSSSSCHDGKAWLHVCITGDDKNATASFIYNGRLVDSVVSWSKEILRTQESECVCINGTCTVVMTDGSASGKADTKILFIEEGKIVHTSTLSGSAQHVEECSCYPRYPGVRCVCRDNWKGSNRPIVDINIKDHSIVSSYVCSGLVGDTPRKNDSSSSSHCLDPNNEEGGHGVKGWAFDDGNDVWMGRTINETSRLGYETFKVIEGWSNPKSKLQINRQVIVDRGNRSGYSGIFSVEGKSCINRCFYVELIRGRKEETEVLWTSNSIVVFCGTSGTYGTGSWPDGADLNLMPI

SEQ ID NO: 23979 - protein, 469 aa, Artificial Sequence; identical to SEQ ID NO: 22922
  derived and/or modified protein sequence (wt) from neuraminidase__InfluenzaA__AHC58008

SEQ ID NO: 23980 - protein, 469 aa, Artificial Sequence; identical to SEQ ID NO: 19518
  derived and/or modified protein sequence (wt) from neuraminidase__InfluenzaA__AHC58020

SEQ ID NO: 23981 - protein, 469 aa, Artificial Sequence
  derived and/or modified protein sequence (wt) from neuraminidase__InfluenzaA__AHC58032
MNPNQKIITIGSVSLTISTICFFMQIAILITTVTLHFKQYEFNSPPNNQVMLCEPTIIERNITEIVYLTNTTIEKEICPKLAEYRNWSKPQCDITGFAPFSKDNSIRLSAGGDIWVTREPYVSCDPNKCYQFALGQGTTLNNVHSNNTVRDRTPYRTLLMNELGVPFHLGTKQVCIAWSSSSCHDGKAWLHVCITGDDKNATASFIYNGKLVDSVVSWSKEILRTQESECVCINGTCTVVMTDGSASGKADTKILFIEEGKIVHTSTLSGSAQHVEECSCYPRYPGVRCVCRDNWKGSNRPIVDINIKDHSIVSSYVCSGLVGDTPRKNDSSSSSHCLNPNNEEGGHGVKGWAFDDGNDVWMGRTINETSRLGYETFKVIEGWSNPKSKLQINRQVIVDRGNRSGYSGIFSVEGKSCINRCFYVELIRGRKEETEVLWTSNSIVVFCGTSGTYGTGSWPDGADLNLMPI

SEQ ID NO: 23982 - protein, 469 aa, Artificial Sequence; identical to SEQ ID NO: 22922
  derived and/or modified protein sequence (wt) from neuraminidase__InfluenzaA__AHC58053

SEQ ID NO: 23983 - protein, 469 aa, Artificial Sequence
  derived and/or modified protein sequence (wt) from neuraminidase__InfluenzaA__AHC58077
MNPNQKIITIGSVSLTISTICFFMQIAILITTVTLHFKQYEFYSPPNNQVMLREPTIIERNITEIVYLTNTTTEKEICPKLAEYRNWSKPQCDITGFAPFSKDNSIRLSAGGDIWVTREPYVSCDPDKCYQFALGQGTTLNNVHSNNTVRDRTPYRTLLMNELGVPFHLGTKQVCIAWSSSSCHDGKAWLHVCITGDDKNATASFIYNGRLVDSVVSWSKEILRTQESECVCINGTCTVVMTDGSASGKADTKILFIEEGKIVHTSTLSGSAQHVEECSCYPRYPGVRCVCRDNWKGSNRPIVDINIKDHSIVSSYVCSGLVGDTPRKNDSSSSSHCLDPNNEEGGHGVKGWAFDDGNDVWMGRTINETSRLGYETFKVIEGWSNPKSKLQINRQVIVDRGNRSGYSGIFSVEGKSCINRCFYVELIRGRKEETEVLWTSNSIVVFCGTSGTYGTGSWPDGADLNLMPI

SEQ ID NO: 23984 - protein, 469 aa, Artificial Sequence; identical to SEQ ID NO: 23975
  derived and/or modified protein sequence (wt) from neuraminidase__InfluenzaA__AHC58089

SEQ ID NO: 23985 - protein, 469 aa, Artificial Sequence; identical to SEQ ID NO: 23971
  derived and/or modified protein sequence (wt) from neuraminidase__InfluenzaA__AHC58101

SEQ ID NO: 23986 - protein, 469 aa, Artificial Sequence
  derived and/or modified protein sequence (wt) from neuraminidase__InfluenzaA__AHC58113
MNPNQKIITIGSVSLTISTICFFMQIAILITTVTLHFKQYEFYSPPNNQVMLCEPTIIERNITEIVYLTNTTIEKEICPKLAEYRNWSKPQCDITGFAPFSKDNSIRLSAGGDIWVTREPYVSCDPDKCYQFALGQGTTLNNVHSNNTVRDRTPYRTLLMNELGVPFHLGTKQVCIAWSSSSCHDGKAWLHVCITGDDKNATASFIYNGRLVDSVVSWSKKILRTQESECVCINGTCTVVMTDGSASGKADTKILFIEEGKIVHTSTLSGSAQHVEECSCYPRYPGVRCVCRDNWKGSNRPIVDINIKDHSIVSSYVCSGLVGDTPRKNDSSSSSHCLDPNNEEGGHGVKGWAFDDGNDVWMGRTINETSRLGYETFKVIEGWSNPKSKLQINRQVIVDRGNRSGYSGIFSVEGKSCINRCFYVELIRGRKEETEVLWTSNSIVVFCGTSGTYGTGSWPDGADLNLMPI

SEQ ID NO: 23987 - protein, 469 aa, Artificial Sequence; identical to SEQ ID NO: 23971
  derived and/or modified protein sequence (wt) from neuraminidase__InfluenzaA__AHC58129

SEQ ID NO: 23988 - protein, 469 aa, Artificial Sequence; identical to SEQ ID NO: 23971
  derived and/or modified protein sequence (wt) from neuraminidase__InfluenzaA__AHC58153

SEQ ID NO: 23989 - protein, 469 aa, Artificial Sequence; identical to SEQ ID NO: 23971
  derived and/or modified protein sequence (wt) from neuraminidase__InfluenzaA__AHC58165

SEQ ID NO: 23990 - protein, 469 aa, Artificial Sequence; identical to SEQ ID NO: 23975
  derived and/or modified protein sequence (wt) from neuraminidase__InfluenzaA__AHC58177

SEQ ID NO: 23991 - protein, 469 aa, Artificial Sequence
  derived and/or modified protein sequence (wt) from neuraminidase__InfluenzaA__AHC58189
MNPNQKIITIGSVSLTISTICFFMQIAILITTVTLHFKQYEFNSPPNNQVMLCEPTIIERNITEIVYLTNTTIEKEICPKPAEYRNWSKPQCDITGFAPFSKDNSIRLSAGGDIWVTREPYVSCDPDKCYQFALGQGTTLNNVHSNNTVRDRTPYRTLLMNELGVPFHLGTKQVCIAWSSSSCHDGKAWLHVCITGDDKNATASFIYNGRLVDSVVSWSKEILRTQESECVCINGTCTVVMTDGSASGKADTKILFIEEGKIVHTSTLSGSAQHVEECSCYPRYPGVRCVCRDNWKGSNRPIVDINIKDHSIVSSYVCSGLVGDTPRKNDSSSSSHCLDPNNEEGGHGVKGWAFDDGNDVWMGRTINEMSRLGYETFKVIEGWSNPKSKLQINRQVIVDRGDRSGYSGIFSVEGKSCINRCFYVELIRGRKEETEVLWTSNSIVVFCGTSGTYGTGSWPDGADLNLMPI

SEQ ID NO: 23992 - protein, 469 aa, Artificial Sequence; identical to SEQ ID NO: 23971
  derived and/or modified protein sequence (wt) from neuraminidase__InfluenzaA__AHC58201

SEQ ID NO: 23993 - protein, 469 aa, Artificial Sequence
  derived and/or modified protein sequence (wt) from neuraminidase__InfluenzaA__AHC58225
MNPNQKIITIGSVSLTISTICFFMQIAILITTVTLHFKQYEFNSPPNNQVMLCEPTIIERNITEIVYLTNTTIEKEICPKPAEYRNWSKPQCDITGFAPFSKDNSIRLSAGGDIWVTREPYVSCDPDKCYQFALGQGTTLNNVHSNNTVRDRTPYRTLLMNELGVPFHLGTKQVCIAWSSSSCHDGKAWLHVCITGDDKNATASFIYNGRLVDSVVSWSKEILRTQESECVCINGTCTVVMTDGSASGKADTKILFIEEGKIVHTSTLSGSAQHVEECSCYPRYPGVRCVCRDNWKGSNRPIVDINIKDHSIVSSYVCSGLVGDTPRKNDSSSSSHCLDPNNEEGGHGVKGWAFDDGNDVWMGRTINETSRLGYETFKVIEGWSNPKSKLQINRQVIVNRGDRSGYSGIFSVEGKSCINRCFYVELIRGRKEETEVLWTSNSIVVFCGTSGTYGTGSWPDGADLNLMPI

SEQ ID NO: 23994 - protein, 469 aa, Artificial Sequence; identical to SEQ ID NO: 23975
  derived and/or modified protein sequence (wt) from neuraminidase__InfluenzaA__AHC58237

SEQ ID NO: 23995 - protein, 469 aa, Artificial Sequence; identical to SEQ ID NO: 23971
  derived and/or modified protein sequence (wt) from neuraminidase__InfluenzaA__AHC58249

SEQ ID NO: 23996 - protein, 469 aa, Artificial Sequence; identical to SEQ ID NO: 19518
  derived and/or modified protein sequence (wt) from neuraminidase__InfluenzaA__AHC58273

SEQ ID NO: 23997 - protein, 469 aa, Artificial Sequence; identical to SEQ ID NO: 23975
  derived and/or modified protein sequence (wt) from neuraminidase__InfluenzaA__AHC58363

SEQ ID NO: 23998 - protein, 469 aa, Artificial Sequence; identical to SEQ ID NO: 22922
  derived and/or modified protein sequence (wt) from neuraminidase__InfluenzaA__AHC58375

SEQ ID NO: 23999 - protein, 469 aa, Artificial Sequence; identical to SEQ ID NO: 23975
  derived and/or modified protein sequence (wt) from neuraminidase__InfluenzaA__AHC58387

SEQ ID NO: 24000 - protein, 469 aa, Artificial Sequence; identical to SEQ ID NO: 23975
  derived and/or modified protein sequence (wt) from neuraminidase__InfluenzaA__AHC58399

SEQ ID NO: 24001 - protein, 469 aa, Artificial Sequence; identical to SEQ ID NO: 23971
  derived and/or modified protein sequence (wt) from neuraminidase__InfluenzaA__AHC58411

SEQ ID NO: 24002 - protein, 469 aa, Artificial Sequence; identical to SEQ ID NO: 22922
  derived and/or modified protein sequence (wt) from neuraminidase__InfluenzaA__AHC58423

SEQ ID NO: 24003 - protein, 469 aa, Artificial Sequence; identical to SEQ ID NO: 23975
  derived and/or modified protein sequence (wt) from neuraminidase__InfluenzaA__AHC58459

SEQ ID NO: 24004 - protein, 469 aa, Artificial Sequence
  derived and/or modified protein sequence (wt) from neuraminidase__InfluenzaA__AHC58471
MNPNQKIITIGSVCMTIGMANLILQIGNIISIWISHSIQLGNQNQIETCNQSVITYENNTWVNQTYVNISNTNFAAGQPVVSVKLAGNSSLCPVSGWAIYSKDNSIRIGSKGDVFVIREPFISCSPLECRTFFLTQGALLNDKHSNGTIKDRSPYRTLMSCPIGEVPSPYNSRFESVAWSASACHDGINWLTIGISGPDNGAVAVLKYNGIITDTIKSWRNNILRTQESECACVNGSCFTVMTDGPSDGQASYKIFRIEKGKIVKSVEMNAPNYHYEECSCYPDSSEITCVCRDNWHGANRPWVSFNQNLEYQIGYICSGVFGDNPRPNDKTGSCGPVSSNGANGVKGFSFKYGNGVWIGRTKSISSRNGFEMIWDPNGWTGTDNNFSIKQDIVGINEWSGYSGSFVQHPELTGLDCIRPCFWVELIRGRPKENTIWTSGSSISFCGVNSDTVGWSWPDGAELPFTIDK

SEQ ID NO: 24005 - protein, 469 aa, Artificial Sequence; identical to SEQ ID NO: 23971
  derived and/or modified protein sequence (wt) from neuraminidase__InfluenzaA__AHC58482

SEQ ID NO: 24006 - protein, 469 aa, Artificial Sequence; identical to SEQ ID NO: 23975
  derived and/or modified protein sequence (wt) from neuraminidase__InfluenzaA__AHC58494

SEQ ID NO: 24007 - protein, 469 aa, Artificial Sequence
  derived and/or modified protein sequence (wt) from neuraminidase__InfluenzaA__AHC58518
MNPNQKIITIGSVSLTISTICFFMQVAILITTVTLHFKQYEFNSPPNNQVMLCEPTIIERNITEIVYLTNTTIEKEICPKLAEYRNWSKPQCDITGFAPFSKDNSIRLSAGGDIWVTREPYVSCDPDKCYQFALGQGTTLNNVHSNNTVRDRTPYRTLLMNELGVPFHLGTKQVCIAWSSSSCHDGKAWLHVCITGDDKNATASFIYNGKLVDSVVSWSKEILRTQESECVCINGTCTVVMTDGSASGKADTKILFIEEGKIVHTSTLSGSAQHVEECSCYPRYPGVRCVCRDNWKGSNRPIVDINIKDHSIVSSYVCSGLVGDTPRKNDSSSSSHCLDPNNEEGGHGVKGWAFDDGNDVWMGRTINETSRLGYETFKVIEGWSNPKSKLQINRQVIVDRGNRSGYSGIFSVEGKSCINRCFYVELIRGRKEETEVLWTSNSIVVFCGTSGTYGTGSWPDGADLNLMPI

SEQ ID NO: 24008 - protein, 469 aa, Artificial Sequence; identical to SEQ ID NO: 23971
  derived and/or modified protein sequence (wt) from neuraminidase__InfluenzaA__AHC58530

SEQ ID NO: 24009 - protein, 469 aa, Artificial Sequence; identical to SEQ ID NO: 23971
  derived and/or modified protein sequence (wt) from neuraminidase__InfluenzaA__AHC58554

SEQ ID NO: 24010 - protein, 469 aa, Artificial Sequence; identical to SEQ ID NO: 23971
  derived and/or modified protein sequence (wt) from neuraminidase__InfluenzaA__AHC58566

SEQ ID NO: 24011 - protein, 469 aa, Artificial Sequence
  derived and/or modified protein sequence (wt) from neuraminidase__InfluenzaA__AHC58578
MNPNQKIITIGSVSLTVSTICFFMQIAILITTVTLHFKQYEFYSPPNNQVMLCEPTIIERNITEIVYLTNTTIEKEICPKLAEYRNWSKPQCDITGFAPFSKDNSIRLSAGGDIWVTREPYVSCDPDKCYQFALGQGTTLNNVHSNNTVRDRTPYRTLLMNELGVPFHLGTKQVCIAWSSSSCHDGKAWLHVCITGDDKNATASFIYNGRLVDSVVSWSKEILRTQESECVCINGTCTVVMTDGSASGKADTKILFIEEGKIVHTSTLSGSAQHVEECSCYPRYPGVRCVCRDNWKGSNRPIVDINIKDHSIVSSYVCSGLVGDTPRKNDSSSSSHCLDPNNEEGGHGVKGWAFDDGNDVWMGRTINETSRLGYETFKVIEGWSNPKSKLQINRQVIVDRGNRSGYSGIFSVEGKSCINRCFYVELIRGRKEETEVLWTSNSIVVFCGTSGTYGTGSWPDGADLNLMPI

SEQ ID NO: 24012 - protein, 469 aa, Artificial Sequence; identical to SEQ ID NO: 19518
  derived and/or modified protein sequence (wt) from neuraminidase__InfluenzaA__AHC58590

SEQ ID NO: 24013 - protein, 469 aa, Artificial Sequence; identical to SEQ ID NO: 24007
  derived and/or modified protein sequence (wt) from neuraminidase__InfluenzaA__AHC58602

SEQ ID NO: 24014 - protein, 469 aa, Artificial Sequence; identical to SEQ ID NO: 23971
  derived and/or modified protein sequence (wt) from neuraminidase__InfluenzaA__AHC58614

SEQ ID NO: 24015 - protein, 469 aa, Artificial Sequence; identical to SEQ ID NO: 23971
  derived and/or modified protein sequence (wt) from neuraminidase__InfluenzaA__AHC58626

SEQ ID NO: 24016 - protein, 469 aa, Artificial Sequence; identical to SEQ ID NO: 23971
  derived and/or modified protein sequence (wt) from neuraminidase__InfluenzaA__AHC58638

SEQ ID NO: 24017 - protein, 469 aa, Artificial Sequence; identical to SEQ ID NO: 23971
  derived and/or modified protein sequence (wt) from neuraminidase__InfluenzaA__AHC58650

SEQ ID NO: 24018 - protein, 469 aa, Artificial Sequence
  derived and/or modified protein sequence (wt) from neuraminidase__InfluenzaA__AHC58662
MNPNQKIITIGSVSLTISTICFFMQTAILITTVTLHFKQYEFNSPPNNQVMLCEPTIIERNITEIVYLTNTTIEKEICPKLAEYRNWSKPQCDITGFAPFSKDNSIRLSAGGDIWVTREPYVSCDPDKCYQFALGQGTTLNNVHSNNTVRDRTPYRTLLMNELGVPFHLGTKQVCIAWSSSSCHDGKAWLHVCITGDDKNATASFIYNGKLVDSVVSWSKEILRTQESECVCINGTCTVVMTDGSASGKADTKILFIEEGKIVHTSTLSGSAQHVEECSCYPRYPGVRCVCRDNWKGSNRPIVDINIKDHSIVSSYVCSGLVGDTPRKNDSSSSSHCLDPNNEEGGHGVKGWAFDDGNDVWMGRTINETSRLGYETFKVIEGWSNPKSKLQINRQVIVDRGNRSGYSGIFSVEGKSCINRCFYVELIRGRKEETEVLWTSNSIVVFCGTSGTYGTGSWPDGADLNLMPI

SEQ ID NO: 24019 - protein, 469 aa, Artificial Sequence
  derived and/or modified protein sequence (wt) from neuraminidase__InfluenzaA__AHC58686
MNPNQKIITIGSVSLTISTICFFMQIAILITTVTLHFKQYEFNSPPNNQVVLCEPTIIERNITEIVYLTNTTIEKEICPKPAEYRNWSKPQCDITGFAPFSKDNSIRLSAGGDIWVTREPYVSCDPDKCYQFALGQGTTLNNVHSNNTVRDRTPYRTLLMNELGVPFHLGTKQVCIAWSSSSCHDGKAWLHVCITGDDKNATASFIYNGRLVDSVVSWSKEILRTQESECVCINGTCTVVMTDGSASGKADTKILFIEEGKIVHTSTLSGSAQHVEECSCYPRYPGVRCVCRDNWKGSNRPIVDINIKDHSIVSSYVCSGLVGDTPRKNDSSSSSHCLDPNNEEGGHGVKGWAFDDGNDVWMGRTINETSRLGYETFKVIEGWSNPKSKLQINRQVIVDRGDRSGYSGIFSVEGKSCINRCFYVELIRGRKEETEVLWTSNSIVVFCGTSGTYGTGSWPDGADLNLMPI

SEQ ID NO: 24020 - protein, 469 aa, Artificial Sequence
  derived and/or modified protein sequence (wt) from neuraminidase__InfluenzaA__AHC58698
MNPNQKIITIGSVSLTISTICFFMQIAILITTVTLHFKQYEFNSPPNNQVMLCEPTIIERNITEIVYLTNTTIEKEICPKLAEYRNWSKPQCDITGFAPFSKDNSIRLSAGGDIWVTREPYVSCDPDKCYQFALGQGTTLNNVHSNNTVRDRTPYRTLLMNELGVPFHLGTKQVCIAWSSSSCHDGKAWLHVCITGDDKNATASFIYNGRLVDSVVSWSKEILRTQESECVCINGTCAVVMTDGSASGKADTKILFIEEGKIVHTSTLSGSAQHVEECSCYPRYPGVRCVCRDNWKGSNRPIVDINIKDHSIVSSYVCSGLVGDTPRKNDSSSSSHCLDPNNEEGGHGVKGWAFDDGNDVWMGRTINETSRLGYETFKVIEGWSNPKSKLQINRQVIVDRGNRSGYSGIFSVEGKSCINRCFYVELIRGRKEETEVLWTSNSIVVFCGTSGTYGTGSWPDGADLNLMPI

SEQ ID NO: 24021 - protein, 469 aa, Artificial Sequence; identical to SEQ ID NO: 22922
  derived and/or modified protein sequence (wt) from neuraminidase__InfluenzaA__AHC58710

SEQ ID NO: 24022 - protein, 469 aa, Artificial Sequence; identical to SEQ ID NO: 22922
  derived and/or modified protein sequence (wt) from neuraminidase__InfluenzaA__AHC58722

SEQ ID NO: 24023 - protein, 469 aa, Artificial Sequence
  derived and/or modified protein sequence (wt) from neuraminidase__InfluenzaA__AHC58734
MNPNQKIITIGSVSLTISTICFFMQIAILITTVTLHFKQYEFNSPPNNQVMLCEPTIIERNITEIVYLTNTTIEKEICPKLAEYRNWSKPQCDITGFAPFSKDNSIRLSAGGDIWVTREPYVSCDPNKCYQFALGQGTTLNNVHSNNTVRDRTPYRTLLMNELGVPFHLGTKQVCIAWSSSSCHDGKAWLHVCITGDDKNATASFIYNGKLVDSVVSWSKEILRTQESECVCINGTCTVVMTDGSASGKADTKILFIEEGKIVHTSTLSGSAQHVEECSCYPRYPGIRCVCRDNWKGSNRPIVDINIKDHSIVSSYVCSGLVGDTPRKNDSSSSSHCLDPNNEEGGHGVKGWAFDDGNDVWMGRTINETSRLGYETFKVIEGWSNPKSKLQINRQVIVDRGNRSGYSGIFSVEGKSCINRCFYVELIRGRKEETEVLWTSNSIVVFCGTSGTYGTGSWPDGADLNLMPI

SEQ ID NO: 24024 - protein, 469 aa, Artificial Sequence; identical to SEQ ID NO: 23971
  derived and/or modified protein sequence (wt) from neuraminidase__InfluenzaA__AHC58746

SEQ ID NO: 24025 - protein, 469 aa, Artificial Sequence; identical to SEQ ID NO: 23975
  derived and/or modified protein sequence (wt) from neuraminidase__InfluenzaA__AHC58758

SEQ ID NO: 24026 - protein, 469 aa, Artificial Sequence; identical to SEQ ID NO: 23971
  derived and/or modified protein sequence (wt) from neuraminidase__InfluenzaA__AHC58770

SEQ ID NO: 24027 - protein, 469 aa, Artificial Sequence; identical to SEQ ID NO: 19518
  derived and/or modified protein sequence (wt) from neuraminidase__InfluenzaA__AHC58782

SEQ ID NO: 24028 - protein, 469 aa, Artificial Sequence; identical to SEQ ID NO: 23971
  derived and/or modified protein sequence (wt) from neuraminidase__InfluenzaA__AHC58806

SEQ ID NO: 24029 - protein, 469 aa, Artificial Sequence
  derived and/or modified protein sequence (wt) from neuraminidase__InfluenzaA__AHC58818
MNPNQKIITIGSVSLTISTICFFIQIAILITTVTLHFKQYEFNSPPNNQVMLCEPTIIERNITEIVYLTNTTIEKEICPKLAEYRNWSKPQCDITGFAPFSKDNSIRLSAGGDIWVTREPYVSCDPDKCYQFALGQGTTLNNVHSNNTVRDRTPYRTLLMNELGVPFHLGTKQVCIAWSSSSCHDGKAWLHVCITGDDKNATASFIYNGRLVDSVVSWSKEILRTQESECVCINGTCTVVMTDGSASGKADTKILFIEEGKIVHTSTLSGSAQHVEECSCYPRYPGVRCVCRDNWKGSNRPIVDINIKDHSIVSSYVCSGLVGDTPRKNDSSSSSHCLDPNNEEGGHGVKGWAFDDGNDVWMGRTINETSRLGYETFKVIEGWSNPKSKLQINRQVIVDRGNRSGYSGIFSVEGKSCINRCFYVELIRGRKEETEVLWTSNSIVVFCGTSGTYGTGSWPDGADLNLMPI

SEQ ID NO: 24030 - protein, 469 aa, Artificial Sequence; identical to SEQ ID NO: 24020
  derived and/or modified protein sequence (wt) from neuraminidase__InfluenzaA__AHC58830

SEQ ID NO: 24031 - protein, 469 aa, Artificial Sequence; identical to SEQ ID NO: 23971
  derived and/or modified protein sequence (wt) from neuraminidase__InfluenzaA__AHC58842

SEQ ID NO: 24032 - protein, 469 aa, Artificial Sequence
  derived and/or modified protein sequence (wt) from neuraminidase__InfluenzaA__AHC58866
MNPNQKIITIGSVSLTISTICFFMQIAILITTVTLHFKQCEFNSPPNNRVMLCEPTIIERNITEIVYLTNTTIEKEICPKLAEYRNWSKPQCDITGFAPFSKDNSIRLSAGGDIWVTREPYVSCDPNKCYQFALGQGTTLNNVHSNNTVRDRTPYRTLLMNELGVPFHLGTKQVCIAWSSSSCHDGKAWLHVCITGDDKNATASFIYNGKLVDSVVSWSKEILRTQESECVCINGTCTVVMTDGSASGKADTKILFIEEGKIVHTSTLSGSAQHVEECSCYPRYPGVRCVCRDNWKGSNRPIVDINIKDHSIVSSYVCSGLVGDTPRKNDSSSSSHCLDPNNEEGGHGVKGWAFDDGNDVWMGRTINETSRLGYETFKVIEGWSNPKSKLQINRQVIVDRGNRSGYSGIFSVEGKSCINRCFYVELIRGRKEETGVLWTSNSIVVFCGTSGTYGTGSWPDGADLNLMPI

SEQ ID NO: 24033 - protein, 469 aa, Artificial Sequence; identical to SEQ ID NO: 24020
  derived and/or modified protein sequence (wt) from neuraminidase__InfluenzaA__AHC58878

SEQ ID NO: 24034 - protein, 469 aa, Artificial Sequence; identical to SEQ ID NO: 23971
  derived and/or modified protein sequence (wt) from neuraminidase__InfluenzaA__AHC58890

SEQ ID NO: 24035 - protein, 469 aa, Artificial Sequence; identical to SEQ ID NO: 23975
  derived and/or modified protein sequence (wt) from neuraminidase__InfluenzaA__AHC58902

SEQ ID NO: 24036 - protein, 469 aa, Artificial Sequence; identical to SEQ ID NO: 23971
  derived and/or modified protein sequence (wt) from neuraminidase__InfluenzaA__AHC58996

SEQ ID NO: 24037 - protein, 469 aa, Artificial Sequence; identical to SEQ ID NO: 23971
  derived and/or modified protein sequence (wt) from neuraminidase__InfluenzaA__AHC59008

SEQ ID NO: 24038 - protein, 469 aa, Artificial Sequence; identical to SEQ ID NO: 23975
  derived and/or modified protein sequence (wt) from neuraminidase__InfluenzaA__AHC59020

SEQ ID NO: 24039 - protein, 469 aa, Artificial Sequence
  derived and/or modified protein sequence (wt) from neuraminidase__InfluenzaA__AHC59032
MNPNQKIITIGSVSLTISTICFFMQIAILITTVTLHFKQYEFNSPPNNQVMLCEPTIIERNITEIVYLTNTTIEKEICPKLAEYRNWSKPQCDITGFAPFSKDNSIRLSAGGDIWVTREPYVSCDPNKCYQFALGQGTTLNNVHSNNTVRDRTPYRTLLMNELGVPFHLGTKQVCIAWSSSSCHDGKAWLHVCITGDDKNATASFIYNGKLVDSVVSWSKEILRTQESECVCINGTCTVVMTDGSASGKADTKILFIEEGKIVHTSTLSGSAQHVEECSCYPRYPSVRCVCRDNWKGSNRPIVDINIKDHSIVSSYVCSGLVGDTPRKNDSSSSSHCLDPNNEEGGHGVKGWAFDDGNDVWMGRTINETSRLGYETFKVIEGWSNPKSKLQINRQVIVDRGNRSGYSGIFSVEGKSCINRCFYVELIRGRKEETEVLWTSNSIVVFCGTSGTYGTGSWPDGADLNLMPI

SEQ ID NO: 24040 - protein, 469 aa, Artificial Sequence; identical to SEQ ID NO: 24007
  derived and/or modified protein sequence (wt) from neuraminidase__InfluenzaA__AHC59044

SEQ ID NO: 24041 - protein, 469 aa, Artificial Sequence; identical to SEQ ID NO: 19518
  derived and/or modified protein sequence (wt) from neuraminidase__InfluenzaA__AHC59056

SEQ ID NO: 24042 - protein, 469 aa, Artificial Sequence; identical to SEQ ID NO: 23971
  derived and/or modified protein sequence (wt) from neuraminidase__InfluenzaA__AHC59068

SEQ ID NO: 24043 - protein, 469 aa, Artificial Sequence; identical to SEQ ID NO: 23971
  derived and/or modified protein sequence (wt) from neuraminidase__InfluenzaA__AHC59080

SEQ ID NO: 24044 - protein, 469 aa, Artificial Sequence
  derived and/or modified protein sequence (wt) from neuraminidase__InfluenzaA__AHC59092
MNPNQKIITIGSVSLTISTICFFMQIAILVTTVTLHFKQYEFNSPPNNQVMLCEPTIIERNITEIVYLTNTTIEKEICPKPAEYRNWSKPQCDITGFAPFSKDNSIRLSAGGDIWVTREPYVSCDPDKCYQFALGQGTTLNNVHSNNTVRDRTPYRTLLMNELGVPFHLGTKQVCIAWSSSSCHDGKAWLHVCITGDDKNATASFIYNGRLVDSVVSWSKEILRTQESECVCINGTCTVVMTDGSASGKADTKILFIEEGKIVHTSTLSGSAQHVEECSCYPRYPGVRCVCRDNWKGSNRPIVDINIKDHSIVSSYVCSGLVGDTPRKNDSSSSGHCLDPNNEEGGHGVKGWAFDDGNDVWMGRTINETSRLGYETFKVIEGWSNPKSKLQINRQVIVDRGDRSGYSGIFSVEGKSCINRCFYVELIRGRKEETEVLWTSNSIVVFCGTSGTYGTGSWPDGADLNLMPI

SEQ ID NO: 24045 - protein, 469 aa, Artificial Sequence
  derived and/or modified protein sequence (wt) from neuraminidase__InfluenzaA__AHC59104
MNPNQKIITIGSVSLTISTICFFMQIAILITTVTLHFKQYEFYSPPNNQVMLCEPTIIKRNITEIVYLTNTTIEKEICPKLAEYRNWSKPQCDITGFAPFSKDNSIRLSAGGDIWVTREPYVSCDPDKCYQFALGQGTTLNNVHSNNTVRDRTPYRTLLMNELGVPFHLGTKQVCIAWSSSSCHDGKAWLHVCITGDDKNATASFIYNGRLVDSVVSWSKEILRTQESECVCINGTCTVVMTDGSASGKADTKILFIEEGKIVHTSTLSGSAQHVEECSCYPRYPGVRCVCRDNWKGSNRPIVDINIKDHSIVSSYVCSGLVGDTPRKNDSSSSSHCLDPNNEEGGHGVKGWAFDDGNDVWMGRTINETSRLGYETFKVIEGWSNPKSKLQINRQVIVDRGNRSGYSGIFSVEGKSCINRCFYVELIRGRKEETEVLWTSNSIVVFCGTSGTYGTGSWPDGADLNLMPI

SEQ ID NO: 24046 - protein, 469 aa, Artificial Sequence
  derived and/or modified protein sequence (wt) from neuraminidase__InfluenzaA__AHC59116
MNPNQKIITIGSVSLTISTICFFMQIAILITTVTLHFKQYEFNSPPNNQVMLCEPTIIERNITEIVYLTNTTIEKEICPKLAEYRNWSKPQCDITGFAPFSKDNSIRLSAGGDIWVTREPYVSCDPNKCYQFALGQGTTLNNVHSNNTVRDRTPYRTLLMNELGVPFHLGTKQVCIAWSSSSCHDGKAWLHVCITGDDKNATASFIYNGKLVDSVVSWSKEILRTQESECVCINGTCTVVMTDGSASGKADTKILFIEEGKIVHTSTLSGSAQHVEECSCYPRYPGVRCVCRDNWKGSNRPIVDINIKDHSIVSSYVCSGLVGDTPRKNDSSSSSHCLDPNNEEGGHGVKGWAFDDGNDVWMGRTINETSRLGYETFKVIEGWSNPKSKLQINRQVIVDRGNRSGYSGIFSVEGKSCINRCFYVELIRGREEETEVLWTSNSIVVFCGTSGTYGTGSWPDGADLNLMPI

SEQ ID NO: 24047 - protein, 469 aa, Artificial Sequence
  derived and/or modified protein sequence (wt) from neuraminidase__InfluenzaA__AHC59128
MNPNQKIITIGSVSLTISTICFFMQIAILITTVTLHFKQYEFYSPPNNQVMLCEPTIMERNITEIVYLTNTTIEKEICPKLAEYRNWSKPQCDITGFAPFSKDNSIRLSAGGDIWVTREPYVSCDPDKCYQFALGQGTTLNNVHSNNTVRDRTPYRTLLMNELGVPFHLGTKQVCIAWSSSSCHDGKAWLHVCVTGDDKNATASFIYNGRLVDSVVSWSKEILRTQESECVCINGTCTVVMTDGSASGKADTKILFIEEGKIVHTSTLSGSAQHVEECSCYPRYPGVRCVCRDNWKGSNRPIVDINIKDHSIVSSYVCSGLVGDTPRKNDSSSSSHCLDPNNEEGGHGVKGWAFDDGNDVWMGRTINETSRLGYETFKVIEGWSNPKSKLQINRQVIVDRGNRSGYSGIFSVEGKSCINRCFYVELIRGRKEETEVLWTSNSIVVFCGTSGTYGTGSWPDGADLNLMPI

SEQ ID NO: 24048 - protein, 469 aa, Artificial Sequence
  derived and/or modified protein sequence (wt) from neuraminidase__InfluenzaA__AHC59152
MNPNQKIITIGSVSLTISTICFFMQVAILITTVTLHFKQYEFNSPPNNQVMLCEPTIIERNITEILYLTNTTIEKEICPKLAEYRNWSKPQCDITGFAPFSKDNSIRLSAGGDIWVTREPYVSCDPDKCYQFALGQGTTLNNVHSNNTVRDRTPYRTLLMNELGVPFHLGTKQVCIAWSSSSCHDGKAWLHVCITGDDKNATASFIYNGKLVDSVVSWSKEILRTQESECVCINGTCTVVMTDGSASGKADTKILFIEEGKIVHTSTLSGSAQHVEECSCYPRYPGVRCVCRDNWKGSNRPIVDINIKDHSIVSSYVCSGLVGDTPRKNDSSSSSHCLDPNNEEGGHGVKGWAFDDGNDVWMGRTINETSRLGYETFKVIEGWSNPKSKLQINRQVIVDRGNRSGYSGIFSVEGKSCINRCFYVELIRGRKEETEVLWTSNSIVVFCGTSGTYGTGSWPDGADLNLMPI

SEQ ID NO: 24049 - protein, 469 aa, Artificial Sequence
  derived and/or modified protein sequence (wt) from neuraminidase__InfluenzaA__AHC59188
MNPNQKIITIGSVSLTISTICFFMQIAILITTVTLHFKQYEFNPPPNNQVVLCEPTIIERNITEIVYLTNTTIEKEICPKLAEYRNWSKPQCDITGFAPFSKDNSIRLSAGGDIWVTREPYVSCDPDKCYQFALGQGTTLNNVHSNNTVRDRTPYRTLLMNELGVPFHLGTKQVCIAWSSSSCHDGKAWLHVCITGDDKNATASFIYNGRLVDSVVSWSKEILRTQESECVCINGTCTVVMTDGSASGKADTKILFIEEGKIVHTSTLSGSAQHVEECSCYPRYPGVRCVCRDNWKGSNRPIVDINIKDHSIVSSYVCSGLVGDTPRKNDSSSSSHCLDPNNEEGGHGVKGWAFDDGNDVWMGRTINETSRLGYETFKVIEGWSNPKSKLQINRQVIVDRGDRSGYSGIFSVEGKSCINRCFYVELIRGRKEETEVLWTSNSIVVFCGTSGTYGTGSWPDGADLNLMPI

SEQ ID NO: 24050 - protein, 469 aa, Artificial Sequence; identical to SEQ ID NO: 19518
  derived and/or modified protein sequence (wt) from neuraminidase__InfluenzaA__AHC59200

SEQ ID NO: 24051 - protein, 469 aa, Artificial Sequence
  derived and/or modified protein sequence (wt) from neuraminidase__InfluenzaA__AHC59212
MNPNQKIITIGSVSLTISTICFFMQIATLITTVTLHFKQYEFNSPPNNQVMLCEPTIIERNITEIVYLTNTTIEKEICPKLAEYRNWSKPQCDITGFAPFSKDNSIRLSAGGDIWVTREPYVSCDPDKCYQFALGQGTTLNNVHSNNTVRDRTPYRTLLMNELGVPFHLGTKQVCIAWSSSSCHDGKAWLHVCITGDDKNATASFIYNGRLVDSVVSWSKEILRTQESECVCINGTCTVVMTDGSASGKADTKILFIEEGKIVHTSTLSGSAQHVEECSCYPRYPGVRCVCRDNWKGSNRPIVDINIKDHSIVSSYVCSGLVGDTPRKNDSSSSSHCLDPNNEEGGHGVKGWAFDDGNDVWMGRTINETSRLGYETFKVIEGWSNPKSKLQINRQVIVDRGDRSGYSGIFSVEGKSCINRCFYVELIRGRKEETEVLWTSNSIVVFCGTSGTYGTGSWPDGADLNLMPI

SEQ ID NO: 24052 - protein, 469 aa, Artificial Sequence; identical to SEQ ID NO: 23975
  derived and/or modified protein sequence (wt) from neuraminidase__InfluenzaA__AHC59224

SEQ ID NO: 24053 - protein, 469 aa, Artificial Sequence
  derived and/or modified protein sequence (wt) from neuraminidase__InfluenzaA__AHC59236
MNPNQKIITIGSVSLTISTICFFMQIAILITTVTLHFKQYEFYSPPNNQVMLCEPTIIERNITEIVYLTNTTIEKEICPKLAEYRNWSKPQCDITGFAPFSKDNSIRLSAGGDIWVTREPYVSCDPDKCYQFALGQGTTLNNVHSNNTVHDRTPYRTLLMNELGVPFHLGTKQVCIAWSSSSCHDGKAWLHVCITGDDKNATASFIYNGRLVDSVVSWSKEILRTQESECVCINGTCTVVMTDGSASGKADTKILFIEEGKIVHTSTLSGSAQHVEECSCYPRYPGVRCVCRDNWKGSNRPIVDINIKDHSIVSSYVCSGLVGDTPRKNDSSSSSHCLDPNNEEGGHGVKGWAFDDGNDVWMGRTINETSRLGYETFKVIEGWSNPKSKLQINRQVIVDRGNRSGYSGIFSVEGKSCINRCFYVELIRGRKEETEVLWTSNSIVVFCGTSGTYGTGSWPDGADLNLMPI

SEQ ID NO: 24054 - protein, 469 aa, Artificial Sequence; identical to SEQ ID NO: 23975
  derived and/or modified protein sequence (wt) from neuraminidase__InfluenzaA__AHC59260

SEQ ID NO: 24055 - protein, 469 aa, Artificial Sequence; identical to SEQ ID NO: 23971
  derived and/or modified protein sequence (wt) from neuraminidase__InfluenzaA__AHC59272

SEQ ID NO: 24056 - protein, 469 aa, Artificial Sequence; identical to SEQ ID NO: 23975
  derived and/or modified protein sequence (wt) from neuraminidase__InfluenzaA__AHC59284

SEQ ID NO: 24057 - protein, 469 aa, Artificial Sequence
  derived and/or modified protein sequence (wt) from neuraminidase__InfluenzaA__AHC59296
MNPNQKIITIGSVSLTISTICFFMQIAILITTVTLHFKQYEFNSPPNNQVMLCEPTIIERNITEIVYLTNTTIEKEICPKLAEYRNWSKPQCDITGFAPFSKDNSIRLSAGGDIWVTREPYVSCDPNKCYQFALGQGTTLNNVHSNNTVRDRTPYRTLLMNELGVPFHLGTKQVCIAWSSSSCHDGKAWLHVCITGDDKNATASFIYNGKLVDSVVSWSKEILRTQESECVCINGTCTVVMTDGSASGKADTKILFIEEGKIVHTSTLSGSAQHVEECSCYPRYPGVRCVCRDNWKGSNRPIVDIKIKDHSIVSSYVCSGLVGDTPRKNDSSSSSHCLDPNNEEGGHGVKGWAFDDGNDVWMGRTINETSRLGYETFKVIEGWSNPKSKLQINRQVIVDRGNRSGYSGIFSVEGKSCINRCFYVELIRGRKEETEVLWTSNSIVVFCGTSGTYGTGSWPDGADLNLMPI

SEQ ID NO: 24058 - protein, 469 aa, Artificial Sequence
  derived and/or modified protein sequence (wt) from neuraminidase__InfluenzaA__AHC59308
MNPNQKIITIGSVSLTISTICFFMQIAILITTVTLHFKQYEFNPPPNNQVMLCEPTIIERNITEIVYLTNTTIEKEICPKLAEYRNWSKPQCDITGFAPFSKDNSIRLSAGGDIWVTREPYVSCDPNKCYQFALGQGTTLNNVHSNNTVRDRTPYRTLLMNELGVPFHLGTKQVCIAWSSSSCHDGKAWLHVCITGDDKNATASFIYNGKLVDSVVSWSKEILRTQESECVCINGTCTVVMTDGSASGKADTKILFIEEGKIVHTSTLSGSAQHVEECSCYPRYPGVRCVCRDNWKGSNRPIVDINIKDHSIVSSYVCSGLVGDTPRKNDSSSSSHCLDPNNEEGGHGVKGWAFDDGNDVWMGRTINETSRLGYETFKVIEGWSNPKSKLQINRQVMVDRGNRSGYSGIFSVEGKSCINRCFYVELIRGRKEETEVLWTSNSIVVFCGTSGTYGTGSWPDGADLNLMPI

SEQ ID NO: 24059 - protein, 469 aa, Artificial Sequence; identical to SEQ ID NO: 23883
  derived and/or modified protein sequence (wt) from neuraminidase__InfluenzaA__AHC59320

SEQ ID NO: 24060 - protein, 469 aa, Artificial Sequence; identical to SEQ ID NO: 22146
  derived and/or modified protein sequence (wt) from neuraminidase__InfluenzaA__AHC59332

SEQ ID NO: 24061 - protein, 469 aa, Artificial Sequence; identical to SEQ ID NO: 24019
  derived and/or modified protein sequence (wt) from neuraminidase__InfluenzaA__AHC59344

SEQ ID NO: 24062 - protein, 469 aa, Artificial Sequence
  derived and/or modified protein sequence (wt) from neuraminidase__InfluenzaA__AHC59368
MNPNQKIITIGSVSLTISTICFFMQIAILITTVTLHFKQYEFNSPPNNQVMLCEPTIIERNITEIVYLTNTTIEKEICPKLAEYRNWSKPQCDITGFAPFSKDNSIRLSAGGDIWVTREPYVSCDPNKCYQFALGQGTTLNNVHSNNTVRDRTPYRTLLMNELGVPFHLGTKQVCIAWSSSSCHDGKAWLHVCITGDDKNATASFIYNGKLVDSVVSWSKEILRTQESECVCINGTCTVVMTDGSASGKADTKILFIEEGKIVHTSTLSGSAQHVEECSCYPRYPGVRCVCRDNWKGSNRPIVDINIKDHSIVSSYVCSGLVGDTPRKNDSSSSSHCLDPNNEEGGHGVKGWAFDDGNDVWMGRTIDETSRLGYETFKVIEGWSNPKSKLQINRQVIVDRGNRSGYSGIFSVEGKSCINRCFYVELIRGRKEETEVLWTSNSIVVFCGTSGTYGTGSWPDGADLNLMPI

SEQ ID NO: 24063 - protein, 469 aa, Artificial Sequence; identical to SEQ ID NO: 23971
  derived and/or modified protein sequence (wt) from neuraminidase__InfluenzaA__AHC59380

SEQ ID NO: 24064 - protein, 469 aa, Artificial Sequence; identical to SEQ ID NO: 22922
  derived and/or modified protein sequence (wt) from neuraminidase__InfluenzaA__AHC59392

SEQ ID NO: 24065 - protein, 469 aa, Artificial Sequence; identical to SEQ ID NO: 24007
  derived and/or modified protein sequence (wt) from neuraminidase__InfluenzaA__AHC59404

SEQ ID NO: 24066 - protein, 469 aa, Artificial Sequence; identical to SEQ ID NO: 23975
  derived and/or modified protein sequence (wt) from neuraminidase__InfluenzaA__AHC59416

SEQ ID NO: 24067 - protein, 469 aa, Artificial Sequence
  derived and/or modified protein sequence (wt) from neuraminidase__InfluenzaA__AHC59428
MNPNQKIITIGSVSLTISTICFFMQIAILITTVTLHFKQYEFYSPPNNQVMLCEPTIIERNITEIVYLTNTTIEKEICPKLAEYRNWSKPQCDITGFAPFSKDNSIRLSAGGDIWVTREPYVSCDPDRCYQFALGQGTTLNNVHSNNTVRDRTPYRTLLMNELGVPFHLGTKQVCIAWSSSSCHDGKAWLHVCITGDDKNATASFIYNGRLVDSVVSWSKEILRTQESECVCINGTCTVVMTDGSASGKADTKILFIEEGKIVHTSTLSGSAQHVEECSCYPRYPGVRCVCRDNWKGSNRPIVDINIKDHSIVSSYVCSGLVGDTPRKNDSSSSSHCLDPNNEEGGHGVKGWAFDDGNDVWMGRTINETSRLGYETFKVIEGWSNPKSKLQINRQVIVDRGNRSGYSGIFSVEGKSCINRCFYVELIRGRKEETEVLWTSNSIVVFCGTSGTYGTGSWPDGADLNLMPI

SEQ ID NO: 24068 - protein, 469 aa, Artificial Sequence
  derived and/or modified protein sequence (wt) from neuraminidase__InfluenzaA__AHC59440
MNPNQKIITIGSVSLTISTICFFMQIAILITTVTLHFKQYEFNSPPNNQVMLCEPTIIERNITEIVYLTNTTIEKEICPKPAEYRNWSKPQCDITGFAPFSKDNSIRLSAGGDIWVTREPYVSCDPDKCYQFALGQGTTLNNVHSNNTVRDRTPYRTLLMNELGVPFHLGTKQVCIAWSSSSCHDGKAWLHVCITGDDKNATASFIYNGRLVDSVVSWSKEILRTQESECVCINGTCTVVMTDGSASGKADTKILFIEEGKIVQTSTLSGSAQHVEECSCYPRYPGVRCVCRDNWKGSNRPIVDINIKDHSIVSSYVCSGLVGDTPRKNDSSSSSHCLDPNNEEGGHGVKGWAFDDGNDVWMGRTINETSRLGYETFKVIEGWSNPKSKLQINRQVIVDRGDRSGYSGIFSVEGKSCINRCFYVELIRGRKEETEVLWTSNSIVVFCGTSGTYGTGSWPDGADLNLMPI

SEQ ID NO: 24069 - protein, 469 aa, Artificial Sequence; identical to SEQ ID NO: 23975
  derived and/or modified protein sequence (wt) from neuraminidase__InfluenzaA__AHC59452

SEQ ID NO: 24070 - protein, 469 aa, Artificial Sequence; identical to SEQ ID NO: 19518
  derived and/or modified protein sequence (wt) from neuraminidase__InfluenzaA__AHC59464

SEQ ID NO: 24071 - protein, 469 aa, Artificial Sequence; identical to SEQ ID NO: 23883
  derived and/or modified protein sequence (wt) from neuraminidase__InfluenzaA__AHC59476

SEQ ID NO: 24072 - protein, 469 aa, Artificial Sequence; identical to SEQ ID NO: 23975
  derived and/or modified protein sequence (wt) from neuraminidase__InfluenzaA__AHC59488

SEQ ID NO: 24073 - protein, 469 aa, Artificial Sequence; identical to SEQ ID NO: 23975
  derived and/or modified protein sequence (wt) from neuraminidase__InfluenzaA__AHC59500

SEQ ID NO: 24074 - protein, 469 aa, Artificial Sequence; identical to SEQ ID NO: 24020
  derived and/or modified protein sequence (wt) from neuraminidase__InfluenzaA__AHC59512

SEQ ID NO: 24075 - protein, 469 aa, Artificial Sequence; identical to SEQ ID NO: 24020
  derived and/or modified protein sequence (wt) from neuraminidase__InfluenzaA__AHC59524

SEQ ID NO: 24076 - protein, 469 aa, Artificial Sequence; identical to SEQ ID NO: 24007
  derived and/or modified protein sequence (wt) from neuraminidase__InfluenzaA__AHC59536

SEQ ID NO: 24077 - protein, 469 aa, Artificial Sequence; identical to SEQ ID NO: 23975
  derived and/or modified protein sequence (wt) from neuraminidase__InfluenzaA__AHC59548

SEQ ID NO: 24078 - protein, 469 aa, Artificial Sequence; identical to SEQ ID NO: 23975
  derived and/or modified protein sequence (wt) from neuraminidase__InfluenzaA__AHC59560

SEQ ID NO: 24079 - protein, 469 aa, Artificial Sequence; identical to SEQ ID NO: 24053
  derived and/or modified protein sequence (wt) from neuraminidase__InfluenzaA__AHC59572

SEQ ID NO: 24080 - protein, 469 aa, Artificial Sequence; identical to SEQ ID NO: 24048
  derived and/or modified protein sequence (wt) from neuraminidase__InfluenzaA__AHC59584

SEQ ID NO: 24081 - protein, 469 aa, Artificial Sequence; identical to SEQ ID NO: 24020
  derived and/or modified protein sequence (wt) from neuraminidase__InfluenzaA__AHC59596

SEQ ID NO: 24082 - protein, 469 aa, Artificial Sequence; identical to SEQ ID NO: 22922
  derived and/or modified protein sequence (wt) from neuraminidase__InfluenzaA__AHC59608

SEQ ID NO: 24083 - protein, 469 aa, Artificial Sequence; identical to SEQ ID NO: 24007
  derived and/or modified protein sequence (wt) from neuraminidase__InfluenzaA__AHC59620

SEQ ID NO: 24084 - protein, 469 aa, Artificial Sequence; identical to SEQ ID NO: 23975
  derived and/or modified protein sequence (wt) from neuraminidase__InfluenzaA__AHC59632

SEQ ID NO: 24085 - protein, 469 aa, Artificial Sequence; identical to SEQ ID NO: 23975
  derived and/or modified protein sequence (wt) from neuraminidase__InfluenzaA__AHC59644

SEQ ID NO: 24086 - protein, 469 aa, Artificial Sequence
  derived and/or modified protein sequence (wt) from neuraminidase__InfluenzaA__AHC59656
MNPNQKIITIGSVSLTISTICFFMQIAILITTVTMHFKQYEFNSPPNNQVMLCEPTIIERNITEIVYLTNTTIEKEICPKLAEYRNWSKPQCDITGFAPFSKDNSIRLSAGGDIWVTREPYVSCDPVKCYQFALGQGTTLNNVHSNNTVRDRTPYRTLLMNELGVPFHLGTKQVCIAWSSSSCHDGKAWLHVCITGDDKNATASFIYNGKLVDSVVSWSKEILRTQESECVCINGTCTVVMTDGSASGKADTKILFIEEGKIVHTSTLSGSAQHVEECSCYPRYPGVRCVCRDNWKGSNRPIVDINIKDHSIVSSYVCSGLVGDTPRKNDSSSSSHCLDPNNEEGGHGVKGWAFDDGNDVWMGRTINETSRLGYETFKVIEGWSNPKSKLQINRQVIVDRGNRSGYSGIFSVEGKSCINRCFYVELIRGRKEETEVLWTSNSIVVFCGTSGTYGTGSWPDGADLNLMPI

SEQ ID NO: 24087 - protein, 469 aa, Artificial Sequence; identical to SEQ ID NO: 24020
  derived and/or modified protein sequence (wt) from neuraminidase__InfluenzaA__AHC59668

SEQ ID NO: 24088 - protein, 469 aa, Artificial Sequence; identical to SEQ ID NO: 24048
  derived and/or modified protein sequence (wt) from neuraminidase__InfluenzaA__AHC59680

SEQ ID NO: 24089 - protein, 469 aa, Artificial Sequence; identical to SEQ ID NO: 23975
  derived and/or modified protein sequence (wt) from neuraminidase__InfluenzaA__AHC59704

SEQ ID NO: 24090 - protein, 469 aa, Artificial Sequence; identical to SEQ ID NO: 19518
  derived and/or modified protein sequence (wt) from neuraminidase__InfluenzaA__AHC59716

SEQ ID NO: 24091 - protein, 469 aa, Artificial Sequence; identical to SEQ ID NO: 19518
  derived and/or modified protein sequence (wt) from neuraminidase__InfluenzaA__AHC59728

SEQ ID NO: 24092 - protein, 469 aa, Artificial Sequence; identical to SEQ ID NO: 24020
  derived and/or modified protein sequence (wt) from neuraminidase__InfluenzaA__AHC59752

SEQ ID NO: 24093 - protein, 469 aa, Artificial Sequence; identical to SEQ ID NO: 24007
  derived and/or modified protein sequence (wt) from neuraminidase__InfluenzaA__AHC59764

SEQ ID NO: 24094 - protein, 469 aa, Artificial Sequence
  derived and/or modified protein sequence (wt) from neuraminidase__InfluenzaA__AHC59776
MNPNQKIITIGSVSLTISTICFFMQIAILITTVTLHFKQYEFYSPPNNQVMLCEPTIIERNITEIVYLTNTTIEKEICPKLAEYRNWSKPQCDITGFAPFSKDNSIRLSAGGDIWVTREPYVSCDPDKCYQFALGQGTTLNNVHSNNTVRDRTPYRTLLMNELGVPFHLGTKQVCIAWSSSSCHDGKAWLHVCITGDDKNATASFIYNGKLVDSVVSWSKEILRTQESECVCINGTCTVVMTDGSASGKADTKILFIEEGKIVHTSTLSGSAQHVEECSCYPRYPGVRCVCRDNWKGSNRPIVDINIKDHSIVSSYVCSGLVGDTPRKNDSSSSSHCLDPNNEEGGHGVKGWAFDDGNDVWMGRTINETSRLGYETFKVIEGWSNPKSKLQINRQVIVDRGNRSGYSGIFSVEGKSCINRCFYVELIRGRKEETEVLWTSNSIVVFCGTSGTYGTGSWPDGADLNLMPI

SEQ ID NO: 24095 - protein, 469 aa, Artificial Sequence; identical to SEQ ID NO: 23971
  derived and/or modified protein sequence (wt) from neuraminidase__InfluenzaA__AHC59788

SEQ ID NO: 24096 - protein, 469 aa, Artificial Sequence; identical to SEQ ID NO: 24048
  derived and/or modified protein sequence (wt) from neuraminidase__InfluenzaA__AHC59800

SEQ ID NO: 24097 - protein, 469 aa, Artificial Sequence
  derived and/or modified protein sequence (wt) from neuraminidase__InfluenzaA__AHC59812
MNPNQKIITIGSVSLTISTICFFMQIAILITTVTLHFKQYEFNSPPNNQVVLCEPTIIERNITEIVYLTNTTIEKEICPKPAEYRNWSKPQCDITGFAPFSKDNSIRLSAGGDIWVTREPYVSCDPDKCYQFALGQGTTLNNVHSNNTVRDRTPYRTLLMNELGVPFHLGTKQVCIAWSSSSCHDGKAWLHVCITGDDKNATASFIYNGRLVDSVVSWSKEILRTQESECVCINGTCTVVMTDGSASGKADTKILFIEEGKIVYTSTLSGSAQHVEECSCYPRYPGVRCVCRDNWKGSNRPIVDINIKDHSIVSSYVCSGLVGDTPRKNDSSSSSHCLDPNNEEGGHGVKGWAFDDGNDVWMGRTINETSRLGYETFKVIEGWSNPKSKLQINRQVIVDRGDRSGYSGIFSVEGKSCINRCFYVELIRGRKEETEVLWTSNSIVVFCGTSGTYGTGSWPDGADLNLMPI

SEQ ID NO: 24098 - protein, 469 aa, Artificial Sequence
  derived and/or modified protein sequence (wt) from neuraminidase__InfluenzaA__AHC59824
MNPNQKIITIGSVSLTISTICFFMQIAILITTVTLHFKQYEFYSPPNNQVMLCEPTIIERNITEIVYLTNTTIEKEICPKLAEYRKWSKPQCDITGFAPFSKDNSIRLSAGGDIWVTREPYVSCDPDKCYQFALGQGTTLNNVHSNNTVRDRTPYRTLLMNELGVPFHLGTKQVCIAWSSSSCHDGKAWLHVCITGDDKNATASFIYNGRLVDSVVSWSKEILRTQESECVCINGTCTVVMTDGSASGKADTKILFIEEGKIVHTSTLSGSAQHVEECSCYPRYPGVRCVCRDNWKGSNRPIVDINIKDHSIVSSYVCSGLVGDTPRKNDSSSSSHCLDPNNEEGGHGVKGWAFDDGNDVWMGRTINETSRLGYETFKVIEGWSNPKSKLQINRQVIVDRGNRSGYSGIFSVEGKSCINRCFYVELIRGRKEETEVLWTSNSIVVFCGTSGTYGTGSWPDGADLNLMPI

SEQ ID NO: 24099 - protein, 469 aa, Artificial Sequence; identical to SEQ ID NO: 23975
  derived and/or modified protein sequence (wt) from neuraminidase__InfluenzaA__AHC59836

SEQ ID NO: 24100 - protein, 469 aa, Artificial Sequence; identical to SEQ ID NO: 22922
  derived and/or modified protein sequence (wt) from neuraminidase__InfluenzaA__AHC59848

SEQ ID NO: 24101 - protein, 469 aa, Artificial Sequence; identical to SEQ ID NO: 23971
  derived and/or modified protein sequence (wt) from neuraminidase__InfluenzaA__AHC59860

SEQ ID NO: 24102 - protein, 469 aa, Artificial Sequence; identical to SEQ ID NO: 24018
  derived and/or modified protein sequence (wt) from neuraminidase__InfluenzaA__AHC59872

SEQ ID NO: 24103 - protein, 469 aa, Artificial Sequence; identical to SEQ ID NO: 24007
  derived and/or modified protein sequence (wt) from neuraminidase__InfluenzaA__AHC59884

SEQ ID NO: 24104 - protein, 469 aa, Artificial Sequence
  derived and/or modified protein sequence (wt) from neuraminidase__InfluenzaA__AHC59895
MNPNQKIITIGSVSLTISTICFFMQIAILITTVTLHFKQYEFNSPPNNQVMLCEPTIIERNITEIVYLTNTTIEKEICPKLAEYRNWSKPQCDITGFAPFSKDNSIRLSAGGDIWVTREPYVSCDPDKCYQFALGQGTTLNNVHSNNTVRDRTPYRTLLMNELGVPFHLGTKQVCIAWSSSSCHDGKAWLHVCITGDDKNATASFIYNGRLVDSVVSWSKEILRTQESECVCINGTCTVVMTDGSASGKADTKILFIKEGKIVHTSTLSGSAQHVEECSCYPRYPGVRCVCRDNWKGSNRPIVDINIKDHSIVSSYVCSGLVGDTPRKNDSSSSSHCLDPNNEEGGHGVKGWAFDDGNDVWMGRTINETSRLGYETFKVIEGWSNPKSKLQINRQVIVDRGNRSGYSGIFSVEGKSCINRCFYVELIRGRKEETEVLWTSNSIVVFCGTSGTYGTGSWPDGADLNLMPI

SEQ ID NO: 24105 - protein, 469 aa, Artificial Sequence; identical to SEQ ID NO: 23975
  derived and/or modified protein sequence (wt) from neuraminidase__InfluenzaA__AHC59907

SEQ ID NO: 24106 - protein, 469 aa, Artificial Sequence
  derived and/or modified protein sequence (wt) from neuraminidase__InfluenzaA__AHC59918
MNPNQKIITIGSVSLTISTICFFIQIAILITTVTLHFKQYEFNSPPNNQVMLCEPTIIERNITEIVYLTNTTIEKEICPKLAEYRNWSKPQCDITGFAPFSKDNSIRLSAGGDIWVTREPYVSCDPDKCYQFALGQGTTLNNVHSNNTVRDRTPYRTLLMNELGVPFHLGTKQVCIAWSSSSCHDGKAWLHVCITGDDKNATASFIYNGRLVDSVVSWSKEILRTQESECVCINGTCTVVMTDGSASGKADTKILFIEEGKIVHTSTLSGSAQHVEECSCYPRYPGVRCVCRDNWKGSNRPIVDINIKDHSIVSSYVCSGLVGDTPRKNDSSSSSHCLDPNNEEGGHGVKGWAFDDGNDVWMGRTINETSRLGYETFKVIEGWSNPKSKLQMNRQVIVDRGNRSGYSGIFSVEGKSCINRCFYVELIRGRKEETEVLWTSNSIVVFCGTSGTYGTGSWPDGADLNLMPI

SEQ ID NO: 24107 - protein, 469 aa, Artificial Sequence; identical to SEQ ID NO: 24106
  derived and/or modified protein sequence (wt) from neuraminidase__InfluenzaA__AHC59930

SEQ ID NO: 24108 - protein, 469 aa, Artificial Sequence; identical to SEQ ID NO: 23975
  derived and/or modified protein sequence (wt) from neuraminidase__InfluenzaA__AHC59942

SEQ ID NO: 24109 - protein, 469 aa, Artificial Sequence; identical to SEQ ID NO: 24020
  derived and/or modified protein sequence (wt) from neuraminidase__InfluenzaA__AHC59954

SEQ ID NO: 24110 - protein, 469 aa, Artificial Sequence
  derived and/or modified protein sequence (wt) from neuraminidase__InfluenzaA__AHC59966
MNPNQKIITIGSVSLTISTICFFMQIAILITTVTLHFKQYEFNSSPNNQVMLCEPTIIERNITEIVYLTNTTIEKEICPKPAEYRNWSKPQCDITGFAPFSKDNSIRLSAGGDIWVTREPYVSCDPDKCYQFALGQGTTLNNVHSNNTVRDRTPYRTLLMNELGVPFHLGTKQVCIAWSSSSCHDGKAWLHVCITGDDKNATASFIYNGRLVDSVVSWSKEILRTQESECVCINGTCTVVMTDGSASGKADTKILFIEEGKIVHTSTLSGSAQHVEECSCYPRYPGVRCVCRDNWKGSNRPIVDINIKDHSIVSSYVCSGLVGDTPRKNDSSSSSHCLDPNNEEGGHGVKGWAFDDGNDVWMGRTINETSRLGYETFKVIEGWSNPKSKLQINRQVIVDRGDGSGYSGIFSVEGKSCINRCFYVELIRGRKEETEVLWTSNSIVVFCGTSGTYGTGSWPDGADLNLMPI

SEQ ID NO: 24111 - protein, 469 aa, Artificial Sequence; identical to SEQ ID NO: 22922
  derived and/or modified protein sequence (wt) from neuraminidase__InfluenzaA__AHC59978

SEQ ID NO: 24112 - protein, 469 aa, Artificial Sequence; identical to SEQ ID NO: 20884
  derived and/or modified protein sequence (wt) from neuraminidase__InfluenzaA__AHC59990

SEQ ID NO: 24113 - protein, 469 aa, Artificial Sequence; identical to SEQ ID NO: 24020
  derived and/or modified protein sequence (wt) from neuraminidase__InfluenzaA__AHC60002

SEQ ID NO: 24114 - protein, 469 aa, Artificial Sequence; identical to SEQ ID NO: 23975
  derived and/or modified protein sequence (wt) from neuraminidase__InfluenzaA__AHC60014

SEQ ID NO: 24115 - protein, 469 aa, Artificial Sequence; identical to SEQ ID NO: 19518
  derived and/or modified protein sequence (wt) from neuraminidase__InfluenzaA__AHC60026

SEQ ID NO: 24116 - protein, 469 aa, Artificial Sequence; identical to SEQ ID NO: 23971
  derived and/or modified protein sequence (wt) from neuraminidase__InfluenzaA__AHC60038

SEQ ID NO: 24117 - protein, 469 aa, Artificial Sequence; identical to SEQ ID NO: 23971
  derived and/or modified protein sequence (wt) from neuraminidase__InfluenzaA__AHC60050

SEQ ID NO: 24118 - protein, 469 aa, Artificial Sequence
  derived and/or modified protein sequence (wt) from neuraminidase__InfluenzaA__AHC60062
MNPNQKIITIGSVSLTISTICFFMQIAILITTVTMHFKQYEFNSPPNNQVMLCEPTIIERNITEIVYLTNTTIEKEICPKLAEYRNWSKPQCDITGFAPFSKDNSIRLSAGGDIWVTREPYVSCDPDKCYQFALGQGTTLNNVHSNNTVRDRTPYRTLLMNELGVPFHLGTKQVCIAWSSSSCHDGKAWLHVCITGDDKNATASFIYNGKLVDSVVSWSKEILRTQESECVCINGTCTVVMTDGSASGKADTKILFIEEGKIVHTSTLSGSAQHVEECSCYPRYPGVRCVCRDNWKGSNRPIVDINIKDHSIVSSYVCSGLVGDTPRKNDSSSSSHCLDPNNEEGGHGVKGWAFDDGNDVWMGRTINETSRLGYETFKVIEGWSNPKSKLQINRQVIVDRGNRSGYSGIFSVEGKSCINRCFYVELIRGRKEETEVLWTSNSIVVFCGTSGTYGTGSWPDGADLNLMPI

SEQ ID NO: 24119 - protein, 469 aa, Artificial Sequence; identical to SEQ ID NO: 22922
  derived and/or modified protein sequence (wt) from neuraminidase__InfluenzaA__AHC60074

SEQ ID NO: 24120 - protein, 469 aa, Artificial Sequence; identical to SEQ ID NO: 23975
  derived and/or modified protein sequence (wt) from neuraminidase__InfluenzaA__AHC60086

SEQ ID NO: 24121 - protein, 469 aa, Artificial Sequence
  derived and/or modified protein sequence (wt) from neuraminidase__InfluenzaA__AHC60098
MNPNQKIITIGSVSLTISTICFFMQIAILITTVTLHFKQYEFYSPPNNQVMLCEPTIIERNITEIVYLTNTTIEKEICPKLAEYRNWSKPQCDITGFAPFSKDNSIRLSAGGDIWVTREPYVSCDPDKCYQFALGQGTTLNNVHSNNTVRDRTPYRTLLMNELGVPFHLGTKQVCIAWSSSSCHDGKAWLHVCITGDDKNATASFIYNGRLVDSVVSWSKEILRTQESECVCINGTCTVVMTDGSASGKADTKILFIEEGKIVHTSTLSGSAQHVEECSCYPRYPGVRCVCRDNWKGSNRPIVDINIKDHSIVSSYVCSGLVGDTPRKNDSSSSSHCLDPNNEEGGHGVKGWAFDDGNDVWMGRTIDETSRLGYETFKVIEGWSNPKSKLQINRQVIVDRGNRSGYSGIFSVEGKSCINRCFYVELIRGRKEETEVLWTSNSIVVFCGTSGTYGTGSWPDGADLNLMPI

SEQ ID NO: 24122 - protein, 469 aa, Artificial Sequence; identical to SEQ ID NO: 23971
  derived and/or modified protein sequence (wt) from neuraminidase__InfluenzaA__AHC60110

SEQ ID NO: 24123 - protein, 469 aa, Artificial Sequence; identical to SEQ ID NO: 24048
  derived and/or modified protein sequence (wt) from neuraminidase__InfluenzaA__AHC60122

SEQ ID NO: 24124 - protein, 469 aa, Artificial Sequence; identical to SEQ ID NO: 23975
  derived and/or modified protein sequence (wt) from neuraminidase__InfluenzaA__AHC60134

SEQ ID NO: 24125 - protein, 469 aa, Artificial Sequence; identical to SEQ ID NO: 24029
  derived and/or modified protein sequence (wt) from neuraminidase__InfluenzaA__AHC60146

SEQ ID NO: 24126 - protein, 469 aa, Artificial Sequence; identical to SEQ ID NO: 24106
  derived and/or modified protein sequence (wt) from neuraminidase__InfluenzaA__AHC60158

SEQ ID NO: 24127 - protein, 469 aa, Artificial Sequence; identical to SEQ ID NO: 23971
  derived and/or modified protein sequence (wt) from neuraminidase__InfluenzaA__AHC60182

SEQ ID NO: 24128 - protein, 469 aa, Artificial Sequence
  derived and/or modified protein sequence (wt) from neuraminidase__InfluenzaA__AHC60206
MNPNQKIITIGSVSLTISIICFFMQVAILITTVTLHFKQYEFNSPPNNQVMLCEPTIIERNITEIVYLTNTTIEKEICPKLAEYRNWSKPQCDITGFAPFSKDNSIRLSAGGDIWVTREPYVSCDPDKCYQFALGQGTTLNNVHSNNTVRDRTPYRTLLMNELGVPFHLGTKQVCIAWSSSSCHDGKAWLHVCITGDDKNATASFIYNGKLVDSVVSWSKEILRTQESECVCINGTCTVVMTDGSASGKADTKILFIEEGKIVHTSTLSGSAQHVEECSCYPRYPGVRCVCRDNWKGSNRPIVDINIKDHSIVSSYVCSGLVGDTPRKNDSSSSSHCLDPNNEEGGHGVKGWAFDDGNDVWMGRTINETSRLGYETFKVIEGWSNPKSKLQINRQVIVDRGNRSGYSGIFSVEGKSCINRCFYVELIRGRKEETEVLWTSNSIVVFCGTSGTYGTGSWPDGADLNLMPI

SEQ ID NO: 24129 - protein, 469 aa, Artificial Sequence; identical to SEQ ID NO: 22922
  derived and/or modified protein sequence (wt) from neuraminidase__InfluenzaA__AHC60218

SEQ ID NO: 24130 - protein, 469 aa, Artificial Sequence; identical to SEQ ID NO: 19518
  derived and/or modified protein sequence (wt) from neuraminidase__InfluenzaA__AHC60230

SEQ ID NO: 24131 - protein, 469 aa, Artificial Sequence; identical to SEQ ID NO: 23971
  derived and/or modified protein sequence (wt) from neuraminidase__InfluenzaA__AHC60242

SEQ ID NO: 24132 - protein, 469 aa, Artificial Sequence; identical to SEQ ID NO: 23971
  derived and/or modified protein sequence (wt) from neuraminidase__InfluenzaA__AHC60254

SEQ ID NO: 24133 - protein, 469 aa, Artificial Sequence; identical to SEQ ID NO: 23971
  derived and/or modified protein sequence (wt) from neuraminidase__InfluenzaA__AHC60266

SEQ ID NO: 24134 - protein, 469 aa, Artificial Sequence; identical to SEQ ID NO: 24020
  derived and/or modified protein sequence (wt) from neuraminidase__InfluenzaA__AHC60278

SEQ ID NO: 24135 - protein, 469 aa, Artificial Sequence; identical to SEQ ID NO: 23971
  derived and/or modified protein sequence (wt) from neuraminidase__InfluenzaA__AHC60290

SEQ ID NO: 24136 - protein, 469 aa, Artificial Sequence
  derived and/or modified protein sequence (wt) from neuraminidase__InfluenzaA__AHC60302
MNPNQKIITIGSVSLTISTICFFMQIAILITTVTLHFKQYEFNSPPNNQVMLCEPTIIERNITEIVYLTNTTIEKEICPKLAEYRNWSKPQCDITGFAPFSKDNSIRLSAGGDIWVTREPYVSCDPNKCYQFALGQGTTLNNVHSNNTVRDRTPYRTLLMNELGVPFHLGTKQVCIAWSSSSCHDGKAWLHVCITGDDKNATASFIYNGKLVDSVVSWSKEILRTQESECVCINGTCTVVMTDGSASGKADTKILFIEEGKIIHTSTLSGSAQHVEECSCYPRYPGVRCVCRDNWKGSNRPIVDINIKDHSIVSSYVCSGLVGDTPRKNDSSSSSHCLDPNNEEGGHGVKGWAFDDGNDVWMGRTINETSRLGYETFKVIEGWSNPKSKLQINRQVIVDRGNRSGYSGIFSVEGKSCINRCFYVELIRGRKEETEVLWTSNSIVVFCGTSGTYGTGSWPDGADLNLMPI

SEQ ID NO: 24137 - protein, 469 aa, Artificial Sequence; identical to SEQ ID NO: 23971
  derived and/or modified protein sequence (wt) from neuraminidase__InfluenzaA__AHC60314

SEQ ID NO: 24138 - protein, 469 aa, Artificial Sequence; identical to SEQ ID NO: 23971
  derived and/or modified protein sequence (wt) from neuraminidase__InfluenzaA__AHC60326

SEQ ID NO: 24139 - protein, 469 aa, Artificial Sequence
  derived and/or modified protein sequence (wt) from neuraminidase__InfluenzaA__AHC60338
MNPNQKIITIGSVSLTISTICFFMQIAILITTVTLHFKQYEFNSPPNNQVMLCEPTIIERNITEIVYLTNTTIEKEICPKPAEYRNWSKPQCDITGFAPFSKDNSIRLSAGGDIWVTREPYVSCDPDKCYQFALGQGTTLNNVHSNNTVRDRTPYRTLLMNELGVPFHLGTKQVCIAWSSSSCHDGKAWLHVCITGDDKNATASFIYNGRLVDSVVSWSKEILRTQESECVCINGTCTVVMTDGSASGKADTKILFIEEGKIVHTSTLSGSAQHVEECSCYPRYPGVRCVCRDNWKGSNRPIVDINIKDHSIVSSYVCSGLVGDTPRKNDSSSSSHCLDPNNEEGGHGVKGWAFDDGDDVWMGRTINETSRLGYETFKVIEGWSNPKSKLQINRQVIVDRGDRSGYSGIFSVEGKSCINRCFYVELIRGRKEETEVLWTSNSIVVFCGTSGTYGTGSWPDGADLNLMPI

SEQ ID NO: 24140 - protein, 469 aa, Artificial Sequence; identical to SEQ ID NO: 20884
  derived and/or modified protein sequence (wt) from neuraminidase__InfluenzaA__AHC60350

SEQ ID NO: 24141 - protein, 469 aa, Artificial Sequence
  derived and/or modified protein sequence (wt) from neuraminidase__InfluenzaA__AHC60362
MNPNQKIITIGSVSLTISTICFFMQVAILITTVTLHFKQYEFNSPPNNQVMLCKPTIIERNITEIVYLTNTTIEKEICPKLAEYRNWSKPQCDITGFAPFSKDNSIRLSAGGDIWVTREPYVSCDPDKCYQFALGQGTTLNNVHSNNTVRDRTPYRTLLMNELGVPFHLGTKQVCIAWSSSSCHDGKAWLHVCITGDDKNATASFIYNGKLVDSVVSWSKEILRTQESECVCINGTCTVVMTDGSASGKADTKILFIEEGKIVHTSTLSGSAQHVEECSCYPRYPGVRCVCRDNWKGSNRPIVDINIKDHSIVSSYVCSGLVGDTPRKNDSSSSSHCLDPNNEEGGHGVKGWAFDDGNDVWMGRTINETSRLGYETFKVIEGWSNPKSKLQINRQVIVDRGNRSGYSGIFSVEGKSCINRCFYVELIRGRKEETEVLWTSNSIVVFCGTSGTYGTGSWPDGADLNLMPI

SEQ ID NO: 24142 - protein, 469 aa, Artificial Sequence; identical to SEQ ID NO: 23883
  derived and/or modified protein sequence (wt) from neuraminidase__InfluenzaA__AHC60374

SEQ ID NO: 24143 - protein, 469 aa, Artificial Sequence; identical to SEQ ID NO: 19518
  derived and/or modified protein sequence (wt) from neuraminidase__InfluenzaA__AHC60386

SEQ ID NO: 24144 - protein, 469 aa, Artificial Sequence; identical to SEQ ID NO: 23975
  derived and/or modified protein sequence (wt) from neuraminidase__InfluenzaA__AHC60398

SEQ ID NO: 24145 - protein, 469 aa, Artificial Sequence; identical to SEQ ID NO: 24007
  derived and/or modified protein sequence (wt) from neuraminidase__InfluenzaA__AHC60410

SEQ ID NO: 24146 - protein, 469 aa, Artificial Sequence; identical to SEQ ID NO: 19518
  derived and/or modified protein sequence (wt) from neuraminidase__InfluenzaA__AHC60422

SEQ ID NO: 24147 - protein, 469 aa, Artificial Sequence; identical to SEQ ID NO: 24007
  derived and/or modified protein sequence (wt) from neuraminidase__InfluenzaA__AHC60434

SEQ ID NO: 24148 - protein, 469 aa, Artificial Sequence; identical to SEQ ID NO: 23975
  derived and/or modified protein sequence (wt) from neuraminidase__InfluenzaA__AHC60446

SEQ ID NO: 24149 - protein, 469 aa, Artificial Sequence
  derived and/or modified protein sequence (wt) from neuraminidase__InfluenzaA__AHC60458
MNPNQKIITIGSVSLTISTICFFMQIAILITTVTLHFKQYEFNSPPNNQVMLCEPTIIERNITEIVYLTNTTIEKEICPKLAEYRNWSKPQCDITGFAPFSKDNSIRLSAGGDIWVTREPYVSCDPDKCYQFALGQGTTLNNVHSNNTVRDRTPYRTLLMNELGVPFHLGTKQVCIAWSSSSCHDGKAWLHVCITGDDKNATASFIYNGRLVDSVVSWSKEILRTQESECVCINGTCAVVMTDGSASGKADTKILFIEEGKIVHTSTLSGSAQHVEECSCYPRYPGVRCVCRDNWKGSNRPIVDINIKDHSIVSSYVCSGLVGDTPRKNDGSSSSHCLDPNNEEGGHGVKGWAFDDGNDVWMGRTINETSRLGYETFKVIEGWSNPKSKLQINRQVIVDRGNRSGYSGIFSVEGKSCINRCFYVELIRGRKEETEVLWTSNSIVVFCGTSGTYGTGSWPDGADLNLMPI

SEQ ID NO: 24150 - protein, 469 aa, Artificial Sequence; identical to SEQ ID NO: 24020
  derived and/or modified protein sequence (wt) from neuraminidase__InfluenzaA__AHC60470

SEQ ID NO: 24151 - protein, 469 aa, Artificial Sequence
  derived and/or modified protein sequence (wt) from neuraminidase__InfluenzaA__AHC60482
MNPNQKIITIGSVSLTISTICFFMQIAILTTTVTLHFKQYEFNSPPNNQVMLCEPTIIERNITEIVYLTNTTIEKEICPKPAEYRNWSKPQCDITGFAPFSKDNSIRLSAGGDIWVTREPYVSCDPDKCYQFALGQGTTLNNVHSNNTVRDRTPYRTLLMNELGVPFHLGTKQVCIAWSSSSCHDGKAWLHVCITGDDKNATASFIYNGRLVDSVVSWSKEILRTQESECVCINGTCTVVMTDGSASGKADTKILFIEEGKIVHTSTLSGSAQHVEECSCYPRYPGVRCVCRDNWKGSNRPIVDINIKDHSIVSSYVCSGLVGDTPRKNDSSSSSHCLDPNNEEGGHGVKGWAFDDGNDVWMGRTINETSRLGYETFKVIEGWSNPKSKLQINRQVIVDRGDRSGYSGIFSVEGKSCINRCFYVELIRGRKEETEVLWTSNSIVVFCGTSGTYGTGSWPDGADLNLMPI

SEQ ID NO: 24152 - protein, 469 aa, Artificial Sequence; identical to SEQ ID NO: 23971
  derived and/or modified protein sequence (wt) from neuraminidase__InfluenzaA__AHC60494

SEQ ID NO: 24153 - protein, 469 aa, Artificial Sequence; identical to SEQ ID NO: 23971
  derived and/or modified protein sequence (wt) from neuraminidase__InfluenzaA__AHC60506

SEQ ID NO: 24154 - protein, 469 aa, Artificial Sequence; identical to SEQ ID NO: 23975
  derived and/or modified protein sequence (wt) from neuraminidase__InfluenzaA__AHC60518

SEQ ID NO: 24155 - protein, 469 aa, Artificial Sequence; identical to SEQ ID NO: 23975
  derived and/or modified protein sequence (wt) from neuraminidase__InfluenzaA__AHC60542

SEQ ID NO: 24156 - protein, 469 aa, Artificial Sequence
  derived and/or modified protein sequence (wt) from neuraminidase__InfluenzaA__AHC60554
MNPNQKIITIGSVSLTISTICFFMQIAILITTVTLHFKQYEFYSPPNNQVMLCEPTMIERNITEIVYLTNTTIEKEICPKLAEYRNWSKPQCDITGFAPFSKDNSIRLSAGGDIWVTREPYVSCDPDKCYQFALGQGTTLNNVHSNNTVRDRTPYRTLLMNELGVPFHLGTKQVCIAWSSSSCHDGKAWLHVCITGDDKNATASFIYNGRLVDSVVSWSKEILRTQESECVCINGTCTVVMTDGSASGKADTKILFIEEGKIVHTSTLSGSAQHVEECSCYPRYPGVRCVCRDNWKGSNRPIVDINIKDHSIVSSYVCSGLVGDTPRKNDSSSSSHCLDPNNEEGGHGVKGWAFDDGNDVWMGRTINETSRLGYETFKVIEGWSNPKSKLQINRQVIVDRGNRSGYSGIFSVEGKSCINRCFYVELIRGRKEETEVLWTSNSIVVFCGTSGTYGTGTWPDGADLNLMPI

SEQ ID NO: 24157 - protein, 469 aa, Artificial Sequence
  derived and/or modified protein sequence (wt) from neuraminidase__InfluenzaA__AHC60566
MNPNQKIITIGSVSLTISTICFFMQIAILITTVTLHFKQYEFNSPPNNQVMLCEPTIIERNITEIVYLTNTTIEKEICPKPAEYRNWSKPQCDITGFAPFSKDNSIRLSAGGDIWVTREPYVSCDPDKCYQFALGQGTTLNNVHSNNTVRDRTPYRTLLMNELGVPFHLGTKQVCIAWSSSSCHDGKAWLHVCITGDDKNATASFIYNGRLVDSVVSWSKEILRTQESECVCINGTCTVVMTDGSASGKADTKILFIEEGKIVHTSTLSGSAQHVEECSCYPRYPGVRCVCRDNWKGSNRPIVDINIKDHSIVSSYVCSGLVGDTPRKNDSSSSSHCLDPNNEEGGHGVKGWAFDDGNDVWMGRTINETSRLGYETFKVIEGWSNPKSKLQVNRQVIVDRGDRSGYSGIFSVEGKSCINRCFYVELIRGRKEETEVLWTSNSIVVFCGTSGTYGTGSWPDGADLNLMPI

SEQ ID NO: 24158 - protein, 469 aa, Artificial Sequence; identical to SEQ ID NO: 22922
  derived and/or modified protein sequence (wt) from neuraminidase__InfluenzaA__AHC60578

SEQ ID NO: 24159 - protein, 469 aa, Artificial Sequence; identical to SEQ ID NO: 23971
  derived and/or modified protein sequence (wt) from neuraminidase__InfluenzaA__AHC60590

SEQ ID NO: 24160 - protein, 469 aa, Artificial Sequence
  derived and/or modified protein sequence (wt) from neuraminidase__InfluenzaA__AHC60602
MNPNQKIITIGSVSLTISTICFFMQIAILITTVTLHFKQYEFNPPPNNQVVLCEPTIIERNITEIVYLTNTTIEKEICPKPAEYRNWSKPQCDITGFAPFSKDNSIRLSAGGDIWVTREPYVSCDPDKCYQFALGQGTTLNNVHSNNTVRDRTPYRTLLMNELGVPFHLGTKQVCIAWSSSSCHDGKAWLHVCITGDDKNATASFIYNGRLVDSVVSWSKEILRTQESECVCINGTCTVVMTDGSASGKADTKILFIEEGKIVHTSTLSGSAQHVEECSCYPRYPGVRCVCRDNWKGSNRPIVDINIKDHSIVSSYVCSGLVGDTPRKNDSSSSSHCLDPNNEEGGHGVKGWAFDDGNDVWMGRTINETSRLGYETFKVIEGWSNPKSKLQINRQVIVDRGDRSGYSGIFSVEGKSCINRCFYVELIRGRKEETEVLWTSNSIVVFCGTSGTYGTGSWPDGADLNLMPI

SEQ ID NO: 24161 - protein, 469 aa, Artificial Sequence; identical to SEQ ID NO: 19518
  derived and/or modified protein sequence (wt) from neuraminidase__InfluenzaA__AHC60614

SEQ ID NO: 24162 - protein, 469 aa, Artificial Sequence; identical to SEQ ID NO: 22922
  derived and/or modified protein sequence (wt) from neuraminidase__InfluenzaA__AHC60626

SEQ ID NO: 24163 - protein, 469 aa, Artificial Sequence
  derived and/or modified protein sequence (wt) from neuraminidase__InfluenzaA__AHC60650
MNPNQKIITIGSVSLTISTICFFMQIAILITTVTLHFKQYEFYSPPNNQVMLCEPTIIERNITEIVYLTNTTIEKEICPKLAEYRNWSKPQCDITGFAPFSKDNSIRLSAGGDIWVTREPYVSCDPDKCYQFALGQGTTLNNVHSNNTVRDRTPYRTLLMNELGVPFHLGTKQVCIAWSSSSCHDGKAWLHVCITGDDENATASFIYNGRLVDSVVSWSKEILRTQESECVCINGTCTVVMTDGSASGKADTKILFIEEGKIVHTSTLSGSAQHVEECSCYPRYPGVRCVCRDNWKGSNRPIVDINIKDHSIVSSYVCSGLVGDTPRKNDSSSSSHCLDPNNEEGGHGVKGWAFDDGNDVWMGRTINETSRLGYETFKVIEGWSNPKSKLQINRQVIVDRGNRSGYSGIFSVEGKSCINRCFYVELIRGRKEETEVLWTSNSIVVFCGTSGTYGTGSWPDGADLNLMPI

SEQ ID NO: 24164 - protein, 469 aa, Artificial Sequence; identical to SEQ ID NO: 24020
  derived and/or modified protein sequence (wt) from neuraminidase__InfluenzaA__AHC60662

SEQ ID NO: 24165 - protein, 469 aa, Artificial Sequence; identical to SEQ ID NO: 23975
  derived and/or modified protein sequence (wt) from neuraminidase__InfluenzaA__AHC60674

SEQ ID NO: 24166 - protein, 469 aa, Artificial Sequence; identical to SEQ ID NO: 19518
  derived and/or modified protein sequence (wt) from neuraminidase__InfluenzaA__AHC60686

SEQ ID NO: 24167 - protein, 469 aa, Artificial Sequence; identical to SEQ ID NO: 23975
  derived and/or modified protein sequence (wt) from neuraminidase__InfluenzaA__AHC60698

SEQ ID NO: 24168 - protein, 469 aa, Artificial Sequence; identical to SEQ ID NO: 23971
  derived and/or modified protein sequence (wt) from neuraminidase__InfluenzaA__AHC60710

SEQ ID NO: 24169 - protein, 469 aa, Artificial Sequence; identical to SEQ ID NO: 24020
  derived and/or modified protein sequence (wt) from neuraminidase__InfluenzaA__AHC60722

SEQ ID NO: 24170 - protein, 469 aa, Artificial Sequence
  derived and/or modified protein sequence (wt) from neuraminidase__InfluenzaA__AHC60734
MNPNQKIITIGSVSLTISTICFFMQIAILITTVTLHFKQYEFNSPPNNQVMLCEPTIIERNITEIVYLINTTIEKEICPKLAEYRNWSKPQCDITGFAPFSKDNSIRLSAGGDIWVTREPYVSCDPNKCYQFALGQGTTLNNVHSNNTVRDRTPYRTLLMNELGVPFHLGTKQVCIAWSSSSCHDGKAWLHVCITGDDKNATASFIYNGKLVDSVVSWSKEILRTQESECVCINGTCTVVMTDGSASGKADTKILFIEEGKIVHTSTLSGSAQHVEECSCYPRYPGVRCVCRDNWKGSNRPIVDINIKDHSIVSSYVCSGLVGDTPRKNDSSSSSHCLDPNNEEGGHGVKGWAFDDGNDVWMGRTINETSRLGYETFKVIEGWSNPKSKLQINRQVIVDRGNRSGYSGIFSVEGKSCINRCFYVELIRGRKEETEVLWTSNSIVVFCGTSGTYGTGSWPDGADLNLMPI

SEQ ID NO: 24171 - protein, 469 aa, Artificial Sequence; identical to SEQ ID NO: 24007
  derived and/or modified protein sequence (wt) from neuraminidase__InfluenzaA__AHC60746

SEQ ID NO: 24172 - protein, 469 aa, Artificial Sequence; identical to SEQ ID NO: 24106
  derived and/or modified protein sequence (wt) from neuraminidase__InfluenzaA__AHC60770

SEQ ID NO: 24173 - protein, 469 aa, Artificial Sequence
  derived and/or modified protein sequence (wt) from neuraminidase__InfluenzaA__AHC60782
MNPNQKIITIGSVSLTISTICFFMQIAILITTVTLHFKQYEFNSPPNNQVMLCEPTIIERNITEIVYLTNTTIEKEICPKLAEYRNWSKPQCDITGFAPFSKDNSIRLSAGGDIWVTREPYVSCDPDKCYQFALGQGTTLNNVHSNNTVRDRTPYRTLLMNELGVPFHLGTKQVCIAWSSSSCHDGKAWLHVCITGDDKNATASFIYNGRLVDSVVSWSKEILRTQESECVCINGTCTVVMTDGSASGKADTKILFIEEGKIVHTSTLSGSAQHVEECSCYPRYPGVRCVCRDNWKGSNRPIVDINIKDHSIVSGYVCSGLVGDTPRKNDSSSSSHCLDPNNEEGGHGVKGWAFDDGNDVWMGRTINETSRLGYETFKVIEGWSNPKSKLQINRQVIVDRGNRSGYSGIFSVEGKSCINRCFYVELIRGRKEETEVLWTSNSIVVFCGTSGTYGTGSWPDGADLNLMPI

SEQ ID NO: 24174 - protein, 469 aa, Artificial Sequence; identical to SEQ ID NO: 24018
  derived and/or modified protein sequence (wt) from neuraminidase__InfluenzaA__AHC60794

SEQ ID NO: 24175 - protein, 469 aa, Artificial Sequence
  derived and/or modified protein sequence (wt) from neuraminidase__InfluenzaA__AHC60806
MNPNQKIITIGSVSLTISTICFFMQIAILITTVTLHFKQCEFNSPPNNQVMLCEPTIIERNITEIVYLTNTTIEKEICPKLAEYRNWSKPQCDITGFAPFSKDNSIRLSAGGDIWVTREPYVSCDPNKCYQFALGQGTTLNNVHSNNTVRDRTPYRTLLMNELGVPFHLGTKQVCIAWSSSSCHDGKAWLHVCITGDDKNATASFIYNGKLVDSVVSWSKEILRTQESECVCINGTCTVVMTDGSASGKADTKILFIEEGKIVHTSTLSGSAQHVEECSCYPRYPGVRCVCRDNWKGSNRPIVDINIKDHSIVSSYVCSGLVGDTPRKNDSSSSSHCLDPNNEEGGHGVKGWAFDDGNDVWMGRTINETSRLGYETFKVIEGWSNPKSKLQINRQVIVDRGNRSGYSGIFSVEGKSCINRCFYVELIRGRKEETGVLWTSNSIVVFCGTSGTYGTGSWPDGADLNLMPI

SEQ ID NO: 24176 - protein, 469 aa, Artificial Sequence; identical to SEQ ID NO: 20884
  derived and/or modified protein sequence (wt) from neuraminidase__InfluenzaA__AHC60818

SEQ ID NO: 24177 - protein, 469 aa, Artificial Sequence; identical to SEQ ID NO: 23975
  derived and/or modified protein sequence (wt) from neuraminidase__InfluenzaA__AHC60830

SEQ ID NO: 24178 - protein, 469 aa, Artificial Sequence; identical to SEQ ID NO: 24156
  derived and/or modified protein sequence (wt) from neuraminidase__InfluenzaA__AHC60842

SEQ ID NO: 24179 - protein, 469 aa, Artificial Sequence; identical to SEQ ID NO: 23975
  derived and/or modified protein sequence (wt) from neuraminidase__InfluenzaA__AHC60854

SEQ ID NO: 24180 - protein, 469 aa, Artificial Sequence; identical to SEQ ID NO: 24020
  derived and/or modified protein sequence (wt) from neuraminidase__InfluenzaA__AHC60866

SEQ ID NO: 24181 - protein, 469 aa, Artificial Sequence; identical to SEQ ID NO: 24007
  derived and/or modified protein sequence (wt) from neuraminidase__InfluenzaA__AHC60878

SEQ ID NO: 24182 - protein, 469 aa, Artificial Sequence; identical to SEQ ID NO: 24007
  derived and/or modified protein sequence (wt) from neuraminidase__InfluenzaA__AHC60890

SEQ ID NO: 24183 - protein, 469 aa, Artificial Sequence; identical to SEQ ID NO: 24106
  derived and/or modified protein sequence (wt) from neuraminidase__InfluenzaA__AHC60902

SEQ ID NO: 24184 - protein, 469 aa, Artificial Sequence; identical to SEQ ID NO: 23971
  derived and/or modified protein sequence (wt) from neuraminidase__InfluenzaA__AHC60914

SEQ ID NO: 24185 - protein, 469 aa, Artificial Sequence; identical to SEQ ID NO: 23975
  derived and/or modified protein sequence (wt) from neuraminidase__InfluenzaA__AHC60926

SEQ ID NO: 24186 - protein, 469 aa, Artificial Sequence; identical to SEQ ID NO: 23971
  derived and/or modified protein sequence (wt) from neuraminidase__InfluenzaA__AHC60938

SEQ ID NO: 24187 - protein, 469 aa, Artificial Sequence; identical to SEQ ID NO: 23975
  derived and/or modified protein sequence (wt) from neuraminidase__InfluenzaA__AHC60950

SEQ ID NO: 24188 - protein, 469 aa, Artificial Sequence
  derived and/or modified protein sequence (wt) from neuraminidase__InfluenzaA__AHC60962
MNPNQKIITIGSVSLTISTICFFMQIAILITTVTLHFKQYEFYSPPNNQVMLCEPTIIERNITEIVYLTNTTIEKEICPKLAEYRNWSKPQCDITGFAPFSKDNSIRLSAGGDIWVTREPYVSCDPDKCYQFALGQGTTLNNVHSNNTVRDRTPYRTLLMNELGVPFHLGTKQVCIAWSSSSCHDGKAWLHVCVTGDDKNATASFIYNGRLVDSVVSWSKEILRTQESECVCINGTCTVVMTDGSASGKADTKILFIEEGKIVHTSTLSGSAQHVEECSCYPRYPGVRCVCRDNWKGSNRPIVDINIKDHSIVSSYVCSGLVGDTPRKNDSSSSSHCLDPNNEEGGHGVKGWAFDDGNDVWMGRTINETSRLGYETFKVIEGWSNPKSKLQINRQVIVDRGNRSGYSGIFSVEGKSCINRCFYVELIRGRKEETEVLWTSNSIVVFCGTSGTYGTGSWPDGADLNLMPI

SEQ ID NO: 24189 - protein, 469 aa, Artificial Sequence; identical to SEQ ID NO: 24020
  derived and/or modified protein sequence (wt) from neuraminidase__InfluenzaA__AHC60974

SEQ ID NO: 24190 - protein, 469 aa, Artificial Sequence; identical to SEQ ID NO: 23971
  derived and/or modified protein sequence (wt) from neuraminidase__InfluenzaA__AHC60986

SEQ ID NO: 24191 - protein, 469 aa, Artificial Sequence; identical to SEQ ID NO: 24118
  derived and/or modified protein sequence (wt) from neuraminidase__InfluenzaA__AHC60998

SEQ ID NO: 24192 - protein, 469 aa, Artificial Sequence; identical to SEQ ID NO: 24018
  derived and/or modified protein sequence (wt) from neuraminidase__InfluenzaA__AHC61010

SEQ ID NO: 24193 - protein, 469 aa, Artificial Sequence
  derived and/or modified protein sequence (wt) from neuraminidase__InfluenzaA__AHC61022
MNPNQKIITIGSVSLTISTICFFMQIAILITTVTLHFKQYEFNSPPNNQVMLCEPTIIERNITEIVYLTNTTIEKEICPKLAEYRNWSKPQCDITGFAPFSKDNSIRLSAGGDIWVTREPYVSCDPDKCYQFALGQGTTLNNVHSNNTVRDRTPYRTLLMNELGVPFHLGTKQVCIAWSSSSCHDGKAWLHVCITGDDKNATASFIYNGRLVDSVVSWSKEILRTQESECVCINGTCTVVMTDGSASGKADTKILFIEEGKIVHTSTLSGSAQHVEECSCYPRYPGVRCVCRDNWKGSNRPIVDINIKDHSIVSSYVCSGLVGDTPRKNDSSSISHCLDPNNEEGGHGVKGWAFDDGNDVWMGRTINETSRLGYETFKVIEGWSNPKSKLQINRQVIVDRGNRSGYSGIFSVEGKSCINRCFYVELIRGRKEETEVLWTSNSIVVFCGTSGTYGTGSWPDGADLNLMPI

SEQ ID NO: 24194 - protein, 469 aa, Artificial Sequence; identical to SEQ ID NO: 19518
  derived and/or modified protein sequence (wt) from neuraminidase__InfluenzaA__AHC61034

SEQ ID NO: 24195 - protein, 469 aa, Artificial Sequence; identical to SEQ ID NO: 23971
  derived and/or modified protein sequence (wt) from neuraminidase__InfluenzaA__AHC61046

SEQ ID NO: 24196 - protein, 469 aa, Artificial Sequence; identical to SEQ ID NO: 24020
  derived and/or modified protein sequence (wt) from neuraminidase__InfluenzaA__AHC61058

SEQ ID NO: 24197 - protein, 469 aa, Artificial Sequence; identical to SEQ ID NO: 23883
  derived and/or modified protein sequence (wt) from neuraminidase__InfluenzaA__AHC61070

SEQ ID NO: 24198 - protein, 469 aa, Artificial Sequence
  derived and/or modified protein sequence (wt) from neuraminidase__InfluenzaA__AHC61082
MNPNQKIITIGSVSLTISTICFFMQIAILITTVTLHFKQYEFNSPPNNQVVLCEPTIIERNITEIVYLTNTTIEKEICPKPAEYRNWSKPQCDITGFAPFSKDNSIRLSAGGDIWVTREPYVSCDPDKCYQFALGQGTTLNNVHSNNTVRDRTPYRTLLMNELGVPFHLGTKQVCIAWSSSSCHDGKAWLHVCITGDDKNATASFIYNGRLVDSVVSWSKEILRTQESECVCINGTCTVVMTDGSASGKADTKILFIEEGKIVHTSTLSGSAQHVEECSCYPRYPGVRCVCRDNWKGSNRPIVDINIKDHSIVSSYVCSGLVGDTPRKNDSSSSSHCLDPNNEEGGHGVKGWAFDDGNDVWMGRTINETSRLGYETFKVIEGWSNPKSKLQINRQVIVDRGDRSGYSGIFSVEGKSCINRCFYVELIRGRKEETGVLWTSNSIVVFCGTSGTYGTGSWPDGADLNLMPI

SEQ ID NO: 24199 - protein, 469 aa, Artificial Sequence; identical to SEQ ID NO: 19518
  derived and/or modified protein sequence (wt) from neuraminidase__InfluenzaA__AHC61094

SEQ ID NO: 24200 - protein, 469 aa, Artificial Sequence; identical to SEQ ID NO: 24007
  derived and/or modified protein sequence (wt) from neuraminidase__InfluenzaA__AHC61106

SEQ ID NO: 24201 - protein, 469 aa, Artificial Sequence; identical to SEQ ID NO: 24007
  derived and/or modified protein sequence (wt) from neuraminidase__InfluenzaA__AHC61118

SEQ ID NO: 24202 - protein, 469 aa, Artificial Sequence; identical to SEQ ID NO: 23971
  derived and/or modified protein sequence (wt) from neuraminidase__InfluenzaA__AHC61130

SEQ ID NO: 24203 - protein, 469 aa, Artificial Sequence; identical to SEQ ID NO: 24118
  derived and/or modified protein sequence (wt) from neuraminidase__InfluenzaA__AHC61142

SEQ ID NO: 24204 - protein, 469 aa, Artificial Sequence; identical to SEQ ID NO: 24007
  derived and/or modified protein sequence (wt) from neuraminidase__InfluenzaA__AHC61154

SEQ ID NO: 24205 - protein, 469 aa, Artificial Sequence
  derived and/or modified protein sequence (wt) from neuraminidase__InfluenzaA__AHC61166
MNPNQKIITIGSVSLTISTICFFMQVAILITTVTLHFKQYEFNSPPNNQVMLCEPTIIERNITEIVYLTNTTIEKEICPKLAEYRNWSKPQCDITGFAPFSKDNSIRLSAGGDIWVTREPYVSCDPDKCYQFALGQGTTLNNVHSNNTVRDRTPYRTLLMNELGVPFHLGTKQVCIAWSSSSCHDGKAWLHVCITGDDKNATASFIYNGKLVDSVVSWSKEILRTQESECVCINGTCTVVMTDGSASGKADTKILFIEEGKIVHTSTLSGSAQHVEECSCYPRYPGVRCVCRDNWKGSNRPIVDINIKDHSIVSSYVCSGLVGDTPRKNDSSSSSHCLDPNNEEGGHGVKGWAFDDGNDVWMGRTINETSRLGYETFKVIEGWSNPKSKLQTNRQVIVDRGNRSGYSGIFSVEGKSCINRCFYVELIRGRKEETEVLWTSNSIVVFCGTSGTYGTGSWPDGADLNLMPI

SEQ ID NO: 24206 - protein, 469 aa, Artificial Sequence; identical to SEQ ID NO: 23971
  derived and/or modified protein sequence (wt) from neuraminidase__InfluenzaA__AHC61178

SEQ ID NO: 24207 - protein, 469 aa, Artificial Sequence; identical to SEQ ID NO: 24007
  derived and/or modified protein sequence (wt) from neuraminidase__InfluenzaA__AHC61190

SEQ ID NO: 24208 - protein, 469 aa, Artificial Sequence; identical to SEQ ID NO: 24020
  derived and/or modified protein sequence (wt) from neuraminidase__InfluenzaA__AHC61202

SEQ ID NO: 24209 - protein, 469 aa, Artificial Sequence; identical to SEQ ID NO: 23975
  derived and/or modified protein sequence (wt) from neuraminidase__InfluenzaA__AHC61214

SEQ ID NO: 24210 - protein, 469 aa, Artificial Sequence; identical to SEQ ID NO: 24020
  derived and/or modified protein sequence (wt) from neuraminidase__InfluenzaA__AHC61226

SEQ ID NO: 24211 - protein, 469 aa, Artificial Sequence; identical to SEQ ID NO: 24007
  derived and/or modified protein sequence (wt) from neuraminidase__InfluenzaA__AHC61238

SEQ ID NO: 24212 - protein, 469 aa, Artificial Sequence; identical to SEQ ID NO: 24188
  derived and/or modified protein sequence (wt) from neuraminidase__InfluenzaA__AHC61250

SEQ ID NO: 24213 - protein, 469 aa, Artificial Sequence; identical to SEQ ID NO: 23971
  derived and/or modified protein sequence (wt) from neuraminidase__InfluenzaA__AHC61262

SEQ ID NO: 24214 - protein, 469 aa, Artificial Sequence; identical to SEQ ID NO: 23975
  derived and/or modified protein sequence (wt) from neuraminidase__InfluenzaA__AHC61274

SEQ ID NO: 24215 - protein, 469 aa, Artificial Sequence; identical to SEQ ID NO: 19518
  derived and/or modified protein sequence (wt) from neuraminidase__InfluenzaA__AHC61286

SEQ ID NO: 24216 - protein, 469 aa, Artificial Sequence; identical to SEQ ID NO: 24019
  derived and/or modified protein sequence (wt) from neuraminidase__InfluenzaA__AHC61298

SEQ ID NO: 24217 - protein, 469 aa, Artificial Sequence
  derived and/or modified protein sequence (wt) from neuraminidase__InfluenzaA__AHC61310
MNPNQKIITIGSVSLTISTICFFMQIAILITTVTLHFKQYEFNSPPNNQVMLCEPTIIERNITEIVYLTNTTIEKEICPKLAEYRNWSKPQCDITGFAPFSKDNSIRLSAGGDIWVTREPYVSCDPNKCYQFALGQGTTLNNVHSNNTVRDRTPYRTLLMNELGVPFHLGTKQVCIAWSSSSCHDGKAWLHVCITGDDKNATASFIYNGKLVDSVVSWSKEILRTQESECVCINGTCTVVMTDGSASGKADTKILFIEEGKIVHTSTLSGSAQHVEECSCYPRYPGVRCVCRDNWKGSNRPIVDINIKDHSIVSSYVCSGLVGDTPRKNDSSSSSHCLDPNNEEGGHGVKGWAFDDGNDVWMGRTINETSRLGYETFKVIEGWSNPKSKLQINRQVIIDRGNRSGYSGIFSVEGKSCINRCFYVELIRGRKEETEVLWTSSSIVVFCGTSGTYGTGSWPDGADLNLMPI

SEQ ID NO: 24218 - protein, 469 aa, Artificial Sequence; identical to SEQ ID NO: 24048
  derived and/or modified protein sequence (wt) from neuraminidase__InfluenzaA__AHC61322

SEQ ID NO: 24219 - protein, 469 aa, Artificial Sequence; identical to SEQ ID NO: 24007
  derived and/or modified protein sequence (wt) from neuraminidase__InfluenzaA__AHC61334

SEQ ID NO: 24220 - protein, 469 aa, Artificial Sequence; identical to SEQ ID NO: 23975
  derived and/or modified protein sequence (wt) from neuraminidase__InfluenzaA__AHC61346

SEQ ID NO: 24221 - protein, 469 aa, Artificial Sequence
  derived and/or modified protein sequence (wt) from neuraminidase__InfluenzaA__AHC61358
MNPNQKIITIGSVSLTISTICFFMQIAILITTVTLHFKQYEFNSPPNNQVMLCEPTIIERNITEIVYLTNTTIEKEICPKLAEYRNWSKPQCDITGFAPFSKDNSIRLSAGGDIWVTREPYVSCDPDKCYQFALGQGTTLNNVHSNNTVRDRTPYRTLLMNELGVPFHLGTKQVCIAWSSSSCHDGKAWLHVCITGDDKNATASFIYNGRLVDSVVSWSKEILRTQESECVCINGTCTVVMTDGSASGKADTKILFIEEGKIVHTSTLSGSAQHVEECSCYPRYPGVRCVCRDNWKGSNRPIVDINIKDHSIVSSYVCSGLVGDTPRKNDISSSSHCLDPNNEEGGHGVKGWAFDDGNDVWMGRTINETSRLGYETFKVIKGWSNPKSKLQINRQVIVDRGNRSGYSGIFSVEGKSCINRCFYVELIRGRKEETEVLWTSNSIVVFCGTSGTYGTGSWPDGADLNLMPI

SEQ ID NO: 24222 - protein, 469 aa, Artificial Sequence; identical to SEQ ID NO: 24020
  derived and/or modified protein sequence (wt) from neuraminidase__InfluenzaA__AHC61370

SEQ ID NO: 24223 - protein, 469 aa, Artificial Sequence; identical to SEQ ID NO: 24048
  derived and/or modified protein sequence (wt) from neuraminidase__InfluenzaA__AHC61382

SEQ ID NO: 24224 - protein, 469 aa, Artificial Sequence; identical to SEQ ID NO: 24020
  derived and/or modified protein sequence (wt) from neuraminidase__InfluenzaA__AHC61394

SEQ ID NO: 24225 - protein, 469 aa, Artificial Sequence; identical to SEQ ID NO: 24048
  derived and/or modified protein sequence (wt) from neuraminidase__InfluenzaA__AHC61406

SEQ ID NO: 24226 - protein, 469 aa, Artificial Sequence; identical to SEQ ID NO: 24007
  derived and/or modified protein sequence (wt) from neuraminidase__InfluenzaA__AHC61418

SEQ ID NO: 24227 - protein, 469 aa, Artificial Sequence; identical to SEQ ID NO: 19518
  derived and/or modified protein sequence (wt) from neuraminidase__InfluenzaA__AHC61430

SEQ ID NO: 24228 - protein, 469 aa, Artificial Sequence; identical to SEQ ID NO: 24020
  derived and/or modified protein sequence (wt) from neuraminidase__InfluenzaA__AHC61442

SEQ ID NO: 24229 - protein, 469 aa, Artificial Sequence; identical to SEQ ID NO: 24020
  derived and/or modified protein sequence (wt) from neuraminidase__InfluenzaA__AHC61454

SEQ ID NO: 24230 - protein, 469 aa, Artificial Sequence
  derived and/or modified protein sequence (wt) from neuraminidase__InfluenzaA__AHC61466
MNPNQKIITIGSVSLTISTICFFMQIAILITTVTLHFKQYEFNSPPNNQVMLCEPTIIERNTTEIVYLTNTTIEKEICPKLAEYRNWSKPQCDITGFAPFSKDNSIRLSAGGDIWVTREPYVSCDPDKCYQFALGQGTTLNNVHSNNTVRDRTPYRTLLMNELGVPFHLGTKQVCIAWSSSSCHDGKAWLHVCITGDDKNATASFIYNGRLVDSVVSWSKEILRTQESECVCINGTCTVVMTDGSASGKADTKILFIEEGKIVHTSTLSGSAQHVEECSCYPRYPGVRCVCRDNWKGSNRPIVDINIKDHSIVSSYVCSGLVGDTPRKNDSSSSSHCLDPNNEEGGHGVKGWAFDDGNDVWMGRTINETSRLGYETFKVIEGWSNPKSKLQINRQVIVDKGNRSGYSGIFSVEGKSCINRCFYVELIRGRKEETEVLWTSNSIVVFCGTSGTYGTGSWPDGADLNLMPI

SEQ ID NO: 24231 - protein, 469 aa, Artificial Sequence; identical to SEQ ID NO: 23971
  derived and/or modified protein sequence (wt) from neuraminidase__InfluenzaA__AHC61478

SEQ ID NO: 24232 - protein, 469 aa, Artificial Sequence; identical to SEQ ID NO: 24007
  derived and/or modified protein sequence (wt) from neuraminidase__InfluenzaA__AHC61490

SEQ ID NO: 24233 - protein, 469 aa, Artificial Sequence; identical to SEQ ID NO: 23971
  derived and/or modified protein sequence (wt) from neuraminidase__InfluenzaA__AHC61502

SEQ ID NO: 24234 - protein, 469 aa, Artificial Sequence; identical to SEQ ID NO: 24020
  derived and/or modified protein sequence (wt) from neuraminidase__InfluenzaA__AHC61514

SEQ ID NO: 24235 - protein, 469 aa, Artificial Sequence; identical to SEQ ID NO: 22922
  derived and/or modified protein sequence (wt) from neuraminidase__InfluenzaA__AHC61526

SEQ ID NO: 24236 - protein, 469 aa, Artificial Sequence
  derived and/or modified protein sequence (wt) from neuraminidase__InfluenzaA__AHC61538
MNPNQKIITIGSVSLTISTICFFMQIAILITTVTLHFKQYEFNSPPNNQVMLCEPTIIERNITEIVYLTNTTIEKEICPKLAEYRNWSKPQCDITGFAPFSKDNSIRLSAGGDIWVTREPYVSCDPNKCYQFALGQGTTLNNVHSNNTVRDRTPYRTLLMNELGVPFHLGTKQVCIAWSSSSCHDGKAWLHVCITGDDKNATASFIYNGKLVDSVVSWSKEILRTQESECVCINGTCTVVMTDGSASGKADTKILFIEEGKIVHTSTLSGSAQHVEECSCYPRYPGVRCVCRDNWKGSNRPIVDINIKDHSIVSSYVCSGLVGDTPRKNDSSSSSHCLDPNNEEGSHGVKGWAFDDGNDVWMGRTINETSRLGYETFKVIEGWSNPKSKLQINRQVIVDRGNRSGYSGIFSVEGKSCINRCFYVELIRGRKEETEVLWTSNSIVVFCGTSGTYGTGSWPDGADLNLMPI

SEQ ID NO: 24237 - protein, 469 aa, Artificial Sequence; identical to SEQ ID NO: 24020
  derived and/or modified protein sequence (wt) from neuraminidase__InfluenzaA__AHC61550

SEQ ID NO: 24238 - protein, 469 aa, Artificial Sequence
  derived and/or modified protein sequence (wt) from neuraminidase__InfluenzaA__AHC61562
MNPNQKIITIGSVSLTISTICFFMQIAILITTVTLHFKQYEFYSPPNNQVMLCEPTMIERNITEIVYLTNTTIEKEICPKLAEYRNWSKPQCDITGFAPFSKDNSIRLSAGGDIWVTREPYVSCDPDKCYQFALGQGTTLNNVHSNNTVRDRTPYRTLLMNELGVPFHLGTKQVCIAWSSSSCHDGKAWLHVCITGDDKNATASFIYNGRLVDSVVSWSKEILRTQESECVCINGTCTVVMTDGSASGKADTKILFIEEGKIVHTSTLSGSAQHVEECSCYPRYPGVRCVCRDNWKGSNRPIVDINIKDHSIVSSYVCSGLVGDTPRKNDSSSSSHCLDPNNEEGGHGVKGWAFDDGNDVWMGRTINETSRLGYETFKVIEGWSNPKSKLQINRQVIVDRGNRSGYSGIFSVESKSCINRCFYVELIRGRKEETEVLWTSNSIVVFCGTSGTYGTGTWPDGADLNLMPI

SEQ ID NO: 24239 - protein, 469 aa, Artificial Sequence; identical to SEQ ID NO: 24019
  derived and/or modified protein sequence (wt) from neuraminidase__InfluenzaA__AHC61574

SEQ ID NO: 24240 - protein, 469 aa, Artificial Sequence; identical to SEQ ID NO: 24020
  derived and/or modified protein sequence (wt) from neuraminidase__InfluenzaA__AHC61586

SEQ ID NO: 24241 - protein, 469 aa, Artificial Sequence; identical to SEQ ID NO: 22922
  derived and/or modified protein sequence (wt) from neuraminidase__InfluenzaA__AHC61598

SEQ ID NO: 24242 - protein, 469 aa, Artificial Sequence; identical to SEQ ID NO: 23971
  derived and/or modified protein sequence (wt) from neuraminidase__InfluenzaA__AHC61610

SEQ ID NO: 24243 - protein, 469 aa, Artificial Sequence; identical to SEQ ID NO: 24019
  derived and/or modified protein sequence (wt) from neuraminidase__InfluenzaA__AHC61622

SEQ ID NO: 24244 - protein, 469 aa, Artificial Sequence; identical to SEQ ID NO: 19518
  derived and/or modified protein sequence (wt) from neuraminidase__InfluenzaA__AHC61634

SEQ ID NO: 24245 - protein, 469 aa, Artificial Sequence; identical to SEQ ID NO: 19518
  derived and/or modified protein sequence (wt) from neuraminidase__InfluenzaA__AHC61646

SEQ ID NO: 24246 - protein, 469 aa, Artificial Sequence; identical to SEQ ID NO: 19518
  derived and/or modified protein sequence (wt) from neuraminidase__InfluenzaA__AHC61658

SEQ ID NO: 24247 - protein, 469 aa, Artificial Sequence; identical to SEQ ID NO: 22922
  derived and/or modified protein sequence (wt) from neuraminidase__InfluenzaA__AHC61670

SEQ ID NO: 24248 - protein, 469 aa, Artificial Sequence; identical to SEQ ID NO: 23975
  derived and/or modified protein sequence (wt) from neuraminidase__InfluenzaA__AHC61682

SEQ ID NO: 24249 - protein, 469 aa, Artificial Sequence; identical to SEQ ID NO: 22922
  derived and/or modified protein sequence (wt) from neuraminidase__InfluenzaA__AHC61694

SEQ ID NO: 24250 - protein, 469 aa, Artificial Sequence
  derived and/or modified protein sequence (wt) from neuraminidase__InfluenzaA__AHC61706
MNPNQKIITIGSVSLTISTICFFMQIAILITTVTLHFKQYEFNSPPNNQVMLCEPTIIERNITEIVYLTNTTIEKEICPKLAEYRNWSKPQCDITGFAPFSKDNSIRLSAGGDIWVTREPYVSCDPDKCYQFALGQGTTLNNVHSNNTVRDRTPYRTLLMNELGVPFHLGTKQVCIAWSSSSCHDGKAWLHVCITGDDKNATASFIYNGRLVDSVVSWSKEILRTQESECVCINGTCTVVMTDGSASGKADTKILFIEEGKIVHTSTLSGSAQHVEECSCYPRYPGVRCVCRDNWKGSNRPIVDINIKEHSIVSSYVCSGLVGDTPRKNDSSSSSHCLDPNNEEGGHGVKGWAFDDGNDVWMGRTINETSRLGYETFKVIEGWSNPKSKLQINRQVIVDRGNRSGYSGIFSVEGKSCINRCFYVELIRGRKEETEVLWTSNSIVVFCGTSGTYGTGSWPDGADLNLMPI

SEQ ID NO: 24251 - protein, 469 aa, Artificial Sequence
  derived and/or modified protein sequence (wt) from neuraminidase__InfluenzaA__AHC61718
MNPNQKIITIGSVSLTISTICFFMQIAILITTVTLHFKQCEFNSPPNNQVMLCEPTIIERNITEIVYLTNTTIEKEICPKLTEYRNWSKPQCDITGFAPFSKDNSIRLSAGGDIWVTREPYVSCDPNKCYQFALGQGTTLNNVHSNNTVRDRTPYRTLLMNELGVPFHLGTKQVCIAWSSSSCHDGKAWLHVCITGDDKNATASFIYNGKLVDSVVSWSKEILRTQESECVCINGTCTVVMTDGSASGKADTKILFIEEGKIVHTSTLSGSAQHVEECSCYPRYPGVRCVCRDNWKGSNRPIVDINIKDHSIVSSYVCSGLVGDTPRKNDSSSSSHCLDPNNEEGGHGVKGWAFDDGNDVWMGRTINETSRLGYETFKVIEGWSNPKSKLQINRQVIVDRGNRSGYSGIFSVEGKSCINRCFYVELIRGRKEETGVLWTSNSIVVFCGTSGTYGTGSWPDGADLNLMPI

SEQ ID NO: 24252 - protein, 469 aa, Artificial Sequence; identical to SEQ ID NO: 23971
  derived and/or modified protein sequence (wt) from neuraminidase__InfluenzaA__AHC61730

SEQ ID NO: 24253 - protein, 469 aa, Artificial Sequence; identical to SEQ ID NO: 24020
  derived and/or modified protein sequence (wt) from neuraminidase__InfluenzaA__AHC61742

SEQ ID NO: 24254 - protein, 469 aa, Artificial Sequence; identical to SEQ ID NO: 23971
  derived and/or modified protein sequence (wt) from neuraminidase__InfluenzaA__AHC61754

SEQ ID NO: 24255 - protein, 469 aa, Artificial Sequence; identical to SEQ ID NO: 19518
  derived and/or modified protein sequence (wt) from neuraminidase__InfluenzaA__AHC61766

SEQ ID NO: 24256 - protein, 469 aa, Artificial Sequence; identical to SEQ ID NO: 24007
  derived and/or modified protein sequence (wt) from neuraminidase__InfluenzaA__AHC61778

SEQ ID NO: 24257 - protein, 469 aa, Artificial Sequence; identical to SEQ ID NO: 24045
  derived and/or modified protein sequence (wt) from neuraminidase__InfluenzaA__AHC61790

SEQ ID NO: 24258 - protein, 469 aa, Artificial Sequence; identical to SEQ ID NO: 23975
  derived and/or modified protein sequence (wt) from neuraminidase__InfluenzaA__AHC61802

SEQ ID NO: 24259 - protein, 469 aa, Artificial Sequence; identical to SEQ ID NO: 23971
  derived and/or modified protein sequence (wt) from neuraminidase__InfluenzaA__AHC61814

SEQ ID NO: 24260 - protein, 469 aa, Artificial Sequence
  derived and/or modified protein sequence (wt) from neuraminidase__InfluenzaA__AHC61826
MNPNQKIITIGSVSLTISTICFFMQIAILITTVTLHFKQYEFNSPPNNQVVLCEPTIIERNITEIVYLTNTTIEKEICPKPAEYRNWSKPQCDITGFAPFSKDNSIRLSAGGDIWVTREPYVSCDPDKCYQFALGQGTTLNNVHSNNTVRDRTPYRTLLMNELGVPFHLGTKQVCIAWSSSSCHDGKAWLHVCITGDDKNATASFIYNGRLVDSVVSWSKEILRTQESECVCINGTCTVVMTDGSASGKADTKILFIEEGKIVHTSTLSGSAQHVEECSCYPRYPGVRCVCRDNWKGSNRPIVDINIKDHSIVSSYVCSGLVGDTPRKNDSSSSSHCLDPNNEEGGHGVKGWAFDDGNDVWMGRTINETSRLGYETFKVIEGWSNPKSKLQINRQVIVDRSDRSGYSGIFSVEGKSCINRCFYVELIRGRKEETEVLWTSNSIVVFCGTSGTYGTGSWPDGADLNLMPI

SEQ ID NO: 24261 - protein, 469 aa, Artificial Sequence; identical to SEQ ID NO: 23971
  derived and/or modified protein sequence (wt) from neuraminidase__InfluenzaA__AHC61838

SEQ ID NO: 24262 - protein, 469 aa, Artificial Sequence; identical to SEQ ID NO: 24007
  derived and/or modified protein sequence (wt) from neuraminidase__InfluenzaA__AHC61850

SEQ ID NO: 24263 - protein, 469 aa, Artificial Sequence; identical to SEQ ID NO: 24020
  derived and/or modified protein sequence (wt) from neuraminidase__InfluenzaA__AHC61862

SEQ ID NO: 24264 - protein, 469 aa, Artificial Sequence; identical to SEQ ID NO: 23971
  derived and/or modified protein sequence (wt) from neuraminidase__InfluenzaA__AHC61874

SEQ ID NO: 24265 - protein, 469 aa, Artificial Sequence
  derived and/or modified protein sequence (wt) from neuraminidase__InfluenzaA__AHC61886
MNPNQKIITIGSVSLTISTICFFMQIAILITTVTLHFKQYEFNPPPNNQVVLCEPTIIERNITEIVYLTNTTIEKEICPKPAEYRHWSKPQCDITGFAPFSKDNSIRLSAGGDIWVTREPYVSCDPDKCYQFALGQGTTLNNVHSNNTVRDRTPYRTLLMNELGVPFHLGTKQVCIAWSSSSCHDGKAWLHVCITGDDKNATASFIYNGRLVDSVVSWSKEILRTQESECVCINGTCTVVMTDGSASGKADTKILFIEEGKIVHTSTLSGSAQHVEECSCYPRYPGVRCVCRDNWKGSNRPIVDINIKDHSIVSSYVCSGLVGDTPRKNDSSSSSHCLDPNNEEGGHGVKGWAFDDGNDVWMGRTINETSRLGYETFKVIEGWSNPKSKLQINRQVIVDRGDRSGYSGIFSVEGKSCINRCFYVELIRGRKEETEVLWTSNSIVVFCGTSGTYGTGSWPDGADLNLMPI

SEQ ID NO: 24266 - protein, 469 aa, Artificial Sequence; identical to SEQ ID NO: 23975
  derived and/or modified protein sequence (wt) from neuraminidase__InfluenzaA__AHC61898

SEQ ID NO: 24267 - protein, 469 aa, Artificial Sequence; identical to SEQ ID NO: 24007
  derived and/or modified protein sequence (wt) from neuraminidase__InfluenzaA__AHC61910

SEQ ID NO: 24268 - protein, 469 aa, Artificial Sequence; identical to SEQ ID NO: 19518
  derived and/or modified protein sequence (wt) from neuraminidase__InfluenzaA__AHC61934

SEQ ID NO: 24269 - protein, 469 aa, Artificial Sequence
  derived and/or modified protein sequence (wt) from neuraminidase__InfluenzaA__AHC61946
MNPNQKIITIGSVSLTISTICFFMQIAILITTVTLHFKQYESYSPPNNQVMLCEPTIIERNITEIVYLTNTTIEKEICPKLAEYRNWSKPQCDITGFAPFSKDNSIRLSAGGDIWVTREPYVSCDPDKCYQFALGQGTTLNNVHSNNTVRDRTPYRTLLMNELGVPFHLGTKQVCIAWSSSSCHDGKAWLHVCITGDDKNATASFIYNGRLVDSVVSWSKEILRTQESECVCINGTCTVVMTDGSASGKADTKILFIEEGKIVHTSTLSGSAQHVEECSCYPRNPGVRCVCRDNWKGSNRPIVDINIKDHSIVSSYVCSGLVGDTPRKNDSSSSSHCLDPNNEEGGHGVKGWAFDDGNDVWMGRTINETSRLGYETFKVIEGWSNPKSKLQINRQVIVDRGNRSGYSGIFSVEGKSCINRCFYVELIRGRKEETEVLWTSNSIVVFCGTSGTYGTGSWPDGADLNLMPI

SEQ ID NO: 24270 - protein, 469 aa, Artificial Sequence; identical to SEQ ID NO: 22922
  derived and/or modified protein sequence (wt) from neuraminidase__InfluenzaA__AHC61958

SEQ ID NO: 24271 - protein, 469 aa, Artificial Sequence; identical to SEQ ID NO: 23971
  derived and/or modified protein sequence (wt) from neuraminidase__InfluenzaA__AHC61970

SEQ ID NO: 24272 - protein, 469 aa, Artificial Sequence
  derived and/or modified protein sequence (wt) from neuraminidase__InfluenzaA__AHC61982
MNPNQKIITIGSVSLTISTICFFMQIAILITTVTLHFKQYEFNSPPNNQVMLCEPTIIERNITEIVYLTNTTIEKEICPKLAEYRNWSKPQCDITGFAPFSKDNSIRLSAGGDIWVTREPYVSCDPDKCYQFALGQGTTLNNVHSNNTVRDRTPYRTLLMNELGVPFHLGTKQVCIAWSSSSCHDGKAWLHVCITGDDKNATASFIYNGRLVDSVVSWSKEILRTQESECVCINGTCAVVMTDGSASGKADTKILFIEEGKIVHTSTLSGSAQHVEECSCYPRYPGVRCVCRDNWKGSNRPIVDINIKDHGIVSSYVCSGLVGDTPRKNDSSSSSHCLDPNNEEGGHGVKGWAFDDGNDVWMGRTINETSRLGYETFKVIEGWSNPKSKLQINRQVIVDRGNRSGYSGIFSVEGKSCINRCFYVELIRGRKEETEVLWTSNSIVVFCGTSGTYGTGSWPDGADLNLMPI

SEQ ID NO: 24273 - protein, 469 aa, Artificial Sequence; identical to SEQ ID NO: 23975
  derived and/or modified protein sequence (wt) from neuraminidase__InfluenzaA__AHC61994

SEQ ID NO: 24274 - protein, 469 aa, Artificial Sequence; identical to SEQ ID NO: 24007
  derived and/or modified protein sequence (wt) from neuraminidase__InfluenzaA__AHC62006

SEQ ID NO: 24275 - protein, 469 aa, Artificial Sequence; identical to SEQ ID NO: 23971
  derived and/or modified protein sequence (wt) from neuraminidase__InfluenzaA__AHC62018

SEQ ID NO: 24276 - protein, 469 aa, Artificial Sequence; identical to SEQ ID NO: 22922
  derived and/or modified protein sequence (wt) from neuraminidase__InfluenzaA__AHC62030

SEQ ID NO: 24277 - protein, 469 aa, Artificial Sequence; identical to SEQ ID NO: 23975
  derived and/or modified protein sequence (wt) from neuraminidase__InfluenzaA__AHC62042

SEQ ID NO: 24278 - protein, 469 aa, Artificial Sequence; identical to SEQ ID NO: 24048
  derived and/or modified protein sequence (wt) from neuraminidase__InfluenzaA__AHC62053

SEQ ID NO: 24279 - protein, 469 aa, Artificial Sequence
  derived and/or modified protein sequence (wt) from neuraminidase__InfluenzaA__AHC62065
MNPNQKIITIGSVSLTISTICFFMQIAILVTTVTLHFKQYEFNSPPNNQVMLCEPTIIERNITEIVYLTNTTIEKEICPKPAEYRNWSKPQCDITGFAPFSKDNSIRLSAGGDIWVTREPYVSCDPDKCYQFALGQGTTLNNVHSNNTVRDRTPYRTLLMNELGVPFHLGTKQVCIAWSSSSCHDGKAWLHVCITGDDKNATASFIYNGRLVDSVVSWSKEILRTQESECVCINGTCTVVMTDGSASGKADTKILFIEEGKIVHTSTLSGSAQHVEECSCYPRYPGVRCVCRDNWKGSNRPIVDINIKDHSIVSSYVCSGLVGDTPRKNDSSSSSHCLDPNNEEGGHGVKGWAFDDGNDVWMGRTINETSRLGYETFKVIEGWSNPKSKLQINRQVIVDRGDRSGYSGIFSVEGKSCINRCFYVELIRGRKEETEVLWTSNSIVVFCGTSGTYGTGSWPDGADLNLMPI

SEQ ID NO: 24280 - protein, 469 aa, Artificial Sequence; identical to SEQ ID NO: 24106
  derived and/or modified protein sequence (wt) from neuraminidase__InfluenzaA__AHC62077

SEQ ID NO: 24281 - protein, 469 aa, Artificial Sequence; identical to SEQ ID NO: 24020
  derived and/or modified protein sequence (wt) from neuraminidase__InfluenzaA__AHC62089

SEQ ID NO: 24282 - protein, 469 aa, Artificial Sequence; identical to SEQ ID NO: 23971
  derived and/or modified protein sequence (wt) from neuraminidase__InfluenzaA__AHC62101

SEQ ID NO: 24283 - protein, 469 aa, Artificial Sequence; identical to SEQ ID NO: 24020
  derived and/or modified protein sequence (wt) from neuraminidase__InfluenzaA__AHC62113

SEQ ID NO: 24284 - protein, 469 aa, Artificial Sequence
  derived and/or modified protein sequence (wt) from neuraminidase__InfluenzaA__AHC62125
MNPNQKIITIGSVSLTISTICFFMQIAILITTVTLHFKQYEFNSPPNNQVMLCEPTIIERNITEIVYLTNTTIEKEICPKLAEYRNWSKPQCDITGFAPFSKDNSIRLSAGGDIWVTREPYVSCDPNKCYQFALGQGTTLNNVHSNNTVRDRTPYRTLLMNELGVPFHLGTKQVCIAWSSSSCHDGKAWLHVCITGDDKNATASFIYNGKLVDSVVSWSKEILRTQESECVCINGTCTVVMTDGSASGKADTKILFIEEGKIVHTSTLSGSAQHVEECSCYPRYPGVRCVCRDNWKGSNRPIVDINIKDHSIVSSYVCSGLVGDTPRKNDSSSSSHCLDPNNEEGGHGVKGWAFDDGNDVWMGRTINETSRLGYETFKVIEGWSNPKSKLQINRQVIVDRGNKSGYSGIFSVEGKSCINRCFYVELIRGRKEETEVLWTSNSIVVFCGTSGTYGTGSWPDGADLNLMPI

SEQ ID NO: 24285 - protein, 469 aa, Artificial Sequence
  derived and/or modified protein sequence (wt) from neuraminidase__InfluenzaA__AHC62137
MNPNQKIITIGSVSLTISTICFFMQIAILITTVTLHFKQYEFNSPPNNQVMLCEPTIIERNITEIVYLTNTTIEKEICPKLAEYRNWSKPQCDITGFAPFSKDNSIRLSAGGDIWVTREPYVSCDPDKCYQFALGQGTTLNNVHSNNTVRDRTPYRTLLMNELGVPFHLGTKQVCIAWSSSSCHDGKAWLHVCITGDDKNATASFIYNGRLVDSVVSWSKEILRTQESECVCINGTCTVVMTDGSASGKADTKILFIEEGKIVHTSTLSGSAQHVEECSCYPRYPGVRCVCRDNWKGSNRPIVDINIKDHSIVSSYVCSGLVGDTPRKNDSSSSSHCLDPNNEEGGHGVKGWAFDDGNDVWMGRTINETSRLGYETFKVIEGWSNPKSKLQINRQVIVDRGDRSGYSGIFSVEGKSCINRCFYVELIRGRKEETEVLWTSNSIVVFCGTSGTYGTGSWPDGADLNLMPI

SEQ ID NO: 24286 - protein, 469 aa, Artificial Sequence
  derived and/or modified protein sequence (wt) from neuraminidase__InfluenzaA__AHC62149
MNPNQKIITIGSVSLTISTICFFMQIAILITTVTLHFKQYEFNSPPNNQVMLCEPTIIERNITEIVYLTNTTIEKEICPKPAEYRNWSKPQCDITGFAPFSKDNSIRLSAGGDIWVTREPYVSCDPDKCYQFALGQGTTLNNVHSNNTVRDRTPYRTLLMNELGVPFHLGTKQVCIAWSSSSCHDGKAWLHVCITGDDKNATASFIYNGRLVDSVVSWSKEILRTQESECVCINGTCTVVMTDGSASGKADTKILFIEEGKIVHTSTLSGSAQHVEECSCYPRYPGVRCVCRDNWKGSNRPIVDINIRDHSIVSSYVCSGLVGDTPRKNDSSSSSHCLDPNNEEGGHGVKGWAFDDGNDVWMGRTINETSRLGYETFKVIEGWSNPKSKLQINRQVIVDRGDRSGYSGIFSVEGKSCINRCFYVELIRGRKEETEVLWTSNSIVVFCGTSGTYGTGSWPDGADLNLMPI

SEQ ID NO: 24287 - protein, 469 aa, Artificial Sequence; identical to SEQ ID NO: 24007
  derived and/or modified protein sequence (wt) from neuraminidase__InfluenzaA__AHC62161

SEQ ID NO: 24288 - protein, 469 aa, Artificial Sequence
  derived and/or modified protein sequence (wt) from neuraminidase__InfluenzaA__AHC62173
MNPNQKIITIGSVSLTISTICFFMQIAILITTVTLHFKQCEFNSPPNNQVMLCEPTIIERNITEIVYLTNTTIEKEICPKLAEYRNWSKPQCDITGFAPFSKDNSIRLSAGGDIWVTREPYVSCDPNKCYQFALGQGTTLNNVHSNNTVRDRTPYRTLLMNELGVPFHLGTKQVCIAWSSSSCHDGKAWLHVCITGDDKNATASFIYNGKLVDSVVSWSKEILRTQESECVCINGTCTVVMTDGSASGKADTKILFIEEGKIVHTSTLSGSAQHVEECSCYPRYPGVRCVCRDNWKGSNRPIVDINIKDHSIVSSYVCSGLVGDTPRKNDSSSSSHCLDPNNEEGGHGVKGWAFDDGNDVWMGRTINETSRLGYETFKVIEGWSNPKSKLQINRQVIVDRGNRSGYSGIFSVEGKSCINRCFYVELIRGRKEETEVLWTSNSIVVFCGTSGTYGTGSWPDGADLNLMPI

SEQ ID NO: 24289 - protein, 469 aa, Artificial Sequence; identical to SEQ ID NO: 24020
  derived and/or modified protein sequence (wt) from neuraminidase__InfluenzaA__AHC62185

SEQ ID NO: 24290 - protein, 469 aa, Artificial Sequence; identical to SEQ ID NO: 22922
  derived and/or modified protein sequence (wt) from neuraminidase__InfluenzaA__AHC62197

SEQ ID NO: 24291 - protein, 469 aa, Artificial Sequence
  derived and/or modified protein sequence (wt) from neuraminidase__InfluenzaA__AHC62209
MNPNQKIITIGSVSLTISTICFFMQIAILITTVTLHFKQYEFNSPPNNQVMLCEPTIIERNITEIVYLTNTTIEKEICPKPAEYRNWSKPQCDITGFAPFSKDNSIRLSAGGDIWVTREPYVSCDPDKCYQFALGQGTTLNNVHSNNTVRDRTPYRTLLMNELGVPFHLGTKQVCIAWSSSSCHDGKAWLHVCITGDDKNATASFIYNGRLVDSVVSWSKEILRTQESECVCINGTCTVVMTDGSASGKADTKILFIEEGKIVHTSTLSGSAQHVEECSCYPRYPGVRCVCRDNWKGSNRPIVDINIKNHSIVSSYVCSGLVGDTPRKNDSSSSSHCLDPNNEEGGHGVKGWAFDDGNDVWMGRTINETSRLGYETFKVIEGWSNPKSKLQINRQVIVDRGDRSGYSGIFSVEGKSCINRCFYVELIRGRKEETEVLWTSNSIVVFCGTSGTYGTGSWPDGADLNLMPI

SEQ ID NO: 24292 - protein, 469 aa, Artificial Sequence; identical to SEQ ID NO: 23975
  derived and/or modified protein sequence (wt) from neuraminidase__InfluenzaA__AHC62221

SEQ ID NO: 24293 - protein, 469 aa, Artificial Sequence; identical to SEQ ID NO: 19518
  derived and/or modified protein sequence (wt) from neuraminidase__InfluenzaA__AHC62233

SEQ ID NO: 24294 - protein, 469 aa, Artificial Sequence; identical to SEQ ID NO: 23971
  derived and/or modified protein sequence (wt) from neuraminidase__InfluenzaA__AHC62245

SEQ ID NO: 24295 - protein, 469 aa, Artificial Sequence
  derived and/or modified protein sequence (wt) from neuraminidase__InfluenzaA__AHC62257
MNPNQKIITIGSVSLTISTICFFMQIAILITTVTLHFKQYEFNSPPNNQVMLCEPTIIERNITEIVYLTNTTIEKEICPKPAEYRNWSKPQCDITGFAPFSKDNSIRLSAGGDIWVTREPYVSCDPDKCYQFALGQGTTLNNVHSNNTVRDRTPYRTLLMNELGVPFHLGTKQVCIAWSSSSCHDGKAWLHVCITGDDKNATASFIYNGRLVDSVVSWSKEILRTQESECVCINGTCTVVMTDGSASGKADTKILFIEEGKIVHTSTLSGSAQHVEECSCYPRYPGVRCVCRDNWKGSNRPIVDINIKDHSIVSSYVCSGLVGDTPRKNDSSSSSHCLDPNNEEGGHGVKGWAFDDGNDVWMGRTINETSRLGYETFKVIEGWSNPKSKLQINRQVIVGRGDRSGYSGIFSVEGKSCINRCFYVELIRGRKEETEVLWTSNSIVVFCGTSGTYGTGSWPDGADLNLMPI

SEQ ID NO: 24296 - protein, 469 aa, Artificial Sequence; identical to SEQ ID NO: 24048
  derived and/or modified protein sequence (wt) from neuraminidase__InfluenzaA__AHC62269

SEQ ID NO: 24297 - protein, 469 aa, Artificial Sequence; identical to SEQ ID NO: 24020
  derived and/or modified protein sequence (wt) from neuraminidase__InfluenzaA__AHC62281

SEQ ID NO: 24298 - protein, 469 aa, Artificial Sequence; identical to SEQ ID NO: 23975
  derived and/or modified protein sequence (wt) from neuraminidase__InfluenzaA__AHC62293

SEQ ID NO: 24299 - protein, 469 aa, Artificial Sequence; identical to SEQ ID NO: 19518
  derived and/or modified protein sequence (wt) from neuraminidase__InfluenzaA__AHC62305

SEQ ID NO: 24300 - protein, 469 aa, Artificial Sequence; identical to SEQ ID NO: 23971
  derived and/or modified protein sequence (wt) from neuraminidase__InfluenzaA__AHC62317

SEQ ID NO: 24301 - protein, 469 aa, Artificial Sequence
  derived and/or modified protein sequence (wt) from neuraminidase__InfluenzaA__AHC62329
MNPNQKIITIGSVSLTISTICFFMQIAILITTVTLHFKQYEFNSPPNNQVMLCEPTIIERNITEIVYLTNTTIEKEICPKPAEYRNWSKPQCDITGFAPFSKDNSIRLSAGGDIWVTREPYVSCDPDKCYQFALGQGTTLNNVHSNNTVRDRTPYRTLLMNELGVPFHLGTKQVCIAWSSSSCHDGKAWLHVCITGDDKNATASFIYNGRLVDSVVSWSKEILRTQESECVCINGTCTVVMTDGSASGKADTKILFIEEGKIVHTSTLSGSAQHVEECSCYPRYPGVRCVCRDNWKGSNRPIVDINIKDHSIVSSYVCSGLVGDTPRKNDSSSSSHCLDPNNEEGGHGVKGWAFDDGNDVWMGRTINETSRLGYETFKVIEGWSNPKSKLQINRQVIADRGDRSGYSGIFSVEGKSCINRCFYVELIRGRKEETEVLWTSNSIVVFCGTSGTYGTGSWPDGADLNLMPI

SEQ ID NO: 24302 - protein, 469 aa, Artificial Sequence; identical to SEQ ID NO: 23971
  derived and/or modified protein sequence (wt) from neuraminidase__InfluenzaA__AHC62341

SEQ ID NO: 24303 - protein, 469 aa, Artificial Sequence
  derived and/or modified protein sequence (wt) from neuraminidase__InfluenzaA__AHC62353
MNPNQKIITIGSVSLTISTICFFMQIAILITTVTLHFKQYEFNSPPNNQVMLCEPTIIERNITEIVYLTNTTIEKEICPKLAEYRNWSKPQCDITGFAPFSKDNSIRLSAGGDIWVTREPYVSCDPDKCYQFALGQGTTLNNVHSNNTVRDRTPYRTLLMNELGVPFHLGTKQVCIAWSSSSCHDGKAWLHVCITGDDKNATASFIYNGRLVDSVVSWSKEILRTQESECVCINGTCTVVMTDGSASGKADTKILFIEEGKIVHTSTLSGSAQHVEECSCYPRYPGVRCVCRDNWKGSNRPIVDINIKDHSIVSSYVCSGLVGDTPRKTDSSSSSHCLDPNNEEGGHGVKGWAFDDGNDVWMGRTINETSRLGYETFKVIEGWSNPKSKLQINRQVIVDRGNRSGYSGIFSVEGKSCINRCFYVELIRGRKEETEVLWTSNSIVVFCGTSGTYGTGSWPDGADLNLMPI

SEQ ID NO: 24304 - protein, 469 aa, Artificial Sequence; identical to SEQ ID NO: 23971
  derived and/or modified protein sequence (wt) from neuraminidase__InfluenzaA__AHC62365

SEQ ID NO: 24305 - protein, 469 aa, Artificial Sequence; identical to SEQ ID NO: 24188
  derived and/or modified protein sequence (wt) from neuraminidase__InfluenzaA__AHC62377

SEQ ID NO: 24306 - protein, 469 aa, Artificial Sequence; identical to SEQ ID NO: 24020
  derived and/or modified protein sequence (wt) from neuraminidase__InfluenzaA__AHC62389

SEQ ID NO: 24307 - protein, 469 aa, Artificial Sequence; identical to SEQ ID NO: 24020
  derived and/or modified protein sequence (wt) from neuraminidase__InfluenzaA__AHC62401

SEQ ID NO: 24308 - protein, 469 aa, Artificial Sequence; identical to SEQ ID NO: 24048
  derived and/or modified protein sequence (wt) from neuraminidase__InfluenzaA__AHC62413

SEQ ID NO: 24309 - protein, 469 aa, Artificial Sequence; identical to SEQ ID NO: 24106
  derived and/or modified protein sequence (wt) from neuraminidase__InfluenzaA__AHC62425

SEQ ID NO: 24310 - protein, 469 aa, Artificial Sequence; identical to SEQ ID NO: 19518
  derived and/or modified protein sequence (wt) from neuraminidase__InfluenzaA__AHC62437

SEQ ID NO: 24311 - protein, 469 aa, Artificial Sequence; identical to SEQ ID NO: 24020
  derived and/or modified protein sequence (wt) from neuraminidase__InfluenzaA__AHC62449

SEQ ID NO: 24312 - protein, 469 aa, Artificial Sequence; identical to SEQ ID NO: 23975
  derived and/or modified protein sequence (wt) from neuraminidase__InfluenzaA__AHC62461

SEQ ID NO: 24313 - protein, 469 aa, Artificial Sequence; identical to SEQ ID NO: 23971
  derived and/or modified protein sequence (wt) from neuraminidase__InfluenzaA__AHC62473

SEQ ID NO: 24314 - protein, 469 aa, Artificial Sequence; identical to SEQ ID NO: 22146
  derived and/or modified protein sequence (wt) from neuraminidase__InfluenzaA__AHC62485

SEQ ID NO: 24315 - protein, 469 aa, Artificial Sequence; identical to SEQ ID NO: 24020
  derived and/or modified protein sequence (wt) from neuraminidase__InfluenzaA__AHC62509

SEQ ID NO: 24316 - protein, 469 aa, Artificial Sequence
  derived and/or modified protein sequence (wt) from neuraminidase__InfluenzaA__AHC62521
MNPNQKIITIGSVSLTISTICFFMQIAILITTVTLHFKQYEFNSPPNNQVMLCEPTIIERNITEIVYLTNTTIEKEICPKLAEYRNWSKPQCDITGFAPFSKDNSIRLSAGGDIWVTREPYVSCDPNKCYQFALGQGTTLNNVHSNNTVRDRTPYRTLLMNELGVPFHLGTKQVCIAWSSSSCHDGKAWLHVCITGDDKNATASFIYNGKLVDSVVSWSKEILRTQESECVCINGTCTVVMTDGSASGKADTKILFIEEGKIVHTSTLSGSAQHVEECSCYPRYPGVRCVCRDNWKGSNRPIVDINIKDHSIVSSYVCSGLVGDTPRKNDSSSSSHCLDPNNEEGGHGVKGWAFDDGNDVWMGRTINETSRLGYETFKVIEGWSNPKSKLQINRQVIVDRGNRSGYSGIFSVEGKSCINRCFYVELIRGRKEETEVLWTSNSIIVFCGTSGTYGTGSWPDGADLNLMPI

SEQ ID NO: 24317 - protein, 469 aa, Artificial Sequence
  derived and/or modified protein sequence (wt) from neuraminidase__InfluenzaA__AHC62533
MNPNQKIITIGSVSLTISTICFFMQVAILITTVTLHFKQYEFNSPPNNQVMLCEPTIIERNITEILYLTNTTIEKEICPKLAEYRNWSKPQCDITGFAPFSKDNSIRLSAGGDIWVTREPYVSCDPDKCYQFALGQGTTLNNVHSNNTVRDRTPYRTLLMNELGVPFHLGTKQVCIAWSSSSCHDGKAWLHVCITGDDKNATASFIYNGKLVDSVVSWSKEILRTQESECVCINGTCTVVMTDGSASGKADTKILFIEEGKIVHTSTLSGSAQHVEECSCYPRYPGVRCVCRDNWKGSNRPIVDINIKDHSIVSSYVCSGLVGDTPRKNDSSSSSHCLDPNNEEGGNGVKGWAFDDGNDVWMGRTINETSRLGYETFKVIEGWSNPKSKLQINRQVIVDRGNRSGYSGIFSVEGKSCINRCFYVELIRGRKEETEVLWTSNSIVVFCGTSGTYGTGSWPDGADLNLMPI

SEQ ID NO: 24318 - protein, 469 aa, Artificial Sequence; identical to SEQ ID NO: 24175
  derived and/or modified protein sequence (wt) from neuraminidase__InfluenzaA__AHC62545

SEQ ID NO: 24319 - protein, 469 aa, Artificial Sequence; identical to SEQ ID NO: 24020
  derived and/or modified protein sequence (wt) from neuraminidase__InfluenzaA__AHC62557

SEQ ID NO: 24320 - protein, 469 aa, Artificial Sequence; identical to SEQ ID NO: 23971
  derived and/or modified protein sequence (wt) from neuraminidase__InfluenzaA__AHC62569

SEQ ID NO: 24321 - protein, 469 aa, Artificial Sequence; identical to SEQ ID NO: 24020
  derived and/or modified protein sequence (wt) from neuraminidase__InfluenzaA__AHC62581

SEQ ID NO: 24322 - protein, 469 aa, Artificial Sequence
  derived and/or modified protein sequence (wt) from neuraminidase__InfluenzaA__AHC62593
MNPNQKIITIGSVSLTISTICFFMQIAILITTVTLHFKQYEFNSPPNNQVMLCEPTIIERNITEIVYLTNTTIEKEICPKLAEYRNWSKPQCDITGFAPFSKDNSIRLSAGGNIWVTREPYVSCDPDKCYQFALGQGTTLNNVHSNNTVRDRTPYRTLLMNELGVPFHLGTKQVCIAWSSSSCHDGKAWLHVCITGDDKNATASFIYNGRLVDSVVSWSKEILRTQESECVCINGTCTVVMTDGSASGKADTKILFIEEGKIVHTSTLSGSAQHVEECSCYPRYPGVRCVCRDNWKGSNRPIVDINIKDHSIVSSYVCSGLVGDTPRKNDSSSSSHCLDPNNEEGGHGVKGWAFDDGNDVWMGRTINETSRLGYETFKVIEGWSNPKSKLQINRQVIVDRGNRSGYSGIFSVEGKSCINRCFYVELIRGRKEETEVLWTSNSIVVFCGTSGTYGTGSWPDGADLNLMPI

SEQ ID NO: 24323 - protein, 469 aa, Artificial Sequence; identical to SEQ ID NO: 24007
  derived and/or modified protein sequence (wt) from neuraminidase__InfluenzaA__AHC62605

SEQ ID NO: 24324 - protein, 469 aa, Artificial Sequence
  derived and/or modified protein sequence (wt) from neuraminidase__InfluenzaA__AHC62617
MNPNQKIITIGSVSLTISTICFFMQIAILITTVTLHFKQYEFNSPPNNQVMRCEPTIIERNITEIVYLTNTTIEKEICPKLAEYRNWSKPQCDITGFAPFSKDNSIRLSAGGDIWVTREPYVSCDPNKCYQFALGQGTTLNNVHSNNTVRDRTPYRTLLMNELGVPFHLGTKQVCIAWSSSSCHDGKAWLHVCITGDDKNATASFIYNGKLVDSVVSWSKEILRTQESECVCINGTCTVVMTDGSASGKADTKILFIEEGKIVHTSTLSGSAQHVEECSCYPRYPGVRCVCRDNWKGSNRPIVDINIKDHSIVSSYVCSGLVGDTPRKNDSSSSSHCLDPNNEEGGHGVKGWAFDDGNDVWMGRTINETSRLGYETFKVIEGWSNPKSKLQINRQVIVDRGNRSGYSGIFSVEGKSCINRCFYVELIRGRKEETEVLWTSNSIVVFCGTSGTYGTGSWPDGADLNLMPI

SEQ ID NO: 24325 - protein, 469 aa, Artificial Sequence; identical to SEQ ID NO: 23975
  derived and/or modified protein sequence (wt) from neuraminidase__InfluenzaA__AHC62629

SEQ ID NO: 24326 - protein, 469 aa, Artificial Sequence
  derived and/or modified protein sequence (wt) from neuraminidase__InfluenzaA__AHC62641
MNPNQKIITIGSVSLTISTVCFFMQVAILITTVTLHFKQYEFNSPPNNQVMLCEPTIIERNITEILYLTNTTIEKEICPKLAEYRNWSKPQCDITGFAPFSKDNSIRLSAGGDIWVTREPYVSCDPDKCYQFALGQGTTLNNVHSNNTVRDRTPYRTLLMNELGVPFHLGTKQVCIAWSSSSCHDGKAWLHVCITGDDKNATASFIYNGKLVDSVVSWSKEILRTQESECVCINGTCTVVMTDGSASGKADTKILFIEEGKIVHTSTLSGSAQHVEECSCYPRYPGVRCVCRDNWKGSNRPIVDINIKDHSIVSSYVCSGLVGDTPRKNDSSSSSHCLDPNNEEGGHGVKGWAFDDGNDVWMGRTINETSRLGYETFKVIEGWSNPKSKLQINRQVIVDRGNRSGYSGIFSVEGKSCINRCFYVELIRGRKEETEVLWTSNSIVVFCGTSGTYGTGSWPDGADLNLMPI

SEQ ID NO: 24327 - protein, 469 aa, Artificial Sequence; identical to SEQ ID NO: 23975
  derived and/or modified protein sequence (wt) from neuraminidase__InfluenzaA__AHC62653

SEQ ID NO: 24328 - protein, 469 aa, Artificial Sequence; identical to SEQ ID NO: 23975
  derived and/or modified protein sequence (wt) from neuraminidase__InfluenzaA__AHC62665

SEQ ID NO: 24329 - protein, 469 aa, Artificial Sequence
  derived and/or modified protein sequence (wt) from neuraminidase__InfluenzaA__AHC62677
MNPNQKIITIGSVSLTISTICFFMQIAILITTVTLHFKQYEFNSPPNNQVMLCEPTIIERNITEIVYLTNTTIEKEICPKLAEYRNWSKPQCDITGFAPFSKDNSIRLSAGGDIWVTREPYVSCDPNKCYQFALGQGTTLNNVHSNNTVRDRTPYRTLLMNELGVPFHLGTKQVCIAWSSSSCHDGKAWLHVCITGDDKNATASFIYNGKLVDSVVSWSKEILRTQESECVCINGTCTVVMTDGSASGKADTKILFIEEGKIVHTSTLSGSAQHVEECSCYPRYPGVRCVCRDNWKGSNRPIVDINIKDHSIVSSYVCSGLVGDTPRKNDISSSSHCLDPNNEEGGHGVKGWAFDDGNDVWMGRTINETSRLGYETFKVIEGWSNPKSKLQINRQVIVDRGNRSGYSGIFSVEGKSCINRCFYVELIRGRKEETEVLWTSNSIVVFCGTSGTYGTGSWPDGADLNLMPI

SEQ ID NO: 24330 - protein, 465 aa, Artificial Sequence
  derived and/or modified protein sequence (wt) from neuraminidase__InfluenzaA__AHF20560
MNPNQKILCTSATAIIIGAITVLIGIANLGLNIGLHLKPGCNCSHSQPETTNTSQTIINNYYNETNTTNIQMEERTSRNFNNLTKGLCTINSWHIYGKDNAVRIGESSDVLVTREPYVSCDPDECRFYALSQGTTIRGKHSNGTIHDRSQYRALISWPLSSPPTVYNSRVECIGWSSTSCHDGKSRMSICISGPNNNASAVVWYNRRPVAEINTWARNILRTQESECVCHNGVCPVVFTDGSATGPADTRIYYFKEGKILKWESLTGTAKHIEECSCYGERTGITCTCRDNWQGSNRPVIQIDPVAMTHTSQYICSPVLTDNPRPNDPNIGKCNDPYPGNNNNGVKGFSYLDGANTWLGRTISTASRSGYEMLKVPNALTDDRSKPIQGQTIVLNADWSGYSGSFMDYWAEGDCYRACFYVELIRGRPKEDKVWWTSNSIVSMCSSTEFLEQWNWPDGAKIEYFL

SEQ ID NO: 24331 - protein, 465 aa, Artificial Sequence; identical to SEQ ID NO: 23454
  derived and/or modified protein sequence (wt) from neuraminidase__InfluenzaA__AHF20570

SEQ ID NO: 24332 - protein, 470 aa, Artificial Sequence; identical to SEQ ID NO: 16632
  derived and/or modified protein sequence (wt) from neuraminidase__InfluenzaA__AHG96111

SEQ ID NO: 24333 - protein, 470 aa, Artificial Sequence; identical to SEQ ID NO: 16632
  derived and/or modified protein sequence (wt) from neuraminidase__InfluenzaA__AHG96123

SEQ ID NO: 24334 - protein, 470 aa, Artificial Sequence; identical to SEQ ID NO: 16632
  derived and/or modified protein sequence (wt) from neuraminidase__InfluenzaA__AHG96135

SEQ ID NO: 24335 - protein, 470 aa, Artificial Sequence; identical to SEQ ID NO: 16632
  derived and/or modified protein sequence (wt) from neuraminidase__InfluenzaA__AHG96147

SEQ ID NO: 24336 - protein, 470 aa, Artificial Sequence; identical to SEQ ID NO: 16632
  derived and/or modified protein sequence (wt) from neuraminidase__InfluenzaA__AHG96159

SEQ ID NO: 24337 - protein, 470 aa, Artificial Sequence; identical to SEQ ID NO: 16632
  derived and/or modified protein sequence (wt) from neuraminidase__InfluenzaA__AHG96171

SEQ ID NO: 24338 - protein, 470 aa, Artificial Sequence; identical to SEQ ID NO: 16632
  derived and/or modified protein sequence (wt) from neuraminidase__InfluenzaA__AHG96183

SEQ ID NO: 24339 - protein, 470 aa, Artificial Sequence; identical to SEQ ID NO: 16632
  derived and/or modified protein sequence (wt) from neuraminidase__InfluenzaA__AHG96195

SEQ ID NO: 24340 - protein, 470 aa, Artificial Sequence; identical to SEQ ID NO: 16632
  derived and/or modified protein sequence (wt) from neuraminidase__InfluenzaA__AHG96207

SEQ ID NO: 24341 - protein, 470 aa, Artificial Sequence; identical to SEQ ID NO: 16632
  derived and/or modified protein sequence (wt) from neuraminidase__InfluenzaA__AHG96219

SEQ ID NO: 24342 - protein, 470 aa, Artificial Sequence; identical to SEQ ID NO: 16632
  derived and/or modified protein sequence (wt) from neuraminidase__InfluenzaA__AHG96231

SEQ ID NO: 24343 - protein, 470 aa, Artificial Sequence; identical to SEQ ID NO: 16632
  derived and/or modified protein sequence (wt) from neuraminidase__InfluenzaA__AHG96243

SEQ ID NO: 24344 - protein, 470 aa, Artificial Sequence; identical to SEQ ID NO: 16632
  derived and/or modified protein sequence (wt) from neuraminidase__InfluenzaA__AHG96255

SEQ ID NO: 24345 - protein, 470 aa, Artificial Sequence; identical to SEQ ID NO: 16632
  derived and/or modified protein sequence (wt) from neuraminidase__InfluenzaA__AHG96267

SEQ ID NO: 24346 - protein, 470 aa, Artificial Sequence; identical to SEQ ID NO: 16632
  derived and/or modified protein sequence (wt) from neuraminidase__InfluenzaA__AHG96279

SEQ ID NO: 24347 - protein, 470 aa, Artificial Sequence; identical to SEQ ID NO: 16632
  derived and/or modified protein sequence (wt) from neuraminidase__InfluenzaA__AHG96291

SEQ ID NO: 24348 - protein, 470 aa, Artificial Sequence; identical to SEQ ID NO: 16632
  derived and/or modified protein sequence (wt) from neuraminidase__InfluenzaA__AHG96303

SEQ ID NO: 24349 - protein, 469 aa, Artificial Sequence; identical to SEQ ID NO: 16456
  derived and/or modified protein sequence (wt) from neuraminidase__InfluenzaA__AHG96362

SEQ ID NO: 24350 - protein, 469 aa, Artificial Sequence; identical to SEQ ID NO: 16456
  derived and/or modified protein sequence (wt) from neuraminidase__InfluenzaA__AHG96374

SEQ ID NO: 24351 - protein, 469 aa, Artificial Sequence; identical to SEQ ID NO: 16456
  derived and/or modified protein sequence (wt) from neuraminidase__InfluenzaA__AHG96386

SEQ ID NO: 24352 - protein, 470 aa, Artificial Sequence; identical to SEQ ID NO: 16632
  derived and/or modified protein sequence (wt) from neuraminidase__InfluenzaA__AHG96398

SEQ ID NO: 24353 - protein, 469 aa, Artificial Sequence; identical to SEQ ID NO: 16456
  derived and/or modified protein sequence (wt) from neuraminidase__InfluenzaA__AHG96410

SEQ ID NO: 24354 - protein, 469 aa, Artificial Sequence; identical to SEQ ID NO: 16456
  derived and/or modified protein sequence (wt) from neuraminidase__InfluenzaA__AHG96422

SEQ ID NO: 24355 - protein, 469 aa, Artificial Sequence; identical to SEQ ID NO: 16456
  derived and/or modified protein sequence (wt) from neuraminidase__InfluenzaA__AHG96434

SEQ ID NO: 24356 - protein, 469 aa, Artificial Sequence; identical to SEQ ID NO: 16456
  derived and/or modified protein sequence (wt) from neuraminidase__InfluenzaA__AHG96446

SEQ ID NO: 24357 - protein, 469 aa, Artificial Sequence; identical to SEQ ID NO: 16456
  derived and/or modified protein sequence (wt) from neuraminidase__InfluenzaA__AHG96458

SEQ ID NO: 24358 - protein, 469 aa, Artificial Sequence; identical to SEQ ID NO: 16456
  derived and/or modified protein sequence (wt) from neuraminidase__InfluenzaA__AHG96470

SEQ ID NO: 24359 - protein, 469 aa, Artificial Sequence; identical to SEQ ID NO: 16456
  derived and/or modified protein sequence (wt) from neuraminidase__InfluenzaA__AHG96482

SEQ ID NO: 24360 - protein, 469 aa, Artificial Sequence; identical to SEQ ID NO: 16456
  derived and/or modified protein sequence (wt) from neuraminidase__InfluenzaA__AHG96494

SEQ ID NO: 24361 - protein, 469 aa, Artificial Sequence; identical to SEQ ID NO: 16456
  derived and/or modified protein sequence (wt) from neuraminidase__InfluenzaA__AHG96506

SEQ ID NO: 24362 - protein, 470 aa, Artificial Sequence; identical to SEQ ID NO: 16632
  derived and/or modified protein sequence (wt) from neuraminidase__InfluenzaA__AHG96518

SEQ ID NO: 24363 - protein, 470 aa, Artificial Sequence; identical to SEQ ID NO: 16632
  derived and/or modified protein sequence (wt) from neuraminidase__InfluenzaA__AHG96530

SEQ ID NO: 24364 - protein, 470 aa, Artificial Sequence; identical to SEQ ID NO: 16632
  derived and/or modified protein sequence (wt) from neuraminidase__InfluenzaA__AHG96542

SEQ ID NO: 24365 - protein, 470 aa, Artificial Sequence; identical to SEQ ID NO: 16632
  derived and/or modified protein sequence (wt) from neuraminidase__InfluenzaA__AHG96554

SEQ ID NO: 24366 - protein, 470 aa, Artificial Sequence; identical to SEQ ID NO: 16632
  derived and/or modified protein sequence (wt) from neuraminidase__InfluenzaA__AHG96566

SEQ ID NO: 24367 - protein, 470 aa, Artificial Sequence; identical to SEQ ID NO: 16632
  derived and/or modified protein sequence (wt) from neuraminidase__InfluenzaA__AHG96578

SEQ ID NO: 24368 - protein, 470 aa, Artificial Sequence; identical to SEQ ID NO: 16632
  derived and/or modified protein sequence (wt) from neuraminidase__InfluenzaA__AHG96590

SEQ ID NO: 24369 - protein, 470 aa, Artificial Sequence; identical to SEQ ID NO: 16632
  derived and/or modified protein sequence (wt) from neuraminidase__InfluenzaA__AHG96602

SEQ ID NO: 24370 - protein, 470 aa, Artificial Sequence; identical to SEQ ID NO: 16632
  derived and/or modified protein sequence (wt) from neuraminidase__InfluenzaA__AHG96614

SEQ ID NO: 24371 - protein, 470 aa, Artificial Sequence; identical to SEQ ID NO: 16632
  derived and/or modified protein sequence (wt) from neuraminidase__InfluenzaA__AHG96626

SEQ ID NO: 24372 - protein, 470 aa, Artificial Sequence; identical to SEQ ID NO: 16632
  derived and/or modified protein sequence (wt) from neuraminidase__InfluenzaA__AHG96638

SEQ ID NO: 24373 - protein, 470 aa, Artificial Sequence; identical to SEQ ID NO: 16632
  derived and/or modified protein sequence (wt) from neuraminidase__InfluenzaA__AHG96650

SEQ ID NO: 24374 - protein, 470 aa, Artificial Sequence; identical to SEQ ID NO: 16632
  derived and/or modified protein sequence (wt) from neuraminidase__InfluenzaA__AHG96662

SEQ ID NO: 24375 - protein, 470 aa, Artificial Sequence; identical to SEQ ID NO: 16632
  derived and/or modified protein sequence (wt) from neuraminidase__InfluenzaA__AHG96674

SEQ ID NO: 24376 - protein, 470 aa, Artificial Sequence; identical to SEQ ID NO: 16632
  derived and/or modified protein sequence (wt) from neuraminidase__InfluenzaA__AHG96686

SEQ ID NO: 24377 - protein, 469 aa, Artificial Sequence; identical to SEQ ID NO: 16456
  derived and/or modified protein sequence (wt) from neuraminidase__InfluenzaA__AHG96698

SEQ ID NO: 24378 - protein, 469 aa, Artificial Sequence; identical to SEQ ID NO: 16456
  derived and/or modified protein sequence (wt) from neuraminidase__InfluenzaA__AHG96710

SEQ ID NO: 24379 - protein, 469 aa, Artificial Sequence; identical to SEQ ID NO: 16456
  derived and/or modified protein sequence (wt) from neuraminidase__InfluenzaA__AHG96722

SEQ ID NO: 24380 - protein, 469 aa, Artificial Sequence; identical to SEQ ID NO: 16456
  derived and/or modified protein sequence (wt) from neuraminidase__InfluenzaA__AHG96734

SEQ ID NO: 24381 - protein, 469 aa, Artificial Sequence; identical to SEQ ID NO: 16456
  derived and/or modified protein sequence (wt) from neuraminidase__InfluenzaA__AHG96746

SEQ ID NO: 24382 - protein, 469 aa, Artificial Sequence; identical to SEQ ID NO: 16456
  derived and/or modified protein sequence (wt) from neuraminidase__InfluenzaA__AHG96758

SEQ ID NO: 24383 - protein, 469 aa, Artificial Sequence; identical to SEQ ID NO: 16456
  derived and/or modified protein sequence (wt) from neuraminidase__InfluenzaA__AHG96770

SEQ ID NO: 24384 - protein, 469 aa, Artificial Sequence; identical to SEQ ID NO: 16456
  derived and/or modified protein sequence (wt) from neuraminidase__InfluenzaA__AHG96782

SEQ ID NO: 24385 - protein, 469 aa, Artificial Sequence; identical to SEQ ID NO: 16456
  derived and/or modified protein sequence (wt) from neuraminidase__InfluenzaA__AHG96794

SEQ ID NO: 24386 - protein, 469 aa, Artificial Sequence; identical to SEQ ID NO: 16456
  derived and/or modified protein sequence (wt) from neuraminidase__InfluenzaA__AHG96806

SEQ ID NO: 24387 - protein, 469 aa, Artificial Sequence; identical to SEQ ID NO: 16456
  derived and/or modified protein sequence (wt) from neuraminidase__InfluenzaA__AHG96818

SEQ ID NO: 24388 - protein, 469 aa, Artificial Sequence; identical to SEQ ID NO: 16456
  derived and/or modified protein sequence (wt) from neuraminidase__InfluenzaA__AHG96830

SEQ ID NO: 24389 - protein, 469 aa, Artificial Sequence; identical to SEQ ID NO: 16456
  derived and/or modified protein sequence (wt) from neuraminidase__InfluenzaA__AHG96842

SEQ ID NO: 24390 - protein, 469 aa, Artificial Sequence; identical to SEQ ID NO: 16456
  derived and/or modified protein sequence (wt) from neuraminidase__InfluenzaA__AHG96854

SEQ ID NO: 24391 - protein, 469 aa, Artificial Sequence; identical to SEQ ID NO: 16456
  derived and/or modified protein sequence (wt) from neuraminidase__InfluenzaA__AHG96866

SEQ ID NO: 24392 - protein, 469 aa, Artificial Sequence; identical to SEQ ID NO: 16456
  derived and/or modified protein sequence (wt) from neuraminidase__InfluenzaA__AHG96878

SEQ ID NO: 24393 - protein, 469 aa, Artificial Sequence; identical to SEQ ID NO: 16456
  derived and/or modified protein sequence (wt) from neuraminidase__InfluenzaA__AHG96890

SEQ ID NO: 24394 - protein, 469 aa, Artificial Sequence; identical to SEQ ID NO: 16456
  derived and/or modified protein sequence (wt) from neuraminidase__InfluenzaA__AHG96902

SEQ ID NO: 24395 - protein, 469 aa, Artificial Sequence; identical to SEQ ID NO: 16456
  derived and/or modified protein sequence (wt) from neuraminidase__InfluenzaA__AHG96914

SEQ ID NO: 24396 - protein, 469 aa, Artificial Sequence; identical to SEQ ID NO: 16456
  derived and/or modified protein sequence (wt) from neuraminidase__InfluenzaA__AHG96926

SEQ ID NO: 24397 - protein, 469 aa, Artificial Sequence; identical to SEQ ID NO: 16456
  derived and/or modified protein sequence (wt) from neuraminidase__InfluenzaA__AHG96938

SEQ ID NO: 24398 - protein, 469 aa, Artificial Sequence; identical to SEQ ID NO: 16456
  derived and/or modified protein sequence (wt) from neuraminidase__InfluenzaA__AHG96950

SEQ ID NO: 24399 - protein, 469 aa, Artificial Sequence; identical to SEQ ID NO: 16456
  derived and/or modified protein sequence (wt) from neuraminidase__InfluenzaA__AHG96962

SEQ ID NO: 24400 - protein, 469 aa, Artificial Sequence; identical to SEQ ID NO: 16456
  derived and/or modified protein sequence (wt) from neuraminidase__InfluenzaA__AHG96974

SEQ ID NO: 24401 - protein, 469 aa, Artificial Sequence; identical to SEQ ID NO: 16456
  derived and/or modified protein sequence (wt) from neuraminidase__InfluenzaA__AHG96986

SEQ ID NO: 24402 - protein, 469 aa, Artificial Sequence; identical to SEQ ID NO: 16456
  derived and/or modified protein sequence (wt) from neuraminidase__InfluenzaA__AHG96998

SEQ ID NO: 24403 - protein, 469 aa, Artificial Sequence; identical to SEQ ID NO: 16456
  derived and/or modified protein sequence (wt) from neuraminidase__InfluenzaA__AHG97010

SEQ ID NO: 24404 - protein, 469 aa, Artificial Sequence; identical to SEQ ID NO: 16456
  derived and/or modified protein sequence (wt) from neuraminidase__InfluenzaA__AHG97022

SEQ ID NO: 24405 - protein, 469 aa, Artificial Sequence; identical to SEQ ID NO: 16456
  derived and/or modified protein sequence (wt) from neuraminidase__InfluenzaA__AHG97034

SEQ ID NO: 24406 - protein, 469 aa, Artificial Sequence; identical to SEQ ID NO: 16456
  derived and/or modified protein sequence (wt) from neuraminidase__InfluenzaA__AHG97046

SEQ ID NO: 24407 - protein, 469 aa, Artificial Sequence
  derived and/or modified protein sequence (wt) from neuraminidase__InfluenzaA__AHH00872
MNPNQKIITIGSVSLTIATICFLMQIAILVTTVTLHFKQYECNPPPNNQVMLCEPTIIERNITEIVYLTNTTIEKEICPKLAEYRNWSKPQCNITGFAPFSKDNSIRLSAGGDIWVTREPYVSCDPDKCYQFALGQGTTLNNGHSNDTVHDRTPYRTLLMNELGVPFHLGTKQVCIAWSSSSCHDGKAWLHVCVTGDDENATASFIYNGRLVDSIGSWSKKILRTQESECVCINGTCTVIMTDGSASGKADTKILFIEEGKIVHTSPLSGSAQHVEECSCYPRYPGVRCVCRDNWKGSNRPIVDINVKDYSIVSSYVCSGLVGDTPRKNDSSSSSHCLDPNNEEGGHGVKGWAFDDGNDVWMGRTISEKSRSGYETFKVIEGWSKPNSKLQINRQVIIDRGNRSGYSGIFSVEGKSCINRCFYVELIRGRKQETEVLWTSNSIVVFCGTSGTYGTGSWPDGADLNLMPI

SEQ ID NO: 24408 - protein, 471 aa, Artificial Sequence
  derived and/or modified protein sequence (wt) from neuraminidase__InfluenzaA__AHI43497
MNPNQKLFALSGVAIALSILNLLIGISNVGLNISLHLKGKGPKQEENLTCTTINQNNTTVVENTYVNNTTIITKETDWNTPSYLLLNKSLCNVEGWVVIAKDNAIRFGESEQIIVTREPYVSCDPTGCKMYALHQGTTIRNKHSNGTIHDRTAFRGLISTPLGTPPTVSNSGFMCVGWSSTTCHDGIGRMTICIQGNNDNATATVYYNGRLTTTIKTWARNILRTQESECVCHNGTCAVVMTDGSASSQAYTKVMYFHKGLVIKEEALRGSARHIEECSCYGHSQRVTCVCRDNWQGANRPIIEIDMNTLEHTSRYVCTGILTDTSRPGDKSSGDCSNPITGSPGAQGVKGFGFLNGDNTWLGRTISPRSRSGFEMLKIPNAGTDPNSRIAERQEIVDNNNWSGYSGSFIDYWNNNSECYNPCFYVELIRGRPEEAKYVWWTSNSLIALCGSPFPVGSGSFPDGAQIQYFS

SEQ ID NO: 24409 - protein, 469 aa, Artificial Sequence
  derived and/or modified protein sequence (wt) from neuraminidase__InfluenzaA__AHJ57439
MNPNQKIITIGSVSLIISTICFFMQVAILLTTVTLHFKQYEFNSPPNNQVMLCEPTIIERNITEIVYLTNTTIEKEICPKPAEYRNWSKPQCDITGFAPFSKDNSIRLSAGGDIWVTREPYVSCDPDKCYQFALGQGTTLNNVHSNNTVRDRTPYRTLLMNELGVPFHLGTKQVCIAWSSSSCHDGKAWLHVCITGDDKNATASFIYNGRLVDSVVSWSKDILRTQESECVCINGTCTVVMTDGSASGKADTKILFIEEGKIVHTSTLSGSAQHVEECSCYPRYPGVRCVCRDNWKGSNRPIVDINIKDHSIVSSYVCSGLVGDTPRKNDSSSSSHCLDPNNEEGGHGVKGWAFDDGNDVWMGRTINETSRLGYETFKVIEGWSNPKSKLQINRQVIVDRGNRSGYSGIFSVEGKSCINRCFYVELIRGRKEETEVLWTSNSIVVFCGTSGTYGTGSWPDGADINLMPI

SEQ ID NO: 24410 - protein, 469 aa, Artificial Sequence
  derived and/or modified protein sequence (wt) from neuraminidase__InfluenzaA__AHJ57440
MNPNQKIITIGSVSLIISTICFFMQIAILITTVTLHFKQYEFNSPPNNQMMLCEPTIIERNITEIVYLTNTTIEKEICPKPAEYRNWSKPQCDITGFAPFSKDNSIRLSAGGDIWVTREPYVSCDPDKCYQFALGQGTTLNNGHSNNTVRDRTPYRTLLMNELGVPFHLGTKQVCIAWSSSSCHDGKAWLHVCITGDDKNATASFIYNGRLVDSVVSWSKEILRTQESECVCINGTCTVVMTDGSASGKADTKILFIEEGKIVHTSTLSGSAQHVEECSCYPRYPGVRCVCRDNWKGSNRPIVDINIKDHSIVSSYVCSGLVGDTPRKNDSSSSSHCLDPNNEEGGHGVKGWAFDDGNDVWMGRTINETSRLGYETFKVIEGWSNPKSKLQINRQVIVDRGDRSGYSGIFSVEGKSCINRCFYVELIRGRKEETEVLWTSNSIVVFCGTSGTYGTGSWPDGADINLMPI

SEQ ID NO: 24411 - protein, 469 aa, Artificial Sequence
  derived and/or modified protein sequence (wt) from neuraminidase__InfluenzaA__AHJ57441
MNPNQKIITIGSVSLIISTICFFMQIAILITTVTLHFKQYEFNSPPNNQVMLCEPTIIERNKTEIVYLTNTTIEKEICPKPAEYRNWSKPQCDITGFAPFSKDNSIRLSAGGDIWVTREPYVSCDPDKCYQFALGQGTTLNNVHSNNTVHDRTPYRTLLMNELGVPFHLGTKQVCIAWSSSSCHDGKAWLHVCITGDDKNATASFIYNGRLVDSVVSWSKEILRTQESECVCINGTCTVVMTDGSASGKADTKILFIEEGKIVHTSTLSGSAQHVEECSCYPRYPGVRCVCRDNWKGSNRPIVDINIKDHSIVSSYVCSGLVGDTPRKNDSSSSSHCLDPNNEEGGHGVKGWAFDDGNDVWMGRTINETSRLGYETFKVIEGWSNPKSKLQINRQVIVDRGNRSGYSGIFSVEGKSCINRCFYVELIRGRKEETEVLWTSNSIVVFCGTSGTYGTGSWPDGADINLMPI

SEQ ID NO: 24412 - protein, 470 aa, Artificial Sequence
  derived and/or modified protein sequence (wt) from neuraminidase__InfluenzaA__AHJ57654
MNPNQKITCISATGMTLSVVSLLIGIANLGLNIGLHYKVSDSTNINIPNMNETSPTTTIINNHPQNNFTNITNIIMNKNEEGNFLNLTKPLCEVNSWHILSKDNAIRIGENAHILVTREPYLSCDPQGCRMFALSQGTTLRGRHANGTIHDRSPFRALISWEMGQAPSPYNARVECIGWSSTSCHDGISRMSICISGPNNNASAVVWYGGRPVTEIPSWAGNILRTQESECVCHGGICPVVMTDGPANNRAETKIIYFKEGKVQKIEELKGNAQHIEECSCYGASGMIKCICRDNWKGANRPVITIDPEMMTHTSKYLCSKILTDTSRPNDPTNGNCDAPITGGSPDPGVKGFAFLDGENSWLGRTISKDSRSGYEMLKIPNAETDTQSGAISHQIIVNNQNWSGYSGAFIDYWANKECFNPCFYVELIRGRPKESSVLWTSNSIVALCGSRERLGSWSWHDGAEIIYFK

SEQ ID NO: 24413 - protein, 469 aa, Artificial Sequence
  derived and/or modified protein sequence (wt) from neuraminidase__InfluenzaA__AHJ57666
MNPNQKIITIGSVSLTIATVSFLMQIAILTTTVTLHFKHNECNMPPKNQVMSCEPIIIERNITEIVYLNNTTVEKEICPKVVEYRNWSKPQCKITGFAPFSKDNSIRLSAGGDIWVTREPYVSCGLGKCYQFALGQGTTLDNSHSNGTIHDRIPHRTLLMNELGVPFHLGTKQVCIAWSSSSCHDGRAWLHICITGDDRNATASFIYDGMLVDSIGSWSKNILRTQESECVCINGTCAVVMTDGSASGVADTRILFIREGKIVHISPLSGSAQHIEECSCYPRYPDVRCVCRDNWKGSNRPVIDINMADYSIDSNYVCSGLVGDTPRNDDNSSSSNCRDPNNERGNPGVKGWAFDDGNDVWMGRTINRDSRSGYETFRVIGGWTTANSKSQINRQVIVDNNNWSGYSGVFSVEGKSCINRCFYVELIKGRPQEPRVWWTSNSIVVFCGTSGTYGTGSWPDGANINFMPI

SEQ ID NO: 24414 - protein, 470 aa, Artificial Sequence
  derived and/or modified protein sequence (wt) from neuraminidase__InfluenzaA__AHJ57677
MNPNQKITCISATGMTLSVVSMLIGIANLGLNIGLHYKVSDSTNINIPNMNETSPTTTVINNHPQNNFTNITNIIVNKNEEENFLNLTKPLCEVNSWHILSKDNAIRIGENAHILVTREPYLSCDPQGCRMFALSQGTTLRGQHANGTIHDRSPFRALISWEMGQAPSPYNARVECIGWSSTSCHDGISRMSICISGPNNNASAVVWYGGRPVTEIPSWAGNILRTQESECVCHGGICPVVMTDGPANNRAETKIIYFKEGKIQKVEELKGNAQHIEECSCYGASGMIKCICRDNWKGANRPVITIDPEMMTHTSKYLCSKILTDTSRPNDPTNGNCDAPITGGSPDPGVKGFAFLDGENSWLGRTISKDSRSGYEMLKVPNAETDTQSGAISHQMIVNNQNWSGYSGAFIDYWAKKECFNPCFYVELIRGRPKESSVLWTSNSIVALCGSRERLGSWSWHDGAEIIYFK

SEQ ID NO: 24415 - protein, 470 aa, Artificial Sequence
  derived and/or modified protein sequence (wt) from neuraminidase__InfluenzaA__AHJ57689
MNPNQKITCISATGMTLSVVSMLIGIANLGLNIGLHYKVSDSTNINIPKMNETSPTTTIINNHPQNNFTNITNIIVNKNEEENFLNLTKPLCEVNSWHILSKDNAIRIGENAHILVTREPYLSCDPQGCRMFALSQGTTLRGQHANGTIHDRSPFRALISWEMGQAPSPYNARVECIGWSSTSCHDGISRMSICISGPNNNASAVVWYGGRPVTEIPSWAGNILRTQESECVCHGGICPVVMTDGPANNRAETKIIYFKEGKIQKIEELKGNAQHIEECSCYGASGMIKCICRDNWKGANRPVITIDPEMMTHTSKYLCSKILTDTSRPNDPTNGNCDAPITGGSPDPGVKGFAFLDGENSWLGRTISKDSRSGYEMLKVPNAETDTQSGAISHQIIVNNQNWSGYSGAFIDYWANKECFNPCFYVELIRGRPKESSVLWTSNSIVALCGSRERLGSWSWHDGAEIIYFK

SEQ ID NO: 24416 - protein, 470 aa, Artificial Sequence
  derived and/or modified protein sequence (wt) from neuraminidase__InfluenzaA__AHJ57700
MNPNQKITCISATGMTLSVVSLLIGIANLGLNIGLHYKVSDSTNINIPNMNETSPTTTIINNHPQNNFTNITNIIMNKNEEGNFLNLTKPLCEVNSWHILSKDNAIRIGENAHILVTREPYLSCDPQGCRMFALSQGTTLRGRHANGTIHDRSPFRALISWEMGQAPSPYNARVECIGWSSTSCHDGISRMSICISGPNNNASAVVWYGGRPVTEIPSWAGNILRTQESECVCHGGICPVVMTDGPANNRAETKIIYFKEGKVQKIEELKGNAQHIEECSCYGASGMIKCICRDNWKGANRPVITIDPEMMTHTSKYLCSKILTDTSRPNDPTNGNCDAPITGGSPDPGVKGFAFLDGENSWLGRTISKDSRSGYEMLKVPNAETDTQSGAISHQIIVNNQNWSGYSGAFIDYWANKECFNPCFYVELIRGRPKESSVLWTSNSIVALCGSRERLGSWSWHDGAEIIYFK

SEQ ID NO: 24417 - protein, 469 aa, Artificial Sequence
  derived and/or modified protein sequence (wt) from neuraminidase__InfluenzaA__AHJ57710
MNPNQKIITIGSVSLTIATVSFLMQIAILTTTVTLHFKHNECNMPPKNQVMSCEPIIIERNITEIVYLNNTTVEKEICPKVVEYRNWSKPQCKITGFAPFSKDNSIRLSAGGDIWVTREPYVSCGLGKCYQFALGQGTTLDNSHSNGTIHDRIPHRTLLMNELGVPFHLGTKQVCIAWSSSSCHDGRAWLHICITGDDRNATASFIYDGMLVDSISSWSKNILRTQESECVCINGTCAVVMTDGSASGVADTRILFIREGKIVHISPLSGSAQHIEECSCYPRYPDVRCVCRDNWKGSNRPVININMADYSIDSNYVCSGLVGDTPRNDDNSSSSNCRDPNNERGNPGVKGWAFDDGNDVWMGRTINRDSRSGYETFRVIGGWTTANSKSQINRQVIVDNNNWSGYSGVFSVEGKSCINRCFYVELIRGRPQEPRVWWTSNSIVVFCGTSGTYGTGSWPDGANINFMPI

SEQ ID NO: 24418 - protein, 469 aa, Artificial Sequence
  derived and/or modified protein sequence (wt) from neuraminidase__InfluenzaA__AHJ57734
MNPNQKIITIGSVSLTIATVSFLMQIAILTTTVTLHFKHNECNMPPKNQVMSCEPIIIERNITEIVYLNNTTVEKEICPKVAEYRNWSKPQCKITGFAPFSKDNSIRLSAGGDIWVTREPYVSCGLGKCYQFALGQGTTLDNSHSNGTIHDRIPHRTLLMNELGVPFHLGTKQVCIAWSSSSCHDGRAWLHICITGDDRNATASFIYDGMLVDSIGSWSKNILRTQESECVCINGTCAVVMTDGSASGVADTRILFIREGKIVHISPLSGSAQHIEECSCYPRYPDVRCVCRDNWKGSNRPVININMADYSIDSNYVCSGLVGDTPRNDDNSSSSNCRDPNNERGNPGVKGWAFDDGNDVWMGRTINRDSRSGYETFRVIGGWTTANSKSQINRQVIVDNNNWSGYSGVFSVEGKSCINRCFYVELIRGRPQEPRVWWTSNSIVVFCGTSGTYGTGSWPDGANINFMPI

SEQ ID NO: 24419 - protein, 459 aa, Artificial Sequence
  derived and/or modified protein sequence (wt) from neuraminidase__InfluenzaA__AHJ57746
MNPNQKIITIGSVSITIAAVCFLMQIAILATTVTLHFKQNECNIPSKNHVIPCEPIIIERNITEVEIRPKVAEYRDWSKPQCQITGFAPFSKDNSIRLSAGGNIWVTREPYVSCGPDKCYQFALGQGTTLGNGHSNGTIHDKIPHRTLLMNELGVPFHLGTKQVCIAWSSSSCHDGRAWLHVCVTGDDRNATASFIYDGMLVDSIASWSQNILRTQESECVCINGTCTVVMTDGSASGVADTRILFIREGKIVHISPLSGSAQHIEECSCYPRHSDVRCVCRDNWKGSNRPVVDINMTDYSIDSSYVCSGLVGDTPRNDDSSSSSNCRDPNNERGNPGVKGWAFDDGDDVWMGRTISRDSRSGYETFRVIGGWTTANSKSQINRQVIVDNNNWSGYSGVFSVEGKSCINRCFYVELIRGRPQETRVWWTSNSIVVFCGTSGTYGTGSWPDGANINFMPI

SEQ ID NO: 24420 - protein, 469 aa, Artificial Sequence
  derived and/or modified protein sequence (wt) from neuraminidase__InfluenzaA__AHJ57758
MNPNQKIITVGSVSLAIATICLLMQIAILATTVTLHFKQNECNIPSKNQVMPCEPIIIERNITEVVYLNNTIIEKEICPKVVEYRNWSKPQCQITGFAPFSKDNSIRLSAGGDIWVTREPYVSCSPSKCYQFALGQGTTLDNSHSNGTIHDRIPHRTLLMNELGVPFHLGTKQVCIAWSSSSCHDGRAWLHVCITGDDRNATASFIYNGMLVDSISSWSRNILRTQESECVCINGTCTVIMTDGSASGVADTRILFIREGNIVHVSPLSGSAQHIEECSCYPRYPDVRCVCRDNWKGSNRPVVDINMADYSIDSHYVCSGLVGDTPRNDDSSSSSNCKDPNNERGNPGVKGWAFDDGNDVWMGRTISRDSRSGYETFRVIGGWTTANSKSQINRQVIVDNNNWSGYSGVFSVEGKSCINRCFYVELIRGRPQETRVWWTSNSIVVFCGTSGTYGTGSWPDGANINFMPI

SEQ ID NO: 24421 - protein, 466 aa, Artificial Sequence
  derived and/or modified protein sequence (wt) from neuraminidase__InfluenzaA__AHJ57770
MNPNQKIIAIGSVSLTIAIICFLMQIAILTTTMTLHFKQNECSNPSNNQVVPCEPIIIERNTVHLNSTTIEKEICPKVVEYKNWSKPQCQITGFAPFSKDNSIRLSAGGDIWVTREPYVSCSLGKCYQFALGQGTTLKNKHSNGTTHDRIPHRTLLMNELGVPFHLGTKQVCIAWSSSSCYDGKAWLHICVTGDDKNATASIIYDGMLVDSIGSWSKNILRTQESECVCINGTCAVVMTDGSASGKADTRILFIREGKIINISPLSGSAQHVEECSCYPRYPEVRCVCRDNWKGSNRPVLYINMADYSVESSYVCSGLVGDTPRNDDSSSSSNCRDPNNERGAPGVKGWAFDDGNDVWMGRTIKNDSRSGYETFRVVNGWTTANSKSQINRQVIVDSENWSGYSGIFSVEGKNCINRCFYVELIRGRPQEPRVWWTSNSIIVFCGTSGTYGTGSWPDGANINFLPI

SEQ ID NO: 24422 - protein, 469 aa, Artificial Sequence
  derived and/or modified protein sequence (wt) from neuraminidase__InfluenzaA__AHJ57782
MNPNQKIIIIGSVSLTIATVCFLMQIAILATTVTLHFKQNECNIPSKNQVVPCEPIIIERNITEVVYLNNTTIEKEICPAVVEYRNWSKPQCQIKGFAPFSKDNSIRLSAGGDMWVTREPYVSCSPSKCYQFALGQGTTLDNNHSNGTIHDRIPHRTLLMNELGVPFHLGTKQVCIAWSSSSCHDGKAWLHVCVTGDDRNATASFIYDGMLVDSIGSWSQNILRTQESECVCINGTCTVVMTDGSASGIADTRILFVREGKIVHISPLSGSAQHIEECSCYPRYPDVRCVCRDNWKGSNRPIVDINMADYSIGSSYVCSGLVGDTPRNDDRFSSSNCRDPNSERGNPGVKGWAFDDGDDVWMGRTISRDSRSGYETFRVIGGWTTANSKSQINRQVIVDNNNWSGYSGVFSVEGKSCINRCFYVELIRGRPQETRVWWTSNSIVVFCGTSGTYGTGSWPDGANINFMPI

SEQ ID NO: 24423 - protein, 469 aa, Artificial Sequence
  derived and/or modified protein sequence (wt) from neuraminidase__InfluenzaA__AHJ57794
MNPNQKIITVGSVSLAIATICFLMQIAILATTVTLHFKQNECNIPSKNQVMPCEPIIIERNITEVVYLNNTIIEKEICPKVVEYRNWSKPQCQITGFAPFSKDNSIRLSAGGDIWVTREPYVSCSPSKCYQFALGQGTTLDNSHSNGTIHDRIPHRTLLMNELGVPFHLGTKQVCIAWSSSSCHDGRAWLHVCITGDDRNATASFIYNGMLVDSISSWSRNILRTQESECVCINGTCTVIMTDGSASGVADTRILFIREGNIVHVSPLSGSAQHIEECSCYPRYPDVRCVCRDNWKGSNRPVVDINMADYSIDSHYVCSGLVGDTPRNDDSSSSSNCKDPNNERGNPGVKGWASDDGHDVWMGRTIGRDSRSGYETFRVIGGWTTANSKSQINRQVIVDNNNWSGYSGVFSVEGKSCINRCFYVELIRGRPQETRVWWTSNSIVVFCGTSGTYGTGSWPDGANINFMPI

SEQ ID NO: 24424 - protein, 470 aa, Artificial Sequence
  derived and/or modified protein sequence (wt) from neuraminidase__InfluenzaA__AHJ57806
MNPNQKITCISATGMTLSVVSLLTGIANLGLNIGLHYKVSDSTNISIPNMNEASPTTTIINNHPQNNFTNITNIIMNKNEEGNFLNLTKPLCEVNSWHILSKDNAIRIGENAHILVTREPYLSCDPQGCRMFALSQGTTLRGRHANGTIHDRSPFRALISWEMGQAPSPYNARVECIGWSSTSCHDGISRMSICISGPNNNASAVVWYGGRPVTEIPSWAGNILRTQESECVCHGGICPVVMTDGPANNRAETKIIYFKEGKIQKIEELKGNAQHIEECSCYGASGMIKCICRDNWKGANRPVITIDPEMMTHTSKYLCSKILTDTSRPNDPTNGNCDAPITGGSPDPGVKGFAFLDGKNSWLGRTISKDSRSGYEMLKVPNAETDTQSGAISHQIIVNNQNWSGYSGAFIDYWANKECFNPCFYVELIRGRPKESSVLWTSNSIVALCGSRERLGSWSWHDGAEIIYFK

SEQ ID NO: 24425 - protein, 459 aa, Artificial Sequence
  derived and/or modified protein sequence (wt) from neuraminidase__InfluenzaA__AHJ57818
MNPNQKITCISATGVTLSVVSLLIGIANLGLNIGLHYKVSDSPTINIPNMNETNPITTNITNIIVNKNEEGTFLNLTKPLCEVNSWHILSKDNAIRIGEDAHILVTREPYLSCDPQGCRMFALSQGTTLRGRHANGTIHDRSPFRALISWEMGQAPSPYNTRVECIGWSSTSCHDGISRMSICISGPNNNASAVVWYRGRPVTEIPSWAGNILRTQESECVCHKGICPVVMTDGPANNKAATKIIYFKEGKIQKIEELQGNAQHIEECSCYGAAGMIKCVCRDNWKGANRPIITIDPEMMTHTSKYLCSKILTDTSRPNDPTDGNCDAPITGGSPDPGVKGFAFLEGENSWLGRTISKDSRSGYEMLKVPNAETDTQSGAISHQMIVNNQNWSGYSGAFIDYWANKECFNPCFYVELIRGRPKESSVLWTSNSIVALCGSRERLGSWSWHDGAEIIYFK

SEQ ID NO: 24426 - protein, 469 aa, Artificial Sequence
  derived and/or modified protein sequence (wt) from neuraminidase__InfluenzaA__AHJ57830
MNPNQKIITIGSVSLTIATVSFLMQIAILTTTVTLHFKHNECNMPPKNQVMSCEPIIIERNITEIVYLNNTTIEKEICPKVVEYRNWSKPQCKITGFAPFSKDNSIRLSAGGDIWVTREPYVSCGLGKCYQFALGQGTTLDNSHSNGTIHDRIPHRTLLMNELGVPFHLGTKQVCIAWSSSSCHDGRAWLHICITGDDRNATASFIYDGMLVDSIGSWSKNILRTQESECVCINGTCAVVMTDGSASGVADTRILFIREGKIVHISPLSGSAQHIEECSCYPRYPDVRCVCRDNWKGSNRPVIDINMADYSIDSNYVCSGLVGDTPRNDDNSSSSNCRDPNNERGNPGVKGWAFDDGNDVWMGRTINRDSRSGYETFRVIGGWTTANSKSQINRQVIVDNNNWSGYSGVFSVEGKSCINRCFYVELIRGRPQEPRVWWTSNSIVVFCGTSGTYGTGSWPDGANINFMPI

SEQ ID NO: 24427 - protein, 470 aa, Artificial Sequence
  derived and/or modified protein sequence (wt) from neuraminidase__InfluenzaA__AHJ57842
MNPNQKITCISATGMTLSVVSMLIGIANLGLNIGLHYKVSDSTNINIPKMNETNPTTTIINNHPQNNFTNITNIIVNKNEEENFLNLTKPLCEVNSWHILSKDNAIRIGENAHILVTREPYLSCDPQGCRMFALSQGTTIRGQHANGTIHDRSPFRALISWEMGQAPSPYNARVECIGWSSTSCHDGISRMSICISGPNNNASAVVWYGGRPVTEIPSWAGNILRTQESECVCHGGICPVVMTDGPANNRAETKIIYFKEGKIQKIEELKGNAQHIEECSCYGASGMIKCICRDNWKGANRPVITIDPEMMTHTSKYLCSKILTDTSRPNDPTNGNCDAPITGGSSDPGVKGFAFLDGENSWLGRTISKDSRSGYEMLKVPNAETDTQSGAISHQIIVNNQNWSGYSGAFIDYWANKECFNPCFYVELIRGRPKESSVLWTSNSIVALCGSRERLGSWSWHDGAEIIYFK

SEQ ID NO: 24428 - protein, 470 aa, Artificial Sequence
  derived and/or modified protein sequence (wt) from neuraminidase__InfluenzaA__AHJ57853
MNPNQKITCISATGMTLSVVSLLIGIANLGLNVGLHYKVNDPTNINIPNMNETSPTTTIINNHPQNNFTNITNIIVNKNEEENFLNLTKPLCEVNSWHILSKDNAIRIGENAHILVTREPYLSCDPQGCRMFALSQGTTLRGQHANGTIHDRSPFRALISWEMGQAPSPYNARVECIGWSSTSCHDGISRMSICISGPNNNASAVVWYGGRPVTEIPSWAGNILRTQESECVCHGGICPVVMTDGPANNRAETKIIYFKEGKIQKIEELKGNAQHIEECSCYGASGMIKCICRDNWKGANRPVITIDPEMMTHTSKYLCSKILTDTSRPNDPTNGNCDAPITGGSPDPGVKGFAFLDGENSWLGRTISKDSRSGYEMLKVPNAETDTQSGAISHQMIVNNQNWSGYSGAFIDYWANKECFNPCFYVELIRGRPKESSVLWTSNSIVALCGSRERLGSWSWHDGAEIIYFK

SEQ ID NO: 24429 - protein, 470 aa, Artificial Sequence
  derived and/or modified protein sequence (wt) from neuraminidase__InfluenzaA__AHJ57865
MNPNQKITCISATGMTLSVVSMLIGIANLGLNIGLHYKVSDSTNINIPKMNETNPTTTIINNHPQNNFTNITNIIVNKNEEENFLNLTKPLCEVNSWHILSKDNAIRIGENAHILVTREPYLSCDPQGCRMFALSQGTTLRGRHANGTIHDRSPFRALISWEMGQAPSPYNARVECIGWSSTSCHDGISRMSICISGPNNNASAVVWYGGRPVTEIPSWAGNILRTQESECVCHGGICPVVMTDGPANNRAETKIIYFKEGKIQKIEELKGNAQHIEECSCYGASGMIKCICRDNWKGANRPVITIDPEMMTHTSKYLCSKILTDTSRPNDPTNGNCDAPITGGSPDPGVKGFAFLDGENSWLGRTISKDSRSGYEMLKVPNAETDTQSGAISHQMIVNNQNWSGYSGAFIDYWANKECFNPCFYVELIRGRPKESSVLWTSNSIVALCGSRERLGSWSWHDGAEIIYFK

SEQ ID NO: 24430 - protein, 470 aa, Artificial Sequence
  derived and/or modified protein sequence (wt) from neuraminidase__InfluenzaA__AHJ57876
MNPNQKITCISATGMTLSVVSLLIGIANLGLNIGLHYKVSDSTNINIPNMNETSPTTTIINNHPQNNFTNITNIIMNKNEEGNFLNLTKPLCEVNSWHILSKDNAIRIGENAHILVTREPYLSCDPQGCRMFALSQGTTLRGRHANGTIHDRSPFRALISWEMGQAPSPYNARVECIGWSSTSCHDGKSRMSICISGPNNNASAVVWYGGRPITEIPSWAGNILRTQESECVCHGGICPVVMTDGPANNRAETKIIYFKEGKVQKIEELKGNAQHIEECSCYGASGMIKCICRDNWKGANRPVITIDPEMMTHTSKYLCSKILTDTSRPNDPTNGNCDAPITGGSPDPGVKGFAFLDGENSWLGRTISKDSRSGYEMLKVPNAETDTQSGAISHQIIVNNQNWSGYSGAFIDYWANKECFNPCFYVELIRGRPKESSVLWTSNSIVALCGSRERLGSWSWHDGAEIIYFK

SEQ ID NO: 24431 - protein, 470 aa, Artificial Sequence
  derived and/or modified protein sequence (wt) from neuraminidase__InfluenzaA__AHJ57888
MNPNQKITCISATGMTLSVVSMLIGIANLGLNIGLHYKVSDSTNINIPNMNETSPTTTITNNHPQNNFTNITNIIVSKNEEENFLNLTKPLCEVNSWHILSKDNAIRIGENAHILVTREPYLSCDPQGCRMFALSQGTTLRGQHANGTIHDRSPFRALISWEMGQAPSPYNARVECIGWSSTSCHDGISRMSICISGPNNNASAVVWYGGRPVTEIPSWAGNILRTQESECVCHGGICPVVMTDGPANNRAETKIIYFKEGKIQKIEELKGNAQHIEECSCYGASGMIKCICRDNWKGANRPVITIDPEMMTHTSKYLCSKILTDTSRPNDPTNGNCDAPITGGSPDPGVKGFAFLDGENSWLGRTISKDSRSGYEMLKVPNAETDTQSGAISHQMIVNNQNWSGYSGAFIDYWANKECFNPCFYVELIRGRPKESSVLWTSNSIVALCGSRERLGSWSWHDGAEIIYFK

SEQ ID NO: 24432 - protein, 470 aa, Artificial Sequence
  derived and/or modified protein sequence (wt) from neuraminidase__InfluenzaA__AHJ57900
MNPNQKITCISATGMTLSVVSLLIGIANLGLNIGLHYKVSDSTNINIPNMNETSPTATIINNHPQNNFTNITNIIVNKNEEENFFNLAKPLCEVNSWHILSKDNAIRIGENAHILVTREPYLSCDPQGCRMFALSQGTTLRGQHANGTIHDRSPFRALISWEMGQAPSPYNARVECIGWSSTSCHDGISRMSICISGPNNNASAVVWYGGRPVTEIPSWAGNILRTQESECVCHGGICPVVMTDGPANNRAETKIIYFKEGKIQKIEDLKGNAQHIEECSCYGASGMIKCICRDNWKGANRPVITIDPEMMTHTSKYLCSKILTDTSRPNDPTNGNCDAPITGGSPDPGVKGFAFLDGENSWLGRTISKDSRSGYEMLKVPNAETDTQSGAISHQMIVNNQNWSGYSGAFIDYWANKECFNPCFYVELIRGRPKESSVLWTSNSIVALCGSRERLGSWSWHDGAEIIYFK

SEQ ID NO: 24433 - protein, 470 aa, Artificial Sequence
  derived and/or modified protein sequence (wt) from neuraminidase__InfluenzaA__AHJ57911
MNPNQKITCISATGVTLSVVSLLIGIANLGLNIGLHYKVSDSSNINIPNMNETNPTTTIINNHTQNNFKNITNIIVNKNEEGIFLNLTKPLCEVNSWHILSKDNAIRIGEDAHILVTREPYLSCDPQGCRMFALSQGTTLRGRHANGTIHDRSPFRALISWEMGQAPSPYNARVECIGWSSTSCHDGISRMSICISGPNNNASAVVWYRGRPVTEIPSWAGNILRTQESECVCHKGICPVVMTDGPANNRAATKIIYFKEGKIQKIEELKGNAQHIEECSCYGAAGMIKCICRDNWRGANRPVITIDPEMMTHTSKYLCSKILTDTSRPNDPTNGNCDAPITGGSPDPGVKGFAFLDGENSWLGRTISKDSRSGYEMLKVPNAETDTQSGSTSYQIIVNNQNWSGYSGAFIDYWANKECFNPCFYVELIRGRPKESSVLWTSNSIVALCGSRERLGSWSWHDGAEIIYFK

SEQ ID NO: 24434 - protein, 469 aa, Artificial Sequence
  derived and/or modified protein sequence (wt) from neuraminidase__InfluenzaA__AHJ57923
MNPNQKIITVGSVSLAIATICFLMQIAILATTVTLHFKQNECNIPSKNQVMPCEPIIIERNITEVVYLNNTIIEKEICPKVVEYRNWSKPQCQITGFAPFSKDNSIRLSAGGDIWVTREPYVSCSPSKCYQFALGQGTTLDNSHSNGTIHDRIPHRTLLMNELGVPFHLGTKQVCIAWSSSSCHDGRAWLHVCITGDDRNATASFIYNGMLVDSISSWSRNILRTQESECVCINGTCTVIMTDGSASGVADTRILFIREGKIVHVSPLSGSAQHIEECSCYPRYPDVRCVCRDNWKGSNRPVVDINMADYSIDSHYVCSGLVGDTPRNDDSSSSSNCKDPNNERGNPGVKGWAFDDGNDVWMGRTISRDSRSGYETFRVIGGWTTANSKSQINRQVIVDNNNWSGYSGVFSVEGKSCINRCFYVELIRGRPQETRVWWTSNSIVVFCGTSGTYGTGSWPDGANINFMPI

SEQ ID NO: 24435 - protein, 459 aa, Artificial Sequence
  derived and/or modified protein sequence (wt) from neuraminidase__InfluenzaA__AHJ57935
MNPNQKITCISATGVTLSVVSLLIGIANLGLNIGLHYKVSDSPTINIPNMNETNPTTTNITNIIVNKNEEGTFLNLTKPLCEVNSWHILSKDNAIRIGEDAHILVTREPYLSCDPQGCRMFALSQGTTLRGRHANGTIHDRSPFRALISWEMGQAPSPYNTRVECIGWSSTSCHDGISRMSICISGPNNNASAVVWYRGRPVTEIPSWAGNILRTQESECVCHKGICPVVMTDGPANNKAATKIIYFKEGKIQKIEELQGNAQHIEECSCYGAAGMIKCVCRDNWKGANRPIITIDPEMMTHTSKYLCSKILTDTSRPNDPTNGNCDAPITGGSPDPGVKGFAFLDGENSWLGRTISKDSRSGYEMLKVPNAQTDTQSGPTSYQLIVNNQNWSGYSGAFIDYWANKECFNPCFYVELIRGRPKESNVLWTSNSMVALCGSRERLGSWSWHDDAEIIYFK

SEQ ID NO: 24436 - protein, 469 aa, Artificial Sequence
  derived and/or modified protein sequence (wt) from neuraminidase__InfluenzaA__AHJ57946
MNPNQKIITIGSVSLTIATVSFLMQIAILTTTVTLHFKHNECNMPPKNQVMSCEPIIIERNITEIVYLNNTTVEKEICPKVVEYRNWSKPQCKITGFAPFSKDNSIRLSAGGDIWVTREPYVSCGLGKCYQFALGQGTTLDNSHSNGTIHDRIPHRTLLMNELGVPFHLGTKQVCIAWSSSSCHDGRAWLHICITGDDRNATASFIYDGMLVDSIGSWSKNILRTQESECVCINGTCAVVMTDGSASGVADTRILFIREGKIVHISPLSGSAQHIEECSCYPRYPDVRCVCRDNWKGSNRPVIDINMADYSIDSHYVCSGLVGDTPRNDDNSSSSNCRDPNNERGNPGVKGWAFDDGNDVWMGRTINRDSRSGYETFRVIGGWTTANSKSQINRQVIVDNNNWSGYSGVFSVEGKSCINRCFYVELIRGRPQEPRVWWTSNSIVVFCGTSGTYGTGSWPDGANINFMPI

SEQ ID NO: 24437 - protein, 469 aa, Artificial Sequence
  derived and/or modified protein sequence (wt) from neuraminidase__InfluenzaA__AHJ57957
MNPNQKIITIGSVSLTIATVSFLMQIAILTTTVTLHFKQNECNMPPKNQVMSCEPIIIERNITEIVYLNNTTVEKEICPKVVEYRNWSKPQCKITGFAPFSKDNSIRLSAGGDIWVTREPYVSCGLGKCYQFALGQGTTLDNSHSNGTIHDRIPHRTLLMNELGVPFHLGTKQVCIAWSSSSCHDGRAWLHICITGDDRNATASFIYDGMLVDSIGSWSKNILRTQESECVCINGTCAVVMTDGSASGVADTRILFIREGKIVHISPLSGSAQHIEECSCYPRYPDVRCVCRDNWKGSNRPVIDINMADYSIDSNYVCSGLVGDTPRNDDNSSSSNCRDPNNERGNPGVKGWAFDYGNDVWMGRTINRDSRSGYETFRVIGGWTTANSKSQINRQVIVDNNNWSGYSGVFSVEGKSCINRCFYVELIRGRPQEPRVWWTSNSIVVFCGTSGTYGTGSWPDGANINFMPI

SEQ ID NO: 24438 - protein, 469 aa, Artificial Sequence
  derived and/or modified protein sequence (wt) from neuraminidase__InfluenzaA__AHJ57968
MNPNQKIITVGSVSLAIATICLLMQIAILATTVTLHFKQNECNIPSKNQVMPCEPIIIERNITEVVYLNNTIIEKEICPKVVEYRNWSKPQCQITGFAPFSKDNSIRLSAGGDIWVTREPYVSCSPSKCYQFALGQGTTLDNSHSNGTIHDRIPHRTLLMNELGVPFHLGTKQVCIAWSSSSCHDGRAWLHVCITGDDRNATASFIYNGMLVDSISSWSRNILRTQESECVCINGTCTVIMTDGSASGVADTRILFIREGKIVHISPLSGSAQHIEECSCYPRYPDVRCVCRDNWKGSNRPVIDINMADYSIDSNYVCSGLVGDTPRNDDNSSSSNCRDPNNERGNPGVKGWAFDDGNDVWMGRTINRDSRSGYETFRVIGGWTTANSKSQINRQVIVDNNNWSGYSGVFSVEGKSCINRCFYVELIRGRPQETRVWWTSNSIVVFCGTSCTYGTGSWPDGANINFMPI

SEQ ID NO: 24439 - protein, 470 aa, Artificial Sequence
  derived and/or modified protein sequence (wt) from neuraminidase__InfluenzaA__AHJ57980
MNPNQKNTCISAIGMTLSVVSLLIGVADLGLNIGLHYKVSDSSNINIPNMNETNPTTTIINNNPQNNFTNITNIIVNKNEEEKFLNLTKPLCEVNSWHILSKDNAIRIGEDAHILVTREPYLSCDPQGCRMFALSQGTTLRGRHANGTIHDRSPFRALISWEMGQAPSPYNARVECIGWSSTSCHDGISRMSICISGPNNNASAVVWYGGRPVTEIPSWAGNILRTQESECVCHKGICPVVMTDGPANNRAATKIIYFKEGKIQKIEELKGNAQHIEECSCYGAAGMIKCICRDNWKGANRPVITIDPEMMTHTSKYLCSKILTDTSRPNDPTSGNCDAPITGGSPDPGVKGFAFLDGENSWLGRTISKDSRSGYEMLKVPNAETDTQSGPISYQTIVNNQNWSGYSGAFIDYWANKECFNPCFYVELIRGRPKESSVLWTSNSIVALCGSRERLGSWSWHDGAEIIYFK

SEQ ID NO: 24440 - protein, 469 aa, Artificial Sequence
  derived and/or modified protein sequence (wt) from neuraminidase__InfluenzaA__AHJ57992
MNPNQKIITIGSVSLTIATVSFLMQIAILTTTVTLHFKHNECNMPPKNQVMSCEPIIIERNITEIVYLNNTTVEKEICPKVVEYRNWSKPQCKITGFAPFSKDNSIRLSAGGDIWVTREPYVSCGLGKCYQFALGQGTTLDNSHSNGTIHDRIPHRTLLMNELGVPFHLGTKQVCIAWSSSSCHDGRAWLHICITGDDRNATASFIYDGMLVDSIGSWSKNILRTQESECVCINGTCAVVMTDGSASGVADTRILFIREGKIVHISPLSGSAQHIEECSCYPRYPDVRCVCRDNWKGSNRPVININMADYSIDSNYVCSGLVGDTPRNDDNSSSSNCRDPNNERGNPGVKGWAFDDGNDVWMGRTINRDSRSGYETFRVIGGWTTANSKSQINRQVIVDNNNWSGYSGVFSVEGKSCINRCFYVELIRGRPQEPRVWWTSNSIVVFCGTSGTYGTGSWPDGANINFMPI

SEQ ID NO: 24441 - protein, 470 aa, Artificial Sequence
  derived and/or modified protein sequence (wt) from neuraminidase__InfluenzaA__AHJ58004
MNPNQKITCISATGVTLSVVSLLIGIANLGLNIGLHYKVSDSSNINIPNMNETNPTTTIINNHTQNNFKNITNIIVNKNEEGTFLNLTKPLCEVNSWHILSKDNAIRIGEDAHILVTREPYLSCDPQGCRMFALSQGTTLRGRHANGTIHDRSPFRALISWEMGQAPSPYNARVECIGWSSTSCHDGISRMSICISGPNNNASAVVWYRGRPVTEIPSWAGNILRTQESECVCHKGICPVVMTDGPANNRAATKIIYFKEGKIQKIEELKGNAQHIEECSCYGAAGMIKCICRDNWRGANRPVITIDPEMMTHTSKYLCSKILTDTSRPNDPTNGNCDEPITGGSPDPGVKGFAFLDGENSWLGRTISKDSRSGYEMLKVPNAETDTQSGPTSYQIIVNNQNWSGYSGAFIDYWANKECFNPCFYVELIRGRPKESSVLWTSNSIVALCGSRERLGSWSWHDGAEIIYFK

SEQ ID NO: 24442 - protein, 470 aa, Artificial Sequence
  derived and/or modified protein sequence (wt) from neuraminidase__InfluenzaA__AHJ58016
MNPNQKITCISATGMTLSVVSMLIGIANLGLNIGLHYKVSDSTNINIPKMNETNPTTTIINNHPQNNFTNITNIIVNKNEEENFLNLTKPLCEVNSWHILSKDNAIRIGENAHILVTREPYLSCDPQGCRMFALSQGTTLRGRHANGTIHDRSPFRALISWEMGQAPSPYNARVECIGWSSTSCHDGISRMSICISGPNNNASAVVWYGGRPVTEIPSWAGNILRTQESECVCHGGICPVVMTDGPANNRAETKIIYFKEGKIQKIEELKGNAQHIEECSCYGASGMIKCICRDNWKGANRPVITIDPEMMTHTSKYLCSKILTDTSRPNDPTNGNCDAPITGGSPDPGVKGFAFLDGKNSWLGRTISKDSRSGYEMLKVPNAETDTQSGAISHQIIVNNQNWSGYSGAFIDYWANKECFNPCFYVELIRGRPKESSVLWTSNSIVALCGSRERLGSWSWHDGAEIIYLK

SEQ ID NO: 24443 - protein, 470 aa, Artificial Sequence
  derived and/or modified protein sequence (wt) from neuraminidase__InfluenzaA__AHJ58028
MNPNQKITCISATGMTLSVVSMLIGIANLGLNIGLHYKVSDSTNINIPKMNETNPTTTIINNHPQNNFTNITNIIVNKNEEENFLNLTKPLCEVNSWHILSKDNAVRIGEDAHILVTREPYLSCDPQGCRMFALSQGTTLRGRHANGTIHDRSPFRALISWEMGQAPSPYNTRVECIGWSSTSCHDGISRMSICISGPNNNASAVVWYRGRPVTEIPSWAGNILRTQESECVCHKGICPVVMTDGPANNRAETKIIYFKEGKIQKIEELEGNAQHIEECSCYGTAGMIKCICRDNWRGANRPVITIDPEMMTHTSRYLCSKILTDTSRPNDPTNGNCDAPITGGSPDPGVKGFAFLDGKNSWLGRTISKDSRSGYEMLKVPNAETDIQSGPTSNQIIVNNQNWSGYSGAFIDYWANKECFNPCFYVELIRGRPKESNVLWTSNSIVALCGSRERLGSWSWHDGAEIIYFK

SEQ ID NO: 24444 - protein, 469 aa, Artificial Sequence
  derived and/or modified protein sequence (wt) from neuraminidase__InfluenzaA__AHJ58040
MNPNQKIITVGSVSLAIATICLLMQIAILATTVTLHFKQNECNIPSKNQVMPCEPIIIERNITEVVYLNNTIIEKEICPKVVEYRNWSKPQCQITGFAPFSKDNSIRLSAGGDIWVTREPYVSCSPSKCYQFALGQGTTLDNSHSNGTIHDRIPHRTLLMNELGVPFHLGTKQVCIAWSSSSCHDGRAWLHVCITGDDRNATASFIYNGMLVDSISSWSRNILRTQESECVCINGTCTVIMTDGSASGVADTRILFIREGKIVHVSPLSGSAQHIEECSCYPRYPDVRCVCRDNWKGSNRPVVDINMADYSIDSHYVCSGLVGDTPRNDDSSSSSNCKDPNNERGNPGVKGWAFDDGNDVWMGRTISRDSRSGYETFRVIGGWTTANSKSQINRQVIVDNNNWSGYSGVFSVEGKSCINRCFYVELIRGRPQETRVWWTSNSIVVFCGTSGTYGTGSWPDGANINFMPI

SEQ ID NO: 24445 - protein, 469 aa, Artificial Sequence
  derived and/or modified protein sequence (wt) from neuraminidase__InfluenzaA__AHJ58052
MNPNQKIITIGSVSLTIATVSFLMQIAILTTTVTLHFKHNECNMPPKNQVMSCEPIIIERNITEIVYLNNTTVEKEICPKVVEYRNWSKPQCKITGFAPFSKDNSIRLSAGGDIWVTREPYVSCGLGKCYQFALGQGTTLDNSHSNGTIHDRIPHRTLLMNELGVPFHLGTKQVCIAWSSSSCHDGRAWLHICITGDDRNATASFIYDGMLVDSIGSWSKNILRTQESECVCINGTCAVVMTDGSASGVADTRILFIREGKIVHISPLSGSAQHIEECSCYPRYPDVRCVCRDNWKGSNRPVIDINMADYSIDSNYVCSGLVGDTPRNDDNSSSSNCRDPNNERGNPGVKGWAFDDGNDVWMGRTINRDSRSGYETFRVIGGWTTANSKSQINRQVIVDNNNWSGYSGVFSVEGKSCINRCFYVELIRGRPQEPRVWWTSNSIVVFCGTSGTYGTGSWPDGANINFMPI

SEQ ID NO: 24446 - protein, 470 aa, Artificial Sequence
  derived and/or modified protein sequence (wt) from neuraminidase__InfluenzaA__AHJ58064
MNPNQKITCISATGMTLSVVSLLIGIANLGLNIGLHYKVSDSTNINIPNMNETSPTTTIINNHPQNNFTNITNIIVNKNEEENFLNLTKPLCEVNSWHILSKDNAIRIGENAHILVTREPYLSCDPQGCRMFALSQGTTLRGQHANGTIHDRSPFRALISWEMGQAPSPYNARVECIGWSSTSCHDGISRMSICISGPNNNASAVVWYGGRPVTEIPSWAGNILRTQESECVCHGGICPVVMTDGPANNRAETKIIYFKEGKIQKIEELKGNAQHIEECSCYGASGMIKCICRDNWKGANRPVITIDPEMMTHTSKYLCSKILTDTSRPNDPINGNCDAPITGGSPDPGVKGFAFLDGENSWLGRTISKDSRSGYEMLKVPNAETDTQSGAISHQMIVNNQNWSGYSGAFIDYWANKECFNPCFYVELIRGRPKESSVLWTSNSIVALCGSRERLGSWSWHDGAEIIYFK

SEQ ID NO: 24447 - protein, 466 aa, Artificial Sequence
  derived and/or modified protein sequence (wt) from neuraminidase__InfluenzaA__AHJ58075
MNPNQKIIAIGSVSLTIAIICFLLQIAILTTTMTLHFRQNECSNPSNNQVVPCEPIIIERNTVHLNSTTIEKEICPKVAEYKNWSKPQCQITGFAPFSKDNSIRLSAGGDIWVTREPYVSCSLGKCYQFALGQGTTLKNKHSNGTTHDRIPHRTLLMNELGVPFHLGTKQVCIAWSSSSCHDGKAWLHICVTGDDKNATASIIYDGMLVDSIGSWSKNILRTQESECVCINGTCAVVMTDGSASGKADTRILFIREGKIINISPLSGSAQHVEECSCYPRYPEVRCVCRDNWKGSNRPVLYINMADYSIESSYVCSGLVGDTPRDDDSSSSSNCRDPNNERGAPGVKGWAFDDGNDIWMGRTIKSDSRSGYETFRVVNGWTTANSKSQINRQVIVDSDSWSGYSGIFSVEGKNCINRCFYVELIRGRPQETRVWWTSNSIIVFCGTSGTYGTGSWPDGANINFMPI

SEQ ID NO: 24448 - protein, 470 aa, Artificial Sequence
  derived and/or modified protein sequence (wt) from neuraminidase__InfluenzaA__AHJ58087
MNPNQKITCISATGMTLSVVSLLIGIANLGLNIGLHYKVSDSTNINIPNMNETSPTTTIINNHPQNNFTNITNIIVNKNEEENFLNLTKPLCEVNSWHILSKDNAIRIGENAHILVTREPYLSCDPQGCRMFALSQGTTLRGQHANGTIHDRSPFRALISWEMGQAPSPYNARVECIGWSSTSCHDGISRMSICISGPNNNASAVVWYGGRPVTEIPSWAGNILRTQESECVCHGGICPVVMTDGPANNRAETKIIYFKEGKIQKIEELKGNAQHIEECSCYGASGMIKCICRDNWKGANRPVITIDPEMMTHTSKYLCSKILTDTSRPNDPINGNCDAPITGGSPDPGVKGFAFLDGDNSWLGRTISKDSRSGYEMLKVPNAETDTQSGAISHQMIVNNQNWSGYSGAFIDYWANKECFNPCFYVELIRGRPKESSVLWTSNSIVALCGSRERLGSWSWHDGAEIIYFK

SEQ ID NO: 24449 - protein, 469 aa, Artificial Sequence
  derived and/or modified protein sequence (wt) from neuraminidase__InfluenzaA__AHL80721
MNPNQKIITIGSVCMTIGMANLILQIGNIISIWISHSIQLGNQNQIETCNQSVITYENNTWVNQTYVNISNTNFAAGQSVVSVKLAGNSSLCPVSGWAIYSKDNSIRIGSKGDVFVIREPFISCSPLECRTFFLTQGALLNDKHSNGTIKDRSPYRTLMSCPIGEVPSPYNSRFESVAWSASACHDGINWLTIGISGPDNGAVAVLKYNGIITDTIKSWRNNILRTQESECACVNGSCFTVMTDGPSDGQASYKIFRIEKGKIVKSVEMNAPNYHYEECSCYPDSSEITCVCRDNWHGSNRPWVSFNQNLEYQIGYICSGIFGDNPRPNDKTGSCGPVSSNGANGVKGFSFKYGNGVWIGRTKSISSRKGFEMIWDPNGWTGTDNNFSIKQDVVGINEWSGYSGSFVQHPELTGLDCIRPCFWVELIRGRPKENTIWTSGSSISFCGVNSDTVGWSWPDGAELPFTIDK

SEQ ID NO: 24450 - protein, 469 aa, Artificial Sequence
  derived and/or modified protein sequence (wt) from neuraminidase__InfluenzaA__AHL80732
MNPNQKIITIGSVCMTIGMANLILQIGNIISIWISHSIQLGNQNQIETCNQSVITYENNTWVNQTYVNISNTNFAAGQSVVSVKLAGNSSLCPVSGWAIYSKDNSIRIGSKGDVFVIREPFISCSPLECRTFFLTQGALLNDKHSNGTIKDRSPYRTLMSCPIGEVPSPYNSRFESVAWSASACHDGINWLTIGISGPDNGAVAVLKYNGIITDTIKSWRNNILRTQESECACVNGSCFTVMTDGPSDGQASYKIFRIEKGKIVKSVEMNAPNYYYEECSCYPDSSEITCVCRDNWHGSNRPWVSFNQNLEYQIGYICSGIFGDNPRPNDKTGSCGPVSSNGANGVKGFSFKYGNGVWIGRTKSISSRNGFEMIWDPNGWTGTDNNFSIKQDIVGINEWSGYSGSFVQHPELTGLDCIRPCFWVELIRGRPKENTIWTSGSSISFCGVNSDTVGWSWPDGAELPFIIDK

SEQ ID NO: 24451 - protein, 469 aa, Artificial Sequence; identical to SEQ ID NO: 16738
  derived and/or modified protein sequence (wt) from neuraminidase__InfluenzaA__AHL80743

SEQ ID NO: 24452 - protein, 469 aa, Artificial Sequence
  derived and/or modified protein sequence (wt) from neuraminidase__InfluenzaA__AHL80754
MNPNQKIITIGSVCMTIGMANLILQIGNIISIWISHSIQLGNQNQIETCNQSVITYENNTWVNQTYVNISNTNFAAGQSVVSVKLAGNSSLCPVSGWAIYSKDNSIRIGSKGDVFVIREPFISCSPLECRTFFLTQGALLNDKHSNGTIKDRSPYRTLMSCPIGEVPSPYNSRFESVAWSASACHDGINWLTIGISGPDNGAVAVLKYNGIITDTIKSWRNNILRTQESECVCVNGSCFTVMTDGPSDGQASYKIFRIEKGKIVKSVEMNAPNYHYEECSCYPDSSEITCVCRDNWHGSNRPWVSFNQNLEYQIGYICSGIFGDNPRPNDKTGSCGPVSSNGANGVKGFSFKYGNGVWIGRTKSISSRNGFEMIWDPNGWTGTDNNFSIKQDIVGINEWSGYSGSFVQHPELTGLDCIRPCFWVELIRGRPKENTIWTSGSSISFCGVNSDTVGWSWPDGAELPFTIDK

SEQ ID NO: 24453 - protein, 469 aa, Artificial Sequence; identical to SEQ ID NO: 16738
  derived and/or modified protein sequence (wt) from neuraminidase__InfluenzaA__AHL80765

SEQ ID NO: 24454 - protein, 469 aa, Artificial Sequence; identical to SEQ ID NO: 16738
  derived and/or modified protein sequence (wt) from neuraminidase__InfluenzaA__AHL80776

SEQ ID NO: 24455 - protein, 469 aa, Artificial Sequence; identical to SEQ ID NO: 16738
  derived and/or modified protein sequence (wt) from neuraminidase__InfluenzaA__AHL80787

SEQ ID NO: 24456 - protein, 469 aa, Artificial Sequence
  derived and/or modified protein sequence (wt) from neuraminidase__InfluenzaA__AHL80798
MNPNQKIITIGSVCMTIGMANLILQIGNIISIWISHSIQLGNQNQIETCNQSVITYENNTWVNQTYVNISNTNFAAGQSVVSVKLAGNSSLCPVSGWAIYSKDNSIRIGSKGDVFVIREPFISCSPLECRTFFLTQGALLNDKHSNGTIKDRSPYRTLMSCPIGEVPSPYNSRFESVAWSASACHDGINWLTIGISGPDNGAVAVLKYNGIITDTIKSWRNNILRTQESECACVNGSCFTVMTDGPSDGQASYKIFRIEKGKIVKSVEMNAPNYHYEECSCYPDSSEITCVCRDNWHGSNRPWVSFNQNLEYQIGYICSGIFGDNPRPNDKKGSCGPVSSNGANGVKGFSFKYGNGVWIGRTKSISSRNGFEMIWDPNGWTGTDNNFSVKQDIVGINEWSGYSGSFVQHPELTGLDCIRPCFWVELIRGRPKENTIWTSGSSISFCGVNSDTVGWSWPDGAELPFTIDK

SEQ ID NO: 24457 - protein, 469 aa, Artificial Sequence; identical to SEQ ID NO: 16738
  derived and/or modified protein sequence (wt) from neuraminidase__InfluenzaA__AHL80809

SEQ ID NO: 24458 - protein, 469 aa, Artificial Sequence; identical to SEQ ID NO: 16738
  derived and/or modified protein sequence (wt) from neuraminidase__InfluenzaA__AHL80820

SEQ ID NO: 24459 - protein, 469 aa, Artificial Sequence; identical to SEQ ID NO: 16738
  derived and/or modified protein sequence (wt) from neuraminidase__InfluenzaA__AHL80831

SEQ ID NO: 24460 - protein, 469 aa, Artificial Sequence; identical to SEQ ID NO: 16738
  derived and/or modified protein sequence (wt) from neuraminidase__InfluenzaA__AHL80842

SEQ ID NO: 24461 - protein, 469 aa, Artificial Sequence; identical to SEQ ID NO: 18026
  derived and/or modified protein sequence (wt) from neuraminidase__InfluenzaA__AHL80853

SEQ ID NO: 24462 - protein, 469 aa, Artificial Sequence
  derived and/or modified protein sequence (wt) from neuraminidase__InfluenzaA__AHL80864
MNPNQKIITIGSVCMTIGMANLILQIGNIISIWISHSIQLGNQNQIETCNQSVITYENNTWVNQTYVNISNTNFAAGQSVVSVKLAGNSSLCPVSGWAIYSKDNSIRIGSKGDVFVIREPFISCSPLECRTFFLTQGALLNDKHSNGTIKDRSPYRTLMSCPIGEVPSPYNSRFESVAWSASACHDGINWLTIGISGPDNGAVAVLKYNGIITDTIKSWRNNILRTQESECACVNGSCFTVMTDGPSDGQASYKIFRIEKGKIVKSVEMNAPNYYYEECSCYPDSSEITCVCRDNWHGSNRPWVSFNQNLEYQIGYICSGIFGDNPRPNDKKGSCGPVSSNGANGVKGFSFKYGNGVWIGRTKSISSRNGFEMIWDPNGWTGTDNNFSIKQDIVGINEWSGYSGSFVQHPELTGLDCIRPCFWVELIRGRPKENTIWTSGSSISFCGVNSDTVGWSWPDGAELPFTIDK

SEQ ID NO: 24463 - protein, 469 aa, Artificial Sequence; identical to SEQ ID NO: 18026
  derived and/or modified protein sequence (wt) from neuraminidase__InfluenzaA__AHL80875

SEQ ID NO: 24464 - protein, 469 aa, Artificial Sequence; identical to SEQ ID NO: 18026
  derived and/or modified protein sequence (wt) from neuraminidase__InfluenzaA__AHL80886

SEQ ID NO: 24465 - protein, 469 aa, Artificial Sequence
  derived and/or modified protein sequence (wt) from neuraminidase__InfluenzaA__AHL80897
MNPNQKIITIGSVCMTIGMANLILQIGNIISIWISHSIQLGNQNQIETCNQSVITYENNTWVNQTYVNISNTNFAAGQSVVSVKLAGNSSLCPVSGWAIYSKDNSIRIGSKGDVFVIREPFISCSPLECRTFFLTQGALLNDKHSNGTIKDRSPYRTLMSCPIGEVPSPYNSRFESVAWSASACHDGINWLTIGISGPDNGAVAVLKYNGIITDTIKSWRNNILRTQESECACINGSCFTVMTDGPSDGQASYKIFRIEKGKIVKSVEMNAPNYHYEECSCYPDSSEITCVCRDNWHGSNRPWVSFNQNLEYQIGYICSGIFGDNPRPNDKKGSCGPVSSNGANGVKGFSFKYGNGVWIGRTKSISSRNGFEMIWDPNGWTGTDNNFSIKQDIVGINEWSGYSGSFVQHPELTGLDCIRPCFWVELIRGRPKENTIWTSGSSISFCGVNSDTVGWSWPDGAELPFTIDK

SEQ ID NO: 24466 - protein, 469 aa, Artificial Sequence
  derived and/or modified protein sequence (wt) from neuraminidase__InfluenzaA__AHL80908
MNPNQKIITIGSVCMTIGMANLILQIGNIISIWISHSIQLGNQNQIETCNQSVTIHENNTWVNQTYVNISNTNFAAGQSVVSVKLAGNSSLCPVSGWAIYSKDNSIRIGSKGDVFVIREPFISCSPLECRTFFLTQGALLNDKHSNGTIKDRSPYRTLMSCPIGEVPSPYNSRFESVAWSASACHDGINWLTIGISGPDNGAVAVLKYNGIITDTIKSWRNNILRTQESECACVNGSCFTVMTDGPSDGQASYKIFRIEKGKIVKSVEMNAPNYYYEECSCYPDSSEITCVCRDNWHGSNRPWVSFNQNLEYQIGYICSGIFGDNPRPNDKKGSCGPVSSNGANGVKGFSFKYGNGVWIGRTKSISSRNGFEMIWDPNGWTGTDNNFSIKQDIVGINEWSGYSGSFVQHPELTGLDCIRPCFWVELIRGRPKENTIWTSGSSISFCGVNSDTVGWSWPDGAELPFTIDK

SEQ ID NO: 24467 - protein, 469 aa, Artificial Sequence
  derived and/or modified protein sequence (wt) from neuraminidase__InfluenzaA__AHL80919
MNPNQKIITIGSVCMTIGMANLILQIGNIISIWISHSIQLGNQSQIETCNQSVITYENNTWVNQTYVNISNTNFAAGQSVVSVKLAGNSSLCPVSGWAIYSKDNSIRIGSKGDVFVIREPFISCSPLECRTFFLTQGALLNDKHSNGTIKDRSPYRTLMSCPTGEVPSPYNSRFESVAWSASACHDGINWLTIGISGPDNGAVAVLKYNGIITDTIKSWRNNILRTQESECACVNGSCFTIMTDGPSDGQASYKIFRIEKGKIVKSVEMNAPNYHYEECSCYPDSSEITCVCRDNWHGSNRPWVSFNQNLEYQIGYICSGIFGDNPRPNDKTGSCGPVSSNGANGVKGFSFKYGNGVWIGRTKSISSRKGFEMIWDPNGWTGTDNNFSIKQDIVGINEWSGYSGSFVQHPELTGLDCIRPCFWVELIRGRPKENTIWTSGSSISFCGVNSDTVGWSWPDGAELPFTIDK

SEQ ID NO: 24468 - protein, 469 aa, Artificial Sequence; identical to SEQ ID NO: 19518
  derived and/or modified protein sequence (wt) from neuraminidase__InfluenzaA__AHL80930

SEQ ID NO: 24469 - protein, 469 aa, Artificial Sequence; identical to SEQ ID NO: 19518
  derived and/or modified protein sequence (wt) from neuraminidase__InfluenzaA__AHL80949

SEQ ID NO: 24470 - protein, 469 aa, Artificial Sequence
  derived and/or modified protein sequence (wt) from neuraminidase__InfluenzaA__AHL80961
MNPNQKIITIGSVCMTIGMANLILQIGNIISIWISHSIQLGNQNQIETCNQSVITYENNTWVNQTYVNISNTNFAAGQSVVSVKLAGNSSLCPVSGWAIYSKDNSIRIGSKGDVFVIREPFISCSPLECRTFFLTQGALLNDKHSNGTIKDRSPYRTLMSCPIGEVPSPYNSRFESVAWSASACHDGINWLTIGISGPDNGAVAVLKYNGIITDTIKSWRNNILRTQESECACVNGSCFTIMTDGPSDGQASYKIFRIEKGKIVKSVEMNAPNYHYEECSCYPDSSEITCVCRDNWHGSNRPWVSFNQNLEYQIGYICSGIFGDNPRPNDKTGSCGPVSSNGANGVKGFSFKYGNGVWIGRTKSISSRKGFEMIWDPNGWTGTDNNFSIKQDVVGINEWSGYSGSFVQHPELTGLDCIRPCFWVELIRGRPKENTIWTSGSSISFCGVNSDTVGWSWPDGAELPFTIDK

SEQ ID NO: 24471 - protein, 469 aa, Artificial Sequence; identical to SEQ ID NO: 24470
  derived and/or modified protein sequence (wt) from neuraminidase__InfluenzaA__AHL80972

SEQ ID NO: 24472 - protein, 469 aa, Artificial Sequence; identical to SEQ ID NO: 19518
  derived and/or modified protein sequence (wt) from neuraminidase__InfluenzaA__AHL80983

SEQ ID NO: 24473 - protein, 469 aa, Artificial Sequence; identical to SEQ ID NO: 19518
  derived and/or modified protein sequence (wt) from neuraminidase__InfluenzaA__AHL80992

SEQ ID NO: 24474 - protein, 469 aa, Artificial Sequence; identical to SEQ ID NO: 19518
  derived and/or modified protein sequence (wt) from neuraminidase__InfluenzaA__AHL81004

SEQ ID NO: 24475 - protein, 469 aa, Artificial Sequence
  derived and/or modified protein sequence (wt) from neuraminidase__InfluenzaA__AHL81016
MNPNQKIITIGSVSLTISTICFFMQIAILITTVTLHFKQYEFNSPPNNQVMLCEPTIIERNITEIVYLTNTTIEKEICPKLAEYRNWSKPQCDITGFAPFSKDNSIRLSAGGDIWVTREPYVSCDSDKCYQFALGQGTTLNNVHSNNTVRDRTPYRTLLMNELGVPFHLGTKQVCIAWSSSSCHDGKAWLHVCITGDDKNATASFIYNGRLVDSVVSWSKEILRTQESECVCINGTCTVVMTDGSASGKADTKILFIEEGKIVHTSTLSGSAQHVEECSCYPRYPGVRCVCRDNWKGSNRPIVDINIKDHSIVSSYVCSGLVGDTPRKNDSSSSSHCLDPNNEEGGHGVKGWAFDDGNDVWMGRTINETSRLGYETFKVIEGWSNPKSKLQINRQVIVDRGNRSGYSGIFSVEGKSCINRCFYVELIRGRKEETEVLWTSNSIVVFCGTSGTYGTGSWPDGADLNLMPI

SEQ ID NO: 24476 - protein, 469 aa, Artificial Sequence; identical to SEQ ID NO: 19518
  derived and/or modified protein sequence (wt) from neuraminidase__InfluenzaA__AHL81028

SEQ ID NO: 24477 - protein, 469 aa, Artificial Sequence; identical to SEQ ID NO: 19518
  derived and/or modified protein sequence (wt) from neuraminidase__InfluenzaA__AHL81040

SEQ ID NO: 24478 - protein, 469 aa, Artificial Sequence; identical to SEQ ID NO: 19518
  derived and/or modified protein sequence (wt) from neuraminidase__InfluenzaA__AHL81052

SEQ ID NO: 24479 - protein, 469 aa, Artificial Sequence; identical to SEQ ID NO: 24470
  derived and/or modified protein sequence (wt) from neuraminidase__InfluenzaA__AHL81064

SEQ ID NO: 24480 - protein, 469 aa, Artificial Sequence; identical to SEQ ID NO: 24470
  derived and/or modified protein sequence (wt) from neuraminidase__InfluenzaA__AHL81075

SEQ ID NO: 24481 - protein, 469 aa, Artificial Sequence
  derived and/or modified protein sequence (wt) from neuraminidase__InfluenzaA__AHL81086
MNPNQKIITIGSVSLTISTICFFMQIAILITTVTLHFKQYEFNSPPNNQVMLCKPTIIERNITEIVYLTNTTIEKEICPKLAEYRNWSKPQCDITGFAPFSKDNSIRLSAGGDIWVTREPYVSCDPDKCYQFALGQGTTLNNVHSNNTVRDRTPYRTLLMNELGVPFHLGTKQVCIAWSSSSCHDGKAWLHVCITGDDKNATASFIYNGRLVDSVVSWSKEILRTQESECVCINGTCTVVMTDGSASGKADTKILFIEEGKIVHTSTLSGSAQHVEECSCYPRYPGVRCVCRDNWKGSNRPIVDINIKDHSIVSSYVCSGLVGDTPRKNDSSSSSHCLDPNNEEGGHGVKGWAFDDGNDVWMGRTINETSRLGYETFKVIEGWSNPKSKLQINRQVIVDRGNRSGYSGIFSVEGKSCINRCFYVELIRGRKEETEVLWTSNSIVVFCGTSGTYGTGSWPDGADLNLMPI

SEQ ID NO: 24482 - protein, 469 aa, Artificial Sequence
  derived and/or modified protein sequence (wt) from neuraminidase__InfluenzaA__AHL81098
MNPNQKIITIGSVSLTISTICFFVQIAILITTVTLHFKQYEFNSPPNNQVMLCEPTIIERNITEIVYLTNTTIEKEICPKLAEYRNWSKPQCDITGFAPFSKDNSIRLSAGGDIWVTREPYVSCDPDKCYQFALGQGTTLNNVHSNNTVRDRTPYRTLLMNELGVPFHLGTKQVCIAWSSSSCHDGKAWLHVCITGDDKNATASFIYNGRLVDSVVSWSKEILRTQESECVCINGTCTVVMTDGSASGKADTKILFIEEGKIVHTSTLSGSAQHVEECSCYPRYPGVRCVCRDNWKGSNRPIVDINIKDHSIVSSYVCSGLVGDTPRKNDSSSSSHCLDPNNEEGGHGVKGWAFDDGNDVWMGRTINETSRLGYETFKVIEGWSNPKSKLQINRQVIVDRGNRSGYSGIFSVEGKSCINRCFYVELIRGRKEETEVLWTSNSIVVFCGTSGTYGTGSWPDGADLNLMPI

SEQ ID NO: 24483 - protein, 469 aa, Artificial Sequence; identical to SEQ ID NO: 20709
  derived and/or modified protein sequence (wt) from neuraminidase__InfluenzaA__AHL81110

SEQ ID NO: 24484 - protein, 469 aa, Artificial Sequence; identical to SEQ ID NO: 20709
  derived and/or modified protein sequence (wt) from neuraminidase__InfluenzaA__AHL81121

SEQ ID NO: 24485 - protein, 469 aa, Artificial Sequence; identical to SEQ ID NO: 19518
  derived and/or modified protein sequence (wt) from neuraminidase__InfluenzaA__AHL81132

SEQ ID NO: 24486 - protein, 469 aa, Artificial Sequence; identical to SEQ ID NO: 19518
  derived and/or modified protein sequence (wt) from neuraminidase__InfluenzaA__AHL81144

SEQ ID NO: 24487 - protein, 469 aa, Artificial Sequence; identical to SEQ ID NO: 19518
  derived and/or modified protein sequence (wt) from neuraminidase__InfluenzaA__AHL81156

SEQ ID NO: 24488 - protein, 469 aa, Artificial Sequence; identical to SEQ ID NO: 21787
  derived and/or modified protein sequence (wt) from neuraminidase__InfluenzaA__AHL81168

SEQ ID NO: 24489 - protein, 469 aa, Artificial Sequence; identical to SEQ ID NO: 21787
  derived and/or modified protein sequence (wt) from neuraminidase__InfluenzaA__AHL81180

SEQ ID NO: 24490 - protein, 469 aa, Artificial Sequence; identical to SEQ ID NO: 19518
  derived and/or modified protein sequence (wt) from neuraminidase__InfluenzaA__AHL81192

SEQ ID NO: 24491 - protein, 469 aa, Artificial Sequence
  derived and/or modified protein sequence (wt) from neuraminidase__InfluenzaA__AHL81215
MNPNQKIITIGSVSLTISTICFFMQIAILITTVTLHFKQYEFNSPPNNQVMLCEPTIIERNITEIMYLTNTTIEKEICPKLAEYRNWSKPQCDITGFAPFSKDNSIRLSAGGDIWVTREPYVSCDPDKCYQFALGQGTTLNNVHSNNTVRDRTPYRTLLMNELGVPFHLGTKQVCIAWSSSSCHDGKAWLHVCITGDDKNATASFIYNGRLVDSVVSWSKEILRTQESECVCINGTCTVVMTDGSASGKADTKILFIEEGKIVHTSTLSGSAQHVEECSCYPRYPGVRCVCRDNWKGSNRPIVDINIKDHSIVSSYVCSGLVGDTPRKNDSSSSSHCLDPNNEEGGHGVKGWAFDDGNDVWMGRTINETSRLGYETFKVIEGWSNPKSKLQINRQVIVDRGNRSGYSGIFSVEGKSCINRCFYVELIRGRKEETEVLWTSNSIVVFCGTSGTYGTGSWPDGADLNFMPI

SEQ ID NO: 24492 - protein, 469 aa, Artificial Sequence
  derived and/or modified protein sequence (wt) from neuraminidase__InfluenzaA__AHL81227
MNPNQKIITIGSVCMTIGMANLILQIGNIISIWISHSIQLGNQSQIETCNQSVITYENNTWVNQTYVNISNTNFAAGQSVVSVKLAGNSSLCPVSGWAIYSKDNSIRIGSKGDVFVIREPFISCSPLECRTFFLTQGALLNDKHSNGTIKDRSPYRTLMSCPTGEVPSPYNSRFESVAWSASACHDGINWLTIGISGPDNGAVAVLKYNGIITDTIKSWRNNILRTQESECACVNGSCFTIMTDGPSDGQASYKIFRIEKGKIVKSVEMNAPNYHYEECSCYPDSSEITCVCRDNWHGSNRPWVSFNQNLEYQIGYICSGIFGDNPRPNDKTGSCGPVSSNGANGVKGFSFKYGNGVWIGRTKSISSRKGFEMIWDPNGWTGTDNNFSIKQDIIGINEWSGYSGSFVQHPELTGLDCIRPCFWVELIRGRPKENTIWTSGSSISFCGVNSDTVGWSWPDGAELPFTIDK

SEQ ID NO: 24493 - protein, 469 aa, Artificial Sequence; identical to SEQ ID NO: 19518
  derived and/or modified protein sequence (wt) from neuraminidase__InfluenzaA__AHL81238

SEQ ID NO: 24494 - protein, 469 aa, Artificial Sequence; identical to SEQ ID NO: 19518
  derived and/or modified protein sequence (wt) from neuraminidase__InfluenzaA__AHL81250

SEQ ID NO: 24495 - protein, 469 aa, Artificial Sequence; identical to SEQ ID NO: 19518
  derived and/or modified protein sequence (wt) from neuraminidase__InfluenzaA__AHL81262

SEQ ID NO: 24496 - protein, 469 aa, Artificial Sequence; identical to SEQ ID NO: 19518
  derived and/or modified protein sequence (wt) from neuraminidase__InfluenzaA__AHL81274

SEQ ID NO: 24497 - protein, 469 aa, Artificial Sequence; identical to SEQ ID NO: 19518
  derived and/or modified protein sequence (wt) from neuraminidase__InfluenzaA__AHL81286

SEQ ID NO: 24498 - protein, 469 aa, Artificial Sequence; identical to SEQ ID NO: 19518
  derived and/or modified protein sequence (wt) from neuraminidase__InfluenzaA__AHL81298

SEQ ID NO: 24499 - protein, 469 aa, Artificial Sequence; identical to SEQ ID NO: 24470
  derived and/or modified protein sequence (wt) from neuraminidase__InfluenzaA__AHL81310

SEQ ID NO: 24500 - protein, 469 aa, Artificial Sequence; identical to SEQ ID NO: 20709
  derived and/or modified protein sequence (wt) from neuraminidase__InfluenzaA__AHL81332

SEQ ID NO: 24501 - protein, 469 aa, Artificial Sequence
  derived and/or modified protein sequence (wt) from neuraminidase__InfluenzaA__AHL81343
MNPNQKIITIGSVSLTISTICFLMQIAILITTVTLHFKQYEFNSPPNNQVMLCEPTIIERNITEIVYLTNTTIEKEICPKLAEYRNWSKPQCDITGFAPFSKDNSIRLSAGGDIWVTREPYVSCDPDKCYQFALGQGTTLNNVHSNNTVRDRTPYRTLLMNELGVPFHLGTKQVCIAWSSSSCHDGKAWLHVCITGDDKNATASFIYNGRLVDSVVSWSKEILRTQESECVCINGTCTVVITDGSASGKADTKILFIEEGKIVHTSTLSGSAQHVEECSCYPRYPGVRCVCRDNWKGSNRPIVDINIKDHSIVSSYVCSGLVGDTPRKNDSSSSSHCSDPNNEEGGHGVKGWAFDDGNDVWMGRTISEKSRLGYETFKVIEGWSNPKSKLQINRQVIVDRGNRSGYSGIFSVEGKSCINRCFYVELIRGRKEETEVLWTSNSIVVFCGTSGTYGTGSWPDGADINLMPI

SEQ ID NO: 24502 - protein, 469 aa, Artificial Sequence; identical to SEQ ID NO: 19518
  derived and/or modified protein sequence (wt) from neuraminidase__InfluenzaA__AHL81355

SEQ ID NO: 24503 - protein, 469 aa, Artificial Sequence; identical to SEQ ID NO: 20709
  derived and/or modified protein sequence (wt) from neuraminidase__InfluenzaA__AHL81367

SEQ ID NO: 24504 - protein, 469 aa, Artificial Sequence; identical to SEQ ID NO: 20709
  derived and/or modified protein sequence (wt) from neuraminidase__InfluenzaA__AHL81378

SEQ ID NO: 24505 - protein, 469 aa, Artificial Sequence; identical to SEQ ID NO: 20709
  derived and/or modified protein sequence (wt) from neuraminidase__InfluenzaA__AHL81389

SEQ ID NO: 24506 - protein, 469 aa, Artificial Sequence; identical to SEQ ID NO: 19518
  derived and/or modified protein sequence (wt) from neuraminidase__InfluenzaA__AHL81400

SEQ ID NO: 24507 - protein, 469 aa, Artificial Sequence; identical to SEQ ID NO: 24491
  derived and/or modified protein sequence (wt) from neuraminidase__InfluenzaA__AHL81412

SEQ ID NO: 24508 - protein, 469 aa, Artificial Sequence; identical to SEQ ID NO: 16738
  derived and/or modified protein sequence (wt) from neuraminidase__InfluenzaA__AHL81422

SEQ ID NO: 24509 - protein, 469 aa, Artificial Sequence; identical to SEQ ID NO: 18026
  derived and/or modified protein sequence (wt) from neuraminidase__InfluenzaA__AHL81433

SEQ ID NO: 24510 - protein, 469 aa, Artificial Sequence
  derived and/or modified protein sequence (wt) from neuraminidase__InfluenzaA__AHL88954
MNPNQKIITIGSVSLTISTICFFMQIAILITTVTLHFKQYEFNSPPNNQVMLCEPTIIERNITEIVYLTNTTIEKEICPKLAEYRNWSKPQCNITGFAPFSKDNSIRLSAGGDIWVTREPYVSCDPDKCYQFALGQGTTLNNVHSNDTVHDRTPYRTLLMNELGVPFHLGTKQVCIAWSSSSCHDGKAWLHVCVTGDDKNATASFIYNGRLVDSIVSWSKEILRTQESECVCINGTCTVVMTDGSASGKADTKILFIKEGKIVHTSTLSGSAQHVEECSCYPRYPGVRCVCRDNWKGSNRPIVDINIKDYSIVSSYVCSGLVGDTPRKNDSSSSSHCLDPNNEEGGHGVKGWAFDDGNDVWMGRTISEKLRSGYETFKVIEGWSNPNSKLQINRQVIVDRDNRSGYSGIFSVEGKSCINRCFYVELIRGRKEETEVLWTSNSIVVFCGTSGTYGTGSWPDGADINLMPI

SEQ ID NO: 24511 - protein, 469 aa, Artificial Sequence
  derived and/or modified protein sequence (wt) from neuraminidase__InfluenzaA__AHL89033
MNPNQKIITIGSVSLTISTICFFMQIAILITTVTLHFKQYEFNSPPNNQVMLCEPTIIERNITEIVYLTNTTIEKEICPKLAEYRNWSKPQCNITGFAPFSKDNSIRLSAGGDIWVTREPYVSCDPDKCYQFALGQGTTLNNVHSNDTVHDRTPYRTLLMNELGVPFHLGTKQVCIAWSSSSCHDGKAWLHVCVTGDDKNATASFIYNGRLVDSIVSWSKEILRTQESECVCINGTCTVVMTDGSASGKADTKILFIEEGKIVHTSTLSGSAQHVEECSCYPRYPGVRCVCRDNWKGSNRPIVDINIKDYSIVSSYVCSGLVGDTPRKNDSSSSSHCLDPNNEEGGHGVKGWAFDDGNDVWMGRTISEKLRSGYETFKVIEGWSNPNSKLQINRQVIVDRGNRSGYSGIFSVEDKSCINRCFYVELIRGRKEETEVLWTSNSIVVFCGTSGTYGTGSWPDGADINLMPI

SEQ ID NO: 24512 - protein, 469 aa, Artificial Sequence
  derived and/or modified protein sequence (wt) from neuraminidase__InfluenzaA__AHL89045
MNPNQKIITIGSVSLTISTICFFMQIAILITTVTLHFKQYEFNSPPNNQVMLCEPTIIERNITEIVYLTNTTIEKEICPKLAEYRNWSKPQCNITGFAPFSKDNSIRLSAGGDIWVTREPYVSCDPDKCYQFALGQGTTLNNVHSNDTVHDRTPYRTLLMNELGVPFHLGTKQVCIAWSSSSCHDGKAWLHVCVTGDDKNATASFIYNGRLVDSIVSWSKEILRTQESECVCINGTCTVVMTDGSASGKADTKILFIEEGKIVHTSTLSGSAQHVEECSCYPRHPGVRCVCRDNWKGSNRPIVDINIKDYSIVSSYVCSGLVGDTPRKNDSSSSSHCLDPNNEEGGHGVKGWAFDDGNDVWMGRTISEKLRSGYETFKVIEGWSNPNSKLQTNRQVIVDRGNRSGYSGIFSVEGKSCINRCFYVELIRGRKEETEVLWTSNSIVVFCGTSGTYGTGSWPDGADINLMPI

SEQ ID NO: 24513 - protein, 469 aa, Artificial Sequence
  derived and/or modified protein sequence (wt) from neuraminidase__InfluenzaA__AHL89057
MNPNQKIITIGSVSLTISTICFFMQIAILITTVTLHFKQYEFNSPPNNQVMLCEPTIIERNITEIVYLTNTTIEKEICPKLAEYRNWSKPQCNITGFAPFSKDNSIRLSAGGDIWVTREPYVSCDPDKCYQFALGQGTTLNNVHSNDTVHDRTPYRTLLMNELGVPFHLGTKQVCIAWSSSSCHDGKAWLHVCVTGDDKNATASFIYNGRLVDSIVSWSKEILRTQESECVCINGTCTVVMTDGSASGKADTKILFIEEGKIVHTSTLSGSAQHVEECSCYPRYPGVRCVCRDNWKGSNRPIVDINIKDYSIVSSYVCSGLVGDTPRKNDSSSSSHCLDPNNEEGGHGVKGWAFDDGNDVWMGRTISEKLRSGYETFKVIEGWSKPNSKLQINRQVIVDRGNRSGYSGIFSVEGKSCINRCFYVELIRGRKEETEVLWTSNSIVVFCGTSGTYGTGSWPDGADINLMPI

SEQ ID NO: 24514 - protein, 469 aa, Artificial Sequence; identical to SEQ ID NO: 15707
  derived and/or modified protein sequence (wt) from neuraminidase__InfluenzaA__AHL89069

SEQ ID NO: 24515 - protein, 469 aa, Artificial Sequence; identical to SEQ ID NO: 14712
  derived and/or modified protein sequence (wt) from neuraminidase__InfluenzaA__AHL89081

SEQ ID NO: 24516 - protein, 469 aa, Artificial Sequence; identical to SEQ ID NO: 14712
  derived and/or modified protein sequence (wt) from neuraminidase__InfluenzaA__AHL89093

SEQ ID NO: 24517 - protein, 469 aa, Artificial Sequence; identical to SEQ ID NO: 14712
  derived and/or modified protein sequence (wt) from neuraminidase__InfluenzaA__AHL89117

SEQ ID NO: 24518 - protein, 469 aa, Artificial Sequence; identical to SEQ ID NO: 14712
  derived and/or modified protein sequence (wt) from neuraminidase__InfluenzaA__AHL89129

SEQ ID NO: 24519 - protein, 469 aa, Artificial Sequence
  derived and/or modified protein sequence (wt) from neuraminidase__InfluenzaA__AHL89141
MNPNQKIITIGSVSLTISTICFFMQIAILITTVTLHFKQYEFNSPPNNQVMLCEPTIIERNITEIVYLTNTTIEKEICPKLAEYRNWSKPQCNITGFAPFSKDNSIRLSAGGDIWVTREPYVSCDPDKCYQFALGQGTTLNNVHSNDTVHDRTPYRTLLMNELGVPFHLGTKQVCIAWSSSSCHDGKAWLHVCVTGDDKNATASFIYNGRLVDSIVSWSKEILRTQESECVCINGTCTVVMTDGSASGKADTKILFIEEGKIVHTSTLSGSAQHVEECSCYPRYPGVRCVCRDNWKGSNRPIVDINIKDYSIVSSYVCSGLVGDTPRKNDSSSSSHCLDPNNEEGGHGVKGWAFDDGNDVWMGRTISEKLRLGYETFKVIEGWSNPNSKLQTNRQVIVDRGNRSGYSGIFSVEGKSCINRCFYVELIRGRKEETEVLWTSNSIVVFCGTSGTYGTGSWPDGADINLMPI

SEQ ID NO: 24520 - protein, 469 aa, Artificial Sequence
  derived and/or modified protein sequence (wt) from neuraminidase__InfluenzaA__AHL89153
MNPNQKIITIGSVSLTISTICFFMQIAILITTVTLHFKQYEFNSPPNNQVMLCEPTIIERNITEIVYLTNTTIEKEICPKLAEYRNWSKPQCNITGFAPFSKDNSIRLSAGGDIWVTREPYVSCDPDKCYQFSLGQGTTLNNVHSNDTVHDRTPYRTLLMNELGVPFHLGTKQVCIAWSSSSCHDGKAWLHVCVTGDDKNATASFIYNGRLVDSIVSWSKEILRTQESECVCINGTCTVVMTDGSASGKADTKILFIEEGKIVHTSTLSGSAQHVEECSCYPRYPGVRCVCRDNWKGSNRPIVDINIKDYSIVSSYVCSGLVGDTPRKNDSSSSSHCLDPNNEEGGHGVKGWAFDDGNDVWMGRTISEKLRSGYETFKVIEGWSNPNSKLQINRQVIVDRGNRSGYSGIFSVEGKSCINRCFYVELIRGRKEETEVLWTSNSIVVFCGTSGTYGTGSWPDGADINLMPI

SEQ ID NO: 24521 - protein, 469 aa, Artificial Sequence; identical to SEQ ID NO: 14712
  derived and/or modified protein sequence (wt) from neuraminidase__InfluenzaA__AHL89165

SEQ ID NO: 24522 - protein, 469 aa, Artificial Sequence
  derived and/or modified protein sequence (wt) from neuraminidase__InfluenzaA__AHL89177
MNPNQKIITIGSVSLTISTICFFMQIAILITTVTLHFKQYEFNSPPNNQVMLCEPTIIERNITEIVYLTNTTIEKEICPKLAEYRNWSKPQCNITGFAPFSKDNSIRLSAGGDIWVTREPYVSCDPDKCYQFALGQGTTLNNVHSNDTVHDRTPYRTLLMNELGVPFHLGTKQVCIAWSSSSCHDGKAWLHVCVTGDDKNATASFIYNGRLVDSIVSWSNEILRTQESECVCINGTCTVVMTDGSASGKADTKILFIEEGKIVHTSTLSGSAQHVEECSCYPRYPGVRCVCRDNWKGSNRPIVDINIKDYSIVSSYVCSGLVGDTPRKNDSSSSSHCLDPNNEEGGHGVKGWAFDDGNDVWMGRTISEKLRSGYETFKVIEGWSNPNSKLQINRQVIVDRGNRSGYSGIFSVEGKSCINRCFYVELIRGRKEENEVLWTSNSIVVFCGTSGTYGTGSWPDGADINLMPI

SEQ ID NO: 24523 - protein, 469 aa, Artificial Sequence; identical to SEQ ID NO: 16564
  derived and/or modified protein sequence (wt) from neuraminidase__InfluenzaA__AHL89189

SEQ ID NO: 24524 - protein, 469 aa, Artificial Sequence; identical to SEQ ID NO: 15707
  derived and/or modified protein sequence (wt) from neuraminidase__InfluenzaA__AHL89201

SEQ ID NO: 24525 - protein, 469 aa, Artificial Sequence; identical to SEQ ID NO: 16564
  derived and/or modified protein sequence (wt) from neuraminidase__InfluenzaA__AHL89213

SEQ ID NO: 24526 - protein, 469 aa, Artificial Sequence
  derived and/or modified protein sequence (wt) from neuraminidase__InfluenzaA__AHL89225
MNPNQKIITIGSVSLTISTICFFMQIAILITTVTLHFKQYEFNPPPNNQVMLCEPTIIERNITEIVYLTNTTIEKEICPKLAEYRNWSKPQCNITGFAPFSKDNSIRLSAGGDIWVTREPYVSCDPDKCYQFALGQGTTLNNVHSNDTVHDRTPYRTLLMNELGVPFHLGTKQVCIAWSSSSCHDGKAWLHVCVTGDDKNATASFIYNGRLVDSIVSWSKEILRTQESECVCINGTCTVVMTDGSASGKADTKILFIEEGKIVHTSTLSGSAQHVEECSCYPRYPGVRCVCRDNWKGSNRPIVDINIKDYSIVSSYVCSGLVGDTPRKNDSSSSSHCLDPNNEEGGHGVKGWAFDDGNDVWMGRTISEKLRLGYETFKVIEGWSNPNSKLQTNRQVIVDRGNRSGYSGIFSVEGKSCINRCFYVELIRGRKEETEVLWTSNSIVVFCGTSGTYGTGSWPDGADINLMPI

SEQ ID NO: 24527 - protein, 469 aa, Artificial Sequence; identical to SEQ ID NO: 16564
  derived and/or modified protein sequence (wt) from neuraminidase__InfluenzaA__AHL89237

SEQ ID NO: 24528 - protein, 469 aa, Artificial Sequence; identical to SEQ ID NO: 15707
  derived and/or modified protein sequence (wt) from neuraminidase__InfluenzaA__AHL89261

SEQ ID NO: 24529 - protein, 469 aa, Artificial Sequence
  derived and/or modified protein sequence (wt) from neuraminidase__InfluenzaA__AHL89273
MNPNQKIITIGSVSLTISTICFFMQIAILITTVTLHFKQYEFNSPPNNQVMLCEPTIIERNITEIVYLTNTTIEKEICPKLAEYRNWSKPQCNITGFAPFSKDNSIRLSAGGDIWVTREPYVSCDPDKCYQFALGQGTTLNNVHSNDTVHDRTPYRTLLMNELGVPFHLGTKQVCIAWSSSSCHDGKAWLHVCVTGDDKNATASFIYNGRLVDSIVSWSKEILRTQESECVCINGTCTVVMTDGSASGKADTKILFIEEGKIVHTSTLSGSAQHVEECSCYPRYPGVRCVCRDNWKGSNRPIVDINIKDYSIVSSYVCSGLVGDTPRKNDSSSSSHCLDPNNEEGGHGVKGWAFDDGNDVWMGRTISEKLRLGYETFKVIEGWSNPNSKLQTNRQVIVDRGNRSGYSGIFSVEGKSCINRCFYVELIRGRKEETDVLWTSNSIVVFCGTSGTYGTGSWPDGADINLMPI

SEQ ID NO: 24530 - protein, 469 aa, Artificial Sequence
  derived and/or modified protein sequence (wt) from neuraminidase__InfluenzaA__AHL89285
MNPNQKIITIGSVSLTISTICFFMQIAILITTVTLHFKQYEFNSPPNNQVMLCEPTIIERNITEIVYLTNTTIEKEICPKLAEYRNWSKPQCNITGFAPFSKDNSIRLSAGGDIWVTREPYVSCDPDKCYQFALGQGTTLNNVHSNDTVHDRTPYRTLLMNELGVPFHLGTKQVCIAWSSSSCHDGKAWLHVCVTGDDKNATASFIYNGRLVDSIVSWSKEILRTQESECVCINGTCTVVMTDGSASGKADTKILFIEEGKIVHTSTLSGSAQHVEECSCYPRYPGVRCVCRDNWKGSNRPIVDINIKDYSIVSSYVCSGLVGDTPRKNDSSSSSHCLDPNNEEGGHGVKGWAFDDGNDVWMGRTISEKLRLGYETFKVIEGWSNPNSKLQTNRQVIVDRGNRSGYSGIFSVEGKSCINRCFYVELIRGRKEETDVLWTSNSIVVFCSTSGTYGTGSWPDGADINLMPI

SEQ ID NO: 24531 - protein, 469 aa, Artificial Sequence; identical to SEQ ID NO: 24529
  derived and/or modified protein sequence (wt) from neuraminidase__InfluenzaA__AHL89297

SEQ ID NO: 24532 - protein, 469 aa, Artificial Sequence; identical to SEQ ID NO: 24529
  derived and/or modified protein sequence (wt) from neuraminidase__InfluenzaA__AHL89309

SEQ ID NO: 24533 - protein, 469 aa, Artificial Sequence
  derived and/or modified protein sequence (wt) from neuraminidase__InfluenzaA__AHL89321
MNPNQKIITIGSVSLTISTICFFMQIAILITTVTLHFKQYEFNSPPNNQVMLCEPTIIERNITEIVYLTNTTIEKEICPKLAEYRNWSKPQCDITGFAPFSKDNSIRLSAGGDIWVTREPYVSCDPDKCYQFALGQGTTLNNVHSNDTVHDRTPYRTLLMNELGVPFHLGTKQVCIAWSSSSCHDGKAWLHVCVTGDDKNATASFIYNGRLVDSVVSWSKDILRTQESECVCINGTCTVVMTDGSASGKADTKILFIEEGKIVHISTLSGSAQHVEECSCYPRYPGVRCVCRDNWKGSNRPIVDINIKNYSIVSSYVCSGLVGDTPRKTDSSSSSHCLDPNNEEGGHGVKGWAFDDGNDVWMGRTISEKLRLGYETFKVIEGWSNPNSKLQINRQVIVDRGNRSGYSGIFSVEGKSCINRCFYVELIRGRKEETEVLWTSNSIVVFCGTSGTYGTGSWPDGADINLMPI

SEQ ID NO: 24534 - protein, 469 aa, Artificial Sequence
  derived and/or modified protein sequence (wt) from neuraminidase__InfluenzaA__AHL89333
MNPNQKIITIGSVSLTISTICFFMQIAILIATVTLHFKQYEFNSPPNNQVMLCEPTIIERNITEIVYLTNTTIEKEICPKLAEYRNWSKPQCNITGFAPFSKDNSIRLSAGGDIWVTREPYVSCDPDKCYQFALGQGTTLNNVHSNDTVHDRTPYRTLLMNELGVPFHLGTKQVCIAWSSSSCHDGKAWLHVCVTGDDKNATASFIYNGRLVDSIVSWSKEILRTQESECVCINGTCAVVMTDGSASGKADTKILFIEEGKIVHTSTLSGSAQHVEECSCYPRYPGVRCVCRDNWKGSNRPIVDINIKDYSIVSSYVCSGLVGDTPRKNDSSSSSHCLDPNNEEGGHGVKGWAFDDGNDVWMGRTISEKLRLGYETFKVIEGWSNPNSKLQTNRQVIVDRGNRSGYSGIFSVEGKSCINRCFYVELIRGRKEETEVLWTSNSIVVFCGTSGTYGTGSWPDGADINLMPI

SEQ ID NO: 24535 - protein, 469 aa, Artificial Sequence; identical to SEQ ID NO: 14712
  derived and/or modified protein sequence (wt) from neuraminidase__InfluenzaA__AHL89345

SEQ ID NO: 24536 - protein, 469 aa, Artificial Sequence; identical to SEQ ID NO: 15706
  derived and/or modified protein sequence (wt) from neuraminidase__InfluenzaA__AHL89357

SEQ ID NO: 24537 - protein, 469 aa, Artificial Sequence; identical to SEQ ID NO: 15707
  derived and/or modified protein sequence (wt) from neuraminidase__InfluenzaA__AHL89369

SEQ ID NO: 24538 - protein, 469 aa, Artificial Sequence
  derived and/or modified protein sequence (wt) from neuraminidase__InfluenzaA__AHL89381
MNPNQKIITIGSVSLTISTICFFMQIAILITTVTLHFKQYEYNSPPNNQVMLCEPTIIERNITEIVYLTNTTIEKEICPKLAEYRNWSKPQCNITGFAPFSKDNSIRLSAGGDIWVTREPYVSCDPDKCYQFALGQGTTLNNVHSNDTVHDRTPYRTLLMNELGVPFHLGTKQVCIAWSSSSCHDGKAWLHVCVTGDDKNATASFIYNGRLVDSIVSWSKEILRTQESECVCINGTCTVVMTDGSASGKADTKILFIEEGKIVHTSTLSGSAQHVEECSCYPRYPGVRCVCRDNWKGSNRPIVDINIKDYSIVSSYVCSGLVGDTPRKNDSSSSSHCLDPNNEEGGHGVKGWAFDDGNDVWMGRTISEKLRLGYETFKVIEGWSNPNSKLQTNRQVIVDRGNRSGYSGIFSVEGKSCINRCFYVELIRGRKEETEVLWTSNSIVVFCGTSGTYGTGSWPDGADINLMPI

SEQ ID NO: 24539 - protein, 469 aa, Artificial Sequence; identical to SEQ ID NO: 24529
  derived and/or modified protein sequence (wt) from neuraminidase__InfluenzaA__AHL89405

SEQ ID NO: 24540 - protein, 469 aa, Artificial Sequence
  derived and/or modified protein sequence (wt) from neuraminidase__InfluenzaA__AHL89417
MNPNQKIITIGSVSLTISTICFFMQIAILITTVTLHFKQYEFNSPPNNQVMLCEPTIIERNITEIVYLTNTTIEKEICPKLAEYRNWSKPQCDITGFAPFSKDNSIRLSAGGDIWVTREPYVSCDPDKCYQFALGQGTTLNNVHSNDTVHDRTPYRTLLMNELGVPFHLGTKQVCIAWSSSSCHDGKAWLHVCVTGDDKNATASFIYNGRLVDSVVSWSKDILRTQESECVCINGTCTVVMTDGSASGKADTKILFIEEGKIVHTSTLSGSAQHVEECSCYPRYPGVRCVCRDNWKGSNRPIVDIDIKNYSIVSSYVCSGLVGDTPRKTDSSSSSHCLDPNNEEGGHGVKGWAFDDGNDVWMGRTISEKLRLGYETFKVIEGWSNPNSKLQINRQVIVDRGNRSGYSGIFSVEGKSCINRCFYVELIRGRKEETEVLWTSNSIVVFCGTSGTYGTGSWPDGADINLMPI

SEQ ID NO: 24541 - protein, 469 aa, Artificial Sequence; identical to SEQ ID NO: 15707
  derived and/or modified protein sequence (wt) from neuraminidase__InfluenzaA__AHL89429

SEQ ID NO: 24542 - protein, 469 aa, Artificial Sequence; identical to SEQ ID NO: 14712
  derived and/or modified protein sequence (wt) from neuraminidase__InfluenzaA__AHL89441

SEQ ID NO: 24543 - protein, 469 aa, Artificial Sequence; identical to SEQ ID NO: 14712
  derived and/or modified protein sequence (wt) from neuraminidase__InfluenzaA__AHL89453

SEQ ID NO: 24544 - protein, 469 aa, Artificial Sequence
  derived and/or modified protein sequence (wt) from neuraminidase__InfluenzaA__AHL89465
MNPNQKIITIGSVSLTISTICFFMQIAILITTVTLHFKQYEFNSPPNNQVMLCEPTIIERNITEIVYLTNITIEKEKCPKLAEYRNWSKPQCNITGFAPFSKDNSIRLSAGGDIWVTREPYVSCDPDRCYQFALGQGTTLNNVHSNDTVHDRTPYRTLLMNELGVPFHLGTKQVCIAWSSSSCHDGKAWLHVCVTGDDKNATASFIYNGRLVDSIVSWSKEILRTQESECVCINGTCTVVMTDGSASGKADTKILFIEEGKIVHTSTLSGSAQHVEECSCYPRYPGVRCVCRDNWKGSNRPIVDINIKDYSIVSSYVCSGLVGDTPRKNDSSSSSHCLDPNNEEGGHGVKGWAFDDGNDVWMGRTISEKLRLGYETFKVIEGWSNPNSKLQTNRQVIVDRGNRSGYSGIFSVEGKSCINRCFYVELIRGRKEETEVLWTSNSIVVFCGTSGTYGTGSWPDGADINLMPI

SEQ ID NO: 24545 - protein, 469 aa, Artificial Sequence; identical to SEQ ID NO: 24519
  derived and/or modified protein sequence (wt) from neuraminidase__InfluenzaA__AHL89477

SEQ ID NO: 24546 - protein, 469 aa, Artificial Sequence
  derived and/or modified protein sequence (wt) from neuraminidase__InfluenzaA__AHL89489
MNPNQKIITIGSVSLTISTICFFMQIAILITTVTLHFKQYEFNSPPNNQVMLCEPTIIERNITEIVYLTNTTIEKEICPKLAEYRNWSKPQCSITGFAPFSKDNSIRLSAGGDIWVTREPYVSCDPDKCYQFALGQGTTLNNVHSNDTVHDRTPYRTLLMNELGVPFHLGTKQVCIAWSSSSCHDGKAWLHVCVTGDDKNATASFIYNGRLVDSIVSWSKEILRTQESECVCINGTCTVVMTDGSASGKADTKILFIEEGKIVHTSTLSGSAQHVEECSCYPRYPGVRCVCRDNWKGSNRPIVDINIKDYSIVSSYVCSGLVGDTPRKNDRSSSSHCLDPNNEEGGHGVKGWAFDDGNDVWMGRTISEKSRSGYETFKVIEGWSNPHSKLQINRQVIVDRGNRSGYSGIFSVEGKSCINRCFYVELIRGRKEETEVLWTSNSIVVFCGTSGTYGTGSWPDGADINLMPI

SEQ ID NO: 24547 - protein, 469 aa, Artificial Sequence; identical to SEQ ID NO: 15707
  derived and/or modified protein sequence (wt) from neuraminidase__InfluenzaA__AHL89501

SEQ ID NO: 24548 - protein, 469 aa, Artificial Sequence; identical to SEQ ID NO: 15707
  derived and/or modified protein sequence (wt) from neuraminidase__InfluenzaA__AHL89513

SEQ ID NO: 24549 - protein, 469 aa, Artificial Sequence; identical to SEQ ID NO: 15707
  derived and/or modified protein sequence (wt) from neuraminidase__InfluenzaA__AHL89525

SEQ ID NO: 24550 - protein, 469 aa, Artificial Sequence; identical to SEQ ID NO: 15707
  derived and/or modified protein sequence (wt) from neuraminidase__InfluenzaA__AHL89537

SEQ ID NO: 24551 - protein, 470 aa, Artificial Sequence
  derived and/or modified protein sequence (wt) from neuraminidase__InfluenzaA__AHL89549
MNPNQKIITIGSISIAIGIISLMLQIGNIISIWASHSIQTGSQNHTGICNQRIITYENSTWVNHTYVNINNTNVVAGKDKTSVTLAGNSSLCSISGWAIYTKDNSIRIGSKGDVFVIREPFISCSHLECRTFFLTQGALLNDKHSNGTVKDRSPYRALMSCPLGEAPSPYNSKFESVAWSASACHDGMGWLTIGISGPDNGAVAVLKYNGIITETIKSWKKRILRTQESECVCVNGSCFTIMTDGPSNGAASYKIFKIEKGKVTKSIELNAPNFHYEECSCYPDTGTVMCVCRDNWHGSNRPWVSFNQHLDYQIGYICSGVFGDNPRPKDGKGSCNPVTVDGADGVKGFSYKYGNGVWIGRTKSNRLRKGFEMIWDPNGWTDTDSDFSVKQDVVAITDWSGYSGSFVQHPELTGLDCIRPCFWVELVRGLPRENTTIWTSGSSISFCGVDSDTANWSWPDGAELPFTIDK

SEQ ID NO: 24552 - protein, 470 aa, Artificial Sequence; identical to SEQ ID NO: 16030
  derived and/or modified protein sequence (wt) from neuraminidase__InfluenzaA__AHL89561

SEQ ID NO: 24553 - protein, 470 aa, Artificial Sequence; identical to SEQ ID NO: 16030
  derived and/or modified protein sequence (wt) from neuraminidase__InfluenzaA__AHL89573

SEQ ID NO: 24554 - protein, 470 aa, Artificial Sequence; identical to SEQ ID NO: 16065
  derived and/or modified protein sequence (wt) from neuraminidase__InfluenzaA__AHL89585

SEQ ID NO: 24555 - protein, 470 aa, Artificial Sequence
  derived and/or modified protein sequence (wt) from neuraminidase__InfluenzaA__AHL89597
MNPNQKIITIGSISIAIGIISLMLQIGNIISIWASHSIQTGSQNHTGICNQRIITYENSTWVNHTYVNINNTNVVAGKDKTSVTLAGNSSLCSISGWAIYTKDNSIRIGSKGDVFVIREPFISCSHLECRTFFLTQGALLNDKHSNGTVRDRSPYRALMSCPLGEAPSPYNSKFESVAWSASACHDGMGWLTIGISGPDNGAVAVLKYNGIITETIKSWKKRILRTQESECVCVNGSCFTIMTDGPSNGAASYKIFKIEKGKVTKSIELNAPNFHYEECSCYPDTGTVMCVCRDNWHGSNRPWVSFNQNLDYQVGYICSGVFGDNPRPKDGKGSCNPMTVDGADGVKGFSYKYGNGVWIGRTKSNKLRKGFEMIWDPNGWTDTDSDFSVKQDVVAITDWSGYSGSFVQHPELTGLDCIRPCFWVELVRGLPRENTTIWTSGSSISFCGVDSDTANWSWPDGAELPFTIDK

SEQ ID NO: 24556 - protein, 470 aa, Artificial Sequence; identical to SEQ ID NO: 16065
  derived and/or modified protein sequence (wt) from neuraminidase__InfluenzaA__AHL89609

SEQ ID NO: 24557 - protein, 470 aa, Artificial Sequence
  derived and/or modified protein sequence (wt) from neuraminidase__InfluenzaA__AHL89621
MNPNQKIITIGSISIAIGIISLMLQIGNIISIWASHSIQTGSQNHTGICNQRIITYENSTWVNHTYVSINNTNVVAGKDKTSVTLAGNSSLCSISGWAIYTKDNSIRIGSKGDVFVIREPFISCSHLECRTFFLTQGALLNDKHSNGTVKDRSPYRALMSCPLGEAPSPYNSKFESVAWSASACHDGMGWLTIGISGPDNGAVAVLKYNGIITETIKSWKKRILRTQESECVCVNGSCFTIMTDGPSNGAASYKIFKIEKGKVTKSIELNAPNFHYEECSCYPDTGTVMCVCRDNWHGSNRPWVSFNQNLDYQIGYICSGVFGDNPRPKDGKGSCNPVTVDGADGVKGFSYKYGNGVWIGRTKSNRHRKGFEMIWDPNGWTDTDSDFSVKQDVVAITDWSGYSGSFVQHPELTGLDCIRPCFWVELVRGLPRENTTIWTSGSSISFCGVDSDTANWSWPDGAELPFTIDK

SEQ ID NO: 24558 - protein, 470 aa, Artificial Sequence; identical to SEQ ID NO: 16056
  derived and/or modified protein sequence (wt) from neuraminidase__InfluenzaA__AHL89633

SEQ ID NO: 24559 - protein, 470 aa, Artificial Sequence; identical to SEQ ID NO: 16065
  derived and/or modified protein sequence (wt) from neuraminidase__InfluenzaA__AHL89645

SEQ ID NO: 24560 - protein, 470 aa, Artificial Sequence; identical to SEQ ID NO: 16030
  derived and/or modified protein sequence (wt) from neuraminidase__InfluenzaA__AHL89657

SEQ ID NO: 24561 - protein, 470 aa, Artificial Sequence
  derived and/or modified protein sequence (wt) from neuraminidase__InfluenzaA__AHL89669
MNPNQKIITIGSISIAIGIISLMLQIGNIISIWASHSIQTGSQNHTGICNQRIITYENSTWVNHTYVNINNTNVVAGKDKTSVTLAGNSSLCSISGWAIYTKDNSIRIGSKGDVFVIREPFISCSHLECRTFFLTQGALLNDKHSNGTVKDRSPYRALMSCPLGEAPSPYNSKFESVAWSASACHDGMGWLTIGISGPDNGAVAVLKYNGIITETIKSWKKRILRTQESECVCVNGSCFTIMTDGPSNGAASYKIFKIEKGKVTKSIELNAPNFHYEECSCYPDTGTVMCVCRDNWHGSNRPWVSFNQNLDYQVGYICSGVFGDNPRPKDGKGSCNPMTVDGADGVKGFSYKYGNGVWIGRTKSNELRKGFEMIWDPNGWTDTDSDFSVKQDVVAITDWSGYSGSFVQHPELTGLDCIRPCFWVELVRGLPRENTTIWTSGSSISFCGVDSDTANWSWPDGAELPFTIDK

SEQ ID NO: 24562 - protein, 470 aa, Artificial Sequence
  derived and/or modified protein sequence (wt) from neuraminidase__InfluenzaA__AHL89681
MNPNQKIITIGSISIAIGIISLMLQIGNIISIWASHSIQTGSQNHTGICNQRIITYENSTWVNHTYVNINNTNVVAGKDKTSVTLAGNSSLCSISGWAIYTKDNSIRIGSKGDVFVIREPFISCSHLECRTFFLTQGALLNDKHSNGTVKDRSPYRALMSCPLGEAPSPYNSKFESVAWSASACHDGMGWLTIGISGPDNGAVAVLKYNGIITETIKSWKKRILRTQESECVCVNGSCFTIMTDGPSNGAASYKIFKIEKGKITKSIELNAPNFHYEECSCYPDTGTVMCVCRDNWHGSNRPWVSFNQNLDYQVGYICSGVFGDNPRPKDGKGSCNPMTVDGADGVKGFSYKYGNGVWIGRTKSNKLRKGFEMIWDPNGWTDTDSDFSVKQDVVAITDWSGYSGSFVQHPELTGLDCIRPCFWVELVRGLPRENATIWTSGSSISFCGVDSDTANWSWPDGAELPFTIDK

SEQ ID NO: 24563 - protein, 470 aa, Artificial Sequence
  derived and/or modified protein sequence (wt) from neuraminidase__InfluenzaA__AHL89693
MNPNQKIITIGSISIAIGIISLMLQIGNIISIWASHSIQTGSQNHTGICNQRIITYENSTWVNHTYVNINNTNVVAGKDKTSVTLAGNSSLCSISGWAIYTKDNSIRIGSKGDVFVIREPFISCSHLECRTFFLTQGALLNDKHSNGTVKDRSPYRALMSCPLGEAPSPYNSKFESVAWSASACHDGMGWLTIGISGPDNGAVAVLKYKGIITGTIKSWRKQILRTQESECVCMNGSCFTIMTDGPSNGAASYKIFKIEKGKVTKSIELNAPNFHYEECSCYPDTGIVMCVCRDNWHGSNRPWVSFNQNLDYQIGYICSGVFGDNPRPKDGEGSCNPVTVDGADGVKGFSYKYDDGVWIGRTKSNRLRKGFEMIWDPNGWTNTDSDFSVKQDVVAITDWSGYSGSFVQHPELTGLDCIRPCFWVELVRGLPRENTTIWTSGSSISFCGVNSDTANWSWPDGAELPFTIDK

SEQ ID NO: 24564 - protein, 470 aa, Artificial Sequence
  derived and/or modified protein sequence (wt) from neuraminidase__InfluenzaA__AHL89705
MNPNQKIITIGSISIAIGIISLMLQIGNIISIWASHSIQNGSQNHTGICNQRIITYENSTWVNHTYVSINNTNVVAGKDKTSVTLAGNSSLCSISGWAIYTKDNSIRIGSKGDVFVIREPFISCSHLECRTFFLTQGALLNDKHSNGTVKDRSPYRALMSCPLGEAPSPYNSKFESVAWSASACHDGMGWLTIGISGPDNGAVAVLKYNGIITETIKSWKKRILRTQESECVCVNGSCFTIMTDGPSNGAASYKIFKIEKGKVTKSIELNAPNFHYEECSCYPDTGTVMCVCRDNWHGSNRPWVSFNQNLDYQIGYICSGVFGDNPRPKDGKGSCNPVTVDGADGVKGFSYKYGNGVWIGRTKSNRLRKGFEMIWDPNGWTDTDSDFSVKQDVVAITDWSGYSGSFVQHPELTGLDCIRPCFWVELVRGLPRENTTIWTSGSSISFCGVDSDTANWSWPDGAELPFTIDK

SEQ ID NO: 24565 - protein, 470 aa, Artificial Sequence; identical to SEQ ID NO: 16030
  derived and/or modified protein sequence (wt) from neuraminidase__InfluenzaA__AHL89717

SEQ ID NO: 24566 - protein, 470 aa, Artificial Sequence; identical to SEQ ID NO: 16030
  derived and/or modified protein sequence (wt) from neuraminidase__InfluenzaA__AHL89729

SEQ ID NO: 24567 - protein, 470 aa, Artificial Sequence
  derived and/or modified protein sequence (wt) from neuraminidase__InfluenzaA__AHL89753
MNPNQKIITIGSISIAIGIISLMLQIGNIISIWASHSIQTGSQNHTGICNQRIITYENSTWVNHTYVSINNTNVVAGNDKTSVTLAGNSSLCSISGWAIYTKDNSIRIGSKGDVFVIREPFISCSHLECRTFFLTQGALLNDKHSNGTVKDRSPYRALMSCPLGEAPSPYNSKFESVAWSASACHDGMGWLTIGISGPDNGAVAVLKYNGIITETIKSWKKRILRTQESECVCVNGSCFTIMTDGPSNGAASYKIFKIEKGKVTKSIELNAPNFHYEECSCYPDTGTVMCVCRDNWHGSNRPWVSFNQNLDYQIGYICSGVFGDNPRPKDGKGSCNPVTVDGADGVKGFSYKYGNGVWIGRTKSNRLRKGFEMIWDPNGWTDTDSDFSVKQDVVAITDWSGYSGSFVQHPELTGLDCIRPCFWVELVRGLPRENTTIWTSGSSISFCGVDSDTANWSWPDGAELPFTIDK

SEQ ID NO: 24568 - protein, 470 aa, Artificial Sequence; identical to SEQ ID NO: 16030
  derived and/or modified protein sequence (wt) from neuraminidase__InfluenzaA__AHL89765

SEQ ID NO: 24569 - protein, 470 aa, Artificial Sequence; identical to SEQ ID NO: 16071
  derived and/or modified protein sequence (wt) from neuraminidase__InfluenzaA__AHL89777

SEQ ID NO: 24570 - protein, 470 aa, Artificial Sequence; identical to SEQ ID NO: 16030
  derived and/or modified protein sequence (wt) from neuraminidase__InfluenzaA__AHL89789

SEQ ID NO: 24571 - protein, 470 aa, Artificial Sequence
  derived and/or modified protein sequence (wt) from neuraminidase__InfluenzaA__AHL89801
MNPNQKIITIGSISIAIGIISLMLQIGNIISIWASHSIQTGSQNHTGICNQRIITYENSTWVNHTYVNINNTNVVAGKDKTSVALAGNSSLCSISGWAIYTKDNSIRIGSKGDVFVIREPFISCSHLECRTFFLTQGALLNDKHSNGTVKDRSPYRALMSCPLGEAPSPYNSKFESVAWSASACHDGMGWLTIGISGPDNGAVAVLKYNGIITETIKSWKKRILRTQESECVCVNGSCFTIMTDGPSNGAASYKIFKIEKGKVTKSIELNAPNFHYEECSCYPDTGTVMCVCRDNWHGSNRPWVSFNQNLDYQIGYICSGVFGDNPRPKDGKGSCNPVTVDGADGVKGFSYKYGNGVWIGRTKSNRLRKGFEMIWDPNGWTNTDSDFSVKQDVVAITDWSGYSGSFVQHPELTGLDCIRPCFWVELVRGLPRENTTIWTSGSSISFCGVDSDTANWSWPDGAELPFTIDK

SEQ ID NO: 24572 - protein, 470 aa, Artificial Sequence
  derived and/or modified protein sequence (wt) from neuraminidase__InfluenzaA__AHL89813
MNPNQKIITIGSISIAIGIISLMLQIGNIISIWASHSIQTGSQNHTGICNQRIITYENSTWVNHTYVNINNTNVVAGKDKTSVTLAGNSSLCSISGWAIYTKDNSIRIGSKGDVFVIREPFISCSHLECRTFFLTQGALLNDKHSNGTVKDRSPYRALMSCPLGEAPSPYNSKFESVAWSASACHDGMGWLTIGISGPDNGAVAVLKYNGIITETIKSWKKRILRTQESECVCVNGSCFTIMTDGPSNGAASYKIFKIEKGKVTKSIELNAPNFHYEECSCYPDTGTVMCVCRDNWHGSNRPWVSFNQNLDYQVGYICSGVFGDNPRPKDGKGSCNPMTADGADGVKGFSYKYGNGVWIGRTKSNKLRKGFEMIWDPNGWTDTDSDFSVKQDVVAITDWSGYSGSFVQHPELTGLDCIRPCFWVELVRGLPRENATIWTSGSSISFCGVDSDTANWSWPDGAELPFTIDK

SEQ ID NO: 24573 - protein, 470 aa, Artificial Sequence; identical to SEQ ID NO: 16071
  derived and/or modified protein sequence (wt) from neuraminidase__InfluenzaA__AHL89825

SEQ ID NO: 24574 - protein, 470 aa, Artificial Sequence; identical to SEQ ID NO: 16030
  derived and/or modified protein sequence (wt) from neuraminidase__InfluenzaA__AHL89837

SEQ ID NO: 24575 - protein, 470 aa, Artificial Sequence
  derived and/or modified protein sequence (wt) from neuraminidase__InfluenzaA__AHL89849
MNPNQKIITIGSISIAIGIISLMLQIGNIISIWASHSIQTGSQNHTGICNQRIITYENSTWVNHTYVYINNTNVVAGKDKTSVTLAGNSSLCSISGWAIYTKDNSIRIGSKGDVFVIREPFISCSHLECRTFFLTQGALLNDKHSNGTVKDRSPYRALMSCPLGEAPSPYNSKFESVAWSASACHDGMGWLTIGISGPDNGAVAVLKYNGIITETIKSWKKRILRTQESECVCVNGSCFTIMTDGPSNGAASYKIFKIEKGMVTKSIELNAPNFHYEECSCYPDTGTVMCVCRDNWHGSNRPWVSFNQNLDYQIGYICSGVFGDNPRPKDGKGSCNPVTVDGADGVKGFSYKYGNGVWIGRTKSNRLRKGFEMIWDPNGWTNTDSDFSVKQDVVAITDWSGYSGSFVQHPELTGLDCIRPCFWVELVRGLPRENTTIWTSGSSISFCGVDSDTANWSWPDGAELPFTIDK

SEQ ID NO: 24576 - protein, 469 aa, Artificial Sequence; identical to SEQ ID NO: 16066
  derived and/or modified protein sequence (wt) from neuraminidase__InfluenzaA__AHL89861

SEQ ID NO: 24577 - protein, 469 aa, Artificial Sequence
  derived and/or modified protein sequence (wt) from neuraminidase__InfluenzaA__AHL89873
MNPNQKIITIGSVSLTISTICFFMQTAILITTVTLHFKQYEFNSPPNNQVMLCEPTIIERNITEIVYLTNTTIEKEICPKLAEYRNWSKPQCDITGFAPFSKDNSIRLSAGGDIWVTREPYVSCDPDKCYQFALGQGTTLNNVHSNDTVRDRTPYRTLLMNELGVPFHLGTKQVCIAWSSSSCHDGKAWLHVCITGDDKNATASFIYNGRLVDSIVSWSKEILRTQESECVCINGTCTVVMTDGSASGKADTKILFIEEGKIVHTSTLSGSAQHVEECSCYPRYPGVRCVCRDNWKGSNRPIVDINIKDHSIVSSYVCSGLVGDTPRKNDSSSSSHCLDPNNEEGGHGVKGWAFDDGNDVWMGRTISEKSRLGYETFKVIEGWSNPKSKLQINRQVIVDGGNRSGYSGIFSVEGKSCINRCFYVELIRGRKEETEVLWTSNSIVVFCGTSGTYGTGSWPDGADINLMPI

SEQ ID NO: 24578 - protein, 469 aa, Artificial Sequence; identical to SEQ ID NO: 16743
  derived and/or modified protein sequence (wt) from neuraminidase__InfluenzaA__AHL89885

SEQ ID NO: 24579 - protein, 469 aa, Artificial Sequence
  derived and/or modified protein sequence (wt) from neuraminidase__InfluenzaA__AHL89897
MNPNQKIITIGSVSLTISTICFFMQIAILITTVTLHFKQYEFNSPPNNQVMLCEPTIIERNITEIVYLTNTTIEKEICPKLAEYRNWSKPQCDITGFAPFSKDNSIRLSAGGDIWVTREPYVSCDPDKCYQFALGQGTTLNNVHSNDTVRDRTPYRTLLMNELGVPFHLGTKQVCIAWSSSSCHDGKAWLHVCITGDDKNATASFIYNGRLVDSIVSWSKEILRTQESECVCINGTCTVVMTDGSASGKADTKILFIEEGKIVHTSTLSGSAQHVEECSCYPRYPGVRCVCRDNWKGSNRPIVDINIKDHSIVSSYVCSGLVGDTPRKNDSSSSSHCLDPNNEEGGHGVKGWAFDDGNDVWMGRTISEKSRLGYETFKVIEGWSNPKSKLQTNRQVIVDRGNRSGYSGIFSVEGKSCINRCFYVELIRGRKEETEVLWTSNSIVVFCGTSGTYGTGSWPDGADINLMPI

SEQ ID NO: 24580 - protein, 469 aa, Artificial Sequence; identical to SEQ ID NO: 16402
  derived and/or modified protein sequence (wt) from neuraminidase__InfluenzaA__AHL89909

SEQ ID NO: 24581 - protein, 469 aa, Artificial Sequence; identical to SEQ ID NO: 16041
  derived and/or modified protein sequence (wt) from neuraminidase__InfluenzaA__AHL89921

SEQ ID NO: 24582 - protein, 469 aa, Artificial Sequence; identical to SEQ ID NO: 16402
  derived and/or modified protein sequence (wt) from neuraminidase__InfluenzaA__AHL89933

SEQ ID NO: 24583 - protein, 469 aa, Artificial Sequence; identical to SEQ ID NO: 16041
  derived and/or modified protein sequence (wt) from neuraminidase__InfluenzaA__AHL89945

SEQ ID NO: 24584 - protein, 469 aa, Artificial Sequence
  derived and/or modified protein sequence (wt) from neuraminidase__InfluenzaA__AHL89957
MNPNQKIITIGSVSLTISTICFFMQIAILITTVTLHFKQYEFNSPPNNQVMLCEPTIIERNITEIVYLTNTTIEKEICPKLAEYRNWSKPQCDITGFAPFSKDNSIRLSAGGDIWVTREPYVSCDPDKCYQFALGQGTTLNNVHSNDTVRDRTPYRTLLMNELGVPFHLGTKQVCIAWSSSSCHDGKAWLHVCITGDDKNATASFIYNGRLVDSIVSWSKEILRTQESECVCINGTCTVVMTDGSASGKADTKILFIKEGKIVHTSTLSGSAQHVEECSCYPRYPGVRCVCRDNWKGSNRPIVDINIKDHSIVSSYVCSGLVGDTPRKNDSSSSSHCLDPNNEEGGHGVKGWAFDDGNDVWMGRTISEKSRLGYETFKVIEGWSNPKSKLQINRQVIVDRGNRSGYSGIFSVEGKSCINRCFYVELIRGRKEETEVLWTSNSIVVFCGTSGTYGTGSWPDGADINLMPI

SEQ ID NO: 24585 - protein, 469 aa, Artificial Sequence; identical to SEQ ID NO: 15884
  derived and/or modified protein sequence (wt) from neuraminidase__InfluenzaA__AHL89969

SEQ ID NO: 24586 - protein, 469 aa, Artificial Sequence; identical to SEQ ID NO: 15884
  derived and/or modified protein sequence (wt) from neuraminidase__InfluenzaA__AHL89981

SEQ ID NO: 24587 - protein, 469 aa, Artificial Sequence
  derived and/or modified protein sequence (wt) from neuraminidase__InfluenzaA__AHL89993
MNPNQKIITIGSVSLSISTICFFMQIAILITTVTLHFKQYEFNSPPNNQVMLCEPTIIERNITEIVYLTNTTIEKEICPKLAEYRNWSKPQCDITGFAPFSKDNSIRLSAGGDIWVTREPYVSCDPDKCYQFALGQGTTLNNVHSNDTVRDRTPYRTLLMNELGVPFHLGTKQVCIAWSSSSCHDGKAWLHVCITGDDKNATASFIYNGRLVDSIVSWSKEILRTQESECVCINGTCTLVMTDGSASGKADTKILFIEEGKIVHTSTLSGSAQHVEECSCYPRYPGVRCVCRDNWKGSNRPIVDINIKDHSIVSSYVCSGLVGDTPRKNDSSSSSHCLDPNNEEGGHGVKGWAFDDGNDVWMGRTISEKSRLGYETFKVIEGWSNPKSKLQINRQVIVDRGNRSGYSGIFSVEGKSCINRCFYVELIRGRKEETEVLWTSNSIVVFCGTSGTYGTGSWPDGADINLMPI

SEQ ID NO: 24588 - protein, 469 aa, Artificial Sequence
  derived and/or modified protein sequence (wt) from neuraminidase__InfluenzaA__AHL90005
MNPNQKIITIGSVSLTISTICFFMQIAILITTVTLHFKQYEFSSPPNNQVMLCEPTIIKRNITEIVYLTNTTIEKEICPKLAEYRNWSKPQCDITGFAPFSKDNSIRLSAGGDIWVTREPYVSCDPDKCYQFALGQGTTLNNVHSNDTVHDRTPYRTLLMNELGVPFHLGTKQVCIAWSSSSCHDGKAWLHVCVTGDDKNATASFIYNGRLVDSIVSWSKEILRTQESECVCINGTCTVVMTDGSASGKADTKILFIEEGKIVHTSTLSGSAQHVEECSCYPRYPGVRCVCRDNWKGSNRPIVDINIKDYSIVSRYVCSGLVGDTPRKNDSYSSSHCLDPNNEEGGHGVKGWAFDDGNDVWMGRTISEKSRSGYETFKVIEGWSNPNSKLQINRQVIVDRGNRSGYSGIFSVEGKSCINRCFYVELIRGRKEETEVLWTSNSIVVFCGTSGTYGTGSWPDGADINLMPI

SEQ ID NO: 24589 - protein, 469 aa, Artificial Sequence; identical to SEQ ID NO: 16090
  derived and/or modified protein sequence (wt) from neuraminidase__InfluenzaA__AHL90017

SEQ ID NO: 24590 - protein, 469 aa, Artificial Sequence; identical to SEQ ID NO: 16041
  derived and/or modified protein sequence (wt) from neuraminidase__InfluenzaA__AHL90029

SEQ ID NO: 24591 - protein, 469 aa, Artificial Sequence; identical to SEQ ID NO: 16057
  derived and/or modified protein sequence (wt) from neuraminidase__InfluenzaA__AHL90041

SEQ ID NO: 24592 - protein, 469 aa, Artificial Sequence; identical to SEQ ID NO: 16057
  derived and/or modified protein sequence (wt) from neuraminidase__InfluenzaA__AHL90053

SEQ ID NO: 24593 - protein, 469 aa, Artificial Sequence; identical to SEQ ID NO: 22322
  derived and/or modified protein sequence (wt) from neuraminidase__InfluenzaA__AHL90065

SEQ ID NO: 24594 - protein, 469 aa, Artificial Sequence; identical to SEQ ID NO: 24584
  derived and/or modified protein sequence (wt) from neuraminidase__InfluenzaA__AHL90077

SEQ ID NO: 24595 - protein, 469 aa, Artificial Sequence; identical to SEQ ID NO: 16066
  derived and/or modified protein sequence (wt) from neuraminidase__InfluenzaA__AHL90089

SEQ ID NO: 24596 - protein, 469 aa, Artificial Sequence; identical to SEQ ID NO: 16743
  derived and/or modified protein sequence (wt) from neuraminidase__InfluenzaA__AHL90101

SEQ ID NO: 24597 - protein, 469 aa, Artificial Sequence; identical to SEQ ID NO: 16041
  derived and/or modified protein sequence (wt) from neuraminidase__InfluenzaA__AHL90113

SEQ ID NO: 24598 - protein, 470 aa, Artificial Sequence; identical to SEQ ID NO: 16632
  derived and/or modified protein sequence (wt) from neuraminidase__InfluenzaA__AHL90125

SEQ ID NO: 24599 - protein, 470 aa, Artificial Sequence
  derived and/or modified protein sequence (wt) from neuraminidase__InfluenzaA__AHL90136
MNPNQKIITIGSISIAIGIISLMLQIGNIISIWASHSIQTGSQNNTGICNQRIITYENSTWVNHTYVNINNTNVVAGEDKTSVTLAGNSSLCSISGWAIYTKDNSIRIGSKGDVFVIREPFISCSHLECRTFFLTQGALLNDKHSNGTVKDRSPYRALMSCPLGEAPSPYNSKFESVAWSASACHDGMGWLTIGISGPDNGAVAVLKYNGIITGTIKSWKKQILRTQESECVCMNGSCFTIMTDGPSNKAASYKIFKIEKGKVTKSIELNAPNFYYEECSCYPDSGMVMCVCRDNWHGSNRPWVSFNQNLDYQIGYICSGVFGDNPRPEDGEGSCNPVTVDGANGVKGFSYKYGNGVWIGRTKSNRLRKGFEMIWDPNGWTNTDSDFSVKQDVVAITDWSGYSGSFVQHPELTGLDCIRPCFWVELVRGLPRENTTIWTSGSSISFCGVNSDTANWSWPDGAELPFTIDK

SEQ ID NO: 24600 - protein, 470 aa, Artificial Sequence; identical to SEQ ID NO: 16632
  derived and/or modified protein sequence (wt) from neuraminidase__InfluenzaA__AHL90160

SEQ ID NO: 24601 - protein, 470 aa, Artificial Sequence
  derived and/or modified protein sequence (wt) from neuraminidase__InfluenzaA__AHL90172
MNPNQKIITIGSISIAIGIISLMLQIGNIISIWASHSIQTGSQNNTGICNQRIITYENSTWVNHTYVNINNTNVVAGEDKTSVTLAGNSSLCSISGWAIYTKDNSIRIGSKGDVFVIREPFISCSHLECRTFFLTQGALLNDKHSNGTVKDRSPYRALMSCPLGEAPSPYNSKFESVAWSASACHDGMGWLTIGISGPDNGAVAVLKYNGIITGTIKSWKKQILRTQESECVCMNGSCFTIMTDGPSNKAASYKIFKIEKGKVTKSIELNAPNFHYEECSCYPDTGIVMCVCRDNWHGSNRPWVSFNQNLDYQIGYICSGVFGDNPRPEDGEGNCNPVTVDGANGVKGFSYKYGNGVWIGRTKSNRLRKGFEMIWDPNGWTNTDSDFSVKQDVVAITDWSGYSGSFVQHPELTGLDCIRPCFWVELVRGLPRENTTIWTSGSSISFCGVNSDTANWSWPDGAELPFTIDK

SEQ ID NO: 24602 - protein, 470 aa, Artificial Sequence; identical to SEQ ID NO: 16632
  derived and/or modified protein sequence (wt) from neuraminidase__InfluenzaA__AHL90184

SEQ ID NO: 24603 - protein, 470 aa, Artificial Sequence; identical to SEQ ID NO: 19930
  derived and/or modified protein sequence (wt) from neuraminidase__InfluenzaA__AHL90196

SEQ ID NO: 24604 - protein, 470 aa, Artificial Sequence; identical to SEQ ID NO: 16632
  derived and/or modified protein sequence (wt) from neuraminidase__InfluenzaA__AHL90220

SEQ ID NO: 24605 - protein, 470 aa, Artificial Sequence
  derived and/or modified protein sequence (wt) from neuraminidase__InfluenzaA__AHL90232
MNPNQKIITIGSISIAIGIISLMLQIGNIISIWASHSIQTGSQNNTGICNQRIITYENSTWVNHTYVNINNTNVVAGEDKTSVTLAGNSSLCSISGWAIYTKDNSIRIGSKGDVFVIREPFISCSHLECRTFFLTQGALLNDKHSNGTVKDRSPYRALMSCPLGEAPSPYNSKFESVAWSASACHDGMGWLTIGISGPDNGAVAVLKYNGIITGTIKSWKKQILRTQESECVCMNGSCFTIMTDGPSNKAASYKIFKIEKGKVTKSIELNAPNFHYEECSCYPDTGIVMCVCRDNWHGSNRPWVSFNQNLDYQIGYICSGVFGDNPRPEDGEGSCNPVTVNGANGVKGFSYKYDNGVWIGRTKSNRLRKGFEMIWDPNGWTNTDSDFSVKQDVVAITDWSGYSGSFVQHPELTGLDCIRPCFWVELVRGLPRENTTIWTSGSSISFCGVNSDTANWSWPDGAELPFTIDK

SEQ ID NO: 24606 - protein, 470 aa, Artificial Sequence
  derived and/or modified protein sequence (wt) from neuraminidase__InfluenzaA__AHL90244
MNPNQKIITIGSISIAIGIISLMLQIGNIISIWASHSIQTGSQNNTGICNQRIITYENSTWVNHTYVNINNTNVVAGEDKTSVTLAGNSSLCSISGWAIYTKDNSIRIGSKGDVFVIREPFISCSHLECRTFFLTQGALLNDKHSNGTVKDRSPYRALMSCPLGEAPSPYNSKFESVAWSASACHDGMGWLTIGISGPDNGAVAVLKYNGIITGTIKSWKKQILRTQESECVCMNGSCFTIMTDGPSNKAASYKIFKIEKGKVTKSIELNAPNFHYEECSCYPDTGIVMCVCRDNWHGSNRPWVSFNQNLDYQIGYICSGVFGDNPRPEDGEGSCNPMTVDGANGVKGFSYKYDNGVWIGRTKSNRLRKGFEMIWDPNGWTNTDSDFSVKQDVVAITDWSGYSGSFVQHPELTGLDCIRPCFWVELVRGLPRENTTIWTSGSSISFCGVNSDTASWSWPDGAELPFTIDK

SEQ ID NO: 24607 - protein, 470 aa, Artificial Sequence; identical to SEQ ID NO: 17461
  derived and/or modified protein sequence (wt) from neuraminidase__InfluenzaA__AHL90256

SEQ ID NO: 24608 - protein, 470 aa, Artificial Sequence
  derived and/or modified protein sequence (wt) from neuraminidase__InfluenzaA__AHL90268
MNPNQKIITIGSISIAIGIISLMLQIGNIISIWASHSIQTGSQNNTGICNQRIITYENSTWVNHTYVNINNTNVVAGEDKTSVTLAGNSSLCSISGWAIYTKDNSIRIGSKGDVFVIREPFISCSHLECRTFFLTQGALLNDKHSNGTVKDRSPYRALMSCPLGEAPSPYNSKFESVAWSASACHDGMGWLTIGISGPDNGAVAVLKYNGIITGTIKSWKKQILRTQESECVCMNGSCFTIMTDGPSNKAASYKIFKIEKGKVTKSIELNAPNFHYEECSCYPDTSIVMCVCRDNWHGSNRPWVSFNQNLDYQIGYICSGVFGDNPRPEDGEGSCNPVTVDGANGVKGFSYKYDNGVWIGRTKSNRLRKGFEMIWDPNGWTNTDRDFSVKQDVVAITDWSGYSGSFVQHPELTGLDCIRPCFWVELVRGLPRENTTIWTSGSSISFCGVNSDTANWSWPDGAELPFTIDK

SEQ ID NO: 24609 - protein, 470 aa, Artificial Sequence; identical to SEQ ID NO: 17461
  derived and/or modified protein sequence (wt) from neuraminidase__InfluenzaA__AHL90280

SEQ ID NO: 24610 - protein, 470 aa, Artificial Sequence
  derived and/or modified protein sequence (wt) from neuraminidase__InfluenzaA__AHL90304
MNPNQKIITIGSISIAIGIISLMLQIGNIISIWASHSIQTGSQNNTEICNQRIITYENSTWVNHTYVNINNTNVVAGEDKTSVTLAGNSSLCSISGWAIYTKDNSIRIGSKGDVFVIREPFISCSHLECRTFFLTQGALLNDKHSNGTVKDRSPYRALMSCPLGEAPSPYNSKFESVAWSASACHDGMGWLTIGISGPDNGAVAVLKYNGIITGTIKSWKKQILRTQESECVCMNGSCFTIMTDGPSNKAASYKIFKIEKGKVTKSIELNAPNFHYEECSCYPDTGIVMCVCRDNWHGSNRPWVSFNQNLDYQIGYICSGVFGDNPRPEDGEGSCNPVTVDGANGVKGFSYKYDNGVWIGRTKSNRLRKGFEMIWDPNGWTNTDSDFSVKQDVVAITDWSGYSGSFVQHPELTGLDCIRPCFWVELVRGLPRENTTIWTSGSSISFCGVNSDTANWSWPDGAELPFTIDK

SEQ ID NO: 24611 - protein, 470 aa, Artificial Sequence; identical to SEQ ID NO: 16632
  derived and/or modified protein sequence (wt) from neuraminidase__InfluenzaA__AHL90316

SEQ ID NO: 24612 - protein, 470 aa, Artificial Sequence
  derived and/or modified protein sequence (wt) from neuraminidase__InfluenzaA__AHL90328
MNPNKKIITIGSISIAIGIISLMLQIGNIISIWASHSIQTGSQNNTGICNQRIITYENSTWVNHTYVNINNTNVVAGEDKTSVTLAGNSSLCSISGWAIYTKDNSIRIGSKGDVFVIREPFISCSHLECRTFFLTQGALLNDKHSNGTVKDRSPYRALMSCPLGEAPSPYNSKFESVAWSASACHDGMGWLTIGISGPDNGAVAVLKYNGIITGTIKSWKKQILRTQESECVCMNGSCFTIMTDGPSNKAASYKIFKIEKGKVTKSIELNAPNFHYEECSCYPDTGIVMCVCRDNWHGSNRPWVSFNQNLDYQIGYICSGVFGDNPRPEDGEGSCNPVTVDGANGVKGFSYKYDNGVWIGRTKSNRLRKGFEMIWDPNGWTNTDSDFSVKQDVVAVTDWSGYSGSFVQHPELTGLDCIRPCFWVELVRGLPRENTTIWTSGSSISFCGVNSDTANWSWPDGAELPFTIDK

SEQ ID NO: 24613 - protein, 470 aa, Artificial Sequence; identical to SEQ ID NO: 16632
  derived and/or modified protein sequence (wt) from neuraminidase__InfluenzaA__AHL90340

SEQ ID NO: 24614 - protein, 470 aa, Artificial Sequence
  derived and/or modified protein sequence (wt) from neuraminidase__InfluenzaA__AHL90352
MNPNQKIMTIGSISIAIGIISLMLQIGNIISIWASHSIQTGSQNNTGICNQRIITYENSTWVNHTYVNINNTNVVAGEDKTSVTLAGNSSLCSISGWAIYTKDNSIRIGSKGDVFVIREPFISCSHLECRTFFLTQGALLNDKHSNGTVKDRSPYRALMSCPLGEAPSPYNSKFESVAWSASACHDGMGWLTIGISGPDNGAVAVLKYNGIITGTIKSWKKQILRTQESECVCMNGSCFTIMTDGPSNKAASYKIFKIEKGKVTKSIELNAPNFHYEECSCYPDTGIVMCVCRDNWHGSNRPWVSFNQNLDYQIGYICSGVFGDNPRPEDGEGSCSPVTVDGANGVKGFSYKYDNGVWIGRTKSNRLRKGFEMIWDPNGWTNTDSDFSVKQDVVAITDWSGYSGSFVQHPELTGLDCIRPCFWVELVRGMPRENTTIWTSGSSISFCGVNSDTANWSWPDGAELPFTIDK

SEQ ID NO: 24615 - protein, 470 aa, Artificial Sequence; identical to SEQ ID NO: 23461
  derived and/or modified protein sequence (wt) from neuraminidase__InfluenzaA__AHL90364

SEQ ID NO: 24616 - protein, 470 aa, Artificial Sequence; identical to SEQ ID NO: 17461
  derived and/or modified protein sequence (wt) from neuraminidase__InfluenzaA__AHL90376

SEQ ID NO: 24617 - protein, 469 aa, Artificial Sequence
  derived and/or modified protein sequence (wt) from neuraminidase__InfluenzaA__AHL90388
MNPNQKIITIGSVSLIISTICFFMQIAILITTVTLHFKQYEFNSSPNNQVMLCEPTIIERNITEIVYLTNTIIEKEICPKLAEYRNWSKPQCDITGFAPFSKDNSIRLSAGGDIWVTREPYVSCDPDKCYQFALGQGTTLNNVHSNNTVRDRTPYRTLLMNELGVPFHLGTKQVCIAWSSSSCHDGKAWLHVCITGDDKNATASFIYNGRLVDSIVSWSKEILRTQESECVCINGTCTVVMTDGSASGKADTKILFIEEGKIVHTSTLSGSAQHVEECSCYPRYPGVRCVCRDNWKGSNRPIVDINIKDHSIVSSYVCSGLVGDTPRKNDSSSSSHCLDPNNEEGGHGVKGWAFDDGNDVWMGRTISEKSRLGYETFKVIEGWSNPKSKLQINRQVIVDRGNRSGYSGIFSVEGKSCINRCFYVELIRGRKEETEVLWTSNSIVVFCGTSGTYGTGSWPDGADINLMPI

SEQ ID NO: 24618 - protein, 469 aa, Artificial Sequence; identical to SEQ ID NO: 16512
  derived and/or modified protein sequence (wt) from neuraminidase__InfluenzaA__AHL90400

SEQ ID NO: 24619 - protein, 469 aa, Artificial Sequence; identical to SEQ ID NO: 16512
  derived and/or modified protein sequence (wt) from neuraminidase__InfluenzaA__AHL90413

SEQ ID NO: 24620 - protein, 469 aa, Artificial Sequence
  derived and/or modified protein sequence (wt) from neuraminidase__InfluenzaA__AHL90425
MNPNQKIITIGSVSLTISTICFFMQTAILITTVTLHFKQYEFNSPPNNQVMLCEPTIIERNITEIVYLTNTTIEKEICPKLAEYRNWSKPQCDITGFAPFSKDNSIRLSAGGDIWVTREPYVSCDPDKCYQFALGQGTTLNNVHSNDTVHDRTPYRTLLMNELGVPFHLGTKQVCIAWSSSSCHDGKAWLHVCITGDDKNATASFIYNGRLVDSIVSWSKEILRTQESECVCINGTCTVVMTDGSASGKADTKILFIEEGKIVHTSTLSGSAQHVEECSCYPRYPGVRCVCRDNWKGSNRPIVDINIKDHSIVSSYVCSGLVGDTPRKNDSSSSSHCLDPNNEEGGHGVKGWAFDDGNDVWMGRTISEKSRLGYETFKVIEGWSNPKSKLQINRQVIVDRGDRSGYSGIFSVEGKSCINRCFYVELIRGRKEETEVLWTSNSIVVFCGTSGTYGTGSWPDGADINLMPI

SEQ ID NO: 24621 - protein, 469 aa, Artificial Sequence; identical to SEQ ID NO: 16599
  derived and/or modified protein sequence (wt) from neuraminidase__InfluenzaA__AHL90437

SEQ ID NO: 24622 - protein, 469 aa, Artificial Sequence; identical to SEQ ID NO: 16512
  derived and/or modified protein sequence (wt) from neuraminidase__InfluenzaA__AHL90449

SEQ ID NO: 24623 - protein, 469 aa, Artificial Sequence; identical to SEQ ID NO: 16512
  derived and/or modified protein sequence (wt) from neuraminidase__InfluenzaA__AHL90461

SEQ ID NO: 24624 - protein, 469 aa, Artificial Sequence; identical to SEQ ID NO: 16512
  derived and/or modified protein sequence (wt) from neuraminidase__InfluenzaA__AHL90473

SEQ ID NO: 24625 - protein, 469 aa, Artificial Sequence; identical to SEQ ID NO: 16512
  derived and/or modified protein sequence (wt) from neuraminidase__InfluenzaA__AHL90485

SEQ ID NO: 24626 - protein, 469 aa, Artificial Sequence; identical to SEQ ID NO: 16603
  derived and/or modified protein sequence (wt) from neuraminidase__InfluenzaA__AHL90497

SEQ ID NO: 24627 - protein, 469 aa, Artificial Sequence; identical to SEQ ID NO: 16603
  derived and/or modified protein sequence (wt) from neuraminidase__InfluenzaA__AHL90509

SEQ ID NO: 24628 - protein, 469 aa, Artificial Sequence
  derived and/or modified protein sequence (wt) from neuraminidase__InfluenzaA__AHL90521
MNPNQKIITIGSVSLTISTICFFLQIAILITTVTLHFKQYEFNSPPNNQVMLCEPTIIERNITEIVYLTNTTIEKEICPKLAEYRNWSKPQCDITGFAPFSKDNSIRLSAGGDIWVTREPYVSCDPDKCYQFALGQGTTLNNVHSNNTVRDRTPYRTLLMNELGVPFHLGTKQVCIAWSSSSCHDGKAWLHVCITGDDKNATASFIYNGRLVDSIVSWSKEILRTQESECVCINGTCTVVMTDGSASGKADTKILFIEEGKIVHTSTLSGSAQHVEECSCYPRYPGVRCVCRDNWKGSNRPIVDINIKDHSIVSSYVCSGLVGDTPRKNDSSSSSHCLDPNNEEGGHGVKGWAFDDGNDVWMGRTISEKSRLGYETFKVIEGWSNPKSKLQINRQVIVDRGNRSGYSGIFSVEGKSCINRCFYVELIRGRKEETEVLWTSNSIVVFCGTSGTYGTGSWPDGADINLMPI

SEQ ID NO: 24629 - protein, 469 aa, Artificial Sequence
  derived and/or modified protein sequence (wt) from neuraminidase__InfluenzaA__AHL90533
MNPNQKIITIGSVSLTISTICFFMQTAILITTVTLHFKQYEFNSPPNNQVMLCEPTIIERNITEIVYLTNTTIEKEICPKLAEYRNWSKPQCDITGFAPFSKDNSIRLSAGGDIWVTREPYVSCDPDKCYQFALGQGTTLNNVHSNDTVRDRTPYRTLLMNELGVPFHLGTKQVCIAWSSSSCHDGKAWLHVCITGDDKNATASFIYNGRLVDSIVSWSKEILRTQESECVCINGTCTVVMTDGSASGKADTKILFIEEGKIVHTSTLSGSAQHVEECSCYPRYPGVRCVCRDNWKGSNRPIVDINIKDHSIVSSYVCSGLVGDTPRKNDSSSSSHCLDPNNEEGGHGVKGWAFDDGNDVWMGRTISEKSRLGYETFKVIEGWSNPKSKLQINRQVIVERGDRSGYSGIFSVEGKSCINRCFYVELIRGRKEETEVLWTSNSIVVFCGTSGTYGTGSWPDGADINLMPI

SEQ ID NO: 24630 - protein, 469 aa, Artificial Sequence; identical to SEQ ID NO: 16512
  derived and/or modified protein sequence (wt) from neuraminidase__InfluenzaA__AHL90545

SEQ ID NO: 24631 - protein, 469 aa, Artificial Sequence; identical to SEQ ID NO: 16599
  derived and/or modified protein sequence (wt) from neuraminidase__InfluenzaA__AHL90557

SEQ ID NO: 24632 - protein, 469 aa, Artificial Sequence
  derived and/or modified protein sequence (wt) from neuraminidase__InfluenzaA__AHL90569
MNPNQKIITIGSVSLTISTICFFMQIAILITTVTLHFKQYEFNSPPNNQVMLCEPTIIERNITEIVYLTNTTIEKEICPKLAEYRNWSKPQCDIKGFAPFSKDNSIRLSAGGDIWVTREPYVSCDPDKCYQFALGQGTTLNNVHSNNTVRDRTPYRTLLMNELGVPFHLGTKQVCIAWSSSSCHDGKAWLHVCITGDDKNATASFIYNGRLVDSVVSWSKEILRTQESECVCINGTCTVVMTDGSASGKADTKILFIEEGKIVHTSTLSGSAQHVEECSCYPRYPGVRCVCRDNWKGSNRPIVDINIKDHSIVSSYVCSGLVGDTPRKNDSSSSSHCLDPNNEEGGHGVKGWAFDDGNDVWMGRTISEKSRLGYETFKVIEGWSNPKSKLQINRQVIVDRGNRSGYSGIFSVEGKSCINRCFYVELIRGRKEETEVLWTSNSIVVFCGTSGTYGTGSWPDGADINLMPI

SEQ ID NO: 24633 - protein, 469 aa, Artificial Sequence; identical to SEQ ID NO: 16599
  derived and/or modified protein sequence (wt) from neuraminidase__InfluenzaA__AHL90581

SEQ ID NO: 24634 - protein, 469 aa, Artificial Sequence; identical to SEQ ID NO: 16603
  derived and/or modified protein sequence (wt) from neuraminidase__InfluenzaA__AHL90593

SEQ ID NO: 24635 - protein, 469 aa, Artificial Sequence
  derived and/or modified protein sequence (wt) from neuraminidase__InfluenzaA__AHL90605
MNPNQKIITIGSVSLTISTICFFMQIAILITTVTLHFKQYEFNSPPNNQVMLCEPTIIERNITEIVYLTNTTIEKEICPKLAEYRNWSKPQCDITGFAPFSKDNSIRLSAGGDIWVTREPYVSCDPDKCYQFALGQGTTLNNVHSNNTVRDRTPYRTLLMNELGVPFHLGTKQVCIAWSSSSCHDGKAWLHVCITGDDKNATASFIYNGRLVDSVVSWSKEILRTQESECVCINGTCTVVMTDGSASGKADTKILFIEEGKIVHTSTLSGSAQHVEECSCYPRYPGVRCVCRDNWKGSNRPIVDINIKDHSIVSSYVCSGLVGDTPRKNDSSSSSHCLDPNNEEGGHGVKGWAFDDGNDVWMGRTISEKSRLGYETFKVIEGWSNPKSKLQINRQVIVDRGNRSGYSGIFSVEGKSCINRCFYVELIRGRKEETEVLWTSNSIVVFCGTSGTYGTGSWPDGANINLMPI

SEQ ID NO: 24636 - protein, 469 aa, Artificial Sequence; identical to SEQ ID NO: 16599
  derived and/or modified protein sequence (wt) from neuraminidase__InfluenzaA__AHL90629

SEQ ID NO: 24637 - protein, 469 aa, Artificial Sequence; identical to SEQ ID NO: 16599
  derived and/or modified protein sequence (wt) from neuraminidase__InfluenzaA__AHL90641

SEQ ID NO: 24638 - protein, 469 aa, Artificial Sequence; identical to SEQ ID NO: 16512
  derived and/or modified protein sequence (wt) from neuraminidase__InfluenzaA__AHL90653

SEQ ID NO: 24639 - protein, 469 aa, Artificial Sequence; identical to SEQ ID NO: 16599
  derived and/or modified protein sequence (wt) from neuraminidase__InfluenzaA__AHL90665

SEQ ID NO: 24640 - protein, 469 aa, Artificial Sequence
  derived and/or modified protein sequence (wt) from neuraminidase__InfluenzaA__AHL90677
MNPNQKIITIGSVSLTISTICFFMQTAILITTVTLHFKQYEFNSPPNNQVMLCEPTIIERNITEIVYLTNTTIEKEICPKLAEYRNWSKPQCDITGFAPFSKDNSIRLSAGGDIWVTREPYVSCDPDKCYQFALGQGTTLNNVHSNNTVRDRTPYRTLLMNELGVPFHLGTKQVCIAWSSSSCHDGKAWLHVCITGDDKNATASFIYNGKLVDSIVSWSKEILRTQESECVCINGTCTVVMTDGSASGKADTKILFIEEGKIVHTSTLSGSAQHVEECSCYPRYPGVRCVCRDNWKGSNRPIVDINIKDHSIVSSYVCSGLVGDTPRKNDSSSSSHCLDPNNEEGGHGVKGWAFDDGNDVWMGRTISEKSRLGYETFKVIEGWSNPKSKLQINRQVIVDRGNRSGYSGIFSVEGKSCINRCFYVELIRGRKEETEVLWTSNSIVVFCGTSGTYGTGSWPDGADINLMPI

SEQ ID NO: 24641 - protein, 469 aa, Artificial Sequence; identical to SEQ ID NO: 16599
  derived and/or modified protein sequence (wt) from neuraminidase__InfluenzaA__AHL90689

SEQ ID NO: 24642 - protein, 469 aa, Artificial Sequence
  derived and/or modified protein sequence (wt) from neuraminidase__InfluenzaA__AHL90701
MNPNQKIITIGSVSLTISTICFFMQIAILITTVTLHFKQYEFNSPPNNQVMLCEPTIIERNITEIVYLTNTTIEKEICPKLAEYRNWSKPQCDITGFAPFSKDNSIRLSAGGGIWVTREPYVSCDPDKCYQFALGQGTTLNNVHSNNTVRDRTPYRTLLMNELGVPFHLGTKQVCIAWSSSSCHDGKAWLHVCITGDDKNATASFIYNGRLVDSVVSWSKDILRTQESECVCINGTCTVVMTDGSASGKADTKILFIEEGKIVHTSTLSGSAQHVEECSCYPRYPGVRCVCRDNWKGSNRPIVDINIKDHSIVSSYVCSGLVGDTPRKNDSSSSSHCLDPNNEEGGHGVKGWAFDDGNDVWMGRTISEKSRLGYETFKVIEGWSNPKSKLQINRQVIVDRGNRSGYSGIFSVEGKSCINRCFYVELIRGRKEETEVLWTSNSIVVFCGTSGTYGTGSWPDGADINLMPI

SEQ ID NO: 24643 - protein, 469 aa, Artificial Sequence; identical to SEQ ID NO: 19304
  derived and/or modified protein sequence (wt) from neuraminidase__InfluenzaA__AHL90713

SEQ ID NO: 24644 - protein, 470 aa, Artificial Sequence; identical to SEQ ID NO: 19937
  derived and/or modified protein sequence (wt) from neuraminidase__InfluenzaA__AHL90725

SEQ ID NO: 24645 - protein, 470 aa, Artificial Sequence; identical to SEQ ID NO: 18930
  derived and/or modified protein sequence (wt) from neuraminidase__InfluenzaA__AHL90749

SEQ ID NO: 24646 - protein, 470 aa, Artificial Sequence; identical to SEQ ID NO: 17461
  derived and/or modified protein sequence (wt) from neuraminidase__InfluenzaA__AHL90761

SEQ ID NO: 24647 - protein, 470 aa, Artificial Sequence
  derived and/or modified protein sequence (wt) from neuraminidase__InfluenzaA__AHL90773
MNPNQKIITIGSISIAIGIISLMLQIGNIISIWASHSIQTGSQNNTGICNQRIITYENSTWVNHTYVNINNTNVVAGEDKTSMTLAGNSSLCSISGWAIYTKDNSIRIGSKGDVFVIREPFISCSHLECRTFFLTQGALLNDKHSNGTVKDRSPYRALMSCPLGEAPSPYNSKFESVAWSASACHDGMGWLTIGISGPDNGAVAVLKYNGIITGTIKSWKKQILRTQESECVCMNGSCFTIMTDGPSNKAASYKIFKIEKGKVTKSIELNAPNFYYEECSCYPDTGIVMCVCRDNWHGSNRPWVSFNQNLDYQIGYICSGVFGDNPRPEDREGSCNPVTVDGANGVKGFSYKYGNGVWIGRTKSNRLRKGFEMIWDPNGWTNTDSDFSVKQDVVAITDWSGYSGSFVQHPELTGLDCIRPCFWVELVRGLPRENTTIWTSGSSISFCGVNSDTANWSWPDGAELPFTIDK

SEQ ID NO: 24648 - protein, 470 aa, Artificial Sequence
  derived and/or modified protein sequence (wt) from neuraminidase__InfluenzaA__AHL90785
MNPNQKIITIGSISIAIGIISLMLQIGNIISIWASHSIQTGSQNNTGICNQRIITYENSTWVNHTYVNINNTNVVAGEDKTSVTLAGNSSLCSISGWAIYTKDNSIRIGSKGDVFVIREPFISCSHLECRTFFLTQGALLNDKHSNGTVKDRSPYRALMSCPLGEAPSPYNSKFESVAWSASACHDGMGWLTIGISGPDNGAVAVLKYNGIITGTIKSWKKQILRTQESECVCMNGSCFTIMTDGPSNKAASYKIFKIEKGKVTKSIELNAPNFYYEECSCYPDTGIVMCVCRDNWHGSNRPWVSFNQNLDYQIGYICSGVFGDNPRPEDGEGSCNPVTVNGADGVKGFSYKYGNGVWIGRTKSNRLRKGFEMIWDPNGWTNTDSDFSVKQDVVAITDWSGYSGSFVQHPELTGLDCIRPCFWVELVRGLPRENITIWTSGSSISFCGVNSDTANWSWPDGAELPFTIDK

SEQ ID NO: 24649 - protein, 470 aa, Artificial Sequence
  derived and/or modified protein sequence (wt) from neuraminidase__InfluenzaA__AHL90797
MNPNQKIITIGSISIAIGIISLMLQIGNIISIWASHSIQTGSQNNTGICNKRIITYENSTWVNHTYVNINNTNVVAGEDKTSVTLAGNSSLCSISGWAIYTKDNSIRIGSKGDVFVIREPFIACSHLECRTFFLTQGALLNDKHSNGTVKDRSPYRALMSCPLGEAPSPYNSKFESVAWSASACHDGMGWLTIGISGPDNGAVAVLKYNGIITGTIKSWKKQILRTQESECVCMNGSCFTIMTDGPSDKAASYKIFKIEKGKVTKSIELNAPNFHYEECSCYPDTGIVMCVCRDNWHGSNRPWVSFNQNLDYQIGYICSGVFGDNPRPEDGEGSCSPVTVDGANGVKGFSYKYDNGVWIGRTKSNRLRKGFEVIWDPNGWTNTDSDFSVKQDVVAITDWSGYSGSFVQHPELTGLDCIRPCFWVELVRGLPRENTTIWTSGSSISFCGVNSDTANWSWPDGAELPFTIDK

SEQ ID NO: 24650 - protein, 470 aa, Artificial Sequence; identical to SEQ ID NO: 17461
  derived and/or modified protein sequence (wt) from neuraminidase__InfluenzaA__AHL90809

SEQ ID NO: 24651 - protein, 470 aa, Artificial Sequence; identical to SEQ ID NO: 19937
  derived and/or modified protein sequence (wt) from neuraminidase__InfluenzaA__AHL90821

SEQ ID NO: 24652 - protein, 470 aa, Artificial Sequence
  derived and/or modified protein sequence (wt) from neuraminidase__InfluenzaA__AHL90833
MNPNQRIITIGSISIAIGIISLMLQIGNIISIWASHSIQTGSQNNTGICNQRIITYENSTWVNHTYVNINNTNVVAGEDKTSVTLAGNSSLCSISGWAIYTKDNSIRIGSKGDVFVIREPFISCSHLECRTFFLTQGALLNDKHSNGTAKDRSPYRALMSCPLGEAPSPYNSKFESVAWSASACHDGMGWLTIGISGPDNGAVAVLKYNGIITGTIKSWKKQILRTQESECVCMNGSCFTIMTDGPSNKAASYKIFKIEKGKVTKSIELNAPNFYYEECSCYPDTGIVMCVCRDNWHGSNRPWVSFNQNLDYQMGYICSGVFGDNPRPEDGEGSCNPVTVDGANGVKGFSYKYGNGVWIGRTKSNRLRKGFEMIWDPNGWTNTDSDFSVKQDVVAITDWSGYSGSFVQHPELTGLDCIRPCFWVELVRGLPRENTTIWTSGSSISFCGVNSDTANWSWPDGAELPFTIDK

SEQ ID NO: 24653 - protein, 470 aa, Artificial Sequence; identical to SEQ ID NO: 17461
  derived and/or modified protein sequence (wt) from neuraminidase__InfluenzaA__AHL90845

SEQ ID NO: 24654 - protein, 470 aa, Artificial Sequence; identical to SEQ ID NO: 18930
  derived and/or modified protein sequence (wt) from neuraminidase__InfluenzaA__AHL90857

SEQ ID NO: 24655 - protein, 470 aa, Artificial Sequence; identical to SEQ ID NO: 17461
  derived and/or modified protein sequence (wt) from neuraminidase__InfluenzaA__AHL90869

SEQ ID NO: 24656 - protein, 470 aa, Artificial Sequence
  derived and/or modified protein sequence (wt) from neuraminidase__InfluenzaA__AHL90881
MNPNQKIITIGSISIAIGIISTMLQIGSIISIWASHSIQTGSQNNTGICNQRIITYENSTWVNHTYVNINNTNVVAGEDKTSVTLAGNSSLCSISGWAIYTKDNSIRIGSKGDVFVIREPFISCSHLECRTFFLTQGALLNDKHSNGTVKDRSPYRALMSCPLGEAPSPYNSKFESVAWSASACHDGMGWLTIGISGPDNGAVAVLKYNGIITGTIKSWKKQILRTQESECVCMNGSCFTIMTDGPSNKAASYKIFKIEKGKVTKSIELNAPNFYYEECSCYPDTGIVMCVCRDNWHGSNRPWVSFNQNLDYQIGYICSGVFGDNPRPEDGEGSCNPVTVDGANGVKGFSYKYGNGVWIGRTKSNRLIKGFEMIWDPNGWTNTDSDFSVKQDVVAITDWSGYSGSFVQHPELTGLDCIRPCFWVELVRGLPRENTTIWTSGSSISFCGVNSDTANWSWPDGAELPFTIDK

SEQ ID NO: 24657 - protein, 470 aa, Artificial Sequence; identical to SEQ ID NO: 19937
  derived and/or modified protein sequence (wt) from neuraminidase__InfluenzaA__AHL90893

SEQ ID NO: 24658 - protein, 470 aa, Artificial Sequence; identical to SEQ ID NO: 18930
  derived and/or modified protein sequence (wt) from neuraminidase__InfluenzaA__AHL90905

SEQ ID NO: 24659 - protein, 470 aa, Artificial Sequence
  derived and/or modified protein sequence (wt) from neuraminidase__InfluenzaA__AHL90917
MNPNQKIITIGSISIAIGIISLTLQIGNIISIWASHSIQTGSQNNTGICNQRIITYENSTWVNHTYVNINNTNVVAGEDKTSVTLAGNSSLCSISGWAIYTKDNSIRIGSKGDVFVIREPFISCSHLECRTFFLTQGALLNDKHSNGTVKDRSPYRALMSCPLGEAPSPYNSKFESVAWSASACHDGMGWLTIGISGPDNGAVAVLKYNGIITGTIKSWKKQILRTQESECVCMNGSCFTIMTDGPSNKAASYKIFKIEKGKVTKSIELNAPNFYYEECSCYPDTGIVMCVCRDNWHGSNRPWVSFNQNLDYQIGYICSGVFGDNPRPEDGEGSCNPVTVDGANGVKGFSYKYGNGVWIGRTKSNRLRKGFEMIWDPNGWTNTDSDFSVKQDVVAITDWSGYSGSFVQHPELTGLDCIRPCFWVELVRGLPRENTTIWTSGSSISFCGVNSDTANWSWPDGAELPFTIDK

SEQ ID NO: 24660 - protein, 470 aa, Artificial Sequence
  derived and/or modified protein sequence (wt) from neuraminidase__InfluenzaA__AHL90929
MNPNQKIITIGSISIAIGIISLMLQIGNIISIWASHSIQTGSQNNTGICNQRIITYENSTWVNHTYVNINNTNVVAGEDKTSMTLAGNSSLCSISGWAIYTKDNSIRIGSKGDVFVIREPFISCSHLECRTFFLTQGALLNDKHSNGTVKDRSPYRALMSCPLGEAPSPYNSKFESVAWSASACHDGMGWLTIGISGPDNGAVAVLKYNGIITGTIKSWKKQILRTQESECVCMNGSCFTIMTDGPSNKAASYKIFKIEKGKVTKSIELNAPNFYYEECSCYPDTGIVMCVCRDNWHGSNRPWVSFNQNLDYQIGYICSGVFGDNPRPEDGEGSCNPVTVDGANGVKGFSYKYGNGVWIGRTKSNRLRKGFEMIWDPNGWTNTDSDFSVKQDVVAITDWSGYSGSFVQHPELTGLDCIRPCFWVELVRGLPRENTTIWTSGSSISFCGVNSDTANWSWPDGAELPFTIDK

SEQ ID NO: 24661 - protein, 470 aa, Artificial Sequence; identical to SEQ ID NO: 18930
  derived and/or modified protein sequence (wt) from neuraminidase__InfluenzaA__AHL90941

SEQ ID NO: 24662 - protein, 470 aa, Artificial Sequence; identical to SEQ ID NO: 18930
  derived and/or modified protein sequence (wt) from neuraminidase__InfluenzaA__AHL90953

SEQ ID NO: 24663 - protein, 470 aa, Artificial Sequence; identical to SEQ ID NO: 18930
  derived and/or modified protein sequence (wt) from neuraminidase__InfluenzaA__AHL90965

SEQ ID NO: 24664 - protein, 470 aa, Artificial Sequence
  derived and/or modified protein sequence (wt) from neuraminidase__InfluenzaA__AHL90977
MNPNQKIITIGSISIAIGIISLMLQIGNIISIWASHSIQTGSQNNTGICNQRIITYENSTWVNHTYVNINNTNVVAGEDKTSVTLAGNSSLCSISGWAIYTKDNSIRIGSKGDVFVIREPFISCSHLECRTFFLTQGALLNDKHSNGTVKDRSPYRALMSCPLGEAPSPYNSKFESVAWSASACHDGMGWLTIGISGPDNGAVAVLKYNGIITGTIKSWKKQILRTQESECVCMNGSCFTIMTDGPSNKAASYKIFKIEKGKVTKSIELNAPNFYYEECSCYPDTGIVMCVCRDNWHGSNRPWVSFNQNLDYQIGYICSGVFGDNPRPEDGEGSCNPVTVDGANGVKGFSYKYGNGVWIGRTKSNRLRKGFEMIWDPNGWTNTDSDFSVKQDVVAIADWSGYSGSFVQHPELTGLDCIRPCFWVELVRGLPRENTTIWTSGSSISFCGVNSDTANWSWPDGAELPFTIDK

SEQ ID NO: 24665 - protein, 470 aa, Artificial Sequence; identical to SEQ ID NO: 20204
  derived and/or modified protein sequence (wt) from neuraminidase__InfluenzaA__AHL90989

SEQ ID NO: 24666 - protein, 470 aa, Artificial Sequence; identical to SEQ ID NO: 24660
  derived and/or modified protein sequence (wt) from neuraminidase__InfluenzaA__AHL91001

SEQ ID NO: 24667 - protein, 470 aa, Artificial Sequence
  derived and/or modified protein sequence (wt) from neuraminidase__InfluenzaA__AHL91013
MNPNQKIITIGSISIAIGIISLMLQIGNIISIWASHSIQTGSQNNTGICSQRIITYENSTWVNHTYVNINNTNVVAGEDKTSMTLAGNSSLCSISGWAIYTKDNSIRIGSKGDVFVIREPFISCSHLECRTFFLTQGALLNDKHSNGTVKDRSPYRALMSCPLGEAPSPYNSKFESVAWSASACHDGMGWLTIGISGPDNGAVAVLKYNGIITGTIRSWKKQILRTQESECVCMNGSCFTIMTDGPSNKAASYKIFKIEKGKVTKSIELNAPNFYYEECSCYPDTGIVMCVCRDNWHGSNRPWVSFNQNLDYQIGYICSGVFGDNPRPEDGEGSCNPVTVDGANGVKGFSYKYGNGVWIGRTKSNRLRKGFEMIWDPNGWTNTDSDFSVKQDVVAITDWSGYSGSFVQHPELTGLDCIRPCFWVELVRGLPRENTTIWTSGSSISFCGVNSDTANWSWPDGAELPFTIDK

SEQ ID NO: 24668 - protein, 470 aa, Artificial Sequence; identical to SEQ ID NO: 24660
  derived and/or modified protein sequence (wt) from neuraminidase__InfluenzaA__AHL91025

SEQ ID NO: 24669 - protein, 469 aa, Artificial Sequence; identical to SEQ ID NO: 17905
  derived and/or modified protein sequence (wt) from neuraminidase__InfluenzaA__AHL91037

SEQ ID NO: 24670 - protein, 469 aa, Artificial Sequence; identical to SEQ ID NO: 19518
  derived and/or modified protein sequence (wt) from neuraminidase__InfluenzaA__AHL91049

SEQ ID NO: 24671 - protein, 469 aa, Artificial Sequence
  derived and/or modified protein sequence (wt) from neuraminidase__InfluenzaA__AHL91061
MNPNQKIITIGSVSLTISTICFFMQIAILITTVTLHFKQYEFNSPPNNQVMLCEPTIIERNITEIVYLTNTTIEKEICPKLAEYRNWSKPQCDITGFAPFSKDNSIRLSAGGDIWVTREPYVSCDPDKCYQFALGQGTTLNNVHSNNTVRDRTPYRTLLMNELGVPFHLGTKQVCIAWSSSSCHDGKAWLHVCITGDDKNATASFIYNGRLVDSVVSWSKEILRTQESECVCINGTCTVVMTDGSASGKADTKILFIEEGKIVHTSTLSGSAQHVEECSCYPRYPGVRCVCRDNWKGSNRPIVDINIKDHSIVSSYVCSGLVGDTPRKNDSSSSSHCLNPNNEEGGHGVKGWAFDDGNDVWMGRTISEKSRLGYETFKVIEGWSNHKSKLQINRQVIVDRGNRSGYSGIFSVEGKSCINRCFYVELIRGRKEETEVLWTSNSIVVFCGTSGTYGTGSWPDGADLNLMPI

SEQ ID NO: 24672 - protein, 469 aa, Artificial Sequence
  derived and/or modified protein sequence (wt) from neuraminidase__InfluenzaA__AHL91073
MNPNQKIITIGSVSLTISTICFFMQIAILITTVTLHFKQYEFNSPPNNQVMLCEPTIIERNITEIVYLTNTTIEKEICPKLAEYRTWSKPQCDITGFAPFSKDNSIRLSAGGDIWVTREPYVSCDPDKCYQFALGQGTTLNNVHSNNTVRDRTPYRTLLMNELGVPFHLGTKQVCIAWSSSSCHDGKAWLHVCITGDDKNATASFIYNGRLVDSVVSWSKEILRTQESECVCINGTCTVVMTDGSASGKADTKILFIEEGKIVHTSTLSGSAQHVEECSCYPRYPGVRCVCRDNWKGSNRPIVDINIKDHSIVSSYVCSGLVGDTPRKNDSSSGSHCLDPNNEEGGHGVKGWAFDDGNDVWMGRTISEKSRLGYETFKVIEGWSNHKSKLQINRQVIVDRGNRSGYSGIFSVEGKSCINRCFYVELIRGRKEETEVLWTSNSIVVFCGTSGTYGTGSWPDGADLNLMPI

SEQ ID NO: 24673 - protein, 469 aa, Artificial Sequence
  derived and/or modified protein sequence (wt) from neuraminidase__InfluenzaA__AHL91085
MNPNQKIITIGSVSLTISTICFFMQIAILITTVTLHFKQYEFNSPPNNQVMLCEPKIIERNITEIVYLTNTTIEKEICPKLAEYRNWSKPQCDITGFAPFSKDNSIRLSAGGDIWVTREPYVSCDPDKCYQFALGQGTTLNNVHSNNTVRDRTPYRTLLMNELGVPFHLGTKQVCIAWSSSSCHDGKAWLHVCITGDDKNATASFIYNGRLVDSVVSWSKEILRTQESECVCINGICTVVMTDGSASGKADTKILFIEEGKIVHTSTLSGSAQHVEECSCYPRYPGVRCVCRDNWKGSNRPIVDINIKDHSIVSSYVCSGLVGDTPRKNDSSSSSHCLDPNNEEGGHGVKGWAFDDGNDVWMGRTISEKSRLGYETFKVIEGWSNPKSKLQINRQVIVDRGNRSGYSGIFSVEGKSCINRCFYVELIRGRKEETEVLWTSNSIVVFCGTSGTYGTGSWPDGADINLMPI

SEQ ID NO: 24674 - protein, 469 aa, Artificial Sequence; identical to SEQ ID NO: 16599
  derived and/or modified protein sequence (wt) from neuraminidase__InfluenzaA__AHL91097

SEQ ID NO: 24675 - protein, 469 aa, Artificial Sequence
  derived and/or modified protein sequence (wt) from neuraminidase__InfluenzaA__AHL91109
MNPNQKIITIGSVSLTISTICFFMQIAILITTVTLHFKQYEFNSPPNNQVMLCEPTIIERNITEIVYLTNTTIEKEICPKLAEYRNWSKPQCDITGFAPFSKDNSIRLSAGGDIWVTREPYVSCDPDKCYQFALGQGTTLNNVHSNNTVRDRTPYRTLLMNELGVPFHLGTKQVCIAWSSSSCHDGKAWLHVCITGDDKNATASFIYNGRLVDSVVSWSKEILRTQESECVCINGTCTVVMTDGSASGKADTKILFIEEGKIVHTSTLSGSAQHVEECSCYPRYPGVRCVCRDNWKGSNRPIVDINIKDHSIVSSYVCSGLVGDTPRKNDSSSSSHCLDPNNEEGGHGVKGWAFDDGNDVWMGRTISEKSRLGYETFKVIEGWSNHKSKLQINRQVIVDRGNRSGYSGIFSVEGKSCINRCFYVELIRGRKEETEVLWTSNSIVVFCGTSGTYGTGSWPDGADLNIMPI

SEQ ID NO: 24676 - protein, 469 aa, Artificial Sequence; identical to SEQ ID NO: 17905
  derived and/or modified protein sequence (wt) from neuraminidase__InfluenzaA__AHL91121

SEQ ID NO: 24677 - protein, 469 aa, Artificial Sequence
  derived and/or modified protein sequence (wt) from neuraminidase__InfluenzaA__AHL91133
MNPNQKIITIGSVSLTISTICFFMQIAILITTVTLHFKQFEFNSPPNNQVMLCEPTIIERNITEIVYLTNTTIEKEICPKLAEYRNWSKPQCDITGFAPFSKDNSIRLSAGGDIWVTREPYVSCDPDKCYQFALGQGTTLNNVHSNNTVRDRTPYRTLLMNELGVPFHLGTKQVCIAWSSSSCHDGKAWLHVCITGDDKNATASFIYNGRLVDSVVSWSKEILRTQESECVCINGTCTVVMTDGSASGKADTKILFIEEGKIVHTSTLSGSAQHVEECSCYPRYPGVRCVCRDNWKGSNRPIVDINIKDHSIVSSYVCSGLVGDTPRKNDSSSSSHCLDPNNEEGGHGVKGWAFDDGNDVWMGRTISEKSRLGYETFKVIEGWSNHKSKLQINRQVIVDRGNRSGYSGIFSVEGKSCINRCFYVELIRGRKEETEVLWTSNSIVVFCGTSGTYGTGSWPDGADLNLMPI

SEQ ID NO: 24678 - protein, 469 aa, Artificial Sequence; identical to SEQ ID NO: 19304
  derived and/or modified protein sequence (wt) from neuraminidase__InfluenzaA__AHL91145

SEQ ID NO: 24679 - protein, 469 aa, Artificial Sequence; identical to SEQ ID NO: 19304
  derived and/or modified protein sequence (wt) from neuraminidase__InfluenzaA__AHL91157

SEQ ID NO: 24680 - protein, 469 aa, Artificial Sequence; identical to SEQ ID NO: 14712
  derived and/or modified protein sequence (wt) from neuraminidase__InfluenzaA__AHL91169

SEQ ID NO: 24681 - protein, 469 aa, Artificial Sequence; identical to SEQ ID NO: 22146
  derived and/or modified protein sequence (wt) from neuraminidase__InfluenzaA__AHL94987

SEQ ID NO: 24682 - protein, 469 aa, Artificial Sequence; identical to SEQ ID NO: 22146
  derived and/or modified protein sequence (wt) from neuraminidase__InfluenzaA__AHL94999

SEQ ID NO: 24683 - protein, 469 aa, Artificial Sequence
  derived and/or modified protein sequence (wt) from neuraminidase__InfluenzaA__AHL95011
MNPNQKIITIGSVSLTISTICFFMQIAILITTVTLHFKQYEFNSPPNNQVMLCEPTIIERNITEIVYLTNTTIEKEICPKPAEYRNWSKPQCDITGFAPFSKDNSIRLSAGGDIWVTREPYVSCDPDKCYQFALGQGTTLNNVHSNNTVRDRTPYRTLLMNELGVPFHLGTKQVCIAWSSSSCHDGKAWLHVCITGDDKNATASFIYNGRLVDSVVSWSKEILRTQESECVCINGTCTVVMTDGSASGKADTKILFIEEGKIVHTSTLSGSAQHVEECSCYPRYPGVRCVCRDNWKGSNRPIVDINIKDHSIVSRYVCSGLVGDTPRKNDSSSSSHCLDPNNEEGGHGVKGWAFDDGNDVWMGRTINETSRLGYETFKVIEGWFNPKSKLQINRQVIVDRGDRSGYSGIFSVEGKSCINRCFYVELIRGRKEETEVLWTSNSIVVFCGTSGTYGTGSWPDGADLNLMPI

SEQ ID NO: 24684 - protein, 469 aa, Artificial Sequence; identical to SEQ ID NO: 23903
  derived and/or modified protein sequence (wt) from neuraminidase__InfluenzaA__AHL95023

SEQ ID NO: 24685 - protein, 469 aa, Artificial Sequence; identical to SEQ ID NO: 22146
  derived and/or modified protein sequence (wt) from neuraminidase__InfluenzaA__AHL95035

SEQ ID NO: 24686 - protein, 469 aa, Artificial Sequence; identical to SEQ ID NO: 22146
  derived and/or modified protein sequence (wt) from neuraminidase__InfluenzaA__AHL95047

SEQ ID NO: 24687 - protein, 469 aa, Artificial Sequence; identical to SEQ ID NO: 23894
  derived and/or modified protein sequence (wt) from neuraminidase__InfluenzaA__AHL95059

SEQ ID NO: 24688 - protein, 469 aa, Artificial Sequence; identical to SEQ ID NO: 22146
  derived and/or modified protein sequence (wt) from neuraminidase__InfluenzaA__AHL95071

SEQ ID NO: 24689 - protein, 469 aa, Artificial Sequence; identical to SEQ ID NO: 22146
  derived and/or modified protein sequence (wt) from neuraminidase__InfluenzaA__AHL95083

SEQ ID NO: 24690 - protein, 469 aa, Artificial Sequence; identical to SEQ ID NO: 22146
  derived and/or modified protein sequence (wt) from neuraminidase__InfluenzaA__AHL95095

SEQ ID NO: 24691 - protein, 469 aa, Artificial Sequence; identical to SEQ ID NO: 22146
  derived and/or modified protein sequence (wt) from neuraminidase__InfluenzaA__AHL95107

SEQ ID NO: 24692 - protein, 469 aa, Artificial Sequence
  derived and/or modified protein sequence (wt) from neuraminidase__InfluenzaA__AHL95119
MNPNQKIITIGSVSLTISTICFFMQIAILITTVTLHFKQYEFNSPPNNQVMLCEPTIIERNITEIVYLTNTTIEKEICPKPAEYRNWSKPQCDITGFAPFSKDNSIRLSAGGDIWVTREPYVSCDPDKCYQFALGQGTTLNNVHSNNTVRDRTPYRTLLMNELGVPFHLGTKQVCIAWSSSSCHDGKAWLHVCITGDDKNATASFIYNGRLVDSVVSWSKEILRTQESECVCINGTCTVVMTDGSASGKADTKILFIEEGKIVHTSTLSGSAQHVEECSCYPRYPGVRCVCRDNWKGSNRPIVDINIKDHSIVSRYVCSGLVGDTPRKNDSLSSSHCLDPNNEEGGHGVKGWAFDDGNDVWMGRTINETSRLGYETFKVIEGWSNPKSKLQINRQVIVDRGDRSGYSGIFSVEGKSCINRCFYVELIRGRKEETEVLWTSNSIVVFCGTSGTYGTGSWPDGADLNLMPI

SEQ ID NO: 24693 - protein, 469 aa, Artificial Sequence; identical to SEQ ID NO: 23375
  derived and/or modified protein sequence (wt) from neuraminidase__InfluenzaA__AHL95131

SEQ ID NO: 24694 - protein, 469 aa, Artificial Sequence; identical to SEQ ID NO: 23883
  derived and/or modified protein sequence (wt) from neuraminidase__InfluenzaA__AHL95143

SEQ ID NO: 24695 - protein, 469 aa, Artificial Sequence
  derived and/or modified protein sequence (wt) from neuraminidase__InfluenzaA__AHL95155
MNPNQKIITIGSVSLTISTICFFMQIAILITTVTLHFKQYEFNSPPNNQVMLCEPTIIERNITEIVYLTNTTIEKEICPKPAEYRNWSKPQCGITGFAPFSKDNSIRLSAGGDIWVTREPYVSCDPDKCYQFALGQGTTLNNVHSNNTVRDRTPYRTLLMNELGVPFHLGTKQVCIAWSSSSCHDGKAWLHVCITGDDKNATASFIYNGRLVDSVVSWSKEILRTQESECVCINGTCTVVMTDGSASGKADTKILFIEEGKIVHTSTLSGSAQHVEECSCYPRYPGVRCVCRDNWKGSNRPIVDINIKDHSIVSSYVCSGLVGDTPRKNDSSSSSHCLDPNNEEGSHGVKGWAFDDGNDVWMGRTINETSRLGYETFKVIEGWSNPKSKLQINRQVIVDRGDRSGYSGIFSVEGKSCINRCFYVELIRGRKEETEVLWTSNSIVVFCGTSGTYGTGSWPDGADLNLMPI

SEQ ID NO: 24696 - protein, 469 aa, Artificial Sequence
  derived and/or modified protein sequence (wt) from neuraminidase__InfluenzaA__AHL95167
MNPNQKIITIGSVSLTISTICFFMQIAILITTVTLHFKQYEFNSPPNNQVMLCEPTIIERNITEIVYLTNTTIEKEICPKPAEYRNWSKPQCDITGFAPFSKDNSIRLSAGGDIWVTREPYVSCDPDKCYQFALGQGTTLNNVHSNNTVRDRTPYRTLLMNELGVPFHLGTKQVCIAWSSSSCHDGKAWLHVCITGDDKNATASFIYNGRLVDSVVSWSKEILRTQESECVCINGTCTVVMTDGSASGKADTKILFIEEGKIVHTSTLSGSAQHVEECSCYPRYPGVRCVCRDNWKGSNRPIVDINIKDHSIVSRYLCSGLVGDTPRKNDSSSSSHCLDPNNEEGGHGVKGWAFDDGNDVWMGRTINETSRLGYETFKVIEGWSNPKSKLQINRQVIVDRGDRSGYSGIFSVEGKSCINRCFYVELIRGRKEETEVLWTSNSIVVFCGTSGTYGTGSWPDGADLNLMPI

SEQ ID NO: 24697 - protein, 469 aa, Artificial Sequence; identical to SEQ ID NO: 22146
  derived and/or modified protein sequence (wt) from neuraminidase__InfluenzaA__AHL95179

SEQ ID NO: 24698 - protein, 469 aa, Artificial Sequence; identical to SEQ ID NO: 22146
  derived and/or modified protein sequence (wt) from neuraminidase__InfluenzaA__AHL95191

SEQ ID NO: 24699 - protein, 469 aa, Artificial Sequence; identical to SEQ ID NO: 22146
  derived and/or modified protein sequence (wt) from neuraminidase__InfluenzaA__AHL95203

SEQ ID NO: 24700 - protein, 469 aa, Artificial Sequence; identical to SEQ ID NO: 22146
  derived and/or modified protein sequence (wt) from neuraminidase__InfluenzaA__AHL95215

SEQ ID NO: 24701 - protein, 469 aa, Artificial Sequence
  derived and/or modified protein sequence (wt) from neuraminidase__InfluenzaA__AHL95227
MNPNQKIITIGSVSLTISTICFFMQIAILITTVTLHFKQYEFNSPPNNQVMLCEPTIIERNITEIVYLTNTTIEKEICPKPAEYRNWSKPQCGITGFAPFSKDNSIRLSAGGDIWVTREPYVSCDPDKCYQFALGQGTTLNNMHSNNTVRDRTPYRTLLMNELGVPFHLGTKQVCIAWSSSSCHDGKAWLHVCITGDDKNATASFIYNGRLVDSVVSWSKEILRTQESECVCINGTCTVVMTDGSASGKADTKILFIEEGKIVHTSTLSGSAQHVEECSCYPRYPGVRCVCRDNWKGSNRPIVDINIKDHSIVSSYVCSGLVGDTPRENDSSSSSHCLDPNNEEGGHGVKGWAFDDGNDVWMGRTINETSRLGYETFKVIEGWSNPKSKLQINRQVIVDRGDRSGYSGIFSVEGKSCINRCFYVELIRGRKEETEVLWTSNSIVVFCGTSGTYGTGSWPDGADLNLMPI

SEQ ID NO: 24702 - protein, 469 aa, Artificial Sequence; identical to SEQ ID NO: 23883
  derived and/or modified protein sequence (wt) from neuraminidase__InfluenzaA__AHL95239

SEQ ID NO: 24703 - protein, 469 aa, Artificial Sequence
  derived and/or modified protein sequence (wt) from neuraminidase__InfluenzaA__AHL95251
MNPNQKIITIGSVSLTISTICFFMQIAILITTVTLHFKQYEFNSPPNNQVMLCEPTIIERNITEIVYLTNTTIEKEICPKPAEYRNWSKPQCGITGFAPFSKDNSIRLSAGGDIWVTREPYVSCDPDKCYQFALGQGTTLNNVHSNNTVRDRTPYRTLLMNELGVPFHLGTKQVCIAWSSSSCHDGKAWLHVCITGDDKNATASFIYNGRLVDSVVSWSKEILRTQESECVCINGTCTVVMTDGSASGKADTKILFIKEGKIVHTSTLSGSAQHVEECSCYPRYPGVRCVCRDNWKGSNRPIVDINIKDHSIVSSYVCSGLVGDTPRKNDSSSSSHCLDPNNEEGGHGVKGWAFDDGNDVWMGRTINETSRLGYETFKVIEGWSNPKSKLQINRQVIVDRGDRSGYSGIFSVEGKSCINRCFYVELIRGRKEETEVLWTSNSIVVFCGTSGTYGTGSWPDGADLNLMPI

SEQ ID NO: 24704 - protein, 469 aa, Artificial Sequence; identical to SEQ ID NO: 22146
  derived and/or modified protein sequence (wt) from neuraminidase__InfluenzaA__AHL95263

SEQ ID NO: 24705 - protein, 469 aa, Artificial Sequence
  derived and/or modified protein sequence (wt) from neuraminidase__InfluenzaA__AHL95275
MNPNQKIITIGSVSLTISTICFFMQIAILITTVTLHFKQYEFNSPPNNQVMLCEPTIIERNITEIVYLTNITIEKEICPKPAEYRNWSKPQCGITGFAPFSKDNSIRLSAGGDIWVTREPYVSCDPDKCYQFALGQGTTLNNVHSNNTVRDRTPYRTLLMNELGVPFHLGTKQVCIAWSSSSCHDGKAWLHVCITGDDKNATASFIYNGRLVDSVVSWSKEILRTQESECVCINGTCTVVMTDGSASGKADTKILFIEEGKIVHTSTLSGSAQHVEECSCYPRYPGVRCVCRDNWKGSNRPIVDINIKDHSIVSSYVCSGLVGDTPRKNDSSSSSHCLDPNNEEGGHGVKGWAFDDGNDVWMGRTINETSRLGYETFKVIEGWSNPKSKLQINRQVIVDRGDRSGYSGIFSVEGKSCINRCFYVELIRGRKEETEVLWTSNSIVVFCGTSGTYGTGSWPDGADLNLMPI

SEQ ID NO: 24706 - protein, 469 aa, Artificial Sequence; identical to SEQ ID NO: 23389
  derived and/or modified protein sequence (wt) from neuraminidase__InfluenzaA__AHL95299

SEQ ID NO: 24707 - protein, 469 aa, Artificial Sequence
  derived and/or modified protein sequence (wt) from neuraminidase__InfluenzaA__AHL95310
MNPNQKIITIGSVSLTISTICFFMQIAILITTVTLHFKQYEFNSPPNNQVMLCEPTIIERNITEIVYLTNTTIEKEICPKPAEYRNWSKPQCDITGFAPFSKDNSIRLSAGGDIWVTREPYVSCDPDKCYQFALGQGTTLNNVHSNNTVRDRTPYRTLLMNELGVPFHLGTKQVCIAWSSSSCHDGKAWLHVCITGDDKNATASFIYNGRLVDSVVSWSKEILRTQESECVCINGTCTVVMTDGSASGKADTKILFIEEGKIVHTSTLSGSAQHVEECSCYPRYPGVRCVCRDNWKGSNRPIVDINIKDHSIVSRYVCSGLVGDTPRKNDSSSSSHCLDPNNEEGGHGVKGWAFDDGNDVWMGRTINETSRLGYETFKVIEGWSNPKSKLQINRQVIVDRGDRSGYSGIFSVEGKSCINRCFYVELIRGRKEETEVLWTSNSIVVFCGTSGTYGTGSWPDGANLNLMPI

SEQ ID NO: 24708 - protein, 469 aa, Artificial Sequence; identical to SEQ ID NO: 23894
  derived and/or modified protein sequence (wt) from neuraminidase__InfluenzaA__AHL95322

SEQ ID NO: 24709 - protein, 469 aa, Artificial Sequence; identical to SEQ ID NO: 23871
  derived and/or modified protein sequence (wt) from neuraminidase__InfluenzaA__AHL95334

SEQ ID NO: 24710 - protein, 469 aa, Artificial Sequence; identical to SEQ ID NO: 22146
  derived and/or modified protein sequence (wt) from neuraminidase__InfluenzaA__AHL95423

SEQ ID NO: 24711 - protein, 469 aa, Artificial Sequence; identical to SEQ ID NO: 23894
  derived and/or modified protein sequence (wt) from neuraminidase__InfluenzaA__AHL95435

SEQ ID NO: 24712 - protein, 469 aa, Artificial Sequence; identical to SEQ ID NO: 23871
  derived and/or modified protein sequence (wt) from neuraminidase__InfluenzaA__AHL95447

SEQ ID NO: 24713 - protein, 469 aa, Artificial Sequence
  derived and/or modified protein sequence (wt) from neuraminidase__InfluenzaA__AHL95461
MNPNQKIITIGSVSLTISTICFFMQIAILITTVTLHFKQYEFNPPPNNQVMLCEPTIIERNITEIVYLTNTTIEKEICPKPAEYRNWSKPQCGITGFAPFSKDNSIRLSAGGDIWVTREPYVSCGPDKCYQFALGQGTTLNNMHSNNTVRDRTPYRTLLMNELGVPFHLGTKQVCIAWSSSSCHDGKAWLHVCITGDDKNATASFIYNGRLVDSVVSWSKEILRTQESECVCINGTCTVVMTDGSASGKADTKILFIEEGKIVHTSTLSGSAQHVEECSCYPRYPGVRCVCRDNWKGSNRPIVDINIKDHSIVSSYVCSGLVGDTPRKNDSSSSSHCLDPNNEEGGHGVKGWAFDDGNDVWMGRTINETSRLGYETFKVIEGWSNPKSKLQINRQVIVDRGDRSGYSGIFSVEGKSCINRCFYVELIRGRKEETEVLWTSNSIVVFCGTSGTYGTGSWPDGADLNLMPI

SEQ ID NO: 24714 - protein, 469 aa, Artificial Sequence; identical to SEQ ID NO: 22922
  derived and/or modified protein sequence (wt) from neuraminidase__InfluenzaA__AHL95473

SEQ ID NO: 24715 - protein, 469 aa, Artificial Sequence; identical to SEQ ID NO: 22146
  derived and/or modified protein sequence (wt) from neuraminidase__InfluenzaA__AHL95485

SEQ ID NO: 24716 - protein, 469 aa, Artificial Sequence; identical to SEQ ID NO: 22146
  derived and/or modified protein sequence (wt) from neuraminidase__InfluenzaA__AHL95497

SEQ ID NO: 24717 - protein, 469 aa, Artificial Sequence
  derived and/or modified protein sequence (wt) from neuraminidase__InfluenzaA__AHL95509
MNPNQKIITIGSVSLTISTICFFMQIAILITTVTLHFKQYEFNSPPNNQVMLCEPTIIERNITEIVYLTNTTIEKEICPKPAEYRNWSKPQCGITGFAPFSKDNSIRLSAGGDIWVTREPYVSCDPDKCYQFALGQGTTLNNVHSNNTVRDRTPYRTLLMNELGVPFHLGTKQVCIAWSSSSCHDGKAWLHVCITGDDKNATASFIYNGRLVDSVVSWSKEILRTQESECVCINGTCTVVMTDGSASGKADTKILFIEEGKIVHTSTLSGSAQHVEECSCYPRYPGVRCVCRDNWKGSNRPIVDINIKNHSIVSSYVCSGLVGDTPRKNDSSSSSHCLDPNNEEGGHGVKGWAFDDGNDVWMGRTINETSRLGYETFKVIEGWSNPKSKLQINRQVIVDRGDRSGYSGIFSVEGKSCINRCFYVELIRGRKEETEVLWTSNSIVVFCGTSGTYGTGSWPDGADLNLMPI

SEQ ID NO: 24718 - protein, 469 aa, Artificial Sequence; identical to SEQ ID NO: 22146
  derived and/or modified protein sequence (wt) from neuraminidase__InfluenzaA__AHL95521

SEQ ID NO: 24719 - protein, 469 aa, Artificial Sequence; identical to SEQ ID NO: 22146
  derived and/or modified protein sequence (wt) from neuraminidase__InfluenzaA__AHL95533

SEQ ID NO: 24720 - protein, 469 aa, Artificial Sequence; identical to SEQ ID NO: 22146
  derived and/or modified protein sequence (wt) from neuraminidase__InfluenzaA__AHL95545

SEQ ID NO: 24721 - protein, 469 aa, Artificial Sequence
  derived and/or modified protein sequence (wt) from neuraminidase__InfluenzaA__AHL95557
MNPNQKIITIGSVSLTISTICFFIQIAILITTVTLHFKQYEFNSPPNNQVMLCEPTIIERNITEIVYLTNTTIEKEICPKPAEYRNWSKPQCGITGFAPFSKDNSIRLSAGGDIWVTREPYVSCDPDKCYQFALGQGTTLNNVHSNNTARDRTPYRTLLMNELGVPFHLGTKQVCIAWSSSSCHDGKAWLHVCITGDDKNATASFIYNGRLVDSVVSWSKEILRTQESECVCINGTCTVVMTDGSASGKADTKILFIEEGKIVHTSTLSGSAQHVEECSCYPRYPGVRCVCRDNWKGSNRPIVDINIKDHSIVSSYVCSGLVGDTPRKNDSSSSSHCLDPNNEEGGHGVKGWAFDDGNDVWMGRTINETSRLGYETFKVIEGWSNPESKLQINRQVIVDRGDRSGYSGIFSVEGKSCINRCFYVELIRGRKEETEVLWTSNSIVVFCGTSGTYGTGSWPDGADLNLMPI

SEQ ID NO: 24722 - protein, 469 aa, Artificial Sequence; identical to SEQ ID NO: 23871
  derived and/or modified protein sequence (wt) from neuraminidase__InfluenzaA__AHL95569

SEQ ID NO: 24723 - protein, 469 aa, Artificial Sequence; identical to SEQ ID NO: 22146
  derived and/or modified protein sequence (wt) from neuraminidase__InfluenzaA__AHL95581

SEQ ID NO: 24724 - protein, 469 aa, Artificial Sequence
  derived and/or modified protein sequence (wt) from neuraminidase__InfluenzaA__AHL95605
MNPNQKIITIGSVSLTISTICFFMQIAILITTVTLHFKQYEFNSPPNNQVMLCEPTIIERNITEIVYLTNTTIEKEICPKPAEYRNWSKPQCGITGFAPFSKDNSIRLSAGGDIWVTREPYVSCDPDKCYQFALGQGTTLNNVHSNNTVRDRTPYRTLLMNELGVPFHLGTKQVCIAWSSSSCHDGKAWLHVCITGDDKNATASFIYNGRLVDSVVSWSKEILRTQESECVCINGTCTVVMTDGSASGKADTKILFIEEGKIVHTSTLSGSAQHVEECSCYPRYPGVRCVCRDNWKGSNRPIVDINIKDHSIVSSYVCSGLVGDTPRKNDISSSSHCLDPNNEEGGHGVKGWAFDDGNDVWMGRTINETSRLGYETFKVIEGWSNPKSKLQINRQVIVDRGDRSGYSGIFSVEGKSCINRCFYVELIRGRKEETEVLWTSNSIVVFCGTSGTYGTGSWPDGADLNLMPI

SEQ ID NO: 24725 - protein, 469 aa, Artificial Sequence; identical to SEQ ID NO: 22146
  derived and/or modified protein sequence (wt) from neuraminidase__InfluenzaA__AHL95617

SEQ ID NO: 24726 - protein, 469 aa, Artificial Sequence; identical to SEQ ID NO: 22146
  derived and/or modified protein sequence (wt) from neuraminidase__InfluenzaA__AHL95629

SEQ ID NO: 24727 - protein, 469 aa, Artificial Sequence; identical to SEQ ID NO: 22146
  derived and/or modified protein sequence (wt) from neuraminidase__InfluenzaA__AHL95641

SEQ ID NO: 24728 - protein, 469 aa, Artificial Sequence; identical to SEQ ID NO: 22146
  derived and/or modified protein sequence (wt) from neuraminidase__InfluenzaA__AHL95653

SEQ ID NO: 24729 - protein, 469 aa, Artificial Sequence; identical to SEQ ID NO: 24724
  derived and/or modified protein sequence (wt) from neuraminidase__InfluenzaA__AHL95665

SEQ ID NO: 24730 - protein, 469 aa, Artificial Sequence; identical to SEQ ID NO: 22146
  derived and/or modified protein sequence (wt) from neuraminidase__InfluenzaA__AHL95677

SEQ ID NO: 24731 - protein, 469 aa, Artificial Sequence
  derived and/or modified protein sequence (wt) from neuraminidase__InfluenzaA__AHL95689
MNPNQKIITIGSVSLTISTICFFMQIAILITTVTLHFKQYEFDSPPNNQVMLCEPTIIERNITEIVYLTNTTIEKEICPKPAEYRNWSKPQCGITGFAPFSKDNSIRLSAGGDIWVTREPYVSCDPDKCYQFALGQGTTLNNVHSNNTVRDRTPYRTLLMNELGVPFHLGTKQVCIAWSSSSCHDGKAWLHVCITGDDKNATASFIYNGRLVDSVVSWSKEILRTQESECVCINGTCTVVMTDGSASGKADTKILFIEEGKIVHTSTLSGSAQHVEECSCYPRYPGVRCVCRDNWKGSNRPIVDINIKDHSIVSSYVCSGLVGDTPRKNDSSSSSHCLDPNNEEGGHGVKGWAFDDGNDVWMGRTINETSRLGYETFKVIEGWSNPKSKLQINRQVIVDRGDRSGYSGIFSVEGKSCINRCFYVELIRGRKEETEVLWTSNSIVVFCGTSGTYGTGSWPDGANLNLMPI

SEQ ID NO: 24732 - protein, 469 aa, Artificial Sequence; identical to SEQ ID NO: 22146
  derived and/or modified protein sequence (wt) from neuraminidase__InfluenzaA__AHL95701

SEQ ID NO: 24733 - protein, 469 aa, Artificial Sequence; identical to SEQ ID NO: 22146
  derived and/or modified protein sequence (wt) from neuraminidase__InfluenzaA__AHL95713

SEQ ID NO: 24734 - protein, 469 aa, Artificial Sequence
  derived and/or modified protein sequence (wt) from neuraminidase__InfluenzaA__AHL95725
MNPNQKIITIGSVSLTISTICFFMQIAILITTVTLHFKQYEFDPPPNNQVMLCEPTIIERNITEIVYLTNTTIEKEICPKPAEYRNWSKPQCGITGFAPFSKDNSIRLSAGGDIWVTREPYVSCDPDKCYQFALGQGTTLNNVHSNNTVRDRTPYRTLLMNELGVPFHLGTKQVCIAWSSSSCHDGKAWLHVCITGDDKNATASFIYNGRLVDSVVSWSKEILRTQESECVCINGTCTVVMTDGSASGKADTKILFIEEGKIVHTSTLSGSAQHVEECSCYPRYPGVRCVCRDNWKGSNRPIVDINIKDHSIVSSYVCSGLVGDTPRKNDSSSSSHCLDPNNEEGGHGVKGWAFDDGNDVWMGRTINETSRLGYETFKVIEGWSNPKSKLQINRQVIVDRGDRSGYSGIFSVEGKSCINRCFYVELIRGRKEEIEVLWTSNSIVVFCGTSGTYGTGSWPDGADLNLMPI

SEQ ID NO: 24735 - protein, 469 aa, Artificial Sequence; identical to SEQ ID NO: 23883
  derived and/or modified protein sequence (wt) from neuraminidase__InfluenzaA__AHL95737

SEQ ID NO: 24736 - protein, 469 aa, Artificial Sequence
  derived and/or modified protein sequence (wt) from neuraminidase__InfluenzaA__AHL95749
MNPNQKIITIGSVSLTISTICFFMQIAILITTVTLHFKQYEFNSPPNNQVMLCEPTIIERNITEIVYLTNTTIEKEICPKPAEYRNWSKPQCGITGFAPFSKDNSIRLSAGGDIWVTREPYVSCDPDKCYQFALGQGTTLNNVHSNNTARDRTPYRTLLMNELGVPFHLGTKQVCIAWSSSSCHDGKAWLHVCITGDDKNATASFIYNGRLVDSVVSWSKEILRTQESECVCINGTCTVVMTDGSASGKADTKILFIEEGKIVHTSTLSGSAQHVEECSCYPRYPGVRCVCRDNWKGSNRPIVDINIKDHSIVSSYVCSGLVGDTPRKNDSSSSSHCLDPNNEEGGHGVKGWAFDDGNDVWMGRTINETSRLGYETFKVIEGWSNPKSKLQINRQVIVDRGDRSGYSGIFSVEGKSCINRCFYVELIRGRKEETEVLWTSNSIVVFCGTSGTYGTGSWPDGADLNLMPI

SEQ ID NO: 24737 - protein, 469 aa, Artificial Sequence; identical to SEQ ID NO: 22146
  derived and/or modified protein sequence (wt) from neuraminidase__InfluenzaA__AHL95761

SEQ ID NO: 24738 - protein, 469 aa, Artificial Sequence; identical to SEQ ID NO: 22146
  derived and/or modified protein sequence (wt) from neuraminidase__InfluenzaA__AHL95773

SEQ ID NO: 24739 - protein, 469 aa, Artificial Sequence
  derived and/or modified protein sequence (wt) from neuraminidase__InfluenzaA__AHL95785
MNPNQKIITIGSVSLTISTICFFMQIAILITTVTLHFKQYEFNSPPNNQVMLCEPTIIERNITEIVYLTNTTIEKEICPKPAEYRNWSKPQCDITGFAPFSKDNSVRLSAGGDIWVTREPYVSCDPDKCYQFALGQGTTLNNVHSNNTVRDRTPYRTLLMNELGVPFHLGTKQVCIAWSSSSCHDGKAWLHVCITGDDKNATASFIYNGRLVDSVVSWSKEILRTQESECVCINGTCTVVMTDGSASGKADTKILFIEEGKIVHTSTLSGSAQHVEECSCYPRYPGVRCVCRDNWKGSNRPIVDINIKDHSIVSSYVCSGLVGDTPRKNDSSSSSHCLDPNNEEGGHGVKGWAFDDGNDVWMGRTINETSRLGYETFKVIEGWSNPKSKLQINRQVIVDRGDRSGYSGIFSVEGKSCINRCFYVELIRGRKEETEVLWTSNSIVVFCGTSGTYGTGSWPDGADLNLMPI

SEQ ID NO: 24740 - protein, 469 aa, Artificial Sequence; identical to SEQ ID NO: 23871
  derived and/or modified protein sequence (wt) from neuraminidase__InfluenzaA__AHL95797

SEQ ID NO: 24741 - protein, 469 aa, Artificial Sequence; identical to SEQ ID NO: 22146
  derived and/or modified protein sequence (wt) from neuraminidase__InfluenzaA__AHL95833

SEQ ID NO: 24742 - protein, 469 aa, Artificial Sequence; identical to SEQ ID NO: 23871
  derived and/or modified protein sequence (wt) from neuraminidase__InfluenzaA__AHL95845

SEQ ID NO: 24743 - protein, 469 aa, Artificial Sequence
  derived and/or modified protein sequence (wt) from neuraminidase__InfluenzaA__AHL95857
MNPNQKIISIGSVSLTISTICFFMQIAILITTVTLHFKQYEFNSPPNNQVMLCEPTIIERNITEIVYLTNTTIEKEICPKPAEYRNWSKPQCGITGFAPFSKDNSIRLSAGGDIWVTREPYVSCDPDKCYQFALGQGTTLNNVHSNNTVRDRTPYRTLLMNELGVPFHLGTKQVCIAWSSSSCHDGKAWLHVCITGDDKNATASFIYNGRLVDSVVSWSKEILRTQESECVCINGTCTVVMTDGSASGKADTKILFIEEGKIVHTSTLSGSAQHVEECSCYPRYPGVRCVCRDNWKGSNRPIVDINIKDHSIVSSYVCSGLVGDTPRKNDSSSSSHCLDPNNEEGGHGVKGWAFDDGNDVWMGRTINETSRLGYETFKVIEGWSNPKSKLQINRQVIVDRGDRSGYSGIFSVEGKSCINRCFYVELIRGRKEETEVLWTSNSIVVFCGTSGTYGTGSWPDGADLNLMPI

SEQ ID NO: 24744 - protein, 469 aa, Artificial Sequence; identical to SEQ ID NO: 22146
  derived and/or modified protein sequence (wt) from neuraminidase__InfluenzaA__AHL95869

SEQ ID NO: 24745 - protein, 469 aa, Artificial Sequence
  derived and/or modified protein sequence (wt) from neuraminidase__InfluenzaA__AHL95881
MNPNQKIITIGSVCMTIGMANLILQIGNIISIWISHSIQVGNQSQIETCNQSVITYENNTWVNQTYVNISNTNLAAGQSVVSVKLAGNSSLCPVSGWAIYSKDNSVRIGSKGDVFVIREPFISCSPLECRTFFLTQGALLNDKHSNGTIKDRSPYRTLMSCPIGEVPSPYNSRFESVAWSASACHDGINWLTIGISGPDSGAVAVLKYNGIITDTIKSWRNNILRTQESECACVNGSCFTIMTDGPSDGQASYKIFRIEKGKIVKSVEMNAPNYHYEECSCYPDSSEITCVCRDNWHGSNRPWVSFNQNLEYQIGYICSGIFGDNPRPNDKTGSCGPVSSNGANGVKGFSFKYGNGVWIGRTKSISSRKGFEMIWDPNGWTGTDNNFSIKQDIVGINEWSGYSGSFVQHPELTGLDCIRPCFWVELIRGRPKENTIWTSGSSISFCGVNSDTVGWSWPDGAELPFTIDK

SEQ ID NO: 24746 - protein, 469 aa, Artificial Sequence
  derived and/or modified protein sequence (wt) from neuraminidase__InfluenzaA__AHL95892
MNPNQKIITIGSVSLTISTICFFMQIAILITTVTLHFKQYEFNSPPNNQVMLCEPTIIERNITEIVYLTNTTIEKEICPKPAEYRNWSKPQCGITGFAPFSKDNSIRLSAGGDIWVTREPYVSCDPDKCYQFALGQGTTLNNVHSNNTVRDRTPYRTLLMNELGVPFHLGTKQVCIAWSSSSCHDGKAWLHVCITGDDKNATASFIYNGRLVDSVVSWSKEILRTQESECVCINGTCTVVMTDGSASGKADTKILFIEEGKIVHTSTLSGSAQHVEECSCYPRYPGVRCVCRDNWKGSNRPIVDINIKDHSIVSRYVCSGLVGDTPRKNDSSSSSHCLDPNNEEGGHGVKGWAFDDGNDVWMGRTINETSRLGYETFKVIEGWSNPKSKLQINRQVIVDRGDRSGYSGIFSVEGKSCINRCFYVELIRGRKEETEVLWTSNSIVVFCGTSGTYGTGSWPDGADLNLMPI

SEQ ID NO: 24747 - protein, 469 aa, Artificial Sequence; identical to SEQ ID NO: 22146
  derived and/or modified protein sequence (wt) from neuraminidase__InfluenzaA__AHL95904

SEQ ID NO: 24748 - protein, 469 aa, Artificial Sequence
  derived and/or modified protein sequence (wt) from neuraminidase__InfluenzaA__AHL95916
MNPNQKIITIGSVSLTISTICFFMQIAILITTVTLHFKQYELNSPPNNQVMLCEPTIIERNITEIVYLTNTTIEKEICPKPAEYRNWSKPQCGITGFAPFSKDNSIRLSAGGDIWVTREPYVSCDPDKCYQFALGQGTTLNNVHSNNTVRDRTPYRTLLMNELGVPFHLGTKQVCIAWSSSSCHDGKAWLHVCITGDDKNATASFIYNGRLVDSVVSWSKEILRTQESECVCINGTCTVVMTDGSASGKADTKILFIEEGKIVHTSTLSGSAQHVEECSCYPRYPGVRCVCRDNWKGSNRPIVDINIKDHSIVSSYVCSGLVGDTPRKNDSSSSSHCLDPNNEEGGHGVKGWAFDDGNDVWMGRTINETSRLGYETFKVIEGWSNPKSKLQINRQVIVDRGDRSGYSGIFSVEGKSCINRCFYVELIRGRKEETEVLWTSNSIVVFCGTSGTYGTGSWPDGADLNLMPI

SEQ ID NO: 24749 - protein, 469 aa, Artificial Sequence; identical to SEQ ID NO: 23883
  derived and/or modified protein sequence (wt) from neuraminidase__InfluenzaA__AHL95928

SEQ ID NO: 24750 - protein, 469 aa, Artificial Sequence; identical to SEQ ID NO: 23871
  derived and/or modified protein sequence (wt) from neuraminidase__InfluenzaA__AHL95940

SEQ ID NO: 24751 - protein, 469 aa, Artificial Sequence; identical to SEQ ID NO: 22146
  derived and/or modified protein sequence (wt) from neuraminidase__InfluenzaA__AHL95952

SEQ ID NO: 24752 - protein, 469 aa, Artificial Sequence; identical to SEQ ID NO: 22146
  derived and/or modified protein sequence (wt) from neuraminidase__InfluenzaA__AHL95964

SEQ ID NO: 24753 - protein, 469 aa, Artificial Sequence; identical to SEQ ID NO: 22146
  derived and/or modified protein sequence (wt) from neuraminidase__InfluenzaA__AHL95976

SEQ ID NO: 24754 - protein, 469 aa, Artificial Sequence; identical to SEQ ID NO: 22146
  derived and/or modified protein sequence (wt) from neuraminidase__InfluenzaA__AHL95988

SEQ ID NO: 24755 - protein, 469 aa, Artificial Sequence; identical to SEQ ID NO: 22146
  derived and/or modified protein sequence (wt) from neuraminidase__InfluenzaA__AHL96000

SEQ ID NO: 24756 - protein, 469 aa, Artificial Sequence
  derived and/or modified protein sequence (wt) from neuraminidase__InfluenzaA__AHL96012
MNPNQKIITIGSVSLTISTICFFMQIAILITTVTLHFKQYEFNSPPNNQVMLCEPTIIERNITEIVYLTNTTIEKEICPKPAEYRNWSKPQCGITGFAPFSKDNSIRLSAGGDIWVTRVPYVSCDPDKCYQFALGQGTTLNNVHSNNTVRDRTPYRTLLMNELGVPFHLGTKQVCIAWSSSSCHDGKAWLHVCITGDDKNATASFIYNGRLVDSVVSWSKEILRTQESECVCINGTCTVVMTDGSASGKADTKILFIEEGKIVHTSTLSGSAQHVEECSCYPRYPGVRCVCRDNWKGSNRPIVDINIKDHSIVSSYVCSGLVGDTPRKNDSSSSSHCLDPNNEEGGHGVKGWAFDDGNDVWMGRTINETSRLGYETFKVIEGWSNPKSKLQINRQVIVDRGDRSGYSGIFSVEGKSCINRCFYVELIRGRKEETEVLWTSNSIVVFCGTSGTYGTGSWPDGADLNLMPI

SEQ ID NO: 24757 - protein, 469 aa, Artificial Sequence
  derived and/or modified protein sequence (wt) from neuraminidase__InfluenzaA__AHL96024
MNPNQKIITIGSVSLTISTICFFMQIAILITTVTLHFKQYEFNSPPNNQVMLCEPTIIERNITEIVYLTNTTIEKEICPKPAEYRNWSKPQCGITGFAPFSKDNSIRLSAGGDIWVTREPYVSCDPDKCYQFALGQGTTLNNVHSNNTVRDRTPYRTLLMNELGVPFHLGTKQVCIAWSSSSCHDGKAWLHVCITGDDKNATASFIYNGRLVDSVVSWSKENLRTQESECVCINGTCTVVMTDGSASGKADTKILFIEEGKIVHTSTLSGSAQHVEECSCYPRYPGVRCVCRDNWKGSNRPIVDINIKDHSIVSSYVCSGLVGDTPRKNDSSSSSHCLDPNNEEGGHGVKGWAFDDGNDVWMGRTINETSRLGYETFKVIEGWSNPKSKLQINRQVIVDRGDRSGYSGIFSVEGKSCINRCFYVELIRGRKEETEVLWTSNSIVVFCGTSGTYGTGSWPDGADLNLMPI

SEQ ID NO: 24758 - protein, 469 aa, Artificial Sequence; identical to SEQ ID NO: 22146
  derived and/or modified protein sequence (wt) from neuraminidase__InfluenzaA__AHL96036

SEQ ID NO: 24759 - protein, 469 aa, Artificial Sequence; identical to SEQ ID NO: 23389
  derived and/or modified protein sequence (wt) from neuraminidase__InfluenzaA__AHL96048

SEQ ID NO: 24760 - protein, 469 aa, Artificial Sequence; identical to SEQ ID NO: 22146
  derived and/or modified protein sequence (wt) from neuraminidase__InfluenzaA__AHL96059

SEQ ID NO: 24761 - protein, 469 aa, Artificial Sequence; identical to SEQ ID NO: 23883
  derived and/or modified protein sequence (wt) from neuraminidase__InfluenzaA__AHL96071

SEQ ID NO: 24762 - protein, 469 aa, Artificial Sequence; identical to SEQ ID NO: 24724
  derived and/or modified protein sequence (wt) from neuraminidase__InfluenzaA__AHL96083

SEQ ID NO: 24763 - protein, 469 aa, Artificial Sequence; identical to SEQ ID NO: 22146
  derived and/or modified protein sequence (wt) from neuraminidase__InfluenzaA__AHL96095

SEQ ID NO: 24764 - protein, 469 aa, Artificial Sequence
  derived and/or modified protein sequence (wt) from neuraminidase__InfluenzaA__AHL96107
MNPNQKIITIGSVSLTISTICFFMQIAILITTVTLHFKQYEFNSPPNNQVMLCEPTIIERNITEIVYLTNTTIEKEICPKPAEYRNWSKPQCGITGFAPFSKDNSIRLSAGGDIWVTREPYVSCDPDKCYQFALGQGTTLNNMHSNNTVRDRTPYRTLLMNELGVPFHLGTKQVCIAWSSSSCHDGKAWLHVCITGDDKNATASFIYNGRLVDSVVSWSKEILRTQESECVCINGTCTVVMTDGSASGKADTKILFIEEGKIVHTSTLSGSAQHVEECSCYPRYPGVRCVCRDNWKGSNRPIVDINIKDHSIVSSYVCSGLVGDTPRKNDNSSSSHCLDPNNEEGGHGVKGWAFDDGNDVWMGRTINETSRLGYETFKVIEGWSNPKSKLQINRQVIVDRGDRSGYSGIFSVEGKSCINRCFYVELIRGRKEETEVLWTSNSIVVFCGTSGTYGTGSWPDGADLNLMPI

SEQ ID NO: 24765 - protein, 469 aa, Artificial Sequence; identical to SEQ ID NO: 22146
  derived and/or modified protein sequence (wt) from neuraminidase__InfluenzaA__AHL96119

SEQ ID NO: 24766 - protein, 469 aa, Artificial Sequence; identical to SEQ ID NO: 23883
  derived and/or modified protein sequence (wt) from neuraminidase__InfluenzaA__AHL96131

SEQ ID NO: 24767 - protein, 469 aa, Artificial Sequence; identical to SEQ ID NO: 22146
  derived and/or modified protein sequence (wt) from neuraminidase__InfluenzaA__AHL96143

SEQ ID NO: 24768 - protein, 469 aa, Artificial Sequence; identical to SEQ ID NO: 22146
  derived and/or modified protein sequence (wt) from neuraminidase__InfluenzaA__AHL96167

SEQ ID NO: 24769 - protein, 469 aa, Artificial Sequence; identical to SEQ ID NO: 22146
  derived and/or modified protein sequence (wt) from neuraminidase__InfluenzaA__AHL96179

SEQ ID NO: 24770 - protein, 469 aa, Artificial Sequence
  derived and/or modified protein sequence (wt) from neuraminidase__InfluenzaA__AHL96191
MNPNQKIITIGSVSLTISTICFFMQIAILITTVTLHFKQYEFDSPPNNQVMLCEPTIIERNITEIVYLTNTTIEKEICPKPAEYRNWSKPQCGITGFAPFSKDNSIRLSAGGDIWVTREPYVSCDPDKCYQFALGQGTTLNNMHSNNTVRDRTPYRTLLMNELGVPFHLGTKQVCIAWSSSSCHDGKAWLHVCITGDDKNATASFIYNGRLVDSVVSWSKEILRTQESECVCINGTCTVVMTDGSASGKADTKILFIEEGKIVHTSTLSGSAQHVEECSCYPRYPGVRCVCRDNWKGSNRPIVDINIKDHSIVSSYVCSGLVGDTPRKNDSSSSSHCLDPNNEEGGHGVKGWAFDDGNDVWMGRTINETSRLGYETFKVIEGWSNPKSKLQINRQVIVDRGDRSGYSGIFSVEGKSCINRCFYVELIRGRKEETEVLWTSNSIVVFCGTSGTYGTGSWPDGADLNLMPI

SEQ ID NO: 24771 - protein, 469 aa, Artificial Sequence; identical to SEQ ID NO: 23871
  derived and/or modified protein sequence (wt) from neuraminidase__InfluenzaA__AHL96203

SEQ ID NO: 24772 - protein, 469 aa, Artificial Sequence; identical to SEQ ID NO: 23883
  derived and/or modified protein sequence (wt) from neuraminidase__InfluenzaA__AHL96215

SEQ ID NO: 24773 - protein, 469 aa, Artificial Sequence; identical to SEQ ID NO: 22146
  derived and/or modified protein sequence (wt) from neuraminidase__InfluenzaA__AHL96227

SEQ ID NO: 24774 - protein, 469 aa, Artificial Sequence; identical to SEQ ID NO: 22146
  derived and/or modified protein sequence (wt) from neuraminidase__InfluenzaA__AHL96239

SEQ ID NO: 24775 - protein, 469 aa, Artificial Sequence; identical to SEQ ID NO: 22146
  derived and/or modified protein sequence (wt) from neuraminidase__InfluenzaA__AHL96251

SEQ ID NO: 24776 - protein, 469 aa, Artificial Sequence; identical to SEQ ID NO: 22146
  derived and/or modified protein sequence (wt) from neuraminidase__InfluenzaA__AHL96263

SEQ ID NO: 24777 - protein, 469 aa, Artificial Sequence; identical to SEQ ID NO: 23927
  derived and/or modified protein sequence (wt) from neuraminidase__InfluenzaA__AHL96277

SEQ ID NO: 24778 - protein, 469 aa, Artificial Sequence
  derived and/or modified protein sequence (wt) from neuraminidase__InfluenzaA__AHL96308
MNPNQKIITIGSVSLTISTICFFMQIAILITTVTLHFKQYEFNFPPNNQVMLCEPTIIERNITEIVYLTNTTIEKEICPKPAEYRNWSKPQCGITGFAPFSKDNSIRLSAGGDIWVTREPYVSCDPDKCYQFALGQGTTLNNVHSNNTVRDRTPYRTLLMSELGVPFHLGTKQVCIAWSSSSCHDGKAWLHVCITGDDKNATASFIYNGRLVDSVVSWSKEILRTQESECVCINGTCTVVMTDGSASGKADTKILFIEEGKIVHTSTLSGSAQHVEECSCYPRYPGVRCVCRDNWKGSNRPIVDINIKDHSIVSSYVCSGLVGDTPRKNDSSSSSHCLDPNNEEGGHGVKGWAFDDGNDVWMGRTINETSRLGYETFKVIEGWSNPKSKLQINRQVIVDRGDRSGYSGIFSVEGKSCINRCFYVELIRGRKEETEVLWTSNSIVVFCGTSGTYGTGSWPDGADLNLMPI

SEQ ID NO: 24779 - protein, 469 aa, Artificial Sequence; identical to SEQ ID NO: 23375
  derived and/or modified protein sequence (wt) from neuraminidase__InfluenzaA__AHL96321

SEQ ID NO: 24780 - protein, 469 aa, Artificial Sequence; identical to SEQ ID NO: 22146
  derived and/or modified protein sequence (wt) from neuraminidase__InfluenzaA__AHL96333

SEQ ID NO: 24781 - protein, 469 aa, Artificial Sequence
  derived and/or modified protein sequence (wt) from neuraminidase__InfluenzaA__AHL96345
MNPNQKIITIGSVSLTISTICFFMQIAILITTVTLHFKQYEFNSPPNNQVMLCEPTIIERNITEIVYLTNTTIEKEICPKPAEYRNWSKPQCGITGFAPFSKDNSIRLSAGGDIWVTREPYVSCDPDKCYQFALGQGTTLNNVHSNNTVRDRTPYRTLLMNELGVPFHLGTKQVCIAWSSSSCHDGKAWLHVCITGDDKNATASFIYNGRLVDSVVSWSKEILRTQESECVCINGTCTVVMTDGSASGKADTKILFIEEGKIVHTSTLSGSAQHVEECSCYPRYPGVRCVCRDNWKGSNRPIVDINIKDHSIVSSYVCSGLVGDTPRKNDNSSSSHCLDPNNEEGGHGVKGWAFDDGNDVWMGRTINETSRLGYETFKVIEGWSNPKSKLQINRQVIVDRGDRSGYSGIFSVEGKSCINRCFYVELIRGRKEETEVLWTSNSIVVFCGTSGTYGTGSWPDGADLNLMPI

SEQ ID NO: 24782 - protein, 469 aa, Artificial Sequence; identical to SEQ ID NO: 23871
  derived and/or modified protein sequence (wt) from neuraminidase__InfluenzaA__AHL96357

SEQ ID NO: 24783 - protein, 469 aa, Artificial Sequence; identical to SEQ ID NO: 22146
  derived and/or modified protein sequence (wt) from neuraminidase__InfluenzaA__AHL96369

SEQ ID NO: 24784 - protein, 469 aa, Artificial Sequence; identical to SEQ ID NO: 22146
  derived and/or modified protein sequence (wt) from neuraminidase__InfluenzaA__AHL96381

SEQ ID NO: 24785 - protein, 469 aa, Artificial Sequence; identical to SEQ ID NO: 23883
  derived and/or modified protein sequence (wt) from neuraminidase__InfluenzaA__AHL96393

SEQ ID NO: 24786 - protein, 469 aa, Artificial Sequence
  derived and/or modified protein sequence (wt) from neuraminidase__InfluenzaA__AHL96405
MNPNQKIITIGSVSLTISTICFFMQIAILITTVTLHFKQYEFNSPPNNQVMLCEPTIIERNITEIVYLTNTTIEKEICPKPAEYRNWSKPQCGITGFAPFSKDNSIRLSAGGDIWVTREPYVSCDPDKCYQFALGQGTTLNNVHSNNTVRDRTPYRTLLMNELGVPFHLGTKQVCIAWSSSSCHDGKAWLHVCITGDDKNATASFIYNGRLVDSVVSWSKEILRTQESECVCINGTCTVVMTDGSASGKADTKILFIEEGKIVHTSTLSGSAQHVEECSCYPRYPGVRCVCRDNWKGSNRPIVDINIKDHSIVSSYVCSGLVGDTPRKNDSSSSSHCLGPNNEEGGHGVKGWAFDDGNDVWMGRTINETSRLGYETFKVIEGWSNPKSKLQINRQVIVDRGDRSGYSGIFSVEGKSCINRCFYVELIRGRKEETEVLWTSNSIVVFCGTSGTYGTGSWPDGADLNLMPI

SEQ ID NO: 24787 - protein, 469 aa, Artificial Sequence; identical to SEQ ID NO: 22146
  derived and/or modified protein sequence (wt) from neuraminidase__InfluenzaA__AHL96417

SEQ ID NO: 24788 - protein, 469 aa, Artificial Sequence; identical to SEQ ID NO: 22146
  derived and/or modified protein sequence (wt) from neuraminidase__InfluenzaA__AHL96429

SEQ ID NO: 24789 - protein, 469 aa, Artificial Sequence
  derived and/or modified protein sequence (wt) from neuraminidase__InfluenzaA__AHL96441
MNPNQKIITIGSVSLTISTICFFMQIAILITTVTLHFKHYEFNSPPNNQVMLCEPTIIERNITEIVYLTNTTIEKEICPKPAEYRNWSKPQCDITGFAPFSKDNSIRLSAGGDIWVTREPYVSCDPDKCYQFALGQGTTLNNVHSNNTVRDRTPYRTLLMNELGVPFHLGTKQVCIAWSSSSCHDGKAWLHVCITGDDKNATASFIYNGRLVDSVVSWSKEILRTQESECVCINGTCTVVMTDGSASGKADTKILFIEEGKIVHTSTLSGSAQHVEECSCYPRYPGVRCVCRDNWKGSNRPIVDINIKDHSIVSRYVCSGLVGDTPRKNDSSSSSHCLNPNNEEGGHGVKGWAFDDGNDVWMGRTINETSRLGYETFKVIEGWSNPKSKLQINRQIIVDRGDRSGYSGIFSVEGKSCINRCFYVELIRGRKEETEVLWTSNSIVVFCGTSGTYGTGSWPDGADLNLMPI

SEQ ID NO: 24790 - protein, 469 aa, Artificial Sequence; identical to SEQ ID NO: 22146
  derived and/or modified protein sequence (wt) from neuraminidase__InfluenzaA__AHL96453

SEQ ID NO: 24791 - protein, 469 aa, Artificial Sequence; identical to SEQ ID NO: 22146
  derived and/or modified protein sequence (wt) from neuraminidase__InfluenzaA__AHL96465

SEQ ID NO: 24792 - protein, 469 aa, Artificial Sequence
  derived and/or modified protein sequence (wt) from neuraminidase__InfluenzaA__AHL96477
MNPNQKIITIGSVCMTIGMANLILQIGNIISIWISHSIQVGNQSQIETCNQSVITYENNTWVNQTYVNISNTNFAAGQSVVSVKLAGNSSLCPVSGWAIYSKDNSVRIGSKGDVFVIREPFISCSPLECRTFFLTQGALLNDKHSNGTIKDRSPYRTLMSCPIGEVPSPYNSRFESVAWSASACHDGINWLTIGISGPDSGAVAVLKYNGIITDTIKSWRNNILRTQESECACVNGSCFTIMTDGPSDGQASYKIFRIEKGKIVKSVEMNAPNYHYEECSCYPDSSEITCVCRDNWHGSNRPWVSFNQNLEYQIGYICSGIFGDNPRPNDKTGSCGPVSSNGANGVKGFSFKYGNGVWIGRTKSISSRKGFEMIWDPNGWTGTDNNFSIKQDIVGINEWSGYSGSFVQHPELTGLDCIRPCFWVELIRGRPKENTIWTSGSSISFCGVNSDTVGWSWPDGAELPFTIDK

SEQ ID NO: 24793 - protein, 469 aa, Artificial Sequence; identical to SEQ ID NO: 23883
  derived and/or modified protein sequence (wt) from neuraminidase__InfluenzaA__AHL96488

SEQ ID NO: 24794 - protein, 469 aa, Artificial Sequence; identical to SEQ ID NO: 22146
  derived and/or modified protein sequence (wt) from neuraminidase__InfluenzaA__AHL96500

SEQ ID NO: 24795 - protein, 469 aa, Artificial Sequence; identical to SEQ ID NO: 22146
  derived and/or modified protein sequence (wt) from neuraminidase__InfluenzaA__AHL96512

SEQ ID NO: 24796 - protein, 469 aa, Artificial Sequence; identical to SEQ ID NO: 23375
  derived and/or modified protein sequence (wt) from neuraminidase__InfluenzaA__AHL96524

SEQ ID NO: 24797 - protein, 469 aa, Artificial Sequence
  derived and/or modified protein sequence (wt) from neuraminidase__InfluenzaA__AHL96536
MNPNQKIITIGSVSLTISTICFFTQIAILITTVTLHFKQYEFNSPPNNQVMLCEPTIIERNITEIVYLTNTTIEKEICPKPAEYRNWSKPQCGITGFAPFSKDNSIRLSAGGDIWVTREPYVSCDPDKCYQFALGQGTTINNVHSNNTVRDRTPYRTLLMNELGVPFHLGTKQVCIAWSSSSCHDGKAWLHVCITGDDKNATASFIYNGRLVDSVVSWSKEILRTQESECVCINGTCTVVMTDGSASGKADTKILFIEEGKIVHTSTLSGSAQHVEECSCYPRYPGVRCVCRDNWKGSNRPIVDINIKDHSIVSSYVCSGLVGDTPRKNDSSSSSHCLDPNNEEGGHGVKGWAFDDGNDVWMGRTINETSRLGYETFKVIEGWSNPKSKLQINRQVIVDRGDRSGYSGIFSVEGKSCINRCFYVELIRGRKEETEVLWTSNSIVVFCGTSGTYGTGSWPDGADLNLMPI

SEQ ID NO: 24798 - protein, 469 aa, Artificial Sequence; identical to SEQ ID NO: 23883
  derived and/or modified protein sequence (wt) from neuraminidase__InfluenzaA__AHL96548

SEQ ID NO: 24799 - protein, 469 aa, Artificial Sequence
  derived and/or modified protein sequence (wt) from neuraminidase__InfluenzaA__AHL96560
MNPNQKIITIGSVSLTISTICFFMQIAILITTVTLHFKQYEFNSPPNNQVMLCEPTIIERNITEIVYLTNTTIEKEICPKPAEYRNWSKPQCGITGFAPFSKDNSIRLSAGGDIWVTREPYVSCDPDKCYQFALGQGTTLNNVHSNNTVRDRTPYRTLLMNELGVPFHLGTKQVCIAWSSSSCHDGKAWLHVCITGDDKNATASFIYNGRLVDSVVSWSKEILRTQESECVCINGTCTVVMTDGNASGKADTKILFIEEGKIVHTSTLSGSAQHVEECSCYPRYPGVRCVCRDNWKGSNRPIVDINIKDHSIVSSYVCSGLVGDTPRKNDSSSSSHCLDPNNEEGGHGVKGWAFDDGNDVWMGRTINETSRLGYETFKVIEGWSNPKSKLQINRQVIVDRGDRSGYSGIFSVEGKSCINRCFYVELIRGRKEETEVLWTSNSIVVFCGTSGTYGTGSWPDGADLNLMPI

SEQ ID NO: 24800 - protein, 469 aa, Artificial Sequence; identical to SEQ ID NO: 23357
  derived and/or modified protein sequence (wt) from neuraminidase__InfluenzaA__AHL96572

SEQ ID NO: 24801 - protein, 469 aa, Artificial Sequence; identical to SEQ ID NO: 24792
  derived and/or modified protein sequence (wt) from neuraminidase__InfluenzaA__AHL96584

SEQ ID NO: 24802 - protein, 469 aa, Artificial Sequence
  derived and/or modified protein sequence (wt) from neuraminidase__InfluenzaA__AHL96595
MNPNQKIITIGSVSLTISTICFFMQIAILITTVTLHFKQYEFNSPPNNQVMLCEPTIIERNITEIVYLTNTTIEKEICPKPAEYRNWSKPQCGITGFAPFSKDNSIRLSAGGDIWVTREPYVSCDPDKCYQFALGQGTTLNNVHSNNTVRDRTPYRTLLMNELGVPFHLGTKQVCIAWSSSSCHDGKAWLHVCITGDDKNATASFIYNGRLVDSVVSWSKEILRTQESECVCINGTCTVVMTDGSASGKADTKILFIEEGKIVHTSTLSGSAQHVEECSCYPRYPGVRCVCRDNWKGSNRPIVDINIKDHSIVSSYVCSGLVGDTPRKNDSSSSSHCLDPNNEEGGHGVKGWAFDDGNDVWMGRTINETSRLGYETFKVIEGWSNPKSKLQINRQVIVDRGDRSGYSGIFSVESKSCINRCFYVELIRGRKEETEVLWTSNSIVVFCGTSGTYGTGSWPDGADLNLMPI

SEQ ID NO: 24803 - protein, 469 aa, Artificial Sequence; identical to SEQ ID NO: 22146
  derived and/or modified protein sequence (wt) from neuraminidase__InfluenzaA__AHL96607

SEQ ID NO: 24804 - protein, 469 aa, Artificial Sequence
  derived and/or modified protein sequence (wt) from neuraminidase__InfluenzaA__AHL96631
MNPNQKIITIGSVSLTISTICFFMQIAILITTVTLHFKQYEFNSLPNNQVMLCEPTIIERNITEIVYLTNTTIEKEICPKPAEYRNWSKPQCGITGFAPFSKDNSIRLSAGGDIWVTREPYVSCDPDKCYQFALGQGTTLNNMHSNNTVRDRTPYRTLLMNELGVPFHLGTKQVCIAWSSSSCHDGKAWLHVCITGDDKNATASFIYNGRLVDSVVSWSKEILRTQESECVCINGTCTVVMTDGSASGKADTKILFIEEGKIVHTSTLSGSAQHVEECSCYPRYPGVRCVCRDNWKGSNRPIVDINIKDHSIVSSYVCSGLVGDTPRKNDSSSSSHCLDPNNEEGGHGVKGWAFDDGNDVWMGRTINETSRLGYETFKVIEGWSNPKSKLQINRQVIVDRGDRSGYSGIFSVEGKSCINRCFYVELIRGRKEETEVLWTSNSIVVFCGTSGTYGTGSWPDGADLNLMPI

SEQ ID NO: 24805 - protein, 469 aa, Artificial Sequence; identical to SEQ ID NO: 23883
  derived and/or modified protein sequence (wt) from neuraminidase__InfluenzaA__AHL96643

SEQ ID NO: 24806 - protein, 469 aa, Artificial Sequence; identical to SEQ ID NO: 22146
  derived and/or modified protein sequence (wt) from neuraminidase__InfluenzaA__AHL96655

SEQ ID NO: 24807 - protein, 469 aa, Artificial Sequence; identical to SEQ ID NO: 22146
  derived and/or modified protein sequence (wt) from neuraminidase__InfluenzaA__AHL96667

SEQ ID NO: 24808 - protein, 469 aa, Artificial Sequence; identical to SEQ ID NO: 22146
  derived and/or modified protein sequence (wt) from neuraminidase__InfluenzaA__AHL96679

SEQ ID NO: 24809 - protein, 469 aa, Artificial Sequence; identical to SEQ ID NO: 22146
  derived and/or modified protein sequence (wt) from neuraminidase__InfluenzaA__AHL96691

SEQ ID NO: 24810 - protein, 469 aa, Artificial Sequence; identical to SEQ ID NO: 22146
  derived and/or modified protein sequence (wt) from neuraminidase__InfluenzaA__AHL96703

SEQ ID NO: 24811 - protein, 469 aa, Artificial Sequence; identical to SEQ ID NO: 23871
  derived and/or modified protein sequence (wt) from neuraminidase__InfluenzaA__AHL96763

SEQ ID NO: 24812 - protein, 469 aa, Artificial Sequence; identical to SEQ ID NO: 24724
  derived and/or modified protein sequence (wt) from neuraminidase__InfluenzaA__AHL96787

SEQ ID NO: 24813 - protein, 469 aa, Artificial Sequence
  derived and/or modified protein sequence (wt) from neuraminidase__InfluenzaA__AHL96799
MNPNQKIITIGSVSLTISTICFFMQIAILITTVTLHFKQYEFNSPPNNQVMLCEPTIIERNITEIVYLTNTTIEKEICPKPAEYRNWSKPQCGITGFAPFSKDNSIRLSAGGDIWVTREPYVSCDPDKCYQFALGQGTTLNNVHSNNTVRDRTPYRTLLMNELGVPFHLGTKQVCIAWSSSSCHDGKAWLHVCITGDDKNATASFIYNGRLVDSVVSWSKEILRTQESECVCINGTCTVVMTDGSASGKADTKILFIEEGKIVHTSTLSGSAQHVEECSCYPRYPGVRCVCRDNWKGSNRPIVDINIKDHSIVSSYVCSGLVGDTPRKNDSSSSSHCLDPNNEEGGHGVKGWAFDDGNDVWMGRTINETSRLGYETFKVIEGWSNPKSKLQINRQVIVDRGDRSGYSGIFSVEGKSCINRCFYVELIRGRKDETEVLWTSNSIVVFCGTSGTYGTGSWPDGADLNLMPI

SEQ ID NO: 24814 - protein, 469 aa, Artificial Sequence; identical to SEQ ID NO: 23883
  derived and/or modified protein sequence (wt) from neuraminidase__InfluenzaA__AHL96811

SEQ ID NO: 24815 - protein, 469 aa, Artificial Sequence; identical to SEQ ID NO: 23883
  derived and/or modified protein sequence (wt) from neuraminidase__InfluenzaA__AHL96823

SEQ ID NO: 24816 - protein, 469 aa, Artificial Sequence; identical to SEQ ID NO: 22146
  derived and/or modified protein sequence (wt) from neuraminidase__InfluenzaA__AHL96847

SEQ ID NO: 24817 - protein, 469 aa, Artificial Sequence
  derived and/or modified protein sequence (wt) from neuraminidase__InfluenzaA__AHL96859
MNPNQKIITIGSVSLTISTICFFMQIAILITTVTLHFKQYEFNSPPNNQMMLCEPTIIERNITEIVYLTNTTIEKEICPKPAEYRNWSKPQCGITGFAPFSKDNSIRLSAGGDIWVTREPYVSCDPDKCYQFALGQGTTLNNVHSNNTVRDRTPYRTLLMNELGVPFHLGTKQVCIAWSSSSCHDGKAWLHVCITGDDKNATASFIYNGRLVDSVVSWSKEILRTQESECVCINGTCTVVMTDGSASGKADTKILFIEEGKIVHTSTLSGSAQHVEECSCYPRYPGVRCVCRDNWKGSNRPIVDINIKDHSIVSSYVCSGLVGDTPRKNDSSSSSHCLDPNNEEGGHGVKGWAFDDGNDVWMGRTINETSRLGYETFKVIEGWSNPKSKLQINRQVIVDRGDRSGYSGIFSVEGKSCINRCFYVELIRGRKEETEVLWTSNSIVVFCGTSGTYGTGSWPDGADLNLMPI

SEQ ID NO: 24818 - protein, 469 aa, Artificial Sequence
  derived and/or modified protein sequence (wt) from neuraminidase__InfluenzaA__AHL96871
MNPNQKIITIGSVSLTISTICFFMQIAILITTVTLHFKQYEFNSPPNNQVMLCEPTIVERNITEIVYLTNTTIEKEICPKPAEYRNWSKPQCGITGFAPFSKDNSIRLSAGGDIWVTREPYVSCDPDKCYQFALGQGTTLNNVHSNNTVRDRTPYRTLLMNELGVPFHLGTKQVCIAWSSSSCHDGKAWLHVCITGDDKNATASFIYNGRLVDSVVSWSKEVLRTQESECVCINGTCAVVMTDGSASGKADTKILFIEEGKIVHTSTLSGSAQHVEECSCYPRYPGVRCVCRDNWKGSNRPIVDINIKDHSIVSSYVCSGLVGDTPRKNDRSSSSHCLDPNNEEGGHGVKGWAFDDGNDVWMGRTINETSRLGYETFKVIEGWSNPKSKLQINRQVIVDRGDRSGYSGIFSVEGKSCINRCFYVELIRGRKEETEVLWTSNSIVVFCGTSGTYGTGSWPDGADLNLMPI

SEQ ID NO: 24819 - protein, 469 aa, Artificial Sequence
  derived and/or modified protein sequence (wt) from neuraminidase__InfluenzaA__AHL96883
MNPNQKIITIGSVSLTISTICFFMQIAILITTVTLHFKQYEFNSPPNNQVMLCEPTIIERNITEIVYLTNTTIEKEICPKSAEYRNWSKPQCGITGFAPFSKDNSIRLSAGGDIWVTREPYVSCDPDKCYQFALGQGTTLNNMHSNNTVRDRTPYRTLLMNELGVPFHLGTKQVCIAWSSSSCHDGKAWLHVCITGDDKNATASFIYNGRLVDSVVSWSKEILRTQESECVCINGTCTVVMTDGSASGKADTKILFIEEGKIVHTSTLSGSAQHVEECSCYPRYPGVRCVCRDNWKGSNRPIVDINIKDHSIVSSYVCSGLVGDTPRKNDSSSSSHCLDPNNEEGGHGVKGWAFDDGNDVWMGRTINETSRLGYETFKVIEGWSNPKSKLQINRQVIVDRGDRSGYSGIFSVEGKSCINRCFYVELIRGRKEETEVLWTSNSIVVFCGTSGTYGTGSWPDGADLNLMPI

SEQ ID NO: 24820 - protein, 469 aa, Artificial Sequence; identical to SEQ ID NO: 23871
  derived and/or modified protein sequence (wt) from neuraminidase__InfluenzaA__AHL96895

SEQ ID NO: 24821 - protein, 469 aa, Artificial Sequence
  derived and/or modified protein sequence (wt) from neuraminidase__InfluenzaA__AHL96907
MNPNQKIITIGSVSLTISTICFFMQIAILITTVTLHFKQYEFNSPPNNQVMLCEPTIVERNITEIVYLTNTTIEKEICPKPAEYRNWSKPQCGITGFAPFSKDNSIRLSAGGDIWVTREPYVSCDPDKCYQFALGQGTTLNNVHSNNTVRDRTPYRTLLMNELGVPFHLGTKQVCIAWSSSSCHDGKAWLHVCITGDDKNATASFIYNGRLVDSVVSWSKEVLRTQESECVCINGTCAVVMTDGSASGKADTKILFIEEGKIVHTSTLSGSAQHVEECSCYPRYPGVRCVCRDNWKGSNRPIVDINIKDHSIVSSYVCSGLVGDTPRKNDSSSSSHCLDPNNEEGGHGVKGWAFDDGNDVWMGRTINETSRLGYETFKVIEGWSNPKSKLQINRQVIVDRGDRSGYSGIFSVEGKSCINRCFYVELIRGRKEETEVLWTSNSIVVFCGTSGTYGTGSWPDGADLNLMPI

SEQ ID NO: 24822 - protein, 469 aa, Artificial Sequence; identical to SEQ ID NO: 23883
  derived and/or modified protein sequence (wt) from neuraminidase__InfluenzaA__AHL96919

SEQ ID NO: 24823 - protein, 469 aa, Artificial Sequence; identical to SEQ ID NO: 23883
  derived and/or modified protein sequence (wt) from neuraminidase__InfluenzaA__AHL96931

SEQ ID NO: 24824 - protein, 469 aa, Artificial Sequence; identical to SEQ ID NO: 23883
  derived and/or modified protein sequence (wt) from neuraminidase__InfluenzaA__AHL96943

SEQ ID NO: 24825 - protein, 469 aa, Artificial Sequence
  derived and/or modified protein sequence (wt) from neuraminidase__InfluenzaA__AHL96955
MNPNQKIITIGSVSLTISTICFFMQIAILITTVTLHFKQYEFNSPSNNQVMLCEPTIIERNITEIVYLTNTTIEKEICPKPAEYRNWSKPQCGITGFAPFSKDNSIRLSAGGNIWVTREPYVSCDPDKCYQFALGQGTTLNNVHSNNTVRDRTPYRTLLMNELGVPFHLGTKQVCIAWSSSSCHDGKAWLHVCITGDDKNATASFIYNGRLVDSVVSWSKEILRTQESECVCINGTCTVVMTDGSASGKADTKILFIEEGKIVHTSTLSGSAQHVEECSCYPRYPGVRCVCRDNWKGSNRPIVDINIKDHSIVSSYVCSGLVGDTPRKNDSSSSSHCLDPNNEEGGHGVKGWAFDDGNDVWMGRTINETSRLGYETFKVIEGWSNPKSKLQINRQVIVDRGDRSGYSGIFSVEGKSCINRCFYVELIRGRKEETEVLWTSNSIVVFCGTSGTYGTGSWPDGADLNLMPI

SEQ ID NO: 24826 - protein, 469 aa, Artificial Sequence; identical to SEQ ID NO: 24724
  derived and/or modified protein sequence (wt) from neuraminidase__InfluenzaA__AHL96967

SEQ ID NO: 24827 - protein, 469 aa, Artificial Sequence
  derived and/or modified protein sequence (wt) from neuraminidase__InfluenzaA__AHL96979
MNPNQKIITIGSVSLTISTICFFMQIAILITTVTLHFKQYEFNSPPNNQVMLCEPTIIERNITEIVYLTNTTIEKEICPKPAEYRNWSKPQCDITGFAPFSKDNSIRLSAGGDIWVTREPYVSCDPDKCYQFALGQGTTLNNMHSNNTVRDRTPYRTLLMNELGVPFHLGTKQVCIAWSSSSCHDGKAWLHVCITGDDKNATASFIYNGRLVDSVVSWSKEILRTQESECVCINGTCTVVMTDGSASGKADTKILFIEEGKIVHTSTLSGSAQHVEECSCYPRYPGVRCVCRDNWKGSNRPIVDINIKDHSIVSSYVCSGLVGDTPRKNDSSSSSHCLDPNNEEGGHGVKGWAFDDGNDVWMGRTINETSRLGYETFKVIEGWSNPKSKLQINRQVIVDRGDRSGYSGIFSVEGKSCINRCFYVELIRGRKEETEVLWTSNSIVVFCGTSGTYGTGSWPDGADLNIMPI

SEQ ID NO: 24828 - protein, 469 aa, Artificial Sequence; identical to SEQ ID NO: 23883
  derived and/or modified protein sequence (wt) from neuraminidase__InfluenzaA__AHL96991

SEQ ID NO: 24829 - protein, 469 aa, Artificial Sequence; identical to SEQ ID NO: 22146
  derived and/or modified protein sequence (wt) from neuraminidase__InfluenzaA__AHL97003

SEQ ID NO: 24830 - protein, 469 aa, Artificial Sequence
  derived and/or modified protein sequence (wt) from neuraminidase__InfluenzaA__AHL97015
MNPNQKIITIGSVSLTISTICFFMQIAILITTVTLHFKQYEFNSPPNNQVMLCEPTIIERNITEIVYLTNTTIEKEICPKPAEYRNWSKPQCGITGFAPFSKDNSIRLSAGGDIWVTREPYVSCDPDKCYQFALGQGTTLNNVHSNNTVRDRTPYRTLLMNELGVPFHLGTKQVCIAWSSSSCHDGKAWLHVCITGDDKNATASFIYNGRLVDSVVSWSKEILRTQESECVCINGTCTVVMTDGSASGKADTKILFIEEGKIVHTSTLSGSAQHVEECSCYPRYPGVRCVCRDNWKGSNRPIVDINIKDHSIVSSYVCSGLVGDTPRKNDSSSSSHCLDPNNEEGGHGVKGWAFDDGNDVWMGRTINETSRLGYETFKVIEGWSNPKSKLQINRQIIVDRGDRSGYSGIFSVEGKSCINRCFYVELIRGRKEETEVLWTSNSIVVFCGTSGTYGTGSWPDGADLNLMPI

SEQ ID NO: 24831 - protein, 469 aa, Artificial Sequence; identical to SEQ ID NO: 22146
  derived and/or modified protein sequence (wt) from neuraminidase__InfluenzaA__AHL97027

SEQ ID NO: 24832 - protein, 469 aa, Artificial Sequence
  derived and/or modified protein sequence (wt) from neuraminidase__InfluenzaA__AHL97039
MNPNQKIITIGSVSLTISTICFFMQIAILITTVTLHFKQYEFNSPPNNQVMLCEPTIIERNITEIVYLTNTTIEKEICPKPAEYRNWSKPQCGITGFAPFSKDNSIRLSAGGDIWVTREPYVSCDPDKCYQFALGQGTTLNNVHSNNTVRDRTPYRTLLMNELGVPFHLGTKQVCIAWSSSSCHDGKAWLHVCITGDDKNATASFIYNGRLVDSVVSWSKEILRTQESECVCINGTCTVVMTDGNASGKADTKILFIEEGKIVHTSTLSGSAQHVEECSCYPRYPGVRCVCRDNWKGSNRPIVDINIKDYSIVSSYVCSGLVGDTPRKNDSSSSSHCLDPNNEEGGHGVKGWAFDDGNDVWMGRTINETSRLGYETFKVIEGWSNPKSKLQINRQVIVDRGDRSGYSGIFSVEGKSCINRCFYVELIRGRKEETEVLWTSNSIVVFCGTSGTYGTGSWPDGADLNLMPI

SEQ ID NO: 24833 - protein, 469 aa, Artificial Sequence; identical to SEQ ID NO: 22146
  derived and/or modified protein sequence (wt) from neuraminidase__InfluenzaA__AHL97051

SEQ ID NO: 24834 - protein, 469 aa, Artificial Sequence
  derived and/or modified protein sequence (wt) from neuraminidase__InfluenzaA__AHL97063
MNPNQKIITIGSVSLTISTICFFMQIAILITTVTLHFKQYEFNSPPNNQVMLCEPTIIERNITEIVYLTNTTIEKEICPKPAEYRNWSKPQCGITGFAPFSKDNSIRLSAGGDIWVTREPYVSCDPDKCYQFALGQGTTLNNVHSNNTVRDRTPYRTLLMNELGVPFHLGTKQVCIAWSSSSCHDGKAWLHVCITGDDKNATASFIYNGRLVDSVVSWSKEILRTQESECVCINGTCTVVMTDGSASGKADTKILFIEEGKIVHTSTLSGSAQHVEECSCYPRYPGVRCVCRDNWKGSNRPIVDINIKDHSIVSSYVCSGLVGDTPRKNDSSSSSHCLGPNNEEGGHGVKGWAFDDGNDVWMGRTINETSRLGYETFKVIDGWSNPKSKLQINRQVIVDRGDRSGYSGIFSVEGKSCINRCFYVELIRGRKEETEVLWTSNSIVVFCGTSGTYGTGSWPDGADLNLMPI

SEQ ID NO: 24835 - protein, 469 aa, Artificial Sequence; identical to SEQ ID NO: 22146
  derived and/or modified protein sequence (wt) from neuraminidase__InfluenzaA__AHL97075

SEQ ID NO: 24836 - protein, 469 aa, Artificial Sequence; identical to SEQ ID NO: 23871
  derived and/or modified protein sequence (wt) from neuraminidase__InfluenzaA__AHL97087

SEQ ID NO: 24837 - protein, 469 aa, Artificial Sequence; identical to SEQ ID NO: 23375
  derived and/or modified protein sequence (wt) from neuraminidase__InfluenzaA__AHL97099

SEQ ID NO: 24838 - protein, 469 aa, Artificial Sequence; identical to SEQ ID NO: 22146
  derived and/or modified protein sequence (wt) from neuraminidase__InfluenzaA__AHL97111

SEQ ID NO: 24839 - protein, 469 aa, Artificial Sequence
  derived and/or modified protein sequence (wt) from neuraminidase__InfluenzaA__AHL97123
MNPNQKIITIGSVSLTISTICFFMQIAILITTVTLHFKQYEFDSPPNNQVMLCEPTIIERNITEIVYLTNTTIEKEICPKPAEYRNWSKPQCGITGFAPFSKDNSIRLSAGGDIWVTREPYVSCDPDKCYQFALGQGTTLNNVHSNNTVRDRTPYRTLLMNELGVPFHLGTKQVCIAWSSSSCHDGKAWLHVCITGDDKNATASFIYNGRLVDSVVSWSKEILRTQESECVCINGTCTVVMTDGSASGKADTKILFIEEGKIVHTSTLSGSAQHVEECSCYPRYPGVRCVCRDNWKGSNRPIVDINIKDHSIVSSYVCSGLVGDTPRRNDSSSSSHCLDPNNEEGGHGVKGWAFDDGNDVWMGRTINETSRLGYETFKVIEGWSNPKSKLQINRQVIVDRGDRSGYSGIFSVEGKSCINRCFYVELIRGRKEETEVLWTSNSIVVFCGTSGTYGTGSWPDGADLNLMPI

SEQ ID NO: 24840 - protein, 469 aa, Artificial Sequence; identical to SEQ ID NO: 23903
  derived and/or modified protein sequence (wt) from neuraminidase__InfluenzaA__AHL97135

SEQ ID NO: 24841 - protein, 469 aa, Artificial Sequence
  derived and/or modified protein sequence (wt) from neuraminidase__InfluenzaA__AHL97147
MNPNQKIITIGSVSLTISTICFFMQIAILITTVTLHFKQYEFNSPPNNQVMLCEPTIIERNITEIVYLTNTTIEKEICPKPAEYRNWSKPQCGITGFAPFSKDNSIRLSAGGDIWVTREPYVSCDPDKCYQFALGQGTTLNNVHSNNTVRDRTPYRTLLMNELGVPFHLGTKQVCIAWSSSSCHDGKAWLHVCITGDDKNATASFIYNGRLVDSVVSWSKEILRTQESECVCINGTCTVVMTDGSASGKADTKILFIEEGKIVHTSTLSGSAQHVEECSCYPRYPGVRCVCRDNWRGSNRPIVDINIKDHSIVSSYVCSGLVGDTPRKNDSSSSSHCLDPNNEEGGHGVKGWAFDDGNDVWMGRTINETSRLGYETFKVIEGWSNPKSKLQINRQVIVDRGDRSGYSGIFSVEGKSCINRCFYVELIRGRKEETEVLWTSNSIVVFCGTSGTYGTGSWPDGADLNLMPI

SEQ ID NO: 24842 - protein, 469 aa, Artificial Sequence; identical to SEQ ID NO: 22146
  derived and/or modified protein sequence (wt) from neuraminidase__InfluenzaA__AHL97159

SEQ ID NO: 24843 - protein, 469 aa, Artificial Sequence; identical to SEQ ID NO: 22146
  derived and/or modified protein sequence (wt) from neuraminidase__InfluenzaA__AHL97171

SEQ ID NO: 24844 - protein, 469 aa, Artificial Sequence; identical to SEQ ID NO: 22146
  derived and/or modified protein sequence (wt) from neuraminidase__InfluenzaA__AHL97183

SEQ ID NO: 24845 - protein, 469 aa, Artificial Sequence; identical to SEQ ID NO: 22146
  derived and/or modified protein sequence (wt) from neuraminidase__InfluenzaA__AHL97195

SEQ ID NO: 24846 - protein, 469 aa, Artificial Sequence; identical to SEQ ID NO: 22146
  derived and/or modified protein sequence (wt) from neuraminidase__InfluenzaA__AHL97207

SEQ ID NO: 24847 - protein, 469 aa, Artificial Sequence; identical to SEQ ID NO: 22146
  derived and/or modified protein sequence (wt) from neuraminidase__InfluenzaA__AHL97219

SEQ ID NO: 24848 - protein, 469 aa, Artificial Sequence
  derived and/or modified protein sequence (wt) from neuraminidase__InfluenzaA__AHL97231
MNPNQKIITIGSVSLTISTICFFMQIAILITTVTLHFKQYDFNSPPNNQVMLCEPTIIERNITEIVYLTNTTIEKEICPKPAEYRNWSKPQCGITGFAPFSKDNSIRLSAGGDIWVTREPYVSCDPDKCYQFALGQGTTLNNVHSNNTVRDRTPYRTLLMNELGVPFHLGTKQVCIAWSSSSCHDGKAWLHVCITGDDKNATASFIYNGRLVDSVVSWSKEILRTQESECVCINGTCTVVMTDGSASGKADTKILFIEEGKIVHTSTLSGSAQHVEECSCYPRYPGVRCVCRDNWKGSNRPIVDINIKDHSVISSYVCSGLVGDTPRKNDSSSSSHCLDPNNEEGGHGVKGWAFDDGNDVWMGRTINETSRLGYETFKVIGGWSNPKSKLQINRQVIVDRGDRSGYSGIFSVEGKSCINRCFYVELIRGRKEETEVLWTSNSIVVFCGTSGTYGTGSWPDGADLNLMPI

SEQ ID NO: 24849 - protein, 469 aa, Artificial Sequence
  derived and/or modified protein sequence (wt) from neuraminidase__InfluenzaA__AHL97243
MNPNQKIITIGSVSLTISTICFFMQIAILITTVTLNFKQYEFNSPPNNQVMLCEPTIIERNITEIVYLTNTTIEKEICPKPAEYRNWSKPQCGITGFAPFSKDNSIRLSAGGDIWVTREPYVSCDPDKCYQFALGQGTTLNNVHSNNTVRDRTPYRTLLMNELGVPFHLGTKQVCIAWSSSSCHDGKAWLHVCITGDDKNATASFIYNGRLVDSVVSWSKEILRTQESECVCINGTCTVVMTDGSASGKADTKILFIEEGKIVHTSTLSGSAQHVEECSCYPRYPGVRCVCRDNWKGSNRPIVDINIKDHSIVSSYVCSGLVGDTPRKNDSSSSSHCLDPNNEEGGHGVKGWAFDDGNDVWMGRTINETSRLGYETFKVIEGWSNPKSKLQINRQVIVDRGDRSGYSGIFSVEGKSCINRCFYVELIRGRKEETEVLWTSNSIVVFCGTSGTYGTGSWPDGADLNLMPI

SEQ ID NO: 24850 - protein, 469 aa, Artificial Sequence; identical to SEQ ID NO: 23375
  derived and/or modified protein sequence (wt) from neuraminidase__InfluenzaA__AHL97255

SEQ ID NO: 24851 - protein, 469 aa, Artificial Sequence
  derived and/or modified protein sequence (wt) from neuraminidase__InfluenzaA__AHL97267
MNPNQKIITIGSVSLTISTICFFMQIAILITTVTLHFKQYEFNSPPNNQVMLCEPTIIERNITEIVYLTNTTIEKEICPKPAEYRNWSKPQCGITGFAPFSKDNSIRLSAGGDIWVTREPYVSCDPDKCYQFALGQGTTLNNVHSNNTARDRTPYRTLLMNELGVPFHLGTKQVCIAWSSSSCHDGKAWLHVCITGDDKNATASFIYNGRLVDSVVSWSKEILRTQESECVCINGTCTVVMTDGSASGKADTKILFIEEGKIVHTSTLSGSAQHVEECSCYPRYPGVRCVCRDNWKGSNRPIVDINIKDHSIVSSYVCSGLVGDTPRKNDSFSSSHCLDPNNEEGGHGVKGWAFDDGNDVWMGRTINETSRLGYETFKVIEGWSNPKSKLQINRQVIVDRGDRSGYSGIFSVEGKSCINRCFYVELIRGRKEETEVLWTSNSIVVFCGTSGTYGTGSWPDGADLNLMPI

SEQ ID NO: 24852 - protein, 469 aa, Artificial Sequence; identical to SEQ ID NO: 22146
  derived and/or modified protein sequence (wt) from neuraminidase__InfluenzaA__AHL97279

SEQ ID NO: 24853 - protein, 469 aa, Artificial Sequence; identical to SEQ ID NO: 24736
  derived and/or modified protein sequence (wt) from neuraminidase__InfluenzaA__AHL97291

SEQ ID NO: 24854 - protein, 469 aa, Artificial Sequence; identical to SEQ ID NO: 24724
  derived and/or modified protein sequence (wt) from neuraminidase__InfluenzaA__AHL97303

SEQ ID NO: 24855 - protein, 469 aa, Artificial Sequence
  derived and/or modified protein sequence (wt) from neuraminidase__InfluenzaA__AHL97339
MNPNQKIITIGSVSLTISTICFFMQIAILITTVTLHFKQYEFDSPPNNQVMLCEPTIIERNITEIVYLTNTTIEKEICPKPAEYRNWSKPQCGITGFAPFSKDNSIRLSAGGDIWVTREPYVSCDPDKCYQFALGQGTTLNNVHSNNTVRDRTSYRTLLMNELGVPFHLGTKQVCIAWSSSSCHDGKAWLHVCITGDDKNATASFIYNGRLVDSVVSWSKEILRTQESECVCINGTCTVVMTDGSASGRADTKILFIEEGKIVHTSTLSGSAQHVEECSCYPRYPGVRCVCRDNWKGSNRPIVDINIKDHSIVSSYVCSGLVGDTPRKNDSSSSSHCLDPNNEEGGHGVKGWAFDDGNDVWMGRTINETSRLGYETFKVIEGWSNPKSKLQINRQVIVDRGDRSGYSGIFSVEGKSCINRCFYVELIRGRKEETEVLWTSNSIVVFCGTSGTYGTGSWPDGADLNLMPI

SEQ ID NO: 24856 - protein, 469 aa, Artificial Sequence; identical to SEQ ID NO: 23871
  derived and/or modified protein sequence (wt) from neuraminidase__InfluenzaA__AHL97351

SEQ ID NO: 24857 - protein, 469 aa, Artificial Sequence; identical to SEQ ID NO: 24736
  derived and/or modified protein sequence (wt) from neuraminidase__InfluenzaA__AHL97363

SEQ ID NO: 24858 - protein, 469 aa, Artificial Sequence; identical to SEQ ID NO: 22146
  derived and/or modified protein sequence (wt) from neuraminidase__InfluenzaA__AHL97387

SEQ ID NO: 24859 - protein, 469 aa, Artificial Sequence
  derived and/or modified protein sequence (wt) from neuraminidase__InfluenzaA__AHL97399
MNPNQKIITIGSVSLTISTICFFMQIAILITTVTLHFKQYEFNSPPNNQVMLCEPTIIERNITEIMYLTNTTIEKEICPKPAEYRNWSKPQCGITGFAPFSKDNSIRLSAGGDIWVTREPYVSCDPDKCYQFALGQGTTLNNMHSNNTVRDRTPYRTLLMNELGVPFHLGTKQVCIAWSSSSCHDGKAWLHVCITGDDKNATASFIYNGRLVDSVVSWSKEILRTQESECVCINGTCTVVMTDGSASGKADTKILFIEEGKIVHTSTLSGSAQHVEECSCYPRYPGVRCVCRDNWKGSNRPIVDINIKDHSIVSSYVCSGLVGDTPRKNDSSSSSHCLDPNNEEGGHGVKGWAFDDGNDVWMGRTINETSRLGYETFKVIEGWSNPKSKLQINRQVIVDRGDRSGYSGIFSVEGRSCINRCFYVELIRGRKEETEVLWTSNSIVVFCGTSGTYGTGSWPDGADLNLMPI

SEQ ID NO: 24860 - protein, 469 aa, Artificial Sequence; identical to SEQ ID NO: 23375
  derived and/or modified protein sequence (wt) from neuraminidase__InfluenzaA__AHL97411

SEQ ID NO: 24861 - protein, 469 aa, Artificial Sequence
  derived and/or modified protein sequence (wt) from neuraminidase__InfluenzaA__AHL97423
MNPNQKIITIGSVSLTISTICFFMQIAILITTVTLHFKQYEFNSPPNNQVMLCEPTIIERNITEIVYLTNTTIEKEICPKPAEYRNWSKPQCGITGFAPFSKDNSIRLSAGGDIWVTREPYVSCDPDKCYQFALGQGTTLNNVHSNNTVRDRTPYRTLLMNELGVPFHLGTKQVCIAWSSSSCHDGKAWLHVCITGDDKNATASFIYNGRLVDSVVSWSKEILRTQESECVCINGTCTVVMTDGSASGKADTKILFIEEGKIVHTSTLSGSAQHVEECSCYPRYPGVRCVCRDNWKGSNRPIVDINIKDHSIVSSYVCSGLVGDTPRKNDSSSSSHCLDPNNEEGGHGVKGWAFDDGNDMWMGRTINETSRLGYETFKVIEGWSNPKSKLQINRQVIVDRGDRSGYSGIFSVEGKSCINRCFYVELIRGRKEETEVLWTSNSIVVFCGTSGTYGTGSWPDGADLNLMPI

SEQ ID NO: 24862 - protein, 469 aa, Artificial Sequence
  derived and/or modified protein sequence (wt) from neuraminidase__InfluenzaA__AHL97447
MNPNQKIITIGSVSLTISTICFFMQIAILITTVTLHFKQYEFNSPPNNQVMLCEPTIIERNITEIVYLTNTTIEKEICPKPAEYRNWSKPQCGITGFAPFSKDNSIRLSAGGDIWVTREPYVSCDPDKCYQFALGQGTTLNNVHSNNTVRDRTPYRTLLMNELGVPFHLGTKQVCIAWSSSSCHDGKAWLHVCITGDDKNATASFIYNGRLVDSVVSWSKEILRTQESECVCINGTCTVVMTDGSASGKADTKILFIEEGKIVHTSTLSGSAQHVEECSCYPRYPGVRCVCRDNWKGSNRPIVDINIKDHSIVSSYVCSGLVGDTPRKNDSFSSSHCLDPNNEEGGHGVKGWAFDDGNDVWMGRTINETSRLGYETFKVIEGWSNPKSKLQINRQVIVDRGDRSGYSGIFSVEGKSCINRCFYVELIRGRKEETEVLWTSNSIVVFCGTSGTYGTGSWPDGADLNLMPI

SEQ ID NO: 24863 - protein, 469 aa, Artificial Sequence; identical to SEQ ID NO: 22146
  derived and/or modified protein sequence (wt) from neuraminidase__InfluenzaA__AHL97459

SEQ ID NO: 24864 - protein, 469 aa, Artificial Sequence; identical to SEQ ID NO: 24736
  derived and/or modified protein sequence (wt) from neuraminidase__InfluenzaA__AHL97471

SEQ ID NO: 24865 - protein, 469 aa, Artificial Sequence; identical to SEQ ID NO: 23871
  derived and/or modified protein sequence (wt) from neuraminidase__InfluenzaA__AHL97483

SEQ ID NO: 24866 - protein, 469 aa, Artificial Sequence; identical to SEQ ID NO: 22146
  derived and/or modified protein sequence (wt) from neuraminidase__InfluenzaA__AHL97496

SEQ ID NO: 24867 - protein, 469 aa, Artificial Sequence; identical to SEQ ID NO: 22146
  derived and/or modified protein sequence (wt) from neuraminidase__InfluenzaA__AHL97508

SEQ ID NO: 24868 - protein, 469 aa, Artificial Sequence
  derived and/or modified protein sequence (wt) from neuraminidase__InfluenzaA__AHL97520
MNPNQKIITIGSVSLTISTICFFMQIAILITTVTLHFKQYEFNSPPNNQVMLCEPTIIERNITEIVYLTNTTIEKETCPKPAEYRNWSKPQCGITGFAPFSKDNSIRLSAGGDIWVTREPYVSCGPDKCYQFALGQGTTLNNMHSNNTVRDRTPYRTLLMNELGVPFHLGTKQVCIAWSSSSCHDGKAWLHVCITGDDKNATASFIYNGRLVDSVVSWSKEILRTQESECVCINGTCTVVMTDGSASGKADTKILFIEEGKIVHTSTLSGSAQHVEECSCYPRYPGVRCVCRDNWKGSNRPIVDINIKDHSIVSSYVCSGLVGDTPRKNDSSSSSHCLDPNNEEGGHGVKGWAFDDGNDVWMGRTINETSRLGYETFKVIEGWSNPKSKLQINRQVIVDRGDRSGYSGIFSVEGKSCINRCFYVELIRGRKEETEVLWTSNSIVVFCGTSGTYGTGSWPDGADLNLMPI

SEQ ID NO: 24869 - protein, 469 aa, Artificial Sequence; identical to SEQ ID NO: 22146
  derived and/or modified protein sequence (wt) from neuraminidase__InfluenzaA__AHL97532

SEQ ID NO: 24870 - protein, 469 aa, Artificial Sequence; identical to SEQ ID NO: 22146
  derived and/or modified protein sequence (wt) from neuraminidase__InfluenzaA__AHL97544

SEQ ID NO: 24871 - protein, 469 aa, Artificial Sequence; identical to SEQ ID NO: 23871
  derived and/or modified protein sequence (wt) from neuraminidase__InfluenzaA__AHL97556

SEQ ID NO: 24872 - protein, 469 aa, Artificial Sequence
  derived and/or modified protein sequence (wt) from neuraminidase__InfluenzaA__AHL97568
MNPNQKIITIGSVSLTISAICFFMQIAILITTVTLRFKQYEFNSPPNNQVMLCEPTIIERNITEIVYLTNTTIEKEICPKPAEYRNWSKPQCDITGFAPFSKDNSIRLSAGGDIWVTREPYVSCDPDKCYQFALGQGTTLTNVHSNNTVRDRTPYRTLLMNELGVPFHLGTKQVCIAWSSSSCHDGKAWLHVCITGDDKNATASFIYNGRLVDSVVSWSKEILRTQESECVCINGTCTVVMTDGSASGKADTKILFIEEGKIVHTSTLSGSAQHVEECSCYPRYPGVRCVCRDNWKGSNRPIVDINIKDHSIVSRYVCSGLVGDTPRKNDSSSSSHCLDPNNEEGGHGVKGWAFDDGNDVWMGRTINETSRLGYETFKVIEGWSNPKSKLQINRQVIVDRGDRSGYSGIFSVEGKSCINRCFYVELIRGRKEETEVLWTSNSIVVFCGTSGTYGTGSWPDGADLNLMPI

SEQ ID NO: 24873 - protein, 469 aa, Artificial Sequence; identical to SEQ ID NO: 24786
  derived and/or modified protein sequence (wt) from neuraminidase__InfluenzaA__AHL97580

SEQ ID NO: 24874 - protein, 469 aa, Artificial Sequence
  derived and/or modified protein sequence (wt) from neuraminidase__InfluenzaA__AHL97592
MNPNQKIITIGSVSLTISTICFFMQIAILITTVTLHFKQYEFNSPPNNQVMLCEPTIIERNITEIVYLTNTTIEKEICPKPAEYRNWSKPQCGITGFAPFSKDNSVRLSAGGDIWVTREPYVSCDPDKCYQFALGQGTTLNNVHSNNTVRDRTPYRTLLMNELGVPFHLGTKQVCIAWSSSSCHDGKAWLHVCITGDDKNATASFIYNGRLVDSVVSWSKEILRTQESECVCINGTCTVVMTDGSASGKADTKILFIEEGKIVHTSTLSGSAQHVEECSCYPRYPGVRCVCRDNWKGSNRPIVDINIKDHSIVSSYVCSGLVGDTPRKNDSSSSSHCLGPNNEEGGHGVKGWAFDDGNDVWMGRTINETSRSGYETFKVIEGWSNPKSKLQINRQVIVDRGDRSGYSGIFSVEGKSCINRCFYVELIRGRKEETEVLWTSNSIVVFCGTSGTYGTGSWPDGADLNLMPI

SEQ ID NO: 24875 - protein, 469 aa, Artificial Sequence; identical to SEQ ID NO: 22146
  derived and/or modified protein sequence (wt) from neuraminidase__InfluenzaA__AHL97604

SEQ ID NO: 24876 - protein, 469 aa, Artificial Sequence
  derived and/or modified protein sequence (wt) from neuraminidase__InfluenzaA__AHL97616
MNPNQKIITIGSVSLTISTICFFMQIAILITTVTLHFKQYEFNSPPNNQVMLCEPTIIERNITEIVYLTNTTIEKEICPKPAEYRNWSKPQCGITGFAPFSKDNSIRLSAGGDIWVTREPYVSCDPDKCYQFALGQGTTLNNMHSNNTVRDRTPYRTLLMNELGVPFHLGTKQVCIAWSSSSCHDGKAWLHVCITGDDKNATASFIYNGRLVDSVVSWSKEVLRTQESECVCINGTCTVVMTDGSASGKADTKILFIEEGKIVHTSTLSGSAQHVEECSCYPRYPGVRCVCRDNWKGSNRPIVDINIKDHSIVSSYVCSGLVGDTPRKNDSSSSSHCLDPNNEEGGHGVKGWAFDDGNDVWMGRTINETSRLGYETFKVIEGWSNPKSKLQINRQVIVDRGDRSGYSGIFSVEGKSCINRCFYVELIRGRKEETEVLWTSNSIVVFCGTSGTYGTGSWPDGADLNLMPI

SEQ ID NO: 24877 - protein, 469 aa, Artificial Sequence; identical to SEQ ID NO: 24736
  derived and/or modified protein sequence (wt) from neuraminidase__InfluenzaA__AHL97628

SEQ ID NO: 24878 - protein, 469 aa, Artificial Sequence; identical to SEQ ID NO: 22146
  derived and/or modified protein sequence (wt) from neuraminidase__InfluenzaA__AHL97640

SEQ ID NO: 24879 - protein, 469 aa, Artificial Sequence; identical to SEQ ID NO: 23894
  derived and/or modified protein sequence (wt) from neuraminidase__InfluenzaA__AHL97652

SEQ ID NO: 24880 - protein, 469 aa, Artificial Sequence; identical to SEQ ID NO: 23894
  derived and/or modified protein sequence (wt) from neuraminidase__InfluenzaA__AHL97664

SEQ ID NO: 24881 - protein, 469 aa, Artificial Sequence; identical to SEQ ID NO: 23375
  derived and/or modified protein sequence (wt) from neuraminidase__InfluenzaA__AHL97676

SEQ ID NO: 24882 - protein, 469 aa, Artificial Sequence; identical to SEQ ID NO: 22146
  derived and/or modified protein sequence (wt) from neuraminidase__InfluenzaA__AHL97688

SEQ ID NO: 24883 - protein, 469 aa, Artificial Sequence; identical to SEQ ID NO: 23871
  derived and/or modified protein sequence (wt) from neuraminidase__InfluenzaA__AHL97700

SEQ ID NO: 24884 - protein, 469 aa, Artificial Sequence
  derived and/or modified protein sequence (wt) from neuraminidase__InfluenzaA__AHL97712
MNPNQKIITIGSVSLTISTICFFMQIAILITTVTLHFKQYEFNSPPNNQVMLCEPTIIERNITEIVYLTNTTIEKEICPKPAEYRNWSKPQCGITGFAPFSKDNSIRLSAGGDIWVTREPYVSCDPDKCYQFALGQGTTLNNVHSNNTVRDRTPYRTLLMNELGVPFHLGTKQVCIAWSSSSCHDGKAWLHVCITGDDKNATASFIYNGRLVDSVVSWSKEILRTQESECVCINGTCTVVMTDGSASGKADTKILFIEEGKIVHTSTLSGSAQHVEECSCYPRYPGVRCVCRDNWKGSNRPIVDINIKDHSIVSSYVCSGLVGDTPRKNDSTSSSHCLDPNNEEGGHGVKGWAFDDGNDVWMGRTINETSRLGYETFKVIEGWSNPKSKLQINRQVIVDRGDRSGYSGIFSVEGKSCINRCFYVELIRGRKEETEVLWTSNSIVVFCGTSGTYGTGSWPDGADLNLMPI

SEQ ID NO: 24885 - protein, 469 aa, Artificial Sequence; identical to SEQ ID NO: 23871
  derived and/or modified protein sequence (wt) from neuraminidase__InfluenzaA__AHL97724

SEQ ID NO: 24886 - protein, 469 aa, Artificial Sequence; identical to SEQ ID NO: 22146
  derived and/or modified protein sequence (wt) from neuraminidase__InfluenzaA__AHL97736

SEQ ID NO: 24887 - protein, 469 aa, Artificial Sequence
  derived and/or modified protein sequence (wt) from neuraminidase__InfluenzaA__AHL97760
MNPNQKIITIGSVSLTISTICFFMQIAILITTVTLHFKQYEFNSPPNNQVMLCEPTIIERNITEIVYLTNTTIEKEICPKPAEYRNWSKPQCGITGFAPFSKDNSIRLSAGGDIWVTREPYVSCDPDKCYQFALGQGTTLNNVHSNNTVRDRTPYRTLLMNELGVPFHLGTKQVCIAWSSSSCHDGKAWLHVCITGDDENATASFIYNGRLVDSVVSWSKEILRTQESECVCINGTCTVVMTDGSASGKADTKILFIEEGKIVHTSTLSGSAQHVEECSCYPRYPGVRCVCRDNWKGSNRPIVDINIKDHSIVSSYVCSGLVGDTPRKNDSSSSSHCLDPNNEEGGHGVKGWAFDDGNDVWMGRTINETSRLGYETFKVIEGWSNPKSKLQINRQVIVDRGDRSGYSGIFSVEGKSCINRCFYVELIRGRKEETEVLWTSNSIVVFCGTSGTYGTGSWPDGADLNLMPI

SEQ ID NO: 24888 - protein, 469 aa, Artificial Sequence
  derived and/or modified protein sequence (wt) from neuraminidase__InfluenzaA__AHL97772
MNPNQKIITIGSVSLTISTICFFMQIAILITTVTLHFKQYEFNSPPNNQVMLCEPTIIERNITEIVYLTNTTIEKEICPKPAEYRNWSKPQCGITGFAPFSKDNSIRLSAGGDIWVTREPYVSCDPDKCYQFALGQGTTLNNVHSNNTVRDRTPYRTLLMNELGVPFHLGTKQVCIAWSSSSCHDGKAWLHVCITGDDKNATASFIYNGRLVDSVVSWSKEILRTQESECVCINGTCTVVMTDGSASGKADTKILFIEEGKIVHTSTLSGSAQHVEECSCYPRYPGVRCVCRDNWKGSNRPIVDINIKDHSIVSSYVCSGLVGDTPRKNDSSSSSHCLDPNNEEGGHGVKGWAFDDGNDVWMGRTINETSRLGYETFKVIEGWSNPKSKLQINRQVIVDRGDRSGYSGIFSVEGKSCINRCFYVELIRGRKEETEVLWTSNSVVVFCGTSGTYGTGSWPDGADLNLMPI

SEQ ID NO: 24889 - protein, 469 aa, Artificial Sequence; identical to SEQ ID NO: 23375
  derived and/or modified protein sequence (wt) from neuraminidase__InfluenzaA__AHL97784

SEQ ID NO: 24890 - protein, 469 aa, Artificial Sequence; identical to SEQ ID NO: 22146
  derived and/or modified protein sequence (wt) from neuraminidase__InfluenzaA__AHL97796

SEQ ID NO: 24891 - protein, 469 aa, Artificial Sequence; identical to SEQ ID NO: 22146
  derived and/or modified protein sequence (wt) from neuraminidase__InfluenzaA__AHL97808

SEQ ID NO: 24892 - protein, 469 aa, Artificial Sequence; identical to SEQ ID NO: 22146
  derived and/or modified protein sequence (wt) from neuraminidase__InfluenzaA__AHL97820

SEQ ID NO: 24893 - protein, 469 aa, Artificial Sequence
  derived and/or modified protein sequence (wt) from neuraminidase__InfluenzaA__AHL97832
MNPNQKIITIGSVSLTISTICFFMQIAILITTVTLHFKQYEFDSPPNNQVMLCEPTIIERNITEIVYLTNTTIEKEICPKPAEYRSWSKPQCGITGFAPFSKDNSIRLSAGGDIWVTREPYVSCDPDKCYQFALGQGTTLNNVHSNNTVRDRTPYRTLLMNELGVPFHLGTKQVCIAWSSSSCHDGKAWLHVCITGDDKNATASFIYNGRLVDSVVSWSKEILRTQESECVCINGTCTVVMTDGSASGKADTKILFIEEGKIVHTSTLSGSAQHVEECSCYPRYPGVRCVCRDNWKGSNRPIVDINIKDHSIVSSYVCSGLVGDTPRKNDSSSSSHCLDPNNEEGGHGVKGWAFDDGNDVWMGRTINETSRLGYETFKVIEGWSNPKSKLQINRQVIVDRGDRSGYSGIFSVEGKSCINRCFYVELIRGRKEETEVLWTSNSIVVFCGTSGTYGTGSWPDGADLNLMPI

SEQ ID NO: 24894 - protein, 469 aa, Artificial Sequence; identical to SEQ ID NO: 22146
  derived and/or modified protein sequence (wt) from neuraminidase__InfluenzaA__AHL97844

SEQ ID NO: 24895 - protein, 469 aa, Artificial Sequence; identical to SEQ ID NO: 24887
  derived and/or modified protein sequence (wt) from neuraminidase__InfluenzaA__AHL97856

SEQ ID NO: 24896 - protein, 469 aa, Artificial Sequence; identical to SEQ ID NO: 22146
  derived and/or modified protein sequence (wt) from neuraminidase__InfluenzaA__AHL97868

SEQ ID NO: 24897 - protein, 469 aa, Artificial Sequence; identical to SEQ ID NO: 23871
  derived and/or modified protein sequence (wt) from neuraminidase__InfluenzaA__AHL97880

SEQ ID NO: 24898 - protein, 469 aa, Artificial Sequence; identical to SEQ ID NO: 22146
  derived and/or modified protein sequence (wt) from neuraminidase__InfluenzaA__AHL97892

SEQ ID NO: 24899 - protein, 469 aa, Artificial Sequence; identical to SEQ ID NO: 22146
  derived and/or modified protein sequence (wt) from neuraminidase__InfluenzaA__AHL97904

SEQ ID NO: 24900 - protein, 469 aa, Artificial Sequence; identical to SEQ ID NO: 23883
  derived and/or modified protein sequence (wt) from neuraminidase__InfluenzaA__AHL97916

SEQ ID NO: 24901 - protein, 469 aa, Artificial Sequence; identical to SEQ ID NO: 22146
  derived and/or modified protein sequence (wt) from neuraminidase__InfluenzaA__AHL97928

SEQ ID NO: 24902 - protein, 469 aa, Artificial Sequence; identical to SEQ ID NO: 24862
  derived and/or modified protein sequence (wt) from neuraminidase__InfluenzaA__AHL97952

SEQ ID NO: 24903 - protein, 469 aa, Artificial Sequence; identical to SEQ ID NO: 22146
  derived and/or modified protein sequence (wt) from neuraminidase__InfluenzaA__AHL97964

SEQ ID NO: 24904 - protein, 469 aa, Artificial Sequence; identical to SEQ ID NO: 22146
  derived and/or modified protein sequence (wt) from neuraminidase__InfluenzaA__AHL97976

SEQ ID NO: 24905 - protein, 469 aa, Artificial Sequence; identical to SEQ ID NO: 22146
  derived and/or modified protein sequence (wt) from neuraminidase__InfluenzaA__AHL97988

SEQ ID NO: 24906 - protein, 469 aa, Artificial Sequence
  derived and/or modified protein sequence (wt) from neuraminidase__InfluenzaA__AHL98000
MNPNQKIITIGSVSLTISTICFFMQIAILITTVTLHFKQYEFNSPPNNQVMLCEPTIIERNITEIVYLTNTTIEKEICPKPAEYRNWSKPQCGITGFAPFSKDNSIRLSAGGDIWVTREPYVSCDPDKCYQFALGQGTTLNNVHSNNTVRDRTPYRTLLMNELGVPFHLGTKQVCIAWSSSSCHDGKAWLHVCITGDDKNATASFIYNGRLVDSVVSWSKEILRTHESECVCINGTCTVVMTDGSASGKADTKILFIEEGKIVHTSTLSGSAQHVEECSCYPRYPGVRCVCRDNWKGSNRPIVDINIKDHSIVSSYVCSGLVGDTPRKKDSSSSSHCLDPNNEEGGHGVKGWAFDDGNDVWMGRTINETSRLGYETFKVIEGWSNPKSKLQINRQVIVDRGDRSGYSGIFSVEGKSCINRCFYVELIRGRKEETEVLWTSNSIVVFCGTSGTYGTGSWPDGADLNLMPI

SEQ ID NO: 24907 - protein, 469 aa, Artificial Sequence
  derived and/or modified protein sequence (wt) from neuraminidase__InfluenzaA__AHL98012
MNPNQKIITIGSVSLTISTICFFMQIAILITTVTLHFKQYEFNSPPNNQVMLCEPTIIERNITEIVYLTNTTIEKEICPKPAEYRNWSKPQCGITGFAPFSKDNSIRLSAGGDIWVTREPYVSCDPDKCYQFALGQGTTLNNVHSNNTVRDRTPYRTLLMNELGVPFHLGTKQVCIAWSSSSCHDGKAWLHVCITGDDKNATASFIYNGRLVDSVVSWSKEVLRTQESECVCINGTCTVVMTDGSASGKADTKILFIEEGKIVHTSTLSGSAQHVEECSCYPRYPGVRCVCRDNWKGSNRPIVDINIKDHSIVSSYVCSGLVGDTPRKNDSSSSSHCLDPNNEEGDHGVKGWAFDDGNDVWMGRTINETSRLGYETFKVIEGWSNPKSKLQINRQVIVDRGDRSGYSGIFSVEGKSCINRCFYVELIRGRKEETEVLWTSNSIVVFCGTSGTYGTGSWPDGADLNLMPI

SEQ ID NO: 24908 - protein, 469 aa, Artificial Sequence; identical to SEQ ID NO: 23883
  derived and/or modified protein sequence (wt) from neuraminidase__InfluenzaA__AHL98048

SEQ ID NO: 24909 - protein, 469 aa, Artificial Sequence; identical to SEQ ID NO: 23883
  derived and/or modified protein sequence (wt) from neuraminidase__InfluenzaA__AHL98060

SEQ ID NO: 24910 - protein, 469 aa, Artificial Sequence; identical to SEQ ID NO: 23883
  derived and/or modified protein sequence (wt) from neuraminidase__InfluenzaA__AHL98072

SEQ ID NO: 24911 - protein, 469 aa, Artificial Sequence; identical to SEQ ID NO: 22146
  derived and/or modified protein sequence (wt) from neuraminidase__InfluenzaA__AHL98084

SEQ ID NO: 24912 - protein, 469 aa, Artificial Sequence; identical to SEQ ID NO: 23883
  derived and/or modified protein sequence (wt) from neuraminidase__InfluenzaA__AHL98096

SEQ ID NO: 24913 - protein, 469 aa, Artificial Sequence; identical to SEQ ID NO: 22146
  derived and/or modified protein sequence (wt) from neuraminidase__InfluenzaA__AHL98119

SEQ ID NO: 24914 - protein, 469 aa, Artificial Sequence; identical to SEQ ID NO: 22146
  derived and/or modified protein sequence (wt) from neuraminidase__InfluenzaA__AHL98131

SEQ ID NO: 24915 - protein, 469 aa, Artificial Sequence; identical to SEQ ID NO: 22146
  derived and/or modified protein sequence (wt) from neuraminidase__InfluenzaA__AHL98143

SEQ ID NO: 24916 - protein, 469 aa, Artificial Sequence
  derived and/or modified protein sequence (wt) from neuraminidase__InfluenzaA__AHL98155
MNPNQKIITIGSVSLTISTICFFMQIAILITTVTLHFKQYEFNSPPNNQVMLCEPTIIERNITEIVYLTNTTIEKEICPKPAEYRNWSKPQCGITGFAPFSKDNSIRLSAGGDIWVTREPYVSCDPDKCYQFALGQGTTLNNVHSNNTVRDRTPYRTLLMNELGVPFHLGTKQVCIAWSSSSCHDGKAWLHVCITGDDKNATASFIYNGRLVDSVVSWSKEILRTQESECVCINGTCTVVMTDGSASGKADTKILFIEEGKIVHTSTLSGSAQHVEECSCYPRYPGVRCVCRDNWKGSNRPIVDINIKDHSIVSSYVCSGLVGDTPRKNDSSSSSHCLDPNNEEGGHGVKGWAFDDGNDVWMGRTINETSRLGYETFKVIEGWSNSKSKLQINRQVIVDRGDRSGYSGIFSVEGKSCINRCFYVELIRGRKEETEVLWTSNSIVVFCGTSGTYGTGSWPDGADLNLMPI

SEQ ID NO: 24917 - protein, 469 aa, Artificial Sequence; identical to SEQ ID NO: 22146
  derived and/or modified protein sequence (wt) from neuraminidase__InfluenzaA__AHL98167

SEQ ID NO: 24918 - protein, 469 aa, Artificial Sequence; identical to SEQ ID NO: 22146
  derived and/or modified protein sequence (wt) from neuraminidase__InfluenzaA__AHL98179

SEQ ID NO: 24919 - protein, 469 aa, Artificial Sequence; identical to SEQ ID NO: 22146
  derived and/or modified protein sequence (wt) from neuraminidase__InfluenzaA__AHL98191

SEQ ID NO: 24920 - protein, 469 aa, Artificial Sequence; identical to SEQ ID NO: 23883
  derived and/or modified protein sequence (wt) from neuraminidase__InfluenzaA__AHL98215

SEQ ID NO: 24921 - protein, 469 aa, Artificial Sequence
  derived and/or modified protein sequence (wt) from neuraminidase__InfluenzaA__AHL98227
MNPNQKIITIGSVSLTISTICFFMQIAILITTVTLHFKQYEFNSPPNNQVMLCEPTIIERNITDIVYLTNTTIEKEICPKPAEYRNWSKPQCGITGFAPFSKDNSIRLSAGGDIWVTREPYVSCDPDKCYQFALGQGTTLNNMHSNNTVRDRTPYRTLLMNELGVPFHLGTKQVCIAWSSSSCHDGKAWLHVCITGDDKNATASFIYNGRLVDSVVSWSKEILRTQESECVCINGTCTVVMTDGSASGKADTKILFIEEGKIVHTSTLSGSAQHVEECSCYPRYPGVRCVCRDNWKGSNRPIVDINIKDHSIVSSYVCSGLVGDTPRKNDSSSSSHCLDPNNEEGGHGVKGWAFDDGNDVWMGRTINETSRLGYETFKVIEGWSNPKSKLQINRQVIVDRGDRSGYSGIFSVEGKSCINRCFYVELIRGRKEETEVLWTSNSIVVFCGTSGTYGTGSWPDGADLNLMPI

SEQ ID NO: 24922 - protein, 469 aa, Artificial Sequence; identical to SEQ ID NO: 22146
  derived and/or modified protein sequence (wt) from neuraminidase__InfluenzaA__AHL98239

SEQ ID NO: 24923 - protein, 469 aa, Artificial Sequence; identical to SEQ ID NO: 22146
  derived and/or modified protein sequence (wt) from neuraminidase__InfluenzaA__AHL98251

SEQ ID NO: 24924 - protein, 469 aa, Artificial Sequence; identical to SEQ ID NO: 23894
  derived and/or modified protein sequence (wt) from neuraminidase__InfluenzaA__AHL98263

SEQ ID NO: 24925 - protein, 469 aa, Artificial Sequence; identical to SEQ ID NO: 22146
  derived and/or modified protein sequence (wt) from neuraminidase__InfluenzaA__AHL98275

SEQ ID NO: 24926 - protein, 469 aa, Artificial Sequence; identical to SEQ ID NO: 24792
  derived and/or modified protein sequence (wt) from neuraminidase__InfluenzaA__AHL98287

SEQ ID NO: 24927 - protein, 469 aa, Artificial Sequence
  derived and/or modified protein sequence (wt) from neuraminidase__InfluenzaA__AHL98298
MNPNQKIITIGSVSLTISTICFFMQIAILITTVTLHFKQYEFNSPPNNQVMLCEPTIIGRNITEIVYLTNTTIEKEICPKPAEYRNWSKPQCGITGFAPFSKDNSIRLSAGGDIWVTREPYVSCDPDKCYQFALGQGTTLNNVHSNNTVRDRTPYRTLLMNELGVPFHLGTKQVCIAWSSSSCHDGKAWLHVCITGDDKNATASFIYNGRLVDSVVSWSKEILRTQESECVCINGTCTVVMTDGSASGKADTKILFIEEGKIVHTSTLSGSAQHVEECSCYPRYPGVRCVCRDNWKGSNRPIVDINIKDHSIVSSYVCSGLVGDTPRKNDSSSSSHCLDPNNEEGGHGVKGWAFDDGNDVWMGRTINETSRLGYETFKVIEGWSNPKSKLQINRQVIVDRGDRSGYSGIFSVEGKSCINRCFYVELIRGRKEETEVLWTSNSIVVFCGTSGTYGTGSWPDGADLNLMPI

SEQ ID NO: 24928 - protein, 469 aa, Artificial Sequence; identical to SEQ ID NO: 22146
  derived and/or modified protein sequence (wt) from neuraminidase__InfluenzaA__AHL98310

SEQ ID NO: 24929 - protein, 469 aa, Artificial Sequence; identical to SEQ ID NO: 22146
  derived and/or modified protein sequence (wt) from neuraminidase__InfluenzaA__AHL98322

SEQ ID NO: 24930 - protein, 469 aa, Artificial Sequence
  derived and/or modified protein sequence (wt) from neuraminidase__InfluenzaA__AHL98334
MNPNQKIITIGSVSLTISTICFFMQIAILITTVTLHFKQYEFNSPPNNQVMLCEPTIIERNITEVVYLTNTTIEKEICPKPAEYRNWSKPQCGITGFAPFSKDNSIRLSAGGDIWVTREPYVSCDPDKCYQFALGQGTTLNNVHSNNTVRDRTPYRTLLMNELGVPFHLGTKQVCIAWSSSSCHDGKAWLHVCITGDDKNATASFIYNGRLVDSVVSWSKEILRTQESECVCINGTCTVVMTDGSASGKADTKILFIEEGKIVHTSTLSGSAQHVEECSCYPRYPGVRCVCRDNWKGSNRPIVDINIKDHSIVSSYVCSGLVGDTPRKNDSSSSSHCLDPNNEEGGHGVKGWAFDDGNDVWMGRTINETSRLGYETFKVIEGWSNPKSKLQINRQVIVDRGDRSGYSGIFSVEGKSCINRCFYVELIRGRKEETEVLWTSNSIVVFCGTSGTYGTGSWPDGADLNLMPI

SEQ ID NO: 24931 - protein, 469 aa, Artificial Sequence
  derived and/or modified protein sequence (wt) from neuraminidase__InfluenzaA__AHL98346
MNPNQKIITIGSVSLTISTICFFMQIAILITTVTLHFKQYEFDSPPNNQVMLCEPTIIERNITEIVYLTNTTIEKEICPKPAEYRNWSKPQCGITGFAPFSKDNSIRLSAGGDIWVTREPYVSCDPDKCYQFALGQGTTLNNVHSNNTVRDRTPYRTLLMNELGVPFHLGTKQVCIAWSSSSCHDGKAWLHVCITGDDKNATASFIYNGRLVDSVVSWSKEILRTQESECVCINGTCTVVMTDGSASGKADTKILFIEEGKIVHTSTLSGSAQHVEECSCYPRYPGVRCVCRDNWKGSNRPIVDINIKDHSIVSSYVCSGLVGDTPRKNDSSSSSHCLDPNNEEGGHGVKGWAFDDGNDVWMGRTINETSRLGYETFKVIEGWSNPKSKLQINRQVIVDRGDRSGYSGIFSVEGKSCINRCFYVELIRGRKEENEVLWTSNSIVVFCGTSGTYGTGSWPDGADLNLMPI

SEQ ID NO: 24932 - protein, 469 aa, Artificial Sequence; identical to SEQ ID NO: 22146
  derived and/or modified protein sequence (wt) from neuraminidase__InfluenzaA__AHL98357

SEQ ID NO: 24933 - protein, 469 aa, Artificial Sequence; identical to SEQ ID NO: 23894
  derived and/or modified protein sequence (wt) from neuraminidase__InfluenzaA__AHL98369

SEQ ID NO: 24934 - protein, 469 aa, Artificial Sequence
  derived and/or modified protein sequence (wt) from neuraminidase__InfluenzaA__AHL98381
MNPNQKIITIGSVSLTISTICFFMQIAILITTVTLHFKQYEFNSPPNNQVMLCEPTIIERNITEIVYLTNTTIEKEICPKPAEYRNWSKPQCGITGFAPFSKDNSIRLSAGGDIWVTREPYVSCGPDKCYQFALGQGTTLNNMHSNNTVRDRTPYRTLLMSELGVPFHLGTKQVCIAWSSSSCHDGKAWLHVCITGDDKNATASFIYNGRLVDSVVSWSKEILRTQESECVCINGTCTVVMTDGSASGKADTKILFIEEGKIVHTSTLSGSAQHVEECSCYPRYPGVRCVCRDNWKGSNRPIVDINIKDHSTVSSYVCSGLVGDTPRKNDSSSSSHCLDPNNEEGGHGVKGWAFDDGNDVWMGRTINETSRLGYETFKVIEGWSNPKSKLQINRQVIVDRGDRSGYSGIFSVEGKSCINRCFYVELIRGRKEETEVLWTSNSIVVFCGTSGTYGTGSWPDGADLNLMPI

SEQ ID NO: 24935 - protein, 469 aa, Artificial Sequence
  derived and/or modified protein sequence (wt) from neuraminidase__InfluenzaA__AHL98393
MNPNQKIITIGSVSLTISTICFFMQIAILITTVTLHFKQYEFNSPPNNQMMLCEPTIIERNITEIVYLTNTTIEKEICPKPAEYRNWSKPQCGITGFAPFSKDNSIRLSAGGDIWVTREPYVSCGPDKCYQFALGQGTTLNNMHSNNTVRDRTPYRTLLMNELGVPFHLGTKQVCIAWSSSSCHDGKAWLHVCITGDDKNATASFIYNGRLVDSVVSWSKEILRTQESECVCINGTCTVVMTDGSASGKADTKILFIEEGKIVHTSTLSGSDQHIEECSCYPRYPGVRCVCRDNWKGSNRPIVDINIKDHSIVSSYVCSGLVGDTPRKNDSSSSSHCLDPNNEEGGHGVKGWAFDDGNDVWMGRTINETSRLGYETFKVIEGWSNPKSKLQINRQVIVDRGDRSGYSGIFSVEGKSCINRCFYVELIRGRKEETEVLWTSNSIVVFCGTSGTYGTGSWPDGADLNLMPI

SEQ ID NO: 24936 - protein, 469 aa, Artificial Sequence; identical to SEQ ID NO: 22146
  derived and/or modified protein sequence (wt) from neuraminidase__InfluenzaA__AHL98405

SEQ ID NO: 24937 - protein, 469 aa, Artificial Sequence; identical to SEQ ID NO: 22146
  derived and/or modified protein sequence (wt) from neuraminidase__InfluenzaA__AHL98417

SEQ ID NO: 24938 - protein, 469 aa, Artificial Sequence; identical to SEQ ID NO: 22146
  derived and/or modified protein sequence (wt) from neuraminidase__InfluenzaA__AHL98429

SEQ ID NO: 24939 - protein, 469 aa, Artificial Sequence
  derived and/or modified protein sequence (wt) from neuraminidase__InfluenzaA__AHL98452
MNPTQKIITIGSVCMTIGMANLILQIGNIISIWISHSIQLGNQSQIETCNQSVITYENNTWVNQTYVNISNTNFAAGQSVVSVKLAGNSSLCPVSGWAIYSKDNSVRIGSKGDVFVIREPFISCSPLECRTFFLTQGALLNDKHSNGTIKDRSPYRTLMSCPIGEVPSPYNSRFESVAWSASACHDGINWLTIGISGPDSGAVAVLKYNGIITDTIKSWKNNILRTQESECACVNGSCFTIMTDGPSDGQASYKIFRIEKGKIVKSVEMNAPNYHYEECSCYPDSSEITCVCRDNWHGSNRPWVSFNQNLEYQIGYICSGVFGDNPRPNDKTGSCGPVSSNGANGVKGFSFKYGNGVWIGRTKSISSRKGFEMIWDPNGWTGTDNNFSIKQDIVGINEWSGYSGSFVQHPELTGLDCIRPCFWVELIRGRPKENTIWTSGSSISFCGVNSDTVGWSWPDGAELPFTIDK

SEQ ID NO: 24940 - protein, 469 aa, Artificial Sequence
  derived and/or modified protein sequence (wt) from neuraminidase__InfluenzaA__AHL98474
MNPNQKIITIGSVCMTIGMANLILQIGNIISIWISHSIQLGNQSQIETCNQSVITYENNTWVNQTYVNISNTNFAAGQSVVSVKLAGNSSLCPVSGWAIYSKDNSVRIGSKGDVFVIREPFISCSPLECRTFFLTQGALLNDKHSNGTIKDRSPYRTLMSCPIGEVPSPYNSRFESVAWSASACHDGINWLTIGISGPNSGAVAVLKYNGIITDTIKSWRNNILRTQESECACVNGSCFTIMTDGPSDGQASYKIFRIEKGKIVKSVEMNAPNYHYEECSCYPDSSEITCVCRDNWHGSNRPWVSFNQNLEYQIGYICSGVFGDNPRPNDKTGSCGPVSSNGANGVKGFSFKYGNGVWIGRTKSISSRKGFEMIWDPNGWTGTDNNFSIKQDIVGINEWSGYSGSFVQHPELTGLDCIRPCFWVELIRGRPKENTIWTSGSSISFCGVNSDTVGWSWPDGAELPFTIDK

SEQ ID NO: 24941 - protein, 469 aa, Artificial Sequence
  derived and/or modified protein sequence (wt) from neuraminidase__InfluenzaA__AHL98485
MNPNQKIITIGSVSLTISTICFFMQIAILITTVTLHFKQYEFNSPPNNQVMLCEPTIIERNITEIVYLTNTTIEKEICPKPAEYRNWSKPQCGITGFAPFSKDNSIRLSAGGDIWVTREPYVSCDPDKCYQFALGQGTTLNNVHSNNTVRDRTPYRTLLMNELGVPFHLGTKQVCIAWSSSSCHDGKAWLHVCITGDDKNATASFIYNGRLVDSVVSWSKEILRTQESECVCINGTCTVVMTDGSASGKADTKILFIEEGKIVHTSILSGSAQHVEECSCYPRYPGVRCVCRDNWKGSNRPIVDINIKDHSIVSSYVCSGLVGDTPRKNDSSSSSHCLDPNNEEGGHGVKGWAFDDGNDVWMGRTINETSRLGYETFKVIEGWSNPKSKLQINRQVIVDRGDRSGYSGIFSVEGKSCINRCFYVELIRGRKEETEVLWTSNSIVVFCGTSGTYGTGSWPDGADLNLMPI

SEQ ID NO: 24942 - protein, 469 aa, Artificial Sequence; identical to SEQ ID NO: 23375
  derived and/or modified protein sequence (wt) from neuraminidase__InfluenzaA__AHL98497

SEQ ID NO: 24943 - protein, 469 aa, Artificial Sequence; identical to SEQ ID NO: 22146
  derived and/or modified protein sequence (wt) from neuraminidase__InfluenzaA__AHL98509

SEQ ID NO: 24944 - protein, 469 aa, Artificial Sequence; identical to SEQ ID NO: 22146
  derived and/or modified protein sequence (wt) from neuraminidase__InfluenzaA__AHL98521

SEQ ID NO: 24945 - protein, 469 aa, Artificial Sequence; identical to SEQ ID NO: 23375
  derived and/or modified protein sequence (wt) from neuraminidase__InfluenzaA__AHL98533

SEQ ID NO: 24946 - protein, 469 aa, Artificial Sequence; identical to SEQ ID NO: 22146
  derived and/or modified protein sequence (wt) from neuraminidase__InfluenzaA__AHL98545

SEQ ID NO: 24947 - protein, 469 aa, Artificial Sequence; identical to SEQ ID NO: 22146
  derived and/or modified protein sequence (wt) from neuraminidase__InfluenzaA__AHL98557

SEQ ID NO: 24948 - protein, 469 aa, Artificial Sequence; identical to SEQ ID NO: 22146
  derived and/or modified protein sequence (wt) from neuraminidase__InfluenzaA__AHL98569

SEQ ID NO: 24949 - protein, 469 aa, Artificial Sequence
  derived and/or modified protein sequence (wt) from neuraminidase__InfluenzaA__AHL98581
MNPNQKIITIGSVSLTISTICFFMQIAILITTVTLHFKQYEFNSPPNNQVMLCEPTIIERNITEIVYLTNTTIEKEICPKPAEYRNWSKPQCGITGFAPFSKDNSIRLSAGGNIWVTREPYVSCDPDKCYQFALGQGTTLNNVHSNNTVRDRTPYRTLLMNELGVPFHLGTKQVCIAWSSSSCHDGKAWLHVCITGDDKNATASFIYNGRLVDSVVSWSKEILRTQESECVCINGTCTVVMTDGSASGKADTKILFIEEGKIVHTSTLSGSAQHVEECSCYPRYPGVRCVCRDNWKGSNRPIVDINIKDHSIVSSYVCSGLVGDTPRKNDSSSSSHCLDPNNEEGGHGVKGWAFDDGNDVWMGRTINETSRLGYETFKVIEGWSNPKSKLQINRQVIVDRGDRSGYSGIFSVEGKSCINRCFYVELIRGRKEETEVLWTSNSIVVFCGTSGTYGTGSWPDGADLNLMPI

SEQ ID NO: 24950 - protein, 469 aa, Artificial Sequence; identical to SEQ ID NO: 22146
  derived and/or modified protein sequence (wt) from neuraminidase__InfluenzaA__AHL98593

SEQ ID NO: 24951 - protein, 469 aa, Artificial Sequence; identical to SEQ ID NO: 23883
  derived and/or modified protein sequence (wt) from neuraminidase__InfluenzaA__AHL98605

SEQ ID NO: 24952 - protein, 469 aa, Artificial Sequence; identical to SEQ ID NO: 23375
  derived and/or modified protein sequence (wt) from neuraminidase__InfluenzaA__AHL98617

SEQ ID NO: 24953 - protein, 469 aa, Artificial Sequence; identical to SEQ ID NO: 23375
  derived and/or modified protein sequence (wt) from neuraminidase__InfluenzaA__AHL98629

SEQ ID NO: 24954 - protein, 469 aa, Artificial Sequence; identical to SEQ ID NO: 22146
  derived and/or modified protein sequence (wt) from neuraminidase__InfluenzaA__AHL98641

SEQ ID NO: 24955 - protein, 469 aa, Artificial Sequence; identical to SEQ ID NO: 24724
  derived and/or modified protein sequence (wt) from neuraminidase__InfluenzaA__AHL98653

SEQ ID NO: 24956 - protein, 469 aa, Artificial Sequence; identical to SEQ ID NO: 22146
  derived and/or modified protein sequence (wt) from neuraminidase__InfluenzaA__AHL98665

SEQ ID NO: 24957 - protein, 469 aa, Artificial Sequence
  derived and/or modified protein sequence (wt) from neuraminidase__InfluenzaA__AHL98677
MNPNQKIITIGSVSLTISTICFFMQIAILITTVTLHFKQYEFNSPPNNQVMLCEPTIIERNITEIVYLTNTTIEKEICPKPAEYRNWSKPQCGITGFAPFSKDNSIRLSAGGDIWVTREPYVSCDPDKCYQFALGQGTTLNNVHSNNTVRDRTPHRTLLMNELGVPFHLGTKQVCIAWSSSSCHDGKAWLHVCITGDDKNATASFIYNGRLVDSVVSWSKEILRTQESECVCINGTCTVVMTDGSASGKADTKILFIEEGKIVHTSTLSGNAQHVEECSCYPRYPGVRCVCRDNWKGSNRPIVDINIKDHSIVSSYVCSGLVGDTPRKNDSSSSSHCLDPNNEEGGHGVKGWAFDDGNDVWMGRTINETSRLGYETFKVIEGWSNPKSKLQINRQVIVDRGDRSGYSGIFSVEGKSCINRCFYVELIRGRKEETEVLWTSNSIVVFCGTSGTYGTGSWPDGADLNLMPI

SEQ ID NO: 24958 - protein, 469 aa, Artificial Sequence; identical to SEQ ID NO: 23894
  derived and/or modified protein sequence (wt) from neuraminidase__InfluenzaA__AHL98689

SEQ ID NO: 24959 - protein, 469 aa, Artificial Sequence
  derived and/or modified protein sequence (wt) from neuraminidase__InfluenzaA__AHL98702
MNPNQKIITIGSVSLTISTICFFMQIAILITTVTLHFKQYEFDSPPNNQVMLCEPTIIERNITEIVYLTNTTIEKEICPKPAEYRNWSKPQCGITGFAPFSKDNSIRLSAGGDIWVTREPYVSCDPDKCYQFALGQGTTLNNGHSNNTVRDRTPYRTLLMNELGVPFHLGTKQVCIAWSSSSCHDGKAWLHVCITGDDKNATASFIYNGRLVDSVVSWSKEILRTQESECVCINGTCTVVMTDGSASGKADTKILFIEEGKIVHTSTLSGSAQHVEECSCYPRYPGVRCVCRDNWKGSNRPIVDINIKDHSIVSSYVCSGLVGDTPRKNDSSSSSHCLDPNNEEGGHGVKGWAFDDGNDVWMGRTINETSRLGYETFKVIEGWSNPKSKLQINRQVIVDRGDRSGYSGIFSVEGKSCINRCFYVELIRGRKEETEVLWTSNSIVVFCGTSGTYGTGSWPDGADLNLMPI

SEQ ID NO: 24960 - protein, 469 aa, Artificial Sequence; identical to SEQ ID NO: 23389
  derived and/or modified protein sequence (wt) from neuraminidase__InfluenzaA__AHL98714

SEQ ID NO: 24961 - protein, 469 aa, Artificial Sequence
  derived and/or modified protein sequence (wt) from neuraminidase__InfluenzaA__AHL98725
MNPNQKIITIGSVSLTISTICFFMQIAILITTVTLHFKQYEFNSPPNNQVMLCEPTIIERNITEIVYLTNTTIEKEICPKPAEYRNWSKPQCGITGFAPFSKDNSIRLSAGGGIWVTREPYVSCDPDKCYQFALGQGTTLNNVHSNNTVRDRTPYRTLLMNELGVPFHLGTKQVCIAWSSSSCHDGKAWLHVCITGDDKNATASFIYNGRLVDSVVSWSKEILRTQESECVCINGTCTVVMTDGNASGKADTKILFIEEGKIVHTSTLSGSAQHVEECSCYPRYPGVRCVCRDNWKGSNRPIVDINIKDHSIVSSYVCSGLVGDTPRKNDSSSSSHCLDPNNEEGGHGVKGWAFDDENDVWMGRTINETSRLGYETFKVIEGWSNPKSKLQINRQVIVDRGNRSGYSGIFSVEGKSCINRCFYVELIRGRKEETEVLWTSNSIVVFCGTSGTYGTGSWPDGADLNLMPI

SEQ ID NO: 24962 - protein, 469 aa, Artificial Sequence; identical to SEQ ID NO: 23883
  derived and/or modified protein sequence (wt) from neuraminidase__InfluenzaA__AHL98737

SEQ ID NO: 24963 - protein, 469 aa, Artificial Sequence; identical to SEQ ID NO: 23871
  derived and/or modified protein sequence (wt) from neuraminidase__InfluenzaA__AHL98749

SEQ ID NO: 24964 - protein, 469 aa, Artificial Sequence; identical to SEQ ID NO: 23883
  derived and/or modified protein sequence (wt) from neuraminidase__InfluenzaA__AHL98761

SEQ ID NO: 24965 - protein, 469 aa, Artificial Sequence
  derived and/or modified protein sequence (wt) from neuraminidase__InfluenzaA__AHL98773
MNPNQKIITIGSVSLTISTICFFMQIAILITTVTLHFKQYEFNSPPNNQVMLCEPTIIERNITEIVYLTNTTIEKEICPKPAEYRNWSKPQCGITGFAPFSKDNSIRLSAGGNIWVTREPYVSCDPDKCYQFALGQGTTLNNVHSNNTARDRTPYRTLLMNELGVPFHLGTKQVCIAWSSSSCHDGKAWLHVCITGDDKNATASFIYNGRLVDSVVSWSKEILRTQESECVCINGTCTVVMTDGSASGKADTKILFIEEGKIVHTSTLSGSAQHVEECSCYPRYPGVRCVCRDNWKGSNRPIVDINIKDHSIVSSYVCSGLVGDTPRKNDSSSSSHCLDPNNEEGGHGVKGWAFDDGNDVWMGRTINETSRLGYETFKVIEGWSNPKSKLQINRQVIVDRGDRSGYSGIFSVEGKSCINRCFYVELIRGRKEETEVLWTSNSIVVFCGTSGTYGTGSWPDGADLNLMPI

SEQ ID NO: 24966 - protein, 469 aa, Artificial Sequence; identical to SEQ ID NO: 23903
  derived and/or modified protein sequence (wt) from neuraminidase__InfluenzaA__AHL98785

SEQ ID NO: 24967 - protein, 469 aa, Artificial Sequence
  derived and/or modified protein sequence (wt) from neuraminidase__InfluenzaA__AHL98797
MNPNQKIITIGSVSLTISTICFFTQIAILITTVTLHFKQYEFNSPPNNQVMLCEPTIIERNITEIVYLTNTTIEKEICPKPAEYRNWSKPQCGITGFAPFSKDNSIRLSAGGDIWVTREPYVSCDPDKCYQFALGQGTTLNNVHSNNTVRDRTPYRTLLMNELGVPFHLGTKQVCIAWSSSSCHDGKAWLHVCITGDDKNATASFIYNGRLVDSVVSWSKEILRTQESECVCINGTCTVVMTDGSASGKADTKILFIEEGKIVHTSTLSGSAQHVEECSCYPRYPGVRCVCRDNWKGSNRPIVDINIKDHSIVSSYVCSGLVGDTPRKNDSSSSSHCLDPNNEEGGHGVKGWAFDDGNDVWMGRTINETSRSGYETFKVIEGWSNPKSKLQINRQVIVDRGDRSGYSGIFSVEGKSCINRCFYVELIRGRKEETEVLWTSNSIVVFCGTSGTYGTGSWPDGADLNLMPI

SEQ ID NO: 24968 - protein, 469 aa, Artificial Sequence; identical to SEQ ID NO: 22146
  derived and/or modified protein sequence (wt) from neuraminidase__InfluenzaA__AHL98809

SEQ ID NO: 24969 - protein, 469 aa, Artificial Sequence
  derived and/or modified protein sequence (wt) from neuraminidase__InfluenzaA__AHL98821
MNPNQKIITIGSVSLTISTICFFMQIAILITTVTLHFKQYEFNSPPNNQVMLCEPTIIERNITEIVYLTNTTIEKEICPKPAEYRNWSKPQCGITGFAPFSKDNSIRLSAGGDIWVTREPYVSCDPDRCYQFALGQGTTLNNMHSNNTVRDRTPYRTLLMNELGVPFHLGTKQVCIAWSSSSCHDGKAWLHVCITGDDKNATASFIYNGRLVDSVVSWSKEILRTQESECVCINGTCTVVMTDGSASGKADTKILFIEEGKIVHTSTLSGSAQHVEECSCYPRYPGVRCVCRDNWKGSNRPIVDINIKDHSIVSSYVCSGLVGDTPRKNDSSSSSHCLDPNNEEGGHGVKGWAFDDGNDVWMGRTINETSRLGYETFKVIEGWSNPKSKLQINRQVIVDRGDRSGYSGIFSVEGKSCINRCFYVELIRGRKEETEVLWTSNSIVVFCGTSGTYGTGSWPDGADLNLMPI

SEQ ID NO: 24970 - protein, 469 aa, Artificial Sequence; identical to SEQ ID NO: 22146
  derived and/or modified protein sequence (wt) from neuraminidase__InfluenzaA__AHL98833

SEQ ID NO: 24971 - protein, 469 aa, Artificial Sequence
  derived and/or modified protein sequence (wt) from neuraminidase__InfluenzaA__AHL98845
MNPNQKIITIGSVSLTISTICFFMQIAILITTVTLHFKQYEFNSPPNNQVMLCEPTIIERNITEIVYLINTTIEKEICPKPAEYRNWSKPQCGITGFAPFSKDNSIRLSAGGDIWVTREPYVSCGPDKCYQFALGQGTTLNNMHSNNTVRDRTPYRTLLMNELGVPFHLGTKQVCIAWSSSSCHDGKAWLHVCITGDDKNATASFIYNGRLVDSVVSWSKEILRTQESECVCINGTCTVVMTDGSASGKADTKILFIEEGKIVHTSTLSGSAQHVEECSCYPRYPGVRCVCRDNWKGSNRPIVDINIKDHSIVSSYVCSGLVGDTPRKNDSSSSSHCLDPNNEEGGHGVKGWAFDDGNDVWMGRTINETSRLGYETFKVIEGWSNPKSKLQINRQVIVDRGDRSGYSGIFSVEGKSCINRCFYVELIRGRKEETEVLWTSNSIVVFCGTSGTYGTGSWPDGADLNLMPI

SEQ ID NO: 24972 - protein, 469 aa, Artificial Sequence; identical to SEQ ID NO: 23883
  derived and/or modified protein sequence (wt) from neuraminidase__InfluenzaA__AHL98857

SEQ ID NO: 24973 - protein, 469 aa, Artificial Sequence; identical to SEQ ID NO: 23883
  derived and/or modified protein sequence (wt) from neuraminidase__InfluenzaA__AHL98869

SEQ ID NO: 24974 - protein, 469 aa, Artificial Sequence; identical to SEQ ID NO: 22146
  derived and/or modified protein sequence (wt) from neuraminidase__InfluenzaA__AHL98881

SEQ ID NO: 24975 - protein, 469 aa, Artificial Sequence
  derived and/or modified protein sequence (wt) from neuraminidase__InfluenzaA__AHL98893
MNPNQKIITIGSVSLTISTICFFMQIAILITTVTLHFKQYEFDSPPNNQVMLCEPTIIERNITEIVYLTNTTIEKEICPKPAEYRNWSKPQCGITGFAPFSKDNSIRLSAGGDIWVTREPYVSCDPDKCYQFALGQGTTLNNVHSNNTVRDRTPYRTLLMNELGVPFHLGTKQVCIAWSSSSCHDGKAWLHVCITGDDKNATASFIYNGRLVDSVVSWSKEILRTQESECVCINGTCTVVMTDGSASGKADTKILFIEEGKIVHTSTLSGSAQHVEECSCYPRYPGVRCVCRDNWKGSNRPIVDINIKDHSIVSSYVCSGLVGDTPRKNDSSSSSHCLDPNNEEGGHGVKGWAFDDGNDVWMGRTINETSRLGYETFKVFEGWSNPKSKLQINRQVIVDRGDRSGYSGIFSVEGKSCINRCFYVELIRGRKEETEVLWTSNSIVVFCGTSGTYGTGSWPDGADLNLMPI

SEQ ID NO: 24976 - protein, 469 aa, Artificial Sequence; identical to SEQ ID NO: 23871
  derived and/or modified protein sequence (wt) from neuraminidase__InfluenzaA__AHL98905

SEQ ID NO: 24977 - protein, 469 aa, Artificial Sequence; identical to SEQ ID NO: 22146
  derived and/or modified protein sequence (wt) from neuraminidase__InfluenzaA__AHL98916

SEQ ID NO: 24978 - protein, 469 aa, Artificial Sequence; identical to SEQ ID NO: 23894
  derived and/or modified protein sequence (wt) from neuraminidase__InfluenzaA__AHL98928

SEQ ID NO: 24979 - protein, 469 aa, Artificial Sequence; identical to SEQ ID NO: 22146
  derived and/or modified protein sequence (wt) from neuraminidase__InfluenzaA__AHL98940

SEQ ID NO: 24980 - protein, 469 aa, Artificial Sequence; identical to SEQ ID NO: 22146
  derived and/or modified protein sequence (wt) from neuraminidase__InfluenzaA__AHL98952

SEQ ID NO: 24981 - protein, 469 aa, Artificial Sequence; identical to SEQ ID NO: 23871
  derived and/or modified protein sequence (wt) from neuraminidase__InfluenzaA__AHL98964

SEQ ID NO: 24982 - protein, 469 aa, Artificial Sequence
  derived and/or modified protein sequence (wt) from neuraminidase__InfluenzaA__AHL98976
MNPNQKIITIGSVSLTISTICFFMQIAILITTVTLHFKQYEFNSPPNNQVMLCEPTIVERNITEIVYLTNTTIEKEICPKPAEYRNWSKPQCGITGFAPFSKDNSIRLSAGGDIWVTREPYVSCDPDKCYQFALGQGTTLNNVHSNNTVRDRTPYRTLLMNELGVPFHLGTKQVCIAWSSSSCHDGKAWLHVCITGDDKNATASFIYNGRLVDSVASWSKEVLRTQESECVCINGTCAVVMTDGSASGKADTKILFIEEGKIVHTSTLSGSAQHVEECSCYPRYPGVRCVCRDNWKGSNRPIVDINIKDHSIVSSYVCSGLVGDTPRKNDSSSSSHCLDPNNEEGGHGVKGWAFDDGNDVWMGRTINETSRLGYETFKVIEGWSNPKSKLQINRQVIVDRGDRSGYSGIFSVEGKSCINRCFYVELIRGRKEETEVLWTSNSIVVFCGTSGTYGTGSWPDGADLNLMPI

SEQ ID NO: 24983 - protein, 469 aa, Artificial Sequence; identical to SEQ ID NO: 23871
  derived and/or modified protein sequence (wt) from neuraminidase__InfluenzaA__AHL98988

SEQ ID NO: 24984 - protein, 469 aa, Artificial Sequence; identical to SEQ ID NO: 22146
  derived and/or modified protein sequence (wt) from neuraminidase__InfluenzaA__AHL99000

SEQ ID NO: 24985 - protein, 469 aa, Artificial Sequence; identical to SEQ ID NO: 22146
  derived and/or modified protein sequence (wt) from neuraminidase__InfluenzaA__AHL99012

SEQ ID NO: 24986 - protein, 469 aa, Artificial Sequence
  derived and/or modified protein sequence (wt) from neuraminidase__InfluenzaA__AHL99024
MNPNQKIITIGSVSLTISTICFFMQIAILITTVTLHFKQYEFNSPPNNQVMLCEPTIIERNITEIVYLTNTTIEKEICPKPAEYRNWSKPQCGITGFAPFSKDNSIRLSAGGDIWVTREPYVSCDPDKCYQFALGQGTTLNNVHSNNTVRDRTPYRTLLMNELGVPFHLGTKQVCIAWSSSSCHDGKAWLHVCITGDDKNATASFIYNGRLVDSVVSWSKEILRTQESECVCINGTCTVVMTDGSASGKADTKILFIEEGKIVHTSTLSGSAQHVEECSCYPRYPGVRCICRDNWKGSNRPIVDINIKDHSIVSSYVCSGLVGDTPRKNDSSSSSHCLDPNNEEGGHGVKGWAFDDGNDVWMGRTINETSRLGYETFKVIEGWSNPKSKLQINRQVIVDRGDRSGYSGIFSVEGKSCINRCFYVELIRGRKEETEVLWTSNSIVVFCGTSGTYGTGSWPDGADLNLMPI

SEQ ID NO: 24987 - protein, 469 aa, Artificial Sequence; identical to SEQ ID NO: 23364
  derived and/or modified protein sequence (wt) from neuraminidase__InfluenzaA__AHL99036

SEQ ID NO: 24988 - protein, 469 aa, Artificial Sequence; identical to SEQ ID NO: 24786
  derived and/or modified protein sequence (wt) from neuraminidase__InfluenzaA__AHL99048

SEQ ID NO: 24989 - protein, 469 aa, Artificial Sequence; identical to SEQ ID NO: 22146
  derived and/or modified protein sequence (wt) from neuraminidase__InfluenzaA__AHL99060

SEQ ID NO: 24990 - protein, 469 aa, Artificial Sequence
  derived and/or modified protein sequence (wt) from neuraminidase__InfluenzaA__AHL99072
MNPNQKIITIGSVSLTISTICFFMQIAILITTVTLHFKQYEFNSPPNNQVMLCEPTIIERNITEIVYLTNTTIEKEICPKPAEYRNWSKPQCGITGFAPFSKDNSIRLSAGGDIWVTREPYVSCDPDKCYQFALGQGTTLNNVHSNNTVRDRTPYRTLLMNELGVPFHLGTKQVCIAWSSSSCHDGKAWLHVCITGDDKNATASFIYNGRLVDSVVSWSKEILRTQESECVCINGTCTVVMTDGSASGKADTKILFIEEGKIVHTSTLSGSAQHVEECSCYPRYPGVRCVCRDNWKGSNRPIVDINMKDHSIVSSYVCSGLVGDTPRKNDSSSSSHCLDPNNEEGGHGVKGWAFDDGNDVWMGRTINETSRLGYETFKVIEGWSNPKSKLQINRQVIVDRGDRSGYSGIFSVEGKSCINRCFYVELIRGRKEETEVLWTSNSIVVFCGTSGTYGTGSWPDGADLNLMPI

SEQ ID NO: 24991 - protein, 469 aa, Artificial Sequence
  derived and/or modified protein sequence (wt) from neuraminidase__InfluenzaA__AHL99084
MNPNQKIITIGSVSLTISTICFFMQIAILITTVTLHFKQYEFNSPPNNQVMLCEPTIIERNITEIVYLTNTTIEKEICPKPAEYRNWSKPQCGITGFAPFSKDNSIRLSAGGDIWVTREPYVSCDPDRCYQFALGQGTTLNNMHSNNTVRDRTPYRTLLMNELGVPFHLGTKQVCIAWSSSSCHDGKAWLHVCITGDDKNATASFIYNGRLVDSVVSWSKEILRTQESECVCINGTCTVVMTDGSASGKADTKILFIEEGKIVHTSTLSGSAQHVEECSCYPRYPGVRCVCRDNWKGSNRPIVDINIKDHNIVSSYVCSGLVGDTPRKNDSSSSSHCLDPNNEEGGHGVKGWAFDDGNDVWMGRTINETSRLGYETFKVIEGWSNPKSKLQINRQVIVDRGDRSGYSGIFSVEGKSCINRCFYVELIRGRKEETEVLWTSNSIVVFCGTSGTYGTGSWPDGADLNLMPI

SEQ ID NO: 24992 - protein, 469 aa, Artificial Sequence; identical to SEQ ID NO: 22146
  derived and/or modified protein sequence (wt) from neuraminidase__InfluenzaA__AHL99096

SEQ ID NO: 24993 - protein, 469 aa, Artificial Sequence; identical to SEQ ID NO: 22146
  derived and/or modified protein sequence (wt) from neuraminidase__InfluenzaA__AHL99108

SEQ ID NO: 24994 - protein, 469 aa, Artificial Sequence; identical to SEQ ID NO: 22146
  derived and/or modified protein sequence (wt) from neuraminidase__InfluenzaA__AHL99120

SEQ ID NO: 24995 - protein, 469 aa, Artificial Sequence; identical to SEQ ID NO: 22146
  derived and/or modified protein sequence (wt) from neuraminidase__InfluenzaA__AHL99132

SEQ ID NO: 24996 - protein, 469 aa, Artificial Sequence
  derived and/or modified protein sequence (wt) from neuraminidase__InfluenzaA__AHL99144
MNPNQKIITIGSVSLTISTICFFMQIAILITTVTLHFKQYEFNSPPNNQVMLCEPTIIERNITEIVYLTNTTIEKEICPKPAEYRNWSKPQCGITGFAPFSKDNSIRLSAGGDIWVTREPYVSCDPDKCYQFALGQGTTLNNVHSNNTVRDRTPYRTLLMNELGVPFHLGTKQVCIAWSSSSCHDGKAWLHVCITGDDKNATASFIYNGRLVDSVVSWSKEILRTQESECVCINGTCTVVMTDGSASGKADTKILFIEEGRIVHTSTLSGSAQHVEECSCYPRYPGVRCVCRDNWKGSNRPIVDINIKDHSIVSSYVCSGLVGDTPRKNDSSSSSHCLDPNNEEGGHGVKGWAFDDGNDVWMGRTINETSRLGYETFKVIEGWSNPKSKLQINRQVIVDRGDRSGYSGIFSVEGKSCINRCFYVELIRGRKEETEVLWTSNSIVVFCGTSGTYGTGSWPDGADLNLMPI

SEQ ID NO: 24997 - protein, 469 aa, Artificial Sequence; identical to SEQ ID NO: 22146
  derived and/or modified protein sequence (wt) from neuraminidase__InfluenzaA__AHL99156

SEQ ID NO: 24998 - protein, 469 aa, Artificial Sequence
  derived and/or modified protein sequence (wt) from neuraminidase__InfluenzaA__AHL99168
MNPNQKIITIGSVSLTISTICFFMQIAILITTVTLHFKQYEFNSPPNNQVMLCEPTIIERNTTEIVYLTNTTIEKEICPKPAEYRNWSKPQCGITGFAPFSKDNSIRLSAGGDIWVTREPYVSCDPDKCYQFALGQGTTLNNVHSNNTVRDRTPYRTLLMNELGVPFHLGTKQVCIAWSSSSCHDGKAWLHVCITGDDKNATASFIYNGRLVDSVVSWSKEILRTQESECVCINGTCTVVMTDGSASGKADTKILFIEEGKIVHTSTLSGSAQHVEECSCYPRYPGVRCVCRDNWKGSNRPIVDINIKDHSIVSSYVCSGLVGDTPRKNDSSSSSHCLDPNNEEGGHGVKGWAFDDGNDVWMGRTINETSRLGYETFKVIEGWSNPKSKLQINRQVIVDRGDRSGYSGIFSVEGKSCINRCFYVELIRGRKEETEVLWTSNSIVVFCGTSGTYGTGSWPDGADLNLMPI

SEQ ID NO: 24999 - protein, 469 aa, Artificial Sequence; identical to SEQ ID NO: 22146
  derived and/or modified protein sequence (wt) from neuraminidase__InfluenzaA__AHL99180

SEQ ID NO: 25000 - protein, 469 aa, Artificial Sequence; identical to SEQ ID NO: 23010
  derived and/or modified protein sequence (wt) from neuraminidase__InfluenzaA__AHL99204

SEQ ID NO: 25001 - protein, 469 aa, Artificial Sequence
  derived and/or modified protein sequence (wt) from neuraminidase__InfluenzaA__AHL99216
MNPNQKIITIGSVSLTISTICFFMQIAILITTVTLHFKQYEFNSPPNNQVMLCEPTIIERNITEIVYLTNTTVEKEICPKPAEYRNWSKPQCGITGFAPFSKDNSIRLSAGGDIWVTREPYVSCDPDKCYQFALGQGTTLNNVHSNNTVRDRTPYRTLLMNELGVPFHLGTKQVCIAWSSSSCHDGKAWLHVCITGDDKNATASFIYNGRLVDSVVSWSKEILRTQESECVCINGTCTVVMTDGSASGKADTKILFIEEGKIVHTSTLSGSAQHVEECSCYPRYPGVRCVCRDNWKGSNRPIIDINIKDHSIVSSYVCSGLVGDTPRKNDSSSSSHCLDPNNEEGGHGVKGWAFDDGNDVWMGRTINETSRLGYETFKVIEGWSNPKSKLQINRQVIVDRGDRSGYSGIFSVEGKSCINRCFYVELIRGRKKETEVLWTSNSIVVFCGTSGTYGTGSWPDGADLNLMPI

SEQ ID NO: 25002 - protein, 469 aa, Artificial Sequence; identical to SEQ ID NO: 22146
  derived and/or modified protein sequence (wt) from neuraminidase__InfluenzaA__AHL99228

SEQ ID NO: 25003 - protein, 469 aa, Artificial Sequence; identical to SEQ ID NO: 22146
  derived and/or modified protein sequence (wt) from neuraminidase__InfluenzaA__AHL99240

SEQ ID NO: 25004 - protein, 469 aa, Artificial Sequence; identical to SEQ ID NO: 22146
  derived and/or modified protein sequence (wt) from neuraminidase__InfluenzaA__AHL99252

SEQ ID NO: 25005 - protein, 469 aa, Artificial Sequence; identical to SEQ ID NO: 22146
  derived and/or modified protein sequence (wt) from neuraminidase__InfluenzaA__AHL99264

SEQ ID NO: 25006 - protein, 469 aa, Artificial Sequence; identical to SEQ ID NO: 22146
  derived and/or modified protein sequence (wt) from neuraminidase__InfluenzaA__AHL99276

SEQ ID NO: 25007 - protein, 469 aa, Artificial Sequence; identical to SEQ ID NO: 23883
  derived and/or modified protein sequence (wt) from neuraminidase__InfluenzaA__AHL99288

SEQ ID NO: 25008 - protein, 469 aa, Artificial Sequence; identical to SEQ ID NO: 24786
  derived and/or modified protein sequence (wt) from neuraminidase__InfluenzaA__AHL99300

SEQ ID NO: 25009 - protein, 469 aa, Artificial Sequence; identical to SEQ ID NO: 22146
  derived and/or modified protein sequence (wt) from neuraminidase__InfluenzaA__AHL99312

SEQ ID NO: 25010 - protein, 469 aa, Artificial Sequence
  derived and/or modified protein sequence (wt) from neuraminidase__InfluenzaA__AHL99324
MNPNQKIITIGSVSLTISTICFFMQIAILITTVTLHFKQYEFNSPPNNQVILCEPTIIERNITEIVYLTNTTIEKEICPKPAEYRNWSKPQCGITGFAPFSKDNSIRLSAGGDIWVTREPYVSCDPDKCYQFALGQGTTLNNVHSNNTVRDRTPYRTLLMNELGVPFHLGTKQVCIAWSSSSCHDGKAWLHVCITGDDKNATASFIYNGKLVDSVVSWSKEILRTQESECVCINGTCTVVMTDGSASGKADTKILFIEEGKIVHTSTLSGSAQHVEECSCYPRYPGVRCVCRDNWKGSNRPIVDINIKDHSIVSSYVCSGLVGDTPRKNDSSSSSHCLDPNNEEGGHGVKGWAFDDGNDVWMGRTINETSRLGYETFKVIEGWSNPKSKLQINRQVIVDRGDRSGYSGIFSVEGKSCINRCFYVELIRGRKEETEVLWTSNSIVVFCGTSGTYGTGSWPDGADLNLMPI

SEQ ID NO: 25011 - protein, 469 aa, Artificial Sequence; identical to SEQ ID NO: 23389
  derived and/or modified protein sequence (wt) from neuraminidase__InfluenzaA__AHL99348

SEQ ID NO: 25012 - protein, 469 aa, Artificial Sequence; identical to SEQ ID NO: 23389
  derived and/or modified protein sequence (wt) from neuraminidase__InfluenzaA__AHL99359

SEQ ID NO: 25013 - protein, 469 aa, Artificial Sequence
  derived and/or modified protein sequence (wt) from neuraminidase__InfluenzaA__AHL99370
MNPNQKIITIGSVSLTITTICFFMQIAILITTVTLHFKQYEFNSPPNNQMMLCEPTIIERNITEIVYLTNTTIEKEICPKPAEYRNWSKPQCGITGFAPFSKDNSIRLSAGGDIWVTREPYVSCDPDKCYQFALGQGTTLNNVHSNNTVRDRTPYRTLLMNELGVPFHLGTKQVCIAWSSSSCHDGKAWLHVCITGDDKNATASFIYNGRLVDSVVSWSKEILRTQESECVCINGTCTVVMTDGSASGKADTKILFIEEGKIVHTSTLSGSAQHVEECSCYPRYPGVRCVCRDNWKGSNRPIVDINIKDHSIVSSYVCSGLVGDTPRKNDSSSSSHCLDPNNEEGGHGVKGWAFDDGNDVWMGRTINETSRLGYETFKVIEGWSNPKSKLQINRQVIVDRGDRSGYSGIFSVEGKSCINRCFYVELIRGRKEETEVLWTSNSIVVFCGTSGTYGTGSWPDGADLNLMPI

SEQ ID NO: 25014 - protein, 469 aa, Artificial Sequence; identical to SEQ ID NO: 22146
  derived and/or modified protein sequence (wt) from neuraminidase__InfluenzaA__AHL99393

SEQ ID NO: 25015 - protein, 469 aa, Artificial Sequence; identical to SEQ ID NO: 22146
  derived and/or modified protein sequence (wt) from neuraminidase__InfluenzaA__AHL99417

SEQ ID NO: 25016 - protein, 469 aa, Artificial Sequence; identical to SEQ ID NO: 22146
  derived and/or modified protein sequence (wt) from neuraminidase__InfluenzaA__AHL99429

SEQ ID NO: 25017 - protein, 469 aa, Artificial Sequence; identical to SEQ ID NO: 22146
  derived and/or modified protein sequence (wt) from neuraminidase__InfluenzaA__AHL99441

SEQ ID NO: 25018 - protein, 469 aa, Artificial Sequence; identical to SEQ ID NO: 22146
  derived and/or modified protein sequence (wt) from neuraminidase__InfluenzaA__AHL99453

SEQ ID NO: 25019 - protein, 469 aa, Artificial Sequence; identical to SEQ ID NO: 22146
  derived and/or modified protein sequence (wt) from neuraminidase__InfluenzaA__AHL99477

SEQ ID NO: 25020 - protein, 469 aa, Artificial Sequence; identical to SEQ ID NO: 24786
  derived and/or modified protein sequence (wt) from neuraminidase__InfluenzaA__AHL99489

SEQ ID NO: 25021 - protein, 469 aa, Artificial Sequence
  derived and/or modified protein sequence (wt) from neuraminidase__InfluenzaA__AHL99501
MNPNQKIITIGSVSLTISTICFFMQIAILITTVTLHFKQYEFNSPPNNQVMLCEPTIIERNITEIVYLTNTTIEKEICPKPAEYRNWSKPQCGITGFAPFSKDNSIRLSAGGDIWVTREPYVSCDPDKCYQFALGQGTTLNNVHSNNTVRDRTPYRTLLMNELGVPFHLGTKQVCIAWSSSSCHDGKAWLHVCITGDDKNATASFIYNGRLVDSVVSWSKEILRTQESECVCINGTCTVVMTDGSASGKADTKILFIEEGKIVHTSTLSGSAQHVEECSCYPRYPGVRCVCRDNWKGSNRPIVDINIKDHSTVSSYVCSGLVGDTPRKNDSSSSSHCLDPNNEEGGHGVKGWAFDDGNDVWMGRTINETSRLGYETFKVIEGWSNPKSKLQINRQVIVDRGDRSGYSGIFSVEGKSCINRCFYVELIRGRKEETEVLWTSNSIVVFCGTSGTYGTGSWPDGADLNLMPI

SEQ ID NO: 25022 - protein, 469 aa, Artificial Sequence; identical to SEQ ID NO: 22146
  derived and/or modified protein sequence (wt) from neuraminidase__InfluenzaA__AHL99525

SEQ ID NO: 25023 - protein, 469 aa, Artificial Sequence
  derived and/or modified protein sequence (wt) from neuraminidase__InfluenzaA__AHL99537
MNPNQKIITIGSVSLTISTICFFMQIAILITTVTLHFKQYEFNSPPNNQVMLCEPTIIERNITEIVYLTNTTIEKEICPKPAEYRNWSKPQCGITGFAPFSKDNSIRLSAGGDIWVTREPYVSCDPDKCYQFALGQGTTLNNVHSNNTVRDRTSYRTLLMNELGVPFHLGTKQVCIAWSSSSCHDGKAWLHVCITGDDKNATASFIYNGRLVDSVVSWSKEILRTQESECVCINGTCTVVMTDGSASGKADTKILFIEEGKIVHTSTLSGSAQHVEECSCYPRYPGVRCVCRDNWKGSNRPIVDINIKDHSIVSSYVCSGLVGDTPRKNDSSSSSHCLDPNNEEGGHGVKGWAFDDGNDVWMGRTINETSRLGYETFKVIEGWSNPKSKLQINRQVIVDRGDRSGYSGIFSVEGKSCINRCFYVELIRGRKEETEVLWTSNSIVVFCGTSGTYGTGSWPDGADLNLMPI

SEQ ID NO: 25024 - protein, 469 aa, Artificial Sequence; identical to SEQ ID NO: 23883
  derived and/or modified protein sequence (wt) from neuraminidase__InfluenzaA__AHL99549

SEQ ID NO: 25025 - protein, 469 aa, Artificial Sequence; identical to SEQ ID NO: 22146
  derived and/or modified protein sequence (wt) from neuraminidase__InfluenzaA__AHL99561

SEQ ID NO: 25026 - protein, 469 aa, Artificial Sequence
  derived and/or modified protein sequence (wt) from neuraminidase__InfluenzaA__AHL99573
MNPNQKIITIGSVSLTISTICFFMQIAILITTVTLHFKQYEFNSPPNNQVMLCEPTIIERNITEIVYLTNTTGEKEICPKPAEYRNWSKPQCGITGFAPFSKDNSIRLSAGGDIWVTREPYVSCDPDKCYQFALGQGTTLNNVHSNNTVRDRTPYRTLLMNELGVPFHLGTKQVCIAWSSSSCHDGKAWLHVCITGDDKNATASFIYNGRLVDSVVSWSKEILRTQESECVCINGTCTVVMTDGSASGKADTKILFIEEGKIVHTSTLSGSAQHVEECSCYPRYPGVRCVCRDNWKGSNRPIIDINIKDHSIVSSYVCSGLVGDTPRKNDSSSSSHCLDPNNEEGGHGVKGWAFDDGNDVWMGRTINETSRLGYETFKVIEGWSNPKSKLQINRQVIVDKGDRSGYSGIFSVEGKSCINRCFYVELIRGRKEETEVLWTSNSIVVFCGTSGTYGTGSWPDGADLNLMPI

SEQ ID NO: 25027 - protein, 469 aa, Artificial Sequence
  derived and/or modified protein sequence (wt) from neuraminidase__InfluenzaA__AHL99585
MNPNQKIITIGSVSLTISTICFFMQIAILITTVTLHFKQYEFNSPPNNQVMLCEPTIIERNITEIVYLTNTTIEKEICPKPAEYRNWSKPQCGITGFAPFSKDNSIRLSAGGDIWVTREPYVSCDPDKCYQFALGQGTTLNNVHSNNTARDRTPYRTLLMNELGVPFHLGTKQVCIAWSSSSCHDGKAWLHVCITGDDKNATASFIYNGRLVDSVVSWSKEILRTQESECVCINGTCTVVMTDGSASGKADTKILFIEEGKIVHTSTLSGSAQHVEECSCYPRYPGVRCVCRDNWKGSNRPIVDINIKDHSIVSSYVCSGLVGDTPRKNDSSSSSHCLNPNNEEGGHGVKGWAFDDGNDVWMGRTINETSRLGYETFKVIEGWSNPKSKLQINRQVIVDRGDRSGYSGIFSVEGKSCINRCFYVELIRGRKEETEVLWTSNSIVVFCGTSGTYGTGSWPDGADLNLMPI

SEQ ID NO: 25028 - protein, 469 aa, Artificial Sequence
  derived and/or modified protein sequence (wt) from neuraminidase__InfluenzaA__AHL99597
MNPNQKIITIGSVCMTIGMANLILQIGNIISIWISHSIQVGNQSQIETCNQSVITYENNTWVNQTYVNISNTNFAVGQSVVSVKLAGNSSLCPVSGWAIYSKDNSVRIGSKGDVFVIREPFISCSPLECRTFFLTQGALLNDKHSNGTIKDRSPYRTLMSCPIGEVPSPYNSRFESVAWSASACHDGINWLTIGISGPDSGAVAVLKYNGIITDTIKSWRNDILRTQESECACVNGSCFTIMTDGPSDGQASYKIFRIEKGKIVKSVEMNAPNYHYEECSCYPDSSEITCVCRDNWHGSNRPWVSFNQNLEYQIGYICSGIFGDNPRPNDKTGSCGPVSSNGANGVKGFSFKYGNGVWIGRTKSISSRKGFEMIWDPNGWTGTDNNFSIKQDIVGINEWSGYSGSFVQHPELTGLDCIRPCFWVELIRGRPKENTIWTSGSSISFCGVNSDTVGWSWPDGAELPFTIDK

SEQ ID NO: 25029 - protein, 469 aa, Artificial Sequence
  derived and/or modified protein sequence (wt) from neuraminidase__InfluenzaA__AHL99608
MNPNQKIITIGSVSLTISTICVFMQIAILITTVTLHFKQYEFNSPPNNQVMLCEPTIIERNITEIVYLTNTTIEKEICPKPAEYRNWSKPQCGITGFAPFSKDNSIRLSAGGDIWVTREPYVSCDPDKCYQFALGQGTTLNNVHSNNTVRDRTPYRTLLMNELGVPFHLGTKQVCIAWSSSSCHDGKAWLHVCITGDDKNATASFIYNGRLVDSVVSWSKEILRTQESECVCINGTCTVVMTDGSASGKADTKILFIEEGKIVHTSTLSGSAQHVEECSCYPRYPGVRCVCRDNWKGSNRPIVDINIKDHSIVSSYVCSGLVGDTPRKNDSSSSSHCLDPNNEEGGHGVKGWAFDDGNDVWMGRTINETSRLGYETFKVIEGWSNPKSKLQINRQVIVDRGDRSGYSGIFSVEGKSCINRCFYVELIRGRKEETEVLWTSNSIVVFCGTSGTYGTGSWPDGADLNLMPI

SEQ ID NO: 25030 - protein, 469 aa, Artificial Sequence
  derived and/or modified protein sequence (wt) from neuraminidase__InfluenzaA__AHL99620
MNPNQKIITIGSVSLTISTICFFMQIAILITTVTLHFKQYEFNSPPNNQVMLCEPTIIERNITEIVYLTNTTIEKEICPKPAEYRNWSKPQCGITGFAPFSKDNSIRLSAGGDIWVTREPYVSCDPDKCYQFALGQGTTLNNVHSNNTVRDRTPYRTLLMNELGVPFHLGTKQVCIAWSSSSCHDGKAWLHVCITGDDKNATASFIYNGKLVDSVVSWSKEILRTQESECVCINGTCTVVMTDGSASGKADTKILFIEEGKIVHTSTLSGSAQHVEECSCYPRYPGVRCVCRDNWKGSNRPIVDINIKDHSIVSSYVCSGLVGDTPRKNDSSSSSHCLDPNNEEGGHGVKGWAFDDGNDVWMGRTINETSRLGYETFKVIEGWSNPKSKLQINRQVIVDRGDRSGYSGIFSVEGKSCINRCFYVELIRGRKEETEVLWTSNSIVVFCGTSGTYGTGSWPDGADLNLMPI

SEQ ID NO: 25031 - protein, 469 aa, Artificial Sequence
  derived and/or modified protein sequence (wt) from neuraminidase__InfluenzaA__AHL99632
MNPNQKIITIGSVSLTISTICFFMQIAILITTVTLHFKQYEFNSPPNNQVMLCEPTTIERNITEIVYLTNTTIEKEICPKPAEYRNWSKPQCGITGFAPFSKDNSIRLSAGGDIWVTREPYVSCDPDKCYQFALGQGTTLNNVHSNNTVRDRTPYRTLLMNELGVPFHLGTKQVCIAWSSSSCHDGKAWLHVCITGDDKNATASFIYNGRLVDSVVSWSKEILRTQESECVCINGTCTVVMTDGSASGKADTKILFIEEGKIVHTSTLSGSAQHVEECSCYPRYPGVRCVCRDNWKGSNRPIVDINIKDHSIVSSYVCSGLVGDTPRKNDSSSSSHCLDPNNEEGGHGVKGWAFDDGNDVWMGRTINETSRLGYETFKVIEGWSNPKSKLQINRQVIVDRGDRSGYSGIFSVEGKSCINRCFYVELIRGRKEETEVLWTSNSIVVFCGTSGTYGTGSWPDGADLNLMPI

SEQ ID NO: 25032 - protein, 469 aa, Artificial Sequence; identical to SEQ ID NO: 24821
  derived and/or modified protein sequence (wt) from neuraminidase__InfluenzaA__AHL99644

SEQ ID NO: 25033 - protein, 469 aa, Artificial Sequence
  derived and/or modified protein sequence (wt) from neuraminidase__InfluenzaA__AHL99668
MNPNQKIITIGSVSLTISTICFFMQIAILITTVTLHFKQYEFNSPPNNQVMLCEPTIIERNITEIVYLTNTTVEKEICPKPAEYRNWSKPQCGITGFAPFSKDNSIRLSAGGDIWVTREPYVSCDPDKCYQFALGQGTTLNNVHSNNTVRDRTPYRTLLMNELGVPFHLGTKQVCIAWSSSSCHDGKAWLHVCITGDDKNATASFIYNGRLVDSVVSWSKEILRTQESECVCINGTCTVVMTDGSASGKADTKILFIEEGKIVHTSTLSGSAQHVEECSCYPRYPGVRCVCRDNWKGSNRPIIDINIKDHSIVSSYVCSGLVGDTPRKNDSSSSSHCLDPNNEEGGHGVKGWAFDDGNDVWMGRTINETSRLGYETFKVIEGWSNPKSKLQINRQVIVDRGDRSGYSGIFSVEGKSCINRCFYVELIRGRKEETEVLWTSNSIVVFCGTSGTYGTGSWPDGADLNLMPI

SEQ ID NO: 25034 - protein, 469 aa, Artificial Sequence; identical to SEQ ID NO: 22146
  derived and/or modified protein sequence (wt) from neuraminidase__InfluenzaA__AHL99680

SEQ ID NO: 25035 - protein, 469 aa, Artificial Sequence
  derived and/or modified protein sequence (wt) from neuraminidase__InfluenzaA__AHL99692
MNPNQKIITIGSVSLTISTTCFFMQIAILITTVTLHFKQYEFNSPPNNQVMLCEPTIIERNITEIVYLTNTTIEKEICPKPAEYRNWSKPQCGITGFAPFSKDNSIRLSAGGDIWVTREPYVSCDPDKCYQFALGQGTTLNNVHSNNTVRDRTPYRTLLMNELGVPFHLGTKQVCIAWSSSSCHDGKAWLHVCITGDDKNATASFIYNGRLVDSVVSWSKEILRTQESECVCINGTCTVVMTDGSASGKADTKILFIEEGKIVHTSTLSGSAQHVEECSCYPRYPGVRCVCRDNWKGSNRPIVDINIKDHSIVSSYVCSGLVGDTPRKNDSSSSSHCLDPNNEEGGHGVKGWAFDDGNDVWMGRTINETSRLGYETFKVIEGWSNPKSKLQINRQVIVDRGDRSGYSGIFSVEGKSCINRCFYVELIRGRKEETEVLWTSNSIVVFCGTSGTYGTGSWPDGADLNLMPI

SEQ ID NO: 25036 - protein, 469 aa, Artificial Sequence; identical to SEQ ID NO: 22146
  derived and/or modified protein sequence (wt) from neuraminidase__InfluenzaA__AHL99704

SEQ ID NO: 25037 - protein, 469 aa, Artificial Sequence; identical to SEQ ID NO: 22146
  derived and/or modified protein sequence (wt) from neuraminidase__InfluenzaA__AHL99716

SEQ ID NO: 25038 - protein, 469 aa, Artificial Sequence; identical to SEQ ID NO: 25028
  derived and/or modified protein sequence (wt) from neuraminidase__InfluenzaA__AHL99740

SEQ ID NO: 25039 - protein, 469 aa, Artificial Sequence
  derived and/or modified protein sequence (wt) from neuraminidase__InfluenzaA__AHL99751
MNPNQKIITIGSVSLTISTICFFMQIAILITTVTLHFKQYEFNSPPNNQVMLCEPTIIERNITEIVYLTNTTVEKEICPKPAEYRNWSKPQCGITGFAPFSKDNSIRLSAGGDIWVTREPYVSCDPDKCYQFALGQGTTLNNVHSNNTARDRTPYRTLLMNELGVPFHLGTKQVCIAWSSSSCHDGKAWLHVCITGDDKNATASFIYNGRLVDSVVSWSKEILRTQESECVCINGTCTVVMTDGSASGKADTKILFIEEGKIVHTSTLSGSAQHVEECSCYPRYPGVRCVCRDNWKGSNRPIVDINIKDHSIVSSYVCSGLVGDTPRKNDSSSSSHCLNPNNEEGGHGVKGWAFDDGNDVWMGRTINETSRLGYETFKVIEGWSNPKSKLQINRQVIVDRGDRSGYSGIFSVEGKSCINRCFYVELIRGRKEETEVLWTSNSIVVFCGTSGTYGTGSWPDGADLNLMPI

SEQ ID NO: 25040 - protein, 469 aa, Artificial Sequence
  derived and/or modified protein sequence (wt) from neuraminidase__InfluenzaA__AHL99763
MNPNQKIITIGSVSLTISTICFFMQIAILITTVTLHFKQYEFNSPPNNQVMLCEPTIIERNITEIVYLTNTTIEKEICPKPAEYRNWSKPQCGITGFAPFSKDNSIRLSAGGDIWVTREPYVSCDPDKCYQFALGQGTTLNNVHSNNTVRDRTPYRTLLMNELGVPFHLGTKQVCIAWSSSSCHDGKAWLHVCITGDDKNATASFIYNGRLVDSVVSWSKEILRTQESECVCINGTCTVVMTDGSASGKADTKILFIEEGKIVHTSTLSGSAQHVEECSCYPRYPGVRCVCRDNWKGSNRPIVDINIKDHSIVSSYVCSGLVGDTPRKNDSSSSSHCLDPNNEEGGHGVKGWAFDDGNDVWMGRTINETSRLGYETFKVIEGWSNPKSKLQMNRQVIVDRGDRSGYSGIFSVEGKSCINRCFYVELIRGRKEETEVLWTSNSIVVFCGTSGTYGTGSWPDGADLNLMPI

SEQ ID NO: 25041 - protein, 469 aa, Artificial Sequence; identical to SEQ ID NO: 22146
  derived and/or modified protein sequence (wt) from neuraminidase__InfluenzaA__AHL99775

SEQ ID NO: 25042 - protein, 469 aa, Artificial Sequence
  derived and/or modified protein sequence (wt) from neuraminidase__InfluenzaA__AHL99787
MNPNQKIITIGSVSLTISTICFFMQIAILITTVTLHFKQYEFNSPPNNQVMLCEPTIIERNITEIVYLTNTTIEKEICPKPAEYRNWSKPQCGITGFAPFSKDNSIRLSAGGDIWVTREPYVSCDPDKCYQFALGQGTTLNNVHSNNTVRDRTPYRTLLMNELGVPFHLGTKQVCIAWSSSSCHDGKAWLHVCITGDDKNATASFIYNGRLVDSVVSWSKEILRTQESECVCINGTCTVVMTDGSASGKADTKILFIEEGKIVHTSTLSGSAQHVEECSCYPRYPGVRCVCRDNWKGSNRPIVDINIKDHSIVSSYVCSGLVGDTPRKNDSSSSSHCLDPNNEEGGHGVKGWAFDDGNDVWMGRTINETSRLGYETFKVIEGWSNPESKLQINRQVIVDRGDRSGYSGIFSVEGKSCINRCFYVELIRGRKEETEVLWTSNSIVVFCGTSGTYGTGSWPDGADLNLMPI

SEQ ID NO: 25043 - protein, 469 aa, Artificial Sequence
  derived and/or modified protein sequence (wt) from neuraminidase__InfluenzaA__AHL99799
MNPNQKIITIGSVSLTISTICFFMQIAILITTVTLHFKQYEFNSPPNNQVMLCEPTIIERNITEIVYLTNTTIEKEICPKPAEYRNWSKPQCGITGFAPFSKDNSIRLSAGGDIWVTREPYVSCDPDKCYQFALGQGTTLNNVHSNNTVRDRTPYRTLLMNELGVPFHLGTKQVCIAWSSSSCHDGKAWLHVCITGDDKNATASFIYNGRLVDSVVSWSKEILRTQESECVCINGTCTVVMTDGSASGKADTKILFIEEGKIVHTSTLSGSAQHVEECSCYPRYPGVRCICRDNWKGSNRPIVDINIKDHSIVSSYVCSGLVGDTPRKNDSSSSSHCLGPNNEEGGHGVKGWAFDDGNDVWMGRTINETSRLGYETFKVIEGWSNPKSKLQINRQVIVDRGDRSGYSGIFSVEGKSCINRCFYVELIRGRKEETEVLWTSNSIVVFCGTSGTYGTGSWPDGADLNLMPI

SEQ ID NO: 25044 - protein, 469 aa, Artificial Sequence; identical to SEQ ID NO: 22146
  derived and/or modified protein sequence (wt) from neuraminidase__InfluenzaA__AHL99811

SEQ ID NO: 25045 - protein, 469 aa, Artificial Sequence
  derived and/or modified protein sequence (wt) from neuraminidase__InfluenzaA__AHL99823
MNPNQKIITIGSVSLTISTICFFMQIAILITTVTLHFKQYEFNSPPNNQVMLCEPTIIERNITEIVYLTNTTIEKEICPKPAEYRNWSKPQCGITGFAPFSKDNSIRLSAGGDIWVTREPYVSCDPDKCYQFALGQGTTLNNVHSNNTVRDRTPYRTLLMNELGVPFHLGTKQVCIAWSSSSCHDGKAWLHVCITGDDKNATASFIYNGRLVDSVVSWSKEILRTQESECVCINGTCAVVMTDGSASGKADTKILFIEEGKIVHTSTLSGSAQHVEECSCYPRYPGVRCVCRDNWKGSNRPIVDINIKDHSIVSSYVCSGLVGDTPRKNDSSSSSHCLDPNNEEGGHGVKGWAFDDGNDVWMGRTINETSRLGYETFKVIEGWSNPKSKLQINRQVIVDRGDRSGYSGIFSVEGKSCINRCFYVELIRGRKEETEVLWTSNSIVVFCGTSGTYGTGSWPDGADLNLMPI

SEQ ID NO: 25046 - protein, 469 aa, Artificial Sequence
  derived and/or modified protein sequence (wt) from neuraminidase__InfluenzaA__AHL99835
MNPNQKIITIGSVSLTISTICFFMQIAILITTVTLHFKQYEFNSPPNNQVMLCEPTIIERNITEIVYLTNTTIEKEICPKPAEYRNWSKPQCGITGFAPFSKDNSIRLSAGGDIWVTREPYVSCAPDKCYQFALGQGTTLNNVHSNNTVRDRTPYRTLLMNELGVPFHLGTKQVCIAWSSSSCHDGKAWLHVCITGDDKNATASFIYNGRLVDSVVSWSKEILRTQESECVCINGTCTVVMTDGSASGKADTKILFIEEGKIVHTSTLSGSAQHVEECSCYPRYPGVRCVCRDNWKGSNRPIVDINIKDHSIVSSYVCSGLVGDTPRKNDSSSSSHCLDPNNEEGGHGVKGWAFDDGNDVWMGRTINETSRLGYETFKVIEGWSNPKSKLLINRQVIVDRGDRSGYSGIFSVEGKSCINRCFYVELIRGRKEETEVLWTSNSIVVFCGTSGTYGTGSWPDGADLNLMPI

SEQ ID NO: 25047 - protein, 469 aa, Artificial Sequence; identical to SEQ ID NO: 22146
  derived and/or modified protein sequence (wt) from neuraminidase__InfluenzaA__AHL99847

SEQ ID NO: 25048 - protein, 469 aa, Artificial Sequence; identical to SEQ ID NO: 23375
  derived and/or modified protein sequence (wt) from neuraminidase__InfluenzaA__AHL99859

SEQ ID NO: 25049 - protein, 469 aa, Artificial Sequence
  derived and/or modified protein sequence (wt) from neuraminidase__InfluenzaA__AHL99871
MNPNQKIITIGSVSLTISTICFFMQIAILTTTVTLHFKQYEFNSPPNNQVMLCEPTIIERNITEIVYLTNTTIEKEICPKPAEYRNWSKPQCDITGFAPFSKDNSIRLSAGGDIWVTREPYVSCDPDKCYQFALGQGTTLNNVHSNNTVRDRTPYRTLLMNELGVPFHLGTKQVCIAWSSSSCHDGKAWLHVCITGDDKNATASFIYNGRLVDSVVSWSKEILRTQESECVCINGTCTVVMTDGSASGKADTKILFIEEGRIVHTSTLSGSAQHVEECSCYPRYPGVRCVCRDNWKGSNRPIVDINIKDHSIVSRYVCSGLVGDTPRKNDSSSSSHCLDPNNEEGGHGVKGWAFDDGNDVWMGRTINETSRLGYETFKVIEGWSNPKSKLQINRQVIVDRGDRSGYSGIFSVEGKSCINRCFYVELIRGRKEETEVLWTSNSIVVFCGTSGTYGTGSWPDGADLNLMPI

SEQ ID NO: 25050 - protein, 469 aa, Artificial Sequence; identical to SEQ ID NO: 22146
  derived and/or modified protein sequence (wt) from neuraminidase__InfluenzaA__AHL99883

SEQ ID NO: 25051 - protein, 469 aa, Artificial Sequence; identical to SEQ ID NO: 25027
  derived and/or modified protein sequence (wt) from neuraminidase__InfluenzaA__AHL99895

SEQ ID NO: 25052 - protein, 469 aa, Artificial Sequence; identical to SEQ ID NO: 22146
  derived and/or modified protein sequence (wt) from neuraminidase__InfluenzaA__AHL99907

SEQ ID NO: 25053 - protein, 469 aa, Artificial Sequence; identical to SEQ ID NO: 22146
  derived and/or modified protein sequence (wt) from neuraminidase__InfluenzaA__AHL99919

SEQ ID NO: 25054 - protein, 469 aa, Artificial Sequence
  derived and/or modified protein sequence (wt) from neuraminidase__InfluenzaA__AHL99943
MNPNQKIITIGSVSLTISTICFFMQIAILITTVTLHFKQHEFNSPPNNQVMLCEPTIIERNITEIVYLTNTTIEKEICPKPAEYRNWSKPQCGITGFAPFSKDNSIRLSAGGDIWVTREPYVSCDPDKCYQFALGQGTTLNNVHSNNTVRDRTPYRTLLMNELGVPFHLGTKQVCIAWSSSSCHDGKAWLHVCITGDDKNATASFIYNGRLVDSVVSWSKEILRTQESECVCINGTCTVVMTDGSASGKADTKILFIEEGKIVHTSTLSGSAQHVEECSCYPRYPGVRCVCRDNWKGSNRPIVDINIKDHSIVSSYVCSGLVGDTPRKNDSSSSSHCLDPNNEEGGHGVKGWAFDDGNDVWMGRTINETSRLGYETFKVIEGWSNPKSKLQINRQVIVDRGDRSGYSGIFSVEGKSCINRCFYVELIRGRKEETEVLWTSNSIVVFCGTSGTYGTGSWPDGADLNLMPI

SEQ ID NO: 25055 - protein, 469 aa, Artificial Sequence; identical to SEQ ID NO: 22146
  derived and/or modified protein sequence (wt) from neuraminidase__InfluenzaA__AHL99955

SEQ ID NO: 25056 - protein, 469 aa, Artificial Sequence
  derived and/or modified protein sequence (wt) from neuraminidase__InfluenzaA__AHL99967
MNPNQKIITIGSVSLTISTICFFMQIAILITTVTLHFKQYEFNSPPNNQVMLCEPTIIERNITEIVYLTNTTIEKEICPKPAEYRNWSKPQCGITGFAPFSKDNSIRLSAGGDIWVTREPYVSCDPDKCYQFALGQGTTLNNVHSNNTVHDRTPYRTLLMNELGVPFHLGTKQVCIAWSSSSCHDGKAWLHVCITGDDKNATASFIYNGRLVDSVVSWSKEILRTQESECVCINGTCTVVMTDGSASGKADTKILFIEEGKIVHTSTLSGSAQHVEECSCYPRYPGVRCVCRDNWKGSNRPIVDINMKDHSIVSSYVCSGLVGDTPRKNDSSSSSHCLDPNNEEGGHGVKGWAFDDGNDVWMGRTINETSRLGYETFKVIEGWSNPKSKLQINRQVIVDRGDRSGYSGIFSVEGKSCINRCFYVELIRGRKEETEVLWTSNSIVVFCGTSGTYGTGSWPDGADLNLMPI

SEQ ID NO: 25057 - protein, 469 aa, Artificial Sequence
  derived and/or modified protein sequence (wt) from neuraminidase__InfluenzaA__AHL99979
MNPNQKIITIGSVSLTISTICFFMQIAILITTVALHFKQHEFNSPPNNQVMLCEPTIIERNITEIVYLTNTTIEKEICPKPAEYRNWSKPQCGITGFAPFSKDNSIRLSAGGDIWVTREPYVSCDPDKCYQFALGQGTTLNNVHSNNTVRDRTPYRTLLMNELGVPFHLGTKQVCIAWSSSSCHDGKAWLHVCITGDDKNATASFIYNGRLVDSVVSWSKEILRTQESECVCINGTCTVVMTDGSASGKADTKILFIEEGKIVHTSTLSGSAQHVEECSCYPRYPGVRCVCRDNWKGSNRPIVDINIKDHSIVSSYVCSGLVGDTPRKNDSSSSSHCLDPNNEEGGHGVKGWAFDDGNDVWMGRTINETSRLGYETFKVIEGWSNPKSKLQINRQVIVDRGDRSGYSGIFSVEGKSCINRCFYVELIRGRKEETEVLWTSNSIVVFCGTSGTYGTGSWPDGADLNLMPI

SEQ ID NO: 25058 - protein, 469 aa, Artificial Sequence; identical to SEQ ID NO: 25054
  derived and/or modified protein sequence (wt) from neuraminidase__InfluenzaA__AHL99991

SEQ ID NO: 25059 - protein, 469 aa, Artificial Sequence; identical to SEQ ID NO: 22146
  derived and/or modified protein sequence (wt) from neuraminidase__InfluenzaA__AHM00004

SEQ ID NO: 25060 - protein, 469 aa, Artificial Sequence; identical to SEQ ID NO: 22146
  derived and/or modified protein sequence (wt) from neuraminidase__InfluenzaA__AHM00016

SEQ ID NO: 25061 - protein, 469 aa, Artificial Sequence; identical to SEQ ID NO: 22146
  derived and/or modified protein sequence (wt) from neuraminidase__InfluenzaA__AHM00028

SEQ ID NO: 25062 - protein, 469 aa, Artificial Sequence; identical to SEQ ID NO: 25054
  derived and/or modified protein sequence (wt) from neuraminidase__InfluenzaA__AHM00040

SEQ ID NO: 25063 - protein, 469 aa, Artificial Sequence; identical to SEQ ID NO: 22146
  derived and/or modified protein sequence (wt) from neuraminidase__InfluenzaA__AHM00052

SEQ ID NO: 25064 - protein, 469 aa, Artificial Sequence; identical to SEQ ID NO: 23010
  derived and/or modified protein sequence (wt) from neuraminidase__InfluenzaA__AHM00064

SEQ ID NO: 25065 - protein, 469 aa, Artificial Sequence; identical to SEQ ID NO: 22146
  derived and/or modified protein sequence (wt) from neuraminidase__InfluenzaA__AHM00076

SEQ ID NO: 25066 - protein, 469 aa, Artificial Sequence; identical to SEQ ID NO: 22146
  derived and/or modified protein sequence (wt) from neuraminidase__InfluenzaA__AHM00088

SEQ ID NO: 25067 - protein, 469 aa, Artificial Sequence
  derived and/or modified protein sequence (wt) from neuraminidase__InfluenzaA__AHM00100
MNPNQKIITIGSICMTIGMANLILQIGNIISIWISHSIQLGNQSQIETCNQSVITYENNTWVNQTYVNISNTNFAAGQSVVSVKLAGNSSLCPVSGWAIYSKDNSIRIGSKGDVFVIREPFISCSPLECRTFFLTQGALLNDKHSNGTIKDRSPYRTLMSCPIGEVPSPYNSRFESVAWSASACHDGINWLTIGISGPDNGAVAVLKYNGVITDTIKSWRNNILRTQESECACVNGSCFTIMTDGPSDGQASYKIFRIEKGKIVKSVEMNAPNYHYEECSCYPDSSEITCVCRDNWHGSNRPWVSFNQNLEYQIGYICSGIFGDNPRPNDKTGSCGPVSSNGANGVKGFSFKYGNGVWIGRTKSISSRKGFEMIWDPNGWTGTDNNFSTKQDIVGINEWSGYSGSFVQHPELTGLDCIRPCFWVELIRGRPKENTIWTSGSSISFCGVNSDTVGWSWPDGAELPFTIDN

SEQ ID NO: 25068 - protein, 469 aa, Artificial Sequence; identical to SEQ ID NO: 24990
  derived and/or modified protein sequence (wt) from neuraminidase__InfluenzaA__AHM00111

SEQ ID NO: 25069 - protein, 469 aa, Artificial Sequence; identical to SEQ ID NO: 25054
  derived and/or modified protein sequence (wt) from neuraminidase__InfluenzaA__AHM00123

SEQ ID NO: 25070 - protein, 469 aa, Artificial Sequence; identical to SEQ ID NO: 23375
  derived and/or modified protein sequence (wt) from neuraminidase__InfluenzaA__AHM00135

SEQ ID NO: 25071 - protein, 469 aa, Artificial Sequence; identical to SEQ ID NO: 23883
  derived and/or modified protein sequence (wt) from neuraminidase__InfluenzaA__AHM00147

SEQ ID NO: 25072 - protein, 469 aa, Artificial Sequence; identical to SEQ ID NO: 25054
  derived and/or modified protein sequence (wt) from neuraminidase__InfluenzaA__AHM00159

SEQ ID NO: 25073 - protein, 469 aa, Artificial Sequence; identical to SEQ ID NO: 22146
  derived and/or modified protein sequence (wt) from neuraminidase__InfluenzaA__AHM00171

SEQ ID NO: 25074 - protein, 469 aa, Artificial Sequence; identical to SEQ ID NO: 22146
  derived and/or modified protein sequence (wt) from neuraminidase__InfluenzaA__AHM00183

SEQ ID NO: 25075 - protein, 469 aa, Artificial Sequence
  derived and/or modified protein sequence (wt) from neuraminidase__InfluenzaA__AHM00195
MNPNQKIITIGSVSLTISTICFFMQIAILITTVTLHFKQYEFNSPPNNQVMLCEPTIIERNITEIVYLTNTTIEKEICPKPAEYRNWSKPQCDITGFAPFSKDNSIRLSAGGDIWVTREPYVSCDPDKCYQFALGQGTTLNNVHSNNTVRDRTPYRTLLMNELGVPFHLGTKQVCIAWSSSSCHDGKAWLHVCITGDDKNATASFIYNGRLVDSVVSWSKEILRTQESECVCINGTCTVVMTDGSASGKADTKVLFIEEGKIVHTSTLSGSAQHVEECSCYPRYPGVRCVCRDNWKGSNRPIVDINIKDHSIVSRYVCSGLVGDTPRKNDSSSSSHCLDPNNEEGGHGVKGWAFDDGNDVWMGRTINETSRLGYETFKVIEGWSNPKSKLQINRQVIVDRGDRSGYSGIFSVEGKSCINRCFYVELIRGRKEETEVLWTSNSIVVFCGTSGTYGTGSWPDGADLNLMPI

SEQ ID NO: 25076 - protein, 469 aa, Artificial Sequence
  derived and/or modified protein sequence (wt) from neuraminidase__InfluenzaA__AHM00207
MNPNQKIITIGSVSLTISTICFFMQIAILITTVTLHFKQHEFNSPPNNQVMLCEPTIIERNITEIVYLTNTTIEKEICPKPAEYRNWSKPQCGITGFAPFSKDNSIRLSAGGNIWVTREPYVSCDPDKCYQFALGQGTTLNNVHSNNTVRDRTPYRTLLMNELGVPFHLGTKQVCIAWSSSSCHDGKAWLHVCITGDDKNATASFIYNGRLVDSVVSWSKEILRTQESECVCINGTCTVVMTDGSASGKADTKILFIEEGKIVHTSTLSGSAQHVEECSCYPRYPGVRCVCRDNWKGSNRPIVDINIKDHSIVSSYVCSGLVGDTPRKNDSSSSSHCLDPNNEEGGHGVKGWAFDDGNDVWMGRTINETSRLGYETFKVIEGWSNPKSKLQINRQVIVDRGDRSGYSGIFSVEGKSCINRCFYVELIRGRKEETEVLWTSNSIVVFCGTSGTYGTGSWPDGADLNLMPI

SEQ ID NO: 25077 - protein, 469 aa, Artificial Sequence; identical to SEQ ID NO: 25054
  derived and/or modified protein sequence (wt) from neuraminidase__InfluenzaA__AHM00219

SEQ ID NO: 25078 - protein, 469 aa, Artificial Sequence; identical to SEQ ID NO: 22146
  derived and/or modified protein sequence (wt) from neuraminidase__InfluenzaA__AHM00231

SEQ ID NO: 25079 - protein, 469 aa, Artificial Sequence; identical to SEQ ID NO: 22146
  derived and/or modified protein sequence (wt) from neuraminidase__InfluenzaA__AHM00243

SEQ ID NO: 25080 - protein, 469 aa, Artificial Sequence; identical to SEQ ID NO: 22146
  derived and/or modified protein sequence (wt) from neuraminidase__InfluenzaA__AHM00255

SEQ ID NO: 25081 - protein, 469 aa, Artificial Sequence
  derived and/or modified protein sequence (wt) from neuraminidase__InfluenzaA__AHM00267
MNPNQKIITIGSVSLTISTICFFMQIAILITTVTLHFKQYEFNSPPNNQVMLCEPTIIERNITEIVYLTNTTIEKEICPKPAEYRNWSKPQCGITGFAPFSKDNSIRLSAGGDIWVTREPYVSCDPDKCYQFALGQGTTLNNVHSNNTVRDRTPYRTLLMNELGVPFHLGTKQVCIAWSSSSCHDGKAWLHVCITGDDKNATASFIYNGRLVDSVASWSKEILRTQESECVCINGTCTVVMTDGSASGKADTKILFIEEGKIVHTSTLSGSAQHVEECSCYPRYPGVRCVCRDNWKGSNRPIVDINIKDHSIVSSYVCSGLVGDTPRKNDSSSSSHCLDPNNEEGGHGVKGWAFDDGNDVWMGRTINETSRLGYETFKVIEGWSNPKSKLQINRQVIVDRGDRSGYSGIFSVEGKSCINRCFYVELIRGRKEETEVLWTSNSIVVFCGTSGTYGTGSWPDGADLNLMPI

SEQ ID NO: 25082 - protein, 469 aa, Artificial Sequence; identical to SEQ ID NO: 23375
  derived and/or modified protein sequence (wt) from neuraminidase__InfluenzaA__AHM00279

SEQ ID NO: 25083 - protein, 469 aa, Artificial Sequence; identical to SEQ ID NO: 22146
  derived and/or modified protein sequence (wt) from neuraminidase__InfluenzaA__AHM00291

SEQ ID NO: 25084 - protein, 469 aa, Artificial Sequence; identical to SEQ ID NO: 22146
  derived and/or modified protein sequence (wt) from neuraminidase__InfluenzaA__AHM00303

SEQ ID NO: 25085 - protein, 469 aa, Artificial Sequence; identical to SEQ ID NO: 22146
  derived and/or modified protein sequence (wt) from neuraminidase__InfluenzaA__AHM00315

SEQ ID NO: 25086 - protein, 469 aa, Artificial Sequence; identical to SEQ ID NO: 23375
  derived and/or modified protein sequence (wt) from neuraminidase__InfluenzaA__AHM00327

SEQ ID NO: 25087 - protein, 469 aa, Artificial Sequence; identical to SEQ ID NO: 23375
  derived and/or modified protein sequence (wt) from neuraminidase__InfluenzaA__AHM00339

SEQ ID NO: 25088 - protein, 469 aa, Artificial Sequence; identical to SEQ ID NO: 25054
  derived and/or modified protein sequence (wt) from neuraminidase__InfluenzaA__AHM00351

SEQ ID NO: 25089 - protein, 469 aa, Artificial Sequence; identical to SEQ ID NO: 24990
  derived and/or modified protein sequence (wt) from neuraminidase__InfluenzaA__AHM00363

SEQ ID NO: 25090 - protein, 469 aa, Artificial Sequence
  derived and/or modified protein sequence (wt) from neuraminidase__InfluenzaA__AHM00375
MNPNQKIITIGSVSLTISTICFFMQIAILITTVTLHFKQHEFNSPPNNQVMLCEPTIIERNITEIVYLTNTTIEKEVCPKPAEYRNWSKPQCGITGFAPFSKDNSIRLSAGGDIWVTREPYVSCDPDKCYQFALGQGTTLNNVHSNNTVRDRTPYRTLLMNELGVPFHLGTKQVCIAWSSSSCHDGKAWLHVCITGDDKNATASFIYNGRLVDSVVSWSKEILRTQESECVCINGTCTVVMTDGSASGKADTKILFIEEGKIVHTSTLSGSAQHVEECSCYPRYPGVRCVCRDNWKGSNRPIVDINIKDHSIVSSYVCSGLVGDTPRKNDSSSSSHCLDPNNEEGGHGVKGWAFDDGNDVWMGRTINETSRLGYETFKVIEGWSNPKSKLQINRQVIVDRGDRSGYSGIFSVEGKSCINRCFYVELIRGRKEETEVLWTSNSIVVFCGTSGTYGTGSWPDGADLNLMPI

SEQ ID NO: 25091 - protein, 469 aa, Artificial Sequence
  derived and/or modified protein sequence (wt) from neuraminidase__InfluenzaA__AHM00398
MNPNQKIITIGSVSLTISTICFFMQIAILITTVTLHFKQHEFNSPPNNQVMLCEPTIIERNITEIVYLTNTTIEKEICPKPAEYRNWSKPQCGITGFAPFSKENSIRLSAGGDIWVTREPYVSCDPDKCYQFALGQGTTLNNVHSNNTVRDRTPYRTLLMNELGVPFHLGTKQVCIAWSSSSCHDGKAWLHVCITGDDKNATASFIYNGRLVDSVVSWSKEILRTQESECVCINGTCTVVMTDGSASGKADTKILFIEEGKIVHTSTLSGSAQHVEECSCYPRYPGVRCVCRDNWKGSNRPIVDINIKDHSIVSSYVCSGLVGDTPRKNDSSSSSHCLDPNNEEGGHGVKGWAFDDGNDVWMGRTINETSRLGYETFKVIEGWSNPKSKLQINRQVIVDRGDRSGYSGIFSVEGKSCINRCFYVELIRGRKEETEVLWTSSSIVVFCGTSGTYGTGSWPDGADLNLMPI

SEQ ID NO: 25092 - protein, 469 aa, Artificial Sequence; identical to SEQ ID NO: 22146
  derived and/or modified protein sequence (wt) from neuraminidase__InfluenzaA__AHM00410

SEQ ID NO: 25093 - protein, 469 aa, Artificial Sequence
  derived and/or modified protein sequence (wt) from neuraminidase__InfluenzaA__AHM00422
MNPNQKIITIGSVSLTISTICFFMQIAILVTTVTLHFKQYEFNSPPNNQVMLCEPTIIERNITEIVYLTNTTIEKEICPKPAEYRNWSKPQCGITGFAPFSKDNSIRLSAGGDIWVTREPYVSCDPDKCYQFALGQGTTLNNVHSNNTVRDRTPYRTLLMNELGVPFHLGTKQVCIAWSSSSCHDGKAWLHVCITGDDKNATASFIYNGRLVDSVVSWSKEILRTQESECVCINGTCTVVMTDGSASGKADTKILFIEEGKIVHTSTLSGSAQHVEECSCYPRYPGVRCVCRDNWKGSNRPIVDINIKDHSIVSSYVCSGLVGDTPRKNDSSSSSHCLDPNNEEGGHGVKGWAFDDGNDVWMGRTINETSRLGYETFKVIEGWSNPKSKLQINRQVIVDRGDRSGYSGIFSVEGKSCINRCFYVELIRGRKEETEVLWTSNSIVVFCGTSGTYGTGSWPDGADLNLMPI

SEQ ID NO: 25094 - protein, 469 aa, Artificial Sequence
  derived and/or modified protein sequence (wt) from neuraminidase__InfluenzaA__AHM00434
MNPNQKIITIGSVSLTISTICFFMQIAILITTVTLHFKQYEFNPPPNNQVMLCEPTIIERNITEIVYLTNTTIEKEICPKPAEYRNWSKPQCGITGFAPFSKDNSIRLSAGGDIWVTREPYVSCDPDKCYQFALGQGTTLNNVHSNNTVRDRTPYRTLLMNELGVPFHLGTKQVCIAWSSSSCHDGKAWLHVCITGDDKNATASFIYNGRLVDSVVSWSKEILRTQESECVCINGTCTVVMTDGSASGKADTKILFIEEGKIVHTSTLSGSAQHVEECSCYPRYPGVRCVCRDNWKGSNRPIVDINIKDHSIVSSYVCSGLVGDTPRKNDSSSSSHCLDPNNEEGGHGVKGWAFDDGNDVWMGRTINETSRLGYETFKVIEGWSNPKSKLQINRQVIVDRGDRSGYSGIFSVEGKSCINRCFYVELIRGRKEETEVLWTSNSIVVFCGTSGTYGTGSWPDGADLNLMPI

SEQ ID NO: 25095 - protein, 469 aa, Artificial Sequence; identical to SEQ ID NO: 22146
  derived and/or modified protein sequence (wt) from neuraminidase__InfluenzaA__AHM00446

SEQ ID NO: 25096 - protein, 469 aa, Artificial Sequence; identical to SEQ ID NO: 25054
  derived and/or modified protein sequence (wt) from neuraminidase__InfluenzaA__AHM00458

SEQ ID NO: 25097 - protein, 469 aa, Artificial Sequence; identical to SEQ ID NO: 25054
  derived and/or modified protein sequence (wt) from neuraminidase__InfluenzaA__AHM00470

SEQ ID NO: 25098 - protein, 469 aa, Artificial Sequence; identical to SEQ ID NO: 25054
  derived and/or modified protein sequence (wt) from neuraminidase__InfluenzaA__AHM00482

SEQ ID NO: 25099 - protein, 469 aa, Artificial Sequence; identical to SEQ ID NO: 25054
  derived and/or modified protein sequence (wt) from neuraminidase__InfluenzaA__AHM00494

SEQ ID NO: 25100 - protein, 469 aa, Artificial Sequence
  derived and/or modified protein sequence (wt) from neuraminidase__InfluenzaA__AHM00506
MNPNQKIITIGSVSLTISTICFFMQIAILITTVTLHFKQYEFNSPPNNQVMLCEPTIIERNITEIVYLTNTTIEKEICPKPAEYRNWSKPQCGITGFAPFSKDNSIRLSAGGDIWVTREPYVSCDPDKCYQFALGQGTTLNNVHSNNTVRDRTPYRTLLMNELGVPFHLGTKQVCIAWSSSSCHDGKAWLHVCITGDDKNATASFIYNGRLVDSVVSWSKEILRTQESECVCINGTCTVVMTDGSASGKADTKILFIEEGKIVHTSTLSGSAQHVEECSCYPRYPGVRCVCRDNWKGSNRPIVDINIKDHSIVSSYVCSGLVGDTPRKNDSSSSSHCLDPNNEEGGHGVKGWAFDDGNDVWMGRTINETSRLGYETFKVIEGWSNPKSKLQINRQVIVNRGDRSGYSGIFSVEGKSCINRCFYVELIRGRKEETEVLWTSNSIVVFCGTSGTYGTGSWPDGADLNLMPI

SEQ ID NO: 25101 - protein, 469 aa, Artificial Sequence; identical to SEQ ID NO: 22146
  derived and/or modified protein sequence (wt) from neuraminidase__InfluenzaA__AHM00518

SEQ ID NO: 25102 - protein, 469 aa, Artificial Sequence
  derived and/or modified protein sequence (wt) from neuraminidase__InfluenzaA__AHM00530
MNPNQKIITIGSVSLTISTICFSMQIAILITTVTLHFKQYEFNPPPNNQVMLCEPTIIERNITEIVYLTNTTIEKEICPKPAEYRNWSKPQCGITGFAPFSKDNSIRLSAGGDIWVTREPYVSCDPDKCYQFALGQGTTLNNVHSNNTVRDRTPYRTLLMNELGVPFHLGTKQVCIAWSSSSCHDGKAWLHVCITGDDKNATASFIYNGRLVDSVVSWSKEILRTQESECVCINGTCTVVMTDGSASGKADTKILFIEEGKIVHTSTLSGSAQHVEECSCYPRYPGVRCVCRDNWKGSNRPIVDINIKDHSIVSSYVCSGLVGDTPRKNDSSSSSHCLDPNNEEGGHGVKGWAFDDGNDVWMGRTINETSRLGYETFKVIEGWSNPKSKLQINRQVIVDRGDRSGYSGIFSVEGKSCINRCFYVELIRGRKEETEVLWTSNSIVVFCGTSGTYGTGSWPDGADLNLMPI

SEQ ID NO: 25103 - protein, 469 aa, Artificial Sequence; identical to SEQ ID NO: 23375
  derived and/or modified protein sequence (wt) from neuraminidase__InfluenzaA__AHM00542

SEQ ID NO: 25104 - protein, 469 aa, Artificial Sequence
  derived and/or modified protein sequence (wt) from neuraminidase__InfluenzaA__AHM00546
MNPNQKIITIGSVSLTISTICFFMQIAILITTVTLHFKQYEFNSPPNNQVMLCEPTIIERNITEIVYLTNTTIEKEICPKPAEYRNWSKPQCDITGFAPFSKDNSIRLSAGGDIWVTREPYVSCDPDKCYQFALGQGTTLNNVHSNNTVRDRTPYRTLLMNELGVPFHLGTKQVCIAWSSSSCHDGKAWLHVCITGDDKNATASFIYNGRLVDSVVSWSKEILRTQESECVCINGTCTVVMTDGSASGKADTKILFIEEGKIVHTSTLSGSAQHVEECSCYPRYPGVRCVCRDNWKGSNRPIVDINIKDHSIVSKYVCSGLVGDTPRKNDSSSSSHCLDPNNEEGGHGVKGWAFDDGNDVWMGRTINETSRLGYETFKVIEGWSNPKSKLQINRQVIVDRGDRSGYSGIFSVEGKSCINRCFYVELIRGRKEETEVLWTSNSIVVFCGTSGTYGTGSWPDGADLNLMPI

SEQ ID NO: 25105 - protein, 469 aa, Artificial Sequence
  derived and/or modified protein sequence (wt) from neuraminidase__InfluenzaA__AHM00558
MNPNQKIITIGSVSLTISTICFFMQIAILITTVTLHFKQYEFNSPPNNQVMLCEPTIIERNITEIVYLTNTTIEKEVCPKPAEYRNWSKPQCGITGFAPFSKDNSIRLSAGGDIWVTREPYVSCDPDKCYQFALGQGTTLNNVHSNNTVRDRTPYRTLLMNELGVPFHLGTKQVCIAWSSSSCHDGKAWLHVCITGDDKNATASFIYNGRLVDSVVSWSKEILRTQESECVCINGTCTVVMTDGSASGKADTKILFIEEGKIVHTSTLSGSAQHVEECSCYPRYPGVRCVCRDNWKGSNRPIVDINIKDHSIVSSYVCSGLVGDTPRKNDSSSSSHCLDPNNEEGGHGVKGWAFDDGNDVWMGRTINETSRLGYETFKVIEGWSNPKSKLQINRQVIVDRGDRSGYSGIFSVEGKSCINRCFYVELIRGRKEETEVLWTSNSIVVFCGTSGTYGTGSWPDGADLNLMPI

SEQ ID NO: 25106 - protein, 469 aa, Artificial Sequence; identical to SEQ ID NO: 22146
  derived and/or modified protein sequence (wt) from neuraminidase__InfluenzaA__AHM00570

SEQ ID NO: 25107 - protein, 469 aa, Artificial Sequence; identical to SEQ ID NO: 22146
  derived and/or modified protein sequence (wt) from neuraminidase__InfluenzaA__AHM00582

SEQ ID NO: 25108 - protein, 469 aa, Artificial Sequence
  derived and/or modified protein sequence (wt) from neuraminidase__InfluenzaA__AHM00594
MNPNQKIITIGSVSLTISTICFFMQIAILITTVTLHFKQHEFNSPPNNQVMLCEPTIIERNITEIVHLTNTTIEKEICPKPAEYRNWSKPQCGITGFAPFSKDNSIRLSAGGDIWVTREPYVSCDPDKCYQFALGQGTTLNNVHSNNTVRDRTPYRTLLMNELGVPFHLGTKQVCIAWSSSSCHDGKAWLHVCITGDDKNATASFIYNGRLVDSVVSWSKEILRTQESECVCINGTCTVVMTDGSASGKADTKILFIEEGKIVHTSTLSGSAQHVEECSCYPRYPGVRCVCRDNWKGSNRPIVDINIKDHSIVSSYVCSGLVGDTPRKNDSSSSSHCLDPNNEEGGHGVKGWAFDDGNDVWMGRTINETSRLGYETFKVIEGWSNPKSKLQINRQVIVDRGDRSGYSGIFSVEGKSCINRCFYVELIRGRKEETEVLWTSNSIVVFCGTSGTYGTGSWPDGADLNLMPI

SEQ ID NO: 25109 - protein, 469 aa, Artificial Sequence; identical to SEQ ID NO: 22146
  derived and/or modified protein sequence (wt) from neuraminidase__InfluenzaA__AHM00606

SEQ ID NO: 25110 - protein, 469 aa, Artificial Sequence; identical to SEQ ID NO: 22146
  derived and/or modified protein sequence (wt) from neuraminidase__InfluenzaA__AHM00618

SEQ ID NO: 25111 - protein, 469 aa, Artificial Sequence; identical to SEQ ID NO: 22146
  derived and/or modified protein sequence (wt) from neuraminidase__InfluenzaA__AHM00630

SEQ ID NO: 25112 - protein, 469 aa, Artificial Sequence; identical to SEQ ID NO: 22146
  derived and/or modified protein sequence (wt) from neuraminidase__InfluenzaA__AHM00642

SEQ ID NO: 25113 - protein, 469 aa, Artificial Sequence; identical to SEQ ID NO: 23375
  derived and/or modified protein sequence (wt) from neuraminidase__InfluenzaA__AHM00654

SEQ ID NO: 25114 - protein, 469 aa, Artificial Sequence; identical to SEQ ID NO: 22146
  derived and/or modified protein sequence (wt) from neuraminidase__InfluenzaA__AHM00666

SEQ ID NO: 25115 - protein, 469 aa, Artificial Sequence; identical to SEQ ID NO: 25054
  derived and/or modified protein sequence (wt) from neuraminidase__InfluenzaA__AHM00678

SEQ ID NO: 25116 - protein, 469 aa, Artificial Sequence; identical to SEQ ID NO: 23389
  derived and/or modified protein sequence (wt) from neuraminidase__InfluenzaA__AHM00690

SEQ ID NO: 25117 - protein, 469 aa, Artificial Sequence; identical to SEQ ID NO: 23375
  derived and/or modified protein sequence (wt) from neuraminidase__InfluenzaA__AHM00701

SEQ ID NO: 25118 - protein, 469 aa, Artificial Sequence
  derived and/or modified protein sequence (wt) from neuraminidase__InfluenzaA__AHM00713
MNPNQKIITIGSVSLTISTICFFMQIAILITTVTLHFKQYEFNSPPNNQVMLCEPTIIERNITEIVYLTNTTIEKEICPKSAEYRNWSKPQCGITGFAPFSKDNSIRLSAGGDIWVTREPYVSCDPDKCYQFALGQGTTLNNVHSNNTVRDRTPYRTLLMNELGVPFHLGTKQVCIAWSSSSCHDGKAWLHVCITGDDKNATASFIYNGRLVDSVVSWSKEILRTQESECVCINGTCTVVMTDGSASGKADTKILFIEEGKIVHTSTLSGSAQHVEECSCYPRYPGVRCVCRDNWKGSNRPIVDINIKDHSIVSSYVCSGLVGDTPRKNDSSSSSHCLDPNNEEGGHGVKGWAFDDGNDVWMGRTINETSRLGYETFKVIEGWSNPKSKLQINRQVIVDRGDRSGYSGIFSVEGKSCINRCFYVELIRGRKEETEVLWTSNSIVVFCGTSGTYGTGSWPDGADLNLMPI

SEQ ID NO: 25119 - protein, 469 aa, Artificial Sequence; identical to SEQ ID NO: 22146
  derived and/or modified protein sequence (wt) from neuraminidase__InfluenzaA__AHM00725

SEQ ID NO: 25120 - protein, 469 aa, Artificial Sequence; identical to SEQ ID NO: 22146
  derived and/or modified protein sequence (wt) from neuraminidase__InfluenzaA__AHM00737

SEQ ID NO: 25121 - protein, 469 aa, Artificial Sequence; identical to SEQ ID NO: 25054
  derived and/or modified protein sequence (wt) from neuraminidase__InfluenzaA__AHM00749

SEQ ID NO: 25122 - protein, 469 aa, Artificial Sequence; identical to SEQ ID NO: 22146
  derived and/or modified protein sequence (wt) from neuraminidase__InfluenzaA__AHM00761

SEQ ID NO: 25123 - protein, 469 aa, Artificial Sequence; identical to SEQ ID NO: 23375
  derived and/or modified protein sequence (wt) from neuraminidase__InfluenzaA__AHM00785

SEQ ID NO: 25124 - protein, 469 aa, Artificial Sequence; identical to SEQ ID NO: 23010
  derived and/or modified protein sequence (wt) from neuraminidase__InfluenzaA__AHM00797

SEQ ID NO: 25125 - protein, 469 aa, Artificial Sequence
  derived and/or modified protein sequence (wt) from neuraminidase__InfluenzaA__AHM00809
MNPNQKIITIGSVSLTISTICFFIQIAILITTVTLHFKQYEFNSPPNNQVMLCEPTIIERNITEIVYLTNTTIEKEICPKPAEYRNWSKPQCDITGFAPFSKDNSIRLSAGGDIWVTREPYVSCDPDKCYQFALGQGTTLNNMHSNNTVRDRTPYRTLLMNELGVPFHLGTKQVCIAWSSSSCHDGKAWLHVCITGDDKNATASFIYNGRLVDSVVSWSKEILRTQESECVCINGTCTVVMTDGSASGKADTKILFIEEGKIVHTSTLSGSAQHVEECSCYPRYPGVRCVCRDNWKGSNRPIVDINIKDHSIVSSYVCSGLVGDTPRKNDSSSSSHCLDPNNEEGGHGVKGWAFDDGNDVWMGRTINETSRLGYETFKVIEGWSNPKSKLQINRQVIVDRGDRSGYSGIFSVEGKSCINRCFYVELIRGRKEETEVLWTSNSIVVFCGTSGTYGTGSWPDGADLNLMPI

SEQ ID NO: 25126 - protein, 469 aa, Artificial Sequence; identical to SEQ ID NO: 25054
  derived and/or modified protein sequence (wt) from neuraminidase__InfluenzaA__AHM00821

SEQ ID NO: 25127 - protein, 469 aa, Artificial Sequence; identical to SEQ ID NO: 25054
  derived and/or modified protein sequence (wt) from neuraminidase__InfluenzaA__AHM00833

SEQ ID NO: 25128 - protein, 469 aa, Artificial Sequence; identical to SEQ ID NO: 23010
  derived and/or modified protein sequence (wt) from neuraminidase__InfluenzaA__AHM00845

SEQ ID NO: 25129 - protein, 469 aa, Artificial Sequence; identical to SEQ ID NO: 22146
  derived and/or modified protein sequence (wt) from neuraminidase__InfluenzaA__AHM00857

SEQ ID NO: 25130 - protein, 469 aa, Artificial Sequence; identical to SEQ ID NO: 22146
  derived and/or modified protein sequence (wt) from neuraminidase__InfluenzaA__AHM00869

SEQ ID NO: 25131 - protein, 469 aa, Artificial Sequence; identical to SEQ ID NO: 22146
  derived and/or modified protein sequence (wt) from neuraminidase__InfluenzaA__AHM00881

SEQ ID NO: 25132 - protein, 469 aa, Artificial Sequence; identical to SEQ ID NO: 23375
  derived and/or modified protein sequence (wt) from neuraminidase__InfluenzaA__AHM00893

SEQ ID NO: 25133 - protein, 469 aa, Artificial Sequence
  derived and/or modified protein sequence (wt) from neuraminidase__InfluenzaA__AHM00905
MNPNQKIITIGSVSLTISTICFFMQIAILITTVTLHFKQYEFNSPPNNQVMLCEPTIIERNITEIVYLTNTTIEKEICPKPAEYRNWSKPQCGITGFAPFSKDNSIRLSAGGDIWVTREPYVSCDPDKCYQFALGQGTTLNNVHSNNTVRDRTPYRTLLMNELGVPFHLGTKQVCIAWSSSSCHDGKAWLHVCITGDDKNATASFIYNGRLVDSVVSWSKEILRTQESECVCINGTCTVVMTDGSASGKADTKILFIEEGKIVHTSTLSGSAQHVEECSCYPRYPGVRCVCRDNWKGSNRPIVDINIKDHSIVSSYVCSGLVGDTPRKTDSSSSGHCLDPNNEEGGHGVKGWAFDDGNDVWMGRTINETSRLGYETFKVIEGWSNPKSKLQINRQVIVDRGDRSGYSGIFSVEGKSCINRCFYVELIRGRKEETEVLWTSNSIVVFCGTSGTYGTGSWPDGADLNLMPI

SEQ ID NO: 25134 - protein, 469 aa, Artificial Sequence
  derived and/or modified protein sequence (wt) from neuraminidase__InfluenzaA__AHM00917
MNPNQKIITIGSVSLTISTICFFMQIAILITTVTLHFKQYEFNSPPNNQVMLCEPTIIERNITEIVYLTNTTIEKEICPKPAEYRNWSKPQCGITGFAPFSKDNSIRLSAGGDIWVTREPYVSCDPDKCYQFALGQGTTLNNVHSNNTVRDRTPYRTLLMNELGVPFHLGTKQVCIAWSSSSCHDGKAWLHVCITGDDKNATASFIYNGRLVDSVVSWSKEILRTQESECVCINGTCTVVMTDGSASGKADTKILFIEEGKIVHTSTLSGSAQHVEECSCYPRYPGVRCVCRDNWKGSNRPIVDINIKDHSIVSSYVCSGLVGDTPRKNDSSSSSHCLDPNNEEGGHGVKGWAFDDGNDIWMGRTINETSRLGYETFKVIEGWSNPKSKLQINRQVIVDRGDRSGYSGIFSVEGKSCINRCFYVELIRGRKEETEVLWTSNSIVVFCGTSGTYGTGSWPDGADLNLMPI

SEQ ID NO: 25135 - protein, 469 aa, Artificial Sequence; identical to SEQ ID NO: 22146
  derived and/or modified protein sequence (wt) from neuraminidase__InfluenzaA__AHM00929

SEQ ID NO: 25136 - protein, 469 aa, Artificial Sequence
  derived and/or modified protein sequence (wt) from neuraminidase__InfluenzaA__AHM00941
MNPNQKIITIGSVSLTISTICFFMQIAILITTVTLHFKQYEFNSPPNNQVMLCEPTIIERNITEIVYLTNTTIEKEICPKPAEYRNWSKPQCDITGFAPFSKDNSIRLSAGGDIWVTREPYVSCDPDKCYQFALGQGTTLNNVHSNNTIRDRTPYRTLLMNELGVPFHLGTKQVCIAWSSSSCHDGKAWLHVCITGDDKNATASFIYNGRLVDSVVSWSKEILRTQESECVCINGTCTVVMTDGSASGKADTKILFIEEGKIVHTSTLSGSAQHVEECSCYPRYPGVRCVCRDNWKGSNRPIVDINIKDHSIVSRYVCSGLVGDTPRKNDSSSSSHCLDPNNEEGGHGVKGWAFDDGNDVWMGRTINETSRLGYETFKVIEGWSNPKSKLQINRQVIVDRGDRSGYSGIFSVEGKSCINRCFYVELIRGRKEETEVLWTSNSIVVFCGTSGTYGTGSWPDGADLNLMPI

SEQ ID NO: 25137 - protein, 469 aa, Artificial Sequence
  derived and/or modified protein sequence (wt) from neuraminidase__InfluenzaA__AHM00953
MNPNQKIITIGSVSLTISTICFFMQIAILITTVTLHFKQYAFNSPPNNQVMLCEPTIIERNITEIVYLTNTTIEKEICPKPAEYRNWSKPQCGITGFAPFSKDNSIRLSAGGDIWVTREPYVSCDPDKCYQFALGQGTTLNNVHSNNTVRDRTPYRTLLMNELGVPFHLGTKQVCIAWSSSSCHDGKAWLHVCITGDDKNATASFIYNGRLVDSVVSWSKEILRTQESECVCINGTCTVVMTDGSASGKADTKILFIEEGKIVHTSTLSGSAQHVEECSCYPRYPGVRCVCRDNWKGSNRPIVDINIKDHSIVSSYVCSGLVGDTPRKNDSSSSSHCLDPNNEEGGHGVKGWAFDDGNDVWMGRTINETSRLGYETFKVIEGWSNPKSKLQINRQVIVDRGDRSGYSGIFSVEGKSCINRCFYVELIRGRKEETEVLWTSNSIVVFCGTSGTYGTGSWPDGADLNLMPI

SEQ ID NO: 25138 - protein, 469 aa, Artificial Sequence; identical to SEQ ID NO: 23375
  derived and/or modified protein sequence (wt) from neuraminidase__InfluenzaA__AHM00965

SEQ ID NO: 25139 - protein, 469 aa, Artificial Sequence; identical to SEQ ID NO: 23375
  derived and/or modified protein sequence (wt) from neuraminidase__InfluenzaA__AHM00977

SEQ ID NO: 25140 - protein, 465 aa, Artificial Sequence
  derived and/or modified protein sequence (wt) from neuraminidase__InfluenzaA__AHM24226
MNPNQKILCTSATAIIIGAIAVLIGIANLGLNIGLHLKPGCNCSHSQPETTNTSQTIINNYYNETNITNIQMEERTSRNFNNLTKGLCTINSWHIYGKDNAVRIGESSDVLVTREPYVSCDPDECRFYALSQGTTIRGKHSNGTIHDRSQYRALISWPLSSPPTVYNSRVECIGWSSTSCHDGKSRMSICISGPNNNASAVVWYNRRPVAEINTWARNILRTQESECVCHNGVCPVVFTDGSATGPADTRIYYFKEGKMLKWESLTGTAKHNEECSCYGERTGITCTCRDNWQGSNRPVIQIDPVAMTHTSQYICSPVLTDNPRPNDPNIGKCNDPYPGNNNNGVKGFSYLDGANTWLGRTISTASRSGYEMLKVPNALTDDRSKPIQGQTIVLNADWSGYSGSFMDYWAEGDCYRACFYVELIRGRPKEDKVWWTSNSIVSMCSSTEFLGQWNWPDGAKIEYFL

SEQ ID NO: 25141 - protein, 465 aa, Artificial Sequence; identical to SEQ ID NO: 23454
  derived and/or modified protein sequence (wt) from neuraminidase__InfluenzaA__AHM24238

SEQ ID NO: 25142 - protein, 465 aa, Artificial Sequence
  derived and/or modified protein sequence (wt) from neuraminidase__InfluenzaA__AHM24250
MNPNQKILCTSATAIIIGAIAVLIGIANLGLNIGLHLKPSCNCSHSQPETTNTSQTIINNYYNETNITNIQMEERTSRNFNNLTKGLCTINSWHIYGKDNAVRIGENSDVLVTREPYVSCDPDECRFYALSQGTTIRGKHSNGTIHDRSQYRALISWPLSSPPTVYNSRVECIGWSSTSCHDGKSRMSICISGPNNNASAVVWYNRRPVAEINTWARNILRTQESECVCHNGVCPVVFTDGSATGPADTRIYYFKEGKILKWESLTGTAKHIEECSCYGERTGITCTCRDNWQGSNRPVIQIDPVAMTHTSQYICSPVLTDNPRPNDPNIGKCNDPYPGNNNNGVKGFSYLDGANTWLGRTISTASRSGYEMLKVPNALTDDRSKPIQGQTIVLNADWSGYSGSFMDYWAEGDCYRACFYVELIRGRPKEDKVWWTSNSIVSMCSSTEFLGQWNWPDGAKIEYFL

SEQ ID NO: 25143 - protein, 469 aa, Artificial Sequence; identical to SEQ ID NO: 20709
  derived and/or modified protein sequence (wt) from neuraminidase__InfluenzaA__AHM98312

SEQ ID NO: 25144 - protein, 469 aa, Artificial Sequence
  derived and/or modified protein sequence (wt) from neuraminidase__InfluenzaA__AHM98331
MNPNQKIITIGSVCMTIGMANLILQIGNIISIWISHSIQLGNQSQIETCNQSVITYENNTWVNQTYVNISNTNFAAGQSVVSVKLAGNSSLCPVSGWAIYSKDNSIRIGSKGDVFVIREPFISCSPLECRTFFLTQGALLNDKHSNGTIKDRSPYRTLMSCPIGEVPSPYNSRFESVAWSASACHDGINWLTIGISGPDNGAVAVLKYNGIITDTIKSWRNNILRTQESECACVNGSCFTIMTDGPSDGQASYKIFRIEKGKIVKSVEMNAPNYHYEECSCYPDSSEITCVCRDNWHGSNRPWVSFNQNLEYQIGYICSGIFGDNPRPNDKTGSCGPVSSNGANGVKGFSFKYGNGVWIGRTKSISSRKGFEMIWDPNGWTGTDNNFSIKQDIVGINEWSGYSGSFVQHPELTGLDCIRPCFWVELIRGRPKENTIWTSGSSISFCGVHSDTVGWSWPDGAELPFTIDK

SEQ ID NO: 25145 - protein, 469 aa, Artificial Sequence; identical to SEQ ID NO: 20725
  derived and/or modified protein sequence (wt) from neuraminidase__InfluenzaA__AHM98342

SEQ ID NO: 25146 - protein, 469 aa, Artificial Sequence
  derived and/or modified protein sequence (wt) from neuraminidase__InfluenzaA__AHM98353
MNPNQKIITIGSVCMTIGMANLILQIGNIISIWISHSIQLGNQSQIETCNQSVITYENNTWVNQTYVNISNTNFAAGQSVVSVKLAGNSSLCPVSGWAIYSKDNSIRIGSKGDVFVIREPFISCSPLECRTFFLTQGALLNDKHSNGTIKDRSPYRTLMSCPIGEVPSPYNSRFESVAWSASACHDGINWLTIGISGPDNGAVAVLKYNGIITDTIKSWRNNILRTQESECACVDGSCFTIMTDGPSDGQASYKIFRIEKGKIVKSVEMNAPNYHYEECSCYPDSSEITCVCRDNWHGSNRPWVSFNQNLEYQIGYICSGIFGDNPRPNDKTGSCGPVSSNGANGVKGFSFKYGNGVWIGRTKSISSRKGFEMIWDPNGWTGTDNNFSIKQDIVGINEWSGYSGSFVQHPELTGLDCIRPCFWVELIRGRPKENTIWTSGSSISFCGVNSDTVGWSWPDGAELPFTIDK

SEQ ID NO: 25147 - protein, 469 aa, Artificial Sequence
  derived and/or modified protein sequence (wt) from neuraminidase__InfluenzaA__AHM98364
MNPNQKIITIGSVCMTIGMANLILQIGNIISIWISHSIQLGNQSQIETCNQSVITYENNTWVNQTYVNISNTNFAAGQSVVSVNLAGNSSLCPVSGWAIYSKDNSIRIGSKGDVFVIREPFISCSPLECRTFFLTQGALLNDKHSNGTIKDRSPYRTLMSCPIGEVPSPYNSRFESVAWSASACHDGINWLTIGISGPDNGAVAVLKYNGIITDTIKSWRNNILRTQESECACVNGSCFTIMTDGPSDGQASYKIFRIEKGKIVKSVEMNAPNYHYEECSCYPDSSEITCVCRDNWHGSNRPWVSFNQNLEYQIGYICSGIFGDNPRPNDKTGSCGPVSSNGANGVKGFSFKYGNGVWIGRTKSISSRKGFEMIWDPNGWTGTDNNFSIKQDIVGINEWSGYSGSFVQHPELTGLDCIRPCFWVELIRGRPKENTIWTSGSSISFCGVNSDTVGWSWPDGAELPFTIDK

SEQ ID NO: 25148 - protein, 469 aa, Artificial Sequence
  derived and/or modified protein sequence (wt) from neuraminidase__InfluenzaA__AHM98375
MNPNQKIITIGSVCMTIGMANLILQIGNIISIWISHSIQLGNQNQIETCNQSVITYENNTWVNQTYVNISNTNFAAGQSVVSVKLAGNSSLCPVSGWAIYSKDNSIRIGSKGDVFVIREPFISCSPLECRTFFLTQGALLNDKHSNGTIKDRSPFRTLMSCPIGEVPSPYNSRFESVAWSASACHDGINWLTIGISGPDNGAVAVLKYNGIITDTIKSWRNNILRTQESECACVNGSCFTIMTDGPSDGQASYKIFRIEKGKIVKSVEMNAPNYHYEECSCYPDSSEITCVCRDNWHGSNRPWVSFNQNLEYQIGYICSGIFGDNPRPNDKTGSCGPVSSNGANGVKGFSFKYGNGVWIGRTKSISSRKGFEMIWDPNGWTGTDNNFSIKQDIVGINEWSGYSGSFVQHPELTGLDCIRPCFWVELIRGRPKENTIWTSGSSISFCGVNSDTVGWSWPDGAELPFTIDK

SEQ ID NO: 25149 - protein, 469 aa, Artificial Sequence; identical to SEQ ID NO: 20709
  derived and/or modified protein sequence (wt) from neuraminidase__InfluenzaA__AHM98386

SEQ ID NO: 25150 - protein, 469 aa, Artificial Sequence
  derived and/or modified protein sequence (wt) from neuraminidase__InfluenzaA__AHM98408
MNPNQKIITIGSVCMTIGMANLILQIGNIISIWISHSIQLGNQSQIETCNQSVITYENNTWINQTYVNISNTNFAAGQSVVSVKLAGNSSLCPVSGWAIYSKDNSIRIGSKGDVFVIREPFISCSPLECRTFFLTQGALLNDKHSNGTIKDRSPYRTLMSCPIGEVPSPYNSRFESVAWSASACHDGINWLTIGISGPDNGAVAVLKYNGIITDTIKSWRNNILRTQESECACVNGSCFTIMTDGPSDGQASYKIFRIEKGKIVKSVEMNAPNYHYEECSCYPDSSEITCVCRDNWHGSNRPWVSFNQNLEYQIGYICSGIFGDNPRPNDKTGSCGPVSSNGANGVKGFSFKYGNGVWIGRTKSISSRKGFEMIWDPNGWTGTDNSFSIKQDIVGINEWSGYSGSFVQHPELTGLDCIRPCFWVELIRGRPKENTIWTSGSSISFCGVNSDTVGWSWPDGAELPFTIDK

SEQ ID NO: 25151 - protein, 469 aa, Artificial Sequence; identical to SEQ ID NO: 25150
  derived and/or modified protein sequence (wt) from neuraminidase__InfluenzaA__AHM98419

SEQ ID NO: 25152 - protein, 469 aa, Artificial Sequence
  derived and/or modified protein sequence (wt) from neuraminidase__InfluenzaA__AHM98430
MNPNQKIITIGSVCMTIGMANLILQIGNIISIWISHSIQLGNQSQIETCNQNVITYENNTWVNQTYVNISNTNFAAGQSVVPVKLAGNSSLCPVSGWAIYSKDNSIRIGSKGDVFVIREPFISCSPLECRTFFLTQGALLNDKHSNGTIKDRSPYRTLMSCPIGEVPSPYNSRFESVAWSASACHDGINWLTIGISGPDNGAVAVLKYNGIITDTIKSWRNNILRTQESECACVNGSCFTIMTDGPSDGQASYKIFRIEKGKIVKSVEMNAPNYHYEECSCYPDSSEITCVCRDNWHGSNRPWVSFNQNLEYQIGYICSGIFGDNPRPNDKTGSCGPVSSNGANGVKGFSFKYGNGVWIGRTKSISSRKGFEMIWDPNGWTGTDNNFSIKQDIVGINEWSGYSGSFVQHPELTGLDCIRPCFWVELIRGRPKENTIWTSGSSISFCGVNSDTVGWSWPDGAELPFTIDK

SEQ ID NO: 25153 - protein, 469 aa, Artificial Sequence; identical to SEQ ID NO: 20957
  derived and/or modified protein sequence (wt) from neuraminidase__InfluenzaA__AHM98441

SEQ ID NO: 25154 - protein, 469 aa, Artificial Sequence
  derived and/or modified protein sequence (wt) from neuraminidase__InfluenzaA__AHM98452
MNPNQKIITIGSVCMTIGMANLILQIGNIISIWISHSIQLRNQSQIETCNQSVITYENNTWVNQTYVNISNTNFAAGQSVVSVKLAGNSSLCPVSGWAIYSKDNSIRIGSKGDVFVIREPFISCSPLECRTFFLTQGALLNDKHSNGTIKDRSPYRTLMSCPIGEVPSPYNSRFESVAWSASACHDGINWLTIGISGPDNGAVAVLKYNGIITDTIKSWRNNILRTQESECACVNGSCFTIMTDGPSDGQASYKIFRIEKGKIVKSVEMNAPNYHYEECSCYPDSSEITCVCRDNWHGSNRPWVSFNQNLEYQIGYICSGIFGDNPRPNDKTGSCGPVSSNGANGVKGFSFKYGNGVWIGRTKSISSRKGFEMIWDPNGWTGTDNNFSIKQDIVGVNEWSGYSGSFVQHPELTGLDCIRPCFWVELIRGRPKENTIWTSGSSISFCGVNSDTVGWSWPDGAELPFTIDK

SEQ ID NO: 25155 - protein, 469 aa, Artificial Sequence; identical to SEQ ID NO: 20709
  derived and/or modified protein sequence (wt) from neuraminidase__InfluenzaA__AHM98474

SEQ ID NO: 25156 - protein, 469 aa, Artificial Sequence
  derived and/or modified protein sequence (wt) from neuraminidase__InfluenzaA__AHM98485
MNPNQKIITIGSVCMTIGMANLILQIGNIISIWISHSIQLGNQSQIETCNQSVITYENNTWVNQTYVNISNTNFAAGQSVVSVKLVGNSSLCPVSGWAIYSKDNSIRIGSKGDVFVIREPFISCSPLECRTFFLTQGALLNDKHSNGTIKDRSPYRTLMSCPIGEVPSPYNSRFESVAWSASACHDGINWLTIGISGPDNGAVAVLKYNGIITDTIKSWRNNILRTQESECACVNGSCFTIMTDGPSDGQASYKIFRIEKGKIVKSVEMNAPNYHYEECSCYPDSSEITCVCRDNWHGSNRPWVSFNQNLEYQIGYICSGIFGDNPRPNDKTGSCGPVSSNGANGVKGFSFKYGNGVWIGRTKSISSRKGFEMIWDPNGWTGTDNNFSIKQDIVGINEWSGYSGSFVQHPELTGLDCIRPCFWVELIRGRPKENTIWTSGSSISFCGVNSDTVGWSWPDGAELPFTIDK

SEQ ID NO: 25157 - protein, 469 aa, Artificial Sequence
  derived and/or modified protein sequence (wt) from neuraminidase__InfluenzaA__AHM98496
MNPNQKIITIGSVCMTIGMANLILQIGNIISIWISHSIQLGNQNQIETCNQSVITYENNTWVNQTYVNISNTNFAAGQSVVSVKLAGNSSLCPVSGWAIYSKDNSIRIGSKGDVFVIREPFISCSPLECRTFFLTQGALLNDKHSNGTIKNRSPYRTLMSCPIGEVPSPYNSRFESVAWSASACHDGINWLTIGISGPDNGAVAVLKYNGIITDTIKSWRNNILRTQESECACVNGSCFTIMTDGPSDGQASYKIFRIEKGKIVKSVEMNAPNYHYEECSCYPDSSEIKCVCRDNWHGSNRPWVSFNQNLEYQIGYICSGIFGDNPRPNDKTGSCGPVSSNGANGVKGFSFKYGNGVWIGRTKSISSRKGFEMIWDPNGWTGTDNNFSIKQDIVGINEWSGYSGSFVQHPELTGLDCIRPCFWVELIRGRPKENTIWTSGSSISFCGVNSDTVGWSWPDGAELPFTIDK

SEQ ID NO: 25158 - protein, 469 aa, Artificial Sequence; identical to SEQ ID NO: 20709
  derived and/or modified protein sequence (wt) from neuraminidase__InfluenzaA__AHM98507

SEQ ID NO: 25159 - protein, 469 aa, Artificial Sequence
  derived and/or modified protein sequence (wt) from neuraminidase__InfluenzaA__AHM98518
MNPNQKIITIGSVCMTIGMANLILQIGNIISIWISHSIQLGNQSQIETCNQSVITYENNTWINQTYVNISNTNFAAGQSVVSVKLAGNSSLCPVSGWAIYSKDNSIRIGSKGDVFVIREPFISCSPLECRTFFLTQGALLNDKHSNGTIKDRSPYRTLMSCPIGEVPSPYNSRFESVAWSASACHDGINWLTIGISGPDNGAVAVLKYNGIITDTIKSWRNNILRTQESECACVNGSCFTIMTDGPSDGQASYKIFRIEKGKIVKSVEMNAPNYHYEECSCYPDSSEITCVCRDNWHGSNRPWVSFNQNLEYQIGYICSGIFGDNPRPNDKTGSCGPVSSNGANGVKGFSFKYGNGVWIGRTKSISSRKGFEMIWDPNGWTGTDNNFSIKQDIVGINEWSGYSGSFVQHPELTGLDCIRPCFWVELIRGRPKENTIWTSGSSMSFCGVNSDTVGWSWPDGAELPFTIDK

SEQ ID NO: 25160 - protein, 469 aa, Artificial Sequence; identical to SEQ ID NO: 20257
  derived and/or modified protein sequence (wt) from neuraminidase__InfluenzaA__AHM98529

SEQ ID NO: 25161 - protein, 469 aa, Artificial Sequence; identical to SEQ ID NO: 21001
  derived and/or modified protein sequence (wt) from neuraminidase__InfluenzaA__AHM98540

SEQ ID NO: 25162 - protein, 469 aa, Artificial Sequence
  derived and/or modified protein sequence (wt) from neuraminidase__InfluenzaA__AHM98562
MNPNQKIITIGSVCMTIGMANLILQIGNIISIWISHSIQLGNQNQIETCNQSVITYENNTWVNQTYVNISNTNFAAGQSVVSVKLAGNSSLCPVSGWAIYSKDNSIRIGSKGDVFVIREPFISCSPLECRTFFLTQGALLNDKHSNGTIKDRSPYRTLMSCPIGEVPSPYNSRFESVAWSASACHDGINWLTIGISGPDNGAVAVLKYNGIITDTIKSWRNNILRTQESECACVNGSCFTIMTDGPSDGQASYKIFRIEKGKIVKSVEMNAPNYHYEECSCYPDSSEITCVCRDNWHGSNRPWVSFNQNLEYQIGYICSGIFGDNPRPNDKAGSCGPVSSNGANGVKGFSFKYGNGVWIGRTKSISSRKGFEMIWDPNGWTGTDNNFSIKQDIVGINEWSGYSGSFVQHPELTGLDCIRPCFWVELIRGRPKENTIWTSGSSISFCGVNSYTVGWSWPDGAELPFTIDK

SEQ ID NO: 25163 - protein, 469 aa, Artificial Sequence; identical to SEQ ID NO: 25152
  derived and/or modified protein sequence (wt) from neuraminidase__InfluenzaA__AHM98573

SEQ ID NO: 25164 - protein, 469 aa, Artificial Sequence
  derived and/or modified protein sequence (wt) from neuraminidase__InfluenzaA__AHM98584
MNPNQKIITIGSVCMTIGMANLILQIGNIISIWISHSIQLGNQSQIETCNQSVITYENNTWINQTYVNISNTNFAAGQSVVSVKLAGNSSLCPVSGWAIYSKDNSIRIGSKGDVFVIREPFISCSPLECRTFFLTQGALLNDKHSNGTIKDRSPYRTLMSCPIGEVPSPYNSRFESVAWSASACHDGINWLTIGISGPDNGAVAVLRYNGIITDTIKSWRNNILRTQESECACVNGSCFTIMTDGPSDGQASYKIFRIEKGKIVKSVEMNAPNYHYEECSCYPDSSEITCVCRDNWHGSNRPWVSFNQNLEYQIGYICSGIFGDNPRPNDKTGSCGPVSSNGANGVKGFSFKYGNGVWIGRTKSISSRKGFEMIWDPNGWTGTDNSFSIKQDIVGINEWSGYSGSFVQHPELTGLDCIRPCFWVELIRGRPKENTIWTSGSSISFCGVNSDTVGWSWPDGAELPFTIDK

SEQ ID NO: 25165 - protein, 469 aa, Artificial Sequence; identical to SEQ ID NO: 25152
  derived and/or modified protein sequence (wt) from neuraminidase__InfluenzaA__AHM98595

SEQ ID NO: 25166 - protein, 469 aa, Artificial Sequence; identical to SEQ ID NO: 20709
  derived and/or modified protein sequence (wt) from neuraminidase__InfluenzaA__AHM98606

SEQ ID NO: 25167 - protein, 469 aa, Artificial Sequence
  derived and/or modified protein sequence (wt) from neuraminidase__InfluenzaA__AHM98617
MNPNQKIITIGSVCMTIGMANLILQIGNIISIWISHSIQLGNQSQIETCNQSVITYENNTWINQTYVNISNTNFAAGQSVVSVKLAGNSSLCPVSGWAIYSKDNSIRIGSKGDVFVIREPFISCSPLGCRTFFLTQGALLNDKHSNGTIKDRSPYRTLMSCPIGEVPSPYNSRFESVAWSASACHDGINWLTIGISGPDNGAVAVLKYNGIITDTIKSWRNNILRTQESECACVNGSCFTIMTDGPSDGQASYKIFRIEKGKIVKSVEMNAPNYHYEECSCYPDSSEITCVCRDNWHGSNRPWVSFNQNLEYQIGYICSGIFGDNPRPNDKTGSCGPVSSNGANGVKGFSFKYGNGVWIGRTKSISSRKGFEMIWDPNGWTGTDNSFSIKQDIVGINEWSGYSGSFVQHPELTGLDCIRPCFWVELIRGRPKENTIWTSGSSISFCGVNSDTVGWSWPDGAELPFTIDK

SEQ ID NO: 25168 - protein, 469 aa, Artificial Sequence; identical to SEQ ID NO: 25150
  derived and/or modified protein sequence (wt) from neuraminidase__InfluenzaA__AHM98628

SEQ ID NO: 25169 - protein, 469 aa, Artificial Sequence
  derived and/or modified protein sequence (wt) from neuraminidase__InfluenzaA__AHM98639
MNPNQKIITIGSVCMTIGMANLILQIGNIISIWISHSIQLGNQSQIETCNQSVIIYENNTWINQTYVNISNTNFAAEQSVVSVKLAGNSSLCPVSGWAIYSKDNSIRIGSKGDVFVIREPFISCSPLECRTFFLTQGALLNDKHSNGTIKDRSPYRTLMSCPIGEVPSPYNSRFESVAWSASACHDGINWLTIGISGPDNGAVAVLKYNGIITDTIKSWRNNILRTQESECACVNGSCFTIMTDGPSDGQASYKIFRIEKGKIVKSVEMNAPNYHYEECSCYPDSSEITCVCRDNWHGSNRPWVSFNQNLEYQIGYICSGIFGDNPRPNDKTGSCGPVSSNGANGVKGFSFKYGNGVWIGRTKSISSRKGFEMIWDPNGWTGTDNSFSIKQDIVGINEWSGYSGSFVQHPELTGLDCIRPCFWVELIRGRPKENTIWTSGSSISFCGVNSDTVGWSWPDGAELPFTIDK

SEQ ID NO: 25170 - protein, 469 aa, Artificial Sequence; identical to SEQ ID NO: 20709
  derived and/or modified protein sequence (wt) from neuraminidase__InfluenzaA__AHM98650

SEQ ID NO: 25171 - protein, 469 aa, Artificial Sequence; identical to SEQ ID NO: 20709
  derived and/or modified protein sequence (wt) from neuraminidase__InfluenzaA__AHM98661

SEQ ID NO: 25172 - protein, 469 aa, Artificial Sequence
  derived and/or modified protein sequence (wt) from neuraminidase__InfluenzaA__AHM98672
MNPNQKIITIGSVCMTIGMANLILQIGNIISIWISHSIQLGNQSQIETCNQNVITYENNTWVNQTYVNISNTNFAAEQSVVPVKLAGNSSLCPVSGWAIYSKDNSIRIGSKGDVFVIREPFISCSPLECRTFFLTQGALLNDKHSNGTIKDRSPYRTLMSCPIGEVPSPYNSRFESVAWSASACHDGINWLTIGISGPDNGAVAVLKYNGIITDTIKSWRNNILRTQESECACVNGSCFTIMTDGPSDGQASYKIFRIEKGKIVKSVEMNAPNYHYEECSCYPDSSEITCVCRDNWHGSNRPWVSFNQNLEYQIGYICSGIFGDNPRPNDKTGSCGPVSSNGANGVKGFSFKYGNGVWIGRTKSISSRKGFEMIWDPNGWTGTDNNFSIKQDIVGINEWSGYSGSFVQHPELTGLDCIRPCFWVELIRGRPKENTIWTSGSSISFCGVNSDTVGWSWPDGAELPFTIDK

SEQ ID NO: 25173 - protein, 469 aa, Artificial Sequence
  derived and/or modified protein sequence (wt) from neuraminidase__InfluenzaA__AHM98683
MNPNQKIITIGSVCMTIGMANLILQIGNIISIWISHSIQLGNQNQIETCNQSVITYENNTWVNQTYVNISNTNFDAGQSVVSVRLAGNSSLCPVSGWAIYSKDNSIRIGSKGDVFVIREPFISCSPLECRTFFLTQGALLNDKHSNGTIKDRSPYRTLMSCPIGEVPSPYNSRFESVAWSASACHDGFNWLTIGISGPDNGAVAVLKYNGIITDTIRSWRNNILRTQESECACVNGSCFTIMTDGPSDGQASYKIFRIEKGKIVKSVEMNAPNYHYEECSCYPDSSEITCVCRDNWHGSNRPWVSFNQNLEYQIGYICSGIFGDNPRPNDKTGSCGPVSSNGANGVKGFSFKYGNGVWIGRTKSISSRKGFEMIWDPNGWTGTDNNFSIKQDIVGINEWSGYSGSFVQHPELTGLDCIRPCFWVELIRGRPKENTIWTSGSSISFCGVNSDTVGWSWPDGAELPFTIDK

SEQ ID NO: 25174 - protein, 469 aa, Artificial Sequence; identical to SEQ ID NO: 20709
  derived and/or modified protein sequence (wt) from neuraminidase__InfluenzaA__AHM98693

SEQ ID NO: 25175 - protein, 469 aa, Artificial Sequence; identical to SEQ ID NO: 23158
  derived and/or modified protein sequence (wt) from neuraminidase__InfluenzaA__AHM98704

SEQ ID NO: 25176 - protein, 469 aa, Artificial Sequence; identical to SEQ ID NO: 23158
  derived and/or modified protein sequence (wt) from neuraminidase__InfluenzaA__AHM98715

SEQ ID NO: 25177 - protein, 469 aa, Artificial Sequence; identical to SEQ ID NO: 20709
  derived and/or modified protein sequence (wt) from neuraminidase__InfluenzaA__AHM98726

SEQ ID NO: 25178 - protein, 469 aa, Artificial Sequence
  derived and/or modified protein sequence (wt) from neuraminidase__InfluenzaA__AHM98737
MNPNQKIITIGSVCMTIGMANLILQIGNIISIWISHSIQLRNQSQIETCNQSVINYENNTWVNQTYVNISNTNFAAGQSVVSVKLAGNSSLCPVSGWAIYSKDNSIRIGSKGDVFVIREPFVSCSPLECRTFFLTQGALLNDKHSNGTIKDRSPYRTLMSCPIGEVPSPYNSRFESVAWSASACHDGINWLTIGISGPDNGAVAVLKYNGIITDTIKSWRNDILRTQESECACVNGSCFTIMTDGPSDGQASYKIFRIEKGKIVKSVEMNAPNYHYEECSCYPDSSEITCVCRDNWHGSNRPWVSFNQNLEYQIGYICSGIFGDNPRPNDKTGSCGPVSSNGANGVKGFSFKYGNGVWIGRTKSISSRKGFEMIWDPNGWTGTDNNFSIKQDIVGINEWSGYSGSFVQHPELTGLDCIRPCFWVELIRGRPKENTIWTSGSSISFCGVNSDTVGWSWPDGAELPFTIDK

SEQ ID NO: 25179 - protein, 469 aa, Artificial Sequence; identical to SEQ ID NO: 23158
  derived and/or modified protein sequence (wt) from neuraminidase__InfluenzaA__AHM98748

SEQ ID NO: 25180 - protein, 469 aa, Artificial Sequence; identical to SEQ ID NO: 23158
  derived and/or modified protein sequence (wt) from neuraminidase__InfluenzaA__AHM98759

SEQ ID NO: 25181 - protein, 469 aa, Artificial Sequence
  derived and/or modified protein sequence (wt) from neuraminidase__InfluenzaA__AHM98770
MNPNQKIITIGSVCMTIGMANLILQIGNIISIWISHSIQLRNQSQIETCNQSAITYENNTWVNQTYVNISNTNFAAGQSVVSVKLAGNSSLCPVSGWAIYSKDNSIRIGSKGDVFVIREPFISCSPLECRTFFLTQGALLNDKHSNGTIKDRSPYRTLMSCPIGEVPSPYNSRFESVAWSASACHDGINWLTIGISGPDNGAVAVLKYNGIITDTIKSWRNNILRTQESECACVNGSCFTIMTDGPSDGQASYKIFRIEKGKIVKSVEMNAPNYHYEECSCYPDSSEITCVCRDNWHGSNRPWVSFNQNLEYQIGYICSGIFGDNPRPNDKTGSCGPVSSNGANGVKGFSFKYGNGVWIGRTKSISSRKGFEMIWDPNGWTGTDNNFSIKQDIVGINEWSGYSGSFVQHPELTGLDCIRPCFWVELIRGRPKENTIWTSGSSISFCGVNSDTVGWSWPDGAELPFTIDK

SEQ ID NO: 25182 - protein, 469 aa, Artificial Sequence
  derived and/or modified protein sequence (wt) from neuraminidase__InfluenzaA__AHM98781
MNPNQKIITIGSVCMTIGMANLILQIGNIISIWISHSIQLGNQNQIETCNQSVITYENNTWVNQTYVNISNTNFAAGQSVVSVKLAGNSSLCPVSGWAIYSKDNSIRIGSKGDVFVIREPFISCSPLECRTFFLTQGALLNDKHSNGTIKDRSPYRTLMSCPIGEVPSPYNSRFESVAWSASACHDGINWLTIGISGPDNGAVAVLKYNGIITDTIKSWRNNILRTQESECACVNGSCFTIMTDGPSDGQASYKIFRIEKGKIVKSVEMNAPNYHYEECSCYPDSSEITCVCRDNWHGSNRPWVSFNQNLEYQIGYICSGIFGDNPRPSDKTGSCGPVSSNGANGVKGFSFKYGNGVWIGRTKSISSRKGFEMIWDPNGWTGTDNSFSIKQDIVGINEWSGYSGSFVQHPELTGLDCIRPCFWVELIRGRPKENTIWTSGSSISFCGVNSGTVGWSWPDGAELPFTIDK

SEQ ID NO: 25183 - protein, 469 aa, Artificial Sequence; identical to SEQ ID NO: 20709
  derived and/or modified protein sequence (wt) from neuraminidase__InfluenzaA__AHM98801

SEQ ID NO: 25184 - protein, 469 aa, Artificial Sequence; identical to SEQ ID NO: 20257
  derived and/or modified protein sequence (wt) from neuraminidase__InfluenzaA__AHM98812

SEQ ID NO: 25185 - protein, 469 aa, Artificial Sequence
  derived and/or modified protein sequence (wt) from neuraminidase__InfluenzaA__AHM98823
MNPNQKIITIGSVCMTIGMANLILQIGNIISIWISHSIQLGNQSQIETCNQSVITYENNTWVNQTYINISNTNFAAGQSVVSVKLAGNSSLCPVSGWAIYSKDNSIRIGSKGDVFVIREPFISCSPSECRTFFLTQGALLNDKHSNGTIKDRSPYRTLMSCPIGEVPSPYNSRFESVAWSASACHDGINWLTIGISGPDNGAVAVLKYNGIITDTIKSWRNNILRTQESECACVNGSCFTIMTDGPSDGQASYKIFRIEKGKIVKSVEMNAPNYHYEECSCYPDSSEITCVCRDNWHGSNRPWVSFNQNLEYQIGYICSGIFGDNPRPNDKTGSCGPVSSNGANGVKGFSFKYGNGVWIGRTKSISSRKGFEMIWDPNGWTGTDNNFSIKQDIVGINEWSGYSGSFVQHPELTGLDCIRPCFWVELIRGRPKENTIWTSGSSISFCGVNSDTVGWSWPDGAELPFTIDK

SEQ ID NO: 25186 - protein, 469 aa, Artificial Sequence
  derived and/or modified protein sequence (wt) from neuraminidase__InfluenzaA__AHM98839
MNPNQKIITIGSVCMTVGMANLILQIGNIISIWISHSIQLGNQSQIETCNQSVITYENNTWVNQTYVNISNTNFAAGQSVVSVKLAGNSSLCPVSGWAIYSKDNSIRIGSKGDVFVIREPFISCSPLECRTFFLTQGALLNDKHSNGTIKDRSPYRTLMSCPIGEVPSPYNSRFESVAWSASACHDGINWLTIGISGPDNGAVAVLKYNGIITDTIKSWRNNILRTQESECACVNGSCFTIMTDGPSDGQASYKIFRIEKGKIVKSVEMNAPNYHYEECSCYPDSSEITCVCRDNWHGSNRPWVSFNQNLEYQIGYICSGIFGDNPRPNDKTGSCGPVSSNGANGVKGFSFKYGNGVWIGRTKSISSRKGFEMIWDPNGWTGTDNNFSIKQDIVGINEWSGYSGSFVQHPELTGLDCIRPCFWVELIRGRPKENTIWTSGSSISFCGVNSDTVGWSWPDGAELPFTIDK

SEQ ID NO: 25187 - protein, 469 aa, Artificial Sequence; identical to SEQ ID NO: 20257
  derived and/or modified protein sequence (wt) from neuraminidase__InfluenzaA__AHM98850

SEQ ID NO: 25188 - protein, 469 aa, Artificial Sequence; identical to SEQ ID NO: 20257
  derived and/or modified protein sequence (wt) from neuraminidase__InfluenzaA__AHM98861

SEQ ID NO: 25189 - protein, 469 aa, Artificial Sequence
  derived and/or modified protein sequence (wt) from neuraminidase__InfluenzaA__AHM98901
MNPNQKIITIGSVCMTIGMANLILQIGNIISIWISHSIQLGNQNQIETCNQSVITYENNTWVNQTYVNISNTNFAAGQSVVSVKLAGNSSLCPVSGWAIYSKDNSIRIGSKGDVFVIREPFISCSPLECRTFFLTQGALLNDKHSNGTIKDRSPHRTLMSCPIGEVPSPYNSRFESVAWSASACHDGINWLTIGISGPDNGAVAVLKYNGIITDTIKSWRNNILRTQESECACVNGSCFTIMTDGPSDGQASYKIFRIEKGKIVKSVEMNAPNYHYEECSCYPDSSEITCVCRDNWHGSNRPWVSFNQNLEYQIGYICSGIFGDNPRPNDKTGSCGPVSSNGANGVKGFSFKYGNGVWIGRTKSISSRKGFEMIWDPNGWTGTDNNFSIKQDIVGINEWSGYSGSFVQHPELTGLDCIRPCFWVELIRGRPKENTIWTSGSSISFCGVNSDTVGWSWPDGAELPFTIDK

SEQ ID NO: 25190 - protein, 469 aa, Artificial Sequence; identical to SEQ ID NO: 23846
  derived and/or modified protein sequence (wt) from neuraminidase__InfluenzaA__AHM98912

SEQ ID NO: 25191 - protein, 469 aa, Artificial Sequence; identical to SEQ ID NO: 23846
  derived and/or modified protein sequence (wt) from neuraminidase__InfluenzaA__AHM98923

SEQ ID NO: 25192 - protein, 469 aa, Artificial Sequence; identical to SEQ ID NO: 23846
  derived and/or modified protein sequence (wt) from neuraminidase__InfluenzaA__AHM98935

SEQ ID NO: 25193 - protein, 469 aa, Artificial Sequence; identical to SEQ ID NO: 23846
  derived and/or modified protein sequence (wt) from neuraminidase__InfluenzaA__AHM98943

SEQ ID NO: 25194 - protein, 469 aa, Artificial Sequence; identical to SEQ ID NO: 23846
  derived and/or modified protein sequence (wt) from neuraminidase__InfluenzaA__AHM98954

SEQ ID NO: 25195 - protein, 469 aa, Artificial Sequence; identical to SEQ ID NO: 23846
  derived and/or modified protein sequence (wt) from neuraminidase__InfluenzaA__AHM98972

SEQ ID NO: 25196 - protein, 469 aa, Artificial Sequence; identical to SEQ ID NO: 23846
  derived and/or modified protein sequence (wt) from neuraminidase__InfluenzaA__AHM98978

SEQ ID NO: 25197 - protein, 469 aa, Artificial Sequence; identical to SEQ ID NO: 23846
  derived and/or modified protein sequence (wt) from neuraminidase__InfluenzaA__AHM98990

SEQ ID NO: 25198 - protein, 469 aa, Artificial Sequence; identical to SEQ ID NO: 23846
  derived and/or modified protein sequence (wt) from neuraminidase__InfluenzaA__AHM99000

SEQ ID NO: 25199 - protein, 469 aa, Artificial Sequence; identical to SEQ ID NO: 23846
  derived and/or modified protein sequence (wt) from neuraminidase__InfluenzaA__AHM99011

SEQ ID NO: 25200 - protein, 469 aa, Artificial Sequence; identical to SEQ ID NO: 23822
  derived and/or modified protein sequence (wt) from neuraminidase__InfluenzaA__AHM99022

SEQ ID NO: 25201 - protein, 469 aa, Artificial Sequence; identical to SEQ ID NO: 23822
  derived and/or modified protein sequence (wt) from neuraminidase__InfluenzaA__AHM99034

SEQ ID NO: 25202 - protein, 469 aa, Artificial Sequence; identical to SEQ ID NO: 23822
  derived and/or modified protein sequence (wt) from neuraminidase__InfluenzaA__AHM99046

SEQ ID NO: 25203 - protein, 469 aa, Artificial Sequence; identical to SEQ ID NO: 23822
  derived and/or modified protein sequence (wt) from neuraminidase__InfluenzaA__AHM99057

SEQ ID NO: 25204 - protein, 469 aa, Artificial Sequence; identical to SEQ ID NO: 23822
  derived and/or modified protein sequence (wt) from neuraminidase__InfluenzaA__AHM99068

SEQ ID NO: 25205 - protein, 469 aa, Artificial Sequence; identical to SEQ ID NO: 23846
  derived and/or modified protein sequence (wt) from neuraminidase__InfluenzaA__AHM99078

SEQ ID NO: 25206 - protein, 469 aa, Artificial Sequence
  derived and/or modified protein sequence (wt) from neuraminidase__InfluenzaA__AHN00720
MNTNQRIITIGTICLIVGIISLLLQIGNIVSLWISHSIQTEEKSHPEVCNQSVITYENNTWVNQTYINISNTNIAAGQGVTPIILAGNSSLCPISGWAIYSKDNSIRIGSKGDIFVMREPFISCSHLECRTFFLTQGALLNDRHSNGTVKDRSPYRTLMSCPIGEAPSPYNSRFESVAWSASACHDGMGWLTIGISGPDNGAVAVLKYNGIITDTMKSWRNKILRTQESECVCINGSCFTIMTDGPSNGQASYKIFKMEKGKIIKSIELDAPNYHYEECSCYPDTGKVVCVCRDNWHASNRPWVSFDQNLDYQIGYICSGVFGDNPRSNDGKGNCGPVLSNGANGVKGFSFRYGNGVWIGRTKSISSRSGFEMIWDPNGWTETDSSFSMKQDIIALTDWSGYSGSFVQHPELTGMNCIRPCFWVELIRGQPKESTIWTSGSSISFCGVNSETASWSWPDGADLPFTIDK

SEQ ID NO: 25207 - protein, 469 aa, Artificial Sequence
  derived and/or modified protein sequence (wt) from neuraminidase__InfluenzaA__AHN00767
MNTNQRIITIGTICLIVGIISLLLQIGNIVSLWISHSIQTGEKSHPEVCNQSVITYENNTWVNQTYVNISNTNIAAGQGVTPIILAGNSSLCPISGWAIYSKDNSIRIGSKGDIFVMREPFISCSHLECRTFFLTQGALLNDRHSNGTVKDRSPYRTLMSCPIGEAPSPYNSRFESVAWSASACHDGMGWLTIGISGPDNGAVAVLKYNGIITDTIKSWRNKILRTQESECVCINGSCFTIMTDGPSNGQASYKIFKMEKGKIIKSIELDAPNYHYEECSCYPDTGKVVCVCRDNWHASNRPWVSFDQNLDYQIGYICSGVFGDNPRSNDGKGNCGPVLSNGANGVKGFSFRYGNGVWIGRTKSISSRSGFEMIWDPNGWTETDSSFSMKQDIIALTDWSGYSGSFVQHPELTGMNCIRPCFWVELIRGQPKESTIWTSGSSISFCGVNSETASWSWPDGADLPFTIDK

SEQ ID NO: 25208 - protein, 465 aa, Artificial Sequence
  derived and/or modified protein sequence (wt) from neuraminidase__InfluenzaA__AHN96324
MNPNQKILCTSATAIIIGAIAVLIGIANLGLNIGLHLKPSCNCSHSQPETTNTSQTIINNYYNETNITNIQMEERTSRNFNNLTKGLCTINSWHIYGKDNAVRIGESSDVLVTREPYVSCDPDECRFYALSQGTTIRGKHSNGTIHDRSQYRALISWPLSSPPTVYNSRVECIGWSSTSCHDGKSRMSICISGPNNNASAVVWYNRRPVAEINTWARNILRTQESECVCHNGVCPVVFTDGSATGPADTRIYYFKEGKILKWESLTGTAKHIEECSCYGERTGITCTCRDNWQGSNRPVVQIDPVAMTHTSQYICSPVLTDNPRPNDPNIGKCNDPYPGNNNNGVKGFSYLDGANTWLGRTISTASRSGYEMLKVPNALTDDRSKPIQGQTIVLNADWSGYSGSFMDYWAEGDCYRACFYVELIRGRPKEDKVWWTSNSIVSMCSSTEFLGQWNWPDGAKIEYFL

SEQ ID NO: 25209 - protein, 469 aa, Artificial Sequence; identical to SEQ ID NO: 21143
  derived and/or modified protein sequence (wt) from neuraminidase__InfluenzaA__AHN96448

SEQ ID NO: 25210 - protein, 469 aa, Artificial Sequence; identical to SEQ ID NO: 22146
  derived and/or modified protein sequence (wt) from neuraminidase__InfluenzaA__AHN96450

SEQ ID NO: 25211 - protein, 469 aa, Artificial Sequence
  derived and/or modified protein sequence (wt) from neuraminidase__InfluenzaA__AHN96451
MNPNQKIITIGSVSLTISTICFFMQIAILITTVTLHFKQYEFNSPPNNQVMLCEPTIIERNITEIMYLTNTTIEKEICPKPAEYRNWSKPQCGITGFAPFSKDNSIRLSAGGDIWVTREPYVSCDPDKCYQFALGQGTTLNNVHSNNTVRDRTPYRTLLMNELGVPFHLGTKQVCIAWSSSSCHDGKAWLHVCITGDDKNATASFIYNGRLVDSVVSWSKEILRTQESECVCINGTCTVVMTDGSASGKADTKILFIEEGKIVHTSTLSGSAQHVEECSCYPRYPGVRCVCRDNWKGSNRPIVDINIKDHSIVSSYVCSGLVGDTPRKNDSSSSSHCLDPNNEEGGHGVKGWAFDDGNDVWMGRTINETSRLGYETFKVIEGWSNPKSKLQINRQVIVDRGDRSGYSGIFSVEGKSCINRCFYVELIRGRKEETEVLWTSNSIVVFCGTSGTYGTGSWPDGADLNLMPI

SEQ ID NO: 25212 - protein, 469 aa, Artificial Sequence
  derived and/or modified protein sequence (wt) from neuraminidase__InfluenzaA__AHN96453
MNPNQKIITIGSVSLTISTICFFMQIAILITTVTLHFKQYEFNSPPNNQVMLCEPTIIERNITEIVYLTNTTIEKEICPKPAEYRNWSKPQCGITGFAPFSKDNSIRLSAGGDIWVTREPYVSCDPDKCYQFALGQGTTLDNVHSNNTVRNRTPYRTLLMNELGVPFHLGTKQVCIAWSSSSCHDGKAWLHVCITGDDKNATASFIYNGRLVDSVVSWSKDILRTQESECVCINGTCTVVMTDGSASGKADTKILFIEEGKIVHTSTLSGSAQHVEECSCYPRYPGVRCVCRDNWKGSNRPIVDINIKDHSIVSSYVCSGLVGDTPRKNDSSSSSHCLDPNNEEGGHGVKGWAFDDGNDVWMGRTINETSRLGYETFKVIEGWSNPKSKLQINRQVIVDRGDRSGYSGIFSIEGKSCINRCFYVELIRGRKEETEVLWTSNSIVVFCGTSGTYGTGSWPDGADLNLMPI

SEQ ID NO: 25213 - protein, 469 aa, Artificial Sequence
  derived and/or modified protein sequence (wt) from neuraminidase__InfluenzaA__AHZ13526
MNPNQKIITIGSVSLTIATICFLMQIAILVTTVTLHFKQYECSSPPNNQVMPCEPIIIERNMTEIVYLTNTTIEKEICPKLVEYRNWSKPQCKITGFAPFSKDNSIRLSAGGDIWVTREPYVSCDPGKCYQFALGQGTTLNNKHSNDTIHDRTPYRTLLMNELGVPFHLGTKQVCIAWSSSSCHDGKAWLHVCVTGHDKNATASFIYDGRLVDSIGSWSKNILRTQESECVCINGTCTVVMTDGSASDRADTKILFIEEGKIVHISPLSGSAQHVEECSCYPRYPGVRCVCRDNWKGSNRPIVDINVKDYSIVSSYVCSGLVGDTPRKNDGSSSSYCRNPNNEKGNHGVKGWAFDDGNDVWMGRTIGEELRSGYETFKVIGGWSTPNSKLQINRQVIVDSNNRSGYSGIFSVEGKSCINRCFYVELIRGREQETRVWWTSNSIVVFCGTSGTYGTGSWPDGADINLMPI

SEQ ID NO: 25214 - protein, 470 aa, Artificial Sequence; identical to SEQ ID NO: 20205
  derived and/or modified protein sequence (wt) from neuraminidase__InfluenzaA__AHZ13584

SEQ ID NO: 25215 - protein, 469 aa, Artificial Sequence; identical to SEQ ID NO: 22922
  derived and/or modified protein sequence (wt) from neuraminidase__InfluenzaA__AHZ35575

SEQ ID NO: 25216 - protein, 469 aa, Artificial Sequence; identical to SEQ ID NO: 22922
  derived and/or modified protein sequence (wt) from neuraminidase__InfluenzaA__AHZ35587

SEQ ID NO: 25217 - protein, 469 aa, Artificial Sequence
  derived and/or modified protein sequence (wt) from neuraminidase__InfluenzaA__AHZ35611
MNPNQKIITIGSVSLTISTICFFMQIAILITTVTLHFKQYEFNSPPNNQVMLCEPTIIERNITEIVYLTNTTIEKEICPKPAEYRNWSKPQCDITGFAPFSKDNSIRLSAGGDIWVTREPYVSCDPDKCYQFALGQGTTLNNVHSNNTVRDRTPYRTLLMNELGVPFHLGTKQVCIAWSSSSCHDGKAWLHVCITGDDKNATASFIYNGRLVDSVVSWSKEILRTQESECVCINGTCTVVMTDGSASGKADTKILFIEEGKIVHTSTLSGSAQHVEECSCYPRYPGVRCVCRDNWKGSNRPIVDINIKDHSIVSSYVCSGLVGDTPRKNDSSSSSHCLDPNNEEGGHGVKGWAFDDGNDVWMGRTINETSRLGYETFKVIEGWSNPKSKLQINRQVIVDRGDRSGYSGIFSVEGRSCINRCFYVELIRGRKEETEVLWTSNSIVVFCGTSGTYGTGSWPDGADLNLMPI

SEQ ID NO: 25218 - protein, 469 aa, Artificial Sequence; identical to SEQ ID NO: 22922
  derived and/or modified protein sequence (wt) from neuraminidase__InfluenzaA__AHZ35623

SEQ ID NO: 25219 - protein, 469 aa, Artificial Sequence; identical to SEQ ID NO: 22922
  derived and/or modified protein sequence (wt) from neuraminidase__InfluenzaA__AHZ35635

SEQ ID NO: 25220 - protein, 469 aa, Artificial Sequence
  derived and/or modified protein sequence (wt) from neuraminidase__InfluenzaA__AHZ35647
MNPNQKIITIGSVSLTISTICFFMQIAILITTVTLHFKQYEFNSPPNNQVMLCEPTIIERNITEIVYLTNTTIEKEICPKPAEYRNWSKPQCDITGFAPFSKDNSIRLSAGGDIWVTREPYVSCDPDKCYQFALGQGTTLNNVHSNNTVRDRTPYRTLLMNELGVPFHLGTKQVCIAWSSSSCHDGKAWLHVCITGDDKNATASFIYNGRLVDSVVSWSKEILRTQESECVCINGTCTVVMTDGSASGKADTKILFIEEGKIVHTSTLSGSAQHVEECSCYPRYPDVRCVCRDNWKGSNRPIVDINIKDHSIVSSYVCSGLVGDTPRKNDSSSSSHCLDPNNEEGGHGVKGWAFDDGNDVWMGRTINETSRLGYETFKVIEGWSNPKSKLQINRQVIVDRGDRSGYSGIFSVEGKSCINRCFYVELIRGRKEETEVLWTSNSIVVFCGTSGTYGTGSWPDGADLNLMPI

SEQ ID NO: 25221 - protein, 469 aa, Artificial Sequence; identical to SEQ ID NO: 22922
  derived and/or modified protein sequence (wt) from neuraminidase__InfluenzaA__AHZ35659

SEQ ID NO: 25222 - protein, 469 aa, Artificial Sequence; identical to SEQ ID NO: 22922
  derived and/or modified protein sequence (wt) from neuraminidase__InfluenzaA__AHZ35671

SEQ ID NO: 25223 - protein, 469 aa, Artificial Sequence; identical to SEQ ID NO: 22922
  derived and/or modified protein sequence (wt) from neuraminidase__InfluenzaA__AHZ35683

SEQ ID NO: 25224 - protein, 469 aa, Artificial Sequence
  derived and/or modified protein sequence (wt) from neuraminidase__InfluenzaA__AHZ35695
MNPNQKIITIGSVSLTISTICFFMQIAILITTVTLHFKQYEFNPPPNNQVMLCEPTIIERNITEIVYLTNTTIEKEICPKPAEYRNWSKPQCDITGFAPFSKDNSIRLSAGGDIWVTREPYVSCDPDKCYQFALGQGTTLNNVHSNNTVRDRTPYRTLLMNELGVPFHLGTKQVCIAWSSSSCHDGKAWLHVCITGDDKNATASFIYNERLVDSVVSWSKEILRTQESECVCINGTCTVVMTDGSASGKADTKILFIEEGKIVHTSTLSGSAQHVEECSCYPRYPGVRCVCRDNWKGSNRPIVDINIKDHSIVSSYVCSGLVGDTPRKNDSSSSSHCLDPNNEEGGHGVKGWAFDDGNDVWMGRTINETSRLGYETFKVIEGWSNPKSKLQINRQVIVDRGDRSGYSGIFSVEGNSCINRCFYVELIRGRKEETEVLWTSNSIVVFCGTSGTYGTGSWPDGADLNLMPI

SEQ ID NO: 25225 - protein, 469 aa, Artificial Sequence
  derived and/or modified protein sequence (wt) from neuraminidase__InfluenzaA__AHZ35719
MNPNQKIITIGSVSLTISTICFFMQIAILITTVTLHFKQYEFNSPPNNQVMLCEPTIIERNITEIVYLTNTTIEKEICPKPAEYRNWSKPQCDITGFAPFSKDNSIRLSAGGDIWVTREPYVSCDPDKCYQFALGQGTTLNNVHSNNTVRDRTPYRTLLMNELGVPFHLGTKQVCIAWSSSSCHDGKAWLHVCITGDDKNATASFIYNGRLVDSVVSWSKEILRTQESECVCINGTCTVVMTDGSASGKADTKILFIEEGKIVHTSTLSGSAQHVEECSCYPRYPGVRCVCRDNWKGSNRPIVDINIKDHSIVSSYVCSGLVGDTPRKNDSSSSSHCLDPNNEEGGHGVKGWAFDDGNDVWMGRTINETSRLGYETFKVIEGWSNPKSKLQINRQVIVDRGDRSGYSGIFSVEGKSCINRCFYVELIRGRKEETEVLWTSNSIVVFCGTSGTYGTGSWPDGADLNLTPI

SEQ ID NO: 25226 - protein, 469 aa, Artificial Sequence; identical to SEQ ID NO: 22922
  derived and/or modified protein sequence (wt) from neuraminidase__InfluenzaA__AHZ35731

SEQ ID NO: 25227 - protein, 469 aa, Artificial Sequence; identical to SEQ ID NO: 22922
  derived and/or modified protein sequence (wt) from neuraminidase__InfluenzaA__AHZ35743

SEQ ID NO: 25228 - protein, 469 aa, Artificial Sequence; identical to SEQ ID NO: 22922
  derived and/or modified protein sequence (wt) from neuraminidase__InfluenzaA__AHZ35755

SEQ ID NO: 25229 - protein, 469 aa, Artificial Sequence; identical to SEQ ID NO: 22922
  derived and/or modified protein sequence (wt) from neuraminidase__InfluenzaA__AHZ35767

SEQ ID NO: 25230 - protein, 469 aa, Artificial Sequence; identical to SEQ ID NO: 22922
  derived and/or modified protein sequence (wt) from neuraminidase__InfluenzaA__AHZ35779

SEQ ID NO: 25231 - protein, 469 aa, Artificial Sequence
  derived and/or modified protein sequence (wt) from neuraminidase__InfluenzaA__AHZ35803
MNPNQKIITIGSVCMTIGMANLMLQIGNIISIWISHSIQLGNKNQIETCNQSVITYENNTWVNQTYVNISNTNFAAGQSVVSVKIAGNSSLCPVSGWAIYSKDNSIRIGSKGDVFVIREPFISCSPLECRTFFLTQGALLNDKHSNGTIKDRSPYRTLMSCPIGEVPSPYNSRFESVAWSASACHDGINWLTIGISGPDNGAVAVLKYNGIITDTIKSWRNNILRTQESECACVNGSCFTIMTDGPSDGQASYKIFRIEKGKIVKSVEMNAPNYHYEECSCYPDSSEITCVCRDNWHGSNRPWVSFNQNLEYQIGYICSGIFGDNPRPHDKTGSCGPVSSNGANGVKGFSFKYGNGVWIGRTKSISSRKGFEMIWDPNGWTGTDNNFSIKQDIVGMNEWSGYSGSFVQHPELTGLDCIRPCFWVELIRGRPKENTIWTSGSSISFCGVNSDTVGWSWPDGAELPFTIDK

SEQ ID NO: 25232 - protein, 469 aa, Artificial Sequence
  derived and/or modified protein sequence (wt) from neuraminidase__InfluenzaA__AHZ35814
MNPNQKIITIGSVSLTISTICFFMQIAILITTVTLHFKQYEFNSPPNNQVMLCEPTIIERNITEIVYLTNTTIEKEICPKLAEYRNWSKPQCDITGFAPFSKDNSIRLSAGGDLWVTREPYVSCDPDKCYQFALGQGTTLNNVHSNNTVRDRTPYRTLLMNELGVPFHLGTKQVCIAWSSSSCHDGKAWLHVCITGDDKNATASFIYNGRLVDSVVSWSKEILRTQESECVCINGTCTVVMTDGSASGKADTKILFIEEGKIVHTSTLSGSAQHVEECSCYPRYPGVRCVCRDNWKGSNRPIVDINIKDHSIVSSYVCSGLVGDTPRKNDSSSSSHCLDPNNEEGGHGVKGWAFDDGNDVWMGRTINETSRLGYETFKVIEGWSNPKSKLQINRQVIVDRGNRSGYSGIFSVEGKSCINRCFYVELIRGRKEETEVLWTSNSIVVFCGTSGTYGTGSWPDGADLNLMPI

SEQ ID NO: 25233 - protein, 469 aa, Artificial Sequence
  derived and/or modified protein sequence (wt) from neuraminidase__InfluenzaA__AHZ35837
MNPNQKIITIGSVCMTIGMANLMLQIGNIISIWISHSIQLGNKNQIETCNQSVITYENNTWVNQTYVNISNTNFAAGQSVVSVKIAGNSSLCPVSGWAIYSKDNSIRIGSKGDVFVIREPFISCSPLECRTFFLTQGALLNDKHSNGTIKDRSPYRTLMSCPIGEVPSPYNSRFESVAWSASACHDGINWLTIGISGPDNGAVAVLKYNGIITDTIKSWRNNILRTQESECACVNGSCFTIMTDGPSDGQASYKIFRIEKGKIVKSVEMNAPNYHYEECSCYPDSSEITCVCRDNWHGSNRPWVSFNQNLEYQIGYICSGIFGDNPRPHDKTGSCGPVSSNGANGVKGFSFKYGNGVWIGRTKSISSRKGFEMIWDPNGWTGTDNNFSIKQDIVGINEWSGYSGSFVQHPELTGLDCIRPCFWVELIRGRPKENTIWTSGSSISFCGVNSDTVGWSWPDGAELPFTIDK

SEQ ID NO: 25234 - protein, 469 aa, Artificial Sequence; identical to SEQ ID NO: 25233
  derived and/or modified protein sequence (wt) from neuraminidase__InfluenzaA__AHZ35848

SEQ ID NO: 25235 - protein, 469 aa, Artificial Sequence; identical to SEQ ID NO: 25233
  derived and/or modified protein sequence (wt) from neuraminidase__InfluenzaA__AHZ35859

SEQ ID NO: 25236 - protein, 469 aa, Artificial Sequence; identical to SEQ ID NO: 25232
  derived and/or modified protein sequence (wt) from neuraminidase__InfluenzaA__AHZ35870

SEQ ID NO: 25237 - protein, 469 aa, Artificial Sequence; identical to SEQ ID NO: 25232
  derived and/or modified protein sequence (wt) from neuraminidase__InfluenzaA__AHZ35882

SEQ ID NO: 25238 - protein, 469 aa, Artificial Sequence
  derived and/or modified protein sequence (wt) from neuraminidase__InfluenzaA__AHZ35894
MNPNQKIITIGSVCMTIGMANLMLQIGNIISIWISHSIQLGNKNQIETCNQSVITYENNTWVNQTYVNISNTNFAAGQSVVSVKIAGNSSLCPVSGWAIYSKDNSIRIGSKGDVFVIREPFISCSPLECRTFFLTQGALLNDKHSNGTIKDRSPYRTLMSCPIGEVPSPYNSRFESVAWSASACHDGINWLTIGISGPDNGAVAVLKYNGIITDTIKSWRNNILRTQESECACVNGSCFTIMTDGPSDGQASYKIFRIEKGKIVKSVEMNAPNYHYEECSCYPDSSEITCVCRDNWHGSNRPWVSFNQNLEYQIGYICSGIFGDNPRPHDKTGSCGPVSSNGANGVKGFSFKYGSGVWIGRTKSISSRKGFEMIWDPNGWTGTDNNFSIKQDIVGINEWSGYSGSFVQHPELTGLDCIRPCFWVELIRGRPKENTIWTSGSSISFCGVNSDTVGWSWPDGAELPFTIDK

SEQ ID NO: 25239 - protein, 469 aa, Artificial Sequence; identical to SEQ ID NO: 25233
  derived and/or modified protein sequence (wt) from neuraminidase__InfluenzaA__AHZ35905

SEQ ID NO: 25240 - protein, 469 aa, Artificial Sequence; identical to SEQ ID NO: 25233
  derived and/or modified protein sequence (wt) from neuraminidase__InfluenzaA__AHZ35916

SEQ ID NO: 25241 - protein, 469 aa, Artificial Sequence; identical to SEQ ID NO: 20958
  derived and/or modified protein sequence (wt) from neuraminidase__InfluenzaA__AHZ35927

SEQ ID NO: 25242 - protein, 469 aa, Artificial Sequence
  derived and/or modified protein sequence (wt) from neuraminidase__InfluenzaA__AHZ35938
MNPNQKIITIGSVCMIIGMANLILQIGNIISIWISHSIQLGNQNQIETCNQSVITYENNTWVNQTYVNISNTNFAAGQSVVSVKLAGNSSLCPVSGWAIYSKDNSIRIGSKGDVFVIREPFISCSPLECRTFFLTQGALLNDKHSNGTIKDRSPYRTLMSCPIGEVPSPYNSRFESVAWSASACHDGINWLTIGISGPDNGAVAVLKYNGIITDTIKSWRNNILRTQESECACVNGSCFTIMTDGPSDGQASYKIFRIEKGKIVKSVEMNAPNYHYEECSCYPDSSEITCVCRDNWHGSNRPWVSFNQNLEYQIGYICSGIFGDNPRPHDKTGSCGPVSSNGANGVKGFSFKYGNGVWIGRTKSISSRKGFEMIWDPNGWTGTDNNFSIKQDIVGINEWSGYSGSFVQHPELTGLDCIRPCFWVELIRGRPKENTIWTSGSSISFCGVNSDTVGWSWPDGAELPFTIDK

SEQ ID NO: 25243 - protein, 469 aa, Artificial Sequence; identical to SEQ ID NO: 25232
  derived and/or modified protein sequence (wt) from neuraminidase__InfluenzaA__AHZ35949

SEQ ID NO: 25244 - protein, 469 aa, Artificial Sequence
  derived and/or modified protein sequence (wt) from neuraminidase__InfluenzaA__AHZ35961
MNPNQKIITIGSVCMTIGMANLMLQIGNIISIWISHSIQLGNKNQIETCNQSVITYENNTWVNQTYVNISNTNFAAGQSVVSVKIAGNSSLCPVSGWAIYSKDNSIRIGSKGDVFVIREPFISCSPLECRTFFLTQGALLNDKHSNGTIKDRSPYRTLMSCPIGEVPSPYNSRFESVAWSASACHDGINWLTIGISGPDNGAVAVLKYNGIITDTIKSWRNNILRTQESECACVNGSCFTIMTDGPSDGQASYKIFRIEKGKIVKSVEMNAPNYHYEECSCYPDSSEITCVCRDNWHGSNRPWVSFNQNLEYQIGYICSGIFGDNPRPHDKTGSCGPVSSNGANGVKGFSFKYGNGVWIGRTKSISSRKGFEMIWDPNGWTGTDNNFSIKQDIVGINEWSGYSGSFVQHPELTGLDCIRPCFWVELIRGRPKESTIWTSGSSISFCGVNSDTVGWSWPDGAELPFTIDK

SEQ ID NO: 25245 - protein, 469 aa, Artificial Sequence; identical to SEQ ID NO: 25233
  derived and/or modified protein sequence (wt) from neuraminidase__InfluenzaA__AHZ35972

SEQ ID NO: 25246 - protein, 469 aa, Artificial Sequence
  derived and/or modified protein sequence (wt) from neuraminidase__InfluenzaA__AHZ35983
MNPNQKITTIGSVCMTIGMANLMLQIGNIISIWISHSIQLGNKNQIETCNQSVITYENNTWVNQTYVNISNTNFAAGQSVVSVKIAGNSSLCPVSGWAIYSKDNSIRIGSKGDVFVIREPFISCSPLECRTFFLTQGALLNDKHSNGTIKDRSPYRTLMSCPIGEVPSPYNSRFESVAWSASACHDGINWLTIGISGPDNGAVAVLKYNGIITDTIKSWRNNILRTQESECACVNGSCFTIMTDGPSDGQASYKIFRIEKGKIVKSVEMNAPNYHYEECSCYPDSSEITCVCRDNWHGSNRPWVSFNQNLEYQIGYICSGIFGDNPRPHDKTGSCGPVSSNGANGVKGFSFKYGNGVWIGRTKSISSRKGFEMIWDPNGWTGTDNNFSIKQDIVGINEWSGYSGSFVQHPELTGLDCIRPCFWVELIRGRPKENTIWTSGSSISFCGVNSDTVGWSWPDGAELPFTIDK

SEQ ID NO: 25247 - protein, 469 aa, Artificial Sequence; identical to SEQ ID NO: 25233
  derived and/or modified protein sequence (wt) from neuraminidase__InfluenzaA__AHZ35994

SEQ ID NO: 25248 - protein, 469 aa, Artificial Sequence; identical to SEQ ID NO: 25233
  derived and/or modified protein sequence (wt) from neuraminidase__InfluenzaA__AHZ36005

SEQ ID NO: 25249 - protein, 469 aa, Artificial Sequence; identical to SEQ ID NO: 25233
  derived and/or modified protein sequence (wt) from neuraminidase__InfluenzaA__AHZ36016

SEQ ID NO: 25250 - protein, 469 aa, Artificial Sequence
  derived and/or modified protein sequence (wt) from neuraminidase__InfluenzaA__AHZ36027
MNPNQKIITIGSVCMTIGMANLILQIGNIISIWISHSIQLGNQNQIETCNQSVIIYENNTWVNQTYVNISNTNFAAGQSVVSVKLAGNSSLCPVSGWAIYSKDNSIRIGSKGDVFVIREPFISCSPLECRTFFLTQGALLNDKHSNGTIKDRSPYRTLMSCPIGEVPSPYNSRFESVAWSASACHDGFNWLTIGISGPDNGAVAVLKYNGIITDTIKSWRNNILRTQESECACVNGSCFTIMTDGPSDGQASYKIFRIEKGKIVKSVEMNAPNYHYEECSCYPDSSEITCVCRDNWHGSNRPWVSFNQNLEYQIGYICSGIFGDNPRPNDKTGSCGPVSSNGANGVKGFSFKYGNGVWIGRTKSISSRKGFEMIWDPNGWTGTDNNFSIKQDIIGINEWSGYSGSFVQHPELTGLDCIRPCFWVELIRGRPKENTIWTSGSSISFCGVNSDTVGWSWPDGAELPFTIDK

SEQ ID NO: 25251 - protein, 469 aa, Artificial Sequence
  derived and/or modified protein sequence (wt) from neuraminidase__InfluenzaA__AHZ36050
MNPNQKIITIGSVSLTISTICFFMQIAILITTVTLHFKQYEFNSPPNNQVMLCEPTIIERNITEIVYLTNTTIEKEICPKLAEYRNWSKPQCDITGFAPFSKDNSIRLSAGGDIWVTREPYVSCDPDKCYQFALGQGTTLNNVHSNNTVRDRTPYRTLLMNELGVPFHLGTKQVCIAWSSSSCHDGKAWLHVCITGDDKNATASFIYNGRLVDSVVSWSKEILRTQESECVCINGTCTVVMTDGSASGKADTKILFIEEGKIVHTSTLSGSAQHVEECSCYPRYPGVRCVCRDNWKGSNRPIVDINIKDHSIVSSYVCSGLVGDTPRRNDSSSSSHCLDPNNEEGGHGVKGWAFDDGNDVWMGRTINETSRLGYETFKVIEGWSNPKSKLQINRQVIVDRGNRSGYSGIFSVEGKSCINRCFYVELIRGRKEETEVLWTSNSIVVFCGTSGTYGTGSWPDGADLNLMPI

SEQ ID NO: 25252 - protein, 469 aa, Artificial Sequence
  derived and/or modified protein sequence (wt) from neuraminidase__InfluenzaA__AHZ36062
MNPNQKIITIGSVCMTIGMANLMLQIGNIISIWISHSIQLGNKNQIETCNQSVITYENNTWVNQTYVNISNTNFAAGQSVVSVKIAGNSSLCPVSGWAIYSKDNSIRIGSKGDVFVIREPFISCSPLGCRTFFLTQGALLNDKHSNGTIKDRSPYRTLMSCPIGEVPSPYNSRFESVAWSASACHDGINWLTIGISGPDNGAVAVLKYNGIITDTIKSWRNNILRTQESECACVNGSCFTIMTDGPSDGQASYKIFRIEKGKIVKSVEMNAPNYHYEECSCYPDSSEITCVCRDNWHGSNRPWVSFNQNLEYQIGYICSGIFGDNPRPHDKTGSCGPVSSNGANGVKGFSFKYGNGVWIGRTKSISSRKGFEMIWDPNGWTGTDNNFSIKQDIVGINEWSGYSGSFVQHPELTGLDCIRPCFWVELIRGRPKENTIWTSGSSISFCGVNSDTVGWSWPDGAELPFTIDK

SEQ ID NO: 25253 - protein, 469 aa, Artificial Sequence; identical to SEQ ID NO: 25233
  derived and/or modified protein sequence (wt) from neuraminidase__InfluenzaA__AHZ36084

SEQ ID NO: 25254 - protein, 469 aa, Artificial Sequence
  derived and/or modified protein sequence (wt) from neuraminidase__InfluenzaA__AHZ36095
MNPNQKIITIGSVCMTIGMANLILQIGNIISIWISHSIQLGNQNQIETCNQSVIIYENNTWVNQTYVNISNTNFAAGQSVVSVKLAGNSSLCPVSGWAIYSKDNSIRIGSKGDVFVIREPFISCSPLECRTFFLTQGALLNDKHSNGTIKDRSPYRTLMSCPIGEVPSPYNSRFESVAWSASACHDGFNWLTIGISGPDNGAVAVLKYNGIITDTIKSWRNNILRTQESECACVNGSCFTIMTDGPSDGQASYKIFRIEKGKIVKSVEMNAPNYHYEECSCYPDSSEITCVCRDNWHGSNRPWVSFNQNLEYQIGYICSGIFGDNPRPNDKTGGCGPVSSNGANGVKGFSFKYGNGVWIGRTKSISSRKGFEMIWDPNGWTGTDNNFSIKQDIIGINEWSGYSGSFVQHPELTGLDCIRPCFWVELIRGRPKENTIWTSGSSISFCGVNSDTVGWSWPDGAELPFTIDK

SEQ ID NO: 25255 - protein, 469 aa, Artificial Sequence; identical to SEQ ID NO: 25233
  derived and/or modified protein sequence (wt) from neuraminidase__InfluenzaA__AHZ36106

SEQ ID NO: 25256 - protein, 469 aa, Artificial Sequence
  derived and/or modified protein sequence (wt) from neuraminidase__InfluenzaA__AHZ36117
MNPNQKIITIGSVCMTIGMANLILQIGNIISIWISHSIQLGNQNQIETCNQSVIIYENNTWVNQTYVNISNTNFAAGQSVVSVKLAGNSSLCPVSGWAIYSKDNSIRIGSKGDVFVIREPFISCSPLECRTFFLTQGALLNDKHSNGTIKDRSPYRTLMSCSIGEVPSPYNSRFESVAWSASACHDGFNWLTIGISGPDNGAVAVLKYNGIITDTIKSWRNNILRTQESECACVNGSCFTIMTDGPSDGQASYKIFRIEKGKIVKSVEMNAPNYHYEECSCYPDSSEITCVCRDNWHGSNRPWVSFNQNLEYQIGYICSGIFGDNPRPNDKTGSCGPVSSNGANGVKGFSFKYGNGVWIGRTKSISSRKGFEMIWDPNGWTGTDNNFSIKQDIIGINEWSGYSGSFVQHPELTGLDCIRPCFWVELIRGRPKENTIWTSGSSISFCGVNSDTVGWSWPDGAELPFTIDK

SEQ ID NO: 25257 - protein, 469 aa, Artificial Sequence; identical to SEQ ID NO: 25233
  derived and/or modified protein sequence (wt) from neuraminidase__InfluenzaA__AHZ36128

SEQ ID NO: 25258 - protein, 469 aa, Artificial Sequence; identical to SEQ ID NO: 25233
  derived and/or modified protein sequence (wt) from neuraminidase__InfluenzaA__AHZ36139

SEQ ID NO: 25259 - protein, 469 aa, Artificial Sequence; identical to SEQ ID NO: 25251
  derived and/or modified protein sequence (wt) from neuraminidase__InfluenzaA__AHZ36150

SEQ ID NO: 25260 - protein, 469 aa, Artificial Sequence; identical to SEQ ID NO: 25233
  derived and/or modified protein sequence (wt) from neuraminidase__InfluenzaA__AHZ36161

SEQ ID NO: 25261 - protein, 469 aa, Artificial Sequence; identical to SEQ ID NO: 25233
  derived and/or modified protein sequence (wt) from neuraminidase__InfluenzaA__AHZ36172

SEQ ID NO: 25262 - protein, 469 aa, Artificial Sequence
  derived and/or modified protein sequence (wt) from neuraminidase__InfluenzaA__AHZ36183
MNPNQKIITIGSVCMTIGMANLMLQIGNIISIWISHSIQLGNKNQIETCNQSVITYENNTWVNQTYVNISNTNFAAGQSVVSVKIAGNSSLCPVSGWAIYSKDNSIRIGSKGDVFVIREPFISCSPLECRTFFLTQGALLNDKHSNGTIKDRSPYRTLMSCPIGEVPSPYNSRFESVAWSASACHDGINWLTIGISGPDNGAVAVLKYNGIITDTIKSWRNNILRTQESECACVNGSCFTIMTDGPSDGQASYKIFRIEKGKIVKSVEMNAPNYHYEECSCYPDSSEITCVCRDNWHGSNRPWVSFNQNLEYQIGYICSGILGDNPRPHDKTGSCGPVSSNGANGVKGFSFKYGNGVWIGRTKSISSRKGFEMIWDPNGWTGTDNNFSIKQDIVGINEWSGYSGSFVQHPELTGLDCIRPCFWVELIRGRPKENTIWTSGSSISFCGVNSDTVGWSWPDGAELPFTIDK

SEQ ID NO: 25263 - protein, 469 aa, Artificial Sequence; identical to SEQ ID NO: 25232
  derived and/or modified protein sequence (wt) from neuraminidase__InfluenzaA__AHZ36194

SEQ ID NO: 25264 - protein, 469 aa, Artificial Sequence; identical to SEQ ID NO: 25251
  derived and/or modified protein sequence (wt) from neuraminidase__InfluenzaA__AHZ36206

SEQ ID NO: 25265 - protein, 469 aa, Artificial Sequence; identical to SEQ ID NO: 25233
  derived and/or modified protein sequence (wt) from neuraminidase__InfluenzaA__AHZ36218

SEQ ID NO: 25266 - protein, 469 aa, Artificial Sequence; identical to SEQ ID NO: 25251
  derived and/or modified protein sequence (wt) from neuraminidase__InfluenzaA__AHZ36229

SEQ ID NO: 25267 - protein, 469 aa, Artificial Sequence; identical to SEQ ID NO: 25233
  derived and/or modified protein sequence (wt) from neuraminidase__InfluenzaA__AHZ36241

SEQ ID NO: 25268 - protein, 469 aa, Artificial Sequence; identical to SEQ ID NO: 25233
  derived and/or modified protein sequence (wt) from neuraminidase__InfluenzaA__AHZ36252

SEQ ID NO: 25269 - protein, 469 aa, Artificial Sequence; identical to SEQ ID NO: 25233
  derived and/or modified protein sequence (wt) from neuraminidase__InfluenzaA__AHZ36263

SEQ ID NO: 25270 - protein, 469 aa, Artificial Sequence; identical to SEQ ID NO: 22922
  derived and/or modified protein sequence (wt) from neuraminidase__InfluenzaA__AHZ36274

SEQ ID NO: 25271 - protein, 469 aa, Artificial Sequence; identical to SEQ ID NO: 25233
  derived and/or modified protein sequence (wt) from neuraminidase__InfluenzaA__AHZ36286

SEQ ID NO: 25272 - protein, 469 aa, Artificial Sequence
  derived and/or modified protein sequence (wt) from neuraminidase__InfluenzaA__AHZ36297
MNPNQKIITIGSVSLTISTICFFMQIAILITTVTLHFKQYEFNSPPNNQVMLCEPTIIERNITEIVYLTNTTIEKEICPRPAEYRNWSKPQCDITGFAPFSKDNSIRLSAGGDIWVTREPYVSCDPDKCYQFALGQGTTLNNVHSNNTVRDRTPYRTLLMNELGVPFHLGTKQVCIAWSSSSCHDGKAWLHVCITGDDKNATASFIYNGRLVDSVVSWSKEILRTQESECVCINGTCTVVMTDGSASGKADTKILFIEEGKIVHTSTLSGGAQHVEECSCYPRYPGVRCVCRDNWKGSNRPIVDINIKDHSIVSSYVCSGLVGDTPRKNDSSSSSHCLDPNNEEGGHGVKGWAFDDGNDVWMGRTINETSRLGYETFKVIEGWSNPKSKLQINRQVIVDRGDRSGYSGIFSVEGKSCINRCFYVELIRGRKEETEVLWTSNSIVVFCGTSGTYGTGSWPDGADLNLMPI

SEQ ID NO: 25273 - protein, 469 aa, Artificial Sequence
  derived and/or modified protein sequence (wt) from neuraminidase__InfluenzaA__AHZ36309
MNPNQKIITIGSVCMTIGMANLMLQIGNIISIWISHSIQLGDKNQIETCNQSVITYENNTWVNQTYVNISNTNFAAGQSVVSVKIAGNSSLCPVSGWAIYSKDNSIRIGSKGDVFVIREPFISCSPLECRTFFLTQGALLNDKHSNGTIKDRSPYRTLMSCPIGEVPSPYNSRFESVAWSASACHDGINWLTIGISGPDNGAVAVLKYNGIITDTIKSWRNNILRTQESECACVNGSCFTIMTDGPSDGQASYKIFRIEKGKIVKSVEMNAPNYHYEECSCYPDSSEITCVCRDNWHGSNRPWVSFNQNLEYQIGYICSGIFGDNPRPHDKTGSCGPVSSNGANGVKGFSFKYGNGVWIGRTKSISSRKGFEMIWDPNGWTGTDNNFSIKQDIVGINEWSGYSGSFVQHPELTGLDCIRPCFWVELIRGRPKENTIWTSGSSISFCGVNSDTVGWSWPDGAELPFTIDK

SEQ ID NO: 25274 - protein, 469 aa, Artificial Sequence; identical to SEQ ID NO: 25233
  derived and/or modified protein sequence (wt) from neuraminidase__InfluenzaA__AHZ36320

SEQ ID NO: 25275 - protein, 469 aa, Artificial Sequence; identical to SEQ ID NO: 25233
  derived and/or modified protein sequence (wt) from neuraminidase__InfluenzaA__AHZ36331

SEQ ID NO: 25276 - protein, 469 aa, Artificial Sequence; identical to SEQ ID NO: 22922
  derived and/or modified protein sequence (wt) from neuraminidase__InfluenzaA__AHZ36353

SEQ ID NO: 25277 - protein, 469 aa, Artificial Sequence
  derived and/or modified protein sequence (wt) from neuraminidase__InfluenzaA__AHZ36365
MNPNQKIITIGSVCMTIGMANLMLQIGNIISIWISHPIQLGNKNQIETCNQSVITYENNTWVNQTYVNISNTNFAAGQSVVSVKIAGNSSLCPVSGWAIYSKDNSIRIGSKGDVFVIREPFISCSPLECRTFFLTQGALLNDKHSNGTIKDRSPYRTLMSCPIGEVPSPYNSRFESVAWSASACHDGINWLTIGISGPDNGAVAVLKYNGIITDTIKSWRNNILRTQESECACVNGSCFTIMTDGPSDGQASYKIFRIEKGKIVKSVEMNAPNYHYEECSCYPDSSEITCVCRDNWHGSNRPWVSFNQNLEYQIGYICSGIFGDNPRPHDKTGSCGPVSSNGANGVKGFSFKYGNGVWIGRTKSISSRKGFEMIWDPNGWTGTDNNFSIKQDIVGINEWSGYSGSFVQHPELTGLDCIRPCFWVELIRGRPKENTIWTSGSSISFCGVNSDTVGWSWPDGAELPFTIDK

SEQ ID NO: 25278 - protein, 469 aa, Artificial Sequence; identical to SEQ ID NO: 22922
  derived and/or modified protein sequence (wt) from neuraminidase__InfluenzaA__AHZ36376

SEQ ID NO: 25279 - protein, 469 aa, Artificial Sequence; identical to SEQ ID NO: 22922
  derived and/or modified protein sequence (wt) from neuraminidase__InfluenzaA__AHZ36388

SEQ ID NO: 25280 - protein, 469 aa, Artificial Sequence; identical to SEQ ID NO: 22922
  derived and/or modified protein sequence (wt) from neuraminidase__InfluenzaA__AHZ36400

SEQ ID NO: 25281 - protein, 469 aa, Artificial Sequence; identical to SEQ ID NO: 22922
  derived and/or modified protein sequence (wt) from neuraminidase__InfluenzaA__AHZ36412

SEQ ID NO: 25282 - protein, 469 aa, Artificial Sequence; identical to SEQ ID NO: 22922
  derived and/or modified protein sequence (wt) from neuraminidase__InfluenzaA__AHZ36424

SEQ ID NO: 25283 - protein, 469 aa, Artificial Sequence; identical to SEQ ID NO: 22922
  derived and/or modified protein sequence (wt) from neuraminidase__InfluenzaA__AHZ36436

SEQ ID NO: 25284 - protein, 469 aa, Artificial Sequence
  derived and/or modified protein sequence (wt) from neuraminidase__InfluenzaA__AHZ36448
MNPNQKIITIGSVSLTISTICFFMQIAILITTVTLHFKQYEFNSPPNNQVMLCEPTIIEKNITEIVYLTNTTIEKEICPKPAEYRNWSKPQCDITGFAPFSKDNSIRLSAGGDIWVTREPYVSCDPDKCYQFALGQGTTLNNVHSNNTVRDRTPYRTLLMNELGVPFHLGTKQVCIAWSSSSCHDGKAWLHVCITGDDKNATASFIYNGRLVDSVVSWSKEILRTQESECVCINGTCTVVMTDGSASGKADTKILFIEEGKIVHTSTLSGSAQHVEECSCYPRYPGVRCVCRDNWKGSNRPIVDINIKDHSIVSSYVCSGLVGDTPRKNDSSSSSHCLDPNNEEGGHGVKGWAFDDGNDVWMGRTINETSRLGYETFKVIEGWSNPKSKLQINRQVIVDRGDRSGYSGIFSVEGKSCINRCFYVELIRGRKEETEVLWTSNSIVVFCGTSGTYGTGSWPDGADLNLMPI

SEQ ID NO: 25285 - protein, 469 aa, Artificial Sequence; identical to SEQ ID NO: 22922
  derived and/or modified protein sequence (wt) from neuraminidase__InfluenzaA__AHZ36460

SEQ ID NO: 25286 - protein, 469 aa, Artificial Sequence; identical to SEQ ID NO: 22922
  derived and/or modified protein sequence (wt) from neuraminidase__InfluenzaA__AHZ36472

SEQ ID NO: 25287 - protein, 469 aa, Artificial Sequence; identical to SEQ ID NO: 22922
  derived and/or modified protein sequence (wt) from neuraminidase__InfluenzaA__AHZ36484

SEQ ID NO: 25288 - protein, 469 aa, Artificial Sequence; identical to SEQ ID NO: 22922
  derived and/or modified protein sequence (wt) from neuraminidase__InfluenzaA__AHZ36496

SEQ ID NO: 25289 - protein, 469 aa, Artificial Sequence; identical to SEQ ID NO: 22922
  derived and/or modified protein sequence (wt) from neuraminidase__InfluenzaA__AHZ36508

SEQ ID NO: 25290 - protein, 469 aa, Artificial Sequence; identical to SEQ ID NO: 22922
  derived and/or modified protein sequence (wt) from neuraminidase__InfluenzaA__AHZ36520

SEQ ID NO: 25291 - protein, 469 aa, Artificial Sequence
  derived and/or modified protein sequence (wt) from neuraminidase__InfluenzaA__AHZ36532
MNPNQKIITIGSVSLTISTICFFMQIAILITTVTLHFKQYEFNSPPNNQVMLCEPTIIERNITEIVYLTNTTIEKEICPKPAEYRTWSKPQCDITGFAPFSKDNSIRLSAGGDIWVTREPYVSCDPDKCYQFALGQGTTLNNVHSNNTVRDRTPYRTLLMNELGVPFHLGTKQVCIAWSSSSCHDGKAWLHVCITGDDKNATASFIYNGRLVDSVVSWSKEILRTQESECVCINGTCTVVMTDGSASGKADTKILFIEEGKIVHTSTLSGSAQHVEECSCYPRYPGVRCVCRDNWKGSNRPIVDINIKDHSIVSSYVCSGLVGDTPRKNDSSSSSHCLDPNNEEGGHGVKGWAFDDGNDVWMGRTINETSRLGYETFKVIEGWSNPKSKLQINRQVIVDRGDRSGYSGIFSVEGKSCINRCFYVELIRGRKEETEVLWTSNSIVVFCGTSGTYGTGSWPDGADLNLMPI

SEQ ID NO: 25292 - protein, 469 aa, Artificial Sequence; identical to SEQ ID NO: 22922
  derived and/or modified protein sequence (wt) from neuraminidase__InfluenzaA__AHZ36544

SEQ ID NO: 25293 - protein, 469 aa, Artificial Sequence; identical to SEQ ID NO: 22922
  derived and/or modified protein sequence (wt) from neuraminidase__InfluenzaA__AHZ36556

SEQ ID NO: 25294 - protein, 469 aa, Artificial Sequence; identical to SEQ ID NO: 22922
  derived and/or modified protein sequence (wt) from neuraminidase__InfluenzaA__AHZ36568

SEQ ID NO: 25295 - protein, 469 aa, Artificial Sequence; identical to SEQ ID NO: 22922
  derived and/or modified protein sequence (wt) from neuraminidase__InfluenzaA__AHZ36580

SEQ ID NO: 25296 - protein, 469 aa, Artificial Sequence; identical to SEQ ID NO: 22922
  derived and/or modified protein sequence (wt) from neuraminidase__InfluenzaA__AHZ36592

SEQ ID NO: 25297 - protein, 469 aa, Artificial Sequence; identical to SEQ ID NO: 22922
  derived and/or modified protein sequence (wt) from neuraminidase__InfluenzaA__AHZ36604

SEQ ID NO: 25298 - protein, 469 aa, Artificial Sequence; identical to SEQ ID NO: 22922
  derived and/or modified protein sequence (wt) from neuraminidase__InfluenzaA__AHZ36616

SEQ ID NO: 25299 - protein, 469 aa, Artificial Sequence
  derived and/or modified protein sequence (wt) from neuraminidase__InfluenzaA__AHZ36628
MNPNQKIITIGSVSLTISTICFFMQIAILITTVTLHFKQCEFNSPPNNQVMLCEPTIIERNITEIVYLTNTTIEKEICPKPAEYRNWSKPQCDITGFAPFSKDNSIRLSAGGDIWVTREPYVSCDPDKCYQFALGQGTTLNNVHSNNTVRDRTPYRTLLMNELGVPFHLGTKQVCIAWSSSSCHDGKAWLHVCITGDDKNATASFIYNGRLVDSVVSWSKEILRTQESECVCINGTCTVVMTDGSASGKADTKILFIEEGKIVHTSTLSGSAQHVEECSCYPRYPGVRCVCRDNWKGSNRPIVDINIKDHSIVSSYVCSGLVGDTPRKNDSSSSSHCLDPNNEEGGHGVKGWAFDDGNDVWMGRTINETSRLGYETFKVIEGWSNPKSKLQINRQVIVDRGDRSGYSGIFSVEGKSCINRCFYVELIRGRKEETEVLWTSNSIVVFCGTSGTYGTGSWPDGADLNLMPI

SEQ ID NO: 25300 - protein, 469 aa, Artificial Sequence
  derived and/or modified protein sequence (wt) from neuraminidase__InfluenzaA__AHZ36640
MNPNQKIITIGSVSLTISTICFFMQIAILITTVTLHFKQYEFNSPPNNQVMLCEPTIIERNITEIVYLTNTTIEKEICPKPAEYRNWSKPQCDITGFAPFSKDNSIRLSAGGDIWVTREPYVSCDPDKCYQFALGQGTTLNNVHSNNTVHDRTPYRTLLMNELGVPFHLGTKQVCIAWSSSSCHDGKAWLHVCITGDDKNATASFIYNGRLVDSVVSWSKEILRTQESECVCINGTCTVVMTDGSASGKADTKILFIEEGKIVHTSTLSGSAQHVEECSCYPRYPGVRCVCRDNWKGSNRPIVDINIKDHSIVSSYVCSGLVGDTPRKNDSSSSSHCLDPNNEEGGHGVKGWAFDDGNDVWMGRTINETSRLGYETFKVIEGWSNPKSKLQINRQVIVDRGDRSGYSGIFSVEGKSCINRCFYVELIRGRKEETEVLWTSNSIVVFCGTSGTYGTGSWPDGADLNLMPI

SEQ ID NO: 25301 - protein, 469 aa, Artificial Sequence; identical to SEQ ID NO: 22922
  derived and/or modified protein sequence (wt) from neuraminidase__InfluenzaA__AHZ36652

SEQ ID NO: 25302 - protein, 469 aa, Artificial Sequence; identical to SEQ ID NO: 22146
  derived and/or modified protein sequence (wt) from neuraminidase__InfluenzaA__AHZ36664

SEQ ID NO: 25303 - protein, 469 aa, Artificial Sequence; identical to SEQ ID NO: 22146
  derived and/or modified protein sequence (wt) from neuraminidase__InfluenzaA__AHZ36676

SEQ ID NO: 25304 - protein, 469 aa, Artificial Sequence; identical to SEQ ID NO: 22146
  derived and/or modified protein sequence (wt) from neuraminidase__InfluenzaA__AHZ36688

SEQ ID NO: 25305 - protein, 465 aa, Artificial Sequence; identical to SEQ ID NO: 23454
  derived and/or modified protein sequence (wt) from neuraminidase__InfluenzaA__AHZ39689

SEQ ID NO: 25306 - protein, 465 aa, Artificial Sequence; identical to SEQ ID NO: 23454
  derived and/or modified protein sequence (wt) from neuraminidase__InfluenzaA__AHZ39713

SEQ ID NO: 25307 - protein, 465 aa, Artificial Sequence; identical to SEQ ID NO: 23454
  derived and/or modified protein sequence (wt) from neuraminidase__InfluenzaA__AHZ39725

SEQ ID NO: 25308 - protein, 465 aa, Artificial Sequence; identical to SEQ ID NO: 23454
  derived and/or modified protein sequence (wt) from neuraminidase__InfluenzaA__AHZ39737

SEQ ID NO: 25309 - protein, 465 aa, Artificial Sequence
  derived and/or modified protein sequence (wt) from neuraminidase__InfluenzaA__AHZ39749
MNPNQKILCISATAIIIGAIAVLIGIANLGLNIGLHLKPGCNCSHSQPETTNTSQTIINNYYNETNITNIQMEERTSRNFNNLTKGLCTINSWHIYGKDNAVRIGESSDVLVTREPYVSCDPDECRFYALSQGTTIRGKHSNGTIHDRSQYRALISWPLSSPPTVYNSRVECIGWSSTSCHDGKSRMSICISGPNNNASAVVWYNRRPVAEINTWARNILRTQESECVCHNGVCPVVFTDGSATGPADTRIYYFKEGKILKWESLTGTAKHIEECSCYGERTGITCTCRDNWQGSNRPVIQIDPVAMTHTSQYICSPVLTDNPRPNDPNIGKCNDPYPGNNNNGVKGFSYLDGANTWLGRTISTASRSGYEMLKVPNALTDDRSKPIQGQTIVLNADWSGYSGSFMDYWAEGDCYRACFYVELIRGRPKEDKVWWTSNSIVSMCSSTEFLGQWNWPDGAKIEYFL

SEQ ID NO: 25310 - protein, 465 aa, Artificial Sequence; identical to SEQ ID NO: 25309
  derived and/or modified protein sequence (wt) from neuraminidase__InfluenzaA__AHZ39761

SEQ ID NO: 25311 - protein, 465 aa, Artificial Sequence; identical to SEQ ID NO: 23454
  derived and/or modified protein sequence (wt) from neuraminidase__InfluenzaA__AHZ39773

SEQ ID NO: 25312 - protein, 465 aa, Artificial Sequence; identical to SEQ ID NO: 23454
  derived and/or modified protein sequence (wt) from neuraminidase__InfluenzaA__AHZ39785

SEQ ID NO: 25313 - protein, 469 aa, Artificial Sequence
  derived and/or modified protein sequence (wt) from neuraminidase__InfluenzaA__AHZ39797
MNPNQKIITIGSVSLTISTVCFFMQIAILITTVTLHFKQYEFNPPPNNQVMLCEPTIIERNITEIVYLTNTTIEKEICPKPAEYRNWSKPQCGITGFAPFSKDNSIRLSAGGDIWVTREPYVSCDPDKCYQFALGQGTTLNNVHSNNTVRDRTPYRTLLMNELGVPFHLGTKQVCIAWSSSSCHDGKAWLHVCITGDDKNATASFIYNGRLVDSVVSWSKEILRTQESECVCINGTCTVVMTDGSASGKSDTKILFIEEGKIVHTSTLSGSAQHVEECSCYPRYPGVRCVCRDNWKGSNRPIVDINIKDHSIVSSYVCSGLVGDTPRKNDSSSSSHCLDPNNEEGGHGVKGWAFDDGNDVWMGRTINETSRLGYETFKVIEGWSNPKSKLQINRQVIVDRGDRSGYSGIFSVEGKSCINRCFYVELIRGRKEETEVLWTSNSIVVFCGTSGTYGTGSWPDGADLNLMPI

SEQ ID NO: 25314 - protein, 469 aa, Artificial Sequence
  derived and/or modified protein sequence (wt) from neuraminidase__InfluenzaA__AHZ39821
MNPNQKIITIGSVSLTISTICFFMQTAILITTVTLHFKQYEFNSPPNNQVMLCEPTIIERNITEIVYLTNTTIEKEICPKLAEYRNWSKPQCDITGFAPFSKDNSIRLSAGGDIWVTREPYVSCDPDKCYQFALGQGTTLNNVHSNNTVRDRTPYRTLLMNELGVPFHLGTKQVCIAWSSSSCHDGKAWLHVCITGDDKNATASFIYNGRLVDSVVSWSKEILRTQESECVCINGTCTVVMTDGSASGKADTKILFIEEGKIVHTSTLSGSAQHVEECSCYPRYPGVRCVCRDNWKGSNRPIVDINIKDHSIVSSYVCSGLVGDTPRRNDSSSSSHCLDPNNEEGGHGVKGWAFDDGNDVWMGRTINETSRLGYETFKVIEGWSNPKSKLQINRQVIVDRGNRSGYSGIFSVEGKSCINRCFYVELIRGRKEETEVLWTSNSIVVFCGTSGTYGTGSWPDGADLNLMPT

SEQ ID NO: 25315 - protein, 469 aa, Artificial Sequence; identical to SEQ ID NO: 23389
  derived and/or modified protein sequence (wt) from neuraminidase__InfluenzaA__AHZ39833

SEQ ID NO: 25316 - protein, 469 aa, Artificial Sequence; identical to SEQ ID NO: 22146
  derived and/or modified protein sequence (wt) from neuraminidase__InfluenzaA__AHZ39844

SEQ ID NO: 25317 - protein, 469 aa, Artificial Sequence
  derived and/or modified protein sequence (wt) from neuraminidase__InfluenzaA__AHZ39856
MNPNQKIITIGSVSLTISTICFFMQIAILITTVTLHFKQYEFNSPPNNQVMLCEPTIIERNITEIVYLTNTTIEKEICPKPAEYRNWSKPQCDITGFAPFSKDNSIRLSAGGDIWVTREPYVSCDPDKCYQFALGQGTTLNNVHSNNTVRDRTPYRTLLMNELGVPFHLGTKQVCIAWSSSSCHDGKAWLHVCITGDDKNATASFIYNGRLVDSVVSWSKEILRTQESECVCINGTCTVVMTDGSASGKADTKILFIEEGKIVHTSTLSGSAQHVEECSCYPRYPGVRCVCRDNWKGSNRPIVDINIKDHSIVSRYVCSGLVGDTPRKNDSSSSSHCLDPNNEEGGHGVKGWAFDDGNDVWMGRTINETSRLGYETFKVIEGWSNPKSKLPINRQVIVDRGDRSGYSGIFSVEGKSCINRCFYVELIRGRKEETEVLWTSNSIVVFCGTSGTYGTGSWPDGADLNLMPI

SEQ ID NO: 25318 - protein, 469 aa, Artificial Sequence; identical to SEQ ID NO: 22146
  derived and/or modified protein sequence (wt) from neuraminidase__InfluenzaA__AHZ39868

SEQ ID NO: 25319 - protein, 469 aa, Artificial Sequence
  derived and/or modified protein sequence (wt) from neuraminidase__InfluenzaA__AHZ39892
MNPNQKIITIGSVSLTISTICFFMQIAILITTVTLHFKQYEFNSPPNNQVVLCEPTIIERNITEIVYLTNTTIEKEICPKPAEYRNWSKPQCDITGFAPFSKDNSIRLSAGGDIWVTREPYVSCDPDKCYQFALGQGTTLNNVHSNNTVRDRTPYRTLLMNELGVPFHLGTKQVCIAWSSSSCHDGKAWLHVCITGDDKNATASFIYNGRLVDSVVSWSKEILRTQESECVCINGTCTVVMTDGSASGKADTKILFIEEGKIVHTSTLSGSAQHVEECSCYPRYPGVRCVCRDNWKGSNRPIVDINIKDHSIVSRYVCSGLVGDTPRKNDSSSSSHCLDPNNEEGGHGVKGWAFDDGNDVWMGRTINETSRLGYETFKVIEGWSNPKSKLQINRQVIVDRGDRSGYSGIFSVEGKSCINRCFYVELIRGRKEETEVLWTSNSIVVFCGTSGTYGTGSWPDGADLNLMPI

SEQ ID NO: 25320 - protein, 469 aa, Artificial Sequence; identical to SEQ ID NO: 23354
  derived and/or modified protein sequence (wt) from neuraminidase__InfluenzaA__AHZ39904

SEQ ID NO: 25321 - protein, 469 aa, Artificial Sequence; identical to SEQ ID NO: 23354
  derived and/or modified protein sequence (wt) from neuraminidase__InfluenzaA__AHZ39916

SEQ ID NO: 25322 - protein, 469 aa, Artificial Sequence; identical to SEQ ID NO: 22146
  derived and/or modified protein sequence (wt) from neuraminidase__InfluenzaA__AHZ39928

SEQ ID NO: 25323 - protein, 469 aa, Artificial Sequence
  derived and/or modified protein sequence (wt) from neuraminidase__InfluenzaA__AHZ39940
MNPNQKIITIGSVSLTISTICFFMQIAILITTVTLHFKQYEFNSPPNNQVMLCEPTIIERNMTEIVYLTNTTIEKEICPKPAEYRNWSKPQCGITGFAPFSKDNSIRLSAGGDIWVTREPYVSCDPDKCYQFALGQGTTLNNVHSNNTVRDRTPYRTLLMNELGVPFHLGTKQVCIAWSSSSCHDGKAWLHVCITGDDKNATASFIYNGRLVDSVVSWSKEILRTQESECVCINGTCTVVMTDGSASGKADTKILFIEEGKIVHTSTLSGSAQHVEECSCYPRYPGVRCVCRDNWKGSNRPIVDINIKDHSIVSSYVCSGLVGDTPRKTDSSSSSHCLDPNNEEGGHGVKGWAFDDGNDVWMGRTINETSRLGYETFKVIEGWSNPKSKLQINRQVIVDRGDRSGYSGIFSVEGKSCINRCFYVELIRGRKEETEVLWTSNSIVVFCGTSGTYGTGSWPDGADLNLMPI

SEQ ID NO: 25324 - protein, 469 aa, Artificial Sequence; identical to SEQ ID NO: 22146
  derived and/or modified protein sequence (wt) from neuraminidase__InfluenzaA__AHZ39952

SEQ ID NO: 25325 - protein, 469 aa, Artificial Sequence; identical to SEQ ID NO: 22146
  derived and/or modified protein sequence (wt) from neuraminidase__InfluenzaA__AHZ39976

SEQ ID NO: 25326 - protein, 469 aa, Artificial Sequence
  derived and/or modified protein sequence (wt) from neuraminidase__InfluenzaA__AHZ39988
MNPNQKIITIGSVSLTISTICFFMQIAILITTVTLHFKQYEFNSPPNNQVMLCEPTIIERNITEIVYLTNTTIEKEICPKPAEYRNWSKPQCGITGFAPFSKDNSIRLSAGGDIWVTREPYVSCDPDKCYQFALGQGTTLNNMHSNNTVRDRTPYRTLLMNELGVPFHLGTKQVCIAWSSSSCHDGKAWLHVCITGDDKNATASFIYNGRLVDSVVSWSKEILRTQESECVCINGTCTVVMTDGSASGKADTKILFIEEGKIVHTSTLSGSTQHVEECSCYPRYPGVRCVCRDNWKGSNRPIVDINIKDHSIVSSYVCSGLVGDTPRKNDSSSSSHCLDPNNEEGGHGVKGWAFDDGNDVWMGRTINETSRLGYETFKVIEGWSNPKSKLQINRQVIVDRGDRSGYSGIFSVEGKSCINRCFYVELIRGRKEETEVLWTSNSIVVFCGTSGTYGTGSWPDGADLNLMPI

SEQ ID NO: 25327 - protein, 469 aa, Artificial Sequence; identical to SEQ ID NO: 22146
  derived and/or modified protein sequence (wt) from neuraminidase__InfluenzaA__AHZ40000

SEQ ID NO: 25328 - protein, 469 aa, Artificial Sequence; identical to SEQ ID NO: 22146
  derived and/or modified protein sequence (wt) from neuraminidase__InfluenzaA__AHZ40012

SEQ ID NO: 25329 - protein, 469 aa, Artificial Sequence
  derived and/or modified protein sequence (wt) from neuraminidase__InfluenzaA__AHZ40024
MNPNQKIITIGSVSLTISTICFFMQIAILITTVTLHFKQYEFNSPPNNQVMLCEPTIIERNITEIVYLTNTTIEKEICPKPAEYRNWSKPQCGITGFAPFSKDNSIRLSAGGDIWVTREPYVSCDPDKCYQFALGQGTTLNNVHSNNTVRDRTPYRTLLMNELGVPFHLGTKQVCIAWSSSSCHDGKAWLHVCITGDDKNATASFIYNGRLVDSVVSWSKEILRTQESECVCINGTCTVVMTDGSASGKADTKILFIEEGKIVHTSTLSGSAQHVEECSCYPRYPGVRCVCRDNWKGSNRPIVDINIKDHSIVSSYVCSGLVGDTPRKNDSSSSSHCLDPNNEEGGHGVKGWAFDDGNDVWMGRTINETSRLGFETFKVIEGWSNPKSKLQINRQVIVDRGDRSGYSGIFSVEGKSCINRCFYVELIRGRKEETEVLWTSNSIVVFCGTSGTYGTGSWPDGADLNLMPI

SEQ ID NO: 25330 - protein, 469 aa, Artificial Sequence; identical to SEQ ID NO: 22146
  derived and/or modified protein sequence (wt) from neuraminidase__InfluenzaA__AHZ40036

SEQ ID NO: 25331 - protein, 469 aa, Artificial Sequence; identical to SEQ ID NO: 23357
  derived and/or modified protein sequence (wt) from neuraminidase__InfluenzaA__AHZ40048

SEQ ID NO: 25332 - protein, 469 aa, Artificial Sequence; identical to SEQ ID NO: 22146
  derived and/or modified protein sequence (wt) from neuraminidase__InfluenzaA__AHZ40063

SEQ ID NO: 25333 - protein, 469 aa, Artificial Sequence
  derived and/or modified protein sequence (wt) from neuraminidase__InfluenzaA__AHZ40075
MNPNQKIITIGSVSLTISTVCFFMQIAILITTVTLHFKQYEFNSPPNNQVMLCEPTIIERNITEIVYLTNTTIEKEICPKPAEYRNWSKPQCGITGFAPFSKDNSIRLSAGGDIWVTREPYVSCDPDKCYQFALGQGTTLNNVHSNNTVRDRTPYRTLLMNELGVPFHLGTKQVCIAWSSSSCHDGKAWLHVCITGDDKNATASFIYNGRLVDSVVSWSKEILRTQESECVCINGTCTVVMTDGSASGKADTKILFIEEGKIVHTSTLSGSAQHVEECSCYPRYPGVRCVCRDNWKGSNRPIVDINIKDHSIVSSYVCSGLVGDTPRKNDSSSSSHCLDPNNEEGGHGVKGWAFDDGNDVWMGRTINETSRLGYETFKVIEGWSNSKSKLQINRQVIVDRGDRSGYSGIFSVEGKSCINRCFYVELIRGRKEETEVLWTSNSIVVFCGTSGTYGTGSWPDGADLNLMPI

SEQ ID NO: 25334 - protein, 469 aa, Artificial Sequence; identical to SEQ ID NO: 22146
  derived and/or modified protein sequence (wt) from neuraminidase__InfluenzaA__AHZ40087

SEQ ID NO: 25335 - protein, 469 aa, Artificial Sequence; identical to SEQ ID NO: 23357
  derived and/or modified protein sequence (wt) from neuraminidase__InfluenzaA__AHZ40099

SEQ ID NO: 25336 - protein, 469 aa, Artificial Sequence
  derived and/or modified protein sequence (wt) from neuraminidase__InfluenzaA__AHZ40111
MNPNQKIITIGSVSLTISTICFFMQIAILITTVTLHFKQYEFNPPPNNQVMLCEPTIIERNITEIVYLTNTTIEKEICPKLAEYRNWSKPQCDITGFAPFSKDNSIRLSAGGDIWVTREPYVSCDPDKCYQFALGQGTTLNNVHSNNTVRDRTPYRTLLMNELGVPFHLGTKQVCIAWSSSSCHDGKAWLHVCITGDDKNATASFIYNGRLVDSVVSWSKDILRTQESECVCINGTCAVVMTDGSASGKADTKILFIEEGKIVHTSTLSGSAQHVEECSCYPRYPGVRCVCRDNWKGSNRPIVDINIKDHSIVSSYVCSGLVGDTPRKNDSSSSGHCLDPNNEEGGHGVKGWAFDDGNDVWMGRTINETSRLGYETFKVIEGWSNPKSKLQINRQVIVDRGNRSGYSGIFSVEGKNCINRCFYVELIRGRKEETEVLWTSNSIVVFCGTSGTYGTGSWPDGADLNLMPI

SEQ ID NO: 25337 - protein, 469 aa, Artificial Sequence
  derived and/or modified protein sequence (wt) from neuraminidase__InfluenzaA__AHZ40123
MNPNQKIITIGSVSLTISTICFFMQIAILITTVTLHFKQYEFNSPPNNQVMLCEPTITERNITEIVYLTNTTIEKEICPKPAEYRNWSKPQCGITGFAPFSKDNSIRLSAGGDIWVTREPYVSCDPDKCYQFALGQGTTLNNVHSNNTVRDRTPYRTLLMNELGVPFHLGTKQVCIAWSSSSCHDGKAWLHVCITGDDKNATASFIYNGRLVDSVVSWSKEILRTQESECVCINGTCTVVMTDGSASGKADTKILFIEEGKIVHTRTLSGSAQHVEECSCYPRYPGVRCVCRDNWKGSNRPIVDINIKDHSIVSSYVCSGLVGDTPRKNDSSSSSHCLDPNNEEGGHGVKGWAFDDGNDVWMGRTINETSRLGYETFKVIEGWSNPKSKLQINRQVIVDRGDRSGYSGIFSVEGKSCINRCFYVELIRGRKEETEVLWTSNSIVVFCGTSGTYGTGSWPDGADLNLMPI

SEQ ID NO: 25338 - protein, 469 aa, Artificial Sequence; identical to SEQ ID NO: 22146
  derived and/or modified protein sequence (wt) from neuraminidase__InfluenzaA__AHZ40133

SEQ ID NO: 25339 - protein, 469 aa, Artificial Sequence; identical to SEQ ID NO: 23364
  derived and/or modified protein sequence (wt) from neuraminidase__InfluenzaA__AHZ40145

SEQ ID NO: 25340 - protein, 469 aa, Artificial Sequence
  derived and/or modified protein sequence (wt) from neuraminidase__InfluenzaA__AHZ40157
MNPNQKIITIGSVSLTISTICFFMQIAILITTVTLHFKQYEFNSPPNNQVMLCEPTIIERNITEIVYLTNTTIEKELCPKLAEYRNWSKPQCDITGFAPFSKDNSIRLSAGGDIWVTREPYVSCDPDKCYQFALGQGTTLNNVHSNNTVRDRTPYRTLLMNELGVPFHLGTKQVCMAWSSSSCHDGKAWLHVCITGDDKNATASFIYNGKLVDSVVSWSKEILRTQESECVCINGTCTVVMTDGSASGKADTKILFIEEGKIVHTSTLSGSAQHVEECSCYPRYPGVRCVCRDNWKGSNRPIVDINIKDHSIVSSYVCSGLVGDTPRKTDSSSSSHCLDPNNEEGGHGVKGWAFDDGNDVWMGRTINETSRLGYETFKVIEGWSNPKSKLQINRQVIVDRGDRSGYSGIFSVEGKSCINRCFYVELIRGRKEETAVLWTSNSIVVFCGTSGTYGTGSWPDGADLNLMPI

SEQ ID NO: 25341 - protein, 469 aa, Artificial Sequence
  derived and/or modified protein sequence (wt) from neuraminidase__InfluenzaA__AHZ40169
MNPNQKIITIGSVCMTIGMANLILQIGNIISIWISHSIQLENQSQIETCNQSVITYENNTWVNQTYVNISNTNFAAGQSVVSVKLAGNSSLCPVSGWAIYSKDNSVRIGSKGDVFVIREPFISCSPLECRTFFLTQGALLNDKHSNGTIKDRSPYRTLMSCPIGEVPSPYNSRFESVAWSASACHDGINWLTIGISGPDSGAVAVLKYNGIITDTIKSWRNNILRTQESECACVNGSCFTIMTDGPSDGQASYKIFRIEKGKIVKSVEMNAPNYHYEECSCYPDSSEITCVCRDNWHGSNRPWVSFNQNLEYQIGYICSGIFGDNPRPNDKTGSCGPVSSNGANGVKGFSFKYGNGVWIGRTKSISSRKGFEMIWDPNGWTGTDNNFSIKQDIVGINEWSGYSGSFVQHPELTGLDCIRPCFWVELIRGRPKENTIWTSGSSISFCGVNSDTVGWSWPDGAELPFTIDK

SEQ ID NO: 25342 - protein, 469 aa, Artificial Sequence
  derived and/or modified protein sequence (wt) from neuraminidase__InfluenzaA__AHZ40180
MNPNQKIITIGSVSLTISTICFFMQITILITTVTLHFKQYEFNSPPNNQVMLCEPTIIERNITEIVYLTNTTIEKEICPKPAEYRNWSKPQCGITGFAPFSKDNSIRLSAGGDIWVTREPYVSCDPDKCYQFALGQGTTLNNVHSNNTVRDRTPYRTLLMNELGVPFHLGTKQVCIAWSSSSCHDGKAWLHVCITGDDKNATASFIYNGRLVDSVVSWSKEILRTQESECVCINGTCTVVMTDGSASGKADTKILFIEEGKIVHTSTLSGSAQHVEECSCYPRYPGVRCVCRDNWKGSNRPIVDINIKDHSIVSSYVCSGLVGDTPRKNDSSSSSHCLDPNNEEGGHGVKGWAFDDGNDVWMGRTINETSRLGYETFKVIEGWSNPKSKLQINRQVIVDRGDRSGYSGIFSVEGKSCINRCFYVELIRGRKEETEVLWTSNSIVVFCGTSGTYGTGSWPDGADLNLMPI

SEQ ID NO: 25343 - protein, 469 aa, Artificial Sequence; identical to SEQ ID NO: 23010
  derived and/or modified protein sequence (wt) from neuraminidase__InfluenzaA__AHZ40192

SEQ ID NO: 25344 - protein, 469 aa, Artificial Sequence; identical to SEQ ID NO: 22146
  derived and/or modified protein sequence (wt) from neuraminidase__InfluenzaA__AHZ40204

SEQ ID NO: 25345 - protein, 469 aa, Artificial Sequence; identical to SEQ ID NO: 22146
  derived and/or modified protein sequence (wt) from neuraminidase__InfluenzaA__AHZ40216

SEQ ID NO: 25346 - protein, 469 aa, Artificial Sequence; identical to SEQ ID NO: 23375
  derived and/or modified protein sequence (wt) from neuraminidase__InfluenzaA__AHZ40228

SEQ ID NO: 25347 - protein, 469 aa, Artificial Sequence
  derived and/or modified protein sequence (wt) from neuraminidase__InfluenzaA__AHZ40240
MNPNQKIITIGSVSLTISTICFLMQIAILITTATLHFKQYEFNSPPNNQVMLCEPTIIERNITEIVYLTNTTIEKEICPKPAEYRNWSKPQCGITGFAPFSKDNSIRLSAGGDIWVTREPYVSCDPDKCYQFALGQGTTLNNVHSNNTVRDRTPYRTLLMNELGVPFHLGTKQVCIAWSSSSCHDGKAWLHVCITGDDKNATASFIYNGRLVDSVVSWSKEILRTQESECVCINGTCTVVMTDGSASGKADTKILFIEEGKIVHTSTLSGSAQHVEECSCYPRYPGVRCVCRDNWKGSNRPIVDINIKDRSIVSSYVCSGLVGDTPRKNDSSSSSHCLDPNNEEGGHGVKGWAFDDGNDVWMGRTINETSRLGYETFKVIEGWSNPKSKLQINRQVIVDRGDRSGYSGIFSVEGKSCINRCFYVELIRGRKEETEVLWTSNSIVVFCGTSGTYGTGSWPDGADLNLMPI

SEQ ID NO: 25348 - protein, 469 aa, Artificial Sequence
  derived and/or modified protein sequence (wt) from neuraminidase__InfluenzaA__AHZ40252
MNPNQKIITIGSVSLTISTICFFMQIAILITTVTLHFKQYEFNSPPNNQVMLCEPTIIERNITEIVYLTNTTIEKEICPKPAEYRNWSKPQCGITGFAPFSKDNSIRLSAGGDIWVTREPYVSCDPDKCYQFALGQGTTLNNVHSNNTVRDRTPYRTLLMNELGVPFHLGTKQVCIAWSSSSCHDGKAWLHVCITGEDKNATASFIYNGRLVDSIVSWSKEILRTQESECVCINGTCTVVMTDGSASGKADTKILFIEEGKIVHTSTLSGSAQHVEECSCYPRYPGVRCVCRDNWKGSNRPIVDINIKDHSIVSSYVCSGLVGDTPRKNDSSSSSHCLDPNNEEGGHGVKGWAFDDGNDVWMGRTINETSRLGYETFKVIEGWSNPKSKLQINRQVIVDRGDRSGYSGIFSVEGKSCINRCFYVELIRGRKEETEVLWTSNSIVVFCGTSGTYGTGSWPDGADLNLMPI

SEQ ID NO: 25349 - protein, 469 aa, Artificial Sequence; identical to SEQ ID NO: 25094
  derived and/or modified protein sequence (wt) from neuraminidase__InfluenzaA__AHZ40264

SEQ ID NO: 25350 - protein, 469 aa, Artificial Sequence; identical to SEQ ID NO: 22146
  derived and/or modified protein sequence (wt) from neuraminidase__InfluenzaA__AHZ40276

SEQ ID NO: 25351 - protein, 469 aa, Artificial Sequence
  derived and/or modified protein sequence (wt) from neuraminidase__InfluenzaA__AHZ40288
MNPNQKIITIGSVSLTISTICFFMQIAILITTVTLHFKQYEFNSPPNNQVMLCEPTIIERNITEIVYLTNTTIEKEICPKLAEYRNWSKPQCDITGFAPFSKDNSIRLSAGGDIWVTREPYVSCDPDKCYQFALGQGTTLNNVHSNNTVRDRTPYRTLLMNELGVPFHLGTKQVCIAWSSSSCHDGKAWLHVCITGDDKNATASFIYNGRLVDSVISWSKDILRTQESECVCINGTCAVVMTDGSASGKADTKILFIEEGKIVHTSTLSGSAQHVEECSCYPRYPGVRCVCRDNWKGSNRPIVDINIKDHSIVSSYVCSGLVGDTPRKNDSSSSGHCLDPNNEEGGHGVKGWAFDDGNDVWMGRTINETSRLGYETFKVIEGWSNPKSKLQINRQVIVDRGNRSGYSGIFSVEGKNCINRCFYVELIRGRKEETEVLWTSNSIVVFCGTSGTYGTGSWPDGADLNLMPI

SEQ ID NO: 25352 - protein, 469 aa, Artificial Sequence
  derived and/or modified protein sequence (wt) from neuraminidase__InfluenzaA__AHZ40312
MNPNQKIITIGSVSLTISTICFFMQIAILITTVTLHFKQYEFNYPPNNQVMLCEPTIIERNITEIVYLTNTTIEKEICPKPAEYRNWSKPQCGITGFAPFSKDNSIRLSAGGDIWVTREPYVSCDPDKCYQFALGQGTTLNNVHSNNTVRDRTPYRTLLMNELGVPFHLGTKQVCIAWSSSSCHDGKAWLHVCITGDDKNATASFIYNGRLVDSVVSWSKEILRTQESECVCINGTCTVVMTDGSASGKADTKILFIEEGKIVHTSTLSGSAQHVEECSCYPRYPGVRCVCRDNWKGSNRPIVDINIKDHSVVSSYVCSGLVGDTPRKNDSSSSSHCLDPNNEEGGHGVKGWAFDDGNDVWMGRTINETSRLGYETFKVIEGWSNPKSKLQINRQVIVDRGDRSGYSGIFSVEGKSCINRCFYVELIRGRKEETEVLWTSNSIVVFCGTSGTYGTGSWPDGADLNLMPI

SEQ ID NO: 25353 - protein, 469 aa, Artificial Sequence; identical to SEQ ID NO: 22146
  derived and/or modified protein sequence (wt) from neuraminidase__InfluenzaA__AHZ40324

SEQ ID NO: 25354 - protein, 469 aa, Artificial Sequence; identical to SEQ ID NO: 22146
  derived and/or modified protein sequence (wt) from neuraminidase__InfluenzaA__AHZ40336

SEQ ID NO: 25355 - protein, 469 aa, Artificial Sequence; identical to SEQ ID NO: 25329
  derived and/or modified protein sequence (wt) from neuraminidase__InfluenzaA__AHZ40348

SEQ ID NO: 25356 - protein, 469 aa, Artificial Sequence; identical to SEQ ID NO: 23354
  derived and/or modified protein sequence (wt) from neuraminidase__InfluenzaA__AHZ40360

SEQ ID NO: 25357 - protein, 469 aa, Artificial Sequence
  derived and/or modified protein sequence (wt) from neuraminidase__InfluenzaA__AHZ40372
MNPNQKIITIGSVSLTISTICFFMQIAILITTVTLHFKQYEFNSPPNNQVMLCEPTIIERNITEIVYLTNTTIEKEICPKPAEYRNWSKPQCGITGFAPFSKDNSIRLSAGGDIWVTREPYVSCDPDKCYQFALGQGTTLNNVHSNNTVRDRTPYRTLLMNELGVPFHLGTKQVCIAWSSSSCHDGKAWLHVCITGDDKNATASFIYNGRLVDSVVSWSKEILRTQESECVCINGTCTVVMTDGSASGKADTKILFIEEGKIVHTSTLSGSAQHVEECSCYPRYPGVRCVCRDNWKGSNRPIVDINIKDHSIVSSYVCSGLVGDTPRKNDSSSSSHCLDPNNEEGDHGVKGWAFDDGNDVWMGRTINETSRLGYETFKVIEGWSNPKSKLQINRQVIVDRGDRSGYSGIFSVEGKSCINRCFYVELIRGRKEETEVLWTSNSIVVFCGTSGTYGTGSWPDGADLNLMPI

SEQ ID NO: 25358 - protein, 469 aa, Artificial Sequence; identical to SEQ ID NO: 23010
  derived and/or modified protein sequence (wt) from neuraminidase__InfluenzaA__AHZ40384

SEQ ID NO: 25359 - protein, 469 aa, Artificial Sequence; identical to SEQ ID NO: 22146
  derived and/or modified protein sequence (wt) from neuraminidase__InfluenzaA__AHZ40396

SEQ ID NO: 25360 - protein, 469 aa, Artificial Sequence; identical to SEQ ID NO: 22146
  derived and/or modified protein sequence (wt) from neuraminidase__InfluenzaA__AHZ40408

SEQ ID NO: 25361 - protein, 469 aa, Artificial Sequence; identical to SEQ ID NO: 22146
  derived and/or modified protein sequence (wt) from neuraminidase__InfluenzaA__AHZ40420

SEQ ID NO: 25362 - protein, 469 aa, Artificial Sequence
  derived and/or modified protein sequence (wt) from neuraminidase__InfluenzaA__AHZ40432
MNPNQKIITIGSVSLTISTICFFMQIAILITTVTLHFKQYEFNSPPNNQVMLCEPTIIERNITEIVYLTNTTIEKEICPKPAEYRNWSKPQCDITGFAPFSKDNSIRLSAGGDIWVTREPYVSCDPDKCYQFALGQGTTLNNVHSNNTVRDRTPYRTLLMNELGVPFHLGTKQVCIAWSSSSCHDGKAWLHVCITGDDKNATASFIYNGRLVDSVVSWSKEILRTQESECVCINGTCTVVMTDGSASGKADTKILFIEEGKIVHTSTLSGSAQHVEECSCYPRYPGVRCVCRDNWKGSNRPIIDINIKDHSIVSRYVCSGLVGDTPRKNDSSSSSHCLDPNNEEGGHGVKGWAFDDGNDVWMGRTINETSRLGYETFKVIEGWSNPKSKLQINRQVIVDRGDRSGYSGIFSVEGKSCINRCFYVELIRGRKEETEVLWTSNSIVVFCGTSGTYGTGSWPDGADLNLMPI

SEQ ID NO: 25363 - protein, 469 aa, Artificial Sequence; identical to SEQ ID NO: 22146
  derived and/or modified protein sequence (wt) from neuraminidase__InfluenzaA__AHZ40444

SEQ ID NO: 25364 - protein, 469 aa, Artificial Sequence
  derived and/or modified protein sequence (wt) from neuraminidase__InfluenzaA__AHZ40456
MNPNQKIITIGSVSLTISTICFFMQIAILITTVTLHFKQYEFNSPPNNQVMLCEPTIIERNITEIVYLTNTTIEKEICPKPAEYRNWSKPQCDITGFAPFSKDNSIRLSAGGDIWVTREPYVSCDPDKCYQFALGQGTTLNNMHSNNTVRDRTPYRTLLMNELGVPFHLGTKQVCIAWSSSSCHDGKAWLHVCITGDDKNATASFIYNGRLVDSVVSWSKEILRTQESECVCINGTCTVVMTDGSASGKADTKILFIEEGKIVHTSTLSGSAQHVEECSCYPRYPGVRCVCRDNWKGSNRPIVDINIKDHSIVSSYVCSGLVGDTPRKNDSSSSSHCLDPNNEEGGHGVKGWAFDDGNDVWMGRTINETSRLGYETFKVIEGWSNPKSKLQINRQVIVDRGDRSGYSGIFSVEGKSCINRCFYVELIRGRKEETEVLWTSNSIVVFCGTSGTYGTGSWPDGADLNLMPI

SEQ ID NO: 25365 - protein, 469 aa, Artificial Sequence
  derived and/or modified protein sequence (wt) from neuraminidase__InfluenzaA__AHZ40468
MNPNQKIITIGSVSLTISTICFFMQIAILITTVTLHFKQYEFNSPPNNQVMLCEPTIIERNITEIVYLTNTTIEKEICPKPAEYRNWSKPQCGITGFAPFSKDNSIRLSAGGDIWVTREPYVSCDPDKCYQFALGQGTTLNNVHSNNTVRDRTPYRTLLMNELGVPFHLGTKQVCIAWSSSSCHDGKAWLHVCITGNDKNATASFIYNGRLVDSVVSWSKEILRTQESECVCINGTCTVVMTDGSASGKADTKILFIEEGKIVHTSTLSGSAQHVEECSCYPRYPGVRCVCRDNWKGSNRPIVDINIKDHSIVSSYVCSGLVGDTPRKNDSSSSSHCLDPNNEEGGHGVKGWAFDDGNDVWMGRTINETSRLGYETFKVIEGWSNPKSKLQINRQVIVDRGDRSGYSGIFSVEGKSCINRCFYVELIRGRKEETEVLWTSNSIVVFCGTSGTYGTGSWPDGADLNLMPI

SEQ ID NO: 25366 - protein, 469 aa, Artificial Sequence; identical to SEQ ID NO: 23354
  derived and/or modified protein sequence (wt) from neuraminidase__InfluenzaA__AHZ40480

SEQ ID NO: 25367 - protein, 469 aa, Artificial Sequence; identical to SEQ ID NO: 24792
  derived and/or modified protein sequence (wt) from neuraminidase__InfluenzaA__AHZ40492

SEQ ID NO: 25368 - protein, 469 aa, Artificial Sequence; identical to SEQ ID NO: 22146
  derived and/or modified protein sequence (wt) from neuraminidase__InfluenzaA__AHZ40503

SEQ ID NO: 25369 - protein, 469 aa, Artificial Sequence; identical to SEQ ID NO: 22146
  derived and/or modified protein sequence (wt) from neuraminidase__InfluenzaA__AHZ40515

SEQ ID NO: 25370 - protein, 469 aa, Artificial Sequence
  derived and/or modified protein sequence (wt) from neuraminidase__InfluenzaA__AHZ40527
MNPNQKIITIGSVSLTISTMCFFMQIAILITTVTLHFKQYEFDSPPNNQVMLCEPTIIERNITEIVYLTNTTIEKEICPKPAEYRNWSKPQCGITGFAPFSKDNSIRLSAGGDIWVTREPYVSCDPDKCYQFALGQGTTLNNVHSNNTVRDRTPYRTLLMNELGVPFHLGTKQVCIAWSSSSCHDGKAWLHVCITGDDKNATASFIYNGRLVDSVVSWSKEILRTQESECVCINGTCTVVMTDGSASGKADTKILFIEEGKIVHTSTLSGSAQHVEECSCYPRYPGVRCVCRDNWKGSNRPIVDINIKDHSIVSSYVCSGLVGDTPRKNDSSSSSHCLDPNNEEGGHGVKGWAFDDGNDVWMGRTINETSRLGYETFKVIEGWSNPKSKLQINRQVIVDRGDRSGYSGIFSVEGKSCINRCFYVELIRGRKEETEVLWTSNSIVVFCGTSGTYGTGSWPDGADLNLMPI

SEQ ID NO: 25371 - protein, 469 aa, Artificial Sequence
  derived and/or modified protein sequence (wt) from neuraminidase__InfluenzaA__AHZ40539
MNPNQKIITIGSVSLTISTICFFMQIAILITTVTLHFKQYEFNSPPNNQVMLCEPTIIERNITEIVYLTNTTIEKEICPKPAEYRNWSKPQCGITGFAPFSKDNSIRLSAGGDIWVTREPYVSCDPDKCYQFALGQGTTLNNVHSNNTVRDRTPYRTLLMNELGVPFHLGTKQVCIAWSSSSCHDGKAWLHVCITGDDKNATASFIYNGRLVDSVVSWSKEILRTQESECVCINGTCTVVMTDGSASGKADTKILFIEEGKIVNTSTLSGSAQHVEECSCYPRYPGVRCVCRDNWKGSNRPIVDINIKDHSIVSSYVCSGLVGDTPRKNDSSSSSHCLDPNNEEGGHGVKGWAFDDGNDVWMGRTINETSRLGYETFKVIEGWSNPKSKLQINRQVIVDRGDRSGYSGIFSVEGKSCINRCFYVELIRGRKEETEVLWTSNSIVVFCGTSGTYGTGSWPDGADLNLMPI

SEQ ID NO: 25372 - protein, 469 aa, Artificial Sequence; identical to SEQ ID NO: 22146
  derived and/or modified protein sequence (wt) from neuraminidase__InfluenzaA__AHZ40551

SEQ ID NO: 25373 - protein, 469 aa, Artificial Sequence
  derived and/or modified protein sequence (wt) from neuraminidase__InfluenzaA__AHZ40563
MNPNQKIITIGSVSLTISTVCFFMQIAILITTVTLHFKQYEFNSSPNNQVMLCEPTIIERNITEIVYLTNTTIEKEICPKPAEYRNWSKPQCGITGFAPFSKDNSIRLSAGGDIWVTREPYVSCDPDKCYQFALGQGTTLNNVHSNNTVRDRTPYRTLLMNELGVPFHLGTKQVCIAWSSSSCHDGKAWLHVCITGDDKNATASFIYNGRLVDSVVSWSKEILRTQESECVCINGTCTVVMTDGSASGKADTKILFIEEGKIVHTSTLSGSAQHVEECSCYPRYPGVRCVCRDNWKGSNRPIVDINIKDHSIVSSYVCSGLVGDTPRKNDSSSSSHCLDPNNEEGGHGVKGWAFDDGNDVWMGRTINETSRLGYETFKVIEGWSNSKSKLQINRQVIVDRGDRSGYSGIFSVEGKSCINRCFYVELIRGRKEETEVLWTSNSIVVFCGTSGTYGTGSWPDGADLNLMPI

SEQ ID NO: 25374 - protein, 469 aa, Artificial Sequence
  derived and/or modified protein sequence (wt) from neuraminidase__InfluenzaA__AHZ40575
MNPNQKIITIGSVSLTISTICFFMQIAILITTVTLHFKQYEFNSPPNNQVMLCEPTIIERNITEIVYLTNTTIEKEICPKPAEYRNWSKPQCGITGFAPFSKDNSIRLSAGGDIWVTREPYVSCDPDKCYQFALGQGTTLNNVHSNNTVRDRTPYRTLLMNELGVPFHLGTKQVCIAWSSSSCHDGKAWLHVCITGDDKNATASFIYNGRLVDSVVSWSKEILRTQESECVCINGTCTVVMTDGSASGKADTKILFIEEGKIVHTSTLSGSAQHVEECSCYPRYPGVRCVCRDNWKGSNRPIVDINIKDHSIVSSYVCSGLVGDTPRKNDSSSSSHCLDPNNEEGGHGVKGWAFDDGNDVWMGRTINETSRLGYETFKVIEGWSNPKSKLQISRQVIVDRGDRSGYSGIFSVEGKSCINRCFYVELIRGRKEETEVLWTSNSIVVFCGTSGTYGTGSWPDGADLNLMPI

SEQ ID NO: 25375 - protein, 469 aa, Artificial Sequence; identical to SEQ ID NO: 25093
  derived and/or modified protein sequence (wt) from neuraminidase__InfluenzaA__AHZ40586

SEQ ID NO: 25376 - protein, 469 aa, Artificial Sequence
  derived and/or modified protein sequence (wt) from neuraminidase__InfluenzaA__AHZ40598
MNPNQKIITIGSVCMTIGMANLILQIGNIISIWISHSIQVGNQSQIETCNQSVITYENNTWVNQTYVNISNTNFAAGQPVVSVKLAGNSSLCPVSGWAIYSKDNSVRIGSKGDVFVIREPFISCSPLECRTFFLTQGALLNDKHSNGTIKDRSPYRTLMSCPIGEVPSPYNSRFESVAWSASACHDGINWLTIGISGPDSGAVAVLKYNGIITDTIKSWRNDILRTQESECACVNGSCFTIMTDGPSDGQASYKIFRIEKGKIVKSVEMNAPNYHYEECSCYPDSSEITCVCRDNWHGSNRPWVSFNQNLEYQIGYICSGIFGDNPRPNDKTGSCGPVSSNGANGVKGFSFKYGNGVWIGRTKSISSRKGFEMIWDPNGWTGTDNNFSIKQDIVGINEWSGYSGSFVQHPELTGLDCIRPCFWVELIRGRPKENTIWTSGSSISFCGVNSDTVGWSWPDGAELPFTIDK

SEQ ID NO: 25377 - protein, 469 aa, Artificial Sequence; identical to SEQ ID NO: 22146
  derived and/or modified protein sequence (wt) from neuraminidase__InfluenzaA__AHZ40609

SEQ ID NO: 25378 - protein, 469 aa, Artificial Sequence; identical to SEQ ID NO: 23375
  derived and/or modified protein sequence (wt) from neuraminidase__InfluenzaA__AHZ40629

SEQ ID NO: 25379 - protein, 469 aa, Artificial Sequence; identical to SEQ ID NO: 23357
  derived and/or modified protein sequence (wt) from neuraminidase__InfluenzaA__AHZ40641

SEQ ID NO: 25380 - protein, 469 aa, Artificial Sequence
  derived and/or modified protein sequence (wt) from neuraminidase__InfluenzaA__AHZ40653
MNPNQKIITIGSVSLTISTICFFMQIAILITTVTLHFKQYEFNSPPNNQVMLCEPTIIERNITEIVYLTNTTIEKEICPKPAGYRNWSKPQCGITGFAPFSKDNSIRLSAGGDIWVTREPYVSCDPDKCYQFALGQGTTLNNVHSNNTVRDRTPYRTLLMNELGVPFHLGTKQVCIAWSSSSCHDGKAWLHVCITGDDKNATASFIYNGRLVDSVVSWSKEILRTQESECVCINGTCTVVMTDGSASGKADTKILFIEEGKIVHTSTLSGSAQHVEECSCYPRYPGVRCVCRDNWKGSNRPIVDINIKDHSIVSSYVCSGLVGDTPRKNDSSSSSHCLDPNNEEGGHGVKGWAFDDGNDVWMGRTINETSRLGYETFKVIEGWSNPKSKLQINRQVIVDRGDRSGYSGIFSVEGKSCINRCFYVELIRGRKEETEVLWTSNSIVVFCGTSGTYGTGSWPDGADLNLMPI

SEQ ID NO: 25381 - protein, 469 aa, Artificial Sequence; identical to SEQ ID NO: 23375
  derived and/or modified protein sequence (wt) from neuraminidase__InfluenzaA__AHZ40665

SEQ ID NO: 25382 - protein, 469 aa, Artificial Sequence; identical to SEQ ID NO: 23375
  derived and/or modified protein sequence (wt) from neuraminidase__InfluenzaA__AHZ40677

SEQ ID NO: 25383 - protein, 469 aa, Artificial Sequence; identical to SEQ ID NO: 22146
  derived and/or modified protein sequence (wt) from neuraminidase__InfluenzaA__AHZ40689

SEQ ID NO: 25384 - protein, 469 aa, Artificial Sequence
  derived and/or modified protein sequence (wt) from neuraminidase__InfluenzaA__AHZ40713
MNPNQKIITIGSVSLTISTICFFMQIAILITTVTLHFKQYEFNSPPNNQVMLCEPTIIERNITEIVYLTNTTIEKEICPKPAEYRNWSKPQCGITGFAPFSKDNSIRLSAGGDIWVTREPYVSCDPDKCYQFALGQGTTLNNVHSNNTVRDRTPYRTLLMNELGVPFHLGTKQVCIAWSSSSCHDGKAWLHVCITGDDKNATASFIYNGRLVDSVVSWSKEILRTQESECVCINGTCTVVMTDGSASGKADTKILFIEEGKIVHTSTLSGSAQHVEECSCYPRYPGVRCVCRDNWKGSNRPIVDINIKDHSIVSSYVCSGLVGDTPRKNDSSSSSHCLDPNNEEGGHGVKGWAFDDGNDVWMGRTINETSRLGYETFKVIEGWSNPKSKLQINRQVIVDRGDKSGYSGIFSVEGKSCINRCFYVELIRGRKEETEVLWTSNSIVVFCGTSGTYGTGSWPDGADLNLMPI

SEQ ID NO: 25385 - protein, 469 aa, Artificial Sequence
  derived and/or modified protein sequence (wt) from neuraminidase__InfluenzaA__AHZ40725
MNPNQKIITIGSVSLTISTICFFMQIAILITTVTLHFKQYEFNSPPNNQVMLCEPTIIERNITEIVYLTNTTIEKEICPKPAEYRNWSKPQCGITGFAPFSKDNSIRLSAGGDIWVTREPYVSCDPDKCYQFALGQGTTLNNVHSNNTVRDRTPYRTLLMNELGVPFHLGTKQVCIAWSSSSCHDGKAWLHVCITGDDKNATASFIYNGRLVDSVVSWSKEILRTQESECVCINGTCTVVMTDGSASGKADTKILFIEEGKIVHTSTLSGSAQHVEECSCYPRYPGVRCVCRDNWKGSNRPIVDINIKDHSIVSGYVCSGLVGDTPRKNDSSSSSHCLDPNNEEGGHGVKGWAFDDGNDVWMGRTINETSRLGYETFKVIEGWSNPKSKLQINRQVIVDRGDRSGYSGIFSVEGKSCINRCFYVELIRGRKEETEVLWTSNSIVVFCGTSGTYGTGSWPDGADLNLMPI

SEQ ID NO: 25386 - protein, 469 aa, Artificial Sequence; identical to SEQ ID NO: 23364
  derived and/or modified protein sequence (wt) from neuraminidase__InfluenzaA__AHZ40737

SEQ ID NO: 25387 - protein, 469 aa, Artificial Sequence
  derived and/or modified protein sequence (wt) from neuraminidase__InfluenzaA__AHZ40749
MNPNQKIITIGSVSLTISTICLFMQIAILITTVTLHFKQYEFNSPPNNQVMLCEPTIIERNITEIVYLTNTTIEKEICPKPAEYRNWSKPQCGITGFAPFSKDNSIRLSAGGDIWVTREPYVSCDPDKCYQFALGQGTTLNNVHSNNTVRDRTPYRTLLMNELGVPFHLGTKQVCIAWSSSSCHDGKAWLHVCITGDDKNATASFIYNGRLVDSVVSWSKEILRTQESECVCINGTCTVVMTDGSASGKADTKILFIEEGKIVHTSTLSGSAQHVEECSCYPRYPGVRCVCRDNWKGSNRPIVDINIKDHSIVSSYVCSGLVGDTPRKNDSSSSSHCLDPNNEEGGHGVKGWAFDDGNDVWMGRTINETSRLGYETFKVIEGWSNPKSKLQINRQVIVDRGDRSGYSGIFSVEGKSCINRCFYVELIRGRKEETEVLWTSNSIVVFCGTSGTYGTGPWPDGADLNLMPI

SEQ ID NO: 25388 - protein, 469 aa, Artificial Sequence
  derived and/or modified protein sequence (wt) from neuraminidase__InfluenzaA__AHZ40761
MNPNQKIITIGSVSLTISTICFFMQIAILITTVTLHFKQYEFNSPPNNQVMLCEPTIIERNITEIVYLTNTTIEKELCPKLAEYRNWSKPQCDITGFAPFSKDNSIRLSAGGDIWVTREPYVSCDPDKCYQFALGQGTTLNNVHSNNTVRDRTPYRTLLMNELGVPFHLGTKQVCMAWSSSSCHDGKAWLHVCITGDDKNATASFIYNGKLVDSVVSWSKEILRTQESECVCINGTCTVVMTDGSASGKADTKILFIEEGKIVHTSTLSGSAQHVEECSCYPRYPGVRCVCRDNWKGSNRPIVDINIKDHSIVSSYVCSGLVGDTPRKTDSSSSSHCLDPNNEEGGHGVKGWAFDDGNDVWMGRTINETSRLGYETFKVIEGWSNPKSKLQINRQVIVDRGDRSGYSGIFSVEGKSCINRCFYVELIRGRKKETAVLWTSNSIVVFCGTSGTYGTGSWPDGADLNLMPI

SEQ ID NO: 25389 - protein, 469 aa, Artificial Sequence; identical to SEQ ID NO: 22146
  derived and/or modified protein sequence (wt) from neuraminidase__InfluenzaA__AHZ40773

SEQ ID NO: 25390 - protein, 469 aa, Artificial Sequence; identical to SEQ ID NO: 16728
  derived and/or modified protein sequence (wt) from neuraminidase__InfluenzaA__AHZ40785

SEQ ID NO: 25391 - protein, 469 aa, Artificial Sequence; identical to SEQ ID NO: 16728
  derived and/or modified protein sequence (wt) from neuraminidase__InfluenzaA__AHZ40796

SEQ ID NO: 25392 - protein, 469 aa, Artificial Sequence; identical to SEQ ID NO: 16728
  derived and/or modified protein sequence (wt) from neuraminidase__InfluenzaA__AHZ40807

SEQ ID NO: 25393 - protein, 469 aa, Artificial Sequence; identical to SEQ ID NO: 16728
  derived and/or modified protein sequence (wt) from neuraminidase__InfluenzaA__AHZ40818

SEQ ID NO: 25394 - protein, 469 aa, Artificial Sequence; identical to SEQ ID NO: 16728
  derived and/or modified protein sequence (wt) from neuraminidase__InfluenzaA__AHZ40829

SEQ ID NO: 25395 - protein, 469 aa, Artificial Sequence; identical to SEQ ID NO: 16728
  derived and/or modified protein sequence (wt) from neuraminidase__InfluenzaA__AHZ40840

SEQ ID NO: 25396 - protein, 469 aa, Artificial Sequence; identical to SEQ ID NO: 16728
  derived and/or modified protein sequence (wt) from neuraminidase__InfluenzaA__AHZ40851

SEQ ID NO: 25397 - protein, 469 aa, Artificial Sequence; identical to SEQ ID NO: 16728
  derived and/or modified protein sequence (wt) from neuraminidase__InfluenzaA__AHZ40862

SEQ ID NO: 25398 - protein, 469 aa, Artificial Sequence; identical to SEQ ID NO: 16728
  derived and/or modified protein sequence (wt) from neuraminidase__InfluenzaA__AHZ40873

SEQ ID NO: 25399 - protein, 469 aa, Artificial Sequence; identical to SEQ ID NO: 16728
  derived and/or modified protein sequence (wt) from neuraminidase__InfluenzaA__AHZ40884

SEQ ID NO: 25400 - protein, 469 aa, Artificial Sequence; identical to SEQ ID NO: 16728
  derived and/or modified protein sequence (wt) from neuraminidase__InfluenzaA__AHZ40895

SEQ ID NO: 25401 - protein, 469 aa, Artificial Sequence; identical to SEQ ID NO: 16728
  derived and/or modified protein sequence (wt) from neuraminidase__InfluenzaA__AHZ40906

SEQ ID NO: 25402 - protein, 469 aa, Artificial Sequence; identical to SEQ ID NO: 16728
  derived and/or modified protein sequence (wt) from neuraminidase__InfluenzaA__AHZ40917

SEQ ID NO: 25403 - protein, 469 aa, Artificial Sequence; identical to SEQ ID NO: 16728
  derived and/or modified protein sequence (wt) from neuraminidase__InfluenzaA__AHZ40928

SEQ ID NO: 25404 - protein, 469 aa, Artificial Sequence; identical to SEQ ID NO: 16728
  derived and/or modified protein sequence (wt) from neuraminidase__InfluenzaA__AHZ40939

SEQ ID NO: 25405 - protein, 469 aa, Artificial Sequence; identical to SEQ ID NO: 16728
  derived and/or modified protein sequence (wt) from neuraminidase__InfluenzaA__AHZ40950

SEQ ID NO: 25406 - protein, 469 aa, Artificial Sequence; identical to SEQ ID NO: 16728
  derived and/or modified protein sequence (wt) from neuraminidase__InfluenzaA__AHZ40961

SEQ ID NO: 25407 - protein, 469 aa, Artificial Sequence; identical to SEQ ID NO: 16728
  derived and/or modified protein sequence (wt) from neuraminidase__InfluenzaA__AHZ40972

SEQ ID NO: 25408 - protein, 469 aa, Artificial Sequence; identical to SEQ ID NO: 16728
  derived and/or modified protein sequence (wt) from neuraminidase__InfluenzaA__AHZ40983

SEQ ID NO: 25409 - protein, 469 aa, Artificial Sequence; identical to SEQ ID NO: 16728
  derived and/or modified protein sequence (wt) from neuraminidase__InfluenzaA__AHZ40994

SEQ ID NO: 25410 - protein, 469 aa, Artificial Sequence; identical to SEQ ID NO: 16728
  derived and/or modified protein sequence (wt) from neuraminidase__InfluenzaA__AHZ41005

SEQ ID NO: 25411 - protein, 469 aa, Artificial Sequence; identical to SEQ ID NO: 16728
  derived and/or modified protein sequence (wt) from neuraminidase__InfluenzaA__AHZ41016

SEQ ID NO: 25412 - protein, 469 aa, Artificial Sequence; identical to SEQ ID NO: 16728
  derived and/or modified protein sequence (wt) from neuraminidase__InfluenzaA__AHZ41027

SEQ ID NO: 25413 - protein, 469 aa, Artificial Sequence; identical to SEQ ID NO: 16728
  derived and/or modified protein sequence (wt) from neuraminidase__InfluenzaA__AHZ41049

SEQ ID NO: 25414 - protein, 469 aa, Artificial Sequence; identical to SEQ ID NO: 16728
  derived and/or modified protein sequence (wt) from neuraminidase__InfluenzaA__AHZ41060

SEQ ID NO: 25415 - protein, 469 aa, Artificial Sequence; identical to SEQ ID NO: 16728
  derived and/or modified protein sequence (wt) from neuraminidase__InfluenzaA__AHZ41071

SEQ ID NO: 25416 - protein, 469 aa, Artificial Sequence; identical to SEQ ID NO: 16728
  derived and/or modified protein sequence (wt) from neuraminidase__InfluenzaA__AHZ41082

SEQ ID NO: 25417 - protein, 469 aa, Artificial Sequence; identical to SEQ ID NO: 16728
  derived and/or modified protein sequence (wt) from neuraminidase__InfluenzaA__AHZ41093

SEQ ID NO: 25418 - protein, 469 aa, Artificial Sequence; identical to SEQ ID NO: 16728
  derived and/or modified protein sequence (wt) from neuraminidase__InfluenzaA__AHZ41104

SEQ ID NO: 25419 - protein, 469 aa, Artificial Sequence; identical to SEQ ID NO: 16728
  derived and/or modified protein sequence (wt) from neuraminidase__InfluenzaA__AHZ41115

SEQ ID NO: 25420 - protein, 469 aa, Artificial Sequence; identical to SEQ ID NO: 16728
  derived and/or modified protein sequence (wt) from neuraminidase__InfluenzaA__AHZ41126

SEQ ID NO: 25421 - protein, 469 aa, Artificial Sequence; identical to SEQ ID NO: 16728
  derived and/or modified protein sequence (wt) from neuraminidase__InfluenzaA__AHZ41137

SEQ ID NO: 25422 - protein, 469 aa, Artificial Sequence; identical to SEQ ID NO: 16728
  derived and/or modified protein sequence (wt) from neuraminidase__InfluenzaA__AHZ41148

SEQ ID NO: 25423 - protein, 469 aa, Artificial Sequence; identical to SEQ ID NO: 16728
  derived and/or modified protein sequence (wt) from neuraminidase__InfluenzaA__AHZ41159

SEQ ID NO: 25424 - protein, 469 aa, Artificial Sequence; identical to SEQ ID NO: 16728
  derived and/or modified protein sequence (wt) from neuraminidase__InfluenzaA__AHZ41170

SEQ ID NO: 25425 - protein, 469 aa, Artificial Sequence; identical to SEQ ID NO: 16728
  derived and/or modified protein sequence (wt) from neuraminidase__InfluenzaA__AHZ41181

SEQ ID NO: 25426 - protein, 469 aa, Artificial Sequence; identical to SEQ ID NO: 16728
  derived and/or modified protein sequence (wt) from neuraminidase__InfluenzaA__AHZ41205

SEQ ID NO: 25427 - protein, 469 aa, Artificial Sequence; identical to SEQ ID NO: 16728
  derived and/or modified protein sequence (wt) from neuraminidase__InfluenzaA__AHZ41251

SEQ ID NO: 25428 - protein, 469 aa, Artificial Sequence; identical to SEQ ID NO: 16728
  derived and/or modified protein sequence (wt) from neuraminidase__InfluenzaA__AHZ41266

SEQ ID NO: 25429 - protein, 469 aa, Artificial Sequence; identical to SEQ ID NO: 16728
  derived and/or modified protein sequence (wt) from neuraminidase__InfluenzaA__AHZ41284

SEQ ID NO: 25430 - protein, 469 aa, Artificial Sequence; identical to SEQ ID NO: 16728
  derived and/or modified protein sequence (wt) from neuraminidase__InfluenzaA__AHZ41295

SEQ ID NO: 25431 - protein, 469 aa, Artificial Sequence; identical to SEQ ID NO: 16728
  derived and/or modified protein sequence (wt) from neuraminidase__InfluenzaA__AHZ41306

SEQ ID NO: 25432 - protein, 469 aa, Artificial Sequence; identical to SEQ ID NO: 16728
  derived and/or modified protein sequence (wt) from neuraminidase__InfluenzaA__AHZ41317

SEQ ID NO: 25433 - protein, 469 aa, Artificial Sequence; identical to SEQ ID NO: 16728
  derived and/or modified protein sequence (wt) from neuraminidase__InfluenzaA__AHZ41328

SEQ ID NO: 25434 - protein, 469 aa, Artificial Sequence; identical to SEQ ID NO: 16728
  derived and/or modified protein sequence (wt) from neuraminidase__InfluenzaA__AHZ41339

SEQ ID NO: 25435 - protein, 469 aa, Artificial Sequence; identical to SEQ ID NO: 16728
  derived and/or modified protein sequence (wt) from neuraminidase__InfluenzaA__AHZ41350

SEQ ID NO: 25436 - protein, 469 aa, Artificial Sequence; identical to SEQ ID NO: 16728
  derived and/or modified protein sequence (wt) from neuraminidase__InfluenzaA__AHZ41369

SEQ ID NO: 25437 - protein, 469 aa, Artificial Sequence; identical to SEQ ID NO: 16728
  derived and/or modified protein sequence (wt) from neuraminidase__InfluenzaA__AHZ41380

SEQ ID NO: 25438 - protein, 469 aa, Artificial Sequence; identical to SEQ ID NO: 16728
  derived and/or modified protein sequence (wt) from neuraminidase__InfluenzaA__AHZ41391

SEQ ID NO: 25439 - protein, 469 aa, Artificial Sequence; identical to SEQ ID NO: 16728
  derived and/or modified protein sequence (wt) from neuraminidase__InfluenzaA__AHZ41402

SEQ ID NO: 25440 - protein, 469 aa, Artificial Sequence; identical to SEQ ID NO: 16728
  derived and/or modified protein sequence (wt) from neuraminidase__InfluenzaA__AHZ41413

SEQ ID NO: 25441 - protein, 469 aa, Artificial Sequence; identical to SEQ ID NO: 16728
  derived and/or modified protein sequence (wt) from neuraminidase__InfluenzaA__AHZ41444

SEQ ID NO: 25442 - protein, 469 aa, Artificial Sequence; identical to SEQ ID NO: 16728
  derived and/or modified protein sequence (wt) from neuraminidase__InfluenzaA__AHZ41455

SEQ ID NO: 25443 - protein, 469 aa, Artificial Sequence; identical to SEQ ID NO: 16728
  derived and/or modified protein sequence (wt) from neuraminidase__InfluenzaA__AHZ41476

SEQ ID NO: 25444 - protein, 469 aa, Artificial Sequence; identical to SEQ ID NO: 16728
  derived and/or modified protein sequence (wt) from neuraminidase__InfluenzaA__AHZ41487

SEQ ID NO: 25445 - protein, 469 aa, Artificial Sequence; identical to SEQ ID NO: 16728
  derived and/or modified protein sequence (wt) from neuraminidase__InfluenzaA__AHZ41498

SEQ ID NO: 25446 - protein, 469 aa, Artificial Sequence; identical to SEQ ID NO: 16728
  derived and/or modified protein sequence (wt) from neuraminidase__InfluenzaA__AHZ41509

SEQ ID NO: 25447 - protein, 469 aa, Artificial Sequence; identical to SEQ ID NO: 16728
  derived and/or modified protein sequence (wt) from neuraminidase__InfluenzaA__AHZ41520

SEQ ID NO: 25448 - protein, 469 aa, Artificial Sequence; identical to SEQ ID NO: 16728
  derived and/or modified protein sequence (wt) from neuraminidase__InfluenzaA__AHZ41531

SEQ ID NO: 25449 - protein, 469 aa, Artificial Sequence; identical to SEQ ID NO: 16728
  derived and/or modified protein sequence (wt) from neuraminidase__InfluenzaA__AHZ41542

SEQ ID NO: 25450 - protein, 469 aa, Artificial Sequence; identical to SEQ ID NO: 16728
  derived and/or modified protein sequence (wt) from neuraminidase__InfluenzaA__AHZ41553

SEQ ID NO: 25451 - protein, 469 aa, Artificial Sequence; identical to SEQ ID NO: 16728
  derived and/or modified protein sequence (wt) from neuraminidase__InfluenzaA__AHZ41564

SEQ ID NO: 25452 - protein, 469 aa, Artificial Sequence; identical to SEQ ID NO: 16728
  derived and/or modified protein sequence (wt) from neuraminidase__InfluenzaA__AHZ41586

SEQ ID NO: 25453 - protein, 469 aa, Artificial Sequence; identical to SEQ ID NO: 16728
  derived and/or modified protein sequence (wt) from neuraminidase__InfluenzaA__AHZ41597

SEQ ID NO: 25454 - protein, 469 aa, Artificial Sequence; identical to SEQ ID NO: 16728
  derived and/or modified protein sequence (wt) from neuraminidase__InfluenzaA__AHZ41608

SEQ ID NO: 25455 - protein, 469 aa, Artificial Sequence; identical to SEQ ID NO: 16728
  derived and/or modified protein sequence (wt) from neuraminidase__InfluenzaA__AHZ41619

SEQ ID NO: 25456 - protein, 469 aa, Artificial Sequence; identical to SEQ ID NO: 16728
  derived and/or modified protein sequence (wt) from neuraminidase__InfluenzaA__AHZ41630

SEQ ID NO: 25457 - protein, 469 aa, Artificial Sequence; identical to SEQ ID NO: 16728
  derived and/or modified protein sequence (wt) from neuraminidase__InfluenzaA__AHZ41641

SEQ ID NO: 25458 - protein, 469 aa, Artificial Sequence; identical to SEQ ID NO: 16728
  derived and/or modified protein sequence (wt) from neuraminidase__InfluenzaA__AHZ41652

SEQ ID NO: 25459 - protein, 469 aa, Artificial Sequence; identical to SEQ ID NO: 16728
  derived and/or modified protein sequence (wt) from neuraminidase__InfluenzaA__AHZ41663

SEQ ID NO: 25460 - protein, 469 aa, Artificial Sequence; identical to SEQ ID NO: 16728
  derived and/or modified protein sequence (wt) from neuraminidase__InfluenzaA__AHZ41674

SEQ ID NO: 25461 - protein, 469 aa, Artificial Sequence; identical to SEQ ID NO: 16728
  derived and/or modified protein sequence (wt) from neuraminidase__InfluenzaA__AHZ41685

SEQ ID NO: 25462 - protein, 469 aa, Artificial Sequence; identical to SEQ ID NO: 16728
  derived and/or modified protein sequence (wt) from neuraminidase__InfluenzaA__AHZ41696

SEQ ID NO: 25463 - protein, 469 aa, Artificial Sequence; identical to SEQ ID NO: 16728
  derived and/or modified protein sequence (wt) from neuraminidase__InfluenzaA__AHZ41707

SEQ ID NO: 25464 - protein, 469 aa, Artificial Sequence; identical to SEQ ID NO: 16728
  derived and/or modified protein sequence (wt) from neuraminidase__InfluenzaA__AHZ41718

SEQ ID NO: 25465 - protein, 469 aa, Artificial Sequence; identical to SEQ ID NO: 16728
  derived and/or modified protein sequence (wt) from neuraminidase__InfluenzaA__AHZ41729

SEQ ID NO: 25466 - protein, 469 aa, Artificial Sequence; identical to SEQ ID NO: 16728
  derived and/or modified protein sequence (wt) from neuraminidase__InfluenzaA__AHZ41740

SEQ ID NO: 25467 - protein, 469 aa, Artificial Sequence; identical to SEQ ID NO: 16728
  derived and/or modified protein sequence (wt) from neuraminidase__InfluenzaA__AHZ41751

SEQ ID NO: 25468 - protein, 469 aa, Artificial Sequence; identical to SEQ ID NO: 16728
  derived and/or modified protein sequence (wt) from neuraminidase__InfluenzaA__AHZ41762

SEQ ID NO: 25469 - protein, 469 aa, Artificial Sequence; identical to SEQ ID NO: 23389
  derived and/or modified protein sequence (wt) from neuraminidase__InfluenzaA__AHZ42564

SEQ ID NO: 25470 - protein, 469 aa, Artificial Sequence; identical to SEQ ID NO: 22146
  derived and/or modified protein sequence (wt) from neuraminidase__InfluenzaA__AHZ42575

SEQ ID NO: 25471 - protein, 469 aa, Artificial Sequence
  derived and/or modified protein sequence (wt) from neuraminidase__InfluenzaA__AHZ42587
MNPNQKIITIGSVSLTISTICFFMQIAILITTVTLHFKQYEFNSPPNNQVMLCEPTIIERNITEIVYLTNTTIEKEMCPKPAEYRNWSKPQCGITGFAPFSKDNSIRLSAGGDIWVTREPYVSCDPDKCYQFALGQGTTLNNVHSNNTVRDRTPYRTLLMNELGVPFHLGTKQVCIAWSSSSCHDGKAWLHVCITGDDKNATASFIYNGRLVDSVVSWSKEILRTQESECVCINGTCTVVMTDGSASGKADTKILFIEEGKIVHTSTLSGSAQHVEECSCYPRYPGVRCVCRDNWKGSNRPIVDINIKDHSIVSSYVCSGLVGDTPRKNDSSSSSHCLDPNNEEGGHGVKGWAFDDGNDVWMGRTINETSRLGYETFKVIEGWSNPKSKLQINRQVIVDRGDRSGYSGIFSVEGKSCINRCFYVELIRGRKEETEVLWTSNSIVVFCGTSGTYGTGSWPDGADLNLMPI

SEQ ID NO: 25472 - protein, 470 aa, Artificial Sequence
  derived and/or modified protein sequence (wt) from neuraminidase__InfluenzaA__AHZ42599
MNPNQKIITIGSVSLTISTICFFMQIAILITTVTLHFKQYEFNSPPKNNQVMLCEPTIIERNITEIVYLTNTTIEKEICPKPAEYRNWSKPQCGITGFAPFSKDNSIRLSAGGDIWVTREPYVSCDPDKCYQFALGQGTTLNNVHSNNTVRDRTPYRTLLMNELGVPFHLGTKQVCIAWSSSSCHDGKAWLHVCITGDDKNATASFIYNGRLVDSVVSWSKEILRTQESECVCINGTCTVVMTDGSASEKADTKILFIEEGKIVHTSTLSGSAQHVEECSCYPRYPGVRCVCRDNWKGSNRPIVDINIKDHSIVSSYVCSGLVGDTPRKNDSSSSSHCLDPNNEEGGHGVKGWAFDDGNDVWMGRTINETSRLGYETFKVIEGWSNPKSKLQINRQVIVDRGDRSGYSGIFSVEGKSCINRCFYVELIRGRKEETEVLWTSNSIVVFCGTSGTYGTGSWPDGADLNLMPI

SEQ ID NO: 25473 - protein, 469 aa, Artificial Sequence; identical to SEQ ID NO: 24792
  derived and/or modified protein sequence (wt) from neuraminidase__InfluenzaA__AHZ42611

SEQ ID NO: 25474 - protein, 469 aa, Artificial Sequence; identical to SEQ ID NO: 22146
  derived and/or modified protein sequence (wt) from neuraminidase__InfluenzaA__AHZ42622

SEQ ID NO: 25475 - protein, 469 aa, Artificial Sequence; identical to SEQ ID NO: 25333
  derived and/or modified protein sequence (wt) from neuraminidase__InfluenzaA__AHZ42634

SEQ ID NO: 25476 - protein, 469 aa, Artificial Sequence; identical to SEQ ID NO: 25376
  derived and/or modified protein sequence (wt) from neuraminidase__InfluenzaA__AHZ42646

SEQ ID NO: 25477 - protein, 469 aa, Artificial Sequence; identical to SEQ ID NO: 22146
  derived and/or modified protein sequence (wt) from neuraminidase__InfluenzaA__AHZ42657

SEQ ID NO: 25478 - protein, 469 aa, Artificial Sequence; identical to SEQ ID NO: 25093
  derived and/or modified protein sequence (wt) from neuraminidase__InfluenzaA__AHZ42669

SEQ ID NO: 25479 - protein, 469 aa, Artificial Sequence; identical to SEQ ID NO: 22146
  derived and/or modified protein sequence (wt) from neuraminidase__InfluenzaA__AHZ42681

SEQ ID NO: 25480 - protein, 469 aa, Artificial Sequence
  derived and/or modified protein sequence (wt) from neuraminidase__InfluenzaA__AHZ42693
MNPNQKIITIGSVCMTIGMANLILQIGNIISIWISHSIQLGNQSQIETCNQSVITYENNTWVNQTYVNISNTNFAAGQSVVSVKLAGNSSLCPVSGWAIYSKDNSVRIGSKGDVFVIREPFISCSPLECRTFFLTQGALLNDKHSNGTIKDRSPYRTLMSCPIGEVPSPYNSRFESVAWSASACHDGINWLTIGISGPDSGAVAVLKYNGIITDTIKSWRNNILRTQESECACVNGSCFTIMTDGPSDGQASYKIFRIEKGKIVKSVEMNAPNYHYEECSCYPDSSEITCVCRDNWHGSNRPWVSFNQNLEYQIGYICSGIFGDNPRPNDKTGSCGPVSSNGANGVKGFSFKYGNGVWIGRTKSISSRKGFEMIWDPNGWTGTDNNFSIKQDIVGINEWSGYSGSFVQHPELTGMDCIRPCFWVELIRGRPKENTIWTSGSIISFCGVNSDTVGWSWPDGAELPFTIDK

SEQ ID NO: 25481 - protein, 469 aa, Artificial Sequence; identical to SEQ ID NO: 22146
  derived and/or modified protein sequence (wt) from neuraminidase__InfluenzaA__AHZ42704

SEQ ID NO: 25482 - protein, 469 aa, Artificial Sequence
  derived and/or modified protein sequence (wt) from neuraminidase__InfluenzaA__AHZ42716
MNPNQKIITIGSVSLTISTICFFMQIAILITTVTLHFKQYEFNSPPNNQVMLCEPTIIERNITEIVYLTNTTIEKEICPKPAEYRNWSKPQCGITGFAPFSKDNSIRLSAGGDIWVTREPYVSCDPDKCYQFALGQGTTLNNVHSNNTVRDRTPYRTLLMNELGVPFHLGTKQVCIAWSSSSCHDGKAWLHVCITGDDKNATASFIYNGRLVDSVVSWSKEILRTQESECVCINGTCTVVMTDGSASGKADTKILFIEEGKIVHTSTLSGSAQHVEECSCYPRYPGVRCVCRDNWKGSNRPIVDINIKDHSIVSSYVCSGLVGDTPRKNDSSSSSHCLDPNNEEGGHGVKGWAFDDGNDVWMGRTINETSRLGYETFKVIEGWSNPKSKFQINRQVIVDRGDRSGYSGIFSVEGKSCINRCFYVELIRGRKEETEVLWTSNSIVVFCGTSGTYGTGSWPDGADLNLMPI

SEQ ID NO: 25483 - protein, 469 aa, Artificial Sequence; identical to SEQ ID NO: 22146
  derived and/or modified protein sequence (wt) from neuraminidase__InfluenzaA__AHZ42728

SEQ ID NO: 25484 - protein, 469 aa, Artificial Sequence; identical to SEQ ID NO: 23389
  derived and/or modified protein sequence (wt) from neuraminidase__InfluenzaA__AHZ42740

SEQ ID NO: 25485 - protein, 469 aa, Artificial Sequence; identical to SEQ ID NO: 23357
  derived and/or modified protein sequence (wt) from neuraminidase__InfluenzaA__AHZ42751

SEQ ID NO: 25486 - protein, 469 aa, Artificial Sequence
  derived and/or modified protein sequence (wt) from neuraminidase__InfluenzaA__AHZ42763
MNPNQKIITIGSVSLTISTICFFMQIAILITTVTLHFKQYEFNSPPNNQVMLCEPTIIERNITEIVYLTNTTIEKEICPKPAEYRNWSKPQCDITGFAPFSKDNSIRLSAGGDIWVTREPYVSCDPDKCYQFALGQGTTLNNVHSNNTVRDRTPYRTLLMNELGVPFHLGTKQVCIAWSSSSCHDGKAWLHVCITGDDKNATASFIYNGRLVDSVVSWSKEILRTQESECVCINGTCTVVMTDGSASGKADTKILFIEEGKIVYTSTLSGSAQHVEECSCYPRYPGVRCVCRDNWKGSNRPIVDINIKDHSIVSRYVCSGLVGDTPRKNDSSSSSHCLDPNNEEGGHGVKGWAFDDGNDVWMGRTINETSRLGYETFKVIEGWSNPKSKLQINRQVIVDRGDRSGYSGIFSVEGKSCINRCFYVELIRGRKEETEVLWTSNSIVVFCGTSGTYGTGSWPDGADLNLMPI

SEQ ID NO: 25487 - protein, 469 aa, Artificial Sequence; identical to SEQ ID NO: 23375
  derived and/or modified protein sequence (wt) from neuraminidase__InfluenzaA__AHZ42775

SEQ ID NO: 25488 - protein, 469 aa, Artificial Sequence; identical to SEQ ID NO: 22146
  derived and/or modified protein sequence (wt) from neuraminidase__InfluenzaA__AHZ42787

SEQ ID NO: 25489 - protein, 469 aa, Artificial Sequence
  derived and/or modified protein sequence (wt) from neuraminidase__InfluenzaA__AHZ42799
MNPNQKIITIGSVSLTISTICFFMQIAILITTVTLHFKQYEFNSPPNNQVMLCEPTIIERNITEIVYLTNTTIEKEICPKPAEYRNWSKPQCGITGFAPFSKDNSIRLSAGGDIWVTREPYVSCDPDKCYQFALGQGTTLNNVHSNNTVRDRTPYRTLLMNELGVPFHLGTKQVCIAWSSSSCHDGKAWLHVCITGDDKNATASFIYNGRLVDSVVSWSKEILRTQESECVCINGTCTVVMTDGSASGKADTKILFIEEGKIVHTSTLSGSAQHVEECSCYPRYPGVRCVCRDNWKGSNRPIIDINIKDHSIVSSYVCSGLVGDTPRKNDSSSSSHCLDPNNEEGGHGVKGWAFDDGNDVWMGRTINETSRLGYETFKVIEGWSNPKSKLQINRQVIVDRGDRSGYSGIFSVEGKSCINRCFYVELIRGRKEETEVLWTSNSIVVFCGTSGTYGTGSWPDGADLNLMPI

SEQ ID NO: 25490 - protein, 469 aa, Artificial Sequence
  derived and/or modified protein sequence (wt) from neuraminidase__InfluenzaA__AHZ42811
MNPNQKIITIGSVSLTISTICFFMQIAILITTVTLHFKQYEFNSPPNNQVMLCEPTIIERNITEIVYLTNTTIEKEICPKPAEYRNWSKPQCGITGFAPFSKDNSIRLSAGGDIWVTREPYVSCDPDKCYQFALGQGTTLNNVHSNNTVRDRTPYRTLLMNELGVPFHLGTKQVCIAWSSSSCHDGKAWLHVCITGDDKNATASFIYNGRLVDSVVSWSKEILRTQESECVCINGTCTVVMTDGSASGKADTKILFIEEGKIVHTSTLSGSAQHVEECSCYPRYPGVRCVCRDNWKGSNRPIVDINIKDHSIVSSYVCSGLVGDTPRKNDSSSSSHCLDPNNEEGGHGVKGWAFDDGNDVWMGRTINETSRLGYETFKVIEGWSNPKSKLQINRQVIVGRGDRSGYSGIFSVEGKSCINRCFYVELIRGRKEETEVLWTSNSIVVFCGTSGTYGTGSWPDGADLNLMPI

SEQ ID NO: 25491 - protein, 469 aa, Artificial Sequence
  derived and/or modified protein sequence (wt) from neuraminidase__InfluenzaA__AHZ42823
MNPNQKIITIGSVCMTIGMANLILQIGNIISIWISHSIQLGNQSQIETCNQSVITYENNTWVNQTYVNISNTNFAAEQSVVSVKLAGNSSLCPVSGWAIYSKDNSVRIGSKGDVFVIREPFISCSPLECRTFFLTQGALLNDKHSNGTIKDRSPYRTLMSCPIGEVPSPYNSRFESVAWSASACHDGINWLTIGISGPDSGAVAVLKYNGIITDTIKSWRNNILRTQESECACVNGSCFTIMTDGPSDGQASYKIFRIEKGKIVKSVEMNAPNYHYEECSCYPDSSEITCVCRDNWHGSNRPWVSFNQNLEYQIGYICSGIFGDNPRPNDKTGSCGPVSSNGANGVKGFSFKYGNGVWIGRTKSISSRKGFEMIWDPNGWTGTDNNFSIKQDIVGINEWSGYSGSFVQHPELTGLDCIRPCFWVELIRGRPKENTIWTSGSSISFCGVNSDTVGWSWPDGAELPFTIDK

SEQ ID NO: 25492 - protein, 469 aa, Artificial Sequence
  derived and/or modified protein sequence (wt) from neuraminidase__InfluenzaA__AHZ42834
MNPNQKIITIGSVSLTISTICFFMQTAILITTVTLHFKQYEFNSPPNNQVMLCEPTIIERNITEIVYLTNTTIEKEICPKPAEYRNWSKPQCGITGFAPFSKDNSIRLSAGGDIWVTREPYVSCDPDKCYQFALGQGTTLNNVHSNNTVRDRTPYRTLLMNELGVPFHLGTKQVCIAWSSSSCHDGKAWLHVCITGDDKNATASFIYNGRLVDSVVSWSKEILRTQESECVCINGTCTVVMTDGSASGKADTKILFIEEGKIVHTSTLSGSAQHVEECSCYPRYPGVRCVCRDNWKGSNRPIVDINIKDHSIVSSYVCSGLVGDTPRKNDSSSSSHCLDPNNEEGGHGVKGWAFDDGNDVWMGRTINETSRLGYETFKVIEGWSNPKSKLQINRQVIVDRGDRSGYSGIFSVEGKSCINRCFYVELIRGRKEETEVLWTSNSIVVFCGTSGTYGTGSWPDGADLNLMPI

SEQ ID NO: 25493 - protein, 469 aa, Artificial Sequence; identical to SEQ ID NO: 22146
  derived and/or modified protein sequence (wt) from neuraminidase__InfluenzaA__AHZ42846

SEQ ID NO: 25494 - protein, 469 aa, Artificial Sequence; identical to SEQ ID NO: 22146
  derived and/or modified protein sequence (wt) from neuraminidase__InfluenzaA__AHZ42858

SEQ ID NO: 25495 - protein, 469 aa, Artificial Sequence; identical to SEQ ID NO: 22146
  derived and/or modified protein sequence (wt) from neuraminidase__InfluenzaA__AHZ42870

SEQ ID NO: 25496 - protein, 469 aa, Artificial Sequence; identical to SEQ ID NO: 22146
  derived and/or modified protein sequence (wt) from neuraminidase__InfluenzaA__AHZ42882

SEQ ID NO: 25497 - protein, 469 aa, Artificial Sequence
  derived and/or modified protein sequence (wt) from neuraminidase__InfluenzaA__AHZ42894
MNPNQKIITIGSVSLTISTICFFMQIAILITTVTLHFKQYEFNSPPNNQVMLCEPTIIERNITEIVYLTNTTIEKEICPKPAEYRNWSKPQCGITGFAPFSKDNSIRLSAGGDIWVTREPYVSCDPDKCYQFALGQGTTLNNVHSNNTVRDRTPYRTLLMNELGVPFHLGTKQVCIAWSSSSCHDGKAWLHVCITGDDKNATASFIYNGRLVDSVVSWSKEILRTQESECVCINGTCTVVMTDGSASGKADTKILFIEEGKIVHTSTLSGSAQHVEECSCYPRYPGVRCVCRDNWKGSNRPIVDINIKDHSIVSSYVCSGLVGDTPRKNDSSSSSHCLDPNNEEGGHGVKGWAFDDGNDVWMGRTINETSRLGYETFKVIEGWSNPKSKLQINRQVIVDKGDRSGYSGIFSVEGKSCINRCFYVELIRGRKEETEVLWTSNSIVVFCGTSGTYGTGSWPDGADLNLMPI

SEQ ID NO: 25498 - protein, 469 aa, Artificial Sequence; identical to SEQ ID NO: 22146
  derived and/or modified protein sequence (wt) from neuraminidase__InfluenzaA__AHZ42906

SEQ ID NO: 25499 - protein, 469 aa, Artificial Sequence; identical to SEQ ID NO: 23375
  derived and/or modified protein sequence (wt) from neuraminidase__InfluenzaA__AHZ42918

SEQ ID NO: 25500 - protein, 465 aa, Artificial Sequence; identical to SEQ ID NO: 23454
  derived and/or modified protein sequence (wt) from neuraminidase__InfluenzaA__AHZ59750

SEQ ID NO: 25501 - protein, 465 aa, Artificial Sequence; identical to SEQ ID NO: 23454
  derived and/or modified protein sequence (wt) from neuraminidase__InfluenzaA__AHZ59762

SEQ ID NO: 25502 - protein, 465 aa, Artificial Sequence; identical to SEQ ID NO: 23454
  derived and/or modified protein sequence (wt) from neuraminidase__InfluenzaA__AHZ59774

SEQ ID NO: 25503 - protein, 465 aa, Artificial Sequence; identical to SEQ ID NO: 23454
  derived and/or modified protein sequence (wt) from neuraminidase__InfluenzaA__AHZ59786

SEQ ID NO: 25504 - protein, 465 aa, Artificial Sequence; identical to SEQ ID NO: 23454
  derived and/or modified protein sequence (wt) from neuraminidase__InfluenzaA__AHZ59798

SEQ ID NO: 25505 - protein, 465 aa, Artificial Sequence; identical to SEQ ID NO: 23454
  derived and/or modified protein sequence (wt) from neuraminidase__InfluenzaA__AHZ59810

SEQ ID NO: 25506 - protein, 465 aa, Artificial Sequence; identical to SEQ ID NO: 23454
  derived and/or modified protein sequence (wt) from neuraminidase__InfluenzaA__AHZ59822

SEQ ID NO: 25507 - protein, 465 aa, Artificial Sequence; identical to SEQ ID NO: 23454
  derived and/or modified protein sequence (wt) from neuraminidase__InfluenzaA__AHZ59834

SEQ ID NO: 25508 - protein, 465 aa, Artificial Sequence; identical to SEQ ID NO: 23454
  derived and/or modified protein sequence (wt) from neuraminidase__InfluenzaA__AHZ59846

SEQ ID NO: 25509 - protein, 465 aa, Artificial Sequence; identical to SEQ ID NO: 23454
  derived and/or modified protein sequence (wt) from neuraminidase__InfluenzaA__AHZ59858

SEQ ID NO: 25510 - protein, 465 aa, Artificial Sequence; identical to SEQ ID NO: 23454
  derived and/or modified protein sequence (wt) from neuraminidase__InfluenzaA__AHZ59870

SEQ ID NO: 25511 - protein, 465 aa, Artificial Sequence; identical to SEQ ID NO: 23454
  derived and/or modified protein sequence (wt) from neuraminidase__InfluenzaA__AHZ59882

SEQ ID NO: 25512 - protein, 465 aa, Artificial Sequence; identical to SEQ ID NO: 23454
  derived and/or modified protein sequence (wt) from neuraminidase__InfluenzaA__AHZ59918

SEQ ID NO: 25513 - protein, 465 aa, Artificial Sequence; identical to SEQ ID NO: 23454
  derived and/or modified protein sequence (wt) from neuraminidase__InfluenzaA__AHZ59930

SEQ ID NO: 25514 - protein, 465 aa, Artificial Sequence; identical to SEQ ID NO: 23454
  derived and/or modified protein sequence (wt) from neuraminidase__InfluenzaA__AHZ59942

SEQ ID NO: 25515 - protein, 465 aa, Artificial Sequence; identical to SEQ ID NO: 23454
  derived and/or modified protein sequence (wt) from neuraminidase__InfluenzaA__AHZ59954

SEQ ID NO: 25516 - protein, 465 aa, Artificial Sequence; identical to SEQ ID NO: 23454
  derived and/or modified protein sequence (wt) from neuraminidase__InfluenzaA__AHZ59966

SEQ ID NO: 25517 - protein, 465 aa, Artificial Sequence; identical to SEQ ID NO: 23454
  derived and/or modified protein sequence (wt) from neuraminidase__InfluenzaA__AHZ59991

SEQ ID NO: 25518 - protein, 465 aa, Artificial Sequence; identical to SEQ ID NO: 23454
  derived and/or modified protein sequence (wt) from neuraminidase__InfluenzaA__AHZ60003

SEQ ID NO: 25519 - protein, 465 aa, Artificial Sequence; identical to SEQ ID NO: 23454
  derived and/or modified protein sequence (wt) from neuraminidase__InfluenzaA__AHZ60015

SEQ ID NO: 25520 - protein, 465 aa, Artificial Sequence; identical to SEQ ID NO: 23454
  derived and/or modified protein sequence (wt) from neuraminidase__InfluenzaA__AHZ60027

SEQ ID NO: 25521 - protein, 465 aa, Artificial Sequence; identical to SEQ ID NO: 23454
  derived and/or modified protein sequence (wt) from neuraminidase__InfluenzaA__AHZ60039

SEQ ID NO: 25522 - protein, 465 aa, Artificial Sequence; identical to SEQ ID NO: 23454
  derived and/or modified protein sequence (wt) from neuraminidase__InfluenzaA__AHZ60051

SEQ ID NO: 25523 - protein, 465 aa, Artificial Sequence; identical to SEQ ID NO: 23454
  derived and/or modified protein sequence (wt) from neuraminidase__InfluenzaA__AHZ60063

SEQ ID NO: 25524 - protein, 465 aa, Artificial Sequence; identical to SEQ ID NO: 23454
  derived and/or modified protein sequence (wt) from neuraminidase__InfluenzaA__AHZ60075

SEQ ID NO: 25525 - protein, 465 aa, Artificial Sequence; identical to SEQ ID NO: 23454
  derived and/or modified protein sequence (wt) from neuraminidase__InfluenzaA__AHZ60087

SEQ ID NO: 25526 - protein, 465 aa, Artificial Sequence; identical to SEQ ID NO: 23454
  derived and/or modified protein sequence (wt) from neuraminidase__InfluenzaA__AHZ60099

SEQ ID NO: 25527 - protein, 469 aa, Artificial Sequence; identical to SEQ ID NO: 22146
  derived and/or modified protein sequence (wt) from neuraminidase__InfluenzaA__AHZ60111

SEQ ID NO: 25528 - protein, 469 aa, Artificial Sequence; identical to SEQ ID NO: 16402
  derived and/or modified protein sequence (wt) from neuraminidase__InfluenzaA__AIA26299

SEQ ID NO: 25529 - protein, 457 aa, Artificial Sequence
  derived and/or modified protein sequence (wt) from neuraminidase__InfluenzaA__AIC64891
MNPNQKIITIGSVCMTIGMANLILQIGNIISIWISHSIQLGNQNQIETCNQSVITYENNTNFAAGQSVVSVKLAGNSSLCPVSGWAIYSKDNSVRIGSKGDVFVIREPFISCSPLECRTFFLTQGALLNDKHSNGTIKDRSPYRTLMSCPIGEVPSPYNSRFESVAWSASACHDGINWLTIGISGPDNGAVAVLKYNGIITDTIKSWRNNILRTQESECACVNGSCFTVMTDGPSNGQASYKIFRIEKGKIVKSVEMNAPNYHYEECSCYPDSSEITCVCRDNWHGSNRPWVSFNQNLEYQIGYICSGIFGDNPRPNDKTGSCGPVSSNGANGVKGFSFKYGNGVWIGRTKSISSRNGFEMIWDPNGWTGTDNNFSIKQDIVGINEWSGYSGSFVQHPELTGLDCIRPCFWVELIRGRPKENTIWTSGSSISFCGVNSDTVGWSWPDGAELPFTIDK

SEQ ID NO: 25530 - protein, 449 aa, Artificial Sequence
  derived and/or modified protein sequence (wt) from neuraminidase__InfluenzaA__AID48084
MNPNKKIITIGSICMVTGMVSLMLQIGNLISIWVSHSIHTGNQHKAEPISNTNLLTEKTVASVKLAGNSSLCPINGWAVYSKDNSIRIGSKGDVFVIREPFISCSHLECRTFFLTQGALLNDKHSNGTVKDRSPHRTLMSCPVGEAPSPYNSRFESVAWSASACHDGTSWLTIGISGPDNGAVAVLKYNGIITDTIKSWRNNILRTQESECACVNGSCFTVMTDGPSNGQASHKIFKMEKGKVVKSVELDAPNYHYEECSCYPDAGEITCVCRDNWHGSNRPWVSFNQNLEYQIGYICSGVFGDNPRPNDGAGSCGPVSSNGAYGVKGFSFKYGNGVWIGRTKSTNSRSGFEMIWDPNGWTETDSSFSVKQDIVAITDWSGYSGSFVQHPELTGLDCIRPCFWVELIRGRPKESTIWTSGSSISFCGVNSDTVGWSWPDGAELPFTIDK

SEQ ID NO: 25531 - protein, 469 aa, Artificial Sequence
  derived and/or modified protein sequence (wt) from neuraminidase__InfluenzaA__AID70507
MNPNQKIITIGSVCTTIGMANLILQIGNIISIWISHSIQLGNQNQIETCNQSVITYENKTWVNQTYVNISNTNFAAGQSVVSVKLAGNSSLCPVSGWAIYSKDNSIRIGSKGDVFVIREPFISCSPLECRTFFLTQGALLNDKHSNGTIKDRSPYRTLMSCPIGEVPSPYNSRFESVAWSASACHDGINWLTIGISGPDNGAVAVLKYNGIITDTIKSWRNNILRTQESECACVNGSCFTVMTDGPSDGQASYKIFRIEKGKIVKSVEMNAPNYHYEECSCYPDSSEITCVCRDNWHGSNRPWVSFNQNLEYQIGYICSGIFGDNPRPNDKTGSCDPVSFNGANGVKGFSFKYGNGVWIGRTKSISSRNGFEMIWDPNGWTGTDNKFSIKQDIVGINEWSGYSGSFVQHPELTGLDCIRPCFWVELIRGRPKENTIWTSGSSISFCGVNSDTVGWFWPDGAELPFTIDK

SEQ ID NO: 25532 - protein, 469 aa, Artificial Sequence
  derived and/or modified protein sequence (wt) from neuraminidase__InfluenzaA__AID70508
MNPNQKIITIGSVCMTIGMANLILQIGNIISIWISHSIQLGNQSQIETCNQSVITYENNTWVNQTYVNISNTNFAAGQSVVSVKLAGNSSLCPVSGWAIYSKDNSIRIGSKGDVFVIREPFISCSPLECRTFFLTQGALLNDKHSNGTIKDRSPYRTLMSCPIGEVPSPYNSRFESVAWSASACHDGINWLTIGISGPNNGAVAVLKYNGIITDTIKSWRNNILRTQESECACVNGSCFTIMTDGPSDGQASYKIFRIEKGKIVKSVEMNAPNYHYEECSCYPDSSEITCVCRDNWHGSNRPWVSFNQNLEYQIGYICSGIFGDNPRPNDKTGSCGPVSSNGANGVKGFSFKYGNGVWIGRTKSISSRKGFEMIWDPNGWTGTDNNFSIKQDIVGINEWSGYSGSFVQHPELTGLDCIRPCFWVELIRGRPKENTIWTSGSSISFCGVNSDTVGWSWPDGAELPFTIDK

SEQ ID NO: 25533 - protein, 469 aa, Artificial Sequence
  derived and/or modified protein sequence (wt) from neuraminidase__InfluenzaA__AID70509
MNPNQKIITIGSVCMTIGMANLILQIGNIISIWISHSIQLGNQSQIETCNQSVITYENNTWVNQTYVNISNTNFAAGQSVVSVKLAGNSSLCPVSGWAIYSKDNSIRIGSKGDVFVIREPFISCSPLECRTFFLTQGALLNDKHSNGTIKDRSPYRTLMSCPIGEVPSPYNSRFESVAWSASACHDGINWLTIGISGPDNGAVAVLKYNGIITDTIKSWRNNILRTQESECACVNGSCFTIMTDGPSDGQASYKIFRIEKGKIVKSVEMNAPNYHYEECSCYPDSSEITCVCRDNWHGSNRPWVSFNQNLEYQIGYICSGIFGDNPRPNDKTGSCGPVSSNGANGVKGFSFKYGNGVWIGRTKSINSRKGFEMIWDPNGWTGTDNNFSIKQDIVGINEWSGYSGSFVQHPELTGLDCIRPCFWVELIRGRPKENTIWTSGSSISFCGVNSDTVGWSWPDGAELPFTIDK

SEQ ID NO: 25534 - protein, 469 aa, Artificial Sequence
  derived and/or modified protein sequence (wt) from neuraminidase__InfluenzaA__AID70510
MNPNQKIITIGSVCITIGMANLILQIGNIISIWISHSIQLGNQSQIETCNQSVITYENNTWVNQTYVNISNTNFAAGQSVVSVKLAGNSSLCPVSGWAIYSKDNSIRIGSKGDVFVIREPFISCSPLECRTFFLTQGALLNDKHSNGTIKDRSPYRTLMSCPIGEVPSPYNSRFESVAWSASACHDGINWLTIGISGPDNGAVAVLKYNGIITDTIKSWRNNILRTQESECACVNGSCFTIMTDGPSDGQASYKIFRIEKGKIVKSVEMNAPNYHYEECSCYPDSSEITCVCRDNWHGSNRPWVSFNQNLEYQIGYICSGIFGDNPRPNDKTGSCGPVSSNGANGVKGFSFKYGNGVWIGRTKSISSRKGFEMIWDPNGWTGTDNNFSIKQDIVGINEWSGYSGSFVQHPELTGLDCIRPCFWVELIRGRPKENTIWTSGSSISFCGVNSDTVGWSWPDGAELPFTIDK

SEQ ID NO: 25535 - protein, 469 aa, Artificial Sequence
  derived and/or modified protein sequence (wt) from neuraminidase__InfluenzaA__AID70511
MNPNQKIITMGSVWMTIGMANLILQSGNIISIWISHSIQLRNQSQIETCNQSVITYENNTWVNQTYVNISNTNFAAGQSVVSVKLAGNSSLCPVSGWAIYSKDNSIRIGSKGDVFVIREPFISCSPLECRTFFLTQGALLNDKHSNGTIKDRSPYRTLMSCPIGEVPSPYNSRFESVAWSASACHDGINWLTIGISGPDNGAVAVLKYNGIITDTIKSWRNNILRTQESECACVNGSCFTIMTDGPSDGQASYKIFRIEKGKIVKSVEMNAPNYHYEECSCYPDSSEITCVCRDNWHGSNRPWVSFNQNLEYQIGYICSGIFGDNPRPNDKTGSCGPVSSNGANGVKGFSFKYGNGVWIGRTKSISSRKGFEMIWDPNGWTGTDNNFSIKQDIVGINEWSGYSGSFVQHPELTGLDCIRPCFWVELIRGRPKENTIWTSGSSISFCGVNSDTVGWSWPDGAELPFTIDK

SEQ ID NO: 25536 - protein, 469 aa, Artificial Sequence
  derived and/or modified protein sequence (wt) from neuraminidase__InfluenzaA__AID70512
MNPNQKIITIGSVWMTIGMANLILQIGNIISIWISHSIQLGNQSQIETCNQSVITYENNTWVNQTYVNISNTNFAAGQSVVSVKLAGNSSLCPVSGWAIYSKDNSIRIGSKGDVFVIREPFISCSPLECRTFFLTQGALLNDKHSNGTIKDRSPYRTLMSCPIGEVPSPYNSRFESVAWSASACHDGINWLTIGISGPDNGAVAVLKYNGIITDTIKSWRNNILRTQESECACVNGSCFTIMTDGPSDGQASYKIFRIEKGKIVKSVEMKAPNYHYEECSCYPDSSEITCVCRDNWHGSNRPWVSFNQNLEYQIGYICSGIFGDNPRPNDKTGSCGPVSSNGANGVKGFSFKYGNGVWIGRTKSISSRKGFEMIWDPNGWTGTDNNFSIKQDIIGINEWSGYSGSFVQHPELTGLDCIRPCFWVELIRGRPKENTIWTSGSSISFCGVNSDTVGWSWPDGAELPFTIDK

SEQ ID NO: 25537 - protein, 469 aa, Artificial Sequence; identical to SEQ ID NO: 20257
  derived and/or modified protein sequence (wt) from neuraminidase__InfluenzaA__AID70514

SEQ ID NO: 25538 - protein, 469 aa, Artificial Sequence
  derived and/or modified protein sequence (wt) from neuraminidase__InfluenzaA__AID70515
MNPNQKIITIGSVCMTIGMANLILQIGNIISIWISHSIQLRNQSQIETCNQSVITYENNTWVNQTYVNISNTNFAAGQSVVSVKLAGNSSLCPVSGWAIYSKDNSIRIGSKGDVFVIREPFISCSPLECRTFFLTQGALLNDKHSNGTIKDRSPYRTLMSCPIGEVPSPYNSRFESVAWSASACHDGINWLTIGISGPDNGAVAVLKYNGIITDTIKSWRNNILRTQESECACVNGSCFTIMTDGPSDGQASYKIFRIEKGKIVKSVEMNAPNYHYEECSCYPDSSEITCVCRDNWHGSNRPWVSFNQNLEYQIGYICSGIFGDNPRPNDKTGSCGPVSSNGANGVKGFSFKYSNGVWIGRTKSISSRKGFEMIWDPNGWTGTDNNFSIKQDIVGINEWSGYSGSFVQHPELTGLDCIRPCFWVELIRGRPKENTIWTSGSSISFCGVNSDTVGWSWPDGAELPFTIDK

SEQ ID NO: 25539 - protein, 469 aa, Artificial Sequence; identical to SEQ ID NO: 23158
  derived and/or modified protein sequence (wt) from neuraminidase__InfluenzaA__AID70516

SEQ ID NO: 25540 - protein, 469 aa, Artificial Sequence
  derived and/or modified protein sequence (wt) from neuraminidase__InfluenzaA__AID70517
MNPNQKIITIGSVCMTIGMANLTLQIGNIISIWISHSIQLGNQNQIETCNQSVITYENNTWVNQTYVNISNTNFAAGQSVVSVKLAGNSSLCPVSGWAIYSKDNSIRIGSKGDVFVIREPFISCSPLECRTFFLTQGALLNDKHSNGTIKDRSPYRTLMSCPIGEVPSPYNSRFESVAWSASACHDGINWLTIGISGPDNGAVAVLKYNGIITDTIKSWRNNILRTQESECACVNGSCFTIMTDGPNDGQASYKIFRIEKGKIVKSVEMNAPNYHYEECSCYPDSSEITCVCRDNWHGSNRPWVSFNQNLEYQIGYICSGIFGDNPRPNDKTGSCGPVSSNGANGVKGFSFKYGNGVWIGRTKSISSRKGFEMIWDPNGWTGTDNNFSIKQDIVGINEWSGYSGSFVQHPELTGLDCIRPCFWVELIRGRPKENTIWTSGSSISFCGVNSDTVGWSWPDGAELPFTIDK

SEQ ID NO: 25541 - protein, 469 aa, Artificial Sequence
  derived and/or modified protein sequence (wt) from neuraminidase__InfluenzaA__AID70518
MNPNQKIITIGSVCMTIGMANLILQIGNIISIWISHSIQLRNQSQIETCNQSVITYENNTWVNQTYVNISNTNFAAGQSVVSVKLAGNSSLCPVSGWAIYSKDNSIRIGSKGDVFVIREPFISCSPLECRTFFLTQGALLNDKHSNGTIKDRSPYRTLMSCPIGEIPSPYNSRFESVAWSASACHDGINWLTIGISGPDNGAVAVLKYNGIITDTIKSWRNNILRTQESECACVNGSCFTIMTDGPSDGQASYKIFRIEKGKIVKSVEMNAPNYHYEECSCYPDSSEITCVCRDNWHGSNRPWVSFNQNLEYQIGYICSGIFGDNPRPNDKTGSCGPVSSNGANGVKGFSFKYGNGVWIGRTKSISSRKGFEMIWDPNGWTGTDNNFSIKQDIVGINEWSGYSGSFVQHPELTGLDCIRPCFWVELIRGRPKENTIWTSGSSISFCGVNSDTVGWSWPDGAELPFTIDK

SEQ ID NO: 25542 - protein, 469 aa, Artificial Sequence
  derived and/or modified protein sequence (wt) from neuraminidase__InfluenzaA__AID70519
MNPNQKIITIGSVCMTIGMANLILQIGNIISIWISHSIQLGNQSQIETCNQSVITYENNTWVNQTYVNISNTNFAAGQSVVSVKLAGNSSLCPVSGWAIYSKDNSIRIGSKGDVFVIREPFISCSPLECRTFFLTQGALLNDKHSNGTIKDRSPYRTLMSCPIGEVPSPYNSRFESVAWSASACHDGINWLTIGISGPDNGAVAVLKYNGIITDTIKSWRNNILRTQESECACVNGSCFTIMTDGPSDGQASYKIFRIEKGKIVKSVEMKAPNYHYEECSCYPDSSEITCVCRDNWHGSNRPWVSFNQNLEYQIGYICSGIFGDNPRPNDKTGSCGPVSSNGANGVKGFSFKYGNGVWIGRTKSISSRKGFEMIWDPNGWTGTDNNFSIKQDIVGINEWSGYSGSFVQHPELTGLDCIRPCFWVELIRGRPKENTIWTSGSSISFCGVNSDTVGWSWPDGAELPFTIDK

SEQ ID NO: 25543 - protein, 469 aa, Artificial Sequence
  derived and/or modified protein sequence (wt) from neuraminidase__InfluenzaA__AID70520
MNPNQKIITIGSVCMTIGMANLILQIGNIISIWISHSIQLRNQSQIETCNQSVITYENNTWVNQTYVNISNTNFAAGQSVVSVKLAGNSSLCPVSGWAIYSKDNSIRIGSKGDVFVIREPFISCSPLECRTFFLTQGALLNDKHSNGTIKDRSPYRTLMSCPIGEVPSPYNSRFESVAWSASACHDGINWLTIGISGPDNGAVAVLKYNGIITDTIKSWRNNILRTQESECACVNGSCFTIMTDGPSDGQASYKIFRIEKGKIVKSVEMNAPNYHYEECSCYPDSSEITCVCRDNWHGSNRPWVSFNQNLEYQIGYICSGIFGDNPRPNDKTGSCGPVSSNGANGVKGFSFKYGNGVWIGRTKSISSRKGFEMIWDPNGWTGTDNNFSIKQDIVGINEWSGYSGSFVQHPELTGLDCIRPCFWVELIRGRPKENTIWTSGSSISFCGVNSGTVGWSWPDGAELPFTIDK

SEQ ID NO: 25544 - protein, 469 aa, Artificial Sequence
  derived and/or modified protein sequence (wt) from neuraminidase__InfluenzaA__AID70521
MNPNQKIITIGSVSLTISRICFFMQIAILINTVTLHFKQYEFNSPPNNQVMLCEPTIIERNITKIVYLTNTTIEKEICPKLAEYRSWSKPQCDITGFAPFSKDNSIRLSAGGDIWVTREPYVSCDPDKCFQFALGQGTTLNNVHSNDTVHDRTPYRTLLMNELGVPFHLGTKQVCIAWSSSSCHDGKAWLHVCITGDDKNATASIIYNGRLVDSIVSWSKKILRTQESECVCINGTCTVVMTDGSASGKADTKILFIEEGKIVHTSTLSGSAQHVEECSCYPRYPGVRCVCRDNWKGSNRPIVDINIKDYSIVSSYVCSGFVGDTPRKPDRSSSSHCLDPNNEEGGHGVKGWAFDDGNDVWMGRTISEKSRLGYETFKVIGGWSNPNSKSQINRQVIVDRGNRSGYSGIFSVEGKSCINRCFYVELIRGRKDETEVLWTSNSIVVFCGTSGTYGTGSWPDGADINLMPI

SEQ ID NO: 25545 - protein, 469 aa, Artificial Sequence
  derived and/or modified protein sequence (wt) from neuraminidase__InfluenzaA__AID70522
MNPNQKIITIGSVSLTISTICFFMQIAILITTVTLHFRQYEFNSPPNNQVMLCEPTIIERNITEIVYLTNTTIEKEICPKLAEYRNWSKPQCDITGFAPFSKDNSIRLSAGGDIWVTREPYVSCDPDKCYQFALGQGTTLNNVHSNNTVRDRTPYRTLLMNELGVPFHLGTKQVCIAWSSSSCHDGKAWLHVCITGDDKNATASFIYNGRLVDSVVSWSKEILRTQESECVCINGTCTVVMTDGSASGKADTKILFIEEGKIVHTSTLSGSAQHVEECSCYPRYPGVRCVCRDNWKGSNRPIVDINIKDHSIVSSYVCSGLVGDTPRKNDSSSSSHCLDPNNEEGGHGVKGWAFDDGNDVWMGRTINETSRLGYETFKVIEGWSNPKSKLQINRQVIVDRGNRSGYSGIFSVEGKSCINRCFYVELIRGRKEETEVLWTSNSIVVFCGTSGTYGTGSWPDGADLNLMPI

SEQ ID NO: 25546 - protein, 469 aa, Artificial Sequence
  derived and/or modified protein sequence (wt) from neuraminidase__InfluenzaA__AID70523
MNPNQKIKTIGSVSLTNSTICIFMQIAILITTVTLHFKQYEFNSPPNNQVMLCEPTIIERNITEIVYLTNTTIEKEICPKLAEYRNWSKPQCDITGFAPFSKDNSIRLSAGGDIWVTREPYVSCDPDKCYQFALGQGTTLNNVHSNNTVRDRTPYRTLLMNELGVPFHLGTKQVCIAWSSSSCHDGKAWLHVCITGDDKNATASFIYNGRLVDSVVSWSKEILRTQESECVCINGTCTVVMTDGSASGKADTKILFIEEGKIVHTSTLSGSAQHVEECSCYPRYPGVRCVCRDNWKGSNRPIVDINIKDHSIVSSYVCSGLVGDTPRKNDSSSSSHCLDPNNEEGGHGVKGWAFDDGNDVWMGRTINETSRLGYETFKVIEGWSNPKSKLQINRQFIVDRGNRSGYSGIFSVEGKSCINRCFYVELIRGRKEETEVLWTSNSIVVFCGTSGTYGTGSWPDGADLNLMPI

SEQ ID NO: 25547 - protein, 469 aa, Artificial Sequence
  derived and/or modified protein sequence (wt) from neuraminidase__InfluenzaA__AID70524
MNPNQKIITIGAVWRTISTICFFMQIAFLITTVTLHFKQYEFNSPPNNQVMPCEPTIIERNITEIVYLTNTTIEKEICPKLAEYRNWSKPQCDITGFAPFSKDNSIRLSAGGDIWVTREPYVSCDPDKCYQFALGQGTTLNNVHSNNTVRDRTPYRTLLMNELGVPFHLGTKQVCIAWSSSSCHDGKAWLHVCITGDDKNATASFIYNGRLVDSVVSWSKEILRTQESECVCINGTCTVVMTDGSASGKADTKILFIEEGKIVHTSTLSGSAQHVEECSCYPRYPGVRCVCRDNWKGSNRPIVDINIKDHSIVSSYVCSGLVGDTPRKNDSSSSSHCLDPNNEEGGHGVKGWAFDDGNDVWMGRTINETSRLGYETFKVIEGWSNPKSKLQINRQVIVDRGNRSGYSGIFSVEGKSCINRCFYVELIRGRKEETEVLWTSNSIVVFCGTSGTYGTGSWPDGADLNLMPI

SEQ ID NO: 25548 - protein, 469 aa, Artificial Sequence
  derived and/or modified protein sequence (wt) from neuraminidase__InfluenzaA__AID70525
MNPNQKIITIGSVSLTIWIICFFMQIAILITTVTLHFKQYEFNSPPNNQVMLCEPTIIERNITEIVYLTNTTIEKEICPKLAEYRNWSKPQCDITGFAPFSKDNSIRLSAGGDIWVTREPYVSCDPDKCYQFALGQGTTLNNVHSNNTVRDRTPYRTLLMNELGVPFHLGTKQVCIAWSSSSCHDGKAWLHVCITGDDKNATASFIYNGRLVDSVVSWSKEILRTQESECVCINGTCTVVMTDGSASGKADTKILFIEEGKIVHTSTLSGSAQHVEECSCYPRYPGVRCVCRDNWKGSNRPIVDINIKDHSIVSSYVCSGLVGDTPRKNDSSSSSHCLDPNNEEGGHGVKGWAFDDGNDVWMGRTINETSRLGYETFKVIEGWSNPKSKLQINRQVIVDRGNRSGYSGIFSVEGKSCINRCFYVELIRGRKEETEVLWTSNSIVVFCGTSGTYGTGSWPDGADLNIMPI

SEQ ID NO: 25549 - protein, 469 aa, Artificial Sequence; identical to SEQ ID NO: 19518
  derived and/or modified protein sequence (wt) from neuraminidase__InfluenzaA__AID70526

SEQ ID NO: 25550 - protein, 469 aa, Artificial Sequence
  derived and/or modified protein sequence (wt) from neuraminidase__InfluenzaA__AID70527
MNPNQKIITIGSVSLTMWIICFFMQIAILITTVTLHFKQYEFNSPPNNQVMLCEPTIIERNITEIVYLTNTTIEKEICPKLAEYRNWSKPQCDITGFAPFSKDNSIRLSAGGDIWVTREPYVSCDPDKCYQFALGQGTTLNNVHSNNTVRDRTPYRTLLMNELGVPFHLGTKQVCIAWSSSSCHDGKAWLHVCITGDDKNATASFIYNGRLVDSVVSWSKEILRTQESECVCINGTCTVVMTDGSASGKADTKILFIEEGKIVHTSTLSGSAQHVEECSCYPRYPGVRCVCRDNWKGSNRPIVDINIKDHSIVSSYVCSGLVGDTPRKNDSSSSSHCLDPNNEEGGHGVKGWAFDDGNDVWMGRTINETSRLGYETFKVIEGWSNPKSKLQINRQVIVDRGNRSGYSGIFSVEGKSCINRCFYVELIRGRKEETEVLWTSNSIVVFCGTSGTYGTGSWPDGADLNLMPI

SEQ ID NO: 25551 - protein, 469 aa, Artificial Sequence
  derived and/or modified protein sequence (wt) from neuraminidase__InfluenzaA__AID70528
MNPNQKIITIGSVSLSISTICFFMQIAILITTVTLHFKQYEFNSPPNNQVMLCEPTIIERNITEIVYLTNTTIEKEICPKLAEYRNWSKPQCDITGFAPFSKDNSIRLSAGGDIWVTREPYVSCDPDKCYQFALGQGTTLNNVHSNNTVRDRTPYRTLLMNELGVPFHLGTKQVCIAWSSSSCHDGKAWLHVCITGDDKNATASFIYNGRLVDSVVSWSKEILRTQESECVCINGTCTVVMTDGSASGKADTKILFIEEGKIVHTSTLSGSAQHVEECSCYPRYPGVRCVCRDNWKGSNRPIVDINIKDHSIVSSYVCSGLVGDTPRKNDSSSSSHCLDPNNEEGGHGVKGWAFDDGNDVWMGRTINETSRLGYETFKVIEGWSNPKSKLQINRQVIVDRGNRSGYSGIFSVEGKSCINRCFYVELIRGRKEETEVLWTSNSIVVFCGTSGTYGTGSWPDGADLNLMPI

SEQ ID NO: 25552 - protein, 469 aa, Artificial Sequence; identical to SEQ ID NO: 19518
  derived and/or modified protein sequence (wt) from neuraminidase__InfluenzaA__AID70529

SEQ ID NO: 25553 - protein, 469 aa, Artificial Sequence
  derived and/or modified protein sequence (wt) from neuraminidase__InfluenzaA__AID70530
MNPNQKIITIGSVSLTISTICFFMQIAILITTVTLHFKQYEFNSPPNNQVMLCEPTIIERNITEIVYLTNTTIEKEICPKLAEYRNWSKPQCDITGFAPFSKDNSIRLSAGGDIWVTREPYVSCDPDKCYQFALGQGTTLNNVHSNNTVRDRTPYRTLLMNELGVPFHLGTKQVCIAWSSSSCHDGKAWLHVCITGDDKNATASFIYNGRLVDSVVSWSKEILRTQESECVCINGTCTVVMTDGSASGKADTKILFIEEGKIVHTSTLSGSAQHVEECSCYPRYPGVRCVCRDNWKGSNRPIVDINIKDHSIVSSYVCSGLVGDTPRKNDSSSSSHCLDPNNEEGGHGVKGWAFDDGNDVWMGRTINETSRLGYETFKVIEGWSNPKSKLQINRQVIVDRGNRSGYSGIFSVEGKSCINRCFYVELIRGRKEETEVLWTSNSIVVFCGTSGTYGTGSWPDGADLNIMPI

SEQ ID NO: 25554 - protein, 469 aa, Artificial Sequence; identical to SEQ ID NO: 19518
  derived and/or modified protein sequence (wt) from neuraminidase__InfluenzaA__AID70531

SEQ ID NO: 25555 - protein, 469 aa, Artificial Sequence
  derived and/or modified protein sequence (wt) from neuraminidase__InfluenzaA__AID70532
MNPNQKIITIGSVSLTISTICFFMQIAILITTVTLHFKQYEFNSPPNNQVMLCEPTIIERNITEIVYLTNTTIEKEICPKLAEYRNWSKPQCDITGFAPFSKDNSIRLSAGGDIWVTREPYVSCDPDKCYQFALGQGTTLNNVHSNNTVRDRTPYRTLLMNELGVPFHLGTKQVCIAWSSSSCHDGKAWLHVCITGDDKNATASFIYNGRLVDSVVSWSKEILRTQESECVCINGTCTVVMTDGSASGKADTKILFIEEGKIVHTSTLSGSAQHVEECSCYPRYPGVRCVCRDNWKGSNRPIVDINIKDHSIVSSYVCSGLVGDTPRKNDSSSSSHCLDPNNEEGGHGVKGWAFDDGNDVWMGRTINETSRLGYETLKVIEGWSNPKSKLQINRQVIVDRGNRSGYYGIFSVEGKSCINRCFYVELIWGRKEEIEVLWTSNSKVVFCGTSGTYGTGSSPDGADLNFMPI

SEQ ID NO: 25556 - protein, 469 aa, Artificial Sequence
  derived and/or modified protein sequence (wt) from neuraminidase__InfluenzaA__AID70533
MNPNQKIITIGSVSLAISTICFFMQIAILITTVTLHFKQYEFNSPPNNQVMLCEPTIIERNITEIVYLTNTTIEKEICPKLAEYRNWSKPQCDITGFAPFSKDNSIRLSAGGDIWVTREPYVSCDPDKCYQFALGQGTTLNNVHSNNTVRDRTPYRTLLMNELGVPFHLGTKQVCIAWSSSSCHDGKAWLHVCITGDDKNATASFIYNGRLVDSVVSWSKEILRTQESECVCINGTCTVVMTDGSASGKADTKILFIEEGKIVHTSTLSGSAQHVEECSCYPRYPGVRCVCRDNWKGSNRPIVDINIKDHSIVSSYVCSGLVGDTPRKNDSSSSSHCLDPNNEEGGHGVKGWAFDDGNDVWMGRTINETSRLGYETFKVIEGWSNPKSKLQINRQVIVDRGNRSGYSGIFSVEGKSCINRCFYVELIRGRKEETEVLWTSNSIVVFCGTSGTYGTGSWPDGADLNLMPI

SEQ ID NO: 25557 - protein, 469 aa, Artificial Sequence
  derived and/or modified protein sequence (wt) from neuraminidase__InfluenzaA__AID70534
MNPNQKIITIGSVSLSIYIICFFMQIAILITTVTLHFKQYEFNSPPNNQAMPCEPTIIERNITEIVYLTNTTIEKEICPKLAEYRNWSKPQCDITGFAPFSKDNSIRLSAGGDIWVTREPYVSCDPDKCYQFALGQGTTLNNVHSNNTVRDRTPYRTLLMNELGVPFHLGTKQVCIAWSSSSCHDGKAWLHVCITGDDKNATASFIYNGRLVDSVVSWSKEILRTQESECVCINGTCTVVMTDGSASGKADTKILFIEEGKIVHTSTLSGSAQHVEECSCYPRYPGVRCVCRDNWKGSNRPIVDINIKDHSIVSSYVCSGLVGDTPRKNDSSSSSHCLDPNNEEGGHGVKGWAFDDGNDVWMGRTINETSRLGYETFKVIEGWSNPKSKLQINRQVIVDRGNRSGYSGIFSVEGKSCINRCFYVELIRGRKEETEVLWTSNSIVVFCGTSGTYGTGSWPDGADLNLMPI

SEQ ID NO: 25558 - protein, 469 aa, Artificial Sequence
  derived and/or modified protein sequence (wt) from neuraminidase__InfluenzaA__AID70535
MNPNQKIITIGSVSLAMCTICFFMQIAILITTVTLHFKQYEFNSPPNNQAMPCEPTIIERNITEIVYLTNTTIEKEICPKLAEYRNWSKPQCDITGFAPFSKDNSIRLSAGGDIWVTREPYVSCDPDKCYQFALGQGTTLNNVHSNNTVRDRTPYRTLLMNELGVPFHLGTKQVCIAWSSSSCHDGKAWLHVCITGDDKNATASFIYNGRLVDSVVSWSKEILRTQESECVCINGTCTVVMTDGSASGKADTKILFIEEGKIVHTSTLSGSAQHVEECSCYPRYPGVRCVCRDNWKGSNRPIVDINIKDHSIVSSYVCSGLVGDTPRKNDSSSSSHCLDPNNEEGGHGVKGWAFDDGNDVWMGRTINETSRLGYETFKVIEGWSNPKSKLQINRQVIVDRGNRSGYSGIFSVEGKSCINRCFYVELIRGRKEETEVLWTSNSIVVFCGTSGTYGTGSWPDGADLNLMPI

SEQ ID NO: 25559 - protein, 469 aa, Artificial Sequence
  derived and/or modified protein sequence (wt) from neuraminidase__InfluenzaA__AID70536
MNPNQKIITIGSVSLTISTVCFFMQIAILITTVTLHFKQYEFNSPPNNQVMLCEPTIIDRNITEIVYLTNTTIEKEICPKLAEYRNWSKPQCDITGFAPFSKDNSIRLSAGGDIWVTREPYVSCDPDKCYQFALGQGTTLNNVHSNNTVRDRTPYRTLLMNELGVPFHLGTKQVCIAWSSSSCHDGKAWLHVCITGDDKNATASFIYNGRLVDSVVSWSKEILRTQESECVCINGTCTVVMTDGSASGKADTKILFIEEGKIVHTSTLSGSAQHVEECSCYPRYPGVRCVCRDNWKGSNRPIVDINIKDHSIVSSYVCSGLVGDTPRKNDSSSSSHCLDPNNEEGGHGVKGWAFDDGNDVWMGRTINETSRLGYETFKVIEGWSNPKSKLQINRQVIVDRGNRSGYSGIFSVEGKSCINRCFYVELIRGRKEETEVLWTSNSIVVFCGTSGTYGTGSWPDGADLNLMPI

SEQ ID NO: 25560 - protein, 469 aa, Artificial Sequence; identical to SEQ ID NO: 19518
  derived and/or modified protein sequence (wt) from neuraminidase__InfluenzaA__AID70537

SEQ ID NO: 25561 - protein, 469 aa, Artificial Sequence
  derived and/or modified protein sequence (wt) from neuraminidase__InfluenzaA__AID70538
MNPNQKKITIGAVSLTMCTVCIFMQIAILITTVTLHFRQYEFNSPPNNQVMLCEPTIIERNITEIVYLTNTTIEKEICPKLAEYRNWSKPQCDITGFAPFSKDNSIRLSAGGDIWVTREPYVSCDPDKCYQFALGQGTTLNNVHSNNTVRDRTPYRTLLMNELGVPFHLGTKQVCIAWSSSSCHDGKAWLHVCITGDDKNATASFIYNGRLVDSVVSWSKEILRTQESECVCINGTCTVVMTDGSASGKADTKILFIEEGKIVHTSTLSGSAQHVEECSCYPRYPGVRCVCRDNWKGSNRPIVDINIKDHSIVSSYVCSGLVGDTPRKNDSSSSSHCLDPNNEEGGHGVKGWAFDDGNDVWMGRTINETSRLGYETFKVIEGWSNPKSKLQINRQVIVDRGNRSGYSGIFSVEGKSCINRCFYVELIRGRKEETEVLWTSNSIVVFCGTSGTYGTGSWPDGADLNLMPI

SEQ ID NO: 25562 - protein, 469 aa, Artificial Sequence
  derived and/or modified protein sequence (wt) from neuraminidase__InfluenzaA__AID70539
MNPNQKIITIGSVSLTISTICFFMQIAILITTVTLHFKQYEFNSPPNNQVMLCEPTIIERNITEIVYLTNTTIEKEICPKLAEYRNWSKPQCDITGFAPFSKDNSIRLSAGGDIWVTREPYVSCDPDKCYQFALGQGTTLNNVHSNNTVRDRTPYRTLLMNELGVPFHLGTKQVCIAWSSSSCHDGKAWLHVCITGDDKNATASFIYNGRLVDSVVSWSKEILRTQESECVCINGTCTVVMTDGSASGKADTKILFIEEGKIVHTSTLSGSAQHVEECSCYPRYPGVRCVCRDNWKGSNRPIVDINIKDHSIVSSYVCSGLVGDTPRKNDSSSSSHCLNPNNEEGGHGVKGWAFDDGNDVWMGRTINETSRLGYETFKVIEGWSNPKSKLQINRQVIVDRGNRSGYSGIFSVEGKSCINRCFYVELIRGRKEETEVLWTSNSIVVFCGTSGTYGTGSWPDGADLNLMPI

SEQ ID NO: 25563 - protein, 469 aa, Artificial Sequence; identical to SEQ ID NO: 19518
  derived and/or modified protein sequence (wt) from neuraminidase__InfluenzaA__AID70540

SEQ ID NO: 25564 - protein, 469 aa, Artificial Sequence; identical to SEQ ID NO: 19518
  derived and/or modified protein sequence (wt) from neuraminidase__InfluenzaA__AID70541

SEQ ID NO: 25565 - protein, 469 aa, Artificial Sequence
  derived and/or modified protein sequence (wt) from neuraminidase__InfluenzaA__AID70633
MNPNQKIITIGSVCMTIGMANLILQIGNIISIWVSHSIQLGNQSQIEACNQSVITYENNTWVNQTYVNISNTNFAAGQSVVSVKLAGNSSLCPVSGWAIYSKDNSVRIGSKGDVFVIREPFISCSPLECRTFFLTQGALLNDKHSNGTIKDRSPYRTLMSCPIGEVPSPYNSRFESVAWSASACHDGINWLTIGISGPDSGAVAVLKYNGIITDTIKSWRNNILRTQESECACVNGSCFTIMTDGPSDGQASYKIFRIEKGKIVKSVEMNAPNYHYEECSCYPDSSEITCVCRDNWHGSNRPWVSFNQNLEYQIGYICSGVFGDNPRPNDKTGSCGPVSSNGANGVKGFSFKYGNGVWIGRTKSISSRKGFEMIWDPNGWTGTDNKFSIKQDIVGINEWSGYSGSFVQHPELTGLDCIRPCFWVELIRGRPEENTIWTSGSSISFCGVNSDTVGWSWPDGAELPFTIDK

SEQ ID NO: 25566 - protein, 465 aa, Artificial Sequence
  derived and/or modified protein sequence (wt) from neuraminidase__InfluenzaA__AID70635
MNPKQKILCTSATAIIIGAIAVLIGIANLGLNIGLHLKPGCNCSHSQPETTNTSQTIINNYYNETNITNIQMEERTSRNFNNLTKGLCTINSWHIYGKDNAVRIGESSDVLVTREPYVSCDPDECRFYALSQGTTIRGKHSNGTIHDGSQYRALISWPLSSPPTVYNSRVECIGWSSTSCHDGKSRMSICISGPNNNASAVVWYNRRPVAEINTWARNILRTQESECVCHNGVCPVVFTDGSATGPADTRIYYFKEGKILKWESLTGTAKHIEECSCYGERTGITCTCRDNWQGSNRPVIQIDPVAMTHTSQYICSPVLTDNPRPNDPNIGKCNDPYPGNNNNGVKGFSYLDGANTWLGRTISTASRSGYEMLKVPNALTDDRSKPIQGQTIVLNADWSGYSGSFMDYWAEGDCYRACFYVELIRGRPKEDKVWWTSNSIVSMCSSTEFLGQWNWPDGAKIEYFL

SEQ ID NO: 25567 - protein, 466 aa, Artificial Sequence
  derived and/or modified protein sequence (wt) from neuraminidase__InfluenzaA__AIG44695
MNPNQKITAIGSVSLIIAIICLLMQIAILTTTMTLHFRQNECSNPSNNQVMPCEPIIIERNTVHLNSTTIEREICPKVAEYKNWSKPQCQITGFAPFSKDNSIRLSASGDIWVTREPYVSCSLDKCYQFALGQGTTLKNKHSNGTTHDRTPHRTLLMNELGVPFHLGTKQVCIAWSSSSCYDGKAWLHVCVTGDDKNATASIIYDGMLVDSVGSWSKNILRTQESECVCINGTCAVVMTDGSASGKADTRVLFIREGKIINISPLSGSAQHVEECSCYPRYPEVRCVCRDNWKGSNRPILYINMADYSIESSYVCSGLVGDTPRNDDSSSSSNCRDPNNERGAPGVKGWAFDDGNDVWMGRTIKNGSRSGYETFRVVNGWTMANSKSQINRQVIVDSDGWSGYSGIFSVEGKKCINRCFYVELIRGRPQEPRVWWTSNSIIVFCGTSGTYGTGSWPDGANINFMPI

SEQ ID NO: 25568 - protein, 469 aa, Artificial Sequence
  derived and/or modified protein sequence (wt) from neuraminidase__InfluenzaA__AIJ10793
MNPNQKIITIGSVSLTISTICFFMQIAILITTVTLHFKQYEFNSPPNNQVMLCEPTIIERNITEIVYLTNTTIEKEICPKLAEYRNWSKPQCDITGFAPFSKDNSIRLSAGGDIWVTREPYVSCDPDKCYQFALGQGTTLNNVHSNNTVRDRTPYRTLLMNELGVPFHLGTKQVCIAWSSSSCHDGKAWLHVCITGDDKNATASFIYNGRLVDSVVSWSKEILRTQESECVCINGTCTVVMTDGSASGKADTKILFIEEGKIVHTSTLSGSAQHVEECSCYPRYPGVRCVCRDNWKGSNRPIVDINIKDHSIVSSYVCSGLVGDTPRKNDSSSSSHCLDPNNEEGGHGVKGWAFDDGNDVWMGRTINETSRLGYETFKAIEGWSNPKSKLQTNRQVIVDRGNRSGYSGIFSVEGKSCINRCFYVELIRGRKEETEVLWTSNSIVVFCGTSGTYGTGSWPDGADLNLMPI

SEQ ID NO: 25569 - protein, 469 aa, Artificial Sequence; identical to SEQ ID NO: 19518
  derived and/or modified protein sequence (wt) from neuraminidase__InfluenzaA__AIJ10794

SEQ ID NO: 25570 - protein, 469 aa, Artificial Sequence; identical to SEQ ID NO: 21143
  derived and/or modified protein sequence (wt) from neuraminidase__InfluenzaA__AIJ10795

SEQ ID NO: 25571 - protein, 469 aa, Artificial Sequence; identical to SEQ ID NO: 21143
  derived and/or modified protein sequence (wt) from neuraminidase__InfluenzaA__AIJ10796

SEQ ID NO: 25572 - protein, 469 aa, Artificial Sequence
  derived and/or modified protein sequence (wt) from neuraminidase__InfluenzaA__AIJ10797
MNPNQKIITIGSVSLTISTICFFMQIAILITTVTLHFKQYEFNSPPNNQVMLCEPTIIERNITEIVYLTNTTIEKEICPKLAEYRNWSKPQCDITGFAPFSKDNSIRLSAGGDIWVTREPYVSCDPDKCYQFALGQGTTLNNVHSNNTVRDRTPYRTLLMNELGVPFHLGTKQVCIAWSSSSCHDGKAWLHVCITGDDKNATASFIYNGKLVDSVVSWSKEILRTQESECVCINGTCTVVMTDGSASGKADTKILFIEEGKIVHTSTLSGSAQHVEECSCYPRYPGVRCVCRDNWKGSNRPIVDINIKDHSIVSSYVCSGLVGDTPRKNDSSSSSHCLDPNNEEGGHGVKGWAFDDGNDVWMGRTINETSRLGYETFKVIEGWSNPKSKLQINRQVIVDRGNRSGYSGIFSVEDKSCINRCFYVELIRGRKEETEVLWTSNSIVVFCGTSGTYGTGSWPDGADLNLMPI

SEQ ID NO: 25573 - protein, 469 aa, Artificial Sequence
  derived and/or modified protein sequence (wt) from neuraminidase__InfluenzaA__AIJ10798
MNPNQKIITIGSVSLTISTICFFMQIAILITTVTLHFKQYEFNSPPNNQVMLCEPTIIERNITEIVYLTNTTIEKEICPTLAEYRNWSKPQCDITGFAPFSKDNSIRLSAGGDIWVTREPYVSCDPDKCYQFALGQGTTLNNVHSNNTVRDRTPYRTLLMNELGVPFHLGTKQVCIAWSSSSCHDGKAWLHVCITGDDKNATASFIYNGRLVDSVVSWSKEILRTQESECVCINGTCTVVMTDGSASGKADTKILFIEEGKIVHTSTLSGSAQHVEECSCYPRYPGVRCVCRDNWKGSNRPIVDINIKDHSIVSSYVCSGLVGDTPRKNDSSSSSHCLDPNNEEGGHGVKGWAFDDGNDVWMGRTINETSRLGYETFKVIEGWSNPKSKLQINRQVIVDRGNRSGYSGIFSVEGKSCINRCFYVELIRGRKEETEVLWTSNSIVVFCGTSGTYGTGSWPDGADLNLMPI

SEQ ID NO: 25574 - protein, 469 aa, Artificial Sequence; identical to SEQ ID NO: 21143
  derived and/or modified protein sequence (wt) from neuraminidase__InfluenzaA__AIJ10799

SEQ ID NO: 25575 - protein, 469 aa, Artificial Sequence
  derived and/or modified protein sequence (wt) from neuraminidase__InfluenzaA__AIJ10800
MNPNQKIITIGSVSLTISTICFFMQIAILITTVTLHFKQYEFNSSPNNQVMLCEPTIIERNITEIVYLTNTTIEKEICPKLAEYRNWSKPQCDITGFAPFSKDNSIRLSAGGDIWVTREPYVSCDPDKCYQFALGQGTTLNNVHSNNTVRDRTPYRTLLMNELGVPFHLGTKQVCIAWSSSSCHDGKAWLHVCITGDDKNATASFIYNGKLVDSVVSWSKEILRTQESECVCINGTCTVVMTDGSASGKADTKILFIEEGKIVHTSTLSGSAQHVEECSCYPRYPGVRCVCRDNWKGSNRPIVDINIKDHSIVSSYVCSGLVGDTPRKNDSSSSSHCLDPNNEEGGHGVKGWAFDDGNDVWMGRTINETSRLGYETFKVIEGWSNPKSKLQINRQVIVDRGNRSGYSGIFSVEGKSCINRCFYVELIRGRKEETEVLWTSNSIVVFCGTSGTYGTGSWPDGADLNLMPI

SEQ ID NO: 25576 - protein, 469 aa, Artificial Sequence; identical to SEQ ID NO: 22146
  derived and/or modified protein sequence (wt) from neuraminidase__InfluenzaA__AIJ10801

SEQ ID NO: 25577 - protein, 469 aa, Artificial Sequence; identical to SEQ ID NO: 22146
  derived and/or modified protein sequence (wt) from neuraminidase__InfluenzaA__AIJ10803

SEQ ID NO: 25578 - protein, 469 aa, Artificial Sequence; identical to SEQ ID NO: 22146
  derived and/or modified protein sequence (wt) from neuraminidase__InfluenzaA__AIJ10804

SEQ ID NO: 25579 - protein, 469 aa, Artificial Sequence; identical to SEQ ID NO: 22146
  derived and/or modified protein sequence (wt) from neuraminidase__InfluenzaA__AIJ10805

SEQ ID NO: 25580 - protein, 469 aa, Artificial Sequence
  derived and/or modified protein sequence (wt) from neuraminidase__InfluenzaA__AIJ10806
MNPNQKIITIGSVSLTISTICFFMQIAILITTVTLHFKQYEFNSPPNNQVMLCEPTIIERNITEIVYLTNTTIEKEICPKPAEYRNWSKPQCGITGFAPFSKDNSIRLSAGGDIWVTREPYVSCDPDKCYQFALGQGTTLNNVHSNNTVRDRTPYRTLLMNELGVPFHLGTKQVCIAWSSSSCHDGKAWLHVCITGDDKNATASFIYNGRLVDSVVSWSKEILRTQESECVCINGTCTVVMTDGSASGKADTKILFIEEGKIVHTSTLSGSAQHVEECSCYPRYPGVRCVCRDNWKGSNRPIVDINIKDHSIVSSYVCSGLVGDTPRKNDSSSISHCLDPNNEEGGHGVKGWAFDDGNDVWMGRTINETSRLGYETFKVIEGWSNPKSKLQINRQVIVDRGDRSGYSGIFSVEGKSCINRCFYVELIRGRKEETEVLWTSNSIVVFCGTSGTYGTGSWPDGADLNLMPI

SEQ ID NO: 25581 - protein, 469 aa, Artificial Sequence
  derived and/or modified protein sequence (wt) from neuraminidase__InfluenzaA__AIJ10807
MNPNQKIITIGSVSLTISTICFFMQIAILITTVTLHFKQYEFNSPPNNQVMLCEPTIIERNITEIVYLTNTTIEKEICPKPAEYRNWSKPQCGITGFAPFSKDNSIRLSAGGDIWVTREAYVSCDPDKCYQFALGQGTTLNNVHSNNTVRDRTPYRTLLMNELGVPFHLGTKQVCIAWSSSSCHDGKAWLHVCITGDDKNATASFIYNGRLVDSVVSWSKEILRTQESECVCINGTCTVVMTDGSASGKADTKILFIEEGKIVHTSTLSGSAQHVEECSCYPRYPGVRCVCRDNWKGSNRPIVDINIKDHSIVSSYVCSGLVGDTPRKNDSSSSSHCLDPNNEEGGHGVKGWAFDDGNDVWMGRTINETSRLGYETFKVIEGWSNPKSKLQINRQVIVDRGDRSGYSGIFSVEGKSCINRCFYVELIRGRKEETEVLWTSNSIVVFCGTSGTYGTGSWPDGADLNLMPI

SEQ ID NO: 25582 - protein, 469 aa, Artificial Sequence
  derived and/or modified protein sequence (wt) from neuraminidase__InfluenzaA__AIJ10808
MNPNQKIITIGSVSLTISTICFFMQIAILITTVTLHFKQYEFNSPPNNQVMLCEPTIIERNITEIVYLTNTTIEKEICPKPAEYRNWSKPQCGITGFAPFSKDNSIRLSAGGDIWVTREPYVSCDPDKCYQFALGQGTTLNNVHSNNTVRDRTPYRTLLMNELGVPFHLGTKQVCIAWSSSSCHDGKAWLHVCITGDDKNATASFIYNGRLVDSVVSWSKEVLRTQESECVCINGTCTVVMTDGSASGKADTKILFIEEGKIVHTSTLSGSAQHVEECSCYPRYPGVRCVCRDNWKGSNRPIVDINIKDHSIVSSYVCSGLVGDTPRKNDSSSSSHCLDPNNEEGGHGVKGWAFDDGNDVWMGRTINETSRLGYETFKVIEGWSNPKSKLQINRQVIVDRGDRSGYSGIFSVEGKSCINRCFYVELIRGRKEETEVLWTSNSIVVFCGTSGTYGTGSWPDGADLNLMPI

SEQ ID NO: 25583 - protein, 469 aa, Artificial Sequence; identical to SEQ ID NO: 22146
  derived and/or modified protein sequence (wt) from neuraminidase__InfluenzaA__AIJ10809

SEQ ID NO: 25584 - protein, 469 aa, Artificial Sequence; identical to SEQ ID NO: 22146
  derived and/or modified protein sequence (wt) from neuraminidase__InfluenzaA__AIJ10810

SEQ ID NO: 25585 - protein, 469 aa, Artificial Sequence
  derived and/or modified protein sequence (wt) from neuraminidase__InfluenzaA__AIJ10812
MNPNQKIITIGSVSLTISTICFFMQIAILITTVTLHFKQYEFNSPPNNQVMLCEPTIMERNVTEIVYLTNTTIEKEICPKPAEYRNWSKPQCGITGFAPFSKDNSIRLSAGGDIWVTREPYVSCDPDKCYQFALGQGTTLNNVHSNNTVRDRTPYRTLLMNELGVPFHLGTKQVCIAWSSSSCHDGKAWLHVCITGDDKNATASFIYNGRLVDSVVSWSKEILRTQESECVCINGTCTVVMTDGSASGKADTKILFIEEGKIVHTSTLSGSAQHVEECSCYPRYPGVRCVCRDNWKGSNRPIVDINIKDHSIVSSYVCSGLVGDTPRKNDSSSSSHCLDPNNEEGGHGVKGWAFDDGNDVWMGRTINETSRLGYETFKVIEGWSNPKSKLQINRQVIVDRGDRSGYSGIFSVEGKSCINRCFYVELIRGRKEETEVLWTSNSIVVFCGTSGTYGTGSWPDGADLNLMPI

SEQ ID NO: 25586 - protein, 469 aa, Artificial Sequence
  derived and/or modified protein sequence (wt) from neuraminidase__InfluenzaA__AIJ10813
MNPNQKIITIGSVSLTISTICFFMQIAILITTVTLHFKQYEFNSPPNNQVMLCEPTIMERNVTEIVYLTNTTIEKEICPKPAEYRNWSKPQCGITGFAPFSKDNSIRLSAGGDIWVTREPYVSCDPDKCYQFALGQGTTLNNVHSNNPVRDRTPYRTLLMNELGVPFHLGTKQVCIAWSSSSCHDGKAWLHVCITGDDKNATASFIYNGRLVDSVVSWSKEILRTQESECVCINGTCTVVMTDGSASGKADTKILFIEEGKIVHTSTLSGSAQHVEECSCYPRYPGVRCVCRDNWKGSNRPIVDINIKDHSIVSSYVCSGLVGDTPRKNDSSSSSHCLDPNNEEGGHGVKGWAFDDGNDVWMGRTINETSRLGYETFKVIEGWSNPKSKLQINRQVIVDRGDRSGYSGIFSVEGKSCINRCFYVELIRGRKEETEVLWTSNSIVVFCGTSGTYGTGSWPDGADLNLMPI

SEQ ID NO: 25587 - protein, 469 aa, Artificial Sequence
  derived and/or modified protein sequence (wt) from neuraminidase__InfluenzaA__AIJ10814
MNPNQKIITIGSVSLTISTICFFMQIAILITTVTLHFKQYEFNSPPNNQVMLCEPTIVERNITEIVYLTNTTIEKEICPKPAEYRNWSKPQCGITGFAPFSKDNSIRLSAGGDIWVTREPYVSCDPDKCYQFALGQGTTLNNVHSNNTVRDRTPYRTLLMNELGVPFHLGTKQVCIAWSSSSCHDGKAWLHVCITGDDKNATASFIYNGRLVDSVVSWSKEILRTQESECVCINGTCTVVMTDGSASGKADTKILFIEEGKIVHTSTLSGSAQHVEECSCYPRYPGVRCVCRDNWKGSNRPIVDINIKDHSIVSSYVCSGLVGDTPRKNDSSSSSHCLDPNNEEGGHGVKGWAFDDGNDVWMGRTINETSRLGYETFKVIEGWSNPKSKLQINRQVIVDKGDRSGYSGIFSVEGKSCINRCFYVELIRGRKEETEVLWTSNSIVVFCGTSGTYGTGSWPDGADLNLMPI

SEQ ID NO: 25588 - protein, 469 aa, Artificial Sequence
  derived and/or modified protein sequence (wt) from neuraminidase__InfluenzaA__AIJ10815
MNPNQKIITIGSVSLTISTICFFMQIAILITTVTLHFKQYEFNSPPNNQVMLCEPTIIERNITEIVYLTNTTIEKEICPKPAEYRNWSKPQCGITGFAPFSKDNSIRLSAGGDIWVTREPYVSCDPDKCYQFALGQGTTLNNVHSNNTVRDRTPYRTLLMNELGVPFHLGTKQVCIAWSSSSCHDGKAWLHVCITGDDKNATASFIYNGRLVDSVVSWSKEILRTQESECVCINGTCTVVMTDGSASGKADTKILFIEEGKIVHTSTLSGSAQHVEECSCYPRYPGVRCVCRDNWKGSNRPIVDINIKDHSIVSSYVCSGLVGDTPRKNDSSSSSHCLDPNNEEGGHGVKGWAFDDGNDVWMGRTINETSRLGYETFKVIEGWSNPKSKLQINRQVIVDRGDRSGYSGIFSVEGKSCINRCFYVELIRGRKEENEVLWTSNSIVVFCGTSGTYGTGSWPDGADLNLMPI

SEQ ID NO: 25589 - protein, 469 aa, Artificial Sequence
  derived and/or modified protein sequence (wt) from neuraminidase__InfluenzaA__AIJ10816
MNPNQKIITIGSVSLTISTICFFMQIAILITTVTLHFKQYEFNSPPNNQVMLCEPTIIERNITEIVYLTNTTIEKEICPKPAEYRNWSKPQCGITGFAPFSKDNSIRLSAGGDIWVTREPYVSCDPDKCYQFALGQGTTLNNVHSNNTVRDRTPYRTLLMNELGVPFHLGTKQVCIAWSSSSCHDGKAWLHVCITGDDKNATASFIYNGRLVDSVVSWSKEILRTQESECVCINGTCTVVMTDGSASGKADTKILFIEEGKIVHTSTLSGSAQHVEECSCYPRYPGVRCVCRDNWKGSNRPIVDINIKDHSIVSSYVCSGLVGDTPRKNDSSSSSHCLDPNNEEGGHGVKGWAFDDGNDVWMGRTINETSRLGYETFKVIEGWSNPKSKLQINRQVIVDRGDRSGYSGIFSVEGKGCINRCFYVELIRGRKEETEVLWTSNSIVVFCGTSGTYGTGSWPDGADLNLMPI

SEQ ID NO: 25590 - protein, 469 aa, Artificial Sequence; identical to SEQ ID NO: 22146
  derived and/or modified protein sequence (wt) from neuraminidase__InfluenzaA__AIJ10817

SEQ ID NO: 25591 - protein, 469 aa, Artificial Sequence; identical to SEQ ID NO: 22146
  derived and/or modified protein sequence (wt) from neuraminidase__InfluenzaA__AIJ10818

SEQ ID NO: 25592 - protein, 469 aa, Artificial Sequence
  derived and/or modified protein sequence (wt) from neuraminidase__InfluenzaA__AIJ10819
MNPNQKIITIGSVSLTISTICFFMQIAILITTVALHFKQYEFNSPPNNQVMLCEPTIIERNITEIVYLTNTTIEKEICPKPAEYRNWSKPQCGITGFAPFSKDNSIRLSAGGDIWVTREPYVSCDPDKCYQFALGQGTTLNNVHSNNTVRDRTPYRTLLMNELGVPFHLGTKQVCIAWSSSSCHDGKAWLHVCITGDDKNATASFIYNGRLVDSVVSWSKEILRTQESECVCINGTCTVVMTDGSASGKANTKILFIEEGKIVHTSTLSGSAQHVEECSCYPRYPGVRCVCRDNWKGSNRPIVDINIKDHSIVSSYVCSGLVGDTPRKNDSSSSSHCLDPNNEEGGHGVKGWAFDDGNDVWMGRTINETSRLGYETFKVIEGWSNPKSKLQINRQVIVDRGDRSGYSGIFSVEGKSCINRCFYVELIRGRKEETEVLWTSNSIVVFCGTSGTYGTGSWPDGADLNLMPI

SEQ ID NO: 25593 - protein, 469 aa, Artificial Sequence; identical to SEQ ID NO: 22146
  derived and/or modified protein sequence (wt) from neuraminidase__InfluenzaA__AIJ10820

SEQ ID NO: 25594 - protein, 469 aa, Artificial Sequence; identical to SEQ ID NO: 22146
  derived and/or modified protein sequence (wt) from neuraminidase__InfluenzaA__AIJ10821

SEQ ID NO: 25595 - protein, 469 aa, Artificial Sequence
  derived and/or modified protein sequence (wt) from neuraminidase__InfluenzaA__AIJ10822
MNPNQKIITIGSVSLTISTICFFMQIAILITTVTLHFKQYEFNSPPNNQVMLCEPTIIERNITEIVYLTNTTIEKEICPKPAEYRNWSKPQCGITGFAPFSKDNSIRLSAGGDIWVTREPYVSCDPDKCYQFALGQGTTLNNVHSNNTVRDRTPYRTLLMNELGVPFHLGTKQVCIAWSSSSCHDGKAWLHVCITGDDKNATASFIYNGRLVDSVVSWSKDILRTQESECVCINGTCTVVMTDGSASGKADTKILFIEEGKIVHTSTLSGSAQHVEECSCYPRYPGVRCVCRDNWKGSNRPIVDINIKDHSIVSSYVCSGLVGDTPRKNDSSSSSHCLDPNNEEGGHGVKGWAFDDGNDVWMGRTINETSRLGYETFKVIEGWSNPKSKLQINRQVIVDRGDRSGYSGIFSVEGKSCINRCFYVELIRGRKEENEVLWTSNSIVVFCGTSGTYGTGSWPDGADLNLMPI

SEQ ID NO: 25596 - protein, 469 aa, Artificial Sequence
  derived and/or modified protein sequence (wt) from neuraminidase__InfluenzaA__AIJ10823
MNPNQKIITIGSVSLTISTICFFMQIAILITTVTLHFNQYEFNSPPNNQVMLCEPTIIERNITEIVYLTTTTIEKEICPKPAEYRNWSKPQCGITGFAPFSKDNSIRLSAGGDIWVTREPYVSCDPDKCYQFALGQGTTLNNVHSNNTVRDRTPFRTLLMNELGVPFHLGTKQVCIAWSSSSCHDGKAWLHVCITGDDKNATASFIYNGRLVDSVVSWSKEILRTQESECVCINGTCTVVMTDGSASGKAVTKILFIEEGKIVHTSTLSGSAQHVEECSCYPRYPGVRCVCRDNWKGSNRPIVDINIKDHSIVSGYVCSGLVGDTPRKNDSSSSSHCLNPNNEEGGHGVKGWAFDDGNDVWMGRTINETSRLGYETFKVIEGWSNPKSKLQINRQVIVDRGDRSGYSGIFSVEGKSCINRCFYVELIRGRKEETEVLWTSNSIVVFCGTSGTYGTGSWPDGADLNLMPI

SEQ ID NO: 25597 - protein, 469 aa, Artificial Sequence
  derived and/or modified protein sequence (wt) from neuraminidase__InfluenzaA__AIJ10824
MNPNQKIITIGSVSLTISTICFFMQIAILITTVTLHFKQYEFNSPPNNQVVLCEPTIIERNITEIVYLTNTTIEKEICPKPAEYRNWSKPQCGITGFAPFSKDNSIRLSAGGDIWVTREPYVSCDPDKCYQFALGQGTTLNNVHSNNTVRDRTPYRTLLMNELGVPFHLGTKQVCIAWSSSSCHDGKAWLHVCITGDDKNATASFIYNGRLVDSVVSWSKEILRTQESECVCINGTCTVVMTDGSASGKADTKILFIEEGKIVHTSTLSGSAQHVEECSCYPRYPGVRCVCRDNWKGSNRPIVDINIKDHSIVSSYVCSGLVGDTPRKNDSSSSSHCLDPNNEEGGHGVKGWAFDDGNDVWMGRTINETSRLGYETFKVIEGWSNPKSKLQINRQVIVDRGDRSGYSGIFSVEGKSCINRCFYVELIRGRKEETEVLWTSNSIVVFCGTSGTYGTGSWPDGADLNLMPI

SEQ ID NO: 25598 - protein, 469 aa, Artificial Sequence
  derived and/or modified protein sequence (wt) from neuraminidase__InfluenzaA__AIJ10827
MNPNQKIITIGSVSLTISTICFFMQIAILITTVTLHFKQYEFNSPPNNQVMLCEPTIIERNITEIVYLTNTTIEKEICPKPAEYRNWSKPQCGITGFAPFSKDNSIRLSAGGDIWVTREPYVSCDPDKCYQFALGQGTTLNNVHSNNTVRDRTPYRTLLMNELGVPFHLGTKQVCIAWSSSSCHDGKAWLHVCITGDDKNATASFIYNGRLVDSVVSWSKDILRTQESECVCINGTCTVVMTDGSASGKADTKILFIEEGKIVHTSTLSGSAQHVEECSCYPRYPGVRCVCRDNWKGSNRPIVDINIKDHSIVSSYVCSGLVGDTPRKNDSSSSSHCLDPNNEEGGHGVKGWAFDDGNDVWMGRTINETSRLGYETFKVIEGWSNPKSKLQINRQVIVDRGDRSGYSGIFSIEGKSCINRCFYVELIRGRKEETEVLWTSNSIVVFCGTSGTYGTGSWPDGADLNLMPI

SEQ ID NO: 25599 - protein, 469 aa, Artificial Sequence
  derived and/or modified protein sequence (wt) from neuraminidase__InfluenzaA__AIJ10828
MNPNQKIITIGSVSLTISTICFFMQIAILITTVTLHFKQYEFNSPPNNQVMLCEPTIIERNITEIVYLTNTTIEKEICPKPAEYRNWSKPQCGITGFAPFSKDNSIRLSAGGDIWVTREPYVSCDPDKCYQFALGQGTTLNNVHSNNTVRDRTPYRTLLMNELGVPFHLGTKQVCIAWSSSSCHDGKAWLHVCITGDDKNATASFIYNGRLVDSVVSWSKDILRTQESECVCINGTCTVVMTDGSASGKADTKILFIEEGKIVHTSTLSGSAQHVEECSCYPRYPGVRCVCRDNWKGSNRPIVDINIKDHSIVSSYVCSGLVGDTPRKNDSSSSSHCLDPNNEEGGHGVKGWAFDDGNDVWMGRTINETSRLGYETFKVIEGWSNPKSKLQINRQVIVDRGDRSGYSGIFSIEGKSCINRCFYVELIRGRKEETEVVWTSNSIVVFCGTSGTYGTGSWPDGADLNLMPI

SEQ ID NO: 25600 - protein, 469 aa, Artificial Sequence
  derived and/or modified protein sequence (wt) from neuraminidase__InfluenzaA__AIJ10829
MNPNQKIITIGSVSLTISTICFFMQIAILITTVTLHFKQYEFNSPPNNQVMLCEPTIIERNITEIVYLTNTTIEKEICPKPAEYRNWSKPQCGITGFAPFSKDNSIRLSAGGDIWVTREPYVSCDPDNCYQFALGQGTTLNNVHSNNTVRDRTPYRTLLMNELGVPFHLGTKQVCIAWSSSSCHDGKAWLHVCITGDDKNATASFIYNGRLVDSVVSWSKDILRTQESECVCINGTCTVVMTDGSASGKADTKILFIEEGKIVHTSTLSGSAQHVEECSCYPRYPGVRCVCRDNWKGSNRPIVDINIKDHSIVSSYVCSGLVGDTPRKNDSSSSSHCLDPNNEEGDHGVKGWAFDDGNDVWMGRTINETSRLGYETFKVIEGWSNPKSKLQINRQVIVDRGDRSGYSGIFSIEGKSCINRCFYVELIRGRKEETEVLWTSNSIVVFCGTSGTYGTGSWPDGADLNLMPI

SEQ ID NO: 25601 - protein, 469 aa, Artificial Sequence
  derived and/or modified protein sequence (wt) from neuraminidase__InfluenzaA__AIJ10830
MNPNQKIITIGSVSLTISTICFFMQIAILITTVTLHFKQYEFNSPPNNQVMLCEPTIIERNITEIVYLTNTTIEKEICPKPAEYKNWSKPQCGITGFAPFSKDNSIRLSAGGDIWVTREPYVSCDPDKCYQFALGQGTTLNNVHSNNTVRDRTPYRTLLMNELGVPFHLGTKQVCIAWSSSSCHDGKAWLHVCITGDDKNATASFIYNGRLVDSVVSWSKDILRTQESECVCINGTCTVVMTDGSASGKADTKILFIEEGKIVHTSTLSGSAQHVEECSCYPRYPGVRCVCRDNWKGSNRPIVDINIKDHSIVSSYVCSGLVGDTPRKNDSSSSSHCLDPNNEEGGHGVKGWAFDDGNDVWMGRTINETSRLGYETFKVIEGWSNPKSKLQINRQVIVDRGDRSGYSGIFSIEGKSCINRCFYVELIRGRKEETEVLWTSNSIVVFCGTSGTYGTGSWPDGADLNLMPI

SEQ ID NO: 25602 - protein, 469 aa, Artificial Sequence; identical to SEQ ID NO: 25598
  derived and/or modified protein sequence (wt) from neuraminidase__InfluenzaA__AIJ10831

SEQ ID NO: 25603 - protein, 469 aa, Artificial Sequence; identical to SEQ ID NO: 25598
  derived and/or modified protein sequence (wt) from neuraminidase__InfluenzaA__AIJ10832

SEQ ID NO: 25604 - protein, 469 aa, Artificial Sequence
  derived and/or modified protein sequence (wt) from neuraminidase__InfluenzaA__AIJ10834
MNPNQKIITIGSVSLTISTICFFMQIAILITTVTLHFKQYEFNSPPNNQVMLCEPTIIERNITEIVYLTNTTIEKEICPKPAEYRNWSKPQCGITGFAPFSKDNSIRLSAGGDIWVTREPYVSCDPDKCYQFALGQGTTLNNVHSNNTVRDRTPYRTLLMNELGVPFHLGTKQVCIAWSSSSCHDGKAWLHVCITGDDKNATASFIYNGRLVDSVVSWSKDILRTQESECVCINGTCTVVMTDGSASGKADTKILFIEEGKIVHTSTLSGSAQHVEECSCYPRYPGVRCVCRDNWKGSNRPIVDINIKDHSIVSSYVCSGLVGDTPRKNDSSSSSHCLDPNNEEGGHGVKGWAFDDGNDVWMGRTINETSRLGYETFKVIEGWSNPKSKLQINRQVIVDRGDRSGYSGIFSIESKSCINRCFYVELIRGRKEETEVLWTSNSIVVFCGTSGTYGTGSWPDGADLNLMPI

SEQ ID NO: 25605 - protein, 469 aa, Artificial Sequence
  derived and/or modified protein sequence (wt) from neuraminidase__InfluenzaA__AIJ10835
MNPNQKIITIGSVSLTISTICFFMQIAILITTVTLHFKQYEFNSTPNNQVMLCEPTIIERNITEIVYLTNTTIEKEICPKPAEYRNWSKPQCGITGFAPFSKDNSIRLSAGGDIWVTREPYVSCDPDKCYQFALGQGTTLNNVHSNNTVRDRTPYRTLLMNELGVPFHLGTKQVCIAWSSSSCHDGKAWLHVCITGDDKNATASFIYNGRLVDSVVSWSKDILRTQESECVCINGTCTVVMTDGSASGKADTKILFIEEGKIVHTSTLSGSAQHVEECSCYPRYPGVRCVCRDNWKGSNRPIVDINIKDHSIVSSYVCSGLVGDTPRKNDSSSSSHCLDPNNEEGGHGVKGWAFDDGNDVWMGRTINETSRLGYETFKVIEGWSNPKSKLQINRQVIVDRGDRSGYSGIFSIEGKSCINRCFYVELIRGRKEETEVLWTSNSIVVFCGTSGTYGTGSWPDGADLNLMPI

SEQ ID NO: 25606 - protein, 469 aa, Artificial Sequence; identical to SEQ ID NO: 25598
  derived and/or modified protein sequence (wt) from neuraminidase__InfluenzaA__AIJ10836

SEQ ID NO: 25607 - protein, 469 aa, Artificial Sequence
  derived and/or modified protein sequence (wt) from neuraminidase__InfluenzaA__AIJ10837
MNPNQKIITIGSVSLTISTICFFMQIAILITTVTLHFKQYEFNSPPNNQVMLCEPTIIERNITEIVYLTNTTIEKEICPKPAEYRNWSKPQCGITGFAPFSKDNSIRLSAGGDIWVTREPYVSCDPDKCYQFALGQGTTLNNVHSNNTVRDRTPYRTLLMNELGVPFHLGTKQVCIAWSSSSCHDGKAWLHVCITGDDKNATASFIYNGRLVDSVVSWSKDILRTQESECVCINGTCTVVMTDGSASGKADTKILFIEEGKIIHTSTLSGSAQHVEECSCYPRYPGVRCVCRDNWKGSNRPIVDINIKDHSIVSSYVCSGLVGDTPRKNDSSSSSHCLDPNNEEGGHGVKGWAFDDGNDVWMGRTINETSRLGYETFKVIEGWSNPKSKLQINRQVIVDRGDRSGYSGIFSIEGKSCINRCFYVELIRGRKEETEVLWTSNSIVVFCGTSGTYGTGSWPDGADLNLMPI

SEQ ID NO: 25608 - protein, 469 aa, Artificial Sequence; identical to SEQ ID NO: 25598
  derived and/or modified protein sequence (wt) from neuraminidase__InfluenzaA__AIJ10838

SEQ ID NO: 25609 - protein, 469 aa, Artificial Sequence
  derived and/or modified protein sequence (wt) from neuraminidase__InfluenzaA__AIJ10841
MNPNQKIITIGSVSLTISTICFFMQIAILITTVTLHFKQYEFNSPPNNQVMLCEPTIIERNITEIVYLTNTTIEKEICPKPAEYRNWSKPQCGITGFAPFSKDNSIRLSAGGDIWVTREPYVSCDPDKCYQFALGQGTTLNNVHSNNTVRDRTPYRTLLMNELGVPFHLGTKQVCIAWSSSSCHDGKAWLHVCITGDDKNATASFIYNGRLVDSVVSWSKDILRTQESECVCINGTCTVVMTDGSASGEADTKILFIEEGKIVHTSTLSGSAQHVEECSCYPRYPGVRCVCRDNWKGSNRPIVDINIKDHSIVSSYVCSGLVGDTPRKNDSSSSSHCLDPNNEEGGHGVKGWAFDDGNDVWMGRTINETSRLGYETFKVIEGWSNPKSKLQINRQVIVDRGDRSGYSGIFSIEGKSCINRCFYVELIRGRKEETEVLWTSNSIVVFCGTSGTYGTGSWPDGADLNLMPI

SEQ ID NO: 25610 - protein, 469 aa, Artificial Sequence
  derived and/or modified protein sequence (wt) from neuraminidase__InfluenzaA__AIJ10842
MNPNQKIITIGSVSLTISTICFFMQIAILITTVTLHFKQYEFNPPPNNQVMLCEPTIIERNITEIVYLTNTTIEKEICPKPAEYRNWSKPQCGITGFAPFSKDNSIRLSAGGDIWVTREPYVSCDPDKCYQFALGQGTTLNNVHSNNTVRDRTPYRTLLMNELGVPFHLGTKQVCIAWSSSSCHDGKAWLHVCITGDDKNATASFIYNGRLVDSVVSWSKDILRTQESECVCINGTCTVVMTDGSASGKADTKILFIEEGKIVHTSTLSGSAQHVEECSCYPRYPGVRCVCRDNWKGSNRPIVDINIKDHSIVSSYVCSGLVGDTPRKNDSSSSSHCLDPNNEEGGHGVKGWAFDDGNDVWMGRTINETSRLGYETFKVIEGWSNPKSKLQINRQVIVDRGDRSGYSGIFSIEGKSCINRCFYVELIRGRKEETEVLWTSNSIVVFCGTSGTYGTGSWPDGADLNLMPI

SEQ ID NO: 25611 - protein, 469 aa, Artificial Sequence; identical to SEQ ID NO: 25598
  derived and/or modified protein sequence (wt) from neuraminidase__InfluenzaA__AIJ10843

SEQ ID NO: 25612 - protein, 469 aa, Artificial Sequence
  derived and/or modified protein sequence (wt) from neuraminidase__InfluenzaA__AIJ10844
MNPNQKIITIGSVSLTISTICFFMQIAILITTVTLHFKQYEFNSPPNNQVMLCEPTIIERNITEIVYLTNTTIEKEICPKPAEYRNWSKPQCGITGFAPFSKDNSIRLSAGGDIWVTREPYVSCDPDKCYQFALGQGTTLNNVHSNNTVRDRTPFRTLLMNELGVPFHLGTKQVCIAWSSSSCHDGKAWLHVCITGDDKNATASFIYNGRLVDSVVSWSKEILRTQESECVCINGTCTVVMTDGSASGKAVTKILFIEEGKIVHTSTLSGSAQHVEECSCYPRYPGVRCVCRDNWKGSNRPIVDINIKDHSIVSGYVCSGLVGDTPRKNDSSSSGHCLDPNNEEGGHGVKGWAFDDGNDVWMGRTINETSRLGYETFKVIKGWSNPKSKLQINRQVIVDRGDRSGYSGIFSVEGKSCINRCFYVELIRGRKEETEVLWTSNSIVVFCGTSGTYGTGSWPDGADLNLMPI

SEQ ID NO: 25613 - protein, 469 aa, Artificial Sequence
  derived and/or modified protein sequence (wt) from neuraminidase__InfluenzaA__AIJ10845
MNPNQKIITIGSVSLTISTICFFMQIAILITTVTLHFKQYEFNSPPNNQVMLCEPTIIERNITEIVYLTNTIIEKEICPKPAEYRNWSKPQCGITGFAPFSKDNSIRLSAGGDIWVTREPYVSCDPDKCYQFALGQGTTLNNVHSNNTVRDRTPFRTLLMNELGVPFHLGTKQVCIAWSSSSCHDGKAWLHVCITGDDKNATASFIYNGRLVDSVVSWSKEILRTQESECVCINGTCTVVMTDGSASGKAVTKILFIEEGKIVHTSTLSGSAQHVEECSCYPRYPGVRCVCRDNWKGSNRPIVDINIKDHSIVSGYVCSGLVGDTPRKNDSSSSSHCLDPNNEEGGHGVKGWAFDDGNDVWMGRTINETSRLGYETFKVIEGWSNPKSKLQINRQVIVDRGDRSGYSGIFSVEGKSCINRCFYVELIRGRKEETEVLWTSNSIVVFCGTSGTYGTGSWPDGADLNLMPI

SEQ ID NO: 25614 - protein, 469 aa, Artificial Sequence
  derived and/or modified protein sequence (wt) from neuraminidase__InfluenzaA__AIJ10847
MNPNQKIITIGSVSLTISTICFFMQIAILITTVTLHFKQYEFNSPPNNQVMLCEPTIIERNITEIVYLTNTTIEKEICPKPAEYRNWSKPQCGITGFAPFSKDNSIRLSAGGDIWVTREPYVSCDPDKCYQFALGQGTTLNNVHSNNTVRDRTPYRTLLMNELGVPFHLGTKQVCIAWSSSSCHDGKAWLHVCITGDDKNATASFIYNGRLVDSVVSWSKDILRTQESECVCINGTCTVVMTDGSASGKADTKILFIEEGKIVHTSTLSGSAQHVEECSCYPRYPGVRCVCRDNWKGSNRPIVDINIKDHSIVSSYVCSGLVGDTPRKNDSFSSSHCLDPNNEEGGHGVKGWAFDDGNDVWMGRTINETSRLGYETFKVIEGWSNPKSKLQINRQVIVDRGDRSGYSGIFSIEGKSCINRCFYVELIRGRKEETEVLWTSNSIVVFCGTSGTYGTGSWPDGADLNLMPI

SEQ ID NO: 25615 - protein, 469 aa, Artificial Sequence; identical to SEQ ID NO: 25598
  derived and/or modified protein sequence (wt) from neuraminidase__InfluenzaA__AIJ10848

SEQ ID NO: 25616 - protein, 469 aa, Artificial Sequence
  derived and/or modified protein sequence (wt) from neuraminidase__InfluenzaA__AIJ10849
MNPNQKIITIGSVSLTISTICFFMQIAILITTVTLHFKQYEFNSPPNNQVMLCEPTIIERNITEIVYLTNTTIEKEICPKPAEYRNWSKPQCGITGFAPFSKDNSIRLSAGGDIWVTREPYVSCDPDKCYQFALGQGTTLNNVHSNNTVRDRTPFRTLLMNELGVPFHLGTKQVCIAWSSSSCHDGKAWLHVCITGDDKNATASFIYNGRLVDSVVSWSKEILRTQESECVCINGTCTVVMTDGSASGKAVTKILFIEEGKIVHTSTLSGSAQHVEECSCYPRYPGVRCVCRDNWKGSNRPIVDINIKDHSIVSGYVCSGLVGDTPRKNDSSSSSHCLDPNNEEGGHGVKGWAFDDGNDVWMGRTINETSRLGYETFKVIEGWSNPKSKLQINRQVIVDRGDRSGYSGIFSVEGKSCINRCFYVELIRGRKEETEVLWTSNSIVVFCGTSGTYGTGSWPDGADLNLMPI

SEQ ID NO: 25617 - protein, 469 aa, Artificial Sequence; identical to SEQ ID NO: 25616
  derived and/or modified protein sequence (wt) from neuraminidase__InfluenzaA__AIJ10851

SEQ ID NO: 25618 - protein, 469 aa, Artificial Sequence; identical to SEQ ID NO: 25616
  derived and/or modified protein sequence (wt) from neuraminidase__InfluenzaA__AIJ10852

SEQ ID NO: 25619 - protein, 469 aa, Artificial Sequence; identical to SEQ ID NO: 25612
  derived and/or modified protein sequence (wt) from neuraminidase__InfluenzaA__AIJ10853

SEQ ID NO: 25620 - protein, 469 aa, Artificial Sequence; identical to SEQ ID NO: 25612
  derived and/or modified protein sequence (wt) from neuraminidase__InfluenzaA__AIJ10854

SEQ ID NO: 25621 - protein, 469 aa, Artificial Sequence
  derived and/or modified protein sequence (wt) from neuraminidase__InfluenzaA__AIJ10855
MNPNQKIITIGSVSLTISTICFFMQIAILITTVTLHFKQYEFNSPPNNQVMLCEPTIIERNITEIVYLTNTTIEKEICPKPAEYRNWSKPQCGITGFAPFSKDNSIRLSAGGDIWVTREPYVSCDPDKCYQFALGQGTTLNNVHSNNTVRDRTPFRTLLMNELGVPFHLGTKQVCIAWSSSSCHDGKAWLHVCITGDDKNATASFIYNGRLVDSVVSWSKEILRTQESECVCINGTCTVVMTDGSASGKAVTKILFIEEGKIVHTSTLSGSAQHVEECSCYPRYPGVRCVCRDNWKGSNRPIVDINIKDHSIVSGYVCSGLVGDTPRKNDSSSSSHCLDPNNEEGDHGVKGWAFDDGNDVWMGRTINETSRLGYETFKVIEGWSNPKSKLQINRQVIVDRGDRSGYSGIFSVEGKSCINRCFYVELIRGRKEETEVLWTSNSIVVFCGTSGTYGTGSWPDGADLNLMPI

SEQ ID NO: 25622 - protein, 469 aa, Artificial Sequence
  derived and/or modified protein sequence (wt) from neuraminidase__InfluenzaA__AIJ10856
MNPNKKIITIGSVSLTISTICFFMQIAILITTVTLHFKQYEFNSPPNNQVMLCEPTIIERNITEIVYLTNTTIEKEICPKPAEYRNWSKPQCGITGFAPFSKDNSIRLSAGGDIWVTREPYVSCDPDKCYQFALGQGTTLKNVHSNNTVRDRTPYRTLLMNELGVPFHLGTKQVCIAWSSSSCHDGKAWLHVCITGDDKNATASFIYNGRLVDSVVSWSKDILRTQESECVCINGTCTVVMTDGSASGKADTKILFIEEGKIVHTSTLSGSAQHVEECSCYPRYPGVRCVCRDNWKGSNRPIVDINIKDHSIVSSYVCSGLVGDTPRKNDSFSSGHCLDPNNEEGGHGVKGWAFDDGNDVWMGRTINETSRLGYETFKVIEGWSNPKSKLQINRQVIVDRGDRSGYSGIFSIEGKSCINRCFYVELIRGRKEETEVLWTSNSIVVFCGTSGTYGTGSWPDGADLNLMPI

SEQ ID NO: 25623 - protein, 469 aa, Artificial Sequence; identical to SEQ ID NO: 25598
  derived and/or modified protein sequence (wt) from neuraminidase__InfluenzaA__AIJ10857

SEQ ID NO: 25624 - protein, 469 aa, Artificial Sequence; identical to SEQ ID NO: 22146
  derived and/or modified protein sequence (wt) from neuraminidase__InfluenzaA__AIJ29348

SEQ ID NO: 25625 - protein, 469 aa, Artificial Sequence; identical to SEQ ID NO: 22146
  derived and/or modified protein sequence (wt) from neuraminidase__InfluenzaA__AIJ29350

SEQ ID NO: 25626 - protein, 469 aa, Artificial Sequence
  derived and/or modified protein sequence (wt) from neuraminidase__InfluenzaA__AIJ29352
MNPNQKIITIGSVSLTISTICFFMQIAILITTVTLHFKQYEFNSPPNNQVMLCEPTIIERNITEIVYLTNTTIEKEICPKPAKYRNWSKPQCGITGFAPFSKDNSIRLSAGGDIWVTREPYVSCDPDKCYQFALGQGTTLNNVHSNNTVRDRTPYRTLLMNELGVPFHLGTKQVCIAWSSSSCHDGKAWLHVCITGDDKNATASFIYNGRLVDSVVSWSKEILRTQESECVCINGTCTVVMTDGSASGKADTKILFIEEGKIVHTSTLSGSAQHVEECSCYPRYPGVRCVCRDNWKGSNRPIVDINIKDHSIVSSYVCSGLVGDTPRKNDSSSSSHCLDPNNEEGGHGVKGWAFDDGNDVWMGRTINETSRLGYETFKVIEGWSNPKSKLQINRQVIVDRGDRSGYSGIFSVEGKSCINRCFYVELIRGRKEETEVLWTSNSIVVFCGTSGTYGTGSWPDGADLNLMPI

SEQ ID NO: 25627 - protein, 469 aa, Artificial Sequence; identical to SEQ ID NO: 21143
  derived and/or modified protein sequence (wt) from neuraminidase__InfluenzaA__AIJ29354

SEQ ID NO: 25628 - protein, 469 aa, Artificial Sequence; identical to SEQ ID NO: 22922
  derived and/or modified protein sequence (wt) from neuraminidase__InfluenzaA__AIJ29356

SEQ ID NO: 25629 - protein, 469 aa, Artificial Sequence; identical to SEQ ID NO: 22922
  derived and/or modified protein sequence (wt) from neuraminidase__InfluenzaA__AIJ29358

SEQ ID NO: 25630 - protein, 469 aa, Artificial Sequence
  derived and/or modified protein sequence (wt) from neuraminidase__InfluenzaA__AIJ29360
MNPNQKIITIGSVSLTISTICFFMQIAILTTTVTLHFKQYEFNSPPNNQVMLCEPTIIERNITEIVYLTNTTIEKEICPKPAEYRNWSKPQCGITGFAPFSKDNSIRLSAGGDIWVTREPYVSCDPDKCYQFALGQGTTLNNVHSNNTVRDRTPYRTLLMNELGVPFHLGTKQVCIAWSSSSCHDGKAWLHVCITGDDKNATASFIYNGRLVDSVVSWSKEILRTQESECVCINGTCTVVMTDGSASGKADTKILFIEEGKIVHTSTLSGSAQHVEECSCYPRYPGVRCVCRDNWKGSNRPIVDINIKDHSIVSSYVCSGLVGDTPRKNDSSSSSHCLDPNNEEGGHGVKGWAFDDGNDVWMGRTINETSRLGYETFKVIEGWSNPKSKLQINRQVIVDRGDRSGYSGIFSVEGKSCINRCFYVELIRGRKEETEVLWTSNSIVVFCGTSGTYGTGSWPDGADLNLMPI

SEQ ID NO: 25631 - protein, 469 aa, Artificial Sequence; identical to SEQ ID NO: 22146
  derived and/or modified protein sequence (wt) from neuraminidase__InfluenzaA__AIJ29362

SEQ ID NO: 25632 - protein, 469 aa, Artificial Sequence
  derived and/or modified protein sequence (wt) from neuraminidase__InfluenzaA__AIL93626
MNPNQKIITIGSVCMTIGMANLILQIGNIISIWISHSIQLGNQSQIEACNQSVITYENNTYVNQTYVNISNTNFAAGRSVVSVKLAGNSSLCPVSGWAIYSKDNSVRIGSKGDVFVIREPFISCSPLECRTFFLTQGALLNDKHSNGTIKDRSPYRTLMSCPIGEVPSPYNSRFESVAWSASACHDGINWLTIGISGPDSGAVAVLKYNGIITDTIKSWKNNILRTQESECACVNGSCFTIMTDGPSDGQASYKIFRIEKGKIVKSVEMNAPNYHYEECSCYPDSSEITCVCRDNWHGSNRPWVSFNQNLEYQIGYICSGVFGDNPRPNDKTGSCGPVLSNGANGVKGFSFKYGNGVWIGRTKSISSRKGFEMIWDPNGWTGTDNNFSIKQDIVGINEWSGYSGSFVQHPELTGLDCIRPCFWVELIRGRPKENTIWTSGSSISFCGVNSDTVGWSWPDGAELPFTIDK

SEQ ID NO: 25633 - protein, 469 aa, Artificial Sequence
  derived and/or modified protein sequence (wt) from neuraminidase__InfluenzaA__AIL93648
MNPNQKIITIGSVSLTISTICFFMQIAILITTVTLHFKQYEFNSPPNNQVMLCEPTIIERNITEIVYLTNTTIEKEICPKPAEYRNWSKPQCGITGFAPFSKDNSIRLSAGGDIWVTREPYVSCDPDKCYQFALGQGTTLNNVHSNNTVRDRTPYRTLLMNELGVPFHLGTKQVCIAWSSSSCHDGKAWLHVCITGDDKNATASFIYNGRLVDSVVSWSKEILRTQESECVCINGTCTVVMTDGSASGKADTKILFIEEGRIVHTSTLSGSAQHVEECSCYPRYPGVRCVCRDNWKGSNRPIVDINIKDHSIVSSYVCSGLVGDTPRKNDSSSSSHCLDPNNEEGGHGVKGWAFDDGNDVWMGRTINETSRLGYETFKVIEGWSNPKSKLQINKQVIVDRGDRSGYSGIFSVEGKSCINRCFYVELIRGRKEETEVLWTSNSIVVFCGTSGTYGTGSWPDGADLNLMPI

SEQ ID NO: 25634 - protein, 469 aa, Artificial Sequence; identical to SEQ ID NO: 22146
  derived and/or modified protein sequence (wt) from neuraminidase__InfluenzaA__AIL93660

SEQ ID NO: 25635 - protein, 469 aa, Artificial Sequence; identical to SEQ ID NO: 22146
  derived and/or modified protein sequence (wt) from neuraminidase__InfluenzaA__AIL93672

SEQ ID NO: 25636 - protein, 469 aa, Artificial Sequence
  derived and/or modified protein sequence (wt) from neuraminidase__InfluenzaA__AIL93684
MNPNQKIITIGSVCMTIGMANLILQIGNIISIWISHSIQLGNQSQIEACNQSVITYENNTWVNQTYVNISNTNSATGQSVVSVKLAGNSSLCPVSGWAIYSKDNSVRIGSKGDVFVIREPFISCSPLECRTFFLTQGALLNDKHSNGTIKDRSPYRTLMSCPIGEVPSPYNSRFESVAWSASACHDGINWLTIGISGPDSGAVAVLKYNGIITDTIKSWKNNILRTQESECACVNGSCFTIMTDGPSDGQASYKIFRIEKGKIVKSVEMNAPNYHYEECSCYPDSSEITCVCRDNWHGSNRPWVSFNQNLEYQIGYICSGVFGDNPRPNDKTGSCGPVLSNGANGVKGFSFKYGNGVWIGRTKSISSRKGFEMIWDPNGWTGTDNNFSIKQDIVGINEWSGYSGSFVQHPELTGLDCIRPCFWIELIRGRPKENTIWTSGSSISFCGVNSDTVGWSWPDGAELPFTIDK

SEQ ID NO: 25637 - protein, 469 aa, Artificial Sequence
  derived and/or modified protein sequence (wt) from neuraminidase__InfluenzaA__AIL93719
MNPNQKIITIGSVSLTISTICFFMQIAILITTVTLHFKQYEFNSPPNNQVMLCEPTIIERNITEIVYLTNTTIEKEICPKPAEYRNWSKPQCGITGFAPFSKDNSIRLSAGGDIWVTREPYVSCDPDKCYQFALGQGTTLNNVHSNNTVRDRTPYRTLLMNELGVPFHLGTKQVCIAWSSSSCHDGKAWLHVCITGDDKNATASFIYNGRLVDSVVSWSKEILRTQESECVCINGTCTVVMTDGSASGKADTKILFIEEGKIVHTSTLSGSAQHVEECSCYPRYPGVRCVCRDNWKGSNRPIVDINIKDHSIVSSYVCSGLVGDTPRKNDSSSSSHCLDPNNEEGGHGVKGWAFDDGNDVWMGRTINETSRLGYETFKVIEGWSNPKSKLQINKQVIVDRGDRSGYSGIFSVEGKSCINRCFYVELIRGRKEETEVLWTSNSIVVFCGTSGTYGTGSWPDGADLNLMPI

SEQ ID NO: 25638 - protein, 469 aa, Artificial Sequence; identical to SEQ ID NO: 25637
  derived and/or modified protein sequence (wt) from neuraminidase__InfluenzaA__AIL93743

SEQ ID NO: 25639 - protein, 469 aa, Artificial Sequence; identical to SEQ ID NO: 25637
  derived and/or modified protein sequence (wt) from neuraminidase__InfluenzaA__AIL93755

SEQ ID NO: 25640 - protein, 469 aa, Artificial Sequence; identical to SEQ ID NO: 22146
  derived and/or modified protein sequence (wt) from neuraminidase__InfluenzaA__AIL93767

SEQ ID NO: 25641 - protein, 469 aa, Artificial Sequence; identical to SEQ ID NO: 22146
  derived and/or modified protein sequence (wt) from neuraminidase__InfluenzaA__AIL93779

SEQ ID NO: 25642 - protein, 469 aa, Artificial Sequence
  derived and/or modified protein sequence (wt) from neuraminidase__InfluenzaA__AIL93791
MNPNQKIITIGSVSLTISTICFFMQIAILITTVTLHFKQYKFNSPPNNQVMLCEPTIIERNITEIVYLTNTTIEKEICPKPAEYRNWSKPQCGITGFAPFSKDNSIRLSAGGDIWVTREPYVSCDPDKCYQFALGQGTTLNNVHSNNTVRDRTPYRTLLMNELGVPFHLGTKQVCIAWSSSSCHDGKAWLHVCITGDDKNATASFIYNGRLVDSVVSWSKEILRTQESECVCINGTCTVVMTDGSASGKADTKILFIEEGKIVHTRTLSGSAQHVEECSCYPRYPGVRCVCRDNWKGSNRPIVDINIKDHSIVSSYVCSGLVGDTPRKNDSSSSSHCLDPNNEEGGHGVKGWAFDDGNDVWMGRTINETSRLGYETFKVIEGWSNPKSKLQINKQVIVDRGDRSGYSGIFSVEGKSCINRCFYVELIRGRKEETEVLWTSNSIVVFCGTSGTYGTGSWPDGADLNLMPI

SEQ ID NO: 25643 - protein, 469 aa, Artificial Sequence; identical to SEQ ID NO: 25637
  derived and/or modified protein sequence (wt) from neuraminidase__InfluenzaA__AIL93803

SEQ ID NO: 25644 - protein, 469 aa, Artificial Sequence
  derived and/or modified protein sequence (wt) from neuraminidase__InfluenzaA__AIL93815
MNPNQKIITIGSVSLTISTICFFMQIAILITTVTLHFKQYEFNSPPNNQVMLCEPTIIERNITEIVYLTNTTIEKEICPKPAEYRNWSKPQCGITGFAPFSKDNSIRLSAGGDIWVTREPYVSCDPDKCYQFALGQGTTLNNVHSNNTVRDRTPYRTLLMNELGVPFHLGTKQVCIAWSSSSCHDGKAWLHVCITGDDKNATASFIYNGRLVDSVVSWSKEILRTQESECVCINGTCTVVMTDGSASGKADTKILFIEEGKIVHTSTLSGSAQHVEECSCYPRYPGVRCVCRDNWKGSNRPIVDINIKDHSIVYSYVCSGLVGDTPRKNDSSSSSHCLNPNNEEGGHGVKGWAFDDGNDVWMGRTINETSRLGYETFKVIEGWSNPKSKLQINRQVIVDRGDRSGYSGIFSVEGKSCINRCFYVELIRGRKEETEVLWTSNSIVVFCGTSGTYGTGSWPDGADLNLMPI

SEQ ID NO: 25645 - protein, 469 aa, Artificial Sequence; identical to SEQ ID NO: 22146
  derived and/or modified protein sequence (wt) from neuraminidase__InfluenzaA__AIL93827

SEQ ID NO: 25646 - protein, 469 aa, Artificial Sequence
  derived and/or modified protein sequence (wt) from neuraminidase__InfluenzaA__AIL93839
MNPNQKIITIGSVCMTIGMANLILQIGNIISIWISHSIQLGNQSQIEACNQSVITYENNTWVNQTYVNISNTNFATGQSVVSVKLAGNSSLCPVSGWAIYSKDNSVRIGSKGDVFVIREPFISCSPLECRTFFLTQGALLNDKHSNGTIKDRSPYRTLMSCPIGEVPSPYNSRFESVAWSASACHDGINWLTIGISGPDSGAVAVLKYNGIITDTIKSWKNNILRTQESECACVNGSCFTIMTDGPSDGQASYKIFRIEKGKIVKSVEMNAPNYHYEECSCYPDSSEITCVCRDNWHGSNRPWVSFNQNLEYQIGYICSGVFGDNPRPNDKTGSCGPVSSNGANGVKGFSFKYGNGVWIGRTKSISSRKGFEMIWDPNGWTGTDNNFSIKQDIVGINEWSGYSGSFVQHPELTGLDCIRPCFWVELIRGRPKENTIWTSGSSISFCGVNSDTVGWSWPDGAELPFTIDK

SEQ ID NO: 25647 - protein, 469 aa, Artificial Sequence
  derived and/or modified protein sequence (wt) from neuraminidase__InfluenzaA__AIL93850
MNPNQKIITIGSVCMTIGMANLILQIGNIISIWISHSIQLGNQSQIEACNQSVITYENNTWVNQTYVNISNTNFATGQSVVSVKLAGNSSLCPVSGWAIYSKDNSVRIGSKGDVFVIREPFISCSPLECRTFFLTQGALLNDKHSNGTIKDRSPYRTLMSCPIGEVPSPYNSRFESVAWSASACHDGINWLTIGISGPDSGAVAVLKYNGIITDTIKSWKNNILRTQESECACVNGSCFTIMTDGPSDGQASYKIFRIEKGKIVKSVEMNAPNYHYEECSCYPDSSEITCVCRDNWHGSNRPWVSFNQNLEYQIGYICSGVFGDNPRPNDKTGSCGPVSSNGAKGVKGFSFKYGNGVWIGRTKSISSRKGFEMIWDPNGWTGTDNNFSIKQDIVGINEWSGYSGSFVQHPELTGLDCIRPCFWVELIRGRPKENTIWTSGSSISFCGVNSDTVGWSWPDGAELPFTIDK

SEQ ID NO: 25648 - protein, 469 aa, Artificial Sequence; identical to SEQ ID NO: 25637
  derived and/or modified protein sequence (wt) from neuraminidase__InfluenzaA__AIL93861

SEQ ID NO: 25649 - protein, 469 aa, Artificial Sequence
  derived and/or modified protein sequence (wt) from neuraminidase__InfluenzaA__AIL93885
MNPNQKIITIGSVSLTISTICFFMQIAILITTVTLHFKQYEFDSPPNNQVMLCEPTIIERNITEIVYLTNTTIEKEICPKPAEYRNWSKPQCGITGFAPFSKDNSIRLSAGGDIWVTREPYVSCDPDKCYQFALGQGTTLNNVHSNNTVRDRTPYRTLLMNELGVPFHLGTKQVCIAWSSSSCHDGKAWLHVCITGDDKNATASFIYNGRLVDSVVSWSKEILRTQESECVCINGTCTVVMTDGSASGKADTKILFIEEGKIVHTSTLSGSAQHVEECSCYPRYPGVRCVCRDNWKGSNRPIVDINIKDHSIVSSYVCSGLVGDTPRKNDSSSSSHCLDPNNEEGGHGVKGWAFDDGNDVWMGRTINETSRLGYETFKVIEGWSNPKSKLQINRQVIVDRGDRSGYSGVFSVEGKSCINRCFYVELIRGRKEETEVLWTSNSIVVFCGTSGTYGTGSWPDGADLNLMPI

SEQ ID NO: 25650 - protein, 469 aa, Artificial Sequence; identical to SEQ ID NO: 25637
  derived and/or modified protein sequence (wt) from neuraminidase__InfluenzaA__AIL93897

SEQ ID NO: 25651 - protein, 469 aa, Artificial Sequence
  derived and/or modified protein sequence (wt) from neuraminidase__InfluenzaA__AIL93909
MNPNQKIITIGSVCMTIGMANLILQIGNIISIWISHSIQLGNQSQIETCNQSVITYENNTWVNQTYVNISNTNFAAGQSVVSVKLAGNSSLCPVSGWAIYSKDNSIRIGSKGDVFVIREPFISCSPLECRTFFLTQGALLNDKHSNGTIKDRSPYRTLMSCPIGEVPSPYNSRFESVAWSASACHDGINWLTIGISGPDSGAVAVLKYNGIITDTIKSWRNNILRTQESECVCVNGSCFTIMTDGPSDGQASYKIFRIEKGKIVKSVEMNAPNYHYEECSCYPDSSEITCVCRDNWHGSNRPWVSFNQNLEYQIGYICSGIFGDNPRPNDKTGSCGPVSSNGANGVKGFSFKYGNGVWIGRTKSISSRKGFEMIWDPNGWTGTDNNFSIKQDIVGINEWSGYSGSFVQHPELTGLDCIRPCFWVELIRGRPKENTIWTSGSSISFCGVNSDTVGWSWPDGAELPFTIDK

SEQ ID NO: 25652 - protein, 469 aa, Artificial Sequence; identical to SEQ ID NO: 25637
  derived and/or modified protein sequence (wt) from neuraminidase__InfluenzaA__AIL93920

SEQ ID NO: 25653 - protein, 469 aa, Artificial Sequence
  derived and/or modified protein sequence (wt) from neuraminidase__InfluenzaA__AIL93943
MNPNQKIITIGSVCMTIGMANLILQIGNIISIWVSHSIQLGNQSQIETCNQSVITYENNTWVNQTYVNISNTNFAAGQSVVSVKLAGNSSLCPVSGWAIYSKDNSVRIGSKGDVFVIREPFISCSPSECRTFFLTQGALLNDKHSNGTIKDRSPYRTLMSCPIGEVPSPYNSRFESVAWSASACHDGINWLTIGISGPDSGAVAVLKYNGIITDTIKSWRNNILRTQESECACVNGSCFTIMTDGPSDGQASYKIFRIEKGKIVKSVEMNAPNYHYEECSCYPDSSEITCVCRDNWHGSNRPWVSFNQNLEYQIGYICSGVFGDNPRPNDKTGSCGPVSSNGANGVKGFSFKYGNGVWIGRTKSISSRKGFEMIWDPNGWTGTDNNFSIKQDIVGIKEWSGYSGSFVQHPELTGLDCIRPCFWVELIRGRPEENTIWTSGSSISFCGVNSDTVGWSWPDGAELPFTIDK

SEQ ID NO: 25654 - protein, 469 aa, Artificial Sequence; identical to SEQ ID NO: 25637
  derived and/or modified protein sequence (wt) from neuraminidase__InfluenzaA__AIL93954

SEQ ID NO: 25655 - protein, 469 aa, Artificial Sequence; identical to SEQ ID NO: 25637
  derived and/or modified protein sequence (wt) from neuraminidase__InfluenzaA__AIL93966

SEQ ID NO: 25656 - protein, 469 aa, Artificial Sequence
  derived and/or modified protein sequence (wt) from neuraminidase__InfluenzaA__AIL93978
MNPNQKIITIGSVSLTISTICLFMQIAILITTVTLHFKQYEFNSPPNNQVMLCEPTIIERNITEIVYLTNTTIEKEICPKPAEYRNWSKPQCGITGFAPFSKDNSIRLSAGGDIWVTREPYVSCDPDKCYQFALGQGTTLNNVHSNNTVRDRTPYRTLLMNELGVPFHLGTKQVCIAWSSSSCHDGKAWLHVCITGDDKNATASFIYNGRLVDSVVSWSKEILRTQESECVCINGTCTVVMTDGSASGKADTKILFIEEGKIVHTSTLSGSAQHVEECSCYPRYPGVRCVCRDNWKGSNRPIVDINIKDHSIVSSYVCSGLVGDTPRKNDSSSSSHCLDPNNEEGGHGVKGWAFDDGNDVWMGRTINETSRLGYETFKVIEGWSNPKSKLQINRQVIVDRGDRSGYSGIFSVEGKSCINRCFYVELIRGRKEETEVLWTSNSIVVFCGTSGTYGTGSWPDGADLNLMPI

SEQ ID NO: 25657 - protein, 469 aa, Artificial Sequence; identical to SEQ ID NO: 25646
  derived and/or modified protein sequence (wt) from neuraminidase__InfluenzaA__AIL93990

SEQ ID NO: 25658 - protein, 469 aa, Artificial Sequence; identical to SEQ ID NO: 22146
  derived and/or modified protein sequence (wt) from neuraminidase__InfluenzaA__AIL94001

SEQ ID NO: 25659 - protein, 469 aa, Artificial Sequence; identical to SEQ ID NO: 25637
  derived and/or modified protein sequence (wt) from neuraminidase__InfluenzaA__AIL94013

SEQ ID NO: 25660 - protein, 469 aa, Artificial Sequence; identical to SEQ ID NO: 25637
  derived and/or modified protein sequence (wt) from neuraminidase__InfluenzaA__AIL94025

SEQ ID NO: 25661 - protein, 469 aa, Artificial Sequence; identical to SEQ ID NO: 25637
  derived and/or modified protein sequence (wt) from neuraminidase__InfluenzaA__AIL94037

SEQ ID NO: 25662 - protein, 469 aa, Artificial Sequence; identical to SEQ ID NO: 25637
  derived and/or modified protein sequence (wt) from neuraminidase__InfluenzaA__AIL94049

SEQ ID NO: 25663 - protein, 469 aa, Artificial Sequence; identical to SEQ ID NO: 25646
  derived and/or modified protein sequence (wt) from neuraminidase__InfluenzaA__AIL94061

SEQ ID NO: 25664 - protein, 469 aa, Artificial Sequence
  derived and/or modified protein sequence (wt) from neuraminidase__InfluenzaA__AIL94072
MNPNQKIITIGSVCMTIGMANLILQIGNIISIWISHSIQLGNQSQIEACNQSVITYENNTWVNQTYVNISNTNFATGQSVVSVKLAGNSSLCPVSGWAIYSKDNSVRIGSKGDVFVIREPFISCSPLECRTFFLTQGALLNDKHSNGTIKDRSPYRTLMSCPIGEVPSPYNSRFESVAWSASACHDGINWLTIGISGPDSGAVAVLKYNGIITDTIKSWKNNILRTQESECACVNGSCFTIMTDGPSDGQASYKIFRIEKGKIVKSVEMNAPNYHYEECSCYPDSSEITCVCRDNWHGSNRPWVSFNQNLEYQIGYICSGVFGDNPRPNDKTGSCGPVLSNGANGVKGFSFKYGNGVWIGRTKSISSRKGFEMIWDPNGWTGTDNNFSIKQDIVGINEWSGYSGSFVQHPELTGLDCIRPCFWIELIRGRPKENTIWTSGSSISFCGVNSDTVGWSWPDGAELPFTIDK

SEQ ID NO: 25665 - protein, 469 aa, Artificial Sequence; identical to SEQ ID NO: 25646
  derived and/or modified protein sequence (wt) from neuraminidase__InfluenzaA__AIL94083

SEQ ID NO: 25666 - protein, 469 aa, Artificial Sequence; identical to SEQ ID NO: 25637
  derived and/or modified protein sequence (wt) from neuraminidase__InfluenzaA__AIL94238

SEQ ID NO: 25667 - protein, 469 aa, Artificial Sequence
  derived and/or modified protein sequence (wt) from neuraminidase__InfluenzaA__AIL94250
MNPNQKIITIGSVCMTIGMANLILQIGNIISIWISHSIQLGNQSQIEACNQSVITYENNTWVNQTYVNISNTNFAAGQSVVSVKLAGNSSLCPVSGWAIYSKDNSVRIGSKGDVFVIREPFISCSPLECRTFFLTQGALLNDKHSNGTIKDRSPYRTLMSCPIGEVPSPYNSRFESVAWSASACHDGINWLTIGISGPDSGAVAVLKYNGIITDTIKSWKNNILRTQESECACVNGSCFTIMTDGPNDGQASYKIFRIEKGKIVKSVEMNAPNYHYEECSCYPDSSEITCVCRDNWHGSNRPWVSFNQNLEYQIGYICSGVFGDNPRPNDKTGSCGPVSSNGANGVKGFSFKYGNGVWIGRTKSISSRKGFEMIWDPNGWTGTDNNFSIKQDIVGINEWSGYSGSFVQHPELTGLDCIRPCFWVELIRGRPKENTIWTSGSSISFCGVNSDTVGWSWPDGAELPFTIDK

SEQ ID NO: 25668 - protein, 469 aa, Artificial Sequence; identical to SEQ ID NO: 22146
  derived and/or modified protein sequence (wt) from neuraminidase__InfluenzaA__AIL94261

SEQ ID NO: 25669 - protein, 469 aa, Artificial Sequence; identical to SEQ ID NO: 22146
  derived and/or modified protein sequence (wt) from neuraminidase__InfluenzaA__AIL94273

SEQ ID NO: 25670 - protein, 469 aa, Artificial Sequence; identical to SEQ ID NO: 22146
  derived and/or modified protein sequence (wt) from neuraminidase__InfluenzaA__AIL94285

SEQ ID NO: 25671 - protein, 469 aa, Artificial Sequence
  derived and/or modified protein sequence (wt) from neuraminidase__InfluenzaA__AIL94297
MNPNQKIITIGSVSLTISTICFFMQIAILITTVTLHFKQYEFNSPPNNQVMLCEPTIIERNITEIVYLTNTTIEKEICPKPAEYRNWSKPQCGITGFAPFSKDNSIRLSAGGDIWVTREPYVSCDPDKCYQFALGQGTTLNNVHSNNTVRDRTPYRTLLMNELGVPFHLGTKQVCIAWSSSSCHDGKAWLHVCITGDDKNATASFIYNGRLVDSVVSWSKEILRTQESECVCINGTCTVVMTDGSASGKADTKILFIEEGKIVHTRTLSGSAQHVEECSCYPRYPGVRCVCRDNWKGSNRPIVDINIKDHSIVSSYVCSGLVGDTPRKNDSSSSSHCLDPNNEEGGHGVKGWAFDDGNDVWMGRTINETSRLGYETFKVIEGWSNPKSKLQINKQVIVDRGDRSGYSGIFSVEGKSCINRCFYVELIRGRKEETEVLWTSNSIVVFCGTSGTYGTGSWPDGADLNLMPI

SEQ ID NO: 25672 - protein, 469 aa, Artificial Sequence; identical to SEQ ID NO: 25637
  derived and/or modified protein sequence (wt) from neuraminidase__InfluenzaA__AIL94309

SEQ ID NO: 25673 - protein, 469 aa, Artificial Sequence; identical to SEQ ID NO: 25656
  derived and/or modified protein sequence (wt) from neuraminidase__InfluenzaA__AIL94321

SEQ ID NO: 25674 - protein, 469 aa, Artificial Sequence; identical to SEQ ID NO: 22146
  derived and/or modified protein sequence (wt) from neuraminidase__InfluenzaA__AIL94368

SEQ ID NO: 25675 - protein, 469 aa, Artificial Sequence
  derived and/or modified protein sequence (wt) from neuraminidase__InfluenzaA__AIL94380
MNPNQKIITIGSVSLTISTICFFMQIAILITTVTLHFKQYEFNSPPNNQVMLCEPTIIERNITEIVYLTNTTIEKEICPKPAEYRNWSKPQCGITGFAPFSKDNSIRLSAGGDIWVTREPYVSCDPDKCYQFALGQGTTLNNVHSNNTVRDRTPYRTLLMNELGVPFHLGTKQVCIAWSSSSCHDGKAWLHVCITGDDKNATASFIYNGRLVDSVVSWSKEILRTQESECVCINGTCTVVMTDGSASGKADTKILFIEEGKIVHTSTLSGSAQHVEECSCYPRYPGVRCVCRDNWKGSNRPVVDINIKDHSIVSSYVCSGLVGDTPRKNDSSSSSHCLDPNNEEGGHGVKGWAFDDGNDVWMGRTINETSRLGYETFKVIEGWSNPKSKLQINKQVIVDRGDRSGYSGIFSVEGKSCINRCFYVELIRGRKEETEVLWTSNSIVVFCGTSGTYGTGSWPDGADLNLMPI

SEQ ID NO: 25676 - protein, 469 aa, Artificial Sequence
  derived and/or modified protein sequence (wt) from neuraminidase__InfluenzaA__AIL94392
MNPNQKIITIGSVCMTIGMANLILQIGNIISIWISHSIQLGNQSQIEACNQSVITYENNTWVNQTYVNISNTNFAAGQSVVSVKLAGNSSLCPVSGWAIYSKDNSVRIGSKGDVFVIREPFISCSPLECRTFFLTQGALLNDKHSNGTIKDRSPYRTLMSCPIGEVPSPYNSRFESVAWSASACHDGINWLTIGISGPDSGAVAVLKYNGIITDTIKSWKNNILRTQESECACVNGSCFTIMTDGPSDGQASYKIFRIEKGKIVKSVEMNAPNYHYEECSCYPDSSEITCVCRDNWHGSNRPWVSFNQNLEYQIGYICSGVFGDNPRPNDKTGSCGPVSSNGANGVKGFSFKYGNGVWIGRTKSISSRKGFEMIWDPNGWTGTDNNFSIKQDIVGINEWSGYSGSFVQHPELTGLDCIRPCFWVELIRGRPKENTIWTSGSSISFCGVNSDTVGWSWPDGAELPFTIDK

SEQ ID NO: 25677 - protein, 469 aa, Artificial Sequence
  derived and/or modified protein sequence (wt) from neuraminidase__InfluenzaA__AIL94403
MNPNQKIITIGSVCMTIGMANLILQIGNIISIWISHSIQLGNQSQIEACNQSVITYENNTWVNQTYVNISNTNFAAGQSVVSVKLAGNSSLCPVSGWAIYSKDNSVRIGSKGDVFVIREPFISCSPLECRTFFLTQGALLNDKHSNGTIKDRSPYRTLMSCPIGEVPSPYNSRFESVAWSASACHDGINWLTIGISGPDSGAVAVLKYNGIITDTIKSWKNNILRTQESECACVNGSCFTIMTDGPSDGQASYKIFRIEKGKIVKSVEMNAPNYHYEECSCYPDSSEITCVCRDNWHGSNRPWVSFNQNLEYQIGYICSGVFGDNPRPNDKTGSCDPVSSNGANGVKGFSFKYGNGVWIGRTKSISSRKGFEMIWDPNGWTGTDNNFSIKQDIVGINEWSGYSGSFVQHPELTGLDCIRPCFWVELIRGRPKENTIWTSGSSISFCGVNSDTVGWSWPDGAELPFTIDK

SEQ ID NO: 25678 - protein, 469 aa, Artificial Sequence; identical to SEQ ID NO: 22146
  derived and/or modified protein sequence (wt) from neuraminidase__InfluenzaA__AIL94426

SEQ ID NO: 25679 - protein, 469 aa, Artificial Sequence
  derived and/or modified protein sequence (wt) from neuraminidase__InfluenzaA__AIL94438
MNPNQKIITIGSVCMTIGMANLILQIGNIISIWISHSIQLGNQSQIEACNQSVITYENNTWVNQTYVNISNTNFATGQSVVSVKLAGNSSLCPVSGWAIYSKDNSVRIGSKGDVFVIREPFISCSPLECRTFFLTQGALLNDKHSNGTIKDRSPYRTLMSCPIGEVPSPYNSRFESVAWSASACHDGINWLTIGISGPDSGAVAVLKYNGIITDTIKSWKNNILRTQESECACVNGSCFTIMTDGPSDGQASYKIFRIEKGKIVKSVEMNAPNYHYEECSCYPDSSEITCVCRDNWHGSNRPWVSFNQNLEYQIGYICSGVFGDNPRPNDKTGSCGPVSSNGANGVKGFSFKYGNGVWIGRTKSVSSRKGFEMIWDPNGWTGTDNNFSIKQDIVGINEWSGYSGSFVQHPELTGLDCIRPCFWVELIRGRPKENTIWTSGSSISFCGVNSDTVGWSWPDGAELPFTIDK

SEQ ID NO: 25680 - protein, 469 aa, Artificial Sequence
  derived and/or modified protein sequence (wt) from neuraminidase__InfluenzaA__AIL94449
MNPNQKIITIGSVSLTISTICFFMQIAILITTVTLHFKQYEFNSPPNNQVMLCEPTIIERNITEIVYLTNTTIEKEICPKPAKYRNWSKPQCGITGFAPFSKDNSIRLSAGGDIWVTREPYVSCDPDKCYQFALGQGTTLNNVHSNNTVRDRTPYRTLLMNELGVPFHLGTKQVCIAWSSSSCHDGKAWLHVCITGDDKNATASFIYNGRLVDSVVSWSKEILRTQESECVCINGTCTVVMTDGSASGKADTKILFIEEGKIVHTSTLSGSAQHVEECSCYPRYPGVRCVCRDNWKGSNRPIVDINIKDHSIVYSYVCSGLVGDTPRKNDSSSSSHCLNPNNEEGGHGVKGWAFDDGNDVWMGRTINETSRLGYETFKVIEGWSNPKSKLQINRQVIVDRGDRSGYSGIFSVEGKSCINRCFYVELIRGRKEETEVLWTSNSIVVFCGTSGTYGTGSWPDGADLNLMPI

SEQ ID NO: 25681 - protein, 469 aa, Artificial Sequence; identical to SEQ ID NO: 25675
  derived and/or modified protein sequence (wt) from neuraminidase__InfluenzaA__AIL94461

SEQ ID NO: 25682 - protein, 469 aa, Artificial Sequence
  derived and/or modified protein sequence (wt) from neuraminidase__InfluenzaA__AIL94473
MNPNQKIITIGSVCMTIGMANLILQIGNIISIWVGHSIQLGNQSQIETCNQSVITYENNTWVNQTYVNISNTNFAAGQSVVPVKLAGNSSLCPVSGWAIYSKDNSVRIGSKGDVFVIREPFISCSPLECRTFFLTQGALLNDKHSNGTIKDRSPYRTLMSCPIGEVPSPYNSRFESVAWSASACHDGINWLTIGISGPDSGAVAVLKYNGIITDTIKSWRNNILRTQESECACVNGSCFTIMTDGPSDGQASYKIFRIEKGKIVKSVEMNTPNYHYEECSCYPDSSEITCVCRDNWHGSNRPWVSFNQNLEYQIGYICSGVFGDNPRPNDKTGSCGPVSSNGANGVKGFSFKYGNGVWIGRTKSISSRKGFEMIWDPNGWTGTDNNFSIKQDIVGIKEWSGYSGSFVQHPELTGLDCIRPCFWVELIRGRPEENTIWTSGSSISFCGVNSDIVGWSWPDGAELPFTIDK

SEQ ID NO: 25683 - protein, 469 aa, Artificial Sequence; identical to SEQ ID NO: 24736
  derived and/or modified protein sequence (wt) from neuraminidase__InfluenzaA__AIL94484

SEQ ID NO: 25684 - protein, 469 aa, Artificial Sequence; identical to SEQ ID NO: 25646
  derived and/or modified protein sequence (wt) from neuraminidase__InfluenzaA__AIL94507

SEQ ID NO: 25685 - protein, 469 aa, Artificial Sequence
  derived and/or modified protein sequence (wt) from neuraminidase__InfluenzaA__AIL94518
MNPNQKIITIGSVSLTISTICFFMQIAILITTVTLHFKQYEFNSPPNNQVMLCEPTIIERNITEIVYLTNTTIEKEICPKPAEYRNWSKPQCGITGFAPFSKDNSIRLSAGGDIWVTREPYVSCDPDKCYQFALGQGTTLNNVHSNNTVRDRTPYRTLLMNELGVPFHLGTKQVCIAWSSSSCHDGKAWLHVCITGDDKNATASFIYNGRLVDSVVSWSKEILRTQESECVCINGTCTVVMTDGSASGKADTKILFIEEGKIVHTSTLSGSAQHVEECSCYPRYPGVRCVCRDNWKGSNRPIVDINIKDHSIVSSYVCSGLVGDTPRKNDSSSSSHCLDPNNEEGGHGVKGWAFDDGNDVWMGRTINETSRLGYETFKVIEGWSNPKSKLQINKQVIVDRGDRSGYSGIFSVEGKSCINRCFYVELIRGRKEETEVLWTSNSIVVFCGTSGTYGTGSWPDGADLSLMPI

SEQ ID NO: 25686 - protein, 469 aa, Artificial Sequence
  derived and/or modified protein sequence (wt) from neuraminidase__InfluenzaA__AIL94530
MNPNQKIITIGSVSLTISTICFFMQIAILITTVTLHFKQYEFNSPPNNQVMLCEPTIIERNITEIVYLTNTTIEKEICPKPAEYRNWSKPQCGITGFAPFSKDNSIRLSAGGDIWVTREPYVSCDPDKCYQFALGQGTTLNNVHSNNTVRDRTPYRTLLMNELGVPFHLGTKQVCIAWSSSSCHDGKAWLHVCITGDDKNATASFIYNGRLVDSVVSWSKEILRTQESECVCINGTCTVVMTDGSASGKADTKILFIEEGKIVHTSTLSGSAQHVEECSCYPRYPGVRCVCRDNWKGSNRPIVDINIKDHSIVSSYVCSGLVGDTPRKNDSSSSSHCLNPNNEEGGHGVKGWAFDDGNDVWMGRTINETSRLGYETFKVIEGWSNPKSKLQINRQVIVDRGDRSGYSGIFSVEGKSCINRCFYVELIRGRKEETEVLWTSNSIVVFCGTSGTYGTGSWPDGADLNLMPI

SEQ ID NO: 25687 - protein, 469 aa, Artificial Sequence; identical to SEQ ID NO: 25676
  derived and/or modified protein sequence (wt) from neuraminidase__InfluenzaA__AIL94542

SEQ ID NO: 25688 - protein, 469 aa, Artificial Sequence; identical to SEQ ID NO: 25646
  derived and/or modified protein sequence (wt) from neuraminidase__InfluenzaA__AIL94553

SEQ ID NO: 25689 - protein, 469 aa, Artificial Sequence; identical to SEQ ID NO: 25637
  derived and/or modified protein sequence (wt) from neuraminidase__InfluenzaA__AIL94564

SEQ ID NO: 25690 - protein, 469 aa, Artificial Sequence; identical to SEQ ID NO: 25646
  derived and/or modified protein sequence (wt) from neuraminidase__InfluenzaA__AIL94576

SEQ ID NO: 25691 - protein, 469 aa, Artificial Sequence
  derived and/or modified protein sequence (wt) from neuraminidase__InfluenzaA__AIL94587
MNPNQKIITIGSVCMTIGMANLILQIGNIISIWISHSIQLGNQSQIEACNQSVITYENNTWVNQTYVNISNTNFAAGQSVVSVKLAGNSSLCPVSGWAIYSKDNSVRIGSKGDVFVIREPFISCSPLECRTFFLTQGALLNDKHSNGTIKDRSPYRTLMSCPIGEVPSPYNSRFESVAWSASACHDGINWLTIGISGPDSGAVAVLKYNGIITDTIKSWKNNILRTQESECACVNGSCFTIMTDGPSDGQASYKIFRIEKGKIVKSVEMDAPNYHYEECSCYPDSSEITCVCRDNWHGSNRPWVSFNQNLEYQIGYICSGVFGDNPRPNDKTGSCGPVSSNGANGVKGFSFKYGNGVWIGRTKSISSRKGFEMIWDPNGWNGTDNNFSIKQDIVGINEWSGYSGSFVQHPELTGLDCIRPCFWVELIRGRPKENTIWTGGSSISFCGVNSDTVGWSWPDGAELPFTIDK

SEQ ID NO: 25692 - protein, 469 aa, Artificial Sequence; identical to SEQ ID NO: 25676
  derived and/or modified protein sequence (wt) from neuraminidase__InfluenzaA__AIL94598

SEQ ID NO: 25693 - protein, 469 aa, Artificial Sequence
  derived and/or modified protein sequence (wt) from neuraminidase__InfluenzaA__AIL94609
MNPNQKIITIGSVSLTISTICLFMQIAILITTVTLHFKQYEFNSPPNNQVMLCEPTIIERNITEIVYLTNTTIEKEICPKPAEYRNWSKPQCGITGFAPFSKDNSIRLSAGGDIWVTREPYVSCDPDKCYQFALGQGTTLNNVHSNNTVRDRTPYRTLLMSELGVPFHLGTKQVCIAWSSSSCHDGKAWLHVCITGDDKNATASFIYNGRLVDSVVSWSKEILRTQESECVCINGTCTVVMTDGSASGKADTKILFIEEGKIVHTSTLSGSAQHVEECSCYPLYPGVRCVCRDNWKGSNRPIVDINIKDHSIVSSYVCSGLVGDTPRKNDSSSSSHCLDPNNEEGGHGVKGWAFDDGNDVWMGRTINETSRLGYETFKVIEGWSNPKSKLQINRQVIVDRGDRSGYSGIFSVEGKSCINRCFYVELIRGRKEETEVLWTSNSIVVFCGTSGTYGTGSWPDGADLNLMPI

SEQ ID NO: 25694 - protein, 469 aa, Artificial Sequence
  derived and/or modified protein sequence (wt) from neuraminidase__InfluenzaA__AIL94621
MNPNQKIITIGSVCMTIGMANLILQIGNIISIWISHSIQLGNQSQIEACNQSVITYENNTWVNQTYVNISNTNFAAGQSVVPVKLAGNSSLCPVSGWAIYSKDNSVRIGSKGDVFVIREPFISCSPLECRTFFLTQGALLNDKHSNGTIKDRSPYRTLMSCPIGEVPSPYNSRFESVAWSASACHDGINWLTIGISGPDSGAVAVLKYNGIITDTIKSWKNNILRTQESECACVNGSCFTIMTDGPSDGQASYKIFRIEKGKIVKSVEMNAPNYHYEECSCYPDSSEITCVCRDNWHGSNRPWVSFNQNLEYQIGYICSGVFGDNPRPNDKTGSCGPVSSNGANGVKGFSFKYGNGVWIGRTKSISSRKGFEMIWDPNGWTGTDNDFSIKQDIVGINEWSGYSGSFVQHPELTGLDCIRPCFWVELIRGRPKENTIWTSGSSISFCGVNSDTVGWSWPDGAELPFTIDK

SEQ ID NO: 25695 - protein, 469 aa, Artificial Sequence; identical to SEQ ID NO: 25646
  derived and/or modified protein sequence (wt) from neuraminidase__InfluenzaA__AIL94632

SEQ ID NO: 25696 - protein, 469 aa, Artificial Sequence; identical to SEQ ID NO: 22146
  derived and/or modified protein sequence (wt) from neuraminidase__InfluenzaA__AIL94643

SEQ ID NO: 25697 - protein, 469 aa, Artificial Sequence
  derived and/or modified protein sequence (wt) from neuraminidase__InfluenzaA__AIL94655
MNPNQKIITIGSVCMTIGMANLILQIGNIISIWISHSIQLGNQSQIETCNQSVITYENNTWVNQTYVNISNTNFAAGQSVVSVKLAGNSSLCPVSGWAIYSKDNSIRIGSKGDVFVIREPFISCSPLECRTFFLTQGALLNDKHSNGTIKDRSPYRTLMSCPIGEVPSPYNSRFESVAWSASACHDGINWLTIGISGPDSGAVAVLKYNGIITDTIKSWRNNILRTQESECACVNGSCFTIMTDGPSDGQASYKIFRIEKGKIVKSVEMNAPNYHYEECSCYPDSSEITCVCRDNWHGSNRPWVSFNQNLEYQIGYICSGIFGDNPRPNDKTGSCGPVSSNGANGVKGFSFKYGNGVWIGRTKSISSRKGFEMIWDPNGWTGTDNNFSIKQDIVGINEWSGYSGSFVQHPELTGLDCIRPCFWVELIRGRPKENTIWTSGSSISFCGVNSDTVGWSWPDGAELPFTIDK

SEQ ID NO: 25698 - protein, 469 aa, Artificial Sequence
  derived and/or modified protein sequence (wt) from neuraminidase__InfluenzaA__AIL94677
MNPNQKIITIGSVCMTIGMANLILQIGNIISIWISHSIQLGNQSQIEACNQSVITYENNTWVNQTYVNISNTNFAAGQSVVPVKLAGNSSLCPVSGWAIYSKDNSVRIGSKGDVFVIREPFISCSPLECRTFFLTQGALLNDKHSNGTIKDRSPYRTLMSCPIGEVPSPYNSRFESVAWSASACHDGINWLTIGISGPDSGAVAVLKYNGIITDTIKSWKNNILRTQESECACVNGSCFTIMTDGPSDGQASYKIFRIEKGKIVKSVEMNAPNYHYEECSCYPDSSEITCVCRDNWHGSNRPWVSFNQNLEYQIGYICSGVFGDNPRPNDKTGSCGPVSSNGANGVKGFSFKYGNGVWIGRTKSISSRKGFEMIWDPNGWTGTDNNFSIKQDIVGINEWSGYSGSFVQHPELTGLDCIRPCFWVELIRGRPKENTIWTSGSSISFCGVNSDTVGWSWPDGAELPFTIDK

SEQ ID NO: 25699 - protein, 469 aa, Artificial Sequence; identical to SEQ ID NO: 25637
  derived and/or modified protein sequence (wt) from neuraminidase__InfluenzaA__AIL94688

SEQ ID NO: 25700 - protein, 469 aa, Artificial Sequence
  derived and/or modified protein sequence (wt) from neuraminidase__InfluenzaA__AIL94700
MNPNQKIITIGSVSLTISTICFFMQIAILITIVTLHFKQYEFNSPPNNQVMLCEPTIIERNITEIVYLTNTTIEKEICPKPAEYRNWSKPQCGITGFAPFSKDNSIRLSAGGDIWVTREPYVSCDPDKCYQFALGQGTTLNNVHSNNTVRDRTPYRTLLMNELGVPFHLGTKQVCIAWSSSSCHDGKAWLHVCITGDDKNATASFIYNGRLVDSVVSWSKEILRTQESECVCINGTCTVVMTDGSASGKADTKILFIEEGKIVHISTLSGSAQHVEECSCYPRYPGVRCVCRDNWKGSNRPIVDINIEDHSIVSSYVCSGLVGDTPRKNDSSSSSHCLDPNNEEGGHGVKGWAFDDGNDVWMGRTINETSRLGYETFKVIEGWSNPKSKLQINRQVIVDRGDRSGYSGIFSVEGKSCINRCFYVELIRGRKEETEVLWTSNSIVVFCGTSGTYGTGSWPDGADLNLMPI

SEQ ID NO: 25701 - protein, 469 aa, Artificial Sequence; identical to SEQ ID NO: 25646
  derived and/or modified protein sequence (wt) from neuraminidase__InfluenzaA__AIL94712

SEQ ID NO: 25702 - protein, 469 aa, Artificial Sequence; identical to SEQ ID NO: 25676
  derived and/or modified protein sequence (wt) from neuraminidase__InfluenzaA__AIL94723

SEQ ID NO: 25703 - protein, 469 aa, Artificial Sequence
  derived and/or modified protein sequence (wt) from neuraminidase__InfluenzaA__AIL94734
MNPNQKIITIGSVSLTISTICFFMQIAILITTVTLHFKQYEFNSPPNNQVMLCEPTIIERNITEIVYLTNTTIEKEICPKPAEYRNWSKPQCGITGFAPFSKDNSIRLSAGGDIWVTREPYVSCDPDKCYQFALGQGTTLNNEHSNNTVRDRTPYRTLLMNELGVPFHLGTKQVCIAWSSSSCHDGKAWLHVCITGDDKNATASFIYNGRLVDSVVSWSKEILRTQESECVCINGTCTVVMTDGSASGKADTKILFIEEGKIVHISTLSGSAQHVEECSCYPRYPGVRCVCRDNWKGSNRPIVDINIKDHSIVSSYVCSGLVGDTPRKNDSSSSSHCLDPNNEEGGHGVKGWAFDDGNDVWMGRTINETSRLGYETFKVIEGWSNPKSKLQINRQVIVDRGDRSGYSGIFSVEGKSCINRCFYVELIRGRKEETEVLWTSNSIVVFCGTSGTYGTGSWPDGADLNLMPI

SEQ ID NO: 25704 - protein, 469 aa, Artificial Sequence; identical to SEQ ID NO: 25646
  derived and/or modified protein sequence (wt) from neuraminidase__InfluenzaA__AIL94746

SEQ ID NO: 25705 - protein, 469 aa, Artificial Sequence; identical to SEQ ID NO: 25676
  derived and/or modified protein sequence (wt) from neuraminidase__InfluenzaA__AIL94757

SEQ ID NO: 25706 - protein, 469 aa, Artificial Sequence; identical to SEQ ID NO: 25637
  derived and/or modified protein sequence (wt) from neuraminidase__InfluenzaA__AIL94768

SEQ ID NO: 25707 - protein, 469 aa, Artificial Sequence; identical to SEQ ID NO: 22146
  derived and/or modified protein sequence (wt) from neuraminidase__InfluenzaA__AIL94780

SEQ ID NO: 25708 - protein, 469 aa, Artificial Sequence; identical to SEQ ID NO: 25676
  derived and/or modified protein sequence (wt) from neuraminidase__InfluenzaA__AIL94803

SEQ ID NO: 25709 - protein, 469 aa, Artificial Sequence; identical to SEQ ID NO: 25656
  derived and/or modified protein sequence (wt) from neuraminidase__InfluenzaA__AIL94814

SEQ ID NO: 25710 - protein, 469 aa, Artificial Sequence
  derived and/or modified protein sequence (wt) from neuraminidase__InfluenzaA__AIL94826
MNPNQKIITIGSVSLTISTICFFMQIAILITTVTLHFKQYEFNSLPNNQVMLCEPTIIERNITEIVYLTNTTIEKEICPKPAEYRNWSKPQCGITGFAPFSKDNSIRLSAGGDIWVTREPYVSCDPDKCYQFALGQGTTLNNVHSNNTARDRTPYRTLLMNELGVPFHLGTKQVCIAWSSSSCHDGKAWLHVCITGDDKNATASFIYNGRLVDSVVSWSKEILRTQESECVCINGTCTVVMTDGSASGKADTKILFIEEGKIVHTSTLSGSAQHVEECSCYPRYPGVRCVCRDNWKGSNRPIVDINIKDHSIVSSYVCSGLVGDTPRKNDSSSSSHCLNPNNEEGGHGVKGWAFDDGNDVWMGRTINETSRLGYETFKVIEGWSNPKSKLQINRQVIVDRGDRSGYSGIFSVEGKSCINRCFYVELIRGRKEETEVLWTSNSIVVFCGTSGTYGTGSWPDGADLNLMPI

SEQ ID NO: 25711 - protein, 469 aa, Artificial Sequence
  derived and/or modified protein sequence (wt) from neuraminidase__InfluenzaA__AIL94850
MNPNQKIITIGSVSLTISTICFFMQIAILITTVTLHFKQYEFNSPPNNQVMLFEPTIIERNITEIVYLTNTTIEKEICPKLAEYRNWSKPQCDITGFAPFSKDNSIRLSAGGDIWVTREPYVSCDPDKCYQFALGQGTTLNNVHSNDTVRDRTPYRTLLMNELGVPFHLGTKQVCIAWSSSSCHDGKAWLHVCITGDDKNATASFIYNGRLVDSIVSWSKEILRTQESECVCINGTCTVVMTDGSASGKADTKILFIKEGKIVHTSTLSGSAQHVEECSCYPRYPGVRCVCRDNWKGSNRPIVDINIKDHSIVSSYVCSGLVGDTPRKNDSSSSSHCLDPNSEEGGHGVKGWAFDDGNDVWMGRTISEKSRLGYETFKVIEGWSNPKSKFQINRQVIVDRGNRSGYSGIFSVEGKSCINRCFYVELIRGRKEETEVLWTSNSIVVFCGTSGTYGTGSWPDGADLNLMPI

SEQ ID NO: 25712 - protein, 469 aa, Artificial Sequence; identical to SEQ ID NO: 19410
  derived and/or modified protein sequence (wt) from neuraminidase__InfluenzaA__AIL94862

SEQ ID NO: 25713 - protein, 469 aa, Artificial Sequence; identical to SEQ ID NO: 19410
  derived and/or modified protein sequence (wt) from neuraminidase__InfluenzaA__AIL94874

SEQ ID NO: 25714 - protein, 469 aa, Artificial Sequence
  derived and/or modified protein sequence (wt) from neuraminidase__InfluenzaA__AIL94886
MNPNQKIITIGSVCMTIGMANLMLQIGNIISIWISHSIQLGNKNQIETCNQSVITYENNTWVNQTYVNISNTNFAAGQSVVSVKIAGNSSLCPVSGWAIYSKDNSIRIGSKGDVFVIREPFISCSPLECRTFFLTQGALLNDKHSNGTIKDRSPYRTLMSCPIGEVPSPYNSRFESVAWSASACHDGINWLTIGISGPDDGAVAVLKYNGIITDTIKSWRNNILRTQESECACVNGSCFTIMTDGPSDGQASYKIFRIEKGKIVKSVEMNAPNYHYEECSCYPDSSEITCVCRDNWHGSNRPWVSFNQNLEYQIGYICSGIFGDNPRPHDKTGSCGPVSSNGANGVKGFSFKYGNGVWIGRTKSISSRKGFEMIWDPNGWTGTDNNFSIKQDIVGINEWSGYSGSFVQHPELTGLDCIRPCFWVELIRGRPKENTIWTSGSSISFCGVNSDTVGWSWPDGAELPFTIDK

SEQ ID NO: 25715 - protein, 469 aa, Artificial Sequence; identical to SEQ ID NO: 22922
  derived and/or modified protein sequence (wt) from neuraminidase__InfluenzaA__AIL94897

SEQ ID NO: 25716 - protein, 469 aa, Artificial Sequence; identical to SEQ ID NO: 25710
  derived and/or modified protein sequence (wt) from neuraminidase__InfluenzaA__AIL94909

SEQ ID NO: 25717 - protein, 469 aa, Artificial Sequence; identical to SEQ ID NO: 22146
  derived and/or modified protein sequence (wt) from neuraminidase__InfluenzaA__AIL94921

SEQ ID NO: 25718 - protein, 469 aa, Artificial Sequence; identical to SEQ ID NO: 22146
  derived and/or modified protein sequence (wt) from neuraminidase__InfluenzaA__AIL94933

SEQ ID NO: 25719 - protein, 469 aa, Artificial Sequence; identical to SEQ ID NO: 25637
  derived and/or modified protein sequence (wt) from neuraminidase__InfluenzaA__AIL94945

SEQ ID NO: 25720 - protein, 469 aa, Artificial Sequence
  derived and/or modified protein sequence (wt) from neuraminidase__InfluenzaA__AIL94957
MNPNQKIITIGSVCMTIGMANLILQIGNIISIWISHSIQLGNQSQIEACNQSVITYENNTWVNQTYVNISNTNFAAGQSVVSVKLAGNSSLCPVSGWAIYSKDNSVRIGSKGDVFVIREPFISCSPLECRTFFLTQGALLNDKHSNGTIKDRSPYRTLMSCPIGEVPSPYNSRFESVAWSASACHDGINWLTIGISGPDSGAVAVLKYNGIITDTIKSWKNNILRTQESECACVNGSCFTIMTDGPSDGQASYKIFRIEKGKIVKSVEMDAPNYHYEECSCYPDSSEITCVCRDNWHGSNRPWVSFNQNLEYQIGYICSGVFGDNPRPNDKTGSCGPVSSNGANGVKGFSFKYGNGVWIGRTKSISSRKGFEMIWDPNGWNGTDNNFSIKQDIVGINEWSGYSGSFVQHPELTGLDCIRPCFWVELIRGRPKENTIWTSGSSISFCGVNSDTVGWSWPDGAELPFTIDK

SEQ ID NO: 25721 - protein, 469 aa, Artificial Sequence; identical to SEQ ID NO: 25710
  derived and/or modified protein sequence (wt) from neuraminidase__InfluenzaA__AIL94968

SEQ ID NO: 25722 - protein, 469 aa, Artificial Sequence
  derived and/or modified protein sequence (wt) from neuraminidase__InfluenzaA__AIM55840
MNPNQKIITIGSVCMTIGMANLILQIGNIISIWISHSIQVGNQSQIEICNQSVITYENNTWVNQTYVNISNTNFAAGQPVVSVKLAGNSSLCPVSGWAIYSKDNSVRIGSKGDVFVIREPFISCSPLECRTFFLTQGALLNDKHSNGTIKDRSPYRTLMSCPIGEVPSPYNSRFESVAWSASACHDGINWLTIGISGPDSGAVAVLKYNGIITDTIKSWRNDILRTQESECACVNGSCFTIMTDGPSDGQASYKIFRIEKGKIVKSVEMNAPNYHFEECSCYPDSSEITCVCRDNWHGSNRPWVSFNQNLEYQIGYICSGIFGDNPRPNDKTGSCGPVSSNGANGVKGFSFKYGNGVWIGRTKSISSRKGFEMIWDPNGWTGTDNNFSIKQDIVGINEWSGYSGSFVQHPELTGLDCIRPCFWVELIRGRPKENTIWTSGSSISFCGVNSDTVGWSWPDGAELPFTIDK

SEQ ID NO: 25723 - protein, 469 aa, Artificial Sequence
  derived and/or modified protein sequence (wt) from neuraminidase__InfluenzaA__AIM55851
MNPNQKIITIGSVCMTIGMANLILQIGNIISIWVSHSIQLGNQSQIETCNQSVITYENNTWVNQTYVNISNTNFAAGQSVVPVKLAGNSSLCPVSGWAIYSKDNSVRIGSKGDVFVIREPFISCSPLECRTFFLTQGALLNDKHSNGTIKDRSPYRTLMSCPIGEVPSPYNSRFESVAWSASACHDGINWLTIGISGPDSGAVAVLKYNGIITDTIKSWRNNILRTQESECACVNGSCFTIMTDGPSDGQASYKIFRIEKGRIVKSVEMNAPNYHYEECSCYPDSSEITCVCRDNWHGSNRPWVSFNQNLEYQIGYICSGVFGDNPRPNDKTGSCGPVSSNGANGVKGFSFKYGNGVWIGRTKSISSRKGFEMIWDPNGWTGTDNKFSIKQDIVGINEWSGYSGSFVQHPELTGLDCIRPCFWVELIRGRPEENTIWTSGSSISFCGVKSDTVGWSWPDGAELPFTIDK

SEQ ID NO: 25724 - protein, 469 aa, Artificial Sequence
  derived and/or modified protein sequence (wt) from neuraminidase__InfluenzaA__AIM55862
MNPNQKIITIGSVCMTIGMANLILQIGNIISIWVSHSIQLGNQSQIETCNQSVITYENNTWVNQTYVNISNTNFAAGQSVVPVKLAGNSSLCPVSGWAIYSKDNSVRIGSKGDVFVIREPFISCSPLECRTFFLTQGALLNDKHSNGTIKDRSPYRTLMSCPIGEVPSPYNSRFESVAWSASACHDGINWLTIGISGPDSGAVAVLKYNGIITDTIKSWRNNILRTQESECACVNGSCFTIMTDGPSDGQASYKIFKIEKGKIVKSVEMNAPNYHYEECSCYPDSSEITCVCRDNWHGSNRPWVSFNQNLEYQIGYICSGVFGDNPRPNDKTGSCGPVSSNGANGVKGFSFKYGNGVWIGRTKSISSRKGFEMIWDPNGWNGTDNNFSIKQDIVGIKEWSGYSGSFVQHPELTGLDCIRPCFWVELIRGRPEENTIWTSGSSISFCGVNSDTVGWSWPDGAELPFTIDK

SEQ ID NO: 25725 - protein, 469 aa, Artificial Sequence
  derived and/or modified protein sequence (wt) from neuraminidase__InfluenzaA__AIM55873
MNPNQKIITIGSVCMTIGMANLILQIGNIISIWVSHSIQLGNQSQIETCNQSVITYENNTWVNQTYVNISNTNFAAGQSVVPVKLAGNSSLCPVSGWAIYSKDNSVRIGSKGDVFVIREPFISCSPLECRTFFLTQGALLNDKHSNGTIKDRSPYRTLMSCPIGEVPSPYNSRFESVAWSASACHDGINWLTIGISGPDSGAVAVLKYNGIITDTIKSWRNNILRTQESECACVNGSCFTIMTDGPSDGQASYKIFRIEKGKIVKSVEMNAPNYHYEECSCYPDSSEITCVCRDNWHGSNRPWVSFNQNLEYQIGYICSGVFGDNPRPNDKTGSCGPVSSNGANGVKGFSFKYGNGVWIGRTKSISSRKGFEMIWDPNGWTGTDNNFSIKQDIVGIKEWSGYSGSFVQHPELTGLDCIRPCFWVELIRGRPEENTIWTSGSSISFCGVNSDTVGWSWPDGAELPFTIDK

SEQ ID NO: 25726 - protein, 469 aa, Artificial Sequence; identical to SEQ ID NO: 25725
  derived and/or modified protein sequence (wt) from neuraminidase__InfluenzaA__AIM55884

SEQ ID NO: 25727 - protein, 469 aa, Artificial Sequence; identical to SEQ ID NO: 25725
  derived and/or modified protein sequence (wt) from neuraminidase__InfluenzaA__AIM55918

SEQ ID NO: 25728 - protein, 469 aa, Artificial Sequence
  derived and/or modified protein sequence (wt) from neuraminidase__InfluenzaA__AIM55929
MNPNQKIITIGSVCMTIGMANLILQIGNIISIWVSHSIQLGNQSQIETCNQSVITYENNTWVNQTYVNISNTNFAAGQSVVSVKLAGNSSLCPVSGWAIYSKDNSVRIGSKGDVFVIREPFISCSPLECRTFFLTQGALLNDKHSNGTIKDRSPYRTLMSCPTGEVPSPYNSRFESVAWSASACHDGINWLTIGISGPDSGAVAVLKYNGIITDTIKSWRNNILRTQESECACVNGSCFTIMTDGPSDGQASYKIFRIEKGKIVKSVEMNAPNYHYEECSCYPDSSEITCVCRDNWHGSNRPWVSFNQNLEYQIGYICSGVFGDNPRPNDKTGSCGPVSSNGANGVKGFSFKYGNGVWIGRTKSISSRKGFEMIWDPNGWTGTDNNFSIKQDIVGIKEWSGYSGSFVQHPELTGLDCIRPCFWVELIRGRPEENTIWTSGSSISFCGVNSDTVGWSWPDGAELPFTIDK

SEQ ID NO: 25729 - protein, 469 aa, Artificial Sequence
  derived and/or modified protein sequence (wt) from neuraminidase__InfluenzaA__AIM55940
MNPNQKIITIGSVCMTIGMANLILQIGNIISIWVSHSIQLGNQSQIETCNQSVITYENNTWVNQTYVNISSTNFAAGQSVVPVKLAGNSSLCPVSGWAIYSKDNSVRIGSKGDVFVIREPFISCSPLECRTFFLTQGALLNDKHSNGTIKDRSPYRTLMSCPIGEVPSPYNSRFESVAWSASACHDGINWLTIGISGPDSGAVAVLKYNGIITDTIKSWRNNILRTQESECACVNGSCFTIMTDGPSDGQASYKIFRIEKGKIVKSVEMNAPNYHYEECSCYPDSSEITCVCRDNWHGSNRPWVSFNQNLEYQIGYICSGVFGDNPRPNDKTGSCGPVSSNGANGVKGFSFKYGNGVWIGRTKSISSRKGFEMIWDPNGWTGTDNNFSIKQDIVGIKEWSGYSGSFVQHPELTGLDCIRPCFWVELIRGRPEENTIWTSGSSISFCGVNSDTVGWSWPDGAELPFTIDK

SEQ ID NO: 25730 - protein, 469 aa, Artificial Sequence
  derived and/or modified protein sequence (wt) from neuraminidase__InfluenzaA__AIM55965
MNPNQKIITIGSVCMTIGMANLILQIGNIISIWVSHSIQLGNQSQIETCNQSVITYENNTWVNQTYVNISNTNFAAGQSVVPVKLAGNSSLCPVSGWAIYSKDNSVRIGSKGDVFVIREPFISCSPLECRTFFLTQGALLNDKHSNGTIKDRSPYRTLMSCPIGEVPSPYNSRFESVAWSASACHDGINWLTIGISGPDSGAVAVLKYNGIITDTIKSWRNNILRTQESECACVNGSCFTIMTDGPSDGQASYKIFRIEKGKIVKSVEMNAPNYHYEECSCYPDSSEITCVCRDNWHGSNRPWVSFNQNLEYQIGYICSGVFGDNPRPNDKTGSCGPVSSNGANGVKGFSFKYGNGVWIGRTKSISSRKGFEMIWDPNGWTGTDNNFSIKQDIVGIKEWSGYSGSFVQHPELTGLDCIRPCFWVELIRGRPEENTIWTSGSSISFCGVNSDAVGWSWPDGAELPFTIDK

SEQ ID NO: 25731 - protein, 469 aa, Artificial Sequence
  derived and/or modified protein sequence (wt) from neuraminidase__InfluenzaA__AIM55976
MNPNQKIITIGSVCMTIGMANLILQIGNIISIWVSHSIQLGNQSQIETCNQSVITYENNTWVNQTYVNISNTNFAAGQSVVSVKLAGNSSLCPVSGWAIYSKDNSVRIGSKGDVFVIREPFISCSPLECRTFFLTQGALLNDKHSNGTIKDRSPYRTLMSCPIGEVPSPYNSRFESVAWSASACHDGINWLTIGISGPDSGAVAVLKYNGIITDTIKSWRNNILRTQESECACVNGSCFTIMTDGPSDGQASYKIFRIEKGKIVKSVEMNAPNYHYEECSCYPDSSEITCVCRDNWHGSNRPWVSFNQNLEYQIGYICSGVFGDNPRPNDKTGSCGPVSSNGANGVKGFSFKYGNGVWIGRTKSISSRKGFEMIWDPNGWTGTDNNFSIKQDIVGIKEWSGYSGSFVQHPELTGLDCIRPCFWVELIRGRPEENTIWTSGSSISFCGVNSDTVGWSWPDGAELPFTIDK

SEQ ID NO: 25732 - protein, 469 aa, Artificial Sequence
  derived and/or modified protein sequence (wt) from neuraminidase__InfluenzaA__AIM55987
MNPNQKIITIGSVCMTIGMANLILQIGNIISIWVSHSIQLGNQSQIETCNQSVITYENNTWVNQTYVNISNTNFAAGQSVVSVKLAGNSSLCPVSGWAIYSKDNSVRIGSKGDVFVIREPFISCSPLECRTFFLTQGALLNDKHSNGTIKDRSPYRTLMSCPTGEVPSPYNSRFESVAWSASACHDGINWLTIGISGPDSGAVAVLKYNGIITDTIKSWRNNILRTQESECACVNGSCFTIMTDGPSDGQASYKIFRIEKGKIVKSVEMNAPNYHYEECSCYPDSSEITCVCRDNWHGSNRPWVSFNQNLEYQIGYICSGVFGDNPRPNDKTGSCGPVSSNGANGVKGFSFKYGNGVWIGRTKSISSRKGFEMIWDPNGWTGTDNNFSIKQDIVGIKEWSGYSGSFVQHPELTGLDCIRPCFWVELIRGRPEENTIWTSGSSISFCGVNSDTVDWSWPDGAELPFTIDK

SEQ ID NO: 25733 - protein, 469 aa, Artificial Sequence
  derived and/or modified protein sequence (wt) from neuraminidase__InfluenzaA__AIM55998
MNPNQKIITIGSVCMTIGMANLILQIGNTISIWVSHSIQLGNQSQIETCNQSVITYENNTWVNQTYVNISNTNFAAGQSVVPVKLAGNSSLCPVSGWAIYSKDNSVRIGSKGDVFVIREPFISCSPLECRTFFLTQGALLNDKHSNGTIKDRSPYRTLMSCPIGEVPSPYNSRFESVAWSASACHDGINWLTIGISGPDSGAVAVLKYNGIITDTIKSWRNNILRTQESECACVNGSCFTIMTDGPSDGQASYKIFRIEKGKIVKSVEMNAPNYHYEECSCYPDSSEITCVCRDNWHGSNRPWVSFNQNLEYQIGYICSGVFGDNPRPNDKTGSCGPVSSNGANGVKGFSFKYGNGVWIGRTKSISSRKGFEMIWDPNGWTGTDNKFSIKQDIVGINEWSGYSGSFVQHPELTGLDCIRPCFWVELIRGRPEENTIWTSGSSISFCGVKSDTVGWSWPDGAELPFTIDK

SEQ ID NO: 25734 - protein, 469 aa, Artificial Sequence; identical to SEQ ID NO: 25731
  derived and/or modified protein sequence (wt) from neuraminidase__InfluenzaA__AIM56009

SEQ ID NO: 25735 - protein, 469 aa, Artificial Sequence; identical to SEQ ID NO: 25731
  derived and/or modified protein sequence (wt) from neuraminidase__InfluenzaA__AIM56020

SEQ ID NO: 25736 - protein, 469 aa, Artificial Sequence; identical to SEQ ID NO: 25731
  derived and/or modified protein sequence (wt) from neuraminidase__InfluenzaA__AIM56031

SEQ ID NO: 25737 - protein, 469 aa, Artificial Sequence
  derived and/or modified protein sequence (wt) from neuraminidase__InfluenzaA__AIM56042
MNPNQKIITIGSVCMTIGMANLILQIGNIISIWVSHSIQLGNQSQIETCNQSVITYENNTWVNQTYVNISNTNFAAGQSVVPVKLAGNSSLCPVSGWAIYSKDNSVRIGSKGDVFVIREPFISCSPLECRTFFLTQGALLNDKHSNGTIKDRSPYRTLMSCPIGEVPSPYNSRFESVAWSASACHDGINWLTIGISGPDSGAVAVLKYNGIITDTIKSWRNNILRTQESECACVNGSCFTIMTDGPSNGQASYKIFRIEKGKIVKSVEMNAPNYHYEECSCYPDSSEITCVCRDNWHGSNRPWVSFNQNLEYQIGYICSGVFGDNPRPNDKTGSCGPVSSNGANGVKGFSFKYGNGVWIGRTKSISSRKGFEMIWDPNGWTGTDNNFSIKQDIVGIKEWSGYSGSFVQHPELTGLDCIRPCFWVELIRGRPEENTIWTSGSSISFCGVNSDTVGWSWPDGAELPFTIDK

SEQ ID NO: 25738 - protein, 469 aa, Artificial Sequence
  derived and/or modified protein sequence (wt) from neuraminidase__InfluenzaA__AIM56053
MNPNQKIITIGSVCMTIGMANLILQIGNIISIWVSHSIQLGNQSQIETCNQSVITYENNTWVNQTYVNISNTNFAAGQSVVSVKLAGNSSLCPVSGWAIYSKDNSVRIGSKGDVFVIREPFISCSPLECRTFFLTQGALLNDKHSNGTIKDRSPYRTLMSCPIGEVPSPYNSRFESVAWSASACHDGINWLTIGISGPDSGAVAVLKYNGIITDTIKSWRNNILRTQESECACVNGSCFTIMTDGPSDEQASYKIFRIEKGKIVKSVEMNAPNYHYEECSCYPDSSEITCVCRDNWHGSNRPWVSFNQNLEYQIGYICSGVFGDNPRPNDKTGSCGPVSSNGANGVKGFSFKYGNGVWIGRTKSISSRKGFEMIWDPNGWTGTDNNFSIKQDIVGIKEWSGYSGSFVQHPELTGLDCIRPCFWVELIRGRPEENTIWTSGSSISFCGVNSDTVGWSWPDGAELPFTIDK

SEQ ID NO: 25739 - protein, 469 aa, Artificial Sequence
  derived and/or modified protein sequence (wt) from neuraminidase__InfluenzaA__AIM56064
MNPNQKIITIGSVCMTIGMANLILQIGNIISIWVSHSIQLGNQSQIETCNQSVITYENNTWVNQTYVNISNTNFAAGQSVVPVKLAGNSSLCPVSGWAIYSKDNSVRIGSKGDVFVIREPFISCSPLECRTFFLTQGALLNDKHSNGTIKDRSPYRTLMSCPIGEVPSPYNSRFESVAWSASACHDGINWLTIGISGPDSGAVAVLKYNGIITDTIKSWRNNILRTQESECACVNGSCFTIMTDGPSDGQASYKIFRIEKGKIVKSVEMNAPNYHYEECSCYPDSSEITCVCRDNWHGSNRPWVSFNQNLEYQIGYICSGVFGDNPRPNDKTGSCGPVSSNGANGVKGFSFKYGNGVWIGRTKSISSRKGFEMIWDPNGWTGTDNNFSIKQDIVGIKEWSGYSGSFVQHPELTGLDCIRPCFWVELVRGRPEENTIWTSGSSISFCGVNSDTVGWSWPDGAELPFTIDK

SEQ ID NO: 25740 - protein, 469 aa, Artificial Sequence
  derived and/or modified protein sequence (wt) from neuraminidase__InfluenzaA__AIM56086
MNPNQKIITIGSVCMTIGMANLILQIGNIISIWVSHSIQLGNQSHIETCNQSVITYENNTWVNQTYVNISNTNFAAGQSVVPVKLAGNSSLCPVSGWAIYSKDNSVRIGSKGDVFVIREPFISCSPLECRTFFLTQGALLNDKHSNGTIKDRSPYRTLMSCPIGEVPSPYNSRFESVAWSASACHDGINWLTIGISGPDNGAVAVLKYNGIITDTIKSWRNNILRTQESECACVNGSCFTIMTDGPSDGQASYKIFRIEKGKIVKSVEMNAPNYHYEECSCYPDSSEITCVCRDNWHGSNRPWVSFNQNLEYQIGYICSGVFGDNPRPNDKTGSCGPVTSNGANGVKGFSFKYGNGVWIGRTKSISSRKGFEMIWDPNGWTGTDNNFSIKQDIIGIKEWSGYSGSFVQHPELTGLDCIRPCFWVELIRGRPEENTIWTSGSSISFCGVNSDTVGWSWPDGAELPFTIDK

SEQ ID NO: 25741 - protein, 469 aa, Artificial Sequence
  derived and/or modified protein sequence (wt) from neuraminidase__InfluenzaA__AIM56097
MNPNQKIITIGSVCMTIGMANLILQIGNIISIWVSHSIQLGNQSQIETCNQSVITYENNTWVNQTYVNISNTNFAAEQSVVSVKLAGNSSLCPVSGWAIYSKDNSVRIGSKGDVFVIREPFISCSPLECRTFFLTQGALLNDKHSNGTIKDRSPYRTLMSCPIGEVPSPYNSRFESVAWSASACHDGINWLTIGISGPDSGAVAVLKYNGIITDTIKSWRNNILRTQESECACVNGSCFTIMTDGPSDGQASYKIFRIEKGKIVKSVEMNAPNYHYEECSCYPDSSEITCVCRDNWHGSNRPWVSFNQNLEYQIGYICSGVFGDNPRPNDKTGSCGPVSSNGANGVKGFSFKYGNGVWIGRTKSISSRKGFEMIWDPNGWTGTDNNFSIKQDIVGIKEWSGYSGSFVQHPELTGLDCIRPCFWVELIRGRPEENTIWTSGSSISFCGVNSDTVGWSWPDGAELPFTIDK

SEQ ID NO: 25742 - protein, 469 aa, Artificial Sequence
  derived and/or modified protein sequence (wt) from neuraminidase__InfluenzaA__AIM56108
MNPNQKIITIGSVCMTIGMANLILQIGNIISIWVSHSIQLGNQSQIETCNQSVITYENNTWINQTYVNISNTNFAAGQSVVPVKLAGNSSLCPVSGWAIYSKDNSVRIGSKGDVFVIREPFISCSPLECRTFFLTQGALLNDKHSNGTIKDRSPYRTLMSCPIGEVPSPYNSRFESVAWSASACHDGINWLTIGISGPDSGAVAVLKYNGIITDTIKSWRNNILRTQESECACVNGSCFTIMTDGPSDGQASYKIFRIEKGKIVKSVEMNAPNYHYEECSCYPDSSEITCVCRDNWHGSNRPWVSFNQNLEYQIGYICSGVFGDNPRPNDKTGSCGPVSSNGANGVKGFSFKYGNGVWIGRTKSISSRKGFEMIWDPNGWTGTDNNFSIKQDIVGIKEWSGYSGSFVQHPELTGLDCIRPCFWVELIRGRPEENTIWTSGSSISFCGVNSDTVGWSWPDGAELPFTIDK

SEQ ID NO: 25743 - protein, 469 aa, Artificial Sequence
  derived and/or modified protein sequence (wt) from neuraminidase__InfluenzaA__AIM56119
MNPNQKIITIGSVCMTIGMANLILQIGNIISIWVSHSIQIGNQSQIETCNQSVITYENNTWVNQTYVNISNTNFAAGQSVVSVKLAGNSSLCPVSGWAIYSKDNSVRIGSKGDVFVIREPFISCSPLECRTFFLTQGALLNDKHSNGTIKDRSPYRTLMSCPIGEVPSPYNSRFESVAWSASACHDGINWLTIGISGPDSGAVAVLKYNGIITDTIKSWRNNILRTQESECACVNGSCFTIMTDGPSDGQASYKIFRIEKGKIVKSVEMNAPNYHYEECSCYPDSSEITCVCRDNWHGSNRPWVSFNQNLEYQIGYICSGVFGDNPRPNDKTGSCGPVSSNGANGVKGFSFKYGNGVWIGRTKSISSRKGFEMIWDPNGWTGTDNKFSIKQDIVGINEWSGYSGSFVQHPELTGLDCIRPCFWVELIRGRPEENTIWTSGSSISFCGVNSDTVGWSWPDGAELPFTIDK

SEQ ID NO: 25744 - protein, 469 aa, Artificial Sequence
  derived and/or modified protein sequence (wt) from neuraminidase__InfluenzaA__AIM56130
MNPNQKIITIGSVCMTIGMANLILQIGNIISIWVSHSIQLGNQSQIETCNQSVITYENNTWVNQTYVNISNTNFAAGQSVVPVKLAGNSSLCPVSGWAIYSKDNSVRIGSKGDVFVIREPFISCSPLECRTFFLTQGALLNDKHSNGTIKDRSPYRTLMSCPIGEVPSPYNSRFESVAWSASACHDGINWLTIGISGPDSGAVAVLKYNGIITDTIKSWRNNILRTQESECACVNGSCFTIMTDGPSDGQASYKIFRIEKGKIVKSVEMNAPNYHYEECSCYPDSSEITCVCRDNWHGSNRPWVSFNQNLEYQIGYICSGVFGDNPRPNDKTGSCGPVSSNGANGVKGFSFKYGNGVWIGRTKSISSRKGFEMIWDPNGWTGTDNKFSIKQDIVGINEWSGYSGSFVQHPELTGLDCIRPCFWVELIRGRPEENTIWTSGSSISFCGVKSDTVGWSWPDGAELPFTIDK

SEQ ID NO: 25745 - protein, 469 aa, Artificial Sequence
  derived and/or modified protein sequence (wt) from neuraminidase__InfluenzaA__AIM56141
MNPNQKIITIGSVCMTIGMANLILQIGNIISIWVSHSIQLGNQSQIETCNQSVIIYENNTWVNQTYVNISNTNFAAGQSVVSVKLAGNSSLCPVSGWAIYSKDNSVRIGSKGDVFVIREPFISCSPLECRTFFLTQGALLNDKHSNGTIKDRSPYRTLMSCPIGEVPSPYNSRFESVAWSASACHDGINWLTIGISGPDSGAVAVLKYNGIITDTIKSWRNNILRTQESECACVNGSCFTIMTDGPSDGQASYKIFRIEKGKIVKSVEMNAPNYHYEECSCYPDSSEITCVCRDNWHGSNRPWVSFNQNLEYQIGYICSGVFGDNPRPNDKTGSCGPVSSNGANGVKGFSFKYGNGVWIGRTKSISSRKGFEMIWDPNGWTGTDNNFSIKQDIVGIKEWSGYSGSFVQHPELTGLDCIRPCFWVELIRGRPEENTIWTSGSSISFCGVNSDTVGWSWPDGAELPFTIDK

SEQ ID NO: 25746 - protein, 469 aa, Artificial Sequence; identical to SEQ ID NO: 25731
  derived and/or modified protein sequence (wt) from neuraminidase__InfluenzaA__AIM56152

SEQ ID NO: 25747 - protein, 469 aa, Artificial Sequence
  derived and/or modified protein sequence (wt) from neuraminidase__InfluenzaA__AIM56163
MNPNQKIITIGSVCMTIGMANLILQIGNIISIWVSHSIQLGNQSHIETCNQSVITYENNTWVNQTYVNISNTNFAAGQSVVPVKLAGNSSLCPVSGWAIYSKDNSVRIGSKGDVFVIREPFISCSPLECRTFFLTQGALLNDKHSNGTIKDRSPYRTLMSCPIGEVPSPYNSRFESVAWSASACHDGINWLTIGISGPDNGAVAVLKYNGIITDTIKSWRNNILRTQESECACVNGSCFTIMTDGPSDGQASYKIFRIEKGKIVKSVEMNAPNYHYEECSCYPDSSEITCVCRDNWHGSNRPWVSFNQNLEYQIGYICSGVFGDNPRPNDKTGSCGPVTSNGANGVKGFSFKYGNGVWIGRTKSISSRKGFEMIWDPNGWTGTDNNFSIKQDIVGIKEWSGYSGSFVQHPELTGLDCIRPCFWVELIRGRPEENTIWTSGSSISFCGVNSDTVGWSWPDGAELPFTIDK

SEQ ID NO: 25748 - protein, 469 aa, Artificial Sequence
  derived and/or modified protein sequence (wt) from neuraminidase__InfluenzaA__AIM56174
MNPNQKIITIGSVCMTIGMANLILQIGNIISIWVSHSIQLGNQSQIETCNQSVITYENNTWVNQTYVNISNTNFAAGQSVVPVKLAGNSSLCPVSGWAIYSKDNSVRIGSKGDVFVIREPFISCSPLECRTFFLTQGALLNDKHSNGTIKDRSPYRTLMSCPIGEVPSPYNSRFESVAWSASACHDGINWLTIGISGPDSGAVAVLKYNGIITDTIKSWRNNILRTQESECACVNGSCFTIMTDGPSDGQASYKIFRIEKGKIVKSVEMNAPNYHYEECSCYPDSSEITCVCRDNWHGSNRPWVSFNQNLEYQIGYICSGVFGDNPRPNDKTGSCGPVSSNGANGVKGFSFKYGNGVWIGRTKSISSRKGFEMIWDPNGWTGTDNNFSIKQDIVGIKEWSGYSGSFVQHPELTGLDCIRPCFWVELIRGRPEENTIWTSGSSISFCGVNSDTVGWSWPDGAELPFTVDK

SEQ ID NO: 25749 - protein, 469 aa, Artificial Sequence; identical to SEQ ID NO: 25744
  derived and/or modified protein sequence (wt) from neuraminidase__InfluenzaA__AIM56185

SEQ ID NO: 25750 - protein, 469 aa, Artificial Sequence; identical to SEQ ID NO: 25743
  derived and/or modified protein sequence (wt) from neuraminidase__InfluenzaA__AIM56196

SEQ ID NO: 25751 - protein, 469 aa, Artificial Sequence; identical to SEQ ID NO: 25725
  derived and/or modified protein sequence (wt) from neuraminidase__InfluenzaA__AIM56207

SEQ ID NO: 25752 - protein, 469 aa, Artificial Sequence
  derived and/or modified protein sequence (wt) from neuraminidase__InfluenzaA__AIM56229
MNPNQKIITIGSVCMTIGMANLILQIGNTISIWVSHSIQIGNQSQIETCNQSVITYENNTWVNQTYVNISNTNFAAGQSVVSVKLAGNSSLCPVSGWAIYSKDNSVRIGSKGDVFVIREPFISCSPLECRTFFLTQGALLNDKHSNGTIKDRSPYRTLMSCPIGEVPSPYNSRFESVAWSASACHDGINWLTIGISGPDSGAVAVLKYNGIITDTIKSWRNNILRTQESECACVNGSCFTIMTDGPSDGHASYKIFRIEKGKIVKSVEMNAPNYHYEECSCYPDSSEITCVCRDNWHGSNRPWVSFNQNLEYQIGYICSGVFGDNPRPNDKTGSCGPVSSNGANGVKGFSFKYGNGVWIGRTKSISSRKGFEMIWDPNGWTGTDNKFSIKQDIVGINEWSGYSGSFVQHPELTGLDCIRPCFWVELIRGRPEENTIWTSGSSISFCGVNSDTVGWSWPDGAELPFTIDK

SEQ ID NO: 25753 - protein, 469 aa, Artificial Sequence
  derived and/or modified protein sequence (wt) from neuraminidase__InfluenzaA__AIM56240
MNPNQKIITIGSVCMTIGMANLILQIGNIISIWISHSIQVGNQSQIETCNQSVITYENNTWVNQTYVNISNTNFAAGQPVVSVKLAGNSSLCSVSGWAIYSKDNSVRIGSKGDVFVIREPFISCSPLECRTFFLTQGALLNDKHSNGTIKDRSPYRTLMSCPIGEVPSPYNSRFESVAWSASACHDGINWLTIGISGPDSGAVAVLKYNGIITDTIKSWRNDILRTQESECACVNGSCFTIMTDGPSDGQASYKIFRIEKGKIVKSVEMNAPNYHYEECSCYPDSSEITCVCRDNWHGSNRPWVSFNQNLEYQIGYICSGIFGDNPRPNDKTGSCGPVSSNGANGVKGFSFKYGNGVWIGRTKSISSRKGFEMIWDPNGWTGTDNNFSIKQDIVGINEWSGYSGSFVQHPELTGLDCIRPCFWVELIRGRPKENTIWTSGSSISFCGVNSDTVGWSWPDGAELPFTIDK

SEQ ID NO: 25754 - protein, 469 aa, Artificial Sequence
  derived and/or modified protein sequence (wt) from neuraminidase__InfluenzaA__AIM56251
MNPNQKIITIGSVCMTIGMANLILQIGNIISIWVSHSIQLGNQSHIETCNQSVITYENNTWVNQTYVNISNTNFAAGQSVVPVKLAGNSSLCPVSGWAIYSKDNSVRIGSKGDVFVIREPFISCSPLECRTFFLTQGALLNDKHSNGTIKDRSPYRTLMSCPIGEVPSPYNSRFESVAWSASACHDGINWLTIGISGPDSGAVAVLKYNGIITDTIKSWRNNILRTQESECACVNGSCFTIMTDGPSDGQASYKIFRIEKGKIVKSVEMNAPNYHYEECSCYPDSSEITCVCRDNWHGSNRPWVSFNQNLEYQIGYICSGVFGDNPRPNDKTGSCGPVSSNGANGVKGFSFKYGNGVWIGRTKSISSRKGFEMIWDPNGWTGTDNNFSIKQDIVGIKEWSGYSGSFVQHPELTGLDCIRPCFWVELIRGRPEENTIWTSGSSISFCGVNSDTVGWSWPDGAELPFTIDK

SEQ ID NO: 25755 - protein, 469 aa, Artificial Sequence; identical to SEQ ID NO: 25754
  derived and/or modified protein sequence (wt) from neuraminidase__InfluenzaA__AIM56262

SEQ ID NO: 25756 - protein, 469 aa, Artificial Sequence; identical to SEQ ID NO: 25725
  derived and/or modified protein sequence (wt) from neuraminidase__InfluenzaA__AIM56273

SEQ ID NO: 25757 - protein, 469 aa, Artificial Sequence
  derived and/or modified protein sequence (wt) from neuraminidase__InfluenzaA__AIM56284
MNPNQKIITIGSVCITIGMANLILQIGNIISIWVSHSIQIGNQSQIETCNQSVITYENNTWVNQTYVNISNTNFAAGQSVVSVKLAGNSSLCPVSGWAIYSKDNSVRIGSKGDVFVIREPFISCSPLECRTFFLTQGALLNDKHSNGTIKDRSPYRTLMSCPIGEVPSPYNSRFESVAWSASACHDGINWLTIGISGPDSGAVAVLKYNGIITDTIKSWRNNILRTQESECACVNGSCFTIMTDGPSDGQASYKIFRIEKGKIVKSVEMNAPNYHYEECSCYPDSSEITCVCRDNWHGSNRPWVSFNQNLEYQIGYICSGVFGDNPRPNDKTGSCGPVSSNGANGVKGFSFKYGNGVWIGRTKSISSRKGFEMIWDPNGWTGTDNKFSIKQDVVGINEWSGYSGSFVQHPELTGLDCIRPCFWVELIRGRPEENTIWTSGSSISFCGVNSDTVGWSWPDGAELPFTIDK

SEQ ID NO: 25758 - protein, 469 aa, Artificial Sequence; identical to SEQ ID NO: 25725
  derived and/or modified protein sequence (wt) from neuraminidase__InfluenzaA__AIM56295

SEQ ID NO: 25759 - protein, 469 aa, Artificial Sequence; identical to SEQ ID NO: 25725
  derived and/or modified protein sequence (wt) from neuraminidase__InfluenzaA__AIM56306

SEQ ID NO: 25760 - protein, 469 aa, Artificial Sequence; identical to SEQ ID NO: 25725
  derived and/or modified protein sequence (wt) from neuraminidase__InfluenzaA__AIM56317

SEQ ID NO: 25761 - protein, 469 aa, Artificial Sequence; identical to SEQ ID NO: 25744
  derived and/or modified protein sequence (wt) from neuraminidase__InfluenzaA__AIM56339

SEQ ID NO: 25762 - protein, 469 aa, Artificial Sequence
  derived and/or modified protein sequence (wt) from neuraminidase__InfluenzaA__AIM56350
MNPNQKIITIGSVCMTIGMANLILQIGNIISIWVSHSIQLGNQSQIETCNQSVITYENNTWVNQTYVNISNTNFAAGQSVVPVKLAGNSSLCPVSGWAIYSKDNSVRIGSKGDVFVIREPFISCSPLECRTFFLTQGALLNDKHSNGTIKDRSPYRTLMSCPIGEVPSPYNSRFESVAWSASACHDGINWLTIGISGPDSGAVAVLKYNGIITDTIKSWRNNILRTQESECACVNGSCFTIMTDGPSDGQASYKIFRIEKGKIVKSVEMNAPNYHYEECSCYPDSSEITCVCRDNWHGSNRPWVSFNQNLEYQIGYICSGVFGDNPRPNDKTGSCGPVSSNGANGVKGFSFKYGNGVWIGRTKSISSRKGFEMIWDPNGWTGTDNNFSIKQDIVGIKEWSGYSGSFVQHPELTGLDCIRPCFWVELIRGRPEENTIWTSGSSISFCGINSDTVGWSWPDGAELPFTIDK

SEQ ID NO: 25763 - protein, 469 aa, Artificial Sequence; identical to SEQ ID NO: 25754
  derived and/or modified protein sequence (wt) from neuraminidase__InfluenzaA__AIM56361

SEQ ID NO: 25764 - protein, 469 aa, Artificial Sequence; identical to SEQ ID NO: 25725
  derived and/or modified protein sequence (wt) from neuraminidase__InfluenzaA__AIM56372

SEQ ID NO: 25765 - protein, 469 aa, Artificial Sequence; identical to SEQ ID NO: 25754
  derived and/or modified protein sequence (wt) from neuraminidase__InfluenzaA__AIM56383

SEQ ID NO: 25766 - protein, 469 aa, Artificial Sequence
  derived and/or modified protein sequence (wt) from neuraminidase__InfluenzaA__AIM56394
MNPNQKIITIGSVCMTIGMANLILQIGNIISIWVSHSIQIGNQSQIETCNQSVITYENNTWVNQTYVNISNTNFAAGQSVVSVKLAGNSSLCPVSGWAIYSKDNSVRIGSKGDVFVIREPFISCSPLECRTFFLTQGALLNDKHSNGTIKDRSPYRTLMSCPIGEVPSPYNSRFESVAWSASACHDGINWLTIGISGPDSGAVAVLKYNGIITDTIKSWRNNILRTQESECACVNGSCFTIMTDGPSDGQASYKIFRIEKGKIVKSVEMNAPNYHYEECSCYPDSSEITCVCRDNWHGSNRPWVSFNQNLEYQIGYICSGIFGDNPRPNDKTGSCGPVSSNGANGVKGFSFKYGNGVWIGRTKSISSRKGFEMIWDPNGWTGTDNKFSIKQDIVGINEWSGYSGSFVQHPELTGLDCIRPCFWVELIRGRPEENTIWTSGSSISFCGVNSDTVGWSWPDGAELPFTIDK

SEQ ID NO: 25767 - protein, 469 aa, Artificial Sequence; identical to SEQ ID NO: 25743
  derived and/or modified protein sequence (wt) from neuraminidase__InfluenzaA__AIM56405

SEQ ID NO: 25768 - protein, 469 aa, Artificial Sequence
  derived and/or modified protein sequence (wt) from neuraminidase__InfluenzaA__AIM56416
MNPNQKIITIGSVCMTIGMANLILQIGNIISIWVSHSIQLGNQSHIETCNQSVITYENNTWVNQTYVNISNINFAAGQSVVPVKLAGNSSLCPVSGWAIYSKDNSVRIGSKGDVFVIREPFISCSPLECRTFFLTQGALLNDKHSNGTIKDRSPYRTLMSCPIGEVPSPYNSRFESVAWSASACHDGINWLTIGISGPDNGAVAVLKYNGIITDTIKSWRNNILRTQESECACVNGSCFTIMTDGPSDGQASYKIFRIEKGKIVKSVEMNAPNYHYEECSCYPDSSEITCVCRDNWHGSNRPWVSFNQNLEYQIGYICSGVFGDNPRPNDKTGSCGPVTSNGANGVKGFSFKYGNGVWIGRTKSISSRKGFEMIWDPNGWTGTDNNFSIKQDIVGIKEWSGYSGSFVQHPELTGLDCIRPCFWVELIRGRPEENTIWTSGSSISFCGVNSDTVGWSWPDGAELPFTIDK

SEQ ID NO: 25769 - protein, 469 aa, Artificial Sequence; identical to SEQ ID NO: 25743
  derived and/or modified protein sequence (wt) from neuraminidase__InfluenzaA__AIM56428

SEQ ID NO: 25770 - protein, 469 aa, Artificial Sequence; identical to SEQ ID NO: 25725
  derived and/or modified protein sequence (wt) from neuraminidase__InfluenzaA__AIM56439

SEQ ID NO: 25771 - protein, 469 aa, Artificial Sequence
  derived and/or modified protein sequence (wt) from neuraminidase__InfluenzaA__AIM56450
MNPNQKIITIGSVCMTIGMANLILQIGNIISIWISHSIQVGNQSQIETCNQSVITYENNTWVNQTYVNISNTNFAAGQPVVSVKLAGNSSLCPVSGWAIYSKDNSVRVGSKGDVFVIREPFISCSPLECRTFFLTQGALLNDKHSNGTIKDRSPYRTLMSCPIGEVPSPYNSRFESVAWSASACHDGINWLTIGISGPDSGAVAVLKYNGIITDTIKSWRNDILRTQESECACVNGSCFTIMTDGPSDGQASYKIFRIEKGKIVKSVEMNAPNYHYEECSCYPDSSEITCVCRDNWHGSNRPWVSFNQNLEYKIGYICSGIFGDNPRPNDKTGSCGPVSSNGANGVKGFSFKYGNGVWIGRTKSISSRKGFEMIWDPNGWTGTDNNFSVKQDIVGINEWSGYSGSFVQHPELTGLDCIRPCFWVELIRGRPKENTIWTSGSSISFCGVNSDTVGWSWPDGAELPFTIDK

SEQ ID NO: 25772 - protein, 469 aa, Artificial Sequence
  derived and/or modified protein sequence (wt) from neuraminidase__InfluenzaA__AIM56461
MNPNQKIITIGSVCMTIGMANLILQIGNIISIWVSHSIQIGNQSQIETCNQSVITYENNTWVNQTYVNISNTNFAAGQSVVSVKLAGNSSLCPVSGWAIYSKDNSVRIGSKGDVFVIREPFISCSPLECRTFFLTQGALLNDKHSNGTIKDRSPYRTLMSCPIGEVPSPYNSRFESVAWSASACHDGINWLTIGISGPDSGAVAVLKYNGIITDTIKSWKNNILRTQESECACVNGSCFTIMTDGPSDGQASYKIFRIEKGKIVKSVEMNAPNYHYEECSCYPDSSEITCVCRDNWHGSNRPWVSFNQNLEYQIGYICSGVFGDNPRPNDKTGSCGPVSSNGANGVKGFSFKYGNGVWIGRTKSISSRKGFEMIWDPNGWTGTDNKFSIKQDIVGVNEWSGYSGSFVQHPELTGLDCIRPCFWVELIRGRPEENTIWTSGSSISFCGVNSDTVGWSWPDGAELPFTIDK

SEQ ID NO: 25773 - protein, 469 aa, Artificial Sequence
  derived and/or modified protein sequence (wt) from neuraminidase__InfluenzaA__AIM56472
MNPNQKIITIGSVCMTIGMANLILQIGNIISIWVSHSIQIGNQSQIETCNQSVITYENNTWVNQTYVNISNTNFAAGQSVVSVKLAGNSSLCPVSGWAIYSKDNSVRIGSKGDVFVIREPFISCSPLECRTFFLTQGALLNDKHSNGTIKDRSPYRTLMSCPIGEVPSPYNSRFESVAWSASACNDGINWLTIGISGPDSGAVAVLKYNGIITDTIKSWRNNILRTQESECACVNGSCFTIMTDGPSDGQASYKIFRIEKGKIVKSVEMNAPNYHYEECSCYPDSSEITCVCRDNWHGSNRPWVSFNQNLEYQIGYICSGVFGDNPRPNDKTGSCGPVSSNGANGVKGFSFKYGNGVWIGRTKSISSRKGFEMIWDPNGWTGTDNKFSIKQDIVGINEWSGYSGSFVQHPELTGLDCIRPCFWVELIRGRPEENTIWTSGSSISFCGVNSDTVGWSWPDGAELPFTIDK

SEQ ID NO: 25774 - protein, 469 aa, Artificial Sequence; identical to SEQ ID NO: 25731
  derived and/or modified protein sequence (wt) from neuraminidase__InfluenzaA__AIM56483

SEQ ID NO: 25775 - protein, 469 aa, Artificial Sequence; identical to SEQ ID NO: 25754
  derived and/or modified protein sequence (wt) from neuraminidase__InfluenzaA__AIM56494

SEQ ID NO: 25776 - protein, 469 aa, Artificial Sequence; identical to SEQ ID NO: 25744
  derived and/or modified protein sequence (wt) from neuraminidase__InfluenzaA__AIM56505

SEQ ID NO: 25777 - protein, 469 aa, Artificial Sequence; identical to SEQ ID NO: 25743
  derived and/or modified protein sequence (wt) from neuraminidase__InfluenzaA__AIM56516

SEQ ID NO: 25778 - protein, 469 aa, Artificial Sequence
  derived and/or modified protein sequence (wt) from neuraminidase__InfluenzaA__AIM56527
MNPNQKIITIGSVCMTIGMANLILQIGNIISIWVSHSIQLGNQSQIETCNQSVITYENNTWVNQTYVNISNTNFAAEQSVVSVKLAGNSSLCPVSGWAIYSKDNSVRIGSKGDVFVIREPFISCSPLECRTFFLTQGALLNDKHSNGTIKDRSPYRTLMSCPIGEVPSPYNSRFESVAWSASACHDGINWLTIGISGPDSGAVAVLKYNGIITDTIKSWRNNILRTQESECACVNGSCFTIMTDGPSDGQASYKIFRIEKGKIVKSVEMNAPNYHYEECSCYPDSSEITCVCRDNWHGSNRPWVSFNQNLEYQIGYICSGVLGDNPRPNDKTGSCGPVSSNGANGVKGFSFKYGNGVWIGRTKSISSRKGFEMVWDPNGWTGTDNNFSIKQDIVGIKEWSGYSGSFVQHPELTGLDCIRPCFWVELIRGRPEENTIWTSGSSISFCGVNSDTVGWSWPDGAELPFTIDK

SEQ ID NO: 25779 - protein, 469 aa, Artificial Sequence; identical to SEQ ID NO: 25725
  derived and/or modified protein sequence (wt) from neuraminidase__InfluenzaA__AIM56538

SEQ ID NO: 25780 - protein, 469 aa, Artificial Sequence
  derived and/or modified protein sequence (wt) from neuraminidase__InfluenzaA__AIM56549
MNPNQKIITIGSVCMTIGMANLILQIGNIISIWVSHSIQIGNQSQIETCNQSVITYENNTWVNQTYVNISNTNFAAGQSVVSVKLAGNSSLCPVSGWAIYSKDNSVRIGSKGDVFVIREPFISCSPLECRTFFLTQGALLNDKHSNGTIKDRSPYRTLMSCPIGEVPSPYNSRFESVAWSASACHDGINWLTIGISGPDSGAVAVLKYNGIITDTIKSWRNNILRTQESECACVNGSCFTIMTDGPSDGQASYKIFRIEKGKIVKSVEMNAPNYHYEECSCYPDSSEVTCVCRDNWHGSNRPWVSFNQNLEYQIGYICSGVFGDNPRPNDKTGSCGPVSSNGANGVKGFSFKYGNGVWIGRTKSISSRKGFEMIWDPNGWTGTDNKFSIKQDIVGINEWSGYSGSFVQHPELTGLDCIRPCFWVELIRGRPEENTIWTSGSSISFCGVNSDTVGWSWPDGAELPFTIDK

SEQ ID NO: 25781 - protein, 469 aa, Artificial Sequence
  derived and/or modified protein sequence (wt) from neuraminidase__InfluenzaA__AIM56560
MNPNQKIITIGSVCMTIGMANLILQIGNIISIWVSHSIQLGNQSHIETCNQSVITYENNTWVNQTYVNISNTNFAAGQSVVPVKLAGNSSLCPVSGWAIHSKDNSVRIGSKGDVFVIREPFISCSPLECRTFFLTQGALLNDKHSNGTIKDRSPYRTLMSCPIGEVPSPYNSRFESVAWSASACHDGINWLTIGISGPDNGAVAVLKYNGIITDTIKSWRNNILRTQESECACVNGSCFTIMTDGPSDGQASYKIFRIEKGKIVKSVEMNAPNYHYEECSCYPDSSEITCVCRDNWHGSNRPWVSFNQNLEYQIGYICSGVFGDNPRPNDKTGSCGPVTSNGANGVKGFSFKYGNGVWIGRTKSISSRKGFEMIWDPNGWTGTDNNFSIKQDIVGIKEWSGYSGSFVQHPELTGLDCIRPCFWVELIRGRPEENTIWTSGSSISFCGVNSDTVGWSWPDGAELPFTIDK

SEQ ID NO: 25782 - protein, 469 aa, Artificial Sequence; identical to SEQ ID NO: 25731
  derived and/or modified protein sequence (wt) from neuraminidase__InfluenzaA__AIM56571

SEQ ID NO: 25783 - protein, 469 aa, Artificial Sequence
  derived and/or modified protein sequence (wt) from neuraminidase__InfluenzaA__AIM56582
MNPNQKIITIGSVCITIGMANLILQIGNIISIWVSHSIQLGNQSQIETCNQSVITYENNTWVNQTYVNISNTNFAAGQSVVSVKLAGNSSLCPVSGWAIYSKDNSVRIGSKGDVFVIREPFISCSPLECRTFFLTQGALLNDKHSNGTIKDRSPYRTLMSCPIGEVPSPYNSRFESVAWSASACHDGINWLTIGISGPDSGAVAVLKYNGIITDTIKSWRNNILRTQESECACVNGSCFTIMTDGPSDGQASYKIFRIEKGKIVKSVEMNAPNYHYEECSCYPDSSEITCVCRDNWHGSNRPWVSFNQNLEYQIGYICSGVFGDNPRPNDKTGSCGPVSSNGANGVKGFSFKYGNGVWIGRTKSISSRKGFEMIWDPNGWTGTDNNFSIKQDIVGIKEWSGYSGSFVQHPELTGLDCIRPCFWVELIRGRPEENTIWTSGSSISFCGVNSDTVGWSWPDGAELPFTIDK

SEQ ID NO: 25784 - protein, 469 aa, Artificial Sequence
  derived and/or modified protein sequence (wt) from neuraminidase__InfluenzaA__AIM56593
MNPNQKIITIGSVCMTIGMANLILQIGNIISIWVSHSIQLGNQSQIETCNQSVITYENNTWVNQTYVNISNTNFAAEQSVVSVKLAGNSSLCPVSGWAIYSKDNSVRIGSKGDVFVIREPFISCSPLECRTFFLTQGALLNDKHSNGTIKDRSPYRTLMSCPIGEVPSPYNSRFESVAWSASACHDGINWLTIGISGPDSGAVAVLKYNGIITDTIKSWRNNILRTQESECACVNGSCFTIMTDGPSDGQASYKIFRIEKGKIVKSVEMNAPNYHYEECSCYPDSSEITCVCRDNWHGSNRPWVSFNQNLEYQIGYICSGVLGDNPRPNDKTGSCGPVSSNGANGVKGFSFKYGNGVWIGRTKSISSRKGFEMIWDPNGWTETDNNFSIKQDIVGIKEWSGYSGSFVQHPELTGLDCIRPCFWVELIRGRPEENTIWTSGSSISFCGVNSDTVGWSWPDGAELPFTIDK

SEQ ID NO: 25785 - protein, 469 aa, Artificial Sequence
  derived and/or modified protein sequence (wt) from neuraminidase__InfluenzaA__AIM56604
MNPNQKIITIGSVCMTIGMANLILQIGNIISIWVSHSIQIGNQSQIETCNQSVITYENNTWVNQTYVNISNINFAAGQSVVSVKLAGNSSLCPVSGWAIYSKDNSVRIGSKGDVFVIREPFISCSPLECRTFFLTQGALLNDKHSNGTIKDRSPYRTLMSCPIGEVPSPYNSRFESVAWSASACHDGINWLTIGISGPDSGAVAVLKYNGIITDTIKSWRNNILRTQESECACVNGSCFTIMTDGPSDGQASYKIFRIEKGKIVKSVEMNAPNYHYEECSCYPDSSEITCVCRDNWHGSNRPWVSFNQNLEYQIGYICSGVFGDNPRPNDKTGSCGPVSSNGANGVKGFSFKYGNGVWIGRTKSISSRKGFEMIWDPNGWTGTDNKFSIKQDIVGINEWSGYSGSFVQHPELTGLDCIRPCFWVELIRGRPEENTIWTSGSSISFCGVNSDTVGWSWPDGAELPFTIDK

SEQ ID NO: 25786 - protein, 469 aa, Artificial Sequence
  derived and/or modified protein sequence (wt) from neuraminidase__InfluenzaA__AIM56615
MNPNQKIITIGSVCMTIGMANLILQIGNIISIWVSHSIQIGNQSQIETCNQSVITYENNTWVNQTYVDISNTNFAAGQSVVSVKLAGNSSLCPVSGWAIYSKDNSVRIGSKGDVFVIREPFISCSPLECRTFFLTQGALLNDKHSNGTIKDRSPYRTLMSCPIGEVPSPYNSRFESVAWSASACHDGINWLTIGISGPDSGAVAVLKYNGIITDTIKSWRNNILRTQESECACVNGSCFTIMTDGPSDGQASYKIFRIEKGKIVKSVEMNAPNYHYEECSCYPDSSEITCVCRDNWHGSNRPWVSFNQNLEYQIGYICSGVFGDNPRPNDKTGSCGPVSSNGANGVKGFSFKYSNGVWIGRTKSISSRKGFEMIWDPNGWTGTDNKFSIKQDIVGINEWSGYSGSFVQHPELTGLDCIRPCFWVELIRGRPEENTIWTSGSSISFCGVNSDTVGWSWPDGAELPFTIDK

SEQ ID NO: 25787 - protein, 469 aa, Artificial Sequence; identical to SEQ ID NO: 25780
  derived and/or modified protein sequence (wt) from neuraminidase__InfluenzaA__AIM56626

SEQ ID NO: 25788 - protein, 469 aa, Artificial Sequence; identical to SEQ ID NO: 25725
  derived and/or modified protein sequence (wt) from neuraminidase__InfluenzaA__AIM56637

SEQ ID NO: 25789 - protein, 469 aa, Artificial Sequence; identical to SEQ ID NO: 25731
  derived and/or modified protein sequence (wt) from neuraminidase__InfluenzaA__AIM56648

SEQ ID NO: 25790 - protein, 469 aa, Artificial Sequence
  derived and/or modified protein sequence (wt) from neuraminidase__InfluenzaA__AIM56659
MNPNQKIITIGSVCMTIGMANLILQIGNIISIWVSHSIQLGNQSHIETCNQSVITYENNTWVNQTYVNISNTNFAAGQSVVPVKLAGNSSLCPVSGWAIYSKDNSVRIGSKGDVFVIREPFISCSPLECRTFFLTQGALLNDKHSNGTIKDRSPYRTLMSCPIGEVPSPYNSRFESVAWSASACHDGINWLTIGISGPDSGAVAVLKYNGIITDTIKSWRNNILRTQESECACVNGSCFTIMTDGPSDGQASYKIFRIEKGKIVKSVEMNAPNYHYEECSCYPDSSEITCVCRDNWHGSNRPWVSFNQNLEYQIGYICSGVFGDNPRPNDKIGSCGPVSSNGANGVKGFSFKYGNGVWIGRTKSISSRKGFEMIWDPNGWTGTDNNFSIKQDIVGIKEWSGYSGSFVQHPELTGLDCIRPCFWVELIRGRPEEKTIWTSGSSISFCGVNSDTVGWSWPDGAELPFTIDK

SEQ ID NO: 25791 - protein, 469 aa, Artificial Sequence
  derived and/or modified protein sequence (wt) from neuraminidase__InfluenzaA__AIM56670
MNPNQKIITIGSVCMTIGMANLILQIGNTISIWVSHSIQIGNQSQIETCNQSVITYENNTWVNQTYVNISNTNFAAGQSVVSVKLAGNSSLCPVSGWAIYSKDNSVRIGSKGDVFVIREPFISCSPLECRTFFLTQGALLNDKHSNGTIKDRSPYRTLMSCPIGEVPSPYNSRFESVAWSASACHDGINWLTIGISGPDSGAVAVLKYNGIITDTIKSWRNNILRTQESECACVNGSCFTIMTDGPSDGQASYKIFRIEKGKIVKSVEMNAPNYHYEECSCYPDSSEITCVCRDNWHGSNRPWVSFNQNLEYQIGYICSGVFGDNPRPNDKTGSCGPVSSNGANGVKGFSFKYGNGVWIGRTKSISSRKGFEMIWDPNGWTGTDNKFSIKQDIVGINEWSGYSGSFVQHPELTGLDCIRPCFWVELIRGRPEENTIWTSGSSISFCGVNSDTVGWSWPDGAELPFTIDK

SEQ ID NO: 25792 - protein, 469 aa, Artificial Sequence; identical to SEQ ID NO: 25743
  derived and/or modified protein sequence (wt) from neuraminidase__InfluenzaA__AIM56703

SEQ ID NO: 25793 - protein, 469 aa, Artificial Sequence
  derived and/or modified protein sequence (wt) from neuraminidase__InfluenzaA__AIM56714
MNPNQKIITIGSVCMTIGMANLILQIGNIISIWVSHSIQIGNQSQIETCNQSVITYENNTWVNQTYVNISNTNFAAGQSVVSVKLAGNSSLCPVSGWAIYSKDNSVRIGSKGDVFVIREPFISCSPLECRTFFLTQGALLNDKHSNGTIKDRSPYRTLMSCPIGEVPSPYNSRFESVAWSASACHDGINWLTIGISGPDSGAVAVLKYNGIITDTIKSWRNNILRTQESECACVNGSCFTIMTDGPSDGQASYKIFRIEKGKIVKSVEMNAPNYHYEECSCYPDSSEITCVCRDNWHGSNRPWVSFNQNLEYQIGYICSGVFGDNPRPNDKTGSCGPVPSNGANGVKGFSFKYGNGVWIGRTKSISSRKGFEMIWDPNGWTGTDNKFSIKQDIVGINEWSGYSGSFVQHPELTGLDCIRPCFWVELIRGRPEENTIWTSGSSISFCGVNSDTVGWSWPDGAELPFTIDK

SEQ ID NO: 25794 - protein, 469 aa, Artificial Sequence
  derived and/or modified protein sequence (wt) from neuraminidase__InfluenzaA__AIM56725
MNPNQKIITIGSVCMTIGMANLILQIGNIISIWVSHSIQIGNQSQIETCNQSVITYENNTWVNQTYVNISNTNFAAGQSVVSVKLAGNSSLCPVSGWAIYSKDNSVRIGSKGDVFVIREPFISCSPLECRTFFLTQGALLNDKHSNGTIKDRSPYRTLMSCPIGEVPSPYNSRFESVAWSASACHDGINWLTIGISGPDSGAVAVLKYNGIITDTIKSWRNNILRTQESECACVNGSCFTIMTDGPSDGQASYKIFRIEKGKIVKSVEMNAPNYHYEECSCYPDSSEVTCVCRDNWHGSNRPWVSFNQNLEYQIGYICSGIFGDNPRPNDKTGSCGPVSSNGANGVKGFSFKYGNGVWIGRTKSISSRKGFEMIWDPNGWTGTDNKFSIKQDIVGINEWSGYSGSFVQHPELTGLDCIRPCFWVELIRGRPEENTIWTSGSSISFCGVNSDTVGWSWPDGAELPFTIDK

SEQ ID NO: 25795 - protein, 469 aa, Artificial Sequence; identical to SEQ ID NO: 25743
  derived and/or modified protein sequence (wt) from neuraminidase__InfluenzaA__AIM56736

SEQ ID NO: 25796 - protein, 469 aa, Artificial Sequence
  derived and/or modified protein sequence (wt) from neuraminidase__InfluenzaA__AIM56747
MNPNQKIITIGSVCMTIGMANLILQIGNIISIWVSHSIQIGNQSQIETCNQSVITYENNTWVNQTYVNISNTNFAAGQSVVSVKLAGNSSLCPVSGWAIYSKDNSVRIGSKGDVFVIREPFISCSSLECRTFFLTQGALLNDKHSNGTIKDRSPYRTLMSCPIGEVPSPYNSRFESVAWSASACHDGINWLTIGISGPDSGAVAVLKYNGIITDTIKSWRNNILRTQESECACVNGSCFTIMTDGPSDGQASYKIFRIEKGKIVKSVEMNAPNYHYEECSCYPDSSEITCVCRDNWHGSNRPWVSFNQNLEYQIGYICSGVFGDNPRPNDKTGSCGPVSSNGANGVKGFSFKYGNGVWIGRTKSISSRKGFEMIWDPNGWTGTDNKFSIKQDIVGINEWSGYSGSFVQHPELTGLDCIRPCFWVELIRGRPEENTIWTSGSSISFCGVNSDTVGWSWPDGAELPFTIDK

SEQ ID NO: 25797 - protein, 469 aa, Artificial Sequence; identical to SEQ ID NO: 25780
  derived and/or modified protein sequence (wt) from neuraminidase__InfluenzaA__AIM56758

SEQ ID NO: 25798 - protein, 469 aa, Artificial Sequence; identical to SEQ ID NO: 25743
  derived and/or modified protein sequence (wt) from neuraminidase__InfluenzaA__AIM56769

SEQ ID NO: 25799 - protein, 469 aa, Artificial Sequence
  derived and/or modified protein sequence (wt) from neuraminidase__InfluenzaA__AIM56780
MNPNQKIITIGSVCMTIGMANLILQIGNIISIWVSHSIQLGNQSQIGTCNQSVITYENNTWVNQTYVNISNTNFAAGQSVVSVKLAGNSSLCPVSGWAIYSKDNSVRIGSKGDVFVIREPFISCSPLECRTFFLTQGALLNDKHSNGTIKDRSPYRTLMSCPIGEVPSPYNSRFESVAWSASACHDGINWLTIGISGPDSGAVAVLKYNGIITDTIKSWRNNILRTQESECACVNGSCFTIMTDGPSDGQASYKIFRIEKGKIIKSVEMNAPNYHYEECSCYPDSSEITCVCRDNWHGSNRPWVSFNQNLEYQIGYICSGVFGDNPRPNDKTGSCGPVSSNGANGVKGFSFKYGNGVWIGRTKSISSRKGFEMIWDPNGWTGTDNKFSIKQDIVGIHEWSGYSGSFVQHPELTGLDCIRPCFWVELIRGRPEENTIWTSGSSISFCGVNSDTVGWSWPDGAELPFTIDK

SEQ ID NO: 25800 - protein, 469 aa, Artificial Sequence
  derived and/or modified protein sequence (wt) from neuraminidase__InfluenzaA__AIM56791
MNPNQKIITIGSVCMTIGMANLILQIGNIISIWVSHSIQLGNQSQIETCNQSVITYENNTWVNQTYVNISNTNFAAGQSVVSVKLAGNSSLCPVSGWAIYSKDNSVRIGSKGDVFVIREPFISCSPLECRTFFLTQGALLNDKHSNGTIKDRSPYRTLMSCPIGEVPSPYNSRFESVAWSASACHDGISWLTIGISGPDSGAVAVLKYNGIITDTIKSWRNNILRTQESECACVNGSCFTIMTDGPSDGQASYKIFRIEKGKIVKSVEMNAPNYHYEECSCYPDSSEITCVCRDNWHGSNRPWVSFNQNLEYQIGYICSGVFGDNPRPNDKTGSCGPVSSNGANGVKGFSFKYGNGVWIGRTKSISSRKGFEMIWDPNGWTGTDNNFSIKQDIVGIKEWSGYSGSFVQHPELTGLDCIRPCFWVELIRGRPEENTIWTSGSSISFCGVNSDTVGWSWPDGAELPFTIDK

SEQ ID NO: 25801 - protein, 469 aa, Artificial Sequence
  derived and/or modified protein sequence (wt) from neuraminidase__InfluenzaA__AIM56813
MNPNQKIITIGSVCMTIGMANLILQIGNIISIWVSHSIQIGNQSQIETCNQSVITYENNTWVNQTYVNISNTNFAAGQSVVSVKLAGNSSLCPVSGWAIYSKDNSVRIGSKGDVFVIREPFISCSPLECRTFFLTQGALLNDKHSNGTIKDRSPYRTLMSCPIGEVPSPYNSKFESVAWSASACHDGINWLTIGISGPDNGAVAVLKYNGIITDTIKSWRNNILRTQESECACVNGSCFTIMTDGPSDGQASYKIFRIEKGKIVKSVEMNAPNYHYEECSCYPDSSEITCVCRDNWHGSNRPWVSFNQNLEYQIGYICSGVFGDNPRPNDKTGSCGPVSSNGANGVKGFSFKYGNGVWIGRTKSISSRKGFEMIWDPNGWTGTDNKFSIKQDIVGINEWSGYSGSFVQHPELTGLDCIRPCFWVELIRGRPEENTIWTSGSSISFCGVNSDTVGWSWPDGAELPFTIDK

SEQ ID NO: 25802 - protein, 469 aa, Artificial Sequence
  derived and/or modified protein sequence (wt) from neuraminidase__InfluenzaA__AIM56824
MNPNQKIITIGSVCMTIGMANLILQIGNIISIWVSHSIQIGNQSQIETCNQSVITYENNTWVNQTYVNISNTNFAAGQSVVSVKLAGNSSLCPVSGWAIYSKDNSVRIGSKGDVFVIREPFISCSPLECRTFFLTQGALLNDKHSNGTIKDRSPYRTLMSCPIGEVPSPYNSRFESVAWSASACHDGINWLTIGISGPDSGAVAVLKYNGIITDTIKSWRNNILRTQESECACVNGSCFTIMTDGPSDGQASYKIFRIEKGKIVKSVEMNAPNYHYEECSCYPDSSEITCVCRDNWHGSNRPWVSFNQNLEYQIGYICSGVFGDNPRPNDKTGSCGPVPSNGANGVKGFSFKYSNGVWIGRTKSISSRKGFEMIWDPNGWTGTDNKFSIKQDIVGINEWSGYSGSFVQHPELTGLDCIRPCFWVELIRGRPEENTIWTSGSSISFCGVNSDTVGWSWPDGAELPFTIDK

SEQ ID NO: 25803 - protein, 465 aa, Artificial Sequence
  derived and/or modified protein sequence (wt) from neuraminidase__InfluenzaA__AIN76385
MNPNQKILCTSATAIIIGAIAVLIGIANLGLNIGLHLKPGCNCSHSQPGTTNTSQTIINNYYNETNITNIQMEERTSRNFNSLTKGLCTINSWHIYGKDNAVRIGESSDVLVTREPYVSCDPDECRFYALSQGTTIRGKHSNGTIHDRSQYRALISWPLSSPPTVYNSRVECIGWSSTSCHDGKSRMSICISGPNNNASAVVWYNRRPVAEINTWARNILRTQESECVCHNGICPIVFTDGSATGPADTRIYYFKEGKILKWESLTGTAKHIEECSCYGERTGITCTCKDNWQGSNRPVIQIDPVAMTHTSQYICSPVLTDTPRPNDPNIGKCNDPYPGNNNNGVKGFSYLDGANTWLGRTISTASRSGYEMLKVPNALTDDRSKPIQGQTIVLNADWSGYSGSFMDYWAEGDCYRACFYVELIRGRPKEDKVWWTSNSIVSMCSSTEFLGQWNWPDGARIEYFL

SEQ ID NO: 25804 - protein, 469 aa, Artificial Sequence; identical to SEQ ID NO: 14087
  derived and/or modified protein sequence (wt) from neuraminidase__InfluenzaA__AIP93105

SEQ ID NO: 25805 - protein, 469 aa, Artificial Sequence
  derived and/or modified protein sequence (wt) from neuraminidase__InfluenzaA__AIP93117
MNPNQKIITIGSVSLTIATVCFLMQIAILATTVTLHFKQHECDSPASNQVMPCEPIIIERNITEIVYLNNTTIEKEICPEVVEYRNWSKPQCQITGFAPFSKDNSIRLSAGGDIWVTREPYVSCDPGKCYQFALGQGTTLDNKHSNGTIHDRIPHRTLLMNELGVPFHLGTKQVCVAWSSSSCHDGKAWLHVCVTGDDRNATASFIYDGRLVDSIGSWSQNILRTQESECVCINGTCTVVMTDGSASGRADTRILFIKEGKIVHISPLSGSAQHIEECSCYPRYPDVRCICRDNWKGSNRPVIDINMEDYSIDSSYVCSGLVGDTPRNDDSSSNSNCRDPNNERGNPGVKGWAFDNGDDVWMGRTISKDLRSGYETFKVIGGWSTPNSKSQVNRQVIVDNNNWSGYSGIFSVEGKSCINRCFYVELIRGRPQETRVWWTSNSIVVFCGTSGTYGTGSWPDGANINFMPI

SEQ ID NO: 25806 - protein, 469 aa, Artificial Sequence
  derived and/or modified protein sequence (wt) from neuraminidase__InfluenzaA__AIR93973
MNPNQKIITIGSVCMTIGMANLILQIGNIISIWISHSIQLGSRNQIEACNQSVITYENNTWVNQTYVNISNTNFAAGQSVVPVKLAGNSSLCPVSGWAIYSKDNSIRIGSKGDVFVIREPFISCSPLECRTFFLTQGALLNDKHSNGTIKDRSPYRTLMSCPIGEVPSPYNSRFESVAWSASACHDGINWLTIGISGPDNGAVAVLKYNGIITDTIKSWRNNILRTQESECVCVNGSCFTVMTDGPSNGQASYKIFRIEKGKIVKSVEMNAPNYHYEECSCYPDSSEITCVCRDNWHGSNRPWVSFNQNLEYQIGYICSGIFGDNPRPNDKTGSCGPVSSNGANGVKGFSFKYGNGVWIGRTKSISSRNGFEMIWDPNGWTETDNNFSIKQDIVGINEWSGYSGSFVQHPELTGLDCIRPCFWVELIRGRPKENTIWTSGSSISFCGVNSNTVGWSWPDGAELPFTIDK

SEQ ID NO: 25807 - protein, 469 aa, Artificial Sequence
  derived and/or modified protein sequence (wt) from neuraminidase__InfluenzaA__AIR93984
MNPNQKIITIGSVCMTIGMANLILQIGNIISIWISHSIQLGNQNQIETCNQSVITYENNTWVNQTYVNISNTNFAAGQSVVSVKLAGNSSLCPVSGWAIYSKDNSIRIGSKGDVFVIREPFISCSPLECRTFFLTQGALLNDKHSNGTIKDRSPYRTLMSCPIGEVPSPYNSRFESVAWSASACHDGINWLTIGISGPDNGAVAVLKYNGIITDTIKSWRNNILRTQESECACVNGSCFTVMTDGPSNGQASYKIFRIEKGKIVKSVEINAPNYHYEECSCYPDSSEITCVCRDNWHGSNRPWVSFNQNLEYQIGYICSGIFGDNPRPNDKTGSCGPVSSNGANGVKGFSFKYGNGVWIGRTKSISSRNGFEMIWDPNGWTGTDNNFSIKQDIVGINEWSGYSGSFVQHPELTGLGCIRPCFWVELIRGRPKENTIWTSGSSISFCGVNSDTVGWSWPDGAELPFTIDK

SEQ ID NO: 25808 - protein, 469 aa, Artificial Sequence
  derived and/or modified protein sequence (wt) from neuraminidase__InfluenzaA__AIR93995
MNPNQKIIIIGSVCMTIGMANLILQIGNIISIWISHSIQLGNQNQIETCNQSVITYENNTWVNQTYVNISNTNFAAGQSVVPVKLAGNSSLCPVSGWAIYSKDNSIRIGSKGDVFVIREPFISCSPLECRTFFLTQGALLNDKHSNGTIKDRSPYRTLMSCPIGEVPSPYNSRFESVAWSASACHDGINWLTIGISGPDNGAVAVLKYNGIITDTIKSWKNNILRTQESECVCVNGSCFTVMTDGPSNGQASYKIFRIEKGKIVKSVEMNAPNYHYEECSCYPDSSEITCVCRDNWHGSNRPWVSFNQNLEYQIGYICSGVFGDNPRPNDKTGSCGPVSSNGANGVKGFSFKYGNGVWIGRTKSISSRNGFEMIWDPNGWTGTDNNFSIKQDIIGINEWSGYSGSFVQHPELTGMDCIRPCFWVELIRGRPKENTIWTSGSSISFCGVNSDTVGWSWPDGAELPFTIDK

SEQ ID NO: 25809 - protein, 466 aa, Artificial Sequence
  derived and/or modified protein sequence (wt) from neuraminidase__InfluenzaA__AIR94118
MNPNQKIIAIGSVSLIIAIICLLMQIAILTTTMTLHFRQNECNNSSNNQVMPCEPIIIERNTVHLNSTTIEREICPKVAEYKNWSKPQCQITGFAPFSKDNSIRLSAGGDIWVTREPYVSCSLDKCYQFALGQGTTLKNKHSNGTTHDRTPHRTLLMNELGVPFHLGTKQVCIAWSSSSCYDGKAWLHICVTGDDKNATASIIYNGMLVDSIGSWSKNILRTQESECVCINGTCAVVMTDGSASGKADTRVLFIKEGKIINISPLSGSAQHVEECSCYPRYPEVRCVCRDNWKGSNRPILYINMADYSIESSYVCSGLVGDTPRNDDSSSSSNCKDPNSERGAPGVKGWAFDDGNDVWMGRTIKNGSRSGYETFRVVNGWTVANSKSQVNRQVIVDSDDWSGYSGIFSVEGKKCINRCFYVELIRGRPQEPRVWWTSNSIIVFCGTSGTYGTGSWPDGANINFMPI

SEQ ID NO: 25810 - protein, 469 aa, Artificial Sequence
  derived and/or modified protein sequence (wt) from neuraminidase__InfluenzaA__AIT38335
MNPNQKIITIGSVSLTIATICFLMQIAILVTTVTLHFKQYECNSPPTNQVMLCEPTIIERNITEIVYLTNTTIEKEICPKLVEYRNWSKPQCKITGFAPFSKDNSIRLSAGGDIWVTREPYVSCDPDKCYQFALGQGTTLNNRHSNDTVHDRTPYRTLLMNELGIPFHLGTKQVCIAWSSSSCHDGKAWLHVCVTGHDENATASFIYDGRLVDSIVSWSKRILRTQESECVCIDGTCTVVMTDGSASGRADTRILFIKEGKIIHISQLSGSAQHVEECSCYPRYPGVRCVCRDNWKGSNRPIVDINVKDYSINSSYVCSGLVGDTPRKNDSFSSSYCLNPNNEEGGHGVKGWAFDDGDDVWMGRTINEKLRSGYETFKVIKGWSKPNSKLQINRQVIVDRGNRSGYSGIFSVEGKGCINRCFYVELIRGRKQETEVWWTSNSIVVFCGTSGTYGTGSWPDGANINLMPI

SEQ ID NO: 25811 - protein, 469 aa, Artificial Sequence
  derived and/or modified protein sequence (wt) from neuraminidase__InfluenzaA__AIT38346
MNPNQKIITIGSISLTIATICFLLQVAILVTTVTLHFKQFECNPTPNNQVMLCEPTVIERNITKIVYLTNTTVEKEICPKPAEYRNWSKPQCKITGFAPFSKDNSIRLSAGGDIWVTREPYVSCAPNKCYQFALGQGTTLNNRHSNDTVHDRTPYRTLLMNELGIPFHLGTKQVCIAWSSSSCHDGKAWLHVCVTGHDKNATASFIYDGRLVDSIGSWSKNILRTQESECVCINGTCTVVMTDGSASGRADTKILFIKEGKIIHISQLSGSAQHVEECSCYPRYPGVRCVCRDNWKGSNRPIVDINVRDYSIVSSYVCSGLVGDTPRKNDSFSSSHCLNPNNEEGGHGVKGWAFDDGDDVWMGRTISEKLRSGYETFKVIKGWSKPNSKLQINRQVIVDRGNRSGYSGIFSVEGKSCINRCFYVELIRGRKQETEVWWTSNSIVVFCGTSGTYGTGSWPDGADINLMPI

SEQ ID NO: 25812 - protein, 469 aa, Artificial Sequence
  derived and/or modified protein sequence (wt) from neuraminidase__InfluenzaA__AIT38361
MNPNQKIITIGSISLTIATICFLMQVAILVTTVTLHFKQYECNSTPNNQVMLCEPTVIERNITKIVYLTNTTVVKEVCPKPAEYRNWSKPQCKITGFAPFSKDNSIRLSAGGDIWVTREPYVSCAPNKCYQFALGQGTTLNNRHSNDTVHDRTPYRTLLMNELGIPFHLGTKQVCIAWSSSSCYDGKAWLHVCVTGHDKNATASFIYDGRLVDSIGSWSKNILRTQESECVCINGTCTVVMTDGSASGRADTKILFIKEGKIIHISQLSGSAQHVEECSCYPRYPGVRCVCRDNWKGSNRPIVDINMRDYSIVSSYVCSGLVGDTPRENDSFSSSHCLNPNNEEGGHGVKGWAFDDGDDVWMGRTISEKLRSGYETFKVIKGWSKPNSKLQINRQVIVDRGNRSGYSGIFSVEGKSCINRCFYVELIRGRKQETEVWWTSNSIVVFCGTSGTYGTGSWPDGADINLMPI

SEQ ID NO: 25813 - protein, 469 aa, Artificial Sequence
  derived and/or modified protein sequence (wt) from neuraminidase__InfluenzaA__AIT38375
MNPNQKIITIGSVCMTIGMVNLILQIGNIISIWISHSIQLGNQNQIEICNQSVITYENNTWVNQTYVNISNTNFAAGQSVVPVKLAGNSSLCSVSGWAIYSKDNSIRIGSKGDVFVIREPFISCSPLECRTFFLTQGALLNDKHSNGTIKDRSPYRTLMSCPIGEVPSPYNSRFESVAWSASACHDGINWLTIGISGPDNGAVAVLKYNGIITDTIKSWRNNILRTQESECACVNGSCFTVMTDGPSDGQASYKIFRIEKGKIVKSVEMNAPNYHYEECSCYPDSSEITCVCRDNWHGSNRPWVSFNQNLEYQIGYICSGIFGDNPRPNDKTGSCGPVSSNGANGVKGFSFKYGNGVWIGRTKSISSRNGFEMIWDPNGWTGTDNNFSIKQDIVGINEWSGYSGSFVQHPELTGLDCIRPCFWVELIRGRPKENTIWTSGSSISFCGVNSDTVGWSWPDGAELPFTIDK

SEQ ID NO: 25814 - protein, 469 aa, Artificial Sequence
  derived and/or modified protein sequence (wt) from neuraminidase__InfluenzaA__AIT93148
MNPNQKIITIGSVCMTIGMANLILQIGNIISIWVSHSIQLGNQSQIETCNQSVITYENNTWVNQTYVNISNTNFAAGQSVVSVKLAGNSSLCPVSGWAIYSKDNSVRIGSKGDVFVIREPFISCSPLECRTFFLTQGALLNDKHSNGTIKDRSPYRTLMSCPIGEVPSPYNSRFESVAWSASACHDGINWLTIGISGPDSGAVAVLKYNGIITDTIKSWRNNILRTQESECACVNGSCFTIMTDGPSDGQASYKIFRIEKGKIVKSVEMNAPNYHYEECSCYPDSSEITCVCRDNWHGSNRPWVSFNQNLEYQIGYICSGVFGDNPRPNDKTGSCGPVSSNGANGVKGFSFKYGNGVWIGRTKSISSRKGFEMIWDPNGWTGTDNKFSIKQDIVGINEWSGYSGSFVQHPELTGLDCIRPCFWVELIRGRPEENTIWTSGSSISFCGVNSDTVGWSWPDGAELPFTIDK

SEQ ID NO: 25815 - protein, 469 aa, Artificial Sequence; identical to SEQ ID NO: 18640
  derived and/or modified protein sequence (wt) from neuraminidase__InfluenzaA__AIU39701

SEQ ID NO: 25816 - protein, 469 aa, Artificial Sequence; identical to SEQ ID NO: 16738
  derived and/or modified protein sequence (wt) from neuraminidase__InfluenzaA__AIU39703

SEQ ID NO: 25817 - protein, 469 aa, Artificial Sequence
  derived and/or modified protein sequence (wt) from neuraminidase__InfluenzaA__AIU39705
MNPNQKIITIGSVCMTIGMANLILQIGNIISIWISHSIQLGNQSQIETCNQSVITYENNTWVNQTYVNISNTNFAAGQSVVSVKLAGNSSLCPVSGWAIYSKDNSIRIGSKGDVFVIREPFISCSPLECRTFFLTQGALLNDKHSNGTIKDRSPYRTLMSCPIGEVPSPYNSRFESVAWSASACHDGINWLTIGISGPDNGAVAVLKYNGIITDTIKSWRNNILRTQESECACVNGSCFTVMTDGPSDGQASYKIFRIEKGKIVKSVEMNAPNYHYEECSCYPDSSEITCVCRDNWHGSNRPWVSFNQNLEYQIGYICSGIFGDNPRPNDNTGSCGPVSSNGANGVKGFSFKYGNGVWIGRTKSISSRNGFEMIWDPNGWTGTDNNFSIKQDIVGINEWSGYSGSFVQHPELTGLDCIRPCFWVELIRGRPKENTIWTSGSSISFCGVNSDTVGWSWPDGAELPFTIDK

SEQ ID NO: 25818 - protein, 470 aa, Artificial Sequence
  derived and/or modified protein sequence (wt) from neuraminidase__InfluenzaA__AIU46611
MNPNQKITCISATGMTLSVVSMLIGIANLGLNIGLHYKVGDSTNINIPNMNETSPTTTIINNHPQNNFTNITNIIVTRNEEGHLLNLTKPLCEVNSWHILSKDNAIRIGEDAHIIVTREPYLSCDPQGCRMFALSQGTTLRGKHANGTIHDRSPFRALVSWEMGQAPSPYNTRVECIGWSSTSCHDGISRMSICISGPNNNASAVVWYGGRPVTEIPSWAGNILRTQESECVCHGGICPVVMTDGPANNRAETKIIYFKEGKIKKIEELKGDAQHIEECSCYGASEMIKCICRDNWKGANRPVITIDPEMMTHTSKYLCSKILTDTSRPNDPTNGNCEAPITGGSPDPGVKGFAFLDGENSWLGRTISKDSRSGYEMLKVPNAETDTQSGAISHQIIVNNQNWSGYSGAFIDYWANKECFNPCFYVELIRGRPKESSVLWTSNSIVALCGSKERLGSWSWHDGAEIIYFK

SEQ ID NO: 25819 - protein, 469 aa, Artificial Sequence
  derived and/or modified protein sequence (wt) from neuraminidase__InfluenzaA__AIV09221
MNPNQKIITIGSVCMTIGMANLILQIGNITSIWISHSIQIGNRNQIEACNQSVITYENNTWVNQTYVNISNTNFAVGQSVVPVKLAGNSSLCPVSGWAIYSKDNSIRIGSKGDVFVIREPFISCSPLECRTFFLTQGALLNDKHSNGTIKDRSPYRTLMSCPIGEVPSPYNSRFESVAWSASACHDGINWLTIGISGPDNGAVAVLKYNGIITDTIKSWRNNILRTQESECVCVNGSCFTVMTDGPSNGQASYKIFRIEKGKIVKSVEMNAPNYHYEECSCYPDSSEITCVCRDNWHGSNRPWVSFNQNLEYQIGYICSGIFGDNPRPNDKTGSCGPVPSNGANGVKGFSFKYGNGVWIGRTKSISSRNGFEMIWDPNGWTETDNDFSIKQDIVGINEWSGYSGSFVQHPELTGLDCIRPCFWVELIRGRPKENTIWTSGSSISFCGVNSNTVDWSWPDGAELPFTIDK

SEQ ID NO: 25820 - protein, 469 aa, Artificial Sequence
  derived and/or modified protein sequence (wt) from neuraminidase__InfluenzaA__AIW60703
MNPNQKIITIGSVSLTIATICFLMQIVILVTTVTLHFKQYECNSPPNNQVMLCEPTIIERNITEIVYLTNTTIEKEICPKLAEYRNWSKPQCKITGFAPFSKDNSIRLSAGGDIWVTREPYVSCDPDKCYQFALGQGTTLNNRHSNDTVHDRTPYRTLLMNELGVPFHLGTKQVCIAWSSSSCHDGKAWLHVCVTGHDENATASFIYDGRLVDSIGSWSKKILRTQESECVCINGTCTVVMTDGSASGRADTKILFIEEGKIVHISPLSGSAQHVEECSCYPQYSGVRCVCRDNWKGSNRPIVDINVKDYSIVSSYVCSGLVGDTPRKNDSSSSSHCLNPNNEEGGHGVKGWAFDDGNDVWMGRTISEKLRSGYETFKVIGGWSKPNSKLQINRQVIVDRGNRSGYSGIFSVEGKNCINRCFYVELIRGRKQETEVWWTSNSIVVFCGTSGTYGTGSWPDGADINLMPI

SEQ ID NO: 25821 - protein, 469 aa, Artificial Sequence
  derived and/or modified protein sequence (wt) from neuraminidase__InfluenzaA__AIW60704
MNPNQKIITIGSVSLTIATICFLMQIVILVTTVTLHFKQYECNSPPNNQVMLCEPTIIERNITEIVYLTNTTIEKEICPKLAEYRNWSKPQCKITGFAPFSKDNSIRLSAGGDIWVTREPYVSCDPDKCYQFALGQGTTLNNRHSNDIVHDRTPYRTLLMNELGVPFHLGTKQVCIAWSSSSCHDGKAWLHVCVTGHDENATASFIYDGRLVDSIGSWSKKILRTQESECVCINGTCTVVMTDGSASGRADTKILFIEEGKIVHISPLSGSAQHVEECSCYPQYSGVRCVCRDNWKGSNRPIVDINVKDYSIVSSYVCSGLVGDTPRKNDSSSSSHCLNPNNEEGGHGVKGWAFDDGNDVWMGRTISEKLRSGYETFKVIGGWSKPNSKLQINRQVIVDRGNRSGYSGIFSVEGKNCINRCFYVELIRGRKQETEVWWTSNSIVVFCGTSGTYGTGSWPDGADINLMPI

SEQ ID NO: 25822 - protein, 469 aa, Artificial Sequence
  derived and/or modified protein sequence (wt) from neuraminidase__InfluenzaA__AIW60705
MNPNQKIITIGSVSLTIATICFLMQIAILVTTVTLHFKQYECNSPPNNQVMLCEPTIIERNITEIVYLTNTTIEKEICPKLAEYRNWSKPQCKITGFAPFSKDNSIRLSAGGDIWVTREPYVSCDPDKCYQFALGQGTTLNNRHSNDTVHDRTPYRTLLMNELGVPFHLGTKQVCIAWSSSSCHDGKAWLHVCVTGHDENATASFIYDGRLVDSIGSWSKKILRTQESECVCINGTCTVVMTDGSASGRADTKILFIEEGKIVHISPLSGSAQHVEECSCYPRYSGVRCVCRDNWKGSNRPIVDINVKDYSIVSSYVCSGLVGDTPRKNDSSSSSHCLNPNNEEGGHGVKGWAFDDGNDVWMGRTISEKFRSGYETFKVIGGWSKPNSKLQINRQVIVDRGNRSGYSGIFSVEGKSCINRCFYVELIRGRKQETEVWWTSNSIVVFCGTSGTYGTGSWPDGADINLMPI

SEQ ID NO: 25823 - protein, 469 aa, Artificial Sequence; identical to SEQ ID NO: 25822
  derived and/or modified protein sequence (wt) from neuraminidase__InfluenzaA__AIW60706

SEQ ID NO: 25824 - protein, 469 aa, Artificial Sequence
  derived and/or modified protein sequence (wt) from neuraminidase__InfluenzaA__AIW60708
MNPNQKIITIGSVSLTIATICFLMQIAILVTTVTLHFKQYECNSPPNNQVMLCEPTIIERNITEIVYLTNTTIEKEICPKLAEYRNWSKPQCNITGFAPFSKDNSIRLSAGGDIWVTREPYVSCDPDKCYQFALGQGTTLNNRHSNDTVHDRTPYRTLLMNELGVPFHLGTKQVCIAWSSSSCHDGKAWLHVCVTGHDENATASFIYNGRLVDSIGSWSKKILRTQESECVCINGTCTVVMTDGSASGKADTKILFIEEGKIVHISPLSGSAQHVEECSCYPRYPGVRCVCRDNWKGSNRPIVDINVKDYSIVSSYVCSGLVGDTPRKNDSSSSSHCLNPNNEEGGHGVKGWAFDDGNDVWMGRTISEKLRSGYETFKVIEGWSNPNSKLQINRQVIVDRGNSSGYSGIFSVEGKSCINRCFYVELIRGRKQETEVWWTSNSIVVLCGTSGTYGTGSWPDGADINLMPI

SEQ ID NO: 25825 - protein, 469 aa, Artificial Sequence
  derived and/or modified protein sequence (wt) from neuraminidase__InfluenzaA__AIW60710
MNPNQKIITIGSVSLTIATICFLMQIAILVTTVTLHFKQYECNSPPNNQVMLCEPTIIERNITEIVYLTNTTIEKEICPKLAEYRNWSKPQCNITGFAPFSKDNSIRLSAGGDIWVTREPYVSCDPDKCYQFALGQGTTLNNGHSNDTVHDRTPYRTLLMNELGVPFHLGTKQVCIAWSSSSCHDGKAWLHVCVTGDDENATASFIYNGRLVDSIGSWSKKILRTQESECVCINGTCTVVMTDGSASGKADTKILFIEEGKIVHTSSLSGSAQHVEECSCYPRYPGVRCVCRDNWKGSNRPTVDINVKDYSIVSSYVCSGLVGDTPRKNDSSSSSHCLDPNNEEGGHGVKGWAFDDGNDVWMGRTISEKLRSGYETFKVIEGWSKPNSKLQINRQVIVDRGNRSGYSGIFSVESKSCINRCFYVELIRGRKQETEVLWTSNSIVVFCGTSGTYGTGSWPDGADINLMPI

SEQ ID NO: 25826 - protein, 469 aa, Artificial Sequence; identical to SEQ ID NO: 14591
  derived and/or modified protein sequence (wt) from neuraminidase__InfluenzaA__AIW60711

SEQ ID NO: 25827 - protein, 469 aa, Artificial Sequence; identical to SEQ ID NO: 14591
  derived and/or modified protein sequence (wt) from neuraminidase__InfluenzaA__AIW60712

SEQ ID NO: 25828 - protein, 469 aa, Artificial Sequence
  derived and/or modified protein sequence (wt) from neuraminidase__InfluenzaA__AIW60713
MNPNQKIITIGSVSLTISTICFFMQIAILITTVTLHFKQYEFSSPPNNQVMLCEPTIIERNITEIVYLTNTTIEKEICPKLAEYRNWSKPQCDITGFAPFSKDNSIRLSAGGDIWVTREPYVSCDPDKCYQFALGQGTTLNNVHSNDTVHDRTPYRTLLMNELGVPFHLGTKQVCIAWSSSSCHDGKAWLHVCVTGDDKNATASFIYNGRLVDSIVSWSKEILRTQESECVCINGTCTVVMTDGSASGKADTKILFIEEGKIVHTSTLSGSAQHVEECSCYPRYPGVRCVCRDNWKGSNRPIVDINIKDYSIASSYVCSGLVGDTPRKNDSSSSSHCLDPNNEEGGHGVKGWAFDDGNDVWMGRTISEKLRSGYETFKVIEGWSNPNSKLQINRQVIVDRGNRSGYSGIFSVEGKSCINRCFYVELIRGRKEETEVLWTSNSIVVFCGTSGTYGTGSWPDGADINLMPI

SEQ ID NO: 25829 - protein, 469 aa, Artificial Sequence
  derived and/or modified protein sequence (wt) from neuraminidase__InfluenzaA__AIW60714
MNPNQKIITIGSVSLTISTICFFMQIAILITTVTLHFKQYEFSSPPNNQVMLCEPTIIERNITEIVYLTNTTIEKEICPKLAEYRNWSKPQCDITGFAPFSKDNSIRLSAGGDIWVTREPYVSCDPDKCYQFALGQGTTLNNVHSNDTVHDRTPYRTLLMNELGVPFHLGTKQVCIAWSSSSCHDGKAWLHVCVTGDDKNATASFIYNGRLVDSIVSWSKEILRTQESECVCINGTCTVVMTDGSASGKADTKILFIEEGKIVHTSTLSGSAQHVEECSCYPRYPGVRCVCRDNWKGSNRPIVDINIKDYSIASSYVCSGLVGDTPRKNDSSSSSHCLDPNNEEGGHGVKGWAFDDGNDVWMGRTISEKLRSGYETFKVIEGWSNPNSKLQINRQVIVGRGNRSGYSGIFSVEGKSCINRCFYVELIRGRKEETEVLWTSNSIVVFCGTSGTYGTGSWPDGADINLMPI

SEQ ID NO: 25830 - protein, 469 aa, Artificial Sequence
  derived and/or modified protein sequence (wt) from neuraminidase__InfluenzaA__AIW60715
MNPNQKIITIGSVSLTISTICFFMQIAILITTVTLHFKQYEFNSPPNNQVMLCEPTIIERNITEIVYLTNTTIEKEICPKLAEYRNWSKPQCDITGFAPFSKDNSIRLSAGGDIWVTREPYVSCDPDKCYQFALGQGTTLNNVHSNDTVRDRTPYRTLLMNELGVPFHLGTKQVCIAWSSSSCHDGKAWLHVCITGDDKNATASFIYNGRLVDSIVSWSKKILRTQESECVCINGTCTVVMTDGSASGKADTKILFIEEGKIVHTSTLSGSAQHVEECSCYPRYPGVRCVCRDNWKGSNRPIVDINIKDHSIVSSYVCSGLVGDTPRKNDSSSSSHCLDPNNEEGGHGVKGWAFDDGNDVWMGRTISEKSRLGYETFKVIEGWSNPKSKLQINRQVIVDRGNRSGYSGIFSVEGKSCINRCFYVELIRGRKEETEVLWTSNSIVVFCGTSGTYGTGSWPDGADINLMPI

SEQ ID NO: 25831 - protein, 469 aa, Artificial Sequence; identical to SEQ ID NO: 16511
  derived and/or modified protein sequence (wt) from neuraminidase__InfluenzaA__AIW60716

SEQ ID NO: 25832 - protein, 469 aa, Artificial Sequence
  derived and/or modified protein sequence (wt) from neuraminidase__InfluenzaA__AIY54970
MNPNQKIITIGSVSLTISTICFFMQIAILITTVTLHFKQYEFNSPPNNQVMLCEPTIIERNITEIVYLTNTTIEKEICPKLAEYRNWSKPQCNITGFAPFSKDNSIRLSAGGDIWVTREPYVSCDPDKCYQFALGQGTTLNNVHSNDTVHDRTPYRTLLMNELGVPFHLGTKQVCIAWSSSSCHDGKAWLHVCVTGDDENATASFIYNGRLVDSIVSWSKKILRTQESECVCINGTCTVVMTDGSASGKADTKILFIEEGKIVHTSTLSGSAQHVEECSCYPRYPGVRCVCRDNWKGSNRPIVDINIKDYSIVSSYVCSGLVGDTPRKTDSSSSSHCLDPNNEEGGHGVKGWAFDDGNDLWMGRTISQNLRSGYETFKVIEGWSNPNSKLQINRQVIVDRGNRSGYSGIFSVEGKSCINRCFYVELIRGRKQETEVLWTSNSIVVFCGTSGTYGTGSWPDGADINLMPI

SEQ ID NO: 25833 - protein, 469 aa, Artificial Sequence
  derived and/or modified protein sequence (wt) from neuraminidase__InfluenzaA__AIY54974
MNPNQKIITIGSVSLTISTICFFMQIAILITTVTLHFKQYEFNSPPNNQVMLCEPTIIERNITEIVYLTNTTIEKEICPKLAEYRNWSKPQCDITGFAPFSKDNSIRLSAGGDIWVTREPYVSCDPDKCYQFALGQGTTLNNVHSNDTVHDRTPYRTLLMSELGVPFHLGTKQVCIAWSSSSCHDGKAWLHVCVTGDDKNATASFIYNGRLVDSIVSWSKKILRTQESECVCINGTCTVVMTDGSASGKADTKILFIEEGKIVHTSTLSGSAQHVEECSCYPRYPGVRCVCRDNWKGSNRPIVDINIKDYSIVSSYVCSGLVGDTPRKNDSSSSSHCLDPNNEEGGHGVKGWAFDDGNDVWMGRTISEKLRSGYETFKVIEGWSNPNSKLQINRQVKVDRGNRSGYSGIFSVEGKSCINRCFYVELIRGRKEETKVLWTSNSIVVFCGTSGTYGTGSWPDGADINLMPI

SEQ ID NO: 25834 - protein, 469 aa, Artificial Sequence
  derived and/or modified protein sequence (wt) from neuraminidase__InfluenzaA__AIY54982
MNPNQKIITIGSVSLTISTICFFMQIAILITTVTLHFKQYEFNSPPNNQVMLCEPTIIERNITEIVYLTNTTIEKEICPKLAEYRNWSKPQCDITGFAPFSKDNSIRLSAGGDIWVTREPYVSCDPDKCYQFALGQGTTLNNVHSNDTVHDRTPYRTLLMNELGVPFHLGTKQVCIAWSSSSCHDGKAWLHVCVTGDDKNATASFIYNGRLVDSIVSWSKEILRTQESECVCINGTCTVVMTDGSASGKADTKILFIEEGKIVHTSTLSGSAQHVEECSCYPRYPGVRCVCRDNWKGSNRPIVDINIKDYSIVSSYVCSGLVGDTPRKNDSSSSSHCLDPNNEEGGHGVKGWAFDDGNDVWMGRTISEKFRSGYETFKVIEGWSNPNSKLQINRQVIVDRGNRSGYSGIFSVEGKSCINRCFYVELIRGRKEETEVLWTSNSIVVFCGTSGTYGTGSWPDGADINLMPI

SEQ ID NO: 25835 - protein, 469 aa, Artificial Sequence
  derived and/or modified protein sequence (wt) from neuraminidase__InfluenzaA__AIY54990
MNPNQKIITIGSVSLTISTICFFMQIAILITTVTLHFKQYEFSSPPNNQVMLCEPTIIERNITEIVYLTNTTIEKEICPKLAEYRNWSKPQCGITGFAPFSKDNSIRLSAGGDIWVTREPYVSCDPDKCYQFALGQGTTLNNVHSNDTVHDRTPYRTLLMNELGVPFHLGTKQVCIAWSSSSCHDGKAWLHVCVTGDDKNATASFIYNGRLVDSIVSWSKEILRTQESECVCINGTCTVVMTDGSASGKADTKILFIEEGKIVHTSTLSGSAQHVEECSCYPRYPGVRCVCRDNWKGSNRPIVDINIKDYSIVSRYVCSGLVGDTPRKNDSSSSSHCLDPNNEEGGHGVKGWAFDDGNDVWMGRTISEKSRSGYETFKVIEGWSNPNSKLQINRQVIVDRGNRSGYSGIFSVEGKSCINRCFYVELIRGRKEETEVLWTSNSIVVFCGTSGTYGTGSWPDGADINLMPI

SEQ ID NO: 25836 - protein, 466 aa, Artificial Sequence
  derived and/or modified protein sequence (wt) from neuraminidase__InfluenzaA__AJD78177
MNPNQKIIAIGSVSLIIAVICLLMQIAILTTTMTLHFMQNECSNPSNNQVMPCEPIIIERNTVHLNNTTIEREICPKAAEYKNWSKPQCQITGFAPFSKDNSIRLSAGGDIWVTREPYVSCSLDKCYQFALGQGTTLKNKHSNGTTHDRTPHRTLLMNELGVPFHLGTKQVCIAWSSSSCYDGKAWLHICVTGDDKNATASIIYDGMLVDSIGSWSKNILRTQESECVCINGTCAVVMTDGSASGKADTRVLFIREGKIINISPLSGSAQHVEECSCYPRYPEVRCVCRDNWKGSNRPILYINMADYSIESSYVCSGLVGDTPRNDDSSSSSNCRDPNNERGAPGVKGWAFDDGNDVWMGRTIKNGSRSGYETFRVVNGWTMANSKSQINRQVIVDSDDWSGYSGIFSVEGKKCINRCFYVELIRGRPQEPRVWWTSNSIIVFCGTSGTYGTGSWPDGANINFMPI

SEQ ID NO: 25837 - protein, 466 aa, Artificial Sequence
  derived and/or modified protein sequence (wt) from neuraminidase__InfluenzaA__AJD78189
MNPNQKIIAIGSVSLIIAIICLLMQIAILTTTMTLHFRQNECNNSSNNQVMPCEPIIIERNTVHLNSTTIEREICPKVAEYKNWSKPQCQITGFAPFSKDNSIRLSAGGDIWVTREPYVSCSLDKCYQFALGQGTTLKNKHSNGTTHDRTSHRTLLMNELGVPFHLGTKQVCIAWSSSSCYDGKAWLHICVTGDDKNATASIIYNGMLVDSIGSWSKNILRTQESECVCINGTCAVVMTDGSASGKADTRVLFIREGKIINISPLSGSAQHVEECSCYPRYPEVRCVCRDNWKGSNRPILYINMADYSIESSYVCSGLVGDTPRNDDSSSSSNCKDPNSERGAPGVKGWAFDDGNDVWMGRTIKNGSRSGYETFRVLNGWTVANSKSQINRQVIVDSDDWSGYSGIFSVEGKKCINRCFYVELIRGRPQEPRVWWTSNSIIVFCGTSGTYGTGSWPDGANINFMPI

SEQ ID NO: 25838 - protein, 466 aa, Artificial Sequence
  derived and/or modified protein sequence (wt) from neuraminidase__InfluenzaA__AJD78201
MNPNQKITAIGSVSLIIAIICLLMQIAILTTTMTLHFRQKECSNPSNNQVMPCEPIIIERNTVHLNSTTIEREICPKVAEYKNWSKPQCLITGFAPFSKDNSIRLSAGGDIWVTREPYVSCSPDKCYQFALGQGTTLKNKHSNGTTHDRTPHRTLLMNELGVPFHLGTKQVCIAWSSSSCYDGKAWLHICVTGDDKNATASIIYDGMLVDSIGSWSKNILRTQESECVCINGTCAVVMTDGSASGVADTRVLFIREGKIINIRPLSGSAQHVEECSCYPRYPEVRCVCRDNWKGSNRPIIYINMADYSIESSYVCSGLVGDTPRNDDSSSSSNCRDPNNERGAPGVKGWAFDDGNDVWMGRTIKNGSRSGYETFRVINGWTMANSKSQINRQVIVDSDDWSGYSGIFSVEGKKCINRCFYVELIRGRPQEPRVWWTSNSIIVFCGTSGTYGTGSWPDGANINFMPI

SEQ ID NO: 25839 - protein, 466 aa, Artificial Sequence
  derived and/or modified protein sequence (wt) from neuraminidase__InfluenzaA__AJD78213
MNPNQKITAIGSVSLIIAIICLFMQIAILTTTMTLHFRQKECSNPSNNQVMPCEPIIIERNTVHLNSTTIEREICPKVAEYKNWSKPQCLITGFAPFSKDNSIRLSAGGDIWVTREPYVSCSPDKCYQFALGQGTTLKNKHSNGTTHDRTPHRTLLMNELGVPFHLGTKQVCIAWSSSSCYDGKAWLHICVTGDDKNATASIIYDGMLVDSIGSWSKNILRTQESECVCINGTCAVVMTDGSASGVADTRVLFIREGKIINIRPLSGSAQHVEECSCYPRYPEVRCVCRDNWKGSNRPIIYINMADYSIESSYVCSGLVGDTPRNDDSSSSSNCRDPNNERGAPGVKGWAFDDGNDVWMGRTIKNGSRSGYETFRVINGWTMANSKSQINRQVIVDSDDWSGYSGIFSVEGKKCINRCFYVELIRGRPQEPRVWWTSNSIIVFCGTSGTYGTGSWPDGANINFMPI

SEQ ID NO: 25840 - protein, 469 aa, Artificial Sequence; identical to SEQ ID NO: 22922
  derived and/or modified protein sequence (wt) from neuraminidase__InfluenzaA__AJI80140

SEQ ID NO: 25841 - protein, 469 aa, Artificial Sequence; identical to SEQ ID NO: 22922
  derived and/or modified protein sequence (wt) from neuraminidase__InfluenzaA__AJI80152

SEQ ID NO: 25842 - protein, 469 aa, Artificial Sequence; identical to SEQ ID NO: 25698
  derived and/or modified protein sequence (wt) from neuraminidase__InfluenzaA__AJI80164

SEQ ID NO: 25843 - protein, 469 aa, Artificial Sequence; identical to SEQ ID NO: 25637
  derived and/or modified protein sequence (wt) from neuraminidase__InfluenzaA__AJI80175

SEQ ID NO: 25844 - protein, 469 aa, Artificial Sequence; identical to SEQ ID NO: 25637
  derived and/or modified protein sequence (wt) from neuraminidase__InfluenzaA__AJI80187

SEQ ID NO: 25845 - protein, 469 aa, Artificial Sequence; identical to SEQ ID NO: 25637
  derived and/or modified protein sequence (wt) from neuraminidase__InfluenzaA__AJI80199

SEQ ID NO: 25846 - protein, 469 aa, Artificial Sequence; identical to SEQ ID NO: 25637
  derived and/or modified protein sequence (wt) from neuraminidase__InfluenzaA__AJI80211

SEQ ID NO: 25847 - protein, 469 aa, Artificial Sequence; identical to SEQ ID NO: 23871
  derived and/or modified protein sequence (wt) from neuraminidase__InfluenzaA__AJI80223

SEQ ID NO: 25848 - protein, 469 aa, Artificial Sequence; identical to SEQ ID NO: 25637
  derived and/or modified protein sequence (wt) from neuraminidase__InfluenzaA__AJI80235

SEQ ID NO: 25849 - protein, 469 aa, Artificial Sequence; identical to SEQ ID NO: 23871
  derived and/or modified protein sequence (wt) from neuraminidase__InfluenzaA__AJI80247

SEQ ID NO: 25850 - protein, 469 aa, Artificial Sequence; identical to SEQ ID NO: 25656
  derived and/or modified protein sequence (wt) from neuraminidase__InfluenzaA__AJI80259

SEQ ID NO: 25851 - protein, 469 aa, Artificial Sequence; identical to SEQ ID NO: 22146
  derived and/or modified protein sequence (wt) from neuraminidase__InfluenzaA__AJI80271

SEQ ID NO: 25852 - protein, 469 aa, Artificial Sequence; identical to SEQ ID NO: 25637
  derived and/or modified protein sequence (wt) from neuraminidase__InfluenzaA__AJI80283

SEQ ID NO: 25853 - protein, 469 aa, Artificial Sequence
  derived and/or modified protein sequence (wt) from neuraminidase__InfluenzaA__AJI80306
MNPNQKIITIGSVSLTISTICFFMQIAILITTVTLHFKQYEFNSPPNNQVMLCEPTIIERNITEIVYLTNTTIEKEICPKPAEYRNWSKPQCGITGFAPFSKDNSIRLSAGGDIWVTREPYVSCDPDKCYQFALGQGTTLNNVHSNNTVLDRTPYRTLLMNELGVPFHLGTKQVCIAWSSSSCHDGKAWLHVCITGDDKNATASFIYNGRLVDSVVSWSKEILRTQESECVCINGTCTVVMTDGSASGKADTKILFIEEGKIVHTSTLSGSAQHVEECSCYPRYPGVRCVCRDNWKGSNRPIVDINIKDHSIVSSYVCSGLVGDTPRKNDSSSSSHCLDPNNEEGGHGVKGWAFDDGNDVWMGRTINETSRLGYETFKVIEGWSNPKSKLQINKQVIVDRGDRSGYSGIFSVEGKSCINRCFYVELIRGRKEETEVLWTSNSIVVFCGTSGTYGTGSWPDGADLNLMPI

SEQ ID NO: 25854 - protein, 469 aa, Artificial Sequence
  derived and/or modified protein sequence (wt) from neuraminidase__InfluenzaA__AJI80318
MNPNQKIITIGSVCMTIGMANLILQIGNIISIWISHSIQLGNQSQIEACNQNVITYENNTWVNQTYVNISNTNFATGQSVVSVKLAGNSSLCPVSGWAIYSKDNSVRIGSKGDVFVIREPFISCSPLECRTFFLTQGALLNDKHSNGTIKDRSPYRTLMSCPIGEVPSPYNSRFESVAWSASACHDGINWLTIGISGPDSGAVAVLKYNGIITDTIKSWKNNILRTQESECACVNGSCFTIMTDGPSDGQASYKIFRIEKGKIVKSVEMNAPNYHYEECSCYPDSSEITCVCRDNWHGSNRPWVSFNQNLEYQIGYICSGVFGDNPRPNDKTGSCGPVSSNGANGVKGFSFKYGNGVWIGRTKSISSRKGFEMIWDPNGWTGTDNNFSIKQDIVGINEWSGYSGSFVQHPELTGLDCIRPCFWVELIRGRPKENTIWTSGSSISFCGVNSDTVGWSWPDGAELPFTIDK

SEQ ID NO: 25855 - protein, 469 aa, Artificial Sequence
  derived and/or modified protein sequence (wt) from neuraminidase__InfluenzaA__AJI80329
MNPNQKIITIGSVCMTIGMANLILQIGNIISIWISHSIQLGNQSQIETCNQSVITYENNTWVNQTYVNISNTNFAAGQSVVSVKLAGNSSLCPVSGWAIYSKDNSVRIGSKGDVFVIREPFISCSPLECRTFFLTQGALLNDKHSNGTIKDRSPYRTLMSCPIGEVPSPYNSRFESVAWSASACHDGINWLTIGISGPDSGAVAVLKYNGIITDTIKSWKNNILRTQESECACVNGSCFTIMTDGPSDGQASYKIFRIEKGKIVKSVEMNAPNYHYEECSCYPDSSEITCVCRDNWHGSNRPWVSFNQNLEYQIGYICSGVFGDNPRPNDKTGSCGPVSSNGANGVKGFSFKYGNGVWIGRTKSISSRKGFEMIWDPNGWTGTDNNFSIKQDIVGINEWSGYSGSFVQHPELTGLDCIRPCFWVELIRGRPKENTIWTSGSSISFCGVNSDTVGWSWPDGAELPFTIDK

SEQ ID NO: 25856 - protein, 469 aa, Artificial Sequence
  derived and/or modified protein sequence (wt) from neuraminidase__InfluenzaA__AJI80340
MNPNQKIITIGSVCMTIGMANLILQIGNIISIWISHSIQLGNQSQIETCNQSVITYENNTWVNQTYVNISNTNFAAGQSVVSVKLAGNSSLCPVSGWAIYSKDNSIRIGSKGDVFVIREPFISCSPLECRTFFLTQGALLNDKHSNGTIKDRSPYRTLMSCPIGEVPSPYNSRFESVAWSASACHDGINWLTIGISGPDSGAVAVLKYNGIITDTIKSWKNNILRTQESECACVNGSCFTIMTDGPSDGQASYKIFRIEKGKIVKSVEMNAPNYYYEECSCYPDSSEITCVCRDNWHGSNRPWVSFNQNLEYQIGYICSGIFGDNPRPNDKTGSCGPVSSNGANGVKGFSFKYGNGVWIGRTKSISSRKGFEMIWDPNGWTGTDNNFSIKQDIVGINEWSGYSGSFVQHPELTGLDCIRPCFWVELIRGRPKENTIWTSGSSISFCGVNSDTVGWSWPDGAELPFTIDK

SEQ ID NO: 25857 - protein, 469 aa, Artificial Sequence; identical to SEQ ID NO: 22146
  derived and/or modified protein sequence (wt) from neuraminidase__InfluenzaA__AJI80351

SEQ ID NO: 25858 - protein, 469 aa, Artificial Sequence
  derived and/or modified protein sequence (wt) from neuraminidase__InfluenzaA__AJI80363
MNPNQKIITIGSVSLTISTICFFMQIAILITTVTLHFKQYEFNSLPNNQVMLCEPTIIERNITEIVYLTNTTIEKEICPKPAEYRNWSKPQCGITGFAPFSKDNSIRLSAGGDIWVTREPYVSCDPDKCYQFALGQGTTLNNVHSNNTARDRTPYRTLLMNELGVPFHLGTKQVCIAWSSSSCHDGKAWLHVCITGDDKNATASFIYNGRLVDSVVSWSKEILRTQESECVCINGTCTVVMTDGSASGKADTKILFIEEGKIVHTSTLSGGAQHVEECSCYPRYPGVRCVCRDNWKGSNRPIVDINIKDHSIVSSYVCSGLVGDTPRKNDSSSSSHCLNPNNEEGGHGVKGWAFDDGNDVWMGRTINETSRLGYETFKVIEGWSNPKSKLQINRQVIVDRGDRSGYSGIFSVEGKSCINRCFYVELIRGRKEETEVLWTSNSIVVFCGTSGTYGTGSWPDGADLNLMPI

SEQ ID NO: 25859 - protein, 469 aa, Artificial Sequence
  derived and/or modified protein sequence (wt) from neuraminidase__InfluenzaA__AJI80375
MNPNQKIITIGSVSLTISTICLFMQIAILITTVTLHFKQHEFNSPPNNQVMLCEPTIIERNITEIVYLTNTTIEKEICPKPAEYRNWSKPQCGITGFAPFSKDNSIRLSAGGDIWVTREPYVSCDPDKCYQFALGQGTTLNNVHSNNTVRDRTPYRTLLMNELGVPFHLGTKQVCIAWSSSSCHDGKAWLHVCITGDDKNATASFIYNGRLVDSVVSWSKEILRTQESECVCINGTCTVVMTDGSASGKADTKILFIEEGKIVHTSTLSGSAQHVEECSCYPRYPGVRCVCRDNWKGSNRPIVDINIKDHSIVSSYVCSGLVGDTPRKNDSSSSSHCLDPNNEEGGHGVKGWAFDDGNDVWMGRTINETSRLGYETFKVIEGWSNPKSKLQINRQVIVDRGDRSGYSGIFSVEGKSCINRCFYVELIRGRKEETEVLWTSNSIVVFCGTSGTYGTGSWPDGADLNLMPI

SEQ ID NO: 25860 - protein, 469 aa, Artificial Sequence; identical to SEQ ID NO: 25676
  derived and/or modified protein sequence (wt) from neuraminidase__InfluenzaA__AJI80387

SEQ ID NO: 25861 - protein, 469 aa, Artificial Sequence; identical to SEQ ID NO: 25676
  derived and/or modified protein sequence (wt) from neuraminidase__InfluenzaA__AJI80398

SEQ ID NO: 25862 - protein, 469 aa, Artificial Sequence; identical to SEQ ID NO: 25676
  derived and/or modified protein sequence (wt) from neuraminidase__InfluenzaA__AJI80409

SEQ ID NO: 25863 - protein, 469 aa, Artificial Sequence; identical to SEQ ID NO: 25676
  derived and/or modified protein sequence (wt) from neuraminidase__InfluenzaA__AJI80420

SEQ ID NO: 25864 - protein, 469 aa, Artificial Sequence; identical to SEQ ID NO: 25676
  derived and/or modified protein sequence (wt) from neuraminidase__InfluenzaA__AJI80431

SEQ ID NO: 25865 - protein, 469 aa, Artificial Sequence; identical to SEQ ID NO: 25671
  derived and/or modified protein sequence (wt) from neuraminidase__InfluenzaA__AJI80442

SEQ ID NO: 25866 - protein, 469 aa, Artificial Sequence; identical to SEQ ID NO: 25676
  derived and/or modified protein sequence (wt) from neuraminidase__InfluenzaA__AJI80454

SEQ ID NO: 25867 - protein, 469 aa, Artificial Sequence; identical to SEQ ID NO: 25671
  derived and/or modified protein sequence (wt) from neuraminidase__InfluenzaA__AJI80465

SEQ ID NO: 25868 - protein, 469 aa, Artificial Sequence; identical to SEQ ID NO: 25676
  derived and/or modified protein sequence (wt) from neuraminidase__InfluenzaA__AJI80477

SEQ ID NO: 25869 - protein, 469 aa, Artificial Sequence; identical to SEQ ID NO: 25676
  derived and/or modified protein sequence (wt) from neuraminidase__InfluenzaA__AJI80488

SEQ ID NO: 25870 - protein, 469 aa, Artificial Sequence; identical to SEQ ID NO: 25698
  derived and/or modified protein sequence (wt) from neuraminidase__InfluenzaA__AJI80499

SEQ ID NO: 25871 - protein, 469 aa, Artificial Sequence; identical to SEQ ID NO: 25676
  derived and/or modified protein sequence (wt) from neuraminidase__InfluenzaA__AJI80510

SEQ ID NO: 25872 - protein, 469 aa, Artificial Sequence; identical to SEQ ID NO: 25698
  derived and/or modified protein sequence (wt) from neuraminidase__InfluenzaA__AJI80521

SEQ ID NO: 25873 - protein, 469 aa, Artificial Sequence
  derived and/or modified protein sequence (wt) from neuraminidase__InfluenzaA__AJJ98767
MNPNQKIITIGSVSLTISTICFFMQIAILITTVTLHFKQYEFNSPSNNQVMLCEPTIIERNITEIVYLTNTTIEKEKCPKPAEYRNWSKPQCDITGFAPFSKDNSIRLSAGGDIWVTREPYVSCDPDKCYQFALGQGTTLNNVHSNNTVRDRTPYRTLLMNELGVPFHLGTKQVCIAWSSSSCHDGKAWLHVCITGDDKNATASFIYNGRLVDSVVSWSKEILRTQESECVCINGTCTVVMTDGSASGKADTKILFIEEGKIVHTSTLSGSAQHVEECSCYPRYPGVRCVCRDNWKGSNRPIVDINIKDHSIVSSYVCSGLVGDTPRKNDSSSSSHCLDPNNEEGGHGVKGWAFDDGDDVWMGRTISEKSRLGYETFKVIEGWSNPKSKLQINRQVIVDRGNRSGYSGIFSVEGKSCINRCFYVELIRGRKEETDVLWTSNSIVVFCGTSGTYGTGSWPDGADINLMPI

SEQ ID NO: 25874 - protein, 469 aa, Artificial Sequence
  derived and/or modified protein sequence (wt) from neuraminidase__InfluenzaA__AJJ98779
MNPNQKIITIGSVSLTISTICFFMQTAILITTVTLHFKQYEFNSPPNNQVMLCEPTIIERNITEIVYLTNTTIEKEICPKPAEYRNWSKPQCDITGFAPFSKDNSIRLSAGGDIWVTREPYVSCDPDKCYQFALGQGTTLNNVHSNDTVRDRTPYRTLLMNELGVPFHLGTKQVCIAWSSSSCHDGKAWLHVCITGDDKNATASFIYNGRLVDSIVSWTKEILRTQESECVCINGTCTVVMTDGSASGKADTKILFIEEGKIVHTSTLSGSAQHVEECSCYPRYPGVRCVCRDNWKGSNRPIVDINIKDHSIVSSYVCSGLVGDTPRKNDSSSSSHCLDPNNEEGGHGVKGWAFDDGNDVWMGRTISEKSRLGYETFKVIEGWSNPKSKLQINRQVIVDRGNRSGYSGIFSVEGKSCINRCFYVELIRGRKEETEVLWTSNSIVVFCGTSGTYGTGSWPDGADINLMPI

SEQ ID NO: 25875 - protein, 469 aa, Artificial Sequence; identical to SEQ ID NO: 22146
  derived and/or modified protein sequence (wt) from neuraminidase__InfluenzaA__AJJ98791

SEQ ID NO: 25876 - protein, 469 aa, Artificial Sequence
  derived and/or modified protein sequence (wt) from neuraminidase__InfluenzaA__AJJ98803
MNPNQKIITIGSVSLTISTICFFMQIAILITTVTLHFKQYEFNSPPNNQVMLCEPTIIERNITEIVYLTNTTIEKEICPKPAEYRNWSKPQCGITGFAPFSKDNSIRLSAGGDIWVTREPYVSCDPDKCYQFALGQGTTLNNVHSNNKVRDRTPYRTLLMNELGVPFHLGTKQVCIAWSSSSCHDGKAWLHVCITGDDKNATASFIYNGRLVDSVVSWSKEILRTQESECVCINGTCTVVMTDGSASGKADTKILFIEEGKIVHTSTLSGSAQHVEECSCYPRYPGVRCVCRDNWKGSNRPIVDINIKDHSIVSSYVCSGLVGDTPRKNDSSSSSHCLDPNNEEGGHGVKGWAFDDGNDVWMGRTINETSRLGYETFKVIEGWSNPKSKLQINRQVIVDRGDRSGYSGIFSVEGKSCINRCFYVELIRGRKEETEVLWTSNSIVVFCGTSGTYGTGSWPDGADLNLMPI

SEQ ID NO: 25877 - protein, 469 aa, Artificial Sequence; identical to SEQ ID NO: 22146
  derived and/or modified protein sequence (wt) from neuraminidase__InfluenzaA__AJJ98815

SEQ ID NO: 25878 - protein, 469 aa, Artificial Sequence
  derived and/or modified protein sequence (wt) from neuraminidase__InfluenzaA__AJJ98827
MNPNQKIITIGSVSLTISTICFFMQIAILITTVTLHFKQYEFNSPPNNQVMLCEPTIIERNITEIVYLTNTTIEKEICPKPAEYRNWSKPQCGITGFAPFSKDNSIRLSAGGDIWVTREPYVSCDPDKCYQFALGQGTTLNNVHSNNTVRDRTPYRTLLMNELGVPFHLGTKQVCIAWSSSSCHDGKAWLHVCITGDDKNATASFIYNGRLVDSVVSWSKEILRTQESECVCINGTCTVVMTDGSASGKADTKILFIEEGKIVHTSTLSGSAQHVEECSCYPRYPGVRCVCRDNWKGSNRPIVDINIKDHNIVSSYVCSGLVGDTPRKNDSSSSSHCLDPNNEEGGHGVKGWAFDDGNDVWMGRTINETSRLGYETFKVIEGWSNPKSKLQINRQVIVDRGDRSGYSGIFSVEGKSCINRCFYVELIRGRKEETEVLWTSNSIVVFCGTSGTYGTGSWPDGADLNLMPI

SEQ ID NO: 25879 - protein, 469 aa, Artificial Sequence; identical to SEQ ID NO: 21143
  derived and/or modified protein sequence (wt) from neuraminidase__InfluenzaA__AJJ98839

SEQ ID NO: 25880 - protein, 469 aa, Artificial Sequence; identical to SEQ ID NO: 19518
  derived and/or modified protein sequence (wt) from neuraminidase__InfluenzaA__AJJ98851

SEQ ID NO: 25881 - protein, 469 aa, Artificial Sequence
  derived and/or modified protein sequence (wt) from neuraminidase__InfluenzaA__AJJ98863
MNPNQKIITIGSVSLTISTICFFMQIAILITTVTLHFKQYEFNSPPNNQVMLCEPTIIERNITEIVYLTNTTIEKEICPKPAEYRNWSKPQCDITGFAPFSKDNSIRLSAGGDIWVTREPYVSCDPDKCYQFALGQGTTLNNVHSNNTVRERTPYRTLLMNELGVPFHLGTKQVCIAWSSSSCHDGKAWLHVCITGDDKNATASFIYNGRLVDSVVSWSKEILRTQESECICINGTCTVVMTDGSASGKADTKILFIEEGKIVHTSTLSGSAQHVEECSCYPRYPGVRCVCRDNWKGSNRPIVDINMKDHSIVSSYVCSGLVGDTPRKNDSSSSSHCLDPNNEEGGHGVKGWAFDDGNDVWMGRTISEKSRLGYETFKVIEGWSNPKSKLQINRQVIVDRGNRSGYSGIFSVEGKSCINRCFYVELIRGRKEETEVLWTSNSIVVFCGTSGTYGTGSWPDGADINLMPI

SEQ ID NO: 25882 - protein, 469 aa, Artificial Sequence
  derived and/or modified protein sequence (wt) from neuraminidase__InfluenzaA__AJJ98875
MNPNQKIITIGSVSLTISTICFFMQIAILITTVTLHFKQYEFNSPPNNQVMLCEPTIIERNITEIVYLTNTTIEKEICPKPAEYRNWSKPQCDITGFAPFSKDNSIRLSAGGDIWVTREPYVSCDPDKCYQFALGQGTTLNNVHSNDTVRNRTPYRTLLMNELGVPFHLGTKQVCIAWSSSSCHDGKAWLHVCITGDDKNATASFIYNGRLVDSVVSWSKEILRTQESECVCINGTCTVVMTDGSASGKADTKILFIEEGKIVHTSTLSGSAQHVEECSCYPRYPGVRCVCRDNWKGSNRPIVDINIKDHSIVSSYVCSGLVGDTPRKNDSSSSSHCLDPNNEEGGHGVKGWAFDDGNDVWMGRTISEKSRLGYETFKVIEGWSNPKSKLQINRQVIVDRGNRSGYSGIFSVEGKSCINRCFYVELIRGRKEETEVLWTSNSIVVFCGTSGTYGTGSWPDGADINLMPI

SEQ ID NO: 25883 - protein, 469 aa, Artificial Sequence
  derived and/or modified protein sequence (wt) from neuraminidase__InfluenzaA__AJJ98887
MNPNQKIITIGSVSLTISTICFFMQIAILITTVTLHFKQYEFNSPPNNQVMLCEPTIIERNITEIVYLTNTTIEKEICPKLAEYRNWSKPQCDITGFAPFSKDNSIRLSAGGDIWVTREPYVSCDPDKCYQFALGQGTTLNNVHSNNTVRNRTPYRTLLMNELGVPFHLGTKQVCIAWSSSSCHDGKAWLHVCITGDDKNATASFIYNGRLVDSIVSWSKEILRTQESECVCINGTCTVVMTDGSASGKADTKILFIEEGKIVHTSTLSGSAQHVEECSCYPRYPGVRCVCRDNWKGSNRPIVDINIKDHSIVSSYVCSGLVGDTPRKNDSSSSSHCLDPNNEEGGHGVKGWAFDDGNDVWMGRTISEKSRLGYETFKVIEGWSNPKSKLQINRQVIVDRGNRSGYSGIFSVEGKSCINRCFYVELIRGRKEETDVLWTSNSIVVFCGTSGTYGTGSWPDGADINLMPI

SEQ ID NO: 25884 - protein, 469 aa, Artificial Sequence
  derived and/or modified protein sequence (wt) from neuraminidase__InfluenzaA__AJJ98899
MNPNQKIITIGSVSLTISTICFFMQTAILITTVTLHFKQYEFNSPPNNQVMLCEPTIIERNITEIVYLTNTTIEKEICPKLAEYRNWSKPQCDITGFAPFSKDNSIRLSAGGDIWVTREPYVSCDPDKCYQFALGQGTTLNNVHSNNTVRNRTPYRTLLMNELGVPFHLGTKQVCIAWSSSSCHDGKAWLHVCITGDDKNATASFIYNGRLVDSIVSWSKEILRTQESECVCINGTCTVVMTDGSASGKADTKILFIEEGKIVHTSTLSGSAQHVEECSCYPRYPGVRCVCRDNWKGSNRPIVDINIKDHSIVSSYVCSGLVGDTPRKNDSSSSSHCLDPNNEEGGHGVKGWAFDDGNDVWMGRTISEKSRLGYETFKVIEGWSNPKSKLQINRQVIVDRGNRSGYSGIFSVEGKSCINRCFYVELIRGRKEETEVLWTSNSIVVFCGTSGTYGTGSWPDGADINLMPI

SEQ ID NO: 25885 - protein, 469 aa, Artificial Sequence; identical to SEQ ID NO: 22146
  derived and/or modified protein sequence (wt) from neuraminidase__InfluenzaA__AJJ98911

SEQ ID NO: 25886 - protein, 469 aa, Artificial Sequence; identical to SEQ ID NO: 22922
  derived and/or modified protein sequence (wt) from neuraminidase__InfluenzaA__AJJ98923

SEQ ID NO: 25887 - protein, 469 aa, Artificial Sequence
  derived and/or modified protein sequence (wt) from neuraminidase__InfluenzaA__AJJ98935
MNPNQKIITIGSVSLTISTICFFMQIAILITTVTLHFKRYEFNSPPNNQVMLCEPTIIERNITEIVYLTNTTIEKEICPKPAEYRNWSKPQCGITGFAPFSKDNSIRLSAGGDIWVTREPYVSCDPDKCYQFALGQGTTLNNVHSNNTVRDRTPYRTLLMNELGVPFHLGTKQVCIAWSSSSCHDGKAWLHVCITGDDKNATASFIYNGRLVDSVVSWSKEILRTQESECVCINGTCTVVMTDGSASGKADTKILFIEEGKIVHTSTLSGSAQHVEECSCYPRYPGVRCVCRDNWKGSNRPIVDINIKDHSIVSSYVCSGLVGDTPRKNDSSSSSHCLDPNNEEGGHGVKGWAFDDGNDVWMGRTINETSRLGYETFKVIEGWSNPKSKLQINRQVIVDRGDRSGYSGIFSVEGKSCINRCFYVELIRGRKEETEVLWTSNSIVVFCGTSGTYGTGSWPDGADLNLMPI

SEQ ID NO: 25888 - protein, 469 aa, Artificial Sequence
  derived and/or modified protein sequence (wt) from neuraminidase__InfluenzaA__AJJ98947
MNPNQKIITIGSVSLTISTICFFMQIAILITTVTLHFKQYEFNSPPNNQVTLCEPTIIERNITEIVYLTNTTIEKEICPKLAEYRNWSKPQCDITGFAPFSKDNSIRLSAGGDIWVTREPYVSCDPDKCYQFALGQGTTLNNVHSNNTVRDRTPYRTLLMNELGVPFHLGTKQVCIAWSSSSCHDGKAWLHVCITGNDKNATASFIYNGRLVDSVVSWSKEILRTQESECVCINGTCTVVMTDGSASGKADTKILFIEEGKIVHTSTLSGSAQHVEECSCYPRYPGVRCVCRDNWKGSNRPIVDINIKDHSIVSSYVCSGLVGDTPRKNDSSSSSHCLDPNNEEGGHGVKGWAFDDGNDVWMGRTINETSRLGYETFKVIEGWSNPKSKLQINRQVIVDRGNRSGYSGIFSVEGKSCINRCFYVELIRGRKEETEVLWTSNSIVVFCGTSGTYGTGSWPDGADLNLMPI

SEQ ID NO: 25889 - protein, 469 aa, Artificial Sequence
  derived and/or modified protein sequence (wt) from neuraminidase__InfluenzaA__AJJ98971
MNPNQKIITIGSVSLTISTICFFMQIAILITTVTLHFKQYEFNSPPNNQVMLCEPTIIERNITEIVYLTNTTIEKEICPKLAEYRNWSKPQCDITGFAPFSKDNSIRLSAGGDIWVTREPYVSCDPDKCYQFALGQGTTLNNVHSNDTVRNRTPYRTLLMNELGVPFHLGTKQVCIAWSSSSCHDGKAWLHVCITGDDKNATASFIYNGRLVDSVVSWSKEILRTQESECVCINGTCTVVMTDGSASGKADTKILFIEEGKIVHTSTLSGSAQHVEECSCYPRYPGVRCVCRDNWKGSNRPIVDINIKDHSIVSSYVCSGLVGDTPRKNDSSSSSHCLDPNNEEGGHGVKGWAFDDGNDVWMGRTISEKSRLGYETFKVIEGWSNPKSKLQINRQVIVDRGNRSGYSGIFSVEGKSCINRCFYVELIRGRKEETEVLWTSNSIVVFCGTSGTYGTGSWPDGADINLMPI

SEQ ID NO: 25890 - protein, 469 aa, Artificial Sequence
  derived and/or modified protein sequence (wt) from neuraminidase__InfluenzaA__AJJ98995
MNPNQKIITIGSVSLTISTICFFMQIAILITTVTLHFKQYEFNSPPNNQVMLCEPTIIERNMTEIVYLTNTTIEKEICPKPAEYRNWSKPQCDITGFAPFSKDNSIRLSAGGDIWVTREPYVSCDPDKCYQFALGQGTTLNNVHSNNIVRDRTPYRTLLMNELGVPFHLGTKQVCIAWSSSSCHDGKAWLHVCITGDDKNATASFIYNGRLVDSVVSWSKEILRTQESECVCINGTCTVVMTDGSASGKADTKILFIEEGKIVHTSTLSGSAQHVEECSCYPRYPGVRCVCRDNWKGSNRPIVDINIKDHSIVSSYVCSGLVGDTPRKNDSSSSSHCLDPNNEEGGHGVKGWAFDDGNDVWMGRTINETSRLGYETFKVIEGWSNPKSKLQINRQVIVDRSDRSGYSGIFSVEGKSCINRCFYVELIRGRKEETEVLWTSNSIVVFCGTSGTYGTGSWPDGADLNLMPI

SEQ ID NO: 25891 - protein, 469 aa, Artificial Sequence; identical to SEQ ID NO: 21143
  derived and/or modified protein sequence (wt) from neuraminidase__InfluenzaA__AJJ99007

SEQ ID NO: 25892 - protein, 469 aa, Artificial Sequence
  derived and/or modified protein sequence (wt) from neuraminidase__InfluenzaA__AJJ99019
MNPNQKIITIGSVSLTISTICFFMQTAILITTVTLHFKQCEFNSPPNNQVMLCEPTIIERNITEIVYLTNTTIEKEICPKLAEYRNWSKPQCDITGFAPFSKDNSIRLSAGGDIWVTREPYVSCDPDKCYQFALGQGTTLNNVHSNNTVRDRTPYRTLLMNELGVPFHLGTKQVCIAWSSSSCHDGKAWLHVCITGDDKNATASFIYNGRLVDSVVSWSKEILRTQESECVCINGTCTVVMTDGSASGKADTKILFIEEGKIVHTSTLSGSAQHVEECSCYPRYPGVRCVCRDNWKGSNRPIVDINIKDHSIVSNYVCSGLVGDTPRKNDSSSSSHCLDPNNEEGGHGVKGWAFDDGNDVWMGRTISEKSRFGYETFKVIEGWSNPKSKLQINRQVIVDRGNRSGYSGIFSVEGKSCINRCFYVELIRGRKEETEVLWTSNSIVVFCGTSGTYGTGSWPDGADINLMPI

SEQ ID NO: 25893 - protein, 469 aa, Artificial Sequence
  derived and/or modified protein sequence (wt) from neuraminidase__InfluenzaA__AJJ99031
MNPNQKIITIGSVSLTISTICFFMQIAILITTVTLHFKQYEFNSPPNNQVMLCEPTIIERNITEIVYLTNTTIEKEICPKLAEYRNWSKPQCDITGFAPFSKDNSIRLSAGGDIWVTREPYVSCDPDKCYQFALGQGTTINNVHSNDTVRDRTPYRTLLMNELGVPFHLGTKQVCIAWSSSSCHDGKAWLHVCITGDDKNATASFIYNGRLVDSVVSWSKEILRTQESECVCINGTCTVVMTDGSASGKADTKILFIEEGKIVHTSTLSGSAQHVEECSCYPRYPGVRCVCRDNWKGSNRPIVDINIKDHSIVSSYVCSGLVGDTPRKNDSSSSSHCLDPNNEEGGHGVKGWAFDDGNDVWMGRTISEKSRLGYETFKVIEGWSNPKSKLQINRQVIVDRGNRSGYSGIFSVEGKSCINRCFYVELIRGRKEETEVLWTSNSIVVFCGTSGTYGTGSWPDGADINLMPI

SEQ ID NO: 25894 - protein, 469 aa, Artificial Sequence
  derived and/or modified protein sequence (wt) from neuraminidase__InfluenzaA__AJJ99043
MNPNQKIITIGSVSLTISTICFFMQIAILITTVTLHFKQYEFNSPPNNQVMLCEPTIIERNITEIVYLTNTTIEKEICPKLAEYRKWSKPQCNITGFAPFSKDNSIRLSAGGDIWVTREPYVSCDPDKCYQFALGQGTTLNNVHSNDTVRDRTPYRTLLMNELGVPFHLGTKQVCIAWSSSSCHDGKAWLHVCVTGDDKNATASFIYNGRLVDSIVSWSKEILRTQESECVCINGTCTVVMTDGSASGKADTKILFIEEGKIVHTSTLSGSAQHVEECSCYPRYPGVRCVCRDNWRGSNRPIVDINMKDYSIVSSYVCSGLVGDTPRKNDSSSSGHCLDPNNEEGGHGVKGWAFDDGNDVWMGRTISEKSRSGYETFKVIEGWSNPNSKLQINRQVIVDRGNRSGYSGIFSVEGKSCINRCFYVELIRGRKEETEVLWTSNSIVVFCGTSGTYGTGSWPDGADINLMPI

SEQ ID NO: 25895 - protein, 469 aa, Artificial Sequence
  derived and/or modified protein sequence (wt) from neuraminidase__InfluenzaA__AJJ99067
MNPNQKIITIGSVSLTISTICFFMQIAILITTVTLHFKQYEFNSPPNNQVMLCEPTIIERNITEIVYLTNTTIEKEICPKPAEYRNWSKPQCGITGFAPFSKDNSIRLSAGGDIWVTREPYVSCDPDKCYQFALGQGTTLNNVHSNNTVRGRTPYRTLLMNELGVPFHLGTKQVCIAWSSSSCHDGKAWLHVCITGDDKNATASFIYNGRLVDSVVSWSKDILRTQESECVCINGTCTVVMTDGSASGKADTKILFIEEGKIVHTSTLSGSAQHVEECSCYPRYPGVRCVCRDNWKGSNRPIVDINIKDHSIVSSYVCSGLVGDTPRKNDSSSSSHCLDPNNEEGGHGVKGWAFDDGNDVWMGRTINETSRLGYETFKVIEGWSNPKSKLQINRQVIVDRGDRSGYSGIFSVEGKSCINRCFYVELIRGRKEETEVLWTSNSIVVFCGTSGTYGTGSWPDGADLNLMPI

SEQ ID NO: 25896 - protein, 469 aa, Artificial Sequence
  derived and/or modified protein sequence (wt) from neuraminidase__InfluenzaA__AJJ99079
MNPNQKIITIGSVSLTISTICFFMQIAILITTVTLHFKQYEFNSPPNNQVMLCEPTIIERNITEIVYLTNTTIEKEICPKPAEYRNWSKPQCGITGFAPFSKDNSIRLSAGGDIWVTREPYVSCDPDKCYQFALGQGTTLNNVHSNNTVRNRTPYRTLLMNELGVPFHLGTKQVCIAWSSSSCHDGKAWLHVCITGDDKNATASFIYNGRLVDSVVSWSKEILRTQESECVCINGTCTVVMTDGSASGKADTKILFIEEGKIVHTSTLSGSAQHVEECSCYPRYPGVRCVCRDNWKGSNRPIVDINIKDHSIVSSYVCSGLVGDTPRKNDSSSSSHCLDPNNEEGGHGVKGWAFDDGNDVWMGRTINETSRLGYETFKVIEGWSNPKSKLQINRQVIVDRGDRSGYSGIFSVEGKSCINRCFYVELIRGRKEETEVLWTSNSIVVFCGTSGTYGTGSWPDGADLNLMPI

SEQ ID NO: 25897 - protein, 469 aa, Artificial Sequence
  derived and/or modified protein sequence (wt) from neuraminidase__InfluenzaA__AJJ99091
MNPNQKIITIGSVSLTISTICFFMQIAILITTVTLHFKQYEFNSPPNNQVMLCEPTIIERNITEIVYLTNTTIEKEICPKPAEYRNWSKPQCGITGFAPFSKDNSIRLSAGGDIWVTREPYVSCDPDKCYQFALGQGTTLNNVHSNNTVRDRTPYRTLLMNELGVPFHLGTKQVCIAWSSSSCHDGKAWLHVCITGDDKNATASFIYNGRLVDSVVSWSKEILRTQESECVCINGTCTVVMTDGSASGKADTKILFIEEGKIVHTSTLSGSAQHVEECSCYPRYPGVRCVCRDNWKGSNRPIVDINIKDHSIVSSYVCSGLVGDTPRKNDSSSSSHCLDPNNEEGGHGVKGWAFDDGNDLWMGRTINETSRLGYETFKVIEGWSNPKSKLQINRQVIVDRGDRSGYSGIFSVEGKSCINRCFYVELIRGRKEETEVLWTSNSIVVFCGTSGTYGTGSWPDGADLNLMPI

SEQ ID NO: 25898 - protein, 469 aa, Artificial Sequence
  derived and/or modified protein sequence (wt) from neuraminidase__InfluenzaA__AJJ99103
MNPNQKIITIGSVSLTISTICFFMQIAILITTVTLHFKQYEFNSPPNNQVMLCEPTIIERNMTEIVYLTNTTIEKEICPKPAEYRNWSKPQCDITGFAPFSKDNSIRLSAGGDIWVTREPYVSCDPDKCYQFALGQGTTLNNVHSNNTVRNRTPYRTLLMNELGVPFHLGTKQVCIAWSSSSCHDGKAWLHVCITGDDKNATASFIYNGRLVDSVVSWSKEILRTQESECVCINGTCTVVMTDGSASGKADTKILFIEEGKIVHTSTLSGSAQHVEECSCYPRYPGVRCVCRDNWKGSNRPIVDINIKDHSIVSSYVCSGLVGDTPRKNDSSSSSHCLDPNNEEGGHGVKGWAFDDGNDVWMGRTINETSRLGYETFKVIEGWSNPKSKLQINRQVIVDRSDRSGYSGIFSVEGKSCINRCFYVELIRGRKEETEVLWTSNSIVVFCGTSGTYGTGSWPDGADLNLMPI

SEQ ID NO: 25899 - protein, 469 aa, Artificial Sequence; identical to SEQ ID NO: 25365
  derived and/or modified protein sequence (wt) from neuraminidase__InfluenzaA__AJJ99115

SEQ ID NO: 25900 - protein, 469 aa, Artificial Sequence; identical to SEQ ID NO: 24285
  derived and/or modified protein sequence (wt) from neuraminidase__InfluenzaA__AJJ99127

SEQ ID NO: 25901 - protein, 469 aa, Artificial Sequence; identical to SEQ ID NO: 25573
  derived and/or modified protein sequence (wt) from neuraminidase__InfluenzaA__AJJ99139

SEQ ID NO: 25902 - protein, 469 aa, Artificial Sequence
  derived and/or modified protein sequence (wt) from neuraminidase__InfluenzaA__AJJ99151
MNPNQKIITIGSVSLTISTICFFMQIAILITTVTLHFKQYEFNSPPNNQVMLCEPTIIERNITEIVYLTNTTIEKEICPKPAEYRNWSKPQCDITGFAPFSKDNSIRLSAGGDIWVTREPYVSCDPDKCYQFALGQGTTLNNVHSNNTVRDRTPYRTLLMNELGVPFHLGTKQVCIAWSSSSCHDGKAWLHVCITGDDKNATASFIYNGRLVDSVVSWSKEILRTQESECVCINGTCTVVMTDGSASGKADTKILFIEEGKIVHTSTLSGSAQHVEECSCYPRYPGVRCVCRDNWKGSNRPIVDINIKDHSIVSSYVCSGLVGDTPRKNDSSSSSHCLDPNNEEGGHGVKGWAFDDGNDVWMGRTISEKSRLGYETFKVIEGWSNPKSKLQINRQVIVDRGNRSGYSGIFSVEGKSCINRCFYVELIRGRKEETEVLWTSNSIVVFCGTSGTYGTGSWPDGADINLMPI

SEQ ID NO: 25903 - protein, 469 aa, Artificial Sequence; identical to SEQ ID NO: 16599
  derived and/or modified protein sequence (wt) from neuraminidase__InfluenzaA__AJJ99163

SEQ ID NO: 25904 - protein, 469 aa, Artificial Sequence
  derived and/or modified protein sequence (wt) from neuraminidase__InfluenzaA__AJJ99175
MNPNQKIITIGSVSLTISTICLFMQIAILITTVTLHFKQYEFNSPPNNQVMLCEPTIIERNITEIVYLTNTTIEKEICPKLAEYRNWSKPQCDITGFAPFSKDNSIRLSAGGDIWVTREPYVSCDPDKCYQFALGQGTTLNNVHSNNTVRDRTPYRTLLMNELGVPFHLGTKQVCIAWSSSSCHDGKAWLHVCITGDDKNATASFIYNGRLVDSVVSWSKEILRTQESECVCINGTCTVVMTDGSASGKADTKILFIEEGKIVHTSTLSGSAQHVEECSCYPRYPGVRCVCRDNWKGSNRPIVDINIKDHSIVSSYVCSGLVGDTPRKNDSSSSSHCLDPNNEEGGHGVKGWAFDDGNDVWMGRTISEKSRLGYETFKVIEGWSNPKSKLQINRQVIVDRGNRSGYSGIFSVEGKSCINRCFYVELIRGRKEETEVLWTSNSIVVFCGTSGTYGTGSWPDGTDINLMPI

SEQ ID NO: 25905 - protein, 469 aa, Artificial Sequence
  derived and/or modified protein sequence (wt) from neuraminidase__InfluenzaA__AJJ99199
MNPNQKIITIGSVSLTISTICFFMQIAILITTVTLHFKQYEFNSPPNNQVMLCEPTIIERNITEIVYLTNTTIEKEICPKLAEYRNWSKPQCDITGFAPFSKDNSIRLSAGGDIWVTREPYVSCDPDKCYQFALGQGTTLNNVHSNDTVRNRTPYRTLLMNELGVPFHLGTKQVCIAWSSSSCHDGKAWLHVCITGDDKNATASFIYNGRLVDSIVSWSKEILRTQESECVCINGTCTVVMTDGSASGKADTKILFIEEGKIVHTSTLSGSAQHVEECSCYPRYPGVRCVCRDNWKGSNRPIVDINIKDHSIVSSYVCSGLVGDTPRKNDSSSSSHCLDPNNEEGGHGVKGWAFDDGNDVWMGRTISEKSRLGYETFKVIEGWSNPKSKLQINRQVIVDRGNRSGYSGIFSVEGKSCINRCFYVELIRGRKEETEVLWTSNSIVVFCGTSGTYGTGSWPDGADINLMPI

SEQ ID NO: 25906 - protein, 469 aa, Artificial Sequence; identical to SEQ ID NO: 16743
  derived and/or modified protein sequence (wt) from neuraminidase__InfluenzaA__AJJ99211

SEQ ID NO: 25907 - protein, 469 aa, Artificial Sequence
  derived and/or modified protein sequence (wt) from neuraminidase__InfluenzaA__AJJ99223
MNPNQKIITIGSVSLTISTICFFMQIAILITTVTLHFKQYEFNSPPNNQVMLCEPTIIERNITEIVYLTNTTIEKEICPKLAEYRNWSKPQCDITGFAPFSKDNSIRLSAGGDIWVTREPYVSCDPDKCYQFALGQGTTLNNVHSNDTVRNRTPYRTLLMNELGVPFHLGTKQVCIAWSSSSCHDGKAWLHVCITGDDKNATASFIYNGRLVDSIVSWSKEILRTQESECVCINGTCTVVMTDGSASGEADTKILFIEEGKIVHTSTLSGSAQHVEECSCYPRYPGVRCVCRDNWKGSNRPIVDINIKDHSIVSSYVCSGLVGDTPRKNDSSSSSHCLDPNNEEGGHGVKGWAFDDGNDVWVGRTISEKSRLGYETFKVIEGWSNPKSKLQINRQVIVDRGNRSGYSGIFSVEGKSCINRCFYVELIRGRKEETEVLWTSNSIVVFCGTSGTYGTGSWPDGADINLMPI

SEQ ID NO: 25908 - protein, 469 aa, Artificial Sequence
  derived and/or modified protein sequence (wt) from neuraminidase__InfluenzaA__AJJ99235
MNPNQKIITIGSVSLTISTICFFMQIAILITTVTLHFKQYEFNSPPNNQVMLCEPTIIERNITEIVYLTNTTIEKEICPKPAEYRNWSKPQCDITGFAPFSKDNSIRLSAGGDIWVTREPYVSCDPDKCYQFALGQGTTLNNVHSNDTVRDRTPYRTLLMNELGVPFHLGTKQVCIAWSSSSCHDGKAWLHVCITGDDKNATASFIYNGRLVDSIVSWSKEILRTQESECVCINGTCTVVMTDGSASGEADTKILFIEEGKIVHTSTLSGSAQHVEECSCYPRYPGVRCVCRDNWKGSNRPIVDINIKDHSIVSSYVCSGLVGDTPRKNDSSSSSHCLDPNNEEGGHGVKGWAFDDGNDVWMGRTISEKSRLGYETFKVIEGWSNPKSKLQINRQVIVDRGNRSGYSGIFSVEGKSCINRCFYVELIRGRKEETEVLWTSNSIVVFCGTSGTYGTGSWPDGADINLMPI

SEQ ID NO: 25909 - protein, 469 aa, Artificial Sequence
  derived and/or modified protein sequence (wt) from neuraminidase__InfluenzaA__AJJ99246
MNPNQKIITIGSVCMTIGMANLILQIGNIISIWISHSIQLGNQSQIETCNQNVITYENNTWVNQTYVNISNTNFAAGQSVVSVKLAGNSSLCPVSGWAIYSKDNSVRIGSKGDVFVIREPFISCSPLECRTFFLTQGALLNDKHSNGTIKDRSPYRTLMSCPIGEVPSPYNSRFESVAWSASACHDGINWLTIGISGPDSGAVAVLKYNGIITDTIKSWRNNILRTQESECACLNGSCFTIMTDGPSDGQASYKIFRIEKGKIVKSVEMNAPNYHYEECSCYPDSSEITCVCRDNWHGSNRPWVSFNQNLEYQIGYICSGIFGDNPRPNDKTGSCGPVSSSGANGVKGFSFKYGNGVWIGRTKSISSRKGFEMIWDPNGWTGTDNNFSIKQDIVGINEWSGYSGSFVQHPELTGLDCIRPCFWVELIRGRPKENTIWTSGSSISFCGVNSDTVGWSWPDGAELPFTIDK

SEQ ID NO: 25910 - protein, 469 aa, Artificial Sequence
  derived and/or modified protein sequence (wt) from neuraminidase__InfluenzaA__AJJ99257
MNPNQKIITIGSVCMTIGMANLILQIGNIISIWISHSIQLGNQNQIETCNQSVITYENNTWVNQTYVNISNTNFAAGQSVVSVKLAGNSSLCPVSGWAIYSKDNSIRIGSKGDVFVIREPFISCSPLECRTFFLTQGALLNDKHSNGTIKDRSPYRTLMSCPIGEVPSPYNSRFESVAWSASACHDGINWLTIGISGPDNGAVAVLKYNGIITDTIKSWRNNILRTQESECACVNGSCFTIMTDGPSDGQASYKIFRIEKGKIVKSVEMNAPNYHYEECSCYPDSSEITCVCRDNWHGSNRPWVSFNQNLEYQIGYICSGIFGDNPRPNDKTGSCGPVPSNGANGVKGFSFKYGNGVWIGRTKSISSRKGFEMIWDPNGWTGTDNSFSIKQDIVGTNEWSGYSGSFVQHPELTGLDCIRPCFWVELIRGRPKENTIWTSGSSISFCGVNSGTVGWSWPDGAELPFTIDK

SEQ ID NO: 25911 - protein, 470 aa, Artificial Sequence; identical to SEQ ID NO: 16632
  derived and/or modified protein sequence (wt) from neuraminidase__InfluenzaA__AJJ99269

SEQ ID NO: 25912 - protein, 469 aa, Artificial Sequence; identical to SEQ ID NO: 20958
  derived and/or modified protein sequence (wt) from neuraminidase__InfluenzaA__AJJ99280

SEQ ID NO: 25913 - protein, 469 aa, Artificial Sequence; identical to SEQ ID NO: 20709
  derived and/or modified protein sequence (wt) from neuraminidase__InfluenzaA__AJJ99291

SEQ ID NO: 25914 - protein, 470 aa, Artificial Sequence
  derived and/or modified protein sequence (wt) from neuraminidase__InfluenzaA__AJJ99303
MNPNQKIITIGSISIAIGIISLMLQIGNIISIWASHSIQTGSQNNTGICNQRIITYENSTWVNHTYVNINNTNVVAGEDKTSVTLAGNSSLCSISGWAIYTKDNSIRIGSKGDVFVIREPFISCSHLECRTFFLTQGALLNDKHSNGTVKDRSPYRALMSCPLGEAPSPYNSKFESVAWSASACHDGMGWLTIGISGPDNGAVAVLKYNGIITGTIKSWKKQILRTQESECVCMNGSCFTIMTDGPSNKAASYKIFKIEKGKVTKSMELNAPNFHYEECSCYPDTGIVMCVCRDNWHGSNRPWVSFNQNLDYQIGYICSGVFGDNPRPEDGEGSCNPVTVDGANGVKGFSYKYDNGVWIGRTKSNRLRKGFEMIWDPNGWTNTDSDFSVKQDVVAITDWSGYSGSFVQHPELTGLDCIRPCFWVELVRGLPRENTTIWTSGSSISFCGVNSDTANWSWPDGAELPFTIDK

SEQ ID NO: 25915 - protein, 469 aa, Artificial Sequence
  derived and/or modified protein sequence (wt) from neuraminidase__InfluenzaA__AJJ99314
MNPNQKIITIGSACMTIGMANLILQIGNIISIWISHSIQLGNQNQIETCNQSVITYENNTWVNQTYVNISNTNFAAGQSVVSVKLAGNSSLCPVSGWAIYSKDNSIRIGSKGDVFVIREPFISCSPLECRTFFLTQGALLNDKHSNGTIKDRSPYRTLMSCPIGEVPSPYNSRFESVAWSASACHDGINWLTIGISGPDNGAVAVLKYNGIITDTIKSWRNNILRTQESECACVNGSCFTVMTDGPSDGQASYKIFRIEKGKIVKSVEMNAPNYHYEECSCYPDSSEITCVCRDNWHGSNRPWVSFNQNLEYQIGYICSGIFGDNPRPNDKTGSCGPVSSNGANGVKGFSFKYGNGVWIGRTKSISSRNGFEMIWDPNGWTGTDNNFSIKQDIVGINEWSGYSGSFVQHPELTGLDCIRPCFWVELIRGRPKENTIWTSGSSISFCGVNSDTVGWSWPDGAELPFTIDK

SEQ ID NO: 25916 - protein, 470 aa, Artificial Sequence
  derived and/or modified protein sequence (wt) from neuraminidase__InfluenzaA__AJJ99326
MNPNQKIITIGSISIAIGIISLMLQIGNIISIWASHSIQTGSQNNTGICNQRIITYENSTWVNHTYVNINNTNVVAGEDKTSVTLAGNSSLCSISGWAIYTKDNSIRIGSKGDVFVIREPFISCSHLECRTFFLTQGALLNDKHSNGTVKDRSPYRALMSCPLGEAPSPYNSKFESVAWSASACHDGLGWLTIGISGPDNGAVAVLKYNGIITGTIKSWKKQILRTQESECVCMNGSCFTIMTDGPSNKAASYKIFKIEKGKVTKSIELNAPNFYYEECSCYPDTGIVMCVCRDNWHGSNRPWVSFNQNLDYQIGYICSGVFGDNPRPEDGEGSCNPVTVDGANGVKGFSYKYGNGVWIGRTKSNRLRKGFEMIWDPNGWTNTDSDFSVKQDVVAITDWSGYSGSFVQHPELTGLDCIRPCFWVELVRGLPRENTTIWTSGSSISFCGVNSDTANWSWPDGAELPFTIDK

SEQ ID NO: 25917 - protein, 469 aa, Artificial Sequence; identical to SEQ ID NO: 18382
  derived and/or modified protein sequence (wt) from neuraminidase__InfluenzaA__AJJ99337

SEQ ID NO: 25918 - protein, 469 aa, Artificial Sequence; identical to SEQ ID NO: 17845
  derived and/or modified protein sequence (wt) from neuraminidase__InfluenzaA__AJJ99348

SEQ ID NO: 25919 - protein, 469 aa, Artificial Sequence; identical to SEQ ID NO: 16738
  derived and/or modified protein sequence (wt) from neuraminidase__InfluenzaA__AJJ99359

SEQ ID NO: 25920 - protein, 469 aa, Artificial Sequence
  derived and/or modified protein sequence (wt) from neuraminidase__InfluenzaA__AJJ99370
MNPNQKIITIGSVCMIIGMANLILQIGNIISIWISHSIQLGNQSQIETCNQSVITYENNTWVNQTYVNISNTNFAAGQSVVSVKLAGNSSLCPVSGWAIYSKDNSIRIGSKGDVFVIREPFISCSPLECRTFFLTQGALLNDKHSNGTIKDRSPHRTLMSCPIGEVPSPYNSRFESVAWSASACHDGINWLTIGISGPDNGAVAVLKYNGIITDTIKSWRNNILRTQESECACVNGSCFTIMTDGPSDRQASYKIFRIEKGKIVKSVEMNAPNYHYEECSCYPDSSEITCVCRDNWHGSNRPWVSFNQNLEYQIGYICSGIFGDNPRPNDKTGSCGPVSSNGANGVKGFSFKYGNGVWIGRTKSISSRKGFEMIWDPNGWTGTDNNFSIKQDIVGINEWSGYSGSFVQHPELTGLDCIRPCFWVELIRGRPKENTIWTSGSSISFCGVNSDTVGWSWPDGAELPFTIDK

SEQ ID NO: 25921 - protein, 469 aa, Artificial Sequence; identical to SEQ ID NO: 20257
  derived and/or modified protein sequence (wt) from neuraminidase__InfluenzaA__AJJ99381

SEQ ID NO: 25922 - protein, 469 aa, Artificial Sequence
  derived and/or modified protein sequence (wt) from neuraminidase__InfluenzaA__AJJ99392
MNPNQKIITIGSVCMTIGMANLILQIGNIISIWISHSIQLGNQNQIETCNQSVITYENNTWVNQTYVNISNTNFAAGQSVVSVKLAGNSSLCPVSGWAIYSKDNSIRIGSKGDVFVIREPFISCSPLECRTFFLTQGALLNDKHSNGTIKDRSPYRTLMSCPIGEVPSPYNSRFESVAWSASACHDGINWLTIGISGPDNGAVAVLKYNGIITDTIKSWRNNILRTQESECACVNGSCFTVMTDGPSDGQASYKIFRIEKGKIVKSVEMNAPNYHYEECSCYPDSSEITCVCRDNWHGSNRPWVSFNQNLEYQIGYICSGIFGDNPRPNDKTGSCGPVSPNGANGVKGFSFKYGNGVWIGRTKSISSRNGFEMIWDPNGWTGTDNNFSIKQDIVGINEWSGYSGSFVQHPELTGLDCIRPCFWVELIRGRPKENTIWTSGSSISFCGVNSDTVGWSWPDGAKLPFTIDK

SEQ ID NO: 25923 - protein, 469 aa, Artificial Sequence; identical to SEQ ID NO: 16738
  derived and/or modified protein sequence (wt) from neuraminidase__InfluenzaA__AJJ99403

SEQ ID NO: 25924 - protein, 470 aa, Artificial Sequence; identical to SEQ ID NO: 17461
  derived and/or modified protein sequence (wt) from neuraminidase__InfluenzaA__AJJ99415

SEQ ID NO: 25925 - protein, 470 aa, Artificial Sequence
  derived and/or modified protein sequence (wt) from neuraminidase__InfluenzaA__AJJ99427
MNPNQKIITIGSISIAIGIISLMLQIGNIISIWASHSIQTGSQNNTGICNQRIITYENSTWVNHTYVNINNTNVVAGEDKTSVTLAGNSSLCSISGWAVYTKDNSIRIGSKGDVFVIREPFISCSHLECRTFFLTQGALLNDKHSNGTVKDRSPYRALMSCPLGEAPSPYNSKFESVAWSASACHDGMGWLTIGISGPDNGAVAVLKYNGIITGTIKSWKKQILRTQESECVCMNGSCFTIMTDGPSDKAASYKIFKIEKGKVTKSIELNAPNFYYEECSCYPDTGIVMCVCRDNWHGSNRPWVSFNQNLDYQIGYICSGVFGDNPRPEDGEGSCNPVTVDGANGVKGFSYKYGNGVWIGRTKSNRLRKGFEMIWDPNGWINTDSDFSVKQDVVAITDWSGYSGSFVQHPELTGLDCIRPCFWVELVRGLPRENTTIWTSGSSISFCGVNSDTANWSWPDGAELPFTIDK

SEQ ID NO: 25926 - protein, 470 aa, Artificial Sequence
  derived and/or modified protein sequence (wt) from neuraminidase__InfluenzaA__AJJ99439
MNPNQKIITIGSISIAIGIISLMLQIGNIISIWASHSIQTGSQNNTGICNQRIITYENSTWVNHTYVNINNTNVVAGEDKTSVTLAGNSSLCSTSGWAIYTKDNSIRIGSKGDVFVIREPFISCSHLECRTFFLTQGALLNDKHSNGTVKDRSPYRALMSCPLGEAPSPYNSKFESVAWSASACHDGMGWLTIGISGPDNGAVAVLKYNGIITGTIKSWKKQILRTQESECVCMNGSCFTIMTDGPSNKAASYKIFKIEKGKVTKSIELNAPNFYYEECSCYPDTGIVMCVCRDNWHGSNRPWVSFNQNLDYQIGYICSGVFGDNPRPEDGEGSCNPVTVDGANGVKGFSYKYGNGVWIGRTKSNRLRKGFEMIWDPNGWTNTDSDFSVKQDVVAITDWSGYSGSFVQHPELTGLDCIRPCFWVELVRGLPRENTTIWTSGSSISFCGVNSDTANWSWPDGAELPFTIDK

SEQ ID NO: 25927 - protein, 470 aa, Artificial Sequence
  derived and/or modified protein sequence (wt) from neuraminidase__InfluenzaA__AJJ99451
MNPNQKIITIGSISIAIGIISLMLQIGNIISIWASHSIQTGSQNNTGICNQRIITYENSTWVNHTYVNINNTNVVAGEDKTSVTLAGNSSLCSISGWAIYTKDNSIRIGSKGDVFVIREPFISCSHLECRTFFLTQGALLNDKHSNRTVKDRSPYRALMSCPLGEAPSPYNSKFESVAWSASACHDGMGWLTIGISGPDNGAVAVLKYNGIITGTIKSWKKQILRTQESECVCMNGSCFTIMTDGPSNKAASYKIFKIEKGKVTKSIELNAPNFHYEECSCYPDTGIVMCVCRDNWHGSNRPWVSFNQNLDYQIGYICSGVFGDNPRPEDGEGSCNPVTVDGANGVKGFSYKYDNGVWIGRTKSNRLRKGFEMIWDPNGWTNTDSDFSVKQDVVAITDWSGYSGSFVQHPELTGLDCIRPCFWVELVRGLPRENTTIWTSGSSISFCGVNSDTANWSWPDGAELPFTIDK

SEQ ID NO: 25928 - protein, 470 aa, Artificial Sequence; identical to SEQ ID NO: 16632
  derived and/or modified protein sequence (wt) from neuraminidase__InfluenzaA__AJJ99463

SEQ ID NO: 25929 - protein, 469 aa, Artificial Sequence
  derived and/or modified protein sequence (wt) from neuraminidase__InfluenzaA__AJJ99474
MNPNQKIITIGSVCMTIGIANLILQIGNIISIWISHSIQLGNQNQIETCNQSVIIYENNTWVNQTYVNISNTNFAAGQSVVSVKLAGNSSLCPVSGWAIYSKDNSIRIGSKGDVFVIREPFISCSPLECRTFFLTQGALLNDKHSNGTIKDRSPYRTLMSCPIGEVPSPYNSRFESVAWSASACHDGINWLTIGISGPDNGAVAVLKYNGIITDTIKSWRNNILRTQESECACVNGSCFTIMTDGPSDGQASYKIFRIEKGKIIKSVEMNAPNYHYEECSCYPDSSEITCVCRDNWHGSNRPWVSFNQNLEYQIGYICSGIFGDNPRPNDKTGSCGPVSSNGANGVKGFSFKYGNGVWIGRTKSISSRKGFEMIWDPNGWTGTDNSFSIKQDIVGINEWSGYSGSFVQHPELTGLDCIRPCFWVELIRGRPKENTIWTSGSSISFCGVNSGTVGWSWPDGAELPFTIDK

SEQ ID NO: 25930 - protein, 469 aa, Artificial Sequence; identical to SEQ ID NO: 20709
  derived and/or modified protein sequence (wt) from neuraminidase__InfluenzaA__AJJ99496

SEQ ID NO: 25931 - protein, 469 aa, Artificial Sequence
  derived and/or modified protein sequence (wt) from neuraminidase__InfluenzaA__AJJ99507
MNPNQKIITIGSVCMTIGMANLILQIGNIISIWISHSIQLGNQNQIETCNQSVITYENNTWVNQTYVNISNTNFAAGQSVVSVKLAGNSSLCPVSGWAIYSKDNSIRIGSKGDVFVIREPFISCSPLECRTFFLTQGALLNDKHSNGTIKDRSPYRTLMSCPIGEVPSPYNSRFESVAWSASACHDGINWLTIGISGPDNGAVAVLKYNGIITDTIKSWRNNILRTQESECACVNGSCFTVMTDGPSDGQASYKIFRIEKGKIVKSVEMNAPNYHYEECSCYPDSSEITCVCRDNWHGANRPWVSFNQNLEYQIGYICSGIFGDNPRPNDKTGSCGPVSSNGANGVKGFSFKYDNGVWIGRTKSISSRNGFEMIWDPNGWTGTDNDFSIKQDIVGINEWSGYSGSFVQHPELTGLDCIRPCFWVELIRGRPKENTIWTSGSSISFCGVNSDTVGWSWPDGAELPFTIDK

SEQ ID NO: 25932 - protein, 469 aa, Artificial Sequence; identical to SEQ ID NO: 16738
  derived and/or modified protein sequence (wt) from neuraminidase__InfluenzaA__AJJ99518

SEQ ID NO: 25933 - protein, 469 aa, Artificial Sequence
  derived and/or modified protein sequence (wt) from neuraminidase__InfluenzaA__AJJ99529
MNPNQKIITIGSVCMTIGMANLILQVGNIISIWISHSIQLGNQNQIETCNQSVITYENNTWVNQTYVNISNTNFAAGQSVVSVKLAGNSSLCPVSGWAIYSKDNSIRIGSKGDVFVIREPFISCSPLECRTFFLTQGALLNDKHSNGTIKDRSPYRTLMSCPIGEVPSPYNSRFESVAWSASACHDGFNWLTIGISGPDNGAVAVLKYNGIITDTIKSWRNNILRTQESECACVNGSCFTIMTDGPSDGQASYKIFRIEKGKIIKSVEMNAPNYHYEECSCYPDSSEITCVCRDNWHGSNRPWVSFNQNLEYQIGYICSGIFGDNPRPNDKTGSCGPVSSNGANGVKGFSFKYGNGVWIGRTKSISSRKGFEMIWDPNGWTGTDNSFSIKQDIVGINEWSGYSGSFVQHPELTGLDCIRPCFWVELIRGRPKENTIWTSGSSISFCGVNSGTVGWSWPDGAELPFTIDK

SEQ ID NO: 25934 - protein, 469 aa, Artificial Sequence
  derived and/or modified protein sequence (wt) from neuraminidase__InfluenzaA__AJJ99540
MNPNQKIITIGSVCMTIGMANLILQIGNIISIWISHSIQLGNQNQIETCNQSVITYENNTWVNQTYVNISNTNFAAGQSVVSVKLAGNSSLCPVSGWAIYSKDNSIRIGSKGDVFVIREPFISCSPLECRTFFLTQGALLNDKHSNGTIKDRSPYRTLMSCPIGEVPSPYNSRFESVAWSASACHDGINWLTIGISGPDNGAVAVLKYNGIITDTIKSWRNNILRTQESECACVNGSCFTIMTDGPSDGQASYKIFRIEKGKIVKSVEMNAPNYHYEECSCYPDSSKITCVCRDNWHGSNRPWVSFNQNLEYQIGYICSGIFGDNPRPNDKTGSCGPVSSNGANGVKGFSFKYGNGIWIGRTKSISSRKGFEMIWDPNGWTGTDNNFSIKQDIVGINEWSGYSGSFVQHPELTGLDCIRPCFWVELIRGRPKENTIWTSGSSISFCGVNSDTVGWSWPDGAELPFTIDK

SEQ ID NO: 25935 - protein, 469 aa, Artificial Sequence
  derived and/or modified protein sequence (wt) from neuraminidase__InfluenzaA__AJJ99551
MNPNQKIITIGSVCMTIGMANLILQIGNIISIWISHSIQLGNQSQTETCNQSVITYENNTWVNQTYVNISNTNPAAGQSVVSVKLAGNSSLCPVSGWAIYSKDNSIRIGSKGDVFVIREPFISCSSLECRTFFLTQGALLNDKHSNGTIKDRSPYRTLMSCPIGEVPSPYNSRFESVAWSASACHDGINWLTIGISGPDNGAVAVLKYNGIITDTIKSWRNNILRTQESECACVNGSCFTIMTDGPSDGQASYKIFRIEKGKIVKSVEMNAPNYHYEECSCYPDSSEITCVCRDNWHGSNRPWVSFNQNLEYQIGYICSGIFGDNPRPNDKTGSCGPVSSNGANGVKGFSFKYGNGVWIGRTKSISSRKGFEMIWDPNGWTGTDNNFSIKQDIVGINEWSGYSGSFVQHPELTGLDCIRPCFWVELIRGRPKENTIWTSGSSISFCGVNSDTVGWSWPDGAELPFTIDK

SEQ ID NO: 25936 - protein, 469 aa, Artificial Sequence; identical to SEQ ID NO: 20725
  derived and/or modified protein sequence (wt) from neuraminidase__InfluenzaA__AJJ99562

SEQ ID NO: 25937 - protein, 469 aa, Artificial Sequence
  derived and/or modified protein sequence (wt) from neuraminidase__InfluenzaA__AJJ99573
MNPNQKIITIGSVCMTIGMANLILQIGNIISIWISHSIQLGNQSQIETCNQSVITYENNTWVNQTYVNISNTNFAAGQSVVSVKLAGNSSLCPVSGWAIYSKDNSIRIGSKGDVFVIREPFISCSPLECRTFFLTQGALLNDKHSNGTIKDRSPYRTLMSCPIGEVPSPYNSRFESVAWSASACHDGINWLTIGISGPDNGAVAVLKYNGIITDTIKSWRNNILRTQESECACVNGSCFTIMTDGPSDGQASYKIFRIEKGKIVKSVEMNAPNYHYEECSCYPDSSEITCVCRDNWHGSNRPWVSFNQNLEYQIGYICSGIFGDNPRPNDKTGSCGPVSSNGANGVKGFSFKYGNGVWIGRTKSISSRKGFEMIWDPNGWTGTDNNFSIKQDVVGINEWSGYSGSFVQHPELTGLDCIRPCFWVELIRGRPKENTIWTSGSSISFCGVNSDTVGWSWPDGAELPFTIDK

SEQ ID NO: 25938 - protein, 469 aa, Artificial Sequence; identical to SEQ ID NO: 25915
  derived and/or modified protein sequence (wt) from neuraminidase__InfluenzaA__AJJ99584

SEQ ID NO: 25939 - protein, 469 aa, Artificial Sequence
  derived and/or modified protein sequence (wt) from neuraminidase__InfluenzaA__AJJ99595
MNPNQKIITIGSVCMTIGMANLIFQIGNIISIWISHSIQLGNQNQIETCNQSVITYENNTWVNQTYVNISNTNFAAGQSVVSVKLAGNSSLCPVSGWAIYSKDNSIRIGSKGDVFVIREPFISCSPLECRTFFLTQGALLNDKHSNGTIKDRSPYRTLMSCPIGEVPSPYNSRFESVAWSASACHDGINWLTIGISGPDNGAVAVLKYNGIITDTIKSWRNNILRTQESECACVNGSCFTVMTDGPSDGQASYKIFRIEKGKIVKSVEMNAPNYHYEECSCYPDSSEITCVCRDNWHGSNRPWVSFNQNLEYQIGYICSGIFGDNPRPNDKTGSCGPVSSNGANGVKGFSFKYGNGVWIGRTKSISSRNGFEMIWDPNGWTGTDNNFSIKQDIVGINEWSGYSGSFVQHPELTGLDCIRPCFWVELIRGRPKENTIWTSGSSISFCGVNSDTVGWSWPDGAELPFTIDK

SEQ ID NO: 25940 - protein, 469 aa, Artificial Sequence
  derived and/or modified protein sequence (wt) from neuraminidase__InfluenzaA__AJJ99606
MNPNQKIITIGSVCMTIGMANLILQIGNIISIWISHSIQLGNQNQIETCNQSVITYENNTWVNQTYVNISNTNFAAGQSVVSVKLAGNSSLCPVSGWAIYSKDNSIRIGSKGDVFVIREPFISCSPLECRTFFLTQGALLNDKHSNGTIKDRSPYRTLMSCPIGEVPSPYNSRFESVAWSASACHDGINWLTIGISGPDNGAVAVLKYNGVITDTIKSWRNNILRTQESECACVNGSCFTVMTDGPSDGQASYKIFRIEKGKIVKSVEMNAPNYHYEECSCYPDSSEITCVCRDNWHGSNRPWVSFNQNLEYQIGYICSGIFGDNPRPNDKTGSCGPVSSNGANGVKGFSFKYGNGVWIGRTKSISSRNGFEMIWDPNGWTGTDNNFSIKQDIVGINEWSGYSGSFVQHPELTGLDCIRPCFWVELIRGRPKENTIWTSGSSISFCGVNSDTVGWSWPDGAELPFTIDK

SEQ ID NO: 25941 - protein, 470 aa, Artificial Sequence; identical to SEQ ID NO: 17461
  derived and/or modified protein sequence (wt) from neuraminidase__InfluenzaA__AJJ99618

SEQ ID NO: 25942 - protein, 470 aa, Artificial Sequence
  derived and/or modified protein sequence (wt) from neuraminidase__InfluenzaA__AJJ99630
MNPNQKIITIGSISIAIGIISLMLQIGNIISIWASHSIQTGSQNNTGICNQRIITYENSTWVNHTYVNINNTNVVAGEDKTSVTLAGNSSLCSISGWAIYTKDNSIRIGSKGDVFVIREPFISCSHLECRTFFLTQGALLNDKHSNGTVKDRSPYRALMSCPLGEAPSPYNSKFESVAWSASACHDGMGWLTIGISGPDNGAVAVLKYNGIITGTIKSWKKQILRTQESECVCMNGSCFTIMTDGPSNKAASYKIFKIEKGKVTKSIELNAPNFYYEECSCYPDTGIVMCVCRDNWHGSNRPWVSFNQNLDYQIGYICSGVFGDNPRPEDGEGSCNPVTVDGANGVKGFSYKYGNGVWIGRTKSNRLRKGFEMIWDPNGWTNTDSDFSMKQNVVAITDWSGYSGSFVQHPELTGLDCIRPCFWVELVRGLPRENTTIWTSGSSISFCGVNSDTANWSWPDGAELPFTIDK

SEQ ID NO: 25943 - protein, 470 aa, Artificial Sequence; identical to SEQ ID NO: 17461
  derived and/or modified protein sequence (wt) from neuraminidase__InfluenzaA__AJJ99642

SEQ ID NO: 25944 - protein, 470 aa, Artificial Sequence; identical to SEQ ID NO: 17461
  derived and/or modified protein sequence (wt) from neuraminidase__InfluenzaA__AJJ99654

SEQ ID NO: 25945 - protein, 470 aa, Artificial Sequence
  derived and/or modified protein sequence (wt) from neuraminidase__InfluenzaA__AJJ99666
MNPNQKIITIGSISIAIGIISLMLQIGNIISIWASHSIQTGSQNNTGICNQRIITYENSTWVNHTYVNINNNNVVAGEDKTSVTLAGNSSLCSISGWAIYTKDNSIRIGSKGDVFVIREPFISCSHLECRTFFLTQGALLNDKHSNGTVKDRSPYRALMSCPLGEAPSPYNSKFESVAWSASACHDGMGWLTIGISGPDNGAVAVLKYNGIITGTIKSWKKQILRTQESECVCMNGSCFTIMTDGPSNKAASYKIFKIEKGKVTKSIELNAPNFHYEECSCYPDTGIVMCVCRDNWHGSNRPWVSFNQNLDYQIGYICSGVFGDNPRPEDGEGSCNPVTVDGANGVKGFSYKYDNGVWIGRTKSNRLRKGFEMIWDPNGWTNTDSDFSVKQDVVAITDWSGYSGSFVQHPELTGLDCIRPCFWVELVRGLPRENTTIWTSGSSISFCGVNSDTANWSWPDGAELPFTIDK

SEQ ID NO: 25946 - protein, 469 aa, Artificial Sequence
  derived and/or modified protein sequence (wt) from neuraminidase__InfluenzaA__AJJ99677
MNPNQKIITIGSVCMTIGMANLILQIGNIISIWISHSIQLGNQNQIETCNQSVITYENNTWVNQTYVNISNTNFAAGQSVVSVKLAGNSSLCPVSGWAIYSKDNSIRIGSKGDVFVIREPFISCSPLECRTFFLTQGALLNDKHSNGTIKDRSPYRTLMSCPIGEVPSPYNSRFESVAWSASACHDGINWLTIGISGPDNGAVAVLKYNGIITDTIKSWRNNILRTQESECACVNGSCFTIMTDGPSDGQASYKIFRIEKGKIIKSVEMNAPNYHYEECSCYPDSSEITCVCRDNWHGSNRPWVSFNQNLEYQIGYICSGIFGDNPRPNDKTGSCGPVSSNGANGVKGFSFKYGNGVWIGRTKSISSRKGFEMIWDPNGWTGTDNSFSIKQDIVGMNEWSGYSGSFVQHPELTGLDCIRPCFWVELIRGRPKENTIWTSGSSISFCGVNSGTVGWSWPDGAELPFTIDK

SEQ ID NO: 25947 - protein, 469 aa, Artificial Sequence
  derived and/or modified protein sequence (wt) from neuraminidase__InfluenzaA__AJJ99688
MNPNQKIITIGSVCMTIGMANLILQIGNIISIWISHSIQLGNQNQIETCNQSVITYENNTWVNQTYVNISNTNFAAGQSVVSVKLAGNSSLCPVSGWAIYSKDNSIRIGSKGDVFVIREPFISCSPLECRTFFLTQGALLNDKHSNGTIKDRSPYRTLMSCPIGEVPSPYNSRFESVAWSASACHDGINWLTIGISGPDNGAVAVLKYNGIITDTIKSWRNNILRTQESECACVNGSCFTIMTDGPSDGQASYKIFRIEKGKIIKSVEMNAPNYHYEECSCYPDSSEITCVCRDNWHGSNRPWVSFNQNLEYQIGYICSGIFGDNPRPNDKTGSCGPVSSNGANGVKGFSFKYGNGVWIGRTKSISSRKGFEMIWDPNGWTGTDNSFSIKQDIVGINEWSGYSGSFVQHPELTGLDCIRPCFWVELIRGRPKENTIWTSGSSISFCGVNSGTVGWSWPDGAELPFTIDK

SEQ ID NO: 25948 - protein, 469 aa, Artificial Sequence
  derived and/or modified protein sequence (wt) from neuraminidase__InfluenzaA__AJJ99710
MNPNQKIITIGSVCMTIGMANLILQIGNIISIWISHSIQLGNQSQIETCNQSVITYENNTWVNQTYVNISNTNFAAGQSVVSVKLAGNSSLCPVSGWAIYSKDNSIRIGSKGDVFVIREPFISCSPLECRTFFLTQGALLNDKHSNGTIKDRSPYRTLMSCPIGEVPSPYNSRFESVAWSASACHDGINWLTIGISGPDNGAVAVLKYNGIITDTIKSWRNNILRTQESECACVNGSCFTIMTDGPSDGQASYKIFRIEKGKIVKSVEMNAPNYHYEECSCYPDSSKITCVCRDNWHGSNRPWVSFNQNLEYQIGYICSGIFGDNPRPNDKTGSCGPVSSNGANGVKGFSFKYGNGVWIGRTKSISSRKGFEMIWDPNGWTGTDNNFSIKQDIVGINEWSGYSGSFVQHPELTGLDCIRPCFWVELIRGRPKENTIWTSGSSISFCGVNSDTVGWSWPDGAELPFTIDK

SEQ ID NO: 25949 - protein, 469 aa, Artificial Sequence; identical to SEQ ID NO: 20257
  derived and/or modified protein sequence (wt) from neuraminidase__InfluenzaA__AJJ99721

SEQ ID NO: 25950 - protein, 469 aa, Artificial Sequence; identical to SEQ ID NO: 20257
  derived and/or modified protein sequence (wt) from neuraminidase__InfluenzaA__AJJ99732

SEQ ID NO: 25951 - protein, 469 aa, Artificial Sequence; identical to SEQ ID NO: 20957
  derived and/or modified protein sequence (wt) from neuraminidase__InfluenzaA__AJJ99743

SEQ ID NO: 25952 - protein, 469 aa, Artificial Sequence; identical to SEQ ID NO: 18291
  derived and/or modified protein sequence (wt) from neuraminidase__InfluenzaA__AJJ99754

SEQ ID NO: 25953 - protein, 469 aa, Artificial Sequence
  derived and/or modified protein sequence (wt) from neuraminidase__InfluenzaA__AJJ99765
MNPNQKIITIGSVCMTIGMANLILQIGNIISIWISHSIQLGNQNQIETCNQSVITYENNTWVNQTYVNISNTNFATGQSVVSVKLAGNSSLCPVSGWAIYSKDNSIRIGSKGDVFVIREPFISCSPLECRTFFLTQGALLNDKHSNGTIKDRSPYRTLMSCPIGEVPSPYNSRFESVAWSASACHDGINWLTIGISGPDNGAVAVLKYNGIITDTIKSWRNNILRTQESECACVNGSCFTVMTDGPSDGQASYKIFRIEKGKIVKSVEMNAPNYHYEECSCYPDSSEITCVCRDNWHGSNRPWVSFNQNLEYQIGYICSGIFGDNPRPNDKTGSCGPVSSNGANGVKGFSFKYGNGVWIGRTKSISSRNGFEMIWDPNGWTGTDNNFSIKQDIVGINEWSGYSGSFVQHPELTGLDCIRPCFWVELIRGRPKENTIWTSGSSISFCGVNSDTVGWSWPDGAELPFTIDK

SEQ ID NO: 25954 - protein, 470 aa, Artificial Sequence
  derived and/or modified protein sequence (wt) from neuraminidase__InfluenzaA__AJJ99777
MNPNQKIITIGSISIAIGIISLILQIGNIISIWASHSIQTGSQNNTGICNQRIITYENSTWVNHTYVNINNTNVVAGEDKTSVTLAGNSSLCSISGWAIYTKDNSIRIGSKGDVFVIREPFISCSHLECRTFFLTQGALLNDKHSNGTVKDRSPYRALMSCPLGEAPSPYNSKFESVAWSASACHDGMGWLTIGISGPDNGAVAVLKYNGIITGTIKSWKKQILRTQESECVCMNGSCFTIMTDGPSNKAASYKIFKIEKGKVTKSIELNAPNFYYEECSCYPDTGIVMCVCRDNWHGSNRPWVSFNQNLDYQIGYICSGVFGDNPRPEDGEGSCNPVTVDGANGVKGFSYKYGNGVWIGRTKSNRLRKGFEMIWDPNGWTNTDSDFSVKQDVVAITDWSGYSGSFVQHPELTGLDCIRPCFWVELVRGLPRENTAVWTSGSSISFCGVNSDTANWSWPDGAELPFTIDK

SEQ ID NO: 25955 - protein, 469 aa, Artificial Sequence; identical to SEQ ID NO: 16738
  derived and/or modified protein sequence (wt) from neuraminidase__InfluenzaA__AJJ99788

SEQ ID NO: 25956 - protein, 470 aa, Artificial Sequence
  derived and/or modified protein sequence (wt) from neuraminidase__InfluenzaA__AJJ99800
MNPNQKIITIGSISIAIGIISLMLQIGNIISIWASHSIQTGSQNNTGICNQRIITYENSTWVNHTYVNINNTNVVAGEDKTSVTLAGNSSLCSISGWAIYTKDNSIRIGSKGDVFVIREPFISCSHLECRTFFLTQGALLNDKHSNGTVKDRSPYRALMSCPLGEAPSPYNSKFESVAWSASACHDGMGWLTIGISGPDNGAVAVLKYNGIITGTIKSWKKQILRTQESECVCMNGSCFTIMTDGPSNKAASYKIFKIEKGKVTKSIELNAPNFYYEECSCYPDTGIVMCVCRDNWHGSNRPWVSFNQNLDYQIGYICSGVFGDNPRPEDGEGSCNPVTVDGANGVKGFSYKYGNGVWIGRTKSNRLRKGFEMIWDPNGWTNTDSDFSVKQDVVAITDWSGYSGSFVQHPELTGLDCIRPCFWVELVRGLPRENTTIWTSGSSISFCGVNSDTANWSWPDGAELPFIIDK

SEQ ID NO: 25957 - protein, 470 aa, Artificial Sequence; identical to SEQ ID NO: 17461
  derived and/or modified protein sequence (wt) from neuraminidase__InfluenzaA__AJJ99812

SEQ ID NO: 25958 - protein, 470 aa, Artificial Sequence
  derived and/or modified protein sequence (wt) from neuraminidase__InfluenzaA__AJJ99824
MNPNQKIITIGSISIAIGTISLMLQIGNIISIWASHSIQTGSQNNTGICNQRIITYENSTWVNHTYVNINNTNVVAGEDKTSVTLAGNSSLCSISGWAIYTKDNSIRIGSKGDVFVIREPFISCSHLECRTFFLTQGALLNDKHSNGTVKDRSPYRALMSCPLGEAPSPYNSKFESVAWSASACHDGMGWLTIGISGPDNGAVAVLKYNGIITGTIKSWKKQILRTQESECVCMNGSCFTIMTDGPSNKAASYKIFKIEKGKVTKSIELNAPNFHYEECSCYPDTGIVMCVCRDNWHGSNRPWVSFNQNLDYQIGYICSGVFGDNPRPEDGEGSCNPVTVDGANGVKGFSYKYDNGVWIGRTKSNRLRKGFEMIWDPNGWTNTDSDFSVKQDVVAITDWSGYSGSFVQHPELTGLDCIRPCFWVELVRGLPRENTTIWTSGSSISFCGVNSDTANWSWPDGAELPFTIDK

SEQ ID NO: 25959 - protein, 469 aa, Artificial Sequence; identical to SEQ ID NO: 25947
  derived and/or modified protein sequence (wt) from neuraminidase__InfluenzaA__AJJ99835

SEQ ID NO: 25960 - protein, 469 aa, Artificial Sequence; identical to SEQ ID NO: 20257
  derived and/or modified protein sequence (wt) from neuraminidase__InfluenzaA__AJJ99846

SEQ ID NO: 25961 - protein, 469 aa, Artificial Sequence; identical to SEQ ID NO: 20257
  derived and/or modified protein sequence (wt) from neuraminidase__InfluenzaA__AJJ99857

SEQ ID NO: 25962 - protein, 469 aa, Artificial Sequence
  derived and/or modified protein sequence (wt) from neuraminidase__InfluenzaA__AJJ99868
MNPNQKIITIGSVCMTIGMANLILQIGNIISIWISHSIQLGNQNQIETCNQSVITYENNTWVNQTYVNISNTNFAAGQSVVSVKLAGNSSLCPVSGWAIYSKDNSIRIGSKGDVFVIREPFISCSPLECRTFFLTQGALLNDKHSNGTIKDRSPYRTLMSCPIGEVPSPYNSRFESVAWSASACHDGINWLTIGISGPDNGAVAVLKYNGIITDTIKSWRNNILRTQESECACVNGSCFTVMTDGPSDGQASYKIFRIEKGKIVKSVEMNAPNYHYEECSCYPDSSVITCVCRDNWHGSNRPWVSFNQNLEYQIGYICSGIFGDNPRPNDKTGSCGPVSSNGANGVKGFSFKYGNGVWIGRTKSISSRNGFEMIWDPNGWTGTDNNFSIKQNIVGINEWSGYSGSFVQHPELTGLDCIRPCFWVELIRGRPKENTIWTSGSSISFCGVNSDTVGWSWPDGAELPFTIDK

SEQ ID NO: 25963 - protein, 469 aa, Artificial Sequence; identical to SEQ ID NO: 19157
  derived and/or modified protein sequence (wt) from neuraminidase__InfluenzaA__AJJ99879

SEQ ID NO: 25964 - protein, 469 aa, Artificial Sequence; identical to SEQ ID NO: 16738
  derived and/or modified protein sequence (wt) from neuraminidase__InfluenzaA__AJJ99890

SEQ ID NO: 25965 - protein, 469 aa, Artificial Sequence
  derived and/or modified protein sequence (wt) from neuraminidase__InfluenzaA__AJJ99901
MNPNQKIITIGSVCMTIGMANLILQIGNIISIWISHSIQLGNQNQIETCNQSVITYENNTWVNQTYVNISNTNFAAGQSVVSVKLAGNSSLCPVSGWAIYSKDNSIRIGSKGDVFVIREPFISCSPLECRTFFLTQGALLNDKHSNGTIKDRSPYRTLMSCPIGEVPSPYNSRFESVAWSASACHDGINWLTIGISGPDNGAVAVLKYNGIITDTIKSWRNNILRTQESECACVNGSCFTIMTDGPSDGQASYKIFRIEKGKIVKSVEMNAPNYHYEECSCYPDSSEITCVCRDNWHGSNRPWVSFNQNLEYQIGYICSGIFGDNPRPNDKTGSCGPVSSNGANGVKGFSFKYGNGVWIGRTKSISSRKGFEMIWDPNGWTGTDNSFSIKQDIVGINEWSGYSGSFVQHPELTGLDCIRPCFWVELIRGRPKENTIWTSGSSISFCGVDSGTVGWSWPDGAELPFTIDK

SEQ ID NO: 25966 - protein, 469 aa, Artificial Sequence
  derived and/or modified protein sequence (wt) from neuraminidase__InfluenzaA__AJJ99912
MNPNQKIITIGSVCMTIGMANLILQIGNIISIWISHSIQLGNQSQIETCNQSVITYENNTWVNQTYVNISNTNFAAGQSVVSVKLAGNSSLCPVSGWAIYSKDNSIRIGSKGDVFVIREPFISCSPLECRTFFLTQGALLNDKHSNGTIKDRSPYRTLMSCPIGEVPSPYNSRFESVAWSASACHDGINWLTIGISGPDNGAVAVLKYNGIITDTIKSWRNNILRTQESECACVNGSCFTIMTDGPSDGQASYKIFRIEKGKIVKSVEMNAPNYHYEECSCYPDSSKITCVCRDNWHGSNRPWVSFNQNLEYQIGYICSGIFGDNPRPKDKTGSCGPVSSNGANGVKGFSFKYGNGVWIGRTKSISSRKGFEMIWDPNGWTGTDNNFSIKQDIVGINEWSGYSGSFVQHPELTGLDCIRPCFWVELIRGRPKENTIWTSGSSISFCGVNSDTVGWSWPDGAELPFTIDK

SEQ ID NO: 25967 - protein, 469 aa, Artificial Sequence; identical to SEQ ID NO: 20257
  derived and/or modified protein sequence (wt) from neuraminidase__InfluenzaA__AJJ99923

SEQ ID NO: 25968 - protein, 469 aa, Artificial Sequence; identical to SEQ ID NO: 20709
  derived and/or modified protein sequence (wt) from neuraminidase__InfluenzaA__AJJ99934

SEQ ID NO: 25969 - protein, 469 aa, Artificial Sequence; identical to SEQ ID NO: 20257
  derived and/or modified protein sequence (wt) from neuraminidase__InfluenzaA__AJJ99945

SEQ ID NO: 25970 - protein, 469 aa, Artificial Sequence
  derived and/or modified protein sequence (wt) from neuraminidase__InfluenzaA__AJJ99956
MNPNQKIITIGSVCMTIGMANLILQIGNIISIWISHSIQLGNQNQIETCNQSVITYENNTWVNQTYVNISNTNFAAGQSVVSVKLAGNSSLCPVSGWAIYSKDNSIRIGSKGDVFVIREPFISCSPLECRTFFLTQGALLNDKHSNGTIKDRSPYRTLMSCPIGEVPSPYNSRFESVAWSASACHDGINWLTIGISGPDNGAVAVLKYNGIITDTIKSWRNNILRTQESECACVNGSCFTVMTDGPSDGQASYKIFRIEKGKIVKSVEMNAPNYHYEECSCYPDSSEITCVCRDNWHGSNRPWVSFNQNLEYQIGYICSGIFGDNPRPNDKTGSCGPVLSNGANGVKGFSFKYGNGVWIGRTKSISSRNGFEMIWDPNGWTGTDNNFSIKQDIVGINEWSGYSGSFVQHPELTGLDCIRPCFWVELIRGRPKENTIWTSGSSISFCGVNSDTVGWSWPDGAELPFTIDK

SEQ ID NO: 25971 - protein, 469 aa, Artificial Sequence; identical to SEQ ID NO: 16738
  derived and/or modified protein sequence (wt) from neuraminidase__InfluenzaA__AJJ99967

SEQ ID NO: 25972 - protein, 470 aa, Artificial Sequence
  derived and/or modified protein sequence (wt) from neuraminidase__InfluenzaA__AJJ99991
MNPNQKIITIGSISIAIGIISLMLQIGNIISIWASHSIQTGSQNNTGICNQRIITYENCTWVNHTYVNINNTNVVAGEDKTSVTLAGNSSLCSISGWAIYTKDNSIRIGSKGDVFVIREPFISCSHLECRTFFLTQGALLNDKHSNGTVKDRSPYRALMSCPLGEAPSPYNSKFESVAWSASACHDGMGWLTIGISGPDNGAVAVLKYNGIITGTIKSWKKQILRTQESECVCMNGSCFTIMTDGPSNKAASYKIFKIEKGKVTKSIELNAPNFHYEECSCYPDTGIVMCVCRDNWHGSNRPWVSFNQNLDYQIGYICSGVFGDNPRPEDGEGSCNPVTVDGANGVKGFSYKYDNGVWIGRTKSNRLRKGFEMIWDPNGWTNTDSDFSVKQDVVAITDWSGYSGSFVQHPELTGLDCIRPCFWVELVRGLPRENTTIWTSGSSISFCGVNSDTANWSWPDGAELPFTIDK

SEQ ID NO: 25973 - protein, 469 aa, Artificial Sequence; identical to SEQ ID NO: 25947
  derived and/or modified protein sequence (wt) from neuraminidase__InfluenzaA__AJK00003

SEQ ID NO: 25974 - protein, 469 aa, Artificial Sequence
  derived and/or modified protein sequence (wt) from neuraminidase__InfluenzaA__AJK00014
MNPNQKIITIGSVCMTIGMANLILQIGNIISIWISHSIQLGNQSQIETCNQSVITYENNTWVNQTYVNISNTNFAAGQSVVSVKLAGNSSLCPVSGWAIYSKDNSIRIGSKGDVFVIREPFISCSPLECRTFFLTQGALLNDKHSNGTIKDRSPYRTLMSCPIGEVPSPYNSRFESVAWSASACHDGINWLTIGISGPDNGAVAVLKYNGVITDTIKSWRNNILRTQESECACVNGSCFTIMTDGPSDGQASYKIFRIEKGKIVKSVEMNAPNYHYEECSCYPDSSEITCVCRDNWHGSNRPWVSFNQNLEYQIGYICSGIFGDNPRPNDKTGSCGPVSSNGANGVKGFSFKYGNGVWIGRTKSISSRKGFEMIWDPNGWTGTDNNFSTKQDIVGINEWSGYSGSFVQHPELTGLDCIRPCFWVELIRGRPKENTIWTSGSIISFCGVNSDTVGWSWPDGAELPFTIDN

SEQ ID NO: 25975 - protein, 469 aa, Artificial Sequence
  derived and/or modified protein sequence (wt) from neuraminidase__InfluenzaA__AJK00025
MNPNQKIITIGSVCMTIGMANLILQIGNIISIWISHSIQLGNQNQIETCNQSVITYENNTWVNQTYVNISNTNFAAGQSVVSVKLAGNSSLCPVSGWAIYSKDNSIRIGSKGDVFVIREPFISCSPLECRTFFLTQGALLNDKHSNGTIKDRSPYRTLMSCPIGEVPSPYNSRFESVAWSASACHDGINWLTIGISGPDNGAVAVLKYNGIITDTIKSWRNNILRTQESECACVNGSCFTIMTDGPSDGQASYKIFRIEKGKIVKSVEMNAPNYHYEECSCYPDSSEITCVCRDNWHGSNRPWVSFNQNLEYQIGYICSGIFGDNPRPNDKTGSCGPVSSNGANGVKGFSFKYGNGVWIGRTKSISSRKGFEMIWDPNGWTGTDNSFSIKQDIVGINEWSGYSGSFVQHPELTGLDCIRPCFWVELIRGRPKENTIWTSGSSISFCGVNSGTVGWSWPDGAELPFTIDK

SEQ ID NO: 25976 - protein, 469 aa, Artificial Sequence
  derived and/or modified protein sequence (wt) from neuraminidase__InfluenzaA__AJK00036
MNPNQKIITIGSVCMTIGMANLILQIGNIISIWISHSIQLGNQSQIETCNQSVITYENNTWVNQTYVNISNINFAAGQSVVSVKLAGNSSLCPVSGWAIYSKDNSIRIGSKGDVFVIREPFISCSPLECRTFFLTQGALLNDKHSNGTIKDRSPYRTLMSCPIGEVPSPYNSRFESVAWSASACHDGINWLTIGISGPDNGAVAVLKYNGIITDTIKSWRNNILRTQESECACVNGSCFTIMTDGPSDGQASYKIFRIEKGKIVKSVEMNAPNYHYEECSCYPDSSEITCVCRDNWHGSNRPWVSFNQNLEYQIGYICSGIFGDNPRPNDKTGSCGPVSSNGANGVKGFSFKYGNGVWIGRTKSISSRKGFEMIWDPNGWTGTDNNFSIKQDIVGINEWSGYSGSFVQHPELTGLDCIRPCFWVELIRGRPKENTIWTSGSSISFCGVNSDTVGWSWPDGAELPFTIDK

SEQ ID NO: 25977 - protein, 469 aa, Artificial Sequence; identical to SEQ ID NO: 20957
  derived and/or modified protein sequence (wt) from neuraminidase__InfluenzaA__AJK00047

SEQ ID NO: 25978 - protein, 469 aa, Artificial Sequence; identical to SEQ ID NO: 20957
  derived and/or modified protein sequence (wt) from neuraminidase__InfluenzaA__AJK00058

SEQ ID NO: 25979 - protein, 469 aa, Artificial Sequence
  derived and/or modified protein sequence (wt) from neuraminidase__InfluenzaA__AJK00069
MNPNQKIITIGSVCMTIGMANLILQIGNIISIWISHSIQLGNQNQIETCNQSVITYENNTWVNQTYFNISNTNFAAGQSVVSVKLAGNSSLCPVSGWAIYSKDNSIRIGSKGDVFVIREPFISCSPLECRTFFLTQGALLNDKHSNGTIKDRSPYRTLMSCPIGEVPSPYNSRFESVAWSASACHDGINWLTIGISGPDNGAVAVLKYNGIITDTIKSWRNNILRTQESECACVNGSCFTVMTDGPSDGQASYKIFRIEKGKIVKSVEMNAPNYHYEECSCYPDSSEITCVCRDNWHGSNRPWVSFNQNLEYQIGYICSGIFGDNPRPNDKTGSCGPVSSNGANGVKGFSFKYGNGVWIGRTKSISSRNGFEMIWDPNGWTGTDNNFSIKQDIVGINEWSGYSGSFVQHPELTGLDCIRPCFWVELIRGRPKENTIWTSGSSISFCGVNSDTVGWSWPDGAELPFTIDK

SEQ ID NO: 25980 - protein, 470 aa, Artificial Sequence; identical to SEQ ID NO: 17461
  derived and/or modified protein sequence (wt) from neuraminidase__InfluenzaA__AJK00081

SEQ ID NO: 25981 - protein, 470 aa, Artificial Sequence; identical to SEQ ID NO: 16632
  derived and/or modified protein sequence (wt) from neuraminidase__InfluenzaA__AJK00093

SEQ ID NO: 25982 - protein, 470 aa, Artificial Sequence
  derived and/or modified protein sequence (wt) from neuraminidase__InfluenzaA__AJK00105
MSPNQKIITIGSISIAIGIISLMLQIGNTISIWASHSIQTGSQNNTGICNQRIITYENSTWVNHTYVNINNTNVVAGEDKTSVTLAGNSSLCSISGWAIYTKDNSIRIGSKGDVFVIREPFISCSHLECRTFFLTQGALLNDKHSNGTVKDRSPYRALMSCPLGEAPSPYNSKFESVAWSASACHDGMGWLTIGISGPDNGAVAVLKYNGIITGTIKSWKKQILRTQESECVCMNGSCFTIMTDGPSNKAASYKIFKIEKGKVTKSIELNAPNFHYEECSCYPDTGIVMCVCRDNWHGSNRPWVSFNQNLDYQIGYICSGVFGDNPRPEDGEGSCNPVTVDGANGVKGFSYKYDNGVWIGRTKSNRLRKGFEMIWDPNGWTNTDSDFSVKQDVVAITDWSGYSGSFVQHPELTGLDCIRPCFWVELVRGLPRENTTIWTSGSSISFCGVNSDTANWSWPDGAELPFTIDK

SEQ ID NO: 25983 - protein, 469 aa, Artificial Sequence; identical to SEQ ID NO: 19013
  derived and/or modified protein sequence (wt) from neuraminidase__InfluenzaA__AJK00116

SEQ ID NO: 25984 - protein, 469 aa, Artificial Sequence; identical to SEQ ID NO: 17845
  derived and/or modified protein sequence (wt) from neuraminidase__InfluenzaA__AJK00127

SEQ ID NO: 25985 - protein, 469 aa, Artificial Sequence; identical to SEQ ID NO: 16738
  derived and/or modified protein sequence (wt) from neuraminidase__InfluenzaA__AJK00138

SEQ ID NO: 25986 - protein, 449 aa, Artificial Sequence
  derived and/or modified protein sequence (wt) from neuraminidase__InfluenzaA__AJK00152
MNPNQKIITIGSICMVTGIVSLMLQIGNIISMWVSHSIQTRNQHQTEPIRNTNFLTENAVASVTLAGNSSLCPIRGWAVHSKDNSIRIGSKGDVFVIREPFISCSHLECRTFFLTQGALINDKHSNGTVKDRSPHRTLMSCPVGEAPSPYNSRFESVAWSASACHDGTSWLTIGISGPDNGAVAVLKYNGIITDTIKSWRNNILRTQESECACVNGSCFTVMTDGPSNGQASYKIFKMEKGKVVKSVELNAPNYHYEECSCYPDAGEITCVCRDNWHGSNRPWVSFNQNLEYQIGYICSGVFGDNPRPNDGTGSCGPVSPNGAYGIKGFSFKYGNGVWIGRTKSTNSRSGFEMIWDPNGWTGTDSDFSVKQDIVEITDWSGYSGSFVQHPELTGLDCIRPCFWVELIRGRPKESTIWTSGSSISFCGVNSDTVSWSWPDGAELPFTIDK

SEQ ID NO: 25987 - protein, 449 aa, Artificial Sequence
  derived and/or modified protein sequence (wt) from neuraminidase__InfluenzaA__AJK00167
MNPNQKIITIGSICMVIGIVSLMLQIGNMISIWVSHSIQTGNQHQAEPIRNANFLTENAVASVTLAGNSSLCPVRGWAVHSKDNSIRIGSKGDVFVIREPFISCSHLECRTFFLTQGALLNDKHSNGTVKDRSPHRTLMSCPVGEAPSPYNSRFESVAWSASACHDGTSWLTIGISGPDNGAVAVLKYNGIITDTIKSWRNNILRTQESECACVNGSCFTVMTDGPSNGQASYKIFKMEKGKVVKSVELNAPNYHYEECSCYPDAGEITCVCRDNWHGSNRPWVSFNQNLEYQIGYICSGVFGDNPRPNDGTGSCGPVSPNGAYGIKGFSFKYGNGVWIGRTKSTNSRSGFEMIWDPNGWTETDSNFSVKQDIVAITDWSGYSGSFVQHPELTGLDCIRPCFWVELIRGRPKESTIWTSGSSISFCGVNSDTVSWSWPDGAELPFTIDK

SEQ ID NO: 25988 - protein, 449 aa, Artificial Sequence
  derived and/or modified protein sequence (wt) from neuraminidase__InfluenzaA__AJK00178
MNPNQKIITIGSICMVIGIVSLMLQIGNMISIWASHSIRTGNQNQVEPIINTNFPTEKAAASITLAGNSSLCPIRGWAIHSKDNSIRIGSKGDVFVIREPFISCSHLECRTFFLTQGALLNDKHSNGTVKDRSPHRTLMSCPVGEAPSPYNSRFESVAWSASACHDGTSWLTIGISGPDNGAVAVLKYNGIITDTIKTWRNNILRTQESECACVNGSCFTVMTDGPSDGQASYKIFKMEKGKVIKSVELDAPNYHYEECSCYPDAGEITCVCRDNWHGSNRPWVSFNQNLEYQIGYICSGVFGDNPRPTDGTGSCGPVSHNGAYGVKGFSFKYGNGVWIGRTKSPNSRSGFEMIWDPNGWSETDSSFSVKQDIVAITDWSGYSGSFVQHPELTGLDCIRPCFWVELIRGRPKESTVWTSGSSISFCGVNSDTVSWSWPDGAELPFTIDK

SEQ ID NO: 25989 - protein, 449 aa, Artificial Sequence
  derived and/or modified protein sequence (wt) from neuraminidase__InfluenzaA__AJK00199
MNPNQKIITIGSICMVIGIVSLMLQIGNMISIWVSHSIQTGNQNQVEPIINTNFLTEKAVVSITLAGNSSLCPIRGWAIHSKDNSIRIGSKGDVFVIREPFISCSHLECRTFFLTQGALLNDKHSNGTVKDRSPHRTLMSCPVGEAPSPYNSRFESVAWSASACHDGTSWLTIGISGPDNGAAAVLKYNGIITDTIKSWRNNILRTQESECACVNGSCFTVMTDGPSDGQASYKIFKMEKGKVIKSVELDAPNYHYEECSCYPDAGEITCVCRDNWHGSNRPWVSFNQNLEYQIGYICSGVFGDNPRPNDGTGSCSPVSHNGAYGVKGFSFKYGNGVWIGRTKSPNSRSGFEMIWDPNGWSETDSSFSVKQDIVAITDWSGYSGSFVQHPELTGLDCIRPCFWVELIRGRPKESTVWTSGSSISFCGVNSDTVSWSWPDGAELPFTIDK

SEQ ID NO: 25990 - protein, 449 aa, Artificial Sequence
  derived and/or modified protein sequence (wt) from neuraminidase__InfluenzaA__AJK00208
MNPNQKIITIGSICMVTGIVSLMLQIGNIISMWVSHSIQTRNQHQTEPIRNTNFLTENAVASVTLAGNSSLCPIRGWAVHSKDNSIRIGSKGDVFVIREPFISCSHLECRTFFLTQGALLNDKHSNGTVKDRSPHRTLMSCPVGEAPSPYNSRFESVAWSASACHDGTSWLTIGISGPDNGAVAVLKYNGIITDTIKSWRNNILRTQESECACVNGSCFTVMTDGPSNGQASYKIFKMEKGKVVKSVELNAPNYHYEECSCYPDAGEIICVCRDNWHGSNRPWVSFNQNLEYQIGYICSGVFGDNPRPNDGTGSCGPVSPNGAYGIKGFSFKYGNGVWIGRTKSTNSRSGFEMIWDPNGWTGTDSDFSVKQDIVEITDWSGYSGSFVQHPELTGLDCIRPCFWVELIRGRPKESTIWTSGSSISFCGVNSDTVSWSWPDGAELPFTIDK

SEQ ID NO: 25991 - protein, 449 aa, Artificial Sequence
  derived and/or modified protein sequence (wt) from neuraminidase__InfluenzaA__AJK00219
MNPNQKIITIGSICMVTGIVSLMLQIGNIISMWVSHSIQTRNQHQAEPIRNTNFLTENAVASVTLAGNLSLCPIRGWAVHSKDNNIRIGSKGDVFVIREPFISCSHLECRTFFLTQGALLNDKHSNGTVKDRSPHRTLMSCPVGEAPSPYNSRFESVAWSASACHDGTSWLTIGISGPDNGAVAVLKYNGIITDTIKSWRNNILRTQESECACVNGSCFTVMTDGPSNGQASYKIFKMEKGKVVKSVELNAPNYHYEECSCYPDAGEIICVCRDNWHGSNRPWVSFNQNLEYQIGYICSGVFGDNPRPNDGTGSCGPVSPNGAYGIKGFSFKYGNGVWIGRTKSTNSRSGFEMIWDPNGWTGTDSDFSVKQDIVEITDWSGYSGSFVQHPELTGLDCIRPCFWVELIRGRPKESTIWTSGSSISFCGVNSDTVSWSWPDGAELPFTIDK

SEQ ID NO: 25992 - protein, 449 aa, Artificial Sequence
  derived and/or modified protein sequence (wt) from neuraminidase__InfluenzaA__AJK00230
MNPNQKIITIGSICMVTGIVSLMLQIGNIISMWVSHSIQTRNQHQTEPIRNTNFLTENAVASVTLAGNSSLCPIRGWAVHSKDNSIRIGSKGDVFVIREPFISCSHLECRTFFLTQGALINDKHSNGTVKDRSPHRTLMSCPVGEAPSPYNSRFESVAWSASACHDGTSWLTIGISGPDNGAVAVLKYNGIITDTIKSWRNNILRTQESECACVNGSCFTVMTDGPSNGQASYKIFKMEKGKVVKSVELNAPNYHYEECSCYPDAGEIICVCRDNWHGSNRPWVSFNQNLEYQIGYICSGVFGDNPRPNDGTGSCGPVSPNGAYGIKGFSFKYGNGVWIGRTKSTNSRSGFEMIWDPNGWTGTDSDFSVKQDIVEITDWSGYSGSFVQHPELTGLDCIRPCFWVELIRGRPKESTIWTSGSSISFCGVNSDTVSWSWPDGAELPFTIDK

SEQ ID NO: 25993 - protein, 459 aa, Artificial Sequence
  derived and/or modified protein sequence (wt) from neuraminidase__InfluenzaA__AJS18470
MNPNQKITCISATGVTLSVVSLLIGIANLGLNIGLHYKVDDSTTINIPNMNETNPTITNITNIIVNKNEERTFLNLTKPLCEVNSWHILSKDNAIRIGEDAHILVTREPYLSCDPQGCRMFALSQGTTLRGRHANGTIHDRSPFRALISWEMGQAPSPYNTRVECIGWSSTSCHDGISRMSICISGPNNNASAVVWYRGRPVTEIPSWVGNILRTQESECVCHKGICPVVMTDGPANNKAATKIIYFKEGKIQKIEELQGNAQHVEECSCYGAAGMIKCVCRDNWKGANRPIITIDPEMMTHTSKYLCSKILTDTSRPNDPTNGNCDAPIIGGSPDPGVKGFAYLDGENSWLGRTISKDSRSGYEMLKVPNAETDTQSGPTSYQLIVNNQNWSGYSGAFIDYWANKGCFNPCFYVELIRGRPKEIDVLWTSNSMVALCGSRERLGSWSWHDGAEIIYFK

SEQ ID NO: 25994 - protein, 459 aa, Artificial Sequence
  derived and/or modified protein sequence (wt) from neuraminidase__InfluenzaA__AJS18481
MNPNQKITCISATGVTLSVVSLLIGIANLGLNIGLHYKVSDSTTINSPNMNETNPTTTNITNIIVNKNEERTFLNLTKPLCEVNSWHILSKDNAIRIGEEAHILVTREPYLSCDPQGCRMFALSQGTTLRGRHANGTIHDRSPFRALISWEMGQAPSPYNTRVECIGWSSTSCHDGISRMSICISGPNNNASAVVWYRGRPVTEIPSWAGNILRTQESECVCHKGICPVVMTDGPANNKAATKIIYFREGKIQKIEELQGNAQHIEECSCYGAAGMIKCACRDNWKGANRPIITIDPEMMTHTSKYLCSKILTDTSRPNDPTNGNCDAPVTGGSPDPGIKGFAFLDGENSWLGRTISKNSRSGYEMLKVPNAETDTQSGPTSYQLIVNNQNWSGYSGAFIDYWANKECFNPCFYVELIRGRPKESDVLWTSNSMVALCGSRERLGSWSWHDGAEIIYFK

SEQ ID NO: 25995 - protein, 469 aa, Artificial Sequence
  derived and/or modified protein sequence (wt) from neuraminidase__InfluenzaA__AKA59350
MNPNQKIITIGSVCMTIGVANLILQIGNIISIWISHSIQLGNQNQIETCNQSVITYENNTWVNQTDVNISNTNFAAGQSVVSVKLAGNSSLCPVSGWAIYSKDNSIRIGSKGDVFVIREPFISCSPLECRTFFLTQGALLNDKHSNGTIKDRSPYRTLMSCPIGEVPSPYNSRFESVAWSASACHDGINWLTIGISGPDNGAVAVLKYNGIITDTIKSWRNNILRTQESECVCVNGSCFTVMTDGPSNGQASYKIFRIEKGKIVKSVEMNAPNYHYEECSCYPDSSEITCVCRDNWHGSNRPWVSFNQNLEYQIGYICSGIFGDNPRPNDKTGSCGPVSSNGANGVKGFSFKYGNGVWIGRTKSISSRNGFEMIWDPNGWTGTDNNFSIKQDIVGINEWSGYSGSFVQHPELTGLDCIRPCFWVELIRGRPKENTVWTSGSSISFCGVNSDTVGWSWPDGAELPFTIDK

SEQ ID NO: 25996 - protein, 469 aa, Artificial Sequence
  derived and/or modified protein sequence (wt) from neuraminidase__InfluenzaA__AKA59352
MNPNQKIITIGSVCMTIGMANLMLQIGNIISIWISHSIQLGNQNQIETCNQSVITYENNTWVNQTYVNISNTNLAVGQSVVSTKLAGNSSLCPVSGWAIYSKDNSIRIGSKGDVFVIREPFISCSPLECRTFFLTQGALLNDKHSNGTIKDRSPYRTLMSCPIGEVPSPYNSRFESVAWSASACHDGINWLTIGISGPDNGAVAVLKYNGIITDTIKSWRNNILRTQESECACVNGSCFTVMTDGPSDGQASYKIFRIEKGKIVKSVEMNAPNYHYEECSCYPDSSEITCVCRDNWHGSNRPWVSFNQNLEYQIGYICSGIFGDNPRPNDKTGSCGPVSSNGANGVKGFSFKYGNGVWIGRTKSISSRNGFEMIWDPNGWTGTDNNFSIKQDIVGINEWSGYSGSFVQHPELTGLDCIRPCFWVELIRGRPKENTIWTSGSSISFCGVNSDTVGWSWPDGAELPFTIDK

SEQ ID NO: 25997 - protein, 469 aa, Artificial Sequence
  derived and/or modified protein sequence (wt) from neuraminidase__InfluenzaA__AKA59354
MNPNQKIITIGSVCMTIGVANLILQIGNIISIWISHSIQLGNQNQIETCNQSVITYENNTWANQTYVNISNTNFAAGQSVVSVKLAGNSSLCPVSGWAIYSKDNSIRIGSKGDVFVIREPFISCSPLECRTFFLTQGALLNDKHSNGTIKDRSPYRTLMSCPIGEVPSPYNSRFESVAWSASACHDGINWLTIGISGPDNGAVAVLKYNGIITDTIKSWRNNILRTQESECVCVNGSCFTVMTDGPSNGQASYKIFRIEKGKIVKSVEMNAPNYHYEECSCYPDSSEITCVCRDNWHGSNRPWVSFNQNLEYQIGYICSGIFGDNPRPNDKTGSCGPVSSNGANGVKGFSFKYGNGVWIGRTKSISSRNGFEMIWDPNGWTETDNNFSIKQDIVGINEWSGYSGSFVQHPELTGLDCIRPCFWVELIRGRPKENTVWTSGSSISFCGVNSDTVGWSWPDGAELPFTIDK

SEQ ID NO: 25998 - protein, 459 aa, Artificial Sequence
  derived and/or modified protein sequence (wt) from neuraminidase__InfluenzaA__AKS48026
MNPNQKITCISATGVTLSVVSLLIGIANLGLNIGLHYKVSDSTTINIPNMNETNPTTTNITNIIVNKNEERTFLNLTKPLCEVNSWHILSKDNAIRIGEDAHILVTREPYLSCDPQGCRMFALSQGTTLRGRHANGTIHDKSPFRALISWEMGQAPSPYNTRVECIGWSSTSCHDGISRMSICISGPNNNASAVVWYRGRPVTEIPSWVGNILRTQESECVCHKGICPVVMTDGPANNKAATKIIYFKEGKIQKIEELQGNAQHIEECSCYGAAGMIKCVCRDNWKGANRPIITIDPEMMTHTSKYLCSKILTDTSRPNDPTNGNCDEPITGGSPDPGVKGFAFLDGENSWLGRTISKDSRSGYEMLKVPNAETDTQSGPTSYQLIVNNQNWSGYSGAFIDYWANKECFNPCFYVELIRGRPKEIDVLWASNSMVALCGSRERLGSWSWHDGAEIIYFK

SEQ ID NO: 25999 - protein, 459 aa, Artificial Sequence
  derived and/or modified protein sequence (wt) from neuraminidase__InfluenzaA__AKS48040
MNPNQKITCISATGMTLSVVSLLIGIANLGLNIGLHYKVSDSTTINIPNMNETNPTTTNITNIIVNKNEERTFLNLTKPLCEVNSWHILSKDNAIRIGEDAHILVTREPYLSCDPQGCRMFALSQGTTLRGRHANGTIHDRSPFRALISWEMGQAPSPYNTRVECIGWSSTSCHDGISRMSICISGPNNNASAVVWYRGRPVTEIPSWVGNILRTQESECVCHKGICPVVMTDGPANNKAATKIIYFKEGKIQKIEELQGNAQHIEECSCYGAAGMIKCVCRDNWKGANRPIITIDPEMMTHTSKYLCSKILTDTSRPNDPTNGNCDAPITGGSPDPGVKGFAFLDGENSWLGRTISKDSRSGYEMLKVPNAETDTQSGPTSYQLIVNNQNWSGYSGAFIDYWANKECFNPCFYVELIRGRPKEIDVLWASNSMVALCGSRERLGSWSWHDGAEIIYFK

SEQ ID NO: 26000 - protein, 459 aa, Artificial Sequence
  derived and/or modified protein sequence (wt) from neuraminidase__InfluenzaA__ALO75898
MNPNQKITCISATGVTLSVVSLLIGIANLGLNIGLHYKVSDSTTINIPNMNETNPTTTNITNIIVNKNEERTFLNLTKPLCEVNSWHILSKDNAIRIGEDAHILVTREPYLSCDPQGCRMFALSQGTTLRGRHANGTIHDRSPFRALISWEMGQAPSPYNTRVECIGWSSTSCHDGISRMSICISGPNNNASAVVWYRGRPVTEIPSWVGNILRTQESECVCHKGICPVVMTDGPANNKAATKIIYFKEGKIQKIEELQGNAQHIEECSCYGAAGMIKCVCRDNWKGANRPIITIDPEMMTHTSKYLCSKILTDTSRPNDPTNGNCDAPITGGSPDPGVKGFAFLDGENSWLGRTISKDSRSGYEMLKVPNAETDTQSGPTSYQLIVNNQNWSGYSGAFIDYWANKECFNPCFYVELIRGRPKEIDVLWASNSMVALCGSRERLGSWSWHDGAEIIYFK

SEQ ID NO: 26001 - protein, 459 aa, Artificial Sequence; identical to SEQ ID NO: 26000
  derived and/or modified protein sequence (wt) from neuraminidase__InfluenzaA__ALO75910

SEQ ID NO: 26002 - protein, 459 aa, Artificial Sequence
  derived and/or modified protein sequence (wt) from neuraminidase__InfluenzaA__ALO75922
MNPNQKITCISATGVTLSVVSLLIGIANLGLNIGLHYKVSDSTTINIPNMNETNPTTTNITNIIVNKNEERTFLNLTKPLCEVNSWHILSKDNAIRIGEDAHILVTREPYLSCDPQGCRMFALSQGTTLRGRHANGTIHDRSPFRALISWEMGQAPSPYNTRVECIGWSSTSCHDGISRMSICISGPNNNASAVVWYRGRPVTEIPSWVGNILRTQESECVCHKGICPVVMTDGPANNKAATKIIYFKEGKIQKIEELQGNAQHIEECSCYGAAGMIKCVCRDNWKGANRPIITIDPEMMTHTSKYLCSKILTDTSRPNDPTNGNCDEPITGGSPDPGVKGFAFLDGENSWLGRTISKDSRSGYEMLKVPNAETDTQSGPTSYQLIVNNQNWSGYSGAFIDYWANKECFNPCFYVELIRGRPKEIDVLWASNSMVALCGSRERLGSWSWHDGAEIIYFK

SEQ ID NO: 26003 - protein, 466 aa, Artificial Sequence
  derived and/or modified protein sequence (wt) from neuraminidase__InfluenzaA__ALT20083
MNPNQRITAIGSVSLIIAIICLLMQIAILTTTMTLHFRQNECSNPSNNQVMPCEPIIIERNTVHLNSTTIEREICPKVAEYKNWSKPQCQITGFAPFSKDNSIRLSASGDIWVTREPYVSCSLNKCYQFALGQGTTLKNKHSNGTTHDRTPHRTLLMNELGVPFHLGTKQVCIAWSSSSCYDGKAWLHVCVTGDDKNATASIIYDGMLVDSIGSWSKNILRTQESECVCINGTCAVVMTDGSASGKADTRVLFIREGKIINISPLSGSAQHVEECSCYPRYPEVRCVCRDNWKGSNRPILYINMADYSIESSYVCSGLVGDTPRNDDSSSSSNCRDPNNERGAPGVKGWAFDDGNDVWMGRTIKNGSRSGYETFRVVNGWTMANSKSQINRQVIVDSNDWSGYSGIFSVEGKKCINRCFYVELIRGRPQEPRVWWTSNSIIVFCGTSGTYGTGSWPDGANINFMPI

SEQ ID NO: 26004 - protein, 469 aa, Artificial Sequence
  derived and/or modified protein sequence (wt) from neuraminidase__InfluenzaA__AMA65392
MNPNQKIITIGSVCMTIGMANLILQIGNIISIWVSHSIQIGNQSQIETCNQSVITYENNTWVNQTYVNISNTNFAAGQSVVSVKLAGNSSLCPVSGWAIYSKDNSVRIGSRGDVFVIREPFISCSPLECRTFFLTQGALLNDKHSNGTIKDRSPYRTLMSCPIGEVPSPYNSRFESVAWSASACHDGINWLTIGISGPDSGAVAVLKYNGIITDTIKSWRNNILRTQESECACVNGSCFTIMTDGPSDGQASYKIFRIEKGKIIKSVEMKAPNYHYEECSCYPDSSEITCVCRDNWHGSNRPWVSFNQNLEYQMGYICSGVFGDNPRPNDKTGSCGPVSSNGANGVKGFSFKYGNGVWIGRTKSISSRKGFEMIWDPNGWTGTDNKFSIKQDIVGINEWSGYSGSFVQHPELTGLDCIRPCFWVELIRGRPEENTIWTSGSSISFCGVNSDTVGWSWPDGAELPFTIDK

SEQ ID NO: 26005 - protein, 469 aa, Artificial Sequence
  derived and/or modified protein sequence (wt) from neuraminidase__InfluenzaA__AMA65394
MNPNQKIITIGSVCMTIGMANLILQIGNIISIWVSHSIQIGNQSQIETCNQSVITYENNTWVNQTYVNISNTNFAAGQSVVSVKLAGNSSLCPVSGWAIYSKDNSVRIGSKGDVFVIREPFISCSPLECRTFFLTQGALLNDKHSNGTIKDRSPYRTLMSCPIGEVPSPYNSRFESVAWSASACHDGINWLTIGISGPDSGAVAVLKYNGIITDTIKSWRNNILRTQESECACVNGSCFTIMTDGPSDGQASYKIFRIEKGKIIKSVEMKAPNYHYEECSCYPDSSEITCVCRDNWHGSNRPWVSFNQNLEYQMGYICSGVFGDNPRPNDKTGSCGPVSSNGANGVKGFSFKYGNGVWIGRTKSISSRKGFEMIWDPNGWTGTDNKFSIKQDIVGINEWSGYSGSFVQHPELTGLDCIRPCFWVELIRGRPEENTIWTSGSSISFCGVNSDTVGWSWPDGAELPFTIDK

SEQ ID NO: 26006 - protein, 469 aa, Artificial Sequence
  derived and/or modified protein sequence (wt) from neuraminidase__InfluenzaA__BAA00618
MNPNQKIITMGSVSIIIAIVCLLMQIAILVTTVTLHFRQHESDSPPSNQVIPCEPIIIERNITEIVYLNNTTIEKETCPKSVEYRNWSKPQCKITGFAPFSKDNSIRLSAGGDIWVTREPYVSCDPGKCYQFALGQGTTLDNKHSNDTIHDRIPHRTLLMNELGVPFHLGTRQVCIAWSSSSCHDGKAWLHVCVTGDDKNATASFIYNGRLVDSIGSWSQNILRTQESECVCINGTCTVVMTDGSASGRADTRILFIEEGKIVHISPLSGSAQHVEECSCYPRYPDVRCICRDNWKGSNSPVVDINMKDYSIDSSYVCSGLVGDTPRNDDRSSKSNCRNPNNERGNHGVKGWAFDNGDDVWMGRTISKDLRSGYETFKVIGGWSTPNSKSQTNRQVIVDSNNWSGYSGIFSVEGKSCINRCFYVELIRGRKQETRVWWTSNSIVVFCGTSGTYGTGSWPDGANIDFMPI

SEQ ID NO: 26007 - protein, 469 aa, Artificial Sequence
  derived and/or modified protein sequence (wt) from neuraminidase__InfluenzaA__BAA00619
MNPNQKIITIGSVSLTFAAICFLMQIAILVTTVTLNFKQYECDPPATNQVMPCEPIIIERNITEIVYLTNTTIEREICPKLVEYRNWSKPQCKITGFAPFSKDNSIRLSAGGDIWVTREPYVSCDPGRCYQFALGQGTTLDNKHSNDTIHDRTPHRTLLMNELGVPFHLGTRQVCIAWSSSSCHDGKAWLHVCITGYDKNATASFIYDGRLVDSIGSWSKNILRTQESECVCINGTCTVVMTDGSASGRADTRILFIEEGRIVHISPLSGSAQHVEECSCYPRYPGVRCICRDNWKGSNRPVVDINVKDYSINSSYVCSGLVGDTPRNNDRSSNSYCQNPNNEKGNHGVKGWAFDDGNDVWMGRTISEDSRSGYQTFKVIGGWSTPNSKLQINRQVIVDSDNRSGYSGIFSVEGKSCINRCFYVELIRGRRQETRVWWTSNSIVVFCGTSGTYGTGSWPDGADINLMPI

SEQ ID NO: 26008 - protein, 469 aa, Artificial Sequence
  derived and/or modified protein sequence (wt) from neuraminidase__InfluenzaA__BAA00620
MNPNQKIMTIGSVSLIIAAVCFLMQIAILVTTVTLHFKQCECDSPSNNQVKPCEPIIIERNITEIVYLNNTTIEKETCPKLVEYRNWSKPQCKITGFAPFSKDNSIRLSAGGDIWVTREPYVSCDPGKCYQFALGQGTTLDNKHSNDTIHDRIPHRTLLMNELGVPFHLGTRQVCIAWSSSSCHDGKAWLHVCVTGDDKNATASFIYDGRLVDSIGSWSQNILRTQESECVCINGTCTVVMTDGSASGRADTRILFIEEGKIVHISPLSGSAQHVEECSCYPRYPNVRCICRDNWKGSNRPIVDINMKDYSIDSSYVCSGLVGDTPRNDDRSSKSNCRNPNNEKGNHGVKGWAFDNGDDVWMGRTISKDLRSGYETFKVIGGWFTPNSKSQVNRQVIVDSDNRSGYSGIFSVEGKSCINRCFYVELIRGRGQETRVWWTSNSIVVFCGTSGTYGKGSWPDGANINFMPI

SEQ ID NO: 26009 - protein, 469 aa, Artificial Sequence
  derived and/or modified protein sequence (wt) from neuraminidase__InfluenzaA__BAA00621
MNPNQKIITIGSVSLTIATICFLMQIAILVTTVTLHFKQYECDSPANNQVMPCEPIIIERNITEIVYLTNTTIEKEICPKLVEYRNWSKPQCKITGFAPFSKDNSIRLSAGGDIWVTREPYVSCDPGKCYQFALGQGTTLDNKHSNDTIHDRTPHRTLLMNELGVPFHLGTRQVCIAWSSSSCHDGKAWLHVCVTGYDKNATASFIYDGRLVDSIGSWSQNILRTQESECVCINGTCTVVMTDGSASGRADTKILFIEEGKIVHTSPLSGSAQHVEECSCYPRYPGVRCICRDNWKGSNRPVVDINVKDYSIDSSYVCSGLVGDTPRKNDRSSSSYCRNPNNEKGTHGVKGWAFDDGNDVWMGRTISEDSRSGYETFKVIGGWSTPNSKLQINRQVIVDSNDRSGYSGIFSVEGKSCINRCFYVELIRGREQETRVWWTSNSIVVFCGTSGTYGTGSWPDGADINLMPI

SEQ ID NO: 26010 - protein, 470 aa, Artificial Sequence
  derived and/or modified protein sequence (wt) from neuraminidase__InfluenzaA__BAA06714
MNPNQKIITIGSISMAIGIISLILQIGNIISIWVSHSIQTGSQNHTGICNQRIITYENSTWVNQTYVNINNTNVVAGKDKTSVTLAGNSSLCPIRGWAIYTKDNSIRIGSKGDVFVIREPFISCSHLECRTFFLTQGALLNDKHSNGTVKDRSPYRRLMSCPLGEAPSPYNSRFESIAWSASACHDGMGWLTIGISGPDDGAVAVLKYNGIITETIKSWKKRILRTQESECVCVNGSCFTIMTDGPSNGQASYRIFKIEKGKVTKSIELDAPNSHYEECSCYPDTGTVMCVCRDNWHGSNRPWVSFNQNLDYQIGYICSGVFGDNPPPKDGKGSCDPVTVDGADGVKGFSYRYGNGVWIGRTKSNRFRKGFEMIWDPNGWTDTDSDFLVKQDVVAMTDWSGYSGSFVQHPELTGLDCMRPCFWVELVRGRPRENTTIWTSGSSISFCGVNSDTANWSWPDGAELPFTIDK

SEQ ID NO: 26011 - protein, 470 aa, Artificial Sequence
  derived and/or modified protein sequence (wt) from neuraminidase__InfluenzaA__BAA06715
MNPNQKIITIGSISMAIGIISLILQIGNIISIWASHSIQTGSQNHTGICNQRIITYENSTWVNQTYVNINNTNVVAGKDKTSVTLAGNSSLCPIRGWAIYTKDNSIRIGSKGDVFVIREPFISCSHLECRTFFLTQGALLNDKHSNGTVKDRSPYRALMSCPLGEAPSPYNSRFESVAWSASACHDGMGWLTIGISGPDNGAVAVLKYNGIITETIKSWKKRILRTQESECVCVNGSCFTIMTDGPSNGAASYRIFKIEKGKVTKSIELDAPNYHYEECSCYPDTGTVMCVCRDNWHGSNRPSVSFNQNLDYQIGYICSGVFGDNPRPKDGEGSCNPVTVDGADGVKGFSYRYGNGVWIGRTKSNRLRKGFEMIWDPNGWTDTDSDFSVKQDVVAMTDWSGYSGSFVQHPELTGLDCMRPCFWVELIRGRPREKTTIWTSGSSISFCGVNSDTANWSWPDGAELPFTIDK

SEQ ID NO: 26012 - protein, 469 aa, Artificial Sequence
  derived and/or modified protein sequence (wt) from neuraminidase__InfluenzaA__BAA06716
MNTNQRIITIGTICLIVGIISLLLQIGNIILLWMSHSIQTGEKSHPKVCNQSVITYENNTWVNQTYVNISNTNIAAGQGVTPIILAGNSSLCPISGWAIYSKDNSIRIGSKGDIFVMREPFISCSHLECRTFFLTQGALLNDRHSNGTVKDRSPYRTLMSCPIGEAPSPYNSRFESVAWSASACHDGMGWLTIGISGPDNGAVAVLKYNGIITDTIKSWRNKILRTQESECVCINGSCFTIMTDGPSNGQASYKLFKMEKGKIIKSIELDAPNYHYEECSCYPDTGKVVCVCRDNWHASNRPWVSFDQNLDYQIGYICSGVFGDNPRSNDGKGNCGPVLSNGANGVKGFSFRYGNGVWIGRTKSISSRRGFEMIWDPNGWTETDSSFSMKQDIIALTDWSGYSGSFVQHPELTGMNCIRPCFWVELIRGQPKESTIWTSGSSISFCGVNSGTASWSWPDGADLPFTIDK

SEQ ID NO: 26013 - protein, 470 aa, Artificial Sequence
  derived and/or modified protein sequence (wt) from neuraminidase__InfluenzaA__BAA06717
MNPNQKIITIGSISMAIGIISLILQIGNIISIWASHSIQTGSQNHTGICNQRMITYENSTWVNQTYVNISNTNVVAGKDKTSVTLAGNSSLCPIRGWAIYTKDNSIRIGSKGDVFVIREPFISCSHLECRTFFLTQGALLNDKHSNGTVKDRSPYRALMSCPLGEAPSPYNSRFESVAWSASACHDGMGWLTIGISGPDDGAVAVLKYNGIITETIKSWRKQILRTQESECVCVNGSCFTIMTDGPSDGPASYRIFKIEKGKVTKSIELDAPNYHYEECSCYPDTGTVMCVCRDNWHGSNRPWVSFNQNLDYQIGYICSGVFGDNPRPKDGEGSCNPVTVDGADGVKGFSYRYGNGVWIGRTKSNRLRKGFEMIWDPNGWTDTDSDFSVKQDVVAMTDWSGYSGSFVQHPELTGLDCMRPCFWVELIRGRPREKTTIWTSGSSISFCGVNSDTANWSWPDGAELPFTIDK

SEQ ID NO: 26014 - protein, 470 aa, Artificial Sequence
  derived and/or modified protein sequence (wt) from neuraminidase__InfluenzaA__BAA06718
MNPNQKIITIGSICMAIGIISLILQIGNIVSIWISHSIQTGSQNYTGICNQRIITYENSTWVNQTYVNINNTNVVAGQDTTSVALAGNSSLCPISGWAIYSKDNSIRIGSKGDVFVIREPFISCSHLECRTFFLTQGALLNDKHSNGTVKDRSPYRRLMSCPIGEAPSPYNSRFESVAWSASACHDGMGWLTIGISGPDDGAVAVLKYNGIITETIKSWRKRILRTQESECVCVNGSCFTIMTDGPNNGPASYRIFKIEKGKITKSIELDAPNSHYEECSCYPDAGTVMCVCRDNWHGSNRPWVSFNQNLDYQIGYICSGVFGDNPRPKDGKGSCDPVTVDGADGVKGFSYRYGNGVWIGRTKSNSSRRGFEMIWDPNGWTDTDSKFLVKQDVVAMTDWSGYSGSFVQHPELTGLDCMRPCFWVELVRGRPRENTTIWTSGSSISFCGVNGDTANWSWPDGAELPFTIDK

SEQ ID NO: 26015 - protein, 470 aa, Artificial Sequence
  derived and/or modified protein sequence (wt) from neuraminidase__InfluenzaA__BAA06720
MNPNQKIITIGSISMAIGIISLILQIGNIISIWVSHSIQTGSQNHTGICNQRIITYENSTWVNQTYVNINNTNVVAGKDKTSVTLAGNSSLCPILGWAIYTKDNSIRIGSKGDVFVIREPFISCSHLECRTFFLTQGALLNDKHSNGTVKDRSPYRRLMSCPLGEAPSPYNSRFESVAWSASACHDGMGWLTIGISGPDDGAVAVLKYNGIITETIKSWKKRILRTQESECVCVNGSCFTIMTDGPSNGAASYRIFKIEKGKVTKSIELDAPNSHYEECSCYPDTGTVMCVCRDNWHGSNRPWVSFNQNLDYQIGYICSGVFGDNPPPKDGKGSCNPVTVDGADGVKGFSYRYGNGVWIGRTKSNRFRKGFEMIWDPNGWTDTDSDFSVKQDVVAMTDWSGYSGSFVQHPELTGLDCMRPCFWVELVRGRPRENTTIWTSGSSISFCGVNSDTANWSWPDGAELPFTIDK

SEQ ID NO: 26016 - protein, 469 aa, Artificial Sequence
  derived and/or modified protein sequence (wt) from neuraminidase__InfluenzaA__BAD16637
MNPNQKIITIGSVSLTIATVCFLMQIAILATTVTLHFKQHECDSPASNQVMPCEPIIIERNITEIVYLNNTTIEKEICPEVVEYRNWSKPQCQITGFAPFSKDNSIRLSAGGDIWVTREPYVSCDPGKCYQFALGQGTTLDNKHSNGTIHDRIPHRTLLMNELGVPFHLGTKQVCVAWSSSSCHDGKAWLHVCVTGDDRNATASFIYDGRLVDSIGSWSQNILRTQESECVCINGTCTVVMTDGSASGRADTRILFIKEGKIVHISPLSGSAQHIEECSCYPRYPDVRCICRDNWKGSNRPVIDINMEDYSIDSSYVCSGLVGDTPRNDDSSSNSNCRDPNNERGNPGVKGWAFDNGDDVWMGRTISKDSRSGYETFKVIGGWSTPNSKSQVNRQVIVGNNNWSGYSGIFSVEGKSCINRCFYVELIRGMPQETRVWWTSNSIVVFCGTSGTYGTGSWPDGANINFMPI

SEQ ID NO: 26017 - protein, 469 aa, Artificial Sequence
  derived and/or modified protein sequence (wt) from neuraminidase__InfluenzaA__BAD16638
MNPNQKIITIGSVSLTIATVCFLMQIAILATTVTLHFKQHECDSPASNQVMPCEPIIIERNITEIVYLNNTTIEKEICPEVVEYRNWSKPQCQITGFAPFSKDNSIRLSAGGDIWVTREPYVSCDPGKCYQFALGQGTTLDNKHSNGTIHDRIPHRTLLMNELGVPFHLGTKQVCVAWSSSSCHDGKAWLHVCVTGDDRNATASFIYDGRLVDSIGSWSQNILRTHESECVCINGTCTVVMTDGSASGRADTRILFIKEGKIVHISPLSGSAQHIEECSCYPRYPDVRCICRDNWKGSNRPVIDINMEDYSIDSSYVCSGLVGDTPRNDDSSSNSNCRDPNNERGNPGVKGWAFDNGDDVWMGRTINKDSRSGYETFKVIGGWSTPNSKSQVNRQVIVDNNNWSGYSGIFSVEGKSCINRCFYVELIRGRPQETRVWWTSNSIVVFCGTSGTYGTGSWPDGANINFMPI

SEQ ID NO: 26018 - protein, 469 aa, Artificial Sequence; identical to SEQ ID NO: 23197
  derived and/or modified protein sequence (wt) from neuraminidase__InfluenzaA__BAD16639

SEQ ID NO: 26019 - protein, 469 aa, Artificial Sequence
  derived and/or modified protein sequence (wt) from neuraminidase__InfluenzaA__BAD16640
MNPNQKIITIGSVSLTIATVCFLMQIAILVTTVTLHFKQHECDSPASNQVMPCEPIIIERNITEIVYLNNTTIEKEICPEVVEYRNWSKPQCQITGFAPFSKDNSIRLSAGGDIWVTREPYVSCDPGKCYQFALGQGTTLDNKHSNDTIHDRIPHRTLLMNELGVPFHLGTRQVCVAWSSSSCHDGKAWLHVCVTGDDKNATASFIYDGRLMDSIGSWSQNILRTQESECVCINGTCTVVMTDGSASGRADTRILFIEEGKIVHISPLSGSAQHVEECSCYPRYPDVRCICRDNWKGSNRPVIDINMEDYSIDSSYVCSGLVGDTPRNDDRSSNSNCRNPNNERGNPGVKGWAFDNGDDVWMGRTISKDLRSGYETFKVIGGWSTPNSKSQINRQVIVDSNNWSGYSGIFSVEGKSCINRCFYVELIRGRQQETRVWWTSNSIVVFCGTSGTYGTGSWPDGANINFMPI

SEQ ID NO: 26020 - protein, 469 aa, Artificial Sequence
  derived and/or modified protein sequence (wt) from neuraminidase__InfluenzaA__BAD16641
MNPNQKIITIGSASLTIATVCFLMQIAILVTTVTLHFKQHECDSPASNQVMPCEPIIIERNTTEIVYLNNTTIEKEICPKVVEYRNWSKPQCKITGFAPFSKDNSIRLSAGGDIWVTREPYVSCDPGKCYQFALGQGTTLDNKHSNDTIHDRIPHRTLLMNELGVPFHLGTRQVCIAWSSSSCHDGKAWLHVCVTGDDKNATASFIYDGRLVDSIGSWSQNILRTQESECVCINGTCTVVMTDGSASGRADTRILFIEEGKIVHISPLSGSAQHVEECSCYPRYPDVRCICRDNWKGSNRPVVDINMEDYSIDSSYVCSGLVGDTPRNDDRSSNSNCRNPNNEKGNQGVKGWAFDNGDDVWMGRTISKDLRSGYETFKVIGGWSTPNSKSQINRQVIVDSDNRSGYSGIFSVEGKSCINRCFYVELIRGRKQETRVWWTSNSIVVFCGTSGTYGTGSWPDGANINLMPI

SEQ ID NO: 26021 - protein, 469 aa, Artificial Sequence
  derived and/or modified protein sequence (wt) from neuraminidase__InfluenzaA__BAD16642
MNPNQKIITIGSVSLTIATVCFLMQIAILVTTVTLHFKQYECDSPASNQVMPCEPIIIERNITEIVYLNNTTIDKEKCPKVVEYRNWSKPQCQITGFAPFSKDNSIRLSAGGDIWVTREPYVSCDHGKCYQFALGQGTTLDNKHSNDTIHDRIPHRTLLMNELGVPFHLGTRQVCIAWSSSSCHDGKAWLHVCITGDDKNATASFIYDGRLVDSIGSWSQNILRTQESECVCINGTCTVVMTDGSASGRADTRILFIEEGKIVHISPLSGSAQHVEECSCYPRYPGVRCICRDNWKGSNRPVVDINMEDYSIDSSYVCSGLVGDTPRNDDRSSNSNCRNPNNERGNQGVKGWAFDNGDDVWMGRTISKDLRSGYETFKVIGGWSTPNSKSQINRQVIVDSDNRSGYSGIFSVEGKSCINRCFYVELIRGRKQETRVWWTSNSIVVFCGTSGTYGTGSWPDGANINFMPI

SEQ ID NO: 26022 - protein, 469 aa, Artificial Sequence
  derived and/or modified protein sequence (wt) from neuraminidase__InfluenzaA__BAD16643
MNPNQKIITIGSVSLTIATICFLMQIAILVTTVTLHFKQYECDSPANNQVMPCEPIIIERNITEIVYLTNTTIEKEICPKLVEYRNWSKPQCKITGFAPFSKDNSIRLSAGGDIWVTREPYVSCDPGKCYQFALGQGTTLDNKHSNDTIHDRTPHRTLLMNELGVPFHLGTRQVCIAWSSSSCHDGKAWLHVCVTGYDKNATASFIYDGRLVDSIGSWSQNILRTQESECVCINGTCTVVMTDGSASGRADTKILFIEEGKIVHISPLSGSAQHVEECSCYPRYPGVRCICRDNWKGSNRPVVDINVKDYSIDSSYVCSGLVGDTPRNNDRSSNSYCRNPNNEKGNHGVKGWAFDDGNDVWMGRTISEDSRSGYETFKVIGGLFTPNSKLQINRQVIVDSDNRSGYSGIFSVEGKSCINRCFYVELIRGREQETRVWWTSNSIVVFCGTSGTYGTGSWPDGADINLMPI

SEQ ID NO: 26023 - protein, 469 aa, Artificial Sequence
  derived and/or modified protein sequence (wt) from neuraminidase__InfluenzaA__BAD16644
MNPNQKIITIGSVSLTIATICFLMQIAILVTTVTLHFKQYECDSPPNNQVMPCEPIIIERNITEIVYLTNTTIEKEICPKLVEYRNWSKPQCKITGFAPFSKDNSIRLSAGGDIWVTREPYVSCDPGKCYQFALGQGTTLDNKHSNDTIHDRTPHRTLLMNELGVPFHLGTRQVCIAWSRSSCHDGKAWLHVCVTGYDKNATASFIYDGRLVDSIGSWSKNILRTQESECVCINGTCTVVMTDGSASGRADTKILFIEEGKIVHISPLSGSAQHVEECSCYPRYPGVRCICRDNWKGSNRPVVDINVKDYSIDSSYVCSGLVGDTPRNNDRSSNSYCRNPNNEKGNHGVKGWAFDDGNDVWMGRTISEDSRSGCETFKVIGGWSTPNSKLQINRQVIVDSDNRSGYSGIFSVEGKSCINRCFYVELIRGREQETRVWWTSNSIVVFCGTSGTYGTGSWPDGADINLMPI

SEQ ID NO: 26024 - protein, 469 aa, Artificial Sequence; identical to SEQ ID NO: 14576
  derived and/or modified protein sequence (wt) from neuraminidase__InfluenzaA__BAD16645

SEQ ID NO: 26025 - protein, 469 aa, Artificial Sequence; identical to SEQ ID NO: 22544
  derived and/or modified protein sequence (wt) from neuraminidase__InfluenzaA__BAD16646

SEQ ID NO: 26026 - protein, 469 aa, Artificial Sequence; identical to SEQ ID NO: 14576
  derived and/or modified protein sequence (wt) from neuraminidase__InfluenzaA__BAD16647

SEQ ID NO: 26027 - protein, 469 aa, Artificial Sequence
  derived and/or modified protein sequence (wt) from neuraminidase__InfluenzaA__BAD16648
MNPNQKIITIGSVSLTIATICFLMQIAILVTTVTLHFKQYECSSPPNNQVMPCEPIIIERNITEIVYLTNTTIEKEICPKLVEYRNWSKPQCKITGFAPFSKDNSIRLSAGGDIWVTREPYVSCDPGKCYQFALGQGTTLDNKHSNDTIHDRTPYRTLLMNELGVPFHLGTRQVCIAWSSSSCHDGKAWLHVCVTGYDKNATASFIYDGRLVDSIGSWSKNILRTQESECVCIYGTCTVVMTDGSASERAETKILFIEEGKIVHISPLSGSAQHVEECSCYPRYPGVRCVCRDNWKGSNRPVVDINVKDYSIVSSYVCSGLVGDTPRKNDRSSSSYCRNPNNEKGNHGVKGWAFDDGNDVWMGRTISEESRSGYETFKVIGGWSTPNSKLQINRQVIVDSDNRSGYSGIFSVEGKSCINRCFYVELIRGREQETRVWWTSNSIVVFCGTSGTYGTGSWPDGADINLMPI

SEQ ID NO: 26028 - protein, 469 aa, Artificial Sequence
  derived and/or modified protein sequence (wt) from neuraminidase__InfluenzaA__BAE07203
MNPNQKITTIGSICMVIGIVSLMLQIGNIISIWVSHSIQTGNQHQAEPCNQSIITYENNTWVNQTYVNISNTNFLTEKAVASVTLAGNSSLCPISGWAVYSKDNGIRIGSKGDVFVIREPFISCSHLECRTFFLTQGALLNDKHSNGTVKDRSPHRTLMSCPVGEAPSPYNSRFESVAWSASACHDGTSWLTIGISGPDNGAVAVLKYNGIITDTIKSWRNNIMRTQESECACVNGSCFTVMTDGPSNGQASYKIFRIEKGKVVKSAELNAPNYHYEECSCYPDAGEITCVCRDNWHGSNRPWVSFNQNLEYRIGYICSGVFGDNPRPNDGTGSCGPVSPKGAYGIKGFSFKYGNGVWIGRTKSTNSRSGFEMIWDPNGWTGTDSNFSVKQDIVAITDWSGYSGSFVQHPELTGLDCIRPCFWVELIRGRPKESTIWTSGSSISFCGVNSDTVGWSWPDGAELPFTIDK

SEQ ID NO: 26029 - protein, 469 aa, Artificial Sequence
  derived and/or modified protein sequence (wt) from neuraminidase__InfluenzaA__BAF46322
MNPNPKIITIGSVSLTISTICFFMQIAILITTVTLHFKQYEFNSPPNNQVMLCEPTIIERNITEIVYLTNTTIEKEICPKLAEYRNWSKPQCDITGFAPFSKDNSIRLSAGGDIWVTREPYVSCDPDKCYQFALGQGTTLNNVHSNDTVHDRTPYRTLLMNELGVPFHLGTKQVCIAWSSSSCHDGKAWLHVCVTGDDKNATASFIYNGRLVDSIVSWSKKILRTQESECVCINGTCTVVMTDGSASGKADTKILFIEEGKIVHTSTLSGSAQHVEECSCYPRYPGVRCVCRDNWKGSNRPIVDINIKDYSIVSSYVCSGLVGDTPRKNDSSSSSHCLDPNNEEGGHGVKGWAFDDGNDVWMGRTISEKLRSGYETFKVIEGWSNPNSKLQINRQVIVDRGNRSGYSGIFSVEGKSCINRCFYVELIRGRKEETEVLWTSNSIVVFCGTSGTYGTGSWPDGADINLMPI

SEQ ID NO: 26030 - protein, 469 aa, Artificial Sequence; identical to SEQ ID NO: 14714
  derived and/or modified protein sequence (wt) from neuraminidase__InfluenzaA__BAF46323

SEQ ID NO: 26031 - protein, 469 aa, Artificial Sequence
  derived and/or modified protein sequence (wt) from neuraminidase__InfluenzaA__BAF46324
MNPNQKIITIGSVSLTISTICFFMQIAILITTVTLHFKQYEFNSPPNNQVMLCEPTIIERNITEIVYLTNTTIEKEICPKLAEYRNWSKPQCDITGFAPFSKDNSIRLSAGGDIWVTREPYVSCDPDKCYQFALGQGTTLNNVHSNDIVHDRTPYRTLLMNELGVPFHLGTKQVCIAWSSSSCHDGKAWLHVWVTGDDKNATASFIYNGRLVDSIVSWSKKILRTQESECVCINGTCTVVMTDGSASGKADTKILFIEEGKIVHTSTLSGSAQHVEECSCYPRYPGVRCVCRDNWKGSNRPIVDINIKDYSIVSSYVCSGLVGDTPRKNDSSSSSHCLDPNNEEGGHGVKGWAFDDGNDVWMGRTISEKLRSGYETFKVIEGWSNPNSKLQINRQVIVDRGNRSGYSGIFSVEGKSCINRCFYVELIRGRKEETEVLWTSNSIVVFCGTSGTYGTGSWPDGADINLMPI

SEQ ID NO: 26032 - protein, 469 aa, Artificial Sequence
  derived and/or modified protein sequence (wt) from neuraminidase__InfluenzaA__BAF46332
MNPNQKIITIGSVSLTISTICFFMQIAILITTVTLHFKQYEFNSPPNNQVMLCEPTIIERNITEIVYLTNTTIEKEICPKLAEYRKWSKPQCNITGFAPFSKDNSIRLSAGGDIWVTREPYVSCDPDKCYQFALGQGTTLNNVHSNDTVRDRTPYRTLLMNELGVPFHLGTKQVCIAWSSSSCHDGKAWLHVCVTGDDKNATASFIYNGRLVDSIVSWSKEILRTQESECVCINGTCTVVMTDGSASGKADTKILFIEEGKIVHTSTLSGSAHHVEECSCYPRYPGVRCVCRDNWKGSNRPIVDINIKDYSIVSSYVCSGLVGDTPRKNDSSSSSHCLDPNNEEGGHGVKGWAFDDGNDVWMGRTISEKLRSGYETFKVIEGWSNPNSKLQINRQVIVDRGNRSGYSGIFSVEGKSCINRCFYVELIRGRKEETEVLWTSNSIVVFCGTSGTYGTGSWPDGADINLMPI

SEQ ID NO: 26033 - protein, 469 aa, Artificial Sequence
  derived and/or modified protein sequence (wt) from neuraminidase__InfluenzaA__BAF46334
MNPNQKIITIGSVSLTISTICFFMQIAILITTVTLHFKQYEFNSPPNNQVMLCEPTIIERNITEIVYLTNTTIEKEICPKLAEYRKWSKPQCNITGFAPFSKDNSIRLSAGGDIWVTREPYVSCDPDKCYQFALGQGTTLNNVHSNDTVRDRTPYRTLLMNELGVPFHLGTKQVCIAWSSSSCHDGKAWLHVCVTGDDKNATASFIYNGRLVDSIVSWSKEILRTQESECVCINGTCTVVMTDGSASGKADTKILFIEEGKIVHTSTLSGSAQHVEECSCYPRYPGVRCVCRDNWKGSNRPIVDINIKDYSIVSSYVCSGLVGDTPRKNDSSSSSHCLDPNNEEGGHGVKGWAFDDGNDVWMGRTISEKLRSGYETFKVIEGWSNPNSKLQINRQVIVDRGNRSGYSGIFSVEGKSCINRCFYVELIRGRKEETEVLWTSNSIVVFCGTSGTYGTGSWPDGADINLMPI

SEQ ID NO: 26034 - protein, 469 aa, Artificial Sequence; identical to SEQ ID NO: 26033
  derived and/or modified protein sequence (wt) from neuraminidase__InfluenzaA__BAF46335

SEQ ID NO: 26035 - protein, 469 aa, Artificial Sequence
  derived and/or modified protein sequence (wt) from neuraminidase__InfluenzaA__BAF46337
MNPNQKIITIGSVSLTISTICFFMQIAILITTVTLHFKQYEFNSPPNNQVMLCEPTIIERNITEIVYLTNTTIEKEICPKLAEYRKWSKPQCNITGFAPFSKDNSIRLSAGGDIWVTREPYVSCDPDKCYQFALGQGTTLNNVHSNDTVRVRTPYRTLLMNELGVPFHLGTKQVCIAWSSSSCHDGKAWLHVCVTGDDKNATASFIYNGRLVDSIVSWSKEILRTQESECVCINGTCTVVMTDGSASGKADTKILFIEEGKIVHTSTLSGSAQHVEECSCYPRYPGVRCVCRDNWKGSNRPIVDINIKDYSIVSSYVCSGLVGDTPRKNDSSSSSHCLDPNNEEGGHGVKGWAFDDGNDVWMARTISEKLRSGYETFKVIEGWSNPNSKLQINRQVIVDRGNRSGYSGIFSVEGKSCINRCFYVELIRGRKEETEVLWTSNSIVVFCGTSGTYGTGSWPDGADINLMPI

SEQ ID NO: 26036 - protein, 469 aa, Artificial Sequence; identical to SEQ ID NO: 26033
  derived and/or modified protein sequence (wt) from neuraminidase__InfluenzaA__BAF46345

SEQ ID NO: 26037 - protein, 469 aa, Artificial Sequence
  derived and/or modified protein sequence (wt) from neuraminidase__InfluenzaA__BAF46346
MNPNQKIITIGSVSLTISTICFFMQIAILITTVTLHFKQYEFNSPPNNQVMLCEPTIIERNITEIVYLTNTTIEKEICPKLAEYRKWSKPQCNIAGFAPFSKDNSIRLSAGGDIWVTREPYVSCDPDKCYQFALGQGTTLNNVHSNDTVRDRTPYRTLLMNELGVPFHLGTKQVCIAWSSSSCHDGKAWLHVCVTGDDKNATASFIYNGRLVDSIVSWSKEILRTQESECVCINGTCTVVMTDGSASGKADTKILFIEEGKIVHTSTLSGSAQHVEECSCYPRYPGVICVCRDNWKGSNRPIVDINIKDYSIVSSYVCSGLVGDTPRKNDSSSSSHCLDPNNEEGGHGVKGWAFDDGNDVWMGRTISEKLRSGYETFKVIEGWSNPNSKLQINRQVIVDRGNRSGYSGIFSVEGKSCINRCFYVELIRGRKEETEVLWTSNSIVVFCGTSGTYGTGSWPDGADINLMPI

SEQ ID NO: 26038 - protein, 469 aa, Artificial Sequence
  derived and/or modified protein sequence (wt) from neuraminidase__InfluenzaA__BAF46347
MNPNQKIITIGSVSLTISTICFFMQIAILITTVTLHFKQYEFNSPPNNQVMLCEPTIIERNITEIVYLTNTTIEKEICPKLAEYRKWSKPQCNITGFAPFSKDNSIRLSAGGDIWVTREPYVSCDPDKCYQFALGQGTTLNNVHSNDTVRDRTPYRTLLMNELGVPFHLGTKQVCIAWSSSSCHDGKAWLHVCVTGDDKNATATFIYNGRLVDSIVSWSKEILRTQESECVCINGTCTVVMTDGSASGKADTKILFIEEGKIVHTSTLSGSAQHVEECSCYPRYPGVRCVCRDNWKGSNRPIVDINIKDYSIVSSYVCSGLVGDTPRKNDSSSSSHCLDPNNEEGGHGVKGWAFDDGNDVWMGRTISEKLRSGYETFKVIEGWSNPNSKLQINRQVIVDRGNRSGYSGIFSVEGKSCINRCFYVELIRGRKEETEVLWTSNSIVVFCGTSGTYGTGSWPDGADINLMPI

SEQ ID NO: 26039 - protein, 469 aa, Artificial Sequence
  derived and/or modified protein sequence (wt) from neuraminidase__InfluenzaA__BAF46349
MNPNQKIITIGSVSLTISTICFFMQIAILITTVTLHFKQYEFNSPPNNQVMLCEPTIIERNITEIVYLTNTTIEKEICPKLAEYRKWSKPQCNITGFAPFSKDNSIRLSAGGDIWVTREPYVSCDPDKCYQFALGQGTTLNNVHSNDTVRARTPYRTLLMNELGVPFHLGTKQVCIAWSSSSCHDGKAWLHVCVTGDDKNATASFIYNGRLVDSIVSWSKEILRTQESECVCINGTCTVVMTDGSASGKADTKILFIEEGKIVHTSTLSGSAQHVEECSCYPRYPGVRCVCRDNWKGSNRPIVDINIKDYSIVSSYVCSGLVGDTPRKNDSSSSSHCLDPNNEEGGHGVKGWAFDDGNDVWMGRTISEKLRSGYETFKVFEGWSNPNSKLQINRQVIVDRGNRSGYSGIFSVEGKSCINRCFYVELIRGRKEETEVLWTSNSIVVFCGTSGTYGTGSWPDGADINLMPI

SEQ ID NO: 26040 - protein, 469 aa, Artificial Sequence; identical to SEQ ID NO: 26033
  derived and/or modified protein sequence (wt) from neuraminidase__InfluenzaA__BAF46350

SEQ ID NO: 26041 - protein, 469 aa, Artificial Sequence
  derived and/or modified protein sequence (wt) from neuraminidase__InfluenzaA__BAF46351
MNPIQKIITIGSVSLTISTICFFMQIAILITTVTLHFKQYEFNSPPNNQVMLCEPTIIERNITEIVYLTNTTIEKEICPKLAEYRKWSKPQCNITGFAPFSKDNSIRLSAGGDIWVTREPYVSCDPDKCYQFALGQGTTLNNVHSNDTVRDRTPYRTLLMNELGVPFHLGTKQVCIAWSSSSCHDGKAWLHVCVTGDDKNATASFIYNGRLVDSIVSWSKEILRTQESECVCINGTCTVVMTDGSASGKADTKILFIEEGKIVHTSTLSGSAQHVEECSCYPRYPGVRCVCRDNWKGSNRPMVDINIKDYSIVSSYVCSGLVGDTPRKNDSSSSSHCLDPNNEEGGHGVKGWAFDDGNDVWMGRTISEKLRSGYETFKVIEGWSNPNSKLQINRQVIVDRGNRSGYSGIFSVEGKSCINRCFYVELIRGRKEETEVLWTSNSIVVFCGTSGTYGTGSWPDGADINLMPI

SEQ ID NO: 26042 - protein, 469 aa, Artificial Sequence
  derived and/or modified protein sequence (wt) from neuraminidase__InfluenzaA__BAF46368
MNPNQKIITIGSVSLTISTICFFMQIAILITTVTLHFKQYEFNSPPNNQVMLCEPTIIERNITEIVYLTNTTIEKEICPKLAEYRNWSKPQCNITGFAPFSKDNSIRLSAGGDIWVTREPYVSCDPDKCYQFALGQGTTLNNVHSNDTVRERTPYRTLLMNELGVPFHLGTKQVCIAWSSSSCHDGKAWLHVCVTGDDKNATASFIYNGRLVDSIVSWSKEILRTQESECVCINGTCTVVMTDGSASGKADTKILFIEEGKIVHTSTLSGSAQHVEECSCYPRYPGVRCVCRDNWKGSNRPIVDINIKDYSIVSSYVCSGLVGDTPRKNDSSSSSHCLDPNNEEGGHGVKGWAFDDGNDVWMGRTISEKLRSGYETFKVIEGWSNPNSKLQINRQVIVDRGNRSGYSGIFSVEGKSCINRCFYVELIRGRKEETEVLWTSNSIVVFCGTSGTYGTGSWPDGADINLMPI

SEQ ID NO: 26043 - protein, 469 aa, Artificial Sequence
  derived and/or modified protein sequence (wt) from neuraminidase__InfluenzaA__BAF46369
MNPNQKIITIGSVSLTISTICFFMQIAILITTVTLHFKQYEFNSPPNNQVMLCEPTIIERNITEIVYLTNTTIEKEICPKLAEYRNWSKPQCNITGFAPFSKDNSIRLSAGGDIWVTREPYVSCDPDKCYQFALGQGTTLNNVHSNDTVHDRTPYRTLLMNELGVPFHLGTKQVCIAWSSSSCHDGKAWLHVCVTGDDKNATASFIYNGKLVDSIVSWSKEILRTQESECVCINGTCTVVMTDGSASGKADTKILFIEEGKIVHTSTLSGSAQHVEECSCYPRYPGVRCVCRDNWKGSNRPIVDINIKDYSIVSSYVCSGLVGDTPRKNDSSSSSHCLDPNNEEGGHGVKGWAFDDGNDVWMGRTISEKSRSGYETFQVIEGWSNSNSKLQINRQVIVDRGNRSGYSGIFSVEGKSCINRCFYVELIRGRKEETEVLWTSNSIVVFCGTSGTYGTGSWPDGADINLMPI

SEQ ID NO: 26044 - protein, 469 aa, Artificial Sequence
  derived and/or modified protein sequence (wt) from neuraminidase__InfluenzaA__BAF46370
MNPNQKIITIGSVSLTISTICFFMQIAILITTVTLHFKQYEFNSLPNNQVMLCEPTIIERNITEIVYLTNTTIEKEICPKLAEYRNWSKPQCNITGFAPFSKDNSIRLSAGGDIWVTREPYVSCDPDKCYQFALGQGTTLNNVHSNDTVHDRTPYRTLLMNELGVPFHLGTKQVCIAWSSSSCHDGKAWLHVCVTGDDKNATASFIYNGRLVDSIVSWSKEILRTQESECVCINGTCTVVMTDGSASGKADTKILFIEEGKIVHTSTLSGSAQHVEECSCYPRYPGVRCVCRDNWKGSNRPIVDINIKDYSIVSSYVCSGLVGDTPRKNDSSSSSHCLDPNNEEGGHGVKGWAFDDGNDVWMGRTISEKLRSGYETFKVIEGWSNPNSKLQINRQVIVDRGNRSGYSGIFSVEGKSCINRCFYVELIRGRKEETEVLWTSTSIVVFCGSSGTYGTGSWPDGADINLMPI

SEQ ID NO: 26045 - protein, 469 aa, Artificial Sequence
  derived and/or modified protein sequence (wt) from neuraminidase__InfluenzaA__BAF46371
MNPNQKIITIGSVSLTISTICFFMQIAILITTVTLHFKQYEFNSPPNNQVMLCEPTIIERNITEIVHLTNTTIEKEICPKLAEYRNWSKPQCNITGFAPFSKDNSIRLSAGGDIWVTREPYVSCDPDKCYQFALGQGTTLNNVHSNDTVHDRTPYRTLLMNELGVPFHLGTKQVCIAWSSSSCHDGKAWLHVCVTGDDKNATASFIYNGRLVDSIVSWSKEILRTQESECVCINGTCTVVMTDGSASGKADTKILFIEEGKIVHTSTLSGSAQHVEECSCYPRYPGVRCVCRDNWKGSNRPIVDINIKDYSIVSSYVCSGLVGDTPRKNDSSSSSHCLDPNNEEGGHGVKGWAFDDGNDVWMGRTISEKLRSGYETFKVIEGWSNPNSKLQTNRQVIVDRSNRSGYSGIFSVEGKSCINRCFYVELIRGRKEETEVLWTSNSIVVFCGTSGTYGTGSWPDGADINLMPI

SEQ ID NO: 26046 - protein, 469 aa, Artificial Sequence
  derived and/or modified protein sequence (wt) from neuraminidase__InfluenzaA__BAF46372
MNPNQKIITIGSVSLTISTICFFMQIAILITTVTLHFKQYEFNSPPNNQVMLCEPTIIERNITEIVYLTNTTIEKEICPKLAEYRNWSKPQCDIAGFAPFSKDNSIRLSAGGDIWVTREPYVSCDPDKCYQFALGQGTTLNNVHSNDTVHDRTPYRTLLMNELGVPFHLGTKQVCIAWSSSSCHDGKAWLHVCVTGDDKNATASFIYNGRLVDSIVSWSKKILRTQESECVCINGTCTVVMTDGSASGKADTKILFIEEGKIVHTSTLSGSAQHVEECSCYPRYPGVRCVCRDNWKGSNRPIVDINIKDYSIVSSYVCSGLVGDTPRKNDSSSSSHCLDPNNEEGGHGVKGWAFDDGNDVWMGRTISEKLRSGYETFKVIEGWSNPNSKLQINRQVIVDRGNRSGYSGIFSVEGKSCINRCFYVELIRGRKEETEVLWTSNSIVVFCGTSGTYGTGSWPDGADINLMPI

SEQ ID NO: 26047 - protein, 469 aa, Artificial Sequence
  derived and/or modified protein sequence (wt) from neuraminidase__InfluenzaA__BAF46385
MNPNQKIITIGSVSLTISTICFFMQIAILITTVTLHFKQYEFNSPPNNQVMLCEPTIIERNITEIVYLTNTTIEKEICPKLAEYRNWSKPQCNITGFAPFSKDNSIRLSAGGDIWVTREPYVSCDPDKCYQFALGQGTTLNNVHSNDTVHDRTPYRTLLMNELGVPFHLGTKQVCIAWSSSSCPDGKAWLHVCVTGDDKNATASFIYNGRLVDSIVSWSKEILRTQESECVCINGTCTVVMTDGSASGKADTKILFIEEGKIVHTSTLSGSAQHVEECSCYPRYPGARCVCRDNWKGSNRPIVDINIKDYSIVSSYVCSGLVGDTPRKNDSSSSSHCLDPNNEEGGHGVKGWAFDDGNDVWMGRTISEKLRSGYETFKVIEGWSNPNSKLQTNRQVIVDRGNRSGYSGIFSVEGKSCINRCFYVELIRGRKEETEVLWTSNSIVVFCGTSSTYGTGSWPDGADINLMPI

SEQ ID NO: 26048 - protein, 469 aa, Artificial Sequence
  derived and/or modified protein sequence (wt) from neuraminidase__InfluenzaA__BAF46386
MNPNQKIITIGSVSLTISTICFFMQIAILITTVTLHFKQYEFNSPPNNQVMLCEPTIIERNITEIVYLTNTTIEKEICPKLAEYRNWSKPQCNITGFAPFSKDNSIRLSAGGDIWVTREPYVSCDPDKCYQFALGQGTTLNNVHSNDTVHDRTPYRTLLMNELGVPFHLGTKQVCIAWSSSSCHDGKAWLHVCVTGDDKNATASFIYNGRLVDSIVSWSKEILRTQESECVCINGTCTVVMTDGSASGKADTKILFIEEGKIVHTSTLSGSAQHVEECSCYPRYPGVRCVCRDNWKGSNRPIVDINIKDYSIVSSYVCSGLVGDTPRKNDSSSSSHCLDPNNEEGGHGVKGWAFDDGNDVWMGRTISEKLRSGYETFKVIEGWSNPNSKLQTNRQVIVDRGNRSGYSGIFSVEGKSCINRCFYVELIRGRKEETEVLWTSNSIVVFCGTSSTYGTGSWPDGADINLMPI

SEQ ID NO: 26049 - protein, 469 aa, Artificial Sequence; identical to SEQ ID NO: 16564
  derived and/or modified protein sequence (wt) from neuraminidase__InfluenzaA__BAF46387

SEQ ID NO: 26050 - protein, 469 aa, Artificial Sequence
  derived and/or modified protein sequence (wt) from neuraminidase__InfluenzaA__BAF46388
MNPNQKIITIGSVSLTISTICFFMQIAILITTVTLHFKQYEFNSPPNNQVMLCEPTIIERNITEIVYLTNTTIEKEICPKLAEYRNWSKPQCNITGFAPFSKDNSIRLSAGGDIWVTREPYVSCDPDKCYQFALGQGTTLNNVHSNDTVHDRTPYRTLLMNELGVPFHLGTKQVCIAWSSSSCHDGKAWLHVCVTGDDKNATASFIYNGRLVDSIVSWSKEILRTQESECVCINGTCTVVMTDGSASGKADTKILFIEEGKIVHTSTLSGSAQHVEECSCYPRYPGVRCVCRDNWKGSNRPIVDINIKDYSIVSSYVCSGLVGDTPRKNDSSSSSHCLDPNNEEGGHGVKGWAFDDGNDVWMGRTISEKLRSGYETFKVIEGWSNPNSKLQINRQDIVDRGNRSGYSGIFSVEGKSCINRCFYVELIRGRKEENEVLWTSNSIVVFCGTSGTYGTGSWPDGADINLMPI

SEQ ID NO: 26051 - protein, 469 aa, Artificial Sequence
  derived and/or modified protein sequence (wt) from neuraminidase__InfluenzaA__BAF47922
MNPNQKIITIGSVSLTISTICFFMQIAILITTVTLHFKQYEFNSPPNIQVMLCEPTIIERNITEIVYLTNTTIEKEICPKLAEYRNWSKPQCDITGFAPFSKDNSIRLSAGGDIWVTREPYVSCDPDKCYQFALGQGTTLNNVHSNDTVHDRTPYRTLLMNELGVPFHLGTKQVCIAWSSSSCHDGKAWLHVCVTGDDKNATASFIYNGRLVDSIVSWSKEILRTQESECVCINGTCTVVMTDGSASGKADTKILFIEEGKIVHTSTLSGSAQHVEECSCYPRYPGVRCVCRDNWKGSNRPIVDINIKDYSIASSYVCSGLVGDTPRKNDSSSSSHCLDPNNEEGGHGVKGWAFDDGNDVWMGRTISEKLRSGYETFKVIEGWSNPNSKLQINRQVIVDRGNRSGYSGIFSVEGKSCINRCFYVELIRGRKEETEVLWTSNSIVVFCGTSGTYGTGSWPDGADINLMPI

SEQ ID NO: 26052 - protein, 469 aa, Artificial Sequence; identical to SEQ ID NO: 14694
  derived and/or modified protein sequence (wt) from neuraminidase__InfluenzaA__BAF47923

SEQ ID NO: 26053 - protein, 469 aa, Artificial Sequence
  derived and/or modified protein sequence (wt) from neuraminidase__InfluenzaA__BAF47924
MNPNQKIITIGSVSLTISTICFFMQIAILITTVTLHFKQYEFNSPPNNQVMLCEPTIIERNITEIVYLTNTTIEKEICPKLAEYRNWSKPQCNITGFAPFSKDNSIRLSAGGDIWVTREPYVSCDPDKCYQFALGQGTTLNNVHSNDTVHDRTPYRTLLMNELGVPFHLGTKQVCIAWSSSSCHDGKAWLHVCVTGDDKNATASFIYNGRLVDSIVSWSKEILRTQESECVCINGTCTVVMTDGSASGKADTKILFIEEGKIVHTSTLSGSAQHVEECSCYPRYPGVRCVCRDNWKGSNRPIVDINIKDYSIVSSYVCSGLVGDTPRKNDSSSSSHCLDPNSEEGGHGVKGWAFDDGNDVWMGRTISEKLRSGYETFKVIEGWSNPNSKLQTNRQVIVDRGNRSGYSGIFSVEGKSCINRCFYVELIRGRKEETEVLWTSNSIVVFCGTSGTYGTGSWPDGADINLMPI

SEQ ID NO: 26054 - protein, 469 aa, Artificial Sequence; identical to SEQ ID NO: 14712
  derived and/or modified protein sequence (wt) from neuraminidase__InfluenzaA__BAF47925

SEQ ID NO: 26055 - protein, 469 aa, Artificial Sequence; identical to SEQ ID NO: 14712
  derived and/or modified protein sequence (wt) from neuraminidase__InfluenzaA__BAF47926

SEQ ID NO: 26056 - protein, 469 aa, Artificial Sequence; identical to SEQ ID NO: 20699
  derived and/or modified protein sequence (wt) from neuraminidase__InfluenzaA__BAF47927

SEQ ID NO: 26057 - protein, 469 aa, Artificial Sequence; identical to SEQ ID NO: 16564
  derived and/or modified protein sequence (wt) from neuraminidase__InfluenzaA__BAF47928

SEQ ID NO: 26058 - protein, 469 aa, Artificial Sequence
  derived and/or modified protein sequence (wt) from neuraminidase__InfluenzaA__BAF47929
MNPNQKIITIGSVSLTISTICFFMQIAILITTVTLHFKQYEFNSPPNNQVMLCEPTIIERNITEIVYLTNTTTEKEICPKLAEYRNWSKPQCNITGFAPFSKDNSIRLSAGGDIWVTREPYVSCDPDKCYQFALGQGTTLNNVHSDDTVHDRTPYRTLLMNELGVPFHLGTKQVCIAWSSSSCHDGKAWLHVCVTGDDKNATASFIYNGRLVDSIVSWSKEILRTQESECVCINGTCTVVMTDGSASGKADTKILFIEEGKIVHTSTLSGSAQHVEECSCYPRYPGVRCVCRDNWKGSNRPIVDINIKDYSIVSSYVCSGLVGDTPRKNDSSSSSHCLDPNNEEGGHGVKGWAFDDGNDVWMGRTISEKLRSGYETFKVIEGWSNPNSKLQINRQVIVDRGNRSGYSGIFSVEGKSCINRCFYVELIRGRKEENEVLWTSNSIVVFCGTSGTYGTGSWPDGADINLMPI

SEQ ID NO: 26059 - protein, 469 aa, Artificial Sequence
  derived and/or modified protein sequence (wt) from neuraminidase__InfluenzaA__BAF47930
MNPNQKIITIGSVSLTISTICFFMQIAILITTVTLHFKQYEFNSPPNNQVMLCEPTIIERNITEIVYLTNTTIEKEICPKLAEYRNWSKPQCNITGFAPFSKDNSIRLSAGGDIWVTREPYVSCDPDKCYQFALGQGTTLNNVHSNDTVHGRTPYRTLLMNELGVPFHLGTKQVCIAWSSSSCHDGKAWLHVCVTGDDKNATASFIYNGRLVDSIVSWSKEILRTQESECVCINGTCTVVMTDGSASGKADTKILFIEEGKIVHTSTLSGSAQHVEECSCYPRYPGVRCVCRDNWKGSNRPIVDINIKDYSTVSSYVCSGLVGDTPRKNDSSSSGHCLDPNNEEGGHGVKGWAFDDGNDVWMGRTISEKLRSGYETFKVIEGWSNPNSKLQINRQVIVDRGNRSGYSGIFSVEGKSCINRCFYVELIRGRKEETEVLWTSNSIVVFCGTSGTYGTGSWPDGADINLMPI

SEQ ID NO: 26060 - protein, 469 aa, Artificial Sequence; identical to SEQ ID NO: 20699
  derived and/or modified protein sequence (wt) from neuraminidase__InfluenzaA__BAF47931

SEQ ID NO: 26061 - protein, 469 aa, Artificial Sequence
  derived and/or modified protein sequence (wt) from neuraminidase__InfluenzaA__BAF47932
MNPNQKIITIGSVSLTISTICFFMQIAILITTVTLHFKQYEFNSPPNNQVMLCEPTIIERNITEIVYLTNTTIEKEICPKLAEYRNWSKPQCNITGFAPFSKDNSIRLSAGGDIWVTREPYVSCDPDKCYQFALGQGTTLNNVHSNDTVHDRTPYRTLLMNELGVPFHLGTKQVCIAWSSSSCHDGKAWLHVCVTGDDKNATASFIYNGRLVDSIVSWSKEILRTQESECVCINGTCTVVMTDGSASGKADTKILFIEEGKIVHTSTLSGSAQHVEECSCYPRYPGVRCVCRDNWKGSNRPIVDINIKDYSIVSSYVCSGLVGDTPRKNDSSSSGHCLDPNNEEGGHGVKGWAFDDGNDVWMGRTISEKLRSGYETFKVIEGWSNPNSKLQINRQVIVDRGNRSGYSGIFSVEGKSCINRCFYVELIRGRKEETEVLWTSNSIVVFCGTSGTYGTGSWPDGADINLMPI

SEQ ID NO: 26062 - protein, 469 aa, Artificial Sequence; identical to SEQ ID NO: 14712
  derived and/or modified protein sequence (wt) from neuraminidase__InfluenzaA__BAF47933

SEQ ID NO: 26063 - protein, 469 aa, Artificial Sequence; identical to SEQ ID NO: 14714
  derived and/or modified protein sequence (wt) from neuraminidase__InfluenzaA__BAF47934

SEQ ID NO: 26064 - protein, 469 aa, Artificial Sequence; identical to SEQ ID NO: 14714
  derived and/or modified protein sequence (wt) from neuraminidase__InfluenzaA__BAF47935

SEQ ID NO: 26065 - protein, 469 aa, Artificial Sequence
  derived and/or modified protein sequence (wt) from neuraminidase__InfluenzaA__BAF47936
MNPNQKIITIGSVSLTISTICFFMQIAILITTVTLHFKQYEFNSPPNNQVMLCEPTIIERNITEIVYLTNTTIEKEICPKLAEYRNWSKPQCNITGFAPFSKDNSIRLSAGGDIWVTREPYVSCDPDKCYQFALGQGTTLNNVHSNDTVHDRTPYRTLLMNELGVPFHLGTKQVCIAWSSSSCHDGKAWLHVCITGDDKNATASFIYNGRLVDSIVSWSKEILRTQESECVCINGTCTVVMTDGSASGKADTKILFIEEGKIVHTSTLSGSAQHVEECSCYPRYPGVRCVCRDNWKGSNRPIVDINIKDYSIVSSYVCSGLVGDTPRKNDSSSSGHCLDPNNEEGGHGVKGWAFDDGNDVWMGRTISEKLRSGYETFKVIEGWSNPNSKLQINRQVIVDRGNRSGYSGIFSVEGKSCINRCFYVELIRGRKEETEVLWTSNSIVVFCGTSGTYGTGSWPDGADINLMPI

SEQ ID NO: 26066 - protein, 469 aa, Artificial Sequence
  derived and/or modified protein sequence (wt) from neuraminidase__InfluenzaA__BAF47937
MNPNQKIITIGSVSLTISTICFFMQIAILITTVTLHFKQYEFNSPPNNQVMLCEPTIIERNITEIVYLTNTTIEKEICPKLAEYRNWSKPQCNITGFAPFSKDNSIRLSAGGDIWVTREPYVSCGPDKCYQFALGQGTTLNNVHSNDTVHDRTPYRTLLMNELGVPFHLGTKQVCIAWSSSSCHDGKAWLHVCVTGDDKNATASFIYNGRLVDSIVSWSKEILRTQESECVCINGTCTVVMTDGSASGKADTKILFIEEGKIVHTSTLSGSAQHVEECSCYPRYPGVRCVCRDNWKGSNRPIVDINIKDYSIVSSYVCSGLVGDTPRKNDSSSSSHCLDPNNEEGGHGVKGWAFDDGNDVWMGRTISEKLRSGYETFKVIEGWSNPNSKLQINRQVIVDRGNRSGYSGIFSVEGKSCINRCFYVELIRGRKEETEVLWTSNSIVVFCGTSGTYGTGSWPDGADINLMPI

SEQ ID NO: 26067 - protein, 469 aa, Artificial Sequence
  derived and/or modified protein sequence (wt) from neuraminidase__InfluenzaA__BAF47938
MNPNQKIITIGSVSLTISTICFFMQIAILITTVTLHFKQYEFNSLPNNQVMLCEPTIIERNITEIVYLTNTTIEKEICPKLAEYRNWSKPQCNITGFAPFSKDNSIRLSAGGDIWVTREPYVSCDPDKCYQFALGQGTTLNNVHSNDTVHGRTPYRTLLMNELGVPFHLGTKQVCIAWSSSSCHDGKAWLHVCVTGDDKNATASFIYNGRLVDSIVSWSKEILRTQESECVCINGTCTVVMTDGSASGKADTKILFIEEGKIVHTSTLSGSAQHVEECSCYPRYPGVRCVCRDNWKGSNRPIVDINIKDYSIVSSYVCSGLVGDTPRKTDSSSSSHCLDPNNEEGGHGVKGWAFDDGNDVWMGRTISEKLRSGYETFKVIEGWSNPNSKLQINRQVIVDRGNRSGYSGIFSVEGKSCINRCFYVELIRGRKEETEVLWTSNSIVVFCGTSGTYGTGSWPDGADINLMPI

SEQ ID NO: 26068 - protein, 469 aa, Artificial Sequence; identical to SEQ ID NO: 14714
  derived and/or modified protein sequence (wt) from neuraminidase__InfluenzaA__BAF47939

SEQ ID NO: 26069 - protein, 469 aa, Artificial Sequence
  derived and/or modified protein sequence (wt) from neuraminidase__InfluenzaA__BAF47940
MNPNQKIITIGSVSLTISTICFFMQIAILITTVTLHFKQYEFNSPPNNQVMLCEPTIIERNITEIVYLTNTTIEKEICPKLAEYRNWSKPQCDITGFAPFSKDNSIRLSAGGDIWVTREPYVSCDPDKCYQFALGQGTTLNNVHSNDTVHDRTPYRTLLMNELGVPFHLGTKQVCIAWSSSSCHDGKAWLHVCVTGDDKNATASFIYNGRLVDSIVSWSKKILRTQESECVCINGTCTVVMTDGSASGKADTKILFIEEGKIVHTSTLSGSAQHVEECSCYPRYPGVRCVCRDNWKGSNRPIVDINIKDYSIVSSYVCSGLVGDTPRKNDSSSSSHCLDPNNEEGGHGVKGWAFDDGNDVWMGRTISEKLRSGYETFKVIEGWSNPNSKLQINRQVIVDRGNRSGYSGIFSVEGKSCINRCFYVELIRGRKEKTEVLWTSNSIVVFCGTSGTYGTGSWPDGADINLMPI

SEQ ID NO: 26070 - protein, 469 aa, Artificial Sequence; identical to SEQ ID NO: 14712
  derived and/or modified protein sequence (wt) from neuraminidase__InfluenzaA__BAF47941

SEQ ID NO: 26071 - protein, 469 aa, Artificial Sequence
  derived and/or modified protein sequence (wt) from neuraminidase__InfluenzaA__BAF47943
MNPNQKIITIGSVSLTISTICFFMQIAILITTVTLHFKQYEFNSPPNNQVMLCEPTIIERNITEIVYLTNTTIEKEICPKLAEYRNWSKPQCNITGFAPFSKDNSIRLSAGGDIWVTREPYVSCDPDKCYQFALGQGTTLNNVHSNDTVHDRTPYRTLLMIELGVPFHLGTKQVCIAWSSSSCHDGKAWLHVCVTGDDKNATASFIYNGRLVDSIVSWSKEILRTQESECVCINGTCTVVMTDGSASGKADTKILFIEEGKIVHTSTLSGSAQHVEECSCYPRYPGVRCVCRDNWKGSNRPIVDINIKDYSIVSSYVCSGLVGDTPRKNDSSSSSHCLDPNNEEGGHGVKGWAFDDGNDVWMGRTISEKLRSGYETFKVIEGWSNPNSKLQTNRQVIVDRGNRSGYSGIFSVEGKSCINRCFYVELIRGRKEETEVLWTSNSIVVFCGTSGTYGTGSWPDGADINLMPI

SEQ ID NO: 26072 - protein, 469 aa, Artificial Sequence
  derived and/or modified protein sequence (wt) from neuraminidase__InfluenzaA__BAF47944
MNPNQKIITIGSVSLTISTICFFMQIAILITTVTLHFKQYEFNSPPNNQVMLCEPTIIERNITEIVYLTNTTIEKEICPKLTEYRNWSKPQCNITGFAPFSKDNSIRLSAGGDIWVTREPYVSCDPDKCYQFALGQGTTLNNVHSNDPVHDRTPYRTLLMNELGVPFHLGTKQVCIAWSSSSCHDGKAWLHVCVTGDDKNATASFIYNGRLVDSIVSWSKEILRTQESECVCINGTCTVVMTDGSASGKADTKILFIEEGKIVHTSTLSGSAQHVEECSCYPRYPGVRCVCRDNWKGSNRPIVDINIKDYSIVSSYVCSGLVGDTPRKNDSSSSSHCLDPNNEEGGHGVKGWAFDDGNDVWMGRTISEKLRSGYETFKVIEGWSNPNSKLQTNRQVIVDRGNRSGYSGIFSVEGKSCINRCFYVELIRGRKEETEVLWTSNSIVVFCGTSGTYGTGSWPDGADINLMPI

SEQ ID NO: 26073 - protein, 469 aa, Artificial Sequence
  derived and/or modified protein sequence (wt) from neuraminidase__InfluenzaA__BAF47945
MNPNQKIITIGSVSLTISTICFFMQIAILITTVTLHFKQYEFNSPPNNQVKLCEPTIIERNITEIVYLTNTTIEKEICPKLAEYRNWSKPQCNITGFAPFSKDNSIRLSAGGDIWVTREPYVSCDPDKCYQFALGQGTTLNNVHSNDTVHDRTPYRTLLMNELGVPFHLGTKQVCIAWSSSSCHDGKAWLHVCVTGDDKNATASFIYNGRLVDSIVSWSKEILRTQESECVCINGTCTVVMTDGSASGKADTKILFIEEGKIVHTSTLSGSAQHVEECSCYPRYPGVRCVCRDNWKGSNRPIVDINIKDYSIVSSYVCSGLVGDTPRKNDSSSSSHCLDPNNEEGGHGVKGWAFDDGNDVWMGRTISEKLRSGYETFKVIEGWSNPNSKLQTNRQVIVDRGNRSGYSGIFSVEGKSCINRCFYVELIRGRKEETEVLWTSNSIVVFCGTSGTYGTGSWPDGADINLMPI

SEQ ID NO: 26074 - protein, 469 aa, Artificial Sequence
  derived and/or modified protein sequence (wt) from neuraminidase__InfluenzaA__BAF47946
MNPNQKIITIGSVSLTISTICFFMQIAILITTVTLHFKQYEFNSPPNNQVMLCEPTIIERNITEIVYLTNTTIEKEICPKLAEYRNWSKPQCNITGFAPFSKDNSIRLSAGGDIWVTREPYVSCDPDKCYQFALGQGTTLNNVHSNDTVHDRTPYRTLLMNELGVPFHLGTKQVCIAWSSSSCHDGKAWLHVCVTGDDKNATASFIYNGRLVDSIVSWSKEILRTQESECVCINGTCTVVMTDGSASGKADTKILFIEEGKIVHTSTLSGSAQHVEECSCYPRYPGVRCVCRDNWKGSNRPIVDINIKDYSIVSSYVCSGLVGDTPRKNDSSSSSHCLDPNNEEGGHGVKGWAFDDGNDVWMGRTISEKLRSGYETFKVLEGWSNPNSKLQTNRQVIVDRGNRSGYSGIFSVEGKSCINRCFYVELIRGRKEETEVLWTSNSIVVFCGTSGTYGTGSWPDGADINLMPI

SEQ ID NO: 26075 - protein, 469 aa, Artificial Sequence
  derived and/or modified protein sequence (wt) from neuraminidase__InfluenzaA__BAF47948
MNPNQKIITIGSVSLTISTICFFMQIAILITTVTLHFKQYEFNSPPNNQVMLCEPTIIERNITEIVYLTNTTIEKEICPKLAEYRNWSKPQCDITGFAPFSKDNSIRLSAGGDIWVTREPYVSCDPDKCYQFALGQGTTLNNVHSNDKVHDRTPYRTLLMNELGVPFHLGTKQVCIAWSSSSCHDGKAWLHVCVTGDDKNATASFIYNGRLVDSIVSWSKKILRTQESECVCINGTCTVVMTDGSASGKADTKILFIEEGKIVHTSTLSGSAQHVEECSCYPRYPGVRCVCRDNWKGSNRPIVDINIKDYSIVSSYVCSGLVGDTPRKNDSSSSSHCLDPNNEEGGHGVKGWAFDDGNDVWMGRTISEKLRSGYETFKVIEGWSNSNSKLQINRQVIVDRGNRSGYSGIFSVEGKSCINRCFYVELIRGRKEETEVLWTSNSIVVFCGTSGTYGTGSWPDGADINLMPI

SEQ ID NO: 26076 - protein, 469 aa, Artificial Sequence
  derived and/or modified protein sequence (wt) from neuraminidase__InfluenzaA__BAF47949
MNPNQKIITIGSVSLTISTICFFMQIAILITTVTLHFKQYEFNSPPNNQVMLCEPTIIERNITEIVYLTNTTIEKEICPKLAEYRNWSKPQCDITGFAPFSKDNSIRLSAGGDIWVTREPYVSCDPDKCYQFALGQGTTLNNVHSNDKVHDRTPYRTLLMNELGVPFHLGTKQVCIAWSSSSCHDGKAWLHVCVTGDDKNATASFIYNGRLVDSIVSWSKKILRTQESECVCINGTCTVVMTDGSASGKADTKILFIEEGKIVHTSTLSGSAQHVEECSCYPRYPGVRCVCRDNWKGSNRPIVDINIKDYSIVSSYVCSGLVGDTPRKNDSSSSSHCLDPNNEEGGHGVKGWAFDDGNDVWMGRTISEKLRSGYETFKVIEGWSNPNSKLQINRQVIVDRGNRSGYSGIFSVEGKSCINRCFYVELIRGRKEETEVLWTSNSIVVFCGTSGTYGTGSWPDGADINLMPI

SEQ ID NO: 26077 - protein, 469 aa, Artificial Sequence; identical to SEQ ID NO: 14714
  derived and/or modified protein sequence (wt) from neuraminidase__InfluenzaA__BAF47950

SEQ ID NO: 26078 - protein, 469 aa, Artificial Sequence
  derived and/or modified protein sequence (wt) from neuraminidase__InfluenzaA__BAF47951
MNPNQKIITIGSVSLTISTICFFMQIAILITTVTLHFKQYEFNSPPNNQVMLCEPTIIERNITEIVYLTNTTIEKEICPKLAEYRNWSKPQCDITGFAPFSKDNSIRLSAGGDIWVTREPYVSCDPDKCYQFALGQGTTLNNVHSNDTVHDRTPYRTLLMNELGVPFHLGTKQVCIAWSSSSCHDGKAWLHVCVTGDDKNATASFIYNGRLVDSIVSWSKKILRTQESECVCINGTCTVVMTDGSASGKADTKILFIEEGKIVHTSTLSGSAQHVEECSCYPRYPGVRCVCRDNWKGSNRPIVDINIKDYSIVSSYVCSGLVGDTPRKNDSSSSSHCLDPNNEEGGHGVKGWAFDDGNDVWMGRTISEKLRSGYETFKVIEGWSNSNSKLQINRQVIVDRGNRSGYSGIFSVEGKSCINRCFYVELIRGRKEETEVLWTSNSIVVFCGTSGTYGTGSWPDGADINLMPI

SEQ ID NO: 26079 - protein, 469 aa, Artificial Sequence
  derived and/or modified protein sequence (wt) from neuraminidase__InfluenzaA__BAF47952
MNPNQKIITIGSVSLTISTICFFMQIAILITTVTLHFKQYEFNSPPNNQVMLCEPTIIERNITEIVYLTNTTIEKEICPKLAEYRNWSKPQCNITGFAPFSKDNSIRLSAGGDIWVTREPYVSCDPDKCYQFALGQGTTLNNVHSNDTVHDRTPYRTLLMNELGVPFHLGTKQVCIAWSSSSCHDGKAWLHVCVTGDDKNATASFIYNGRLVDSIVSWSKEILRTQESECVCINGTCTVVMTDGSASGKADTKILFIEEGKIVHTSTLSGSAQHVEECSCYPRYPGVRCVCRDNWKGSNRPIVDINIKDYSIVSSYVCSGLVGDTPRKNDSSSSSHCLDPNNEEGGHGVKGWAFDDGNDVWMGRTISEKLRSGYETFKVIEGWSNPNSKLQTNRQVIVDRGNRSGYSGIFSVEGKSCINRCFYVELIRGRKEETEVLWTSNSIVVFCGTSGTYGTGSWPDGANINLMPI

SEQ ID NO: 26080 - protein, 469 aa, Artificial Sequence
  derived and/or modified protein sequence (wt) from neuraminidase__InfluenzaA__BAF47953
MNPNQKIITIGSVSLTISTICFFMQIAILITTVTLHFKQYEFNSPPNNQVMLCEPTIIERNITEIVYLTNTTIEKEICPKLAEYRNWSKPQCDITGFAPFSKDNSIRLSAGGDIWVTREPYVSCDPDKCYQFALGQGTTLNNVHSNDTVHDRTPYRTLLMNELGVPFHLGTKQVCIAWSSSSCHDGKAWLHVCVTGDDENATASFIYNGRLVDSIVSWSKKILRTQESECVCINGTCTVVMTDGSASGKADTKILFIEEGKIVHTSTLSGSAQHVEECSCYPRYPGVRCVCRDNWKGSNRPIVDINIKDYSIVSSYVCSGLVGDTPRKNDSSSSSHCLDPNNEEGGHGVKGWAFDDGNDVWMGRTISEKLRSGYETFKVIEGWSNPNSKLQINRQVIVDRGNRSGYSGIFSVEGKSCINRCFYVELIRGRKEETEVLWTSNSIVVFCGTSGTYGTGSWPDGADINLMPI

SEQ ID NO: 26081 - protein, 469 aa, Artificial Sequence; identical to SEQ ID NO: 26033
  derived and/or modified protein sequence (wt) from neuraminidase__InfluenzaA__BAF47954

SEQ ID NO: 26082 - protein, 469 aa, Artificial Sequence; identical to SEQ ID NO: 26033
  derived and/or modified protein sequence (wt) from neuraminidase__InfluenzaA__BAF47955

SEQ ID NO: 26083 - protein, 469 aa, Artificial Sequence
  derived and/or modified protein sequence (wt) from neuraminidase__InfluenzaA__BAF47956
MNPNQKIITIGSVSLTISTICFFMQIAILITTVTLHFKQYEFNSPPNNQVMLCEPTIIERNITEIVYLTNTTIEKEICPKLAEYRKWSKPQCNITGFAPFSKDNSIRLSAGGDIWVTREPYVSCDPDKCYQFALGQGTTLNNVHSNDTVRDRTPYRTLLMNELGVPFHLGTKQVCIAWSSSSCHDGKAWLHVCVTGDDKNATASFIYNGRLVDSIVSWSKEILRTQESECVCINGTCTVVMTDGSASGKADTKILFIEEGKIVHTSTLSGSAQHVEECSCYPRYPGVRCVCRDNWKGSNRPIVDINIKDYSIVSSYVCSGLVGDTPRKNDSSSSSHCLDPNNEEGGHGVKGWAFDDGNDVWMGRTISEKLRSGYETFKVIEGWSNPNSKLQINRQVIVDRGNRSGYSGIFSVEGKSCINRCFYVELIRGRKEETEVLWTSNSIVVFCGTSGTYGTGSWPDGADINFMPI

SEQ ID NO: 26084 - protein, 469 aa, Artificial Sequence
  derived and/or modified protein sequence (wt) from neuraminidase__InfluenzaA__BAF47958
MNPNQKIITIGSVSLTISTICFFMQIAILITTVTLHFKQYEFNSPPNNQVMLCEPTIIERNITEIVYLTNTTIEKEICPKLAEYRKWSKPQCNITGFAPFSKDNSIRLSAGGDIWVTREPYVSCDPDKCYQFALGQGTTLNNVHSNDTVRDRTPYRTLMMNELGVPFHLGTKQVCIAWSSSSCHDGKAWLHVCVTGDDKNATASFIYNGRLVDSIVSWSKEILRTQESECVCINGTCTVVMTDGSASGKADTKILFIEEGKIVHTSTLSGSAQHVEECSCYPRYPGVRCVCRDNWKGSNRPIVDINIKDYSIVSSYVCSGLVGDTPRKNDSSSSSHCLDPNNEEGGHGVKGWAFDDGNDVWMGRTISEKLRSGYETFKVIEGWSNPNSKLQINRQVIVDRGNRSGYSGIFSVEGKSCINRCFYVELIRGRKEETEVLWTSNSIVVFCGTSGTYGTGSWTDGADINFMPI

SEQ ID NO: 26085 - protein, 469 aa, Artificial Sequence
  derived and/or modified protein sequence (wt) from neuraminidase__InfluenzaA__BAF47959
MNPNQKIITIGSVSLTISTICFFMQIAILITTVTLHFKQYEFNSPPNNQVMLCEPTIIERNITEIVYLTNTTIEKEICPKLAEYRNWSKPQCNITGFAPFSKDNSIRLSAGGDIWVTREPYVSCDPDKCYQFALGQGTTLNNVHSNYTVHDRTPYRTLLMNELGVPFHLGTKQVCIAWSSSSCHDGKAWLHVCVTGDDKNATASFIYNGRLVDSIVSWSKEILRTQESECVCINGTCTVVMTDGSASGKADTKILFIEEGKIVHTSTLSGSAQHVEECSCYPRYPGVRCVCRDNWKGSNRPIVDINIKDYSIVSSYVCSGLVGDTPRKNDSSSSGHCLDPNNEEGGHGVKGWAFDDGNDVWMGRTISEKLRSGYETFKVIEGWSNPNSKLQINRQVIVDRGNRSGYSGIFSVEGKSCINRCFYVELIRGRKEETEVLWTSNSIVVFCGTSGTYGTGSWPDGADINLMPI

SEQ ID NO: 26086 - protein, 469 aa, Artificial Sequence
  derived and/or modified protein sequence (wt) from neuraminidase__InfluenzaA__BAF47960
MNPNQKIITIGSVSLTISTICFFMQIAILITTVTLHFKQYEFNSPPNNQVMLCEPTIIERNITEIVYLTNTTIEKEICPKLAEYRNWSKPQCNITGFAPFSKDNSIRLSAGGDIWVTREPYVSCDPDKCYQFALGQGTTLNNVHSNDTVHNRTPYRTLLMNELGVPFHLGTKQVCIAWSSSSCHDGKAWLHVCVTGDDKNATASFIYNGRLVDSIVSWSKEILRTQESECVCINGTCTVVMTDGSASGKADTKILFIEEGKIVHTSTLSGSAQHVEECSCYPRYPGVRCVCRDNWKGSNRPIVDINIKDYSIVSSYVCSGLVGDTPRKNDSSSSGHCLDPNNEEGGHGVKGWAFDDGNDVWMGRTISEKLRSGYETFKVIEGWSNPNSKLQINRQVIVDRGNRSGYSGIFSVEGKSCINRCFYVELIRGRKEETEVLWTSNSIVVFCGTSGTYGTGSWPDGADINLMPI

SEQ ID NO: 26087 - protein, 469 aa, Artificial Sequence
  derived and/or modified protein sequence (wt) from neuraminidase__InfluenzaA__BAF47975
MNPNQKIITIGSVSLTISTICFFMQIAILITTVTLHFKQYEFNSPPNNQVMLCEPTIIERNITEIVYLTNTTIEKEICPKLAEYRKWSKPQCNITGFAPFSKDNSIRLSAGGDIWVTREPYVSCDPDKCYQFALGQGTTLNNVHSNDTVRDRTPYRTLLMNELGVPFHLGTKQVCIAWSSSSCHDGKAWLHVCVTGDDKNATASFIYNGRLVDSIVSWSKEILRTQESECVCINGTCTVVMTDGSASGKADTKILFIEEGKIVHTSTLSGSAQHVEECSCYPRYPGVRCVCRDNWKGSNRPIVDINIKDYSIVSSYVCSGLVGDTPRKNDSSSSSHCLDPNNEEGGHGVKGWAFDDGNDVWMGRTISEKLRSGYETFKVIEGWSNPNSKLQINRQVIVDRGNRSGYSGIFSVEGKSCINRCFYVELIRGRKEETEVLWTSNSIVVFCGTSGTYGTGSWPDGADINHMPI

SEQ ID NO: 26088 - protein, 469 aa, Artificial Sequence; identical to SEQ ID NO: 14712
  derived and/or modified protein sequence (wt) from neuraminidase__InfluenzaA__BAF47976

SEQ ID NO: 26089 - protein, 469 aa, Artificial Sequence
  derived and/or modified protein sequence (wt) from neuraminidase__InfluenzaA__BAF47977
MNPNQKIITIGSVSLTISTICFFMQIAILITTVTLQFKQYEFNSPPNNQVMLCEPTIIERNITEIVYLTNTTIEKEICPKLAEYRNWSKPQCNITGFAPFSKDNSIRLSAGGDIWVTREPYVSCDPDKCYQFALGQGTTLNNVHSNDTVHGRTPYRTLLMNELGVPFHLGTKQVCIAWSSSSCHDGKAWLHVCVTGDDKNATASFIYNGRLVDSIVSWSKEILRTQESECVCINGTCTVVMTDGSASGKADTKILFIEEGKIVHTSTLSGSAQHVEECSCYPRYPGVRCVCRDNWKGSNRPIVDINIKDYSIVSSYVCSGLVGDTPRKNDSSSSSHCLDPNNEEGGHGVKGWAFDDGNDVWMGRTISEKLRSGYETFKVIEGWSNPNSKLQTNRQVIVDRGNRSGYSGIFSVEGKSCINRCFYVELIRGRKEETEVLWTSNSIVVFCGTSGTYGTGSWPDGADINLMPI

SEQ ID NO: 26090 - protein, 469 aa, Artificial Sequence
  derived and/or modified protein sequence (wt) from neuraminidase__InfluenzaA__BAF47978
MNPNQKIITIGSVSLTISTICFFMQIAILVTTVTLHFKQYEFNSPPNNQVMLCEPTIIERNITEIVYLTNTTIEKEICPKLAEYRNWSKPQCNITGFAPFSKDNSIRLSAGGDIWVTREPYVSCDPDKCYQFALGQGTTLNNVHSNDTVHDRTPYRTLLMNELGVPFHLGTKQVCIAWSSSSCHDGKAWLHVCVTGDDKNATASFIYNGRLVDSIVSWSKEILRTQESECVCINGTCTVVMTDGSASGKADTKILFIEEGKIVHTSTLSGSAQHVEECSCYPRYPGVRCVCRDNWKGSNRPIVDINIKDYSIVSSYVCSGLVGDTPRKNDSSSSSHCLDPNNEEGGHGVKGWAFDDGNDAWMGRTISEKLRSGYETFKVIEGWSNPNSKLQINRQVIVDRGNRSGYSGIFSVEGKSCINRCFYVELIRGRKEETEVLWTSNSIVVFCGTSGTYGTGSWPDGADINLMPI

SEQ ID NO: 26091 - protein, 469 aa, Artificial Sequence
  derived and/or modified protein sequence (wt) from neuraminidase__InfluenzaA__BAF47979
MNPNQKIITIGSVSLTISTICFFMQIAILITTVTLHFKQYEFNSPPNNQVMLCEPTIIERNITEIVYLTNTTIEKEICPKLAEYRNWSKPQCNITGFAPFSKDNSIRLSAGGDIWVTREPYVSCDPDKCYQFALGQGTTLNNVHSNDTVHNRTPYRTLLMNELGVPFHLGTKQVCIAWSSSSCHDGKAWLHVCVTGDDKNATASFIYNGRLVDSIVSWSKEILRTQESECVCINGTCTVVMTDGSASGKADTKILFIEEGKIVHTSTLSGSAQHVEECSCYPRYPGVRCVCRDNWKGSNRPIVDINIKDYSIVSSYVCSGLVGDTPRKNDSSSSSHCLDPNNEEGGHGVKGWAFDDGNDVWMGRTISEKLRSGYETFKVIEGWSNPNSKLQTNRQVIVDRGNRSGYSGIFSVEGKSCINRCFYVELIRGRKEETEVLWTSNSIVVFCGTSGTYGTGSWPDGADINLMPI

SEQ ID NO: 26092 - protein, 469 aa, Artificial Sequence; identical to SEQ ID NO: 16564
  derived and/or modified protein sequence (wt) from neuraminidase__InfluenzaA__BAF47980

SEQ ID NO: 26093 - protein, 469 aa, Artificial Sequence
  derived and/or modified protein sequence (wt) from neuraminidase__InfluenzaA__BAF47981
MNPNQKIITIGSVSLTISTICLFMQIAILITTVTLHFKQYEFNSPPNNQVMLCEPTIIERNITEIVYLTNTTIEKEICPKLAEYRKWSKPQCNITGFAPFSKDNSIRLSAGGDIWVTREPYVSCDPDKCYQFALGQGTTLNNVHSNDTVRNRTPYRTLLMNELGVPFHLGTKQVCIAWSSSSCHDGKAWLHVCVTGDDKNATASFIYNGRLVDSIVSWSKEILRTQESECVCINGTCTVVMTDGSASGKADTKILFIEEGKIVHTSTLSGSAQHVEECSCYPRYPGVRCVCRDNWKGSNRPIVDINIKDYSIVSSYVCSGLVGDTPRKNDSSSSSHCLDPNNEEGGHGVKGWAFDDGNDVWMGRTISEKLRSGYETFKVIEGWSNPNSKLQINRQVIVDRGNRSGYSGIFSVEGKSCINRCFYVELIRGRKEETEVLWTSNSIVVFCGTSGTYGTGSWPDGADINLMPI

SEQ ID NO: 26094 - protein, 469 aa, Artificial Sequence
  derived and/or modified protein sequence (wt) from neuraminidase__InfluenzaA__BAF47982
MNPNQKIITIGSVSLTISTICFFMQIAILITTVTLHFKQYEFNSPPNNQVMLCEPTIIERNITEIVYLTNTTIEKEICPKLAEYRKWSKPQCNITGFAPFSKDNSIRLSAGGDIWVTREPYVSCDPDKCYQFALGQGTTLNNVHSNDTVRNRTPYRTLLMNELGVPFHLGTKQVCIAWSSSSCHDGKAWLHVCVTGDDKNATASFIYNGRLVDSIVSWSKEILRTQESECVCINGTCTVVMTDGSASGKADTKILFIEEGKIVHTSTLSGSAQHVEECSCYPRYPGVRCVCRDNWKGSNRPIVDINIKDYSIVSSYVCSGLVGDTPRKNDSSSSSHCLDPNNEEGGHGVKGWAFDDGNDVWMGRTISEKLRSGYETFKVIEGWSNPNSKLQINRQVIVDRGNRSGYSGIFSVEGKSCINRCFYVELIRGRKEETEVLWTSNSIVVFCGTSGTYGTGSWPDGADINLMPI

SEQ ID NO: 26095 - protein, 469 aa, Artificial Sequence; identical to SEQ ID NO: 16564
  derived and/or modified protein sequence (wt) from neuraminidase__InfluenzaA__BAF47983

SEQ ID NO: 26096 - protein, 469 aa, Artificial Sequence
  derived and/or modified protein sequence (wt) from neuraminidase__InfluenzaA__BAF47984
MNPNQKIITIGSVSLTISTICFFMQIAILITTVTLHFKQYEFNSPPNNQVMLCEPTIIERNITEIVYLTNTTIEKEICPKLAEYRNWSKPQCNITGFAPFSKDNSIRLSAGGDIWVTREPYVSCDPDKCYQFALGQGTTLNNVHSNDTVHGRTPYRTLLMNELGVPFHLGTKQVCIAWSSSSCHDGKAWLHVCVTGDDKNATASFIYNGRLVDSIVSWSKEILRTQESECVCINGTCTVVMTDGSASGKADTKILFIEEGKIVHTSTLSGSAQHVEECSCYPRYPGVRCVCRDNWKGSNRPIVDINIKDYSIVSSYVCSGLVGDTPRKNDSSSSSHCLDPNNEEGDHGVKGWAFDDGNDVWMGRTISEKLRSGYETFKVIEGWSNPNSKLQINRQVIVDRGNRSGYSGIFSVEGKSCINRCFYVELIRGRKEETEVLWTSNSIVVFCGTSGTYGTGSWPDGADINLMPI

SEQ ID NO: 26097 - protein, 469 aa, Artificial Sequence
  derived and/or modified protein sequence (wt) from neuraminidase__InfluenzaA__BAF47985
MNPNQKIITIGSVSLTISTICFFMQIAILITTVTLHFKQYEFNFPPNNQVMLCEPTIIERNITEIVYLTNTTIEKEICPKLAEYRNWSKPQCDITGFAPFSKDNSIRLSAGGDIWVTREPYVSCDPDKCYQFALGQGTTLNNVHSNDTVHDRTPYRTLLMNELGVPFHLGTKQVCIAWSSSSCHDGKAWLHVCVTGDDKNATASFIYNGRLVDSIVSWSKKILRTQESECVCINGTCTVVMTDGSASGKADTKILFIEEGKIVHTSTLSGSAQHVEECSCYPRYPGVRCVCRDNWKGSNRPIVDINIKDYSIVSSYVCSGLVGDTPRKNDSSSSSHCLDPNNEEGGHGVKGWAFDDGNDVWMGRTISEKLRSGYETFKVIEGWSNPNSKLQINRQVIVDRGNRSGYSGIFSVEGKSCINRCFYVELIRGRKEETEVLWTSNSIVVFCGTSGTYGTGSWPDGADINLMPI

SEQ ID NO: 26098 - protein, 469 aa, Artificial Sequence
  derived and/or modified protein sequence (wt) from neuraminidase__InfluenzaA__BAF47986
MNPNQKIITIGSVSLTISTICFFMQIAILITTVTLHFKQYEFNFPPNNQVMLCEPTIIERNITEIVYLTNTTIEKEICPKLAEYRNWSKPQCDITGFAPFSKDNSIRLSAGGDIWVTREPYVSCDPDKCYQFALGQGTTLNNVHSNDTVHDRTPYRTLLMNELGVPFHLGTKQVCIAWSSSSCHDGKAWLHVCVTGDDKNATASFIYNGRLVDSIVSWSKKILRTQESECVCINGTCTVVMTDGSASGKADTKILFIEEGKIVHTSTLSGSAQHVEECSCYPRYPGVRCVCRDNWKGSNRPIVDINIKDYSIVSSYVCSGLVGDTPRKNDSSSSSHCLDPNNEEGGHGVKGWAFDDGNDVWMGRTISEKLRSGYETFKVIEGWSNPNSKLQINRQVIVDRGNRSGYSGIFSVEGKSCINRRFYVELIRGRKEETEVLWTSNSIVVFCGTSGTYGTGSWPDGADINLMPI

SEQ ID NO: 26099 - protein, 469 aa, Artificial Sequence
  derived and/or modified protein sequence (wt) from neuraminidase__InfluenzaA__BAF47987
MNPNQKIITIGSVSLTISTICFFMQIAILITTVTLHFKQYEFNFPPNNQVMLCEPTIIERNITEIVYLTNTTIEKEICPKLAEYRNWSKPQCDITGFAPFSKDNSIRLSAGGDIWVTREPYVSCDPDKCYQFALGQGTTLNNVHSNDKVHDRTPYRTLLMNELGVPFHLGTKQVCIAWSSSSCHDGKAWLHVCVTGDDKNATASFIYNGRLVDSIVSWSKKILRTQESECVCINGTCTVVMTDGSASGKADTKILFIEEGKIVHTSTLSGSAQHVEECSCYPRYPGVRCVCRDNWKGSNRPIVDINIKDYSIVSSYVCSGLVGDTPRKNDSSSSSHCLDPNNEEGGHGVKGWAFDDGNDVWMGRTISEKLRSGYETFKVIEGWSNPNSKLQINRQVIVDRGNRSGYSGIFSVEGKSCINRCFYVELIRGRKEETEVLWTSNSIVVFCGTSGTYGTGSWPDGADINLMPI

SEQ ID NO: 26100 - protein, 469 aa, Artificial Sequence; identical to SEQ ID NO: 14714
  derived and/or modified protein sequence (wt) from neuraminidase__InfluenzaA__BAF47988

SEQ ID NO: 26101 - protein, 469 aa, Artificial Sequence; identical to SEQ ID NO: 14714
  derived and/or modified protein sequence (wt) from neuraminidase__InfluenzaA__BAF47989

SEQ ID NO: 26102 - protein, 469 aa, Artificial Sequence
  derived and/or modified protein sequence (wt) from neuraminidase__InfluenzaA__BAF47990
MNPNQKIITIGSVSLTISTICFFMQIAILITTVTLHFKQYEFNSPPNNQVMLCEPTIIERNITEIVYLTNTTIEKEICPKLAEYRNWSKPQCNITGFAPFSKDNSIRLSAGGDIWVTREPYVSCDPDKCYQFALGQGTTLNNVHSNDTVHDRTPYRTLLMNELGVPFHLGTKQVCIAWSSSSCHDGKAWLHVCVTGDDKNATASFIYNGRLVDSIVSWSKEILRTQESECVCINGTCTVIMTDGSASGKADTKILFIEEGKIVHTSTLSGSAQHVEECSCYPRYPGVRCVCRDNWKGSNRPIVDINIKDYSIVSSYVCSGLVGDTPRKNDSSSSSHCLDPNNEEGGHGVKGWAFDDGNDVWMGRTVSEKLRSGYETFKVIEGWSNPNSKLQINRQVIVDRGNRSGYSGIFSVEGKSCINRCFYVELIRGRKEETEVLWTSNSIVVFCGTSGTYGTGSWPDGADINLMPI

SEQ ID NO: 26103 - protein, 469 aa, Artificial Sequence
  derived and/or modified protein sequence (wt) from neuraminidase__InfluenzaA__BAF47991
MNPNQKIITIGSVSLTISTICFFMQIAILITTVTLHFKQYEFNSPPNNQVMLCEPTIIERNITEIVYLTNTTIEKEICPKLAEYRNWSKPQCDITGFAPFSKDNSIRLSAGGDIWVTREPYVSCDPDKCYQFALGQGTTLNNVHSNDIVHDRTPYRTLLMNELGVPFHLGTKQVCIAWSSSSCHDGKAWLHVCVTGDDKNATASFIYNGRLVDSIVSWSKKILRTQESECVCINGTCTVVMTDGSASGKADTKILFIEEGKIVHTSTLSGSAQHVEECSCYPRYPGIRCVCRDNWKGSNRPIVDINIKDYSIVSSYVCSGLVGDTPRKNDSSSSSHCLDPNNEEGGHGVKGWAFDDGNDVWMGRTISEKLRSGYETFKVIEGWSNPNSKLQINRQVIVDRGNRSGYSGIFSVEGKSCINRCFYVELIRGRKEETEVLWTSNSIVVFCGTSGTYGTGSWPDGADINLMPI

SEQ ID NO: 26104 - protein, 469 aa, Artificial Sequence
  derived and/or modified protein sequence (wt) from neuraminidase__InfluenzaA__BAF47992
MNPNQKIITIGSVSLTISTICFFMQIAILITTVTLHFKQYEFNSPPNNQVMLCEPTIIERNITEIVYLTNTTIEKEICPKLAEYRNWSKPQCNITGFAPFSKDNSIRLSAGGDIWVTREPYVSCEPDKCYPFALVQGTTLNNVHSNDTVHDRTPYRTLLMNELGVPFHLGTKQVCIAWSSSSCHDGKAWLHVCVTGDDKNATASFIYNGRLVDSIVSWSKEILRTQESECVCINGTCTVVMTDGSASGKADTKILFIEEGKIVHTSTLSGSAQHVEECSCYPRYPGVRCVCRDNWKGSNRPIVDINIKDYSIVSSYVCSGLVGDTPRKNDSSSSGHCLDPNNEEGGHGVKGWAFDDGNDVWMGRTISEKLRSGYETFKVIEGWSNPNSKLQINRQVIVDRGNRSGYSGIFSVEGKSCINRCFYVELIRGRKEETEVLWTSNSFVVFCGTSGTYGTGSWPDGADINLMPI

SEQ ID NO: 26105 - protein, 469 aa, Artificial Sequence; identical to SEQ ID NO: 26061
  derived and/or modified protein sequence (wt) from neuraminidase__InfluenzaA__BAF47993

SEQ ID NO: 26106 - protein, 469 aa, Artificial Sequence; identical to SEQ ID NO: 14712
  derived and/or modified protein sequence (wt) from neuraminidase__InfluenzaA__BAF47994

SEQ ID NO: 26107 - protein, 469 aa, Artificial Sequence
  derived and/or modified protein sequence (wt) from neuraminidase__InfluenzaA__BAF47995
MNPNQKIITIGSVSLTISTICFFMQIAILITTVTLHFKQYEFNSPPNNQVMLCEPTIIERNITEIVYLTNTTIEKEICPKLAEYRNWSKPQCNITGFAPFSKDNSIRLSAGGDIWVTREPYVSCDPDKCYQFALGQGTTLNNVHSNDTVHGRTPYRTLLMNELGVPFHLGTKQVCIAWSSSSCHDGKAWLHVCVTGDDKNATASFIYNGRLVDSIVSWSKEILRTQESECVCINGTCTVVMTDGSASGKADTKILFIEEGKIVHTSTLSGSAQHVEECSCYPRYPGVRCVCRDNWKGSNRPIVDINIKDYSIVSSYVCSGLVGDTPRKNDSSSSSHCLDPNNEEGGHGVKGWAFDDGNDVWMGRTISEKLRSGYETFKVIEGWSNPNSKLQINRQVIVDRGNRSGYSGIFSVEGKSCINRCFYVELIRGRKEETEVLWTSNSIVVFCGTSGTYGTGSWPDGADINLMPI

SEQ ID NO: 26108 - protein, 469 aa, Artificial Sequence; identical to SEQ ID NO: 26107
  derived and/or modified protein sequence (wt) from neuraminidase__InfluenzaA__BAF47996

SEQ ID NO: 26109 - protein, 469 aa, Artificial Sequence; identical to SEQ ID NO: 14714
  derived and/or modified protein sequence (wt) from neuraminidase__InfluenzaA__BAF47997

SEQ ID NO: 26110 - protein, 469 aa, Artificial Sequence
  derived and/or modified protein sequence (wt) from neuraminidase__InfluenzaA__BAF57504
MNPNQKIITIGSVSLTISTICFFMQIAILITTVTLHFKQYEFNPPPNNQVMLCEPTIIERNITEIVYLTNTTIEKEICPKLAEYRNWSKPQCNITGFAPFSKDNSIRLSAGGDIWVTREPYVSSDPDKCYQFALGQGTTLNNVHSNDTVHDRTPYRTLLMKELGVPFHLGTKQVCIAWSSSSCHDGKAWLHVCVTGDDENATASFIYNGRLVDSVVSWSKKILRTQESECVCINGTCTVVMTDGSASGKADTKILFIEEGKIVHTSSLSGSAQHVEECSCYPRYPGVRCVCRDNWKGSNRPIVDINIKDYSIVSSYVCSGLVGDTPRKNDSSSSSHCLDPNNEEGGHGVKGWAFDDGNDVWMGRTISEKLRSGYETFKVIEGWSNPNSKLQINRQVIVDRGNRSGYSGIFSVEGKSCINRCFYVELIRGRKQETEVLWTSNSIVVFCGTSGTYGTGSWPDGADINLMPI

SEQ ID NO: 26111 - protein, 469 aa, Artificial Sequence
  derived and/or modified protein sequence (wt) from neuraminidase__InfluenzaA__BAF57508
MNPNQKIITIGSVSLTISTICFFMQIAILITTLTLHFKQYEFNSPPNNQVMLCEPTIIERNITEIVYLTNTTIEKEICPKLAEYRNWSKPQCNITGFAPFSKDNSIRLSAGGDIWVTREPYVSCDPDKCYQFALGQGTTLNNVHSNDTVHDRTPYRTLLMNELGVPFHLGTKQVCIAWSSSSCHDGKAWLHVCVTGDDENATASFIYNGRLVDSIVSWSKKILRTQESECVCINGTCTVVMTDGSASGKADTKILFIEEGKIVHTSTLSGSAQHVEECSCYPRYPGVRCVCRDNWKGSNRPIVDINIKDYSIVSSYVCSGLVGDTPRKNDSSSSSHCLDPNNEEGGHGVKGWAFDDGNDVWMGRTISEKLRSGYETFKVIEGWSNPNSKLQINRQVIVDRGNRSGYSGIFSVEGKSCINRCFYVELIRGRKQETEVLWTSNSIVVFCGTSGTYGTGSWPDGADINLMPI

SEQ ID NO: 26112 - protein, 469 aa, Artificial Sequence; identical to SEQ ID NO: 15929
  derived and/or modified protein sequence (wt) from neuraminidase__InfluenzaA__BAF57511

SEQ ID NO: 26113 - protein, 469 aa, Artificial Sequence
  derived and/or modified protein sequence (wt) from neuraminidase__InfluenzaA__BAF57515
MNPNQRIITIGSVSLTISTICFFMQIAILITTVTLHFKQYEFNSPPNNQVMLCEPTIIERNITEIVYLTNTTIEKEICPKLAEYRNWSKPQCNITGFAPFSKDNSIRLSAGGDIWVTREPYVSCDPDKCYQFALGQGTTLNNVHSNDKVHDRTPYRTLLMNELGVPFHLGTKQVCIAWSSSSCHDGKAWLHVCVTGDDENATASFIYNGRLVDSIVSWSKKILRTQESECVCINGTCTVVMTDGSASGKADTKILFIEEGKIVHTSTLSGSAQHVEECSCYPRYPGVRCVCRDNWKGSNRPIVDINIKDYSIVSSYLCSGLVGDTPRKNDSSSSSHCLDPNNEEGGHGVKGWAFDDGNDVWMGRTISEKLRSGYETFKVIEGWSHPNSQLQINRQVIVDRGNRSGYSGIFSVEGKSCINRCFYVELIRGRKQETEVLWTSNSIVVFCGTSGTYGTGSWPDGADINLMPI

SEQ ID NO: 26114 - protein, 469 aa, Artificial Sequence
  derived and/or modified protein sequence (wt) from neuraminidase__InfluenzaA__BAF57522
MNPNQKIITIGSVSLTISTICFFMQIAILITTVTLHFKQYEFNSPPNNQVMLCEPTIIERNITEIVYLTNTIIEKEICPKLAEYRNWSKPQCNITGFAPFSKDNSIRLSAGGDIWVTREPYVSCDPDKCYQFALGQGTTLNNVHSNDTVHDRTPYRTLLMNELGVPFHLGTKQVCIAWSSSSCHDGKAWLHVCVTGDDENATASFIYNGRLVDSIVSWSKKILRTQESECVCINGTCTVVMTDGSASGKADTKILFIEEGKIVHTSTLSGSAQHVEECSCYPRYPGVRCVCRDNWKGSNRPIVDINIKDYSIVSSYVCSGLVGDTPRKNDRSRSSHCLDPNNEEGGHGVKGWAFDDGNDVWMGRTISEKLRSGYETFKVIEGWSKPNSKLQINRQVIVDRGNRTGYSGIFSVEGKSCINRCFYVELIRGRKQETEVLWTSNSIVVFCGTSGTYGTGSWPDGADINLMPI

SEQ ID NO: 26115 - protein, 469 aa, Artificial Sequence
  derived and/or modified protein sequence (wt) from neuraminidase__InfluenzaA__BAF57529
MNPNQKIITIGSVSLTISTICFFMQIAILITTVTLHFKQYEFNSPPNNQVMLCEPTIIERNITEIVYLTNTTIEKEICPKLAEYRNWSKPQCDITGFAPFSKDNSIRLSAGGDIWVTREPYVSCDPDKCYQFALGQGTTLNNVHSNDKVHERTPYRTLLMNELGVPFHLGTKQVCIAWSSSSCHDGKAWLHVCVTGDDKNATASFIYNGRLVDSIVSWSKKILRTQESECVCINGTCTVVMTDGSASGKADTKILFIEEGKIVHTSTLSGSAQHVEECSCYPRYPGVRCVCRDNWKGSNRPIVDINIKDYSIVSSYVCSGLVGDTPRKNDSSSSSHCLDPNNEEGGHGVKGWAFDDGNDVWMGRTISEKLRSGYETFKVIEGWSNPNSKLQINRQVIVDRGNRSGYSGIFSVEGKSCINRCFYVELIRGRKEETEVLWTSNSIVVFCGTSGTYGTGSWPDGADINLMPI

SEQ ID NO: 26116 - protein, 469 aa, Artificial Sequence; identical to SEQ ID NO: 21551
  derived and/or modified protein sequence (wt) from neuraminidase__InfluenzaA__BAF57532

SEQ ID NO: 26117 - protein, 469 aa, Artificial Sequence; identical to SEQ ID NO: 21551
  derived and/or modified protein sequence (wt) from neuraminidase__InfluenzaA__BAF57536

SEQ ID NO: 26118 - protein, 469 aa, Artificial Sequence
  derived and/or modified protein sequence (wt) from neuraminidase__InfluenzaA__BAF57539
MNPNQKIITIGSVSLTISTICFFMQIAILITTVTLHFKQYEFNSPPNNQVMLCEPTIIERNITEIVYLTNTTIEKEICPKLAEYRNWSKPQCDITGFAPFSKDNSIRLSAGGDIWVTREPYVSCDPDKCYQFALGQGTTLNNVHSNDTVHDRTPYRTLLMNELGVPFHLGTKQVCIAWSSSSCHDGKAWLHVCVTGDDKNATASFIYNGRLIDSIVSWSKKILRTQESECVCINGTCTVVMTDGSASGKADTKILFIEEGKIVHTSTLSGSAQHVEECSCYPRYPGVRCVCRDNWKGSNRPIVDINIKDYSIVSSYVCSGLVGDTPRKNDSSSSSHCLDPNNEEGGHGVKGWAFDDGNDVWMGRTISEKLRSGYETFKVIEGWSNPNSKLQINRQVIVDRGNRSGYSGIFSVEGKSCINRCFYVELIRGRKEKTEVLWTSNSIVVFCGTSGTYGTGSWPDGADINLMPI

SEQ ID NO: 26119 - protein, 469 aa, Artificial Sequence
  derived and/or modified protein sequence (wt) from neuraminidase__InfluenzaA__BAF57543
MNPNQKIITIGSVSLTISTICFFMQIAILITTVTLHFKQYEFNSPPNNQVMLCEPTIIERNITEIVYLTNTTIEKEICPKLAEYRNWSKPQCDITGFAPFSKDNSIRLSAGGDIWVTREPYVSCDPDKCYQFALGQGTTLNNVHSNDTVHDRTPYRTLLMNELGVPFHLGTKQVCIAWSSSSCHDGKAWLHVCVTGDDKNATASFIYNGRLVDSIVSWSKKILRTQESECVCINGTCTVVMTDGSASGKADTKILFIEEGKIVHTSTLSGSAQHVEECSCYPRYPGVRCVCRDNWKGSNRPIVDINIKDYSIVSSYVCSGLVGDTPRKNDSSSSSHCLDPNNEEGGHGVKGWAFDDGNDVWMGRTISEKLRSGYETFKVIEGWSNPNSKLQINRQVIVDRGNRSGYSAIFSVEGKSCINRCFYVELIRGRKEETEVLWTSNSIVVFCGTSGTYGTGSWPDGADINLMPI

SEQ ID NO: 26120 - protein, 469 aa, Artificial Sequence
  derived and/or modified protein sequence (wt) from neuraminidase__InfluenzaA__BAF57547
MNPNQKIITIGSVSLTISTICFFMQIAILITTVTLHFKQYEFNSPPNNQVMLCEPTIIERNITEIVYLTNTTIEKEICPKLAEYRNWSKPQCDITGFAPFSKDNSIRLSAGGDIWVTREPYVSCDPDKCYQFALGQGTTLNNVHSNDTVHDRTPYRTLLMNELGVPFHLGTKQVCIAWSSSSCHDGKAWLHVCVTGDDKNATASFIYNGRLVDSIVSWSKKILRTQESECVCINGTCTVVMTDGSASGKADTKILFIEEGKIVHTSTLSGSAQHVEECSCYPRYPGVRCVCRDNWKGSNRPIVDINIKDYSIVSSYVCSGLVGDTPRKNDSSSSSHCLDPNNEEGGHGVKGWAFDDGNDVWMGRTISEKLRSGYETFKVIEGWSNPNSKLQINRQVIVDRGNRSGYSGIFSVEGKSCINRCFYVELIRGRKEETEALWTSNSIVVFCGTSGTYGTGSWPDGADINLMPI

SEQ ID NO: 26121 - protein, 469 aa, Artificial Sequence; identical to SEQ ID NO: 14714
  derived and/or modified protein sequence (wt) from neuraminidase__InfluenzaA__BAF57551

SEQ ID NO: 26122 - protein, 469 aa, Artificial Sequence; identical to SEQ ID NO: 14714
  derived and/or modified protein sequence (wt) from neuraminidase__InfluenzaA__BAF57555

SEQ ID NO: 26123 - protein, 469 aa, Artificial Sequence; identical to SEQ ID NO: 14712
  derived and/or modified protein sequence (wt) from neuraminidase__InfluenzaA__BAF57559

SEQ ID NO: 26124 - protein, 469 aa, Artificial Sequence
  derived and/or modified protein sequence (wt) from neuraminidase__InfluenzaA__BAF57563
MNPNQKIITIGSVSLTISTICFFMQIAILITTVTLHFKQYEFNSPPNNQVMLCEPTIIERNITEIVYLTNTTIEKEICPKLAEYRNWSKPQCDITGFAPFSKDNSIRLSAGGDIWVTREPYVSCDPDKCYQFALGQGTTLNNVHSNDIVHDRTPYRTLLMNELGVPFHLGTKQVCIAWSSSSCHDGKAWLHVCVTGDDKNATASFIYNGRLVDSIVSWSKEILRTQESECVCINGTCTVVMTDGSASGKADTKILFIEEGKIVHTSTLSGSAQHVEECSCYPRYPGVRCVCRDNWKGSNRPIVDINIKDYSIVSSYVCSGLVGDTPRKNDSSSSSHCLDPNNEEGGHGVKGWAFDDGNDVWMGRTISEKLRSGYETFKVIEGWSNPNSKLQINRQVIVDRGNRSGYSGIFSVEGKSCINRCFYVELIRGRKEETEVLWTSNSIVVFCGTSGTYGTGSWPDGADINLMPI

SEQ ID NO: 26125 - protein, 469 aa, Artificial Sequence; identical to SEQ ID NO: 14712
  derived and/or modified protein sequence (wt) from neuraminidase__InfluenzaA__BAF57571

SEQ ID NO: 26126 - protein, 469 aa, Artificial Sequence; identical to SEQ ID NO: 21456
  derived and/or modified protein sequence (wt) from neuraminidase__InfluenzaA__BAF57575

SEQ ID NO: 26127 - protein, 469 aa, Artificial Sequence; identical to SEQ ID NO: 14327
  derived and/or modified protein sequence (wt) from neuraminidase__InfluenzaA__BAF57579

SEQ ID NO: 26128 - protein, 469 aa, Artificial Sequence
  derived and/or modified protein sequence (wt) from neuraminidase__InfluenzaA__BAF57583
MNPNQKIITIGSVSLTISTICFFMQIAILITTVTLHFKQYEFNSPPNNQVMLCEPTIIERNITEIVYLTNTTIEKEICPKLAEYRNWSKPQCNITGFAPFSKDNSIRLSAGGDIRVTREPYVSCDPDKCYQFALGQGTTLNNVHSNDTVHDRTPYRTLLMNELGVPFHLGTKQVCIAWSSSSCHDGKAWLHVCVTGDDKNATASFIYNGRLVDSIVSWSKEILRTQESECVCINGTCTVVMTDGSASGKADTKILFIEEGKIVHTSTLSGSAQHVEECSCYPRYPGVRCVCRDNWKGSNRPIVDINIKDYSIVSSYVCSGLVGDTPRKNDSSSSSHCLDPNNEEGGHGVKGWAFDDGNDVWMGRTISEKLRSGYETFKVIEGWSNPNSKLQINRQVIVDRGNRSGYSGIFSVEGKSCINRCFYVELIRGRKEETEVLWTSNSIVVFCGTSGTYGTGSWPDGADINLMPI

SEQ ID NO: 26129 - protein, 469 aa, Artificial Sequence
  derived and/or modified protein sequence (wt) from neuraminidase__InfluenzaA__BAF57587
MNPNQKIITIGSVSLTISTICFFMQIAILITTVTLHFKQCEFNSPPNNQVMLCEPTIIERNITEIVYLTNTTIEKEICPKLAEYRNWSKPQCNITGFAPFSKDNSIRLSAGGDIWVTREPYVSCDPDKCYQFALGQGTTLNNVHSNDTVHDRTPYRTLLMNELGVPFHLGTKQVCIAWSSSSCHDGKAWLHVCVTGDDKNATASFIYNGRLVDSIVSWSKEILRTQESECVCINGTCTVVMTDGSASGKADTKILFIEEGKIVHTSTLSGSAQHVEECSCYPRYPGVRCVCRDNWKGSNRPIVDINIKDYSIVSSYVCSGLVGDTPRKNDSSSSSHCLDPNNEEGGHGVKGWAFDDGNDVWMGRTISEKLRSGYETFKVIEGWSNPNSKLQINRQVIVDRGNRSGYSGIFSVEGKSCINRCFYVELIRGRKEETEVLWTSNSIVVFCGTSGTYGTGSWPDGADINLMPI

SEQ ID NO: 26130 - protein, 469 aa, Artificial Sequence
  derived and/or modified protein sequence (wt) from neuraminidase__InfluenzaA__BAF57591
MNPNQKIITIGSVSLTISTICFFMQIAILITTVTLHFKQYEFNSPPNNQVMLCEPTIIERNITEIVYLTNTTIEKEICPKLAEYRNWSKPQCDITGFAPFSKDNSIRLSAGGDIWVTREPYVSCDPDKCYQFALGQGTTLNNVHSNDTVHDRTPYRTLLMNELGVPFHLGTKQVCIAWSSSSCHDGKAWLHVCVTGDDKNATASFIYNGRLVDSIVSWSKEILRTQESECVCINGTCTVVMTDGSASGKADTKILFIEEGKIVHTSTLSGSAQHVEECSCYPRYPGVRCVCRDNWKGSNRPIVHINIKDYSIVSSYVCSGLVGDTPRKNDSSSSSHCLNPNNEEGGHGVKGWAFDDGNDVWMGRTISEKLRLGYETFKVIEGWSNPNSKLQINRQVIVDRGNRSGYSGIFSVEGKSCINRCFYVELIRGRKEETEVLWTSNSIVVFCGTSGTYGTGSWPDGADINLMPI

SEQ ID NO: 26131 - protein, 469 aa, Artificial Sequence
  derived and/or modified protein sequence (wt) from neuraminidase__InfluenzaA__BAF57595
MNPNQKIITIGSVSLTISTICFFMQIAILITTVTLHFKQYEFNSPPNNQVMLCEPTIIERNITEIVYLTNTTIEKEICPKIAEYRNWSKPQCNITGFAPFSKDNSIRLSAGGDIWVTREPYVSCDPDKCYQFALGQGTTLNNVHSNDTVHDRTPYRTLLMNELGVPFHLGTKQVCIAWSSSSCHDGKAWLHVCVTGDDKNATASFIYNGRLVDSIVSWSKEILRTQESECVCVNGTCTVVMTDGSASGKADTKILFIEEGKIVHTSTLSGSAQHVEECSCYPRYPGVRCVCRDNWKGSNRPIVDINIKDYSIVSSYVCSGLVGDTPRKNDSSSSSHCLDPNNEEGGHGVKGWAFDDGNDVWMGRTISEKLRSGYETFKVIEGWSNPNSKLQINRQVIVDRGNRSGYSGIFSVEGKSCINRCFYVELIRGRKEETEVLWTSNSIVVFCGTSGTYGTGSWPDGADINLMPI

SEQ ID NO: 26132 - protein, 469 aa, Artificial Sequence; identical to SEQ ID NO: 21456
  derived and/or modified protein sequence (wt) from neuraminidase__InfluenzaA__BAF57599

SEQ ID NO: 26133 - protein, 469 aa, Artificial Sequence
  derived and/or modified protein sequence (wt) from neuraminidase__InfluenzaA__BAF57603
MNPNQKIITIGSVSLTISTICFFMQIAILITTVTLHFKQYEFNSPPNNQVMLCEPTIIERNITEIVYLTNTTIEKEICPKLAEYRNWSKPQCNITGFAPFSKDNSIRLSAGGDIWVTREPYVSCDPDKCYQFALGQGTTLNNVHSNDTVHDRTPYRTLLMNELGVPFHLGTKQVCIAWSSSSCHDGKAWLHVCVTGDDKNATASFIYNGRLVDSIVSWSKEILRTQESECVCINGTCTVVMTDGSASGKADTKILFIEEGKIVHTSTLSGSAQHVEECSCYPRYPGVRCVCRDNWKGSNRPIVDINIKDYSIVSSYVCSGLVGDTPRKNDSSSSSHCLDPNNEEGGHGVKGWAFDDGNDVWMGRTISEKLRSGYETFKVIEGWSNPDSKLQINRQVIVDRGNRSGYSGIFSVEGKSCINRCFYVELIRGRKEETEVLGTSNSIVVFCGTSGTYGTGSWPDGADINLMPI

SEQ ID NO: 26134 - protein, 469 aa, Artificial Sequence; identical to SEQ ID NO: 21551
  derived and/or modified protein sequence (wt) from neuraminidase__InfluenzaA__BAF62620

SEQ ID NO: 26135 - protein, 470 aa, Artificial Sequence
  derived and/or modified protein sequence (wt) from neuraminidase__InfluenzaA__BAF63036
MNPNQKIITIGSISIAIGIISLMLQIGNIISIWASHSIQTGSQNHTGICNQRIITYENSTWVNHTYVTINNTNVVAGKDKTSVTLAGNSSLCSISGWAIYTKDNSIRIGSKGDVFVIREPFISCSHLECRTFFLTQGALLNDKHSNGTVKDRSPYRALMSCPLGEAPSPYNSKFESVAWSASACHDGMGWLTIGISGPDNGAVAVLKYNGIITETIKSWKKRILRTQESECVCVNGSCFTIMTDGPSNGAASYKIFKIEKGKVTKSIELNAPNFHYEECSCYPDTGTVMCVCRDNWHGSNRPWVSFNQNLDYQIGYICSGVFGDNPRPKDGKGSCNPVTVDGADGVKGFSYKYGNGVWIGRTKSNRLRKGFEMIWDPNGWTDTDSDFSVKQDVVAITDWSGYSGSFVQHPELTGLDCIRPCFWVELVRGLPRENTTIWTSGSSISFCGVNSDTANWSWPDGAELPFTIDK

SEQ ID NO: 26136 - protein, 470 aa, Artificial Sequence; identical to SEQ ID NO: 21441
  derived and/or modified protein sequence (wt) from neuraminidase__InfluenzaA__BAF63040

SEQ ID NO: 26137 - protein, 470 aa, Artificial Sequence
  derived and/or modified protein sequence (wt) from neuraminidase__InfluenzaA__BAF63047
MNPNQKIITIGSISIAIGIISLVLQIGNIISIWASHSIQTGSQNHTGICNQRIITYENSTWVNHTYVNINNTNVVAGKDKTSVTLAGNSSLCSISGWAIYTKDNSIRIGSKGDVFVIREPFISCSHLECRTFFLTQGALLNDKHSNGTVKDRSPYRALMSCPLGEAPSPYNSKFESVAWSASACHDGMGWLTIGISGPDNGAVAVLKYNGIITETIKSWKKRILRTQESECVCVNGSCFTIMTDGPSNGAASYKIFKIEKGKVTKSIELNAPNFHYEECSCYPDTGTVMCVCRDNWHGSNRPWVSFNQNLDYQIGYICSGVFGDNPRPKDGEGSCNPVTVDGADGVKGFSYKYGNGVWIGRTKSNRLRKGFEMIWDPNGWTDTDSDFSVKQDVVAITDWSGYSGSFVQHPELTGLDCIRPCFWVELVRGLPRENTTIWTSGSSISFCGVNSDTADWSWPDGAELPFTIDK

SEQ ID NO: 26138 - protein, 470 aa, Artificial Sequence
  derived and/or modified protein sequence (wt) from neuraminidase__InfluenzaA__BAF63058
MNPNQKIITIGSISIAIGIISLMLQIGNIISIWASHSIQTGSQNHTGICNQRIITYENSTWVNHTYVNINNTNVVAGKDKTSVTLAGNSSLCAISGWAIYTKDNSIRIGSKGDVFVIREPFISCSHLECRTFFLTQGALLNDKHSNGTVKDRSPYRALMSCPLGEAPSPYNSKFESVAWSASACHDGMGWLTIGISGPDNGAVAVLKYNGIITETIKSWKKRILRTQESECVCVNGSCFTIMTDGPSNEAASYKIFKIEKGKVTKSIELNAPNFHYEECSCYPDTGTVMCVCRDNWHGSNRPWVSFNPNLDYQIGYICSGVFGDNPRPKDGEGSCNPVTVDGADGVKGFSYKYGNGVWIGRTKSNRLRKGFEMVWDPNGWTDTDSDFSVKQDVVAITDWSGYSGSFVQHPELTGLDCIRPCFWVELVRGLPKENTTIWTSGSSISFCGVNSDTANWSWPDGAELPFTIDK

SEQ ID NO: 26139 - protein, 470 aa, Artificial Sequence; identical to SEQ ID NO: 21441
  derived and/or modified protein sequence (wt) from neuraminidase__InfluenzaA__BAF63065

SEQ ID NO: 26140 - protein, 470 aa, Artificial Sequence; identical to SEQ ID NO: 21441
  derived and/or modified protein sequence (wt) from neuraminidase__InfluenzaA__BAF63069

SEQ ID NO: 26141 - protein, 470 aa, Artificial Sequence; identical to SEQ ID NO: 21441
  derived and/or modified protein sequence (wt) from neuraminidase__InfluenzaA__BAF63079

SEQ ID NO: 26142 - protein, 470 aa, Artificial Sequence; identical to SEQ ID NO: 21441
  derived and/or modified protein sequence (wt) from neuraminidase__InfluenzaA__BAF63092

SEQ ID NO: 26143 - protein, 470 aa, Artificial Sequence; identical to SEQ ID NO: 21441
  derived and/or modified protein sequence (wt) from neuraminidase__InfluenzaA__BAF63098

SEQ ID NO: 26144 - protein, 470 aa, Artificial Sequence
  derived and/or modified protein sequence (wt) from neuraminidase__InfluenzaA__BAF63104
MNPNQKIITIGSISIAIGIISLMLQVGIVVSIWASHSIQTGSQNHTGICNQRIITYENSTWVNHTYVNINNTNVVAGKDKTSVALAGNSSLCSISGWAIYTKDNSIRIGSKGDVFVIREPFISCSHLECRTFFLTQGALLNDKHSNGTVKDRSPYRALMSCPLGEAPSPYNSKFESVAWSASACHDGMGWLTIGISGPDNGAVAVLKYNGIITETIKSWKKRILRTQESECVCVNGSCFTIMTDGPSNGAASYKIFKIEKGQVTKSVELNAPNFHYEECSCYPDTGTVMCVCRDNWHGSNRPWVSFNQNLDYQIGYICSGVFGDNPRPKDGKGSCNPVTVDGADGVKGFSYKYGNGVWIGRTKSNRLRKGFEMIWDPNGWTDTDSDFSVKQDVVAITDWSGYSGSFVQHPELTGLDCIRPCFWVELVRGLPRENTTIWTSGSSISFCGVDSDTANWSWPDGAELPFTIDK

SEQ ID NO: 26145 - protein, 470 aa, Artificial Sequence
  derived and/or modified protein sequence (wt) from neuraminidase__InfluenzaA__BAF63112
MNPNQKIITIGSISIAIGIISLMLQVGNIISIWASHSIQTGSQNHTGICNQRIITYENSTWVNHTYVNINNTNVVAGKDKTSVALAGNSSLCSISGWAIYTKDNSIRIGSKGDVFVIREPFISCSHLECRTFFLTQGALLNDKHSNGTVKDRSPYRALMSCPLGEAPSPYNSKFESVAWSASACHDGMGWLTIGISGPDNGAVAVLKYNGIITETIKSWKKRILRTQESECVCVNGSCFTIMTDGPSNGAASYKIFKIEKGQVTKSVELNAPNFHYEECSCYPDTGTVMCVCRDNWHGSNRPWVSFNQNLDYQIGYICSGVFGDNPRPKDGKGSCNPVTVDGADGVKGFSYKYGNGVWIGRTKSNRLRKGFEMIWDPNGWTDTDSDFSVKQDVVAITDWSGYSGSFVQHPELTGLDCIRPCFWVELVRGLPRENTTIWTSGSSISFCGVDSDTANWSWPDGAELPFTIDK

SEQ ID NO: 26146 - protein, 470 aa, Artificial Sequence
  derived and/or modified protein sequence (wt) from neuraminidase__InfluenzaA__BAF63116
MNPNQKIITIGSISIAIGIISLMLQVGNIISIWASHSIQTGSQNHTGICNQRIITYENSTWVNHTYVNINNTNVVAGKDKTSVALAGNSSLCSISGWAIYTKDNSIRIGSKGDVFVIREPFISCSHLECRTFFLTQGALLNDKHSNGTVKDRSPYRALMSCPLGEAPSPYNSKFESVAWSASACHDGLGWLTIGISGPDNGAVAVLKYNGIITETIKSWKKRILRTQESECVCVNGSCFTIMTDGPSNGAASYKIFKIEKGQVTKSVELNAPNFHYEECSCYPDTGTVMCVCRDNWHGSNRPWVSFNPDLDYQIGYICSGVFGDNPRPKDGKGSCNPVTVDGADGVKGFSYKYGNGVWIGRTKSNRLRKGFEMIWDPNGWTDTDSDFSVKQDVVAITDWSGYSGSFVQHPELTGLDCIRPCFWVELVRGLPRENTTIWTSGSSISFCGVDSDTANWSWPDGAELPFTIDK

SEQ ID NO: 26147 - protein, 470 aa, Artificial Sequence
  derived and/or modified protein sequence (wt) from neuraminidase__InfluenzaA__BAF63124
MNPNQKIITIGSISIAIGIISLMLQIGNIISIWASHSIQTGSQNHTGICNQRIITYENSTWVNHTYVNINNTNVVAGKDKTSVTLAGNSSLCSISGWAIYTKDNSIRIGSKGDVFVIREPFISCSHLECRTFFLTQGALLNDKHSNGTVKDRSPYRALMSCPLGEAPSPYNSKFESVAWSASACHDGMGWLTIGISGPDNGAVAVLKYNGIITETIKSWKKRILRTQESECVCVNGSCFTIMTDGPSNGAASYKIFKIEKGKVTKSRELNAPNFHYEECSCYPDTGTVMCVCRDNWHGSNRPWVSFNPNLDYQIGYICSGVVGDNPRPKDGKGSCNPVTADGADGVKGFSYKYGNGVWIGRTKSNRLRKGFEMIWDPNGWTDTDSDFSVKQDVVAITDWSGYSGSFVQHPELTGLDCIRPCFWVELVRGLPRENTTIWTSGSSISFCGVDSDTANWSWPDGAELPFTIDK

SEQ ID NO: 26148 - protein, 470 aa, Artificial Sequence; identical to SEQ ID NO: 21503
  derived and/or modified protein sequence (wt) from neuraminidase__InfluenzaA__BAF63132

SEQ ID NO: 26149 - protein, 470 aa, Artificial Sequence
  derived and/or modified protein sequence (wt) from neuraminidase__InfluenzaA__BAF63136
MNPNQKIITIGSISIAIGIISLMLQIGNIISIWASHSIQTGSQNHTGICNQRIITYENSTWVNHTYVNINNTNVVAGKDKTSVTLAGNSSLCSISGWAIYTKDNSIRIGSKGDVFVIREPFISCSHLECKTFFLTQGALLNDKHSNGTVKDRSPYRALMSCPLGEAPSPYNSKFESVAWSASACHDGMGWLTIGISGPDNGAVAVLKYNGIITGTIKSWKKQILRTQESECVCMNGSCFTIMTDGPSNGAASYKIFKIEKGKVTKSIELNAPNFHYEECSCYPDTGTVMCVCRDNWHGSNRPWVSFNQNLDYQIGYICSGVFGDNPRPKDGEGSCNPVTVDGANGVKGFSYKYGNGVWIGRTKSNRLRKGFEMIWDPNGWTNTDSDFSVKQDVVAITDWSGYSGSFVQHPELTGLDCIRPCFWVELVRGLPRENTTIWTSGSSISFCGVNSDTANWSWPDGAELPFTIDK

SEQ ID NO: 26150 - protein, 449 aa, Artificial Sequence
  derived and/or modified protein sequence (wt) from neuraminidase__InfluenzaA__BAH24021
MNPNQKIITIGSICMVIGIVSLMLQIGNMVSLWVSHSIQTGNQHQVEPISNTNFLTEKAVASVTLAGNSSLCPIRGWAVHSKDNSIRIGSKGDVFVIREPFISCSHLECRTFFLTQGALLNDKHSNGTVKDRSPHRTLMSCPVGEAPSPYNSRFESVAWSASACHDGTSWLTIGISGPDNGAVAVLKYNGMITDTIKSWRNNILRTQESECACVNGSCFTVMTDGPSNGQASYKIFKMEKGKVVKSVELDAPNYHYEECSCYPDAGEITCVCRDNWHGSNRPWVSFNQNLEYQIGYICSGVFGDNPRPNGGTGSCGPVSPNGAYGVKGFSFKYGNGVWIGRTKSPSSRSGFEMIWDPNGWTETDSSFSVKQDIVAITDWSGYSGSFVQHPELTGLDCIRPCFWVELIRGRPKESTIWTSGSSISFCGVNSDTVSWSWPDGAELPFTIDK

SEQ ID NO: 26151 - protein, 469 aa, Artificial Sequence; identical to SEQ ID NO: 16893
  derived and/or modified protein sequence (wt) from neuraminidase__InfluenzaA__BAH95825

SEQ ID NO: 26152 - protein, 469 aa, Artificial Sequence; identical to SEQ ID NO: 16728
  derived and/or modified protein sequence (wt) from neuraminidase__InfluenzaA__BAH95826

SEQ ID NO: 26153 - protein, 469 aa, Artificial Sequence
  derived and/or modified protein sequence (wt) from neuraminidase__InfluenzaA__BAJ07994
MNPNQKITTIGSICMVIGIVSLMLQIGNIISIWVSHSIQTGNQHQAEPCNQSIITYENNTWVNQTYVNISNTNFLTEKAVASVTLAGNSSLCPISGWAVYSKDNGIRIGSKGDVFVIREPFISCSHLECRIFFLTQGALLNDKHSNGTVKDRSPHRTLMSCPVGEAPSPYNSRFESVAWSASACHDGTSWLTIGISGPDNGAVAVLKYNGIITDTIKSWRNNIMRTQESECACVNGSCFTVMTDGPSNGQASYKIFRIEKGKVVKSAELNAPNYHYEECSCYPDAGEITCVCRDNWHGSNRPWVSFNQNLEYRIGYICSGVFGDNPRPNDGTGSCGPVSPKGAYGIKGFSFKYGNGVWIGRTKSTNSRSGFEMIWDPNGWTGTDSNFSVKQDIVAITDWSGYSGSFVQHPELTGLDCIRPCFWVELIRGRPKESTIWTSGSSISFCGVNSDTVGWSWPDGAELPFTIDK

SEQ ID NO: 26154 - protein, 449 aa, Artificial Sequence
  derived and/or modified protein sequence (wt) from neuraminidase__InfluenzaA__BAK23415
MNPNQKIITIGSVCMIIGIVSLMLQIGNMISIWVGHSIQTGNQCHAEPISNTKFPTEKAAASVTLAGNSSLCPISGWAVYSKDNSIRIGSRGDVFVIREPFISCSHLECRTFFLTQGALLNDKHSNGTVKDRSPHRTLMSCPVGEAPSPYNSRFESVAWSASACHDGTSWLTIGISGPDNGAVAVLKYNGIITDTIKSWRNNILRTQESECACINGSCFTVMTDGPSSGQASYKIFKMEKGKVVKSVELDAPNYHYEECSCYPDAGEITCVCRDNWHGSNRPWVSFNQNLEYQIGYICSGVFGDNPRPNDGTGSCGPVSPNGAYGVKGFSFKYGNGVWIGRTKSTNSRSGFEMIWDPNGWTGTDSSFSVKQDIVAITDWSGYSGSFVQHPELTGLDCIRPCFWVELIRGRPKESTIWTSGSSISFCGVNSDTVSWSWPDGAELPFTIDK

SEQ ID NO: 26155 - protein, 449 aa, Artificial Sequence
  derived and/or modified protein sequence (wt) from neuraminidase__InfluenzaA__BAK23416
MNPNQKIITIGSICMVIGIVSLMLQIGNMISIWVSHSIQTGNQCQAEPISNTKFLTEKAVASVTLAGNSSLCPISGWAVYSKDNSIRIGSRGDVFVIREPFISCSHLECRTFFLTQGALLNDKHSNGTVKDRSPHRTLMSCPVGEAPSPYNSRFESVAWSASACHDGTSWLTIGISGPDNGAVAVLKYNGIITDTIKSWRNNILRTQESECACVNGSCFTVMTDGPSSGQASYKIFKMEKGKVVKSVELDAPNYHYEECSCYPDAGEITCVCRDNWHGSNRPWVSFNQNLEYQIGYICSGVFGDNPRPNDGTGSCGPASPNGAYGVKGFSFKYGNGVWIGRTKSTNSRSGFEMIWDPNGWTGTDSSFSVKQDIVAITDWSGYSGSFVQHPELTGLDCIRPCFWVELIRGRPKESTIWTSGSSISFCGVNSDTVSWSWPDGAELPFTIDK

SEQ ID NO: 26156 - protein, 449 aa, Artificial Sequence
  derived and/or modified protein sequence (wt) from neuraminidase__InfluenzaA__BAK23417
MNPNQKIITIGSICMVIGIVSLMLQIGNMISIWVSHSIQTGNQCQSEPISNTKFLTEKAVASVTLAGNSSLCPISGWAVYSKDNSIRIGSRGDVFVIREPFISCSHLECRTFFLTQGALLNDKHSNGTVKDRSPHRTLMSCPVGEAPSPYNSRFESVAWSASACHDGISWLTIGISGPDNGAVAVLKYNGIITDTIKSWRNNILRTQESECACVNGSCFTVMTDGPSSGQASYKIFKMEKGKVVKSVELDAPNYHYEECSCYPDAGEITCVCRDNWHGSNRPWVSFNQNLEYQIGYICSGVFGDNPRPNDGTGSCGPVSPNGAYGVKGFSFKYGNGVWIGRTKSTNSRSGFEMIWDPNGWTGTDSSFSVKQDIVAITDWSGYSGSFVQHPELTGLDCIRPCFWVELIRGRPKESTIWTSGSSISFCGVNGDTVSWSWPDGAELPFTIDK

SEQ ID NO: 26157 - protein, 449 aa, Artificial Sequence
  derived and/or modified protein sequence (wt) from neuraminidase__InfluenzaA__BAK23418
MNPNQTIITIGSICMVIGIVSLMLQIGNMISIWVSHSIQTGNQCQAEPISNTKFLTEKAVASVTLAGNSSLCPISGWAVYSKDNSIRIGSRGDVFVIREPFISCSHLECRTFFLTQGALLNDKHSNGTVKDRSPHRTLMSCPVGEAPSPYNSRFESVAWSASACHDGTSWLTIGISGPDNGAVAVLKYNGIITDTIKSWRNNILRTQESECACVNGSCFTVMTDGPSSGQASYKIFKMEKGKVVKSVELDAPNYHYEECSCYPDAGEITCVCRDNWHGSNRPWVSFNQNLEYQIGYICSGVFGDNPRPNDGTGSCGPVSPNGAYGVKGFSFKYGNGVWIGRTKSTNSRSGFEMIWDPNGWTGTDSSFSVKQDIVAITDWSGYSGSFVQHPELTGLDCIRPCFWVELIRGRPKESTIWTSGSSISFCGVNSDTVSWSWPDGAELPFTIDK

SEQ ID NO: 26158 - protein, 449 aa, Artificial Sequence; identical to SEQ ID NO: 16577
  derived and/or modified protein sequence (wt) from neuraminidase__InfluenzaA__BAK23420

SEQ ID NO: 26159 - protein, 449 aa, Artificial Sequence; identical to SEQ ID NO: 16577
  derived and/or modified protein sequence (wt) from neuraminidase__InfluenzaA__BAK23421

SEQ ID NO: 26160 - protein, 449 aa, Artificial Sequence
  derived and/or modified protein sequence (wt) from neuraminidase__InfluenzaA__BAK23422
MNPNQKIITIGSVCMVIGIVSLMLQIGNMISIWVGHSIQTGNQCHAEPISNTKFPTEKAAASVTLAGNSSLCPISGWAVYSKDNSIRIGSRGDVFVIREPFISCSHLECRTFFLTQGALLNDKHSNGTVKDRSPHRTLMSCPVGEAPSPYNSRFESVAWSASACHDGTSWLTIGISGPDNGAVAVLKYNGIITDTIKSWRNNILRTQESECACVNGSCFTVMTDGPSSGQASYKIFKMEKGKVVKSVELDAPNYHYEECSCYPDAGEITCVCRDNWHGSNRPWVSFNQNLEYQIGYICSGVFGDNPRPNDGTGSCGPVSPNGAYGVKGFSFKYGNGVWIGRTKSTNSRSGFEMIWDPNGWTGTDSSFSVKQDIVAITDWSGYSGSFVQHPELTGLDCIRPCFWVELIRGRPKESTIWTSGSSISFCGVNSDTVSWSWPDGAELPFTIDK

SEQ ID NO: 26161 - protein, 449 aa, Artificial Sequence
  derived and/or modified protein sequence (wt) from neuraminidase__InfluenzaA__BAK23423
MNPNQKIITIGSICMVIGIVSLMLQIGNMISIWVSHSIQTGNQCQAEPISTTKFLTEKAVASVTLAGNSSLCPISGWAVYSKDNSIRIGPRGDVFVIREPFISCSHLECRTFFLTQGALLNDKHSNGTVKDRSPHRTLMSCPVGEAPSPYNSRFESVAWSASACHDGISWLTIGISGPDNGAVAVLKYNGIITDTIKSWRNNILRTQESECACVNGSCFTVMTDGPSSGQASYKIFKMEKGKVVKSVELDAPNYHYEECSCYPDAGEITCVCRDNWHGSNRPWVSFNQNLEYQIGYICSGVFGDNPRPNDGTGSCGPVSPNGAYGVKGFSFKYGNGVWIGRTKSTNSRSGFEMIWDPNGWTGTDSSFSVKQDIVAITDWSGYSGSFVQHPELTGLDCIRPCFWVELIRGRPKESTIWTSGSSISFCGVNSDTVSWSWPDGAELPFTIDK

SEQ ID NO: 26162 - protein, 449 aa, Artificial Sequence
  derived and/or modified protein sequence (wt) from neuraminidase__InfluenzaA__BAK23424
MNPNQKIITIGSICMVIGIVSLMLQIGNMISIWVSHSIQTGNQCQGEPISNTKFLTEKAVASVTLAGNSSLCPISGWAVYSKDNSIRIGSRGDVFVIREPFISCSHLECRTFFLTQGALLNDKHSNGTVKDRSPHRTLMSCPVGEAPSPYNSRFESVAWSASACHDGTSWLTIGISGPDNGAVAVLKYNGIITDTIKSWRNNILRTQESECACVNGSCFTVMTDGPSSGQASYKIFKMEKGKVVKSVELDAPNYHYEECSCYPDAGEITCVCRDNWHGSNRPWVSFNQNLEYQIGYICSGVFGDNPRPNDGTGSCGPVFSNGAYGVKGFSFKYGNGVWIGRTKSTNSRSGFEMIWDPNGWTGTDSSFSGKQDIVAITDWSGYSGSFVQHPELTGLDCIRPCFWVELIRGRPKESTIWTSGSSISFCGVNSDTVSWSWPDGAELPFTIDK

SEQ ID NO: 26163 - protein, 449 aa, Artificial Sequence
  derived and/or modified protein sequence (wt) from neuraminidase__InfluenzaA__BAK23425
MNPNQKIITIGSICMVIGIVSLMLQIGNMISIWVSHSIQTGNQCQAEPISNTKFLTEKAVASVTLAGNSSLCPISGWAVYSKDNSIRIGSRGDVFVIREPFISCSHLECRTFFLTQGALLNDKHSNGTVKDRSPHRTLMSCPVGEAPSPYNSRFESVAWSASACHDGISWLTIGISGPDNGAVAVLKYNGIITDTIKSWRNNILRTQESECACVNGSCFTVMTDGPSSGQASYKIFKMEKGKVVKSVELDAPNYHYEECSCYPDAGEITCVCRDNWHGSNRPWVSFNQNLEYQIGYICSGVFGDNPRPNDGTGSCGPVSPNGAYGVKGFSFKYGNGVWIGRTKSTNSRSGFEMIWDPNGWIGTDSSFSVKQDIVAITDWSGYSGSFVQHPELTGLDCIRPCFWVELIRGRPKESTIWTSGSSISFCGVNSDTVSWSWPDGAELPFTIDK

SEQ ID NO: 26164 - protein, 449 aa, Artificial Sequence
  derived and/or modified protein sequence (wt) from neuraminidase__InfluenzaA__BAK23426
MNPNQKIITIGSICMVIGIVSLMLQIGNMISIWVSHSIQTGNQCQAEPISNTKFFTEKAVASVTLAGNSSLCPISGWAVYSKDNSIRIGSRGDVFIIREPFISCSHLECRTFFLTQGALLNDKHSNGTVKDRSPHRTLMSCPVGEAPSPYNSRFESVAWSASACHDGTSWLTIGISGPDNGAVAVLKYNGIITDTIKSWRNNILRTQESECACVNGSCFTVMTDGPSSGQASYKIFKMEKGKVVKSVELDAPNYHYEECSCYPDAGEITCVCRDNWHGSNRPWVSFNQNLEYQIGYICSGVFGDNPRPNDGTGSCGPVSPNGAYGVKGFSFKYGNGVWIGRTKSTNSRSGFEMIWDPNGWTGTDSSFSVKQDIVAITDWSGYSGSFVQHPELTGLDCIRPCFWVELIRGRPKESTIWTSGSSISFCGVNSDTVSWSWPDGAELPFTIDK

SEQ ID NO: 26165 - protein, 449 aa, Artificial Sequence; identical to SEQ ID NO: 26163
  derived and/or modified protein sequence (wt) from neuraminidase__InfluenzaA__BAK23427

SEQ ID NO: 26166 - protein, 449 aa, Artificial Sequence
  derived and/or modified protein sequence (wt) from neuraminidase__InfluenzaA__BAK23428
MNPNQKIITIGSICMVIGIVSLMLQIGNMISIWVSHSIQTGNQCQAEPISNTKFLTEKAVASVTLAGNSSLCPISGWAVYSKDNSIRIGSRGDVFVIREPFISCSHLECRTFFLTQGALLNDKHSNGTVKDRSPHRTLMSCPVGEAPSPYNSRFESVAWSASACHDGTSWLTIGISGPDNGAVAVLKYNGIITDTIKSWRNNILRTQESECACVNGSCFTVMTDGPSSGQASYKIFKMEKGKVVKSVELDAPNYHYEECSCYPDAGEITCVCRDNWHGSNRPWVSFNQNLEYQIGYICSGVFGDNPRPNDGTGSCGPVSPNGAYGVKGFSFKYGNGVWIGRTKSTNSRSGFEMIWDPNGWTGTDSSVSVKQDIVAITDWSGYSGSFVQHPELTGLDCIRPCFRVELIRGRPKESTIWTSGSSISFCGVNSDTVSWSWPDGAELPFTIDK

SEQ ID NO: 26167 - protein, 449 aa, Artificial Sequence; identical to SEQ ID NO: 26163
  derived and/or modified protein sequence (wt) from neuraminidase__InfluenzaA__BAK23429

SEQ ID NO: 26168 - protein, 449 aa, Artificial Sequence
  derived and/or modified protein sequence (wt) from neuraminidase__InfluenzaA__BAK23430
MNPNQKIITIGSICMVIGIVSLMLQIGNMISIWVSHSIQTGNQCQAEPISNTKFLTEKAVASVTLAGNSSLCPISGWAVYSKDNSIRIGSRGDVFVIREPFISCSHLECRTFFLTQGALLNDKHSNGTVKDRSPHRTLMSCPVGEAPSPYNSRFESVAWSASACHDGISWLTIGISGPDNGAVAVLKYNGIITDTIKSWRNNILRTQESECACVNGSCFTVMTDGPSSGQASYKIFKMEKGKVVKSVELDAPNYHYEECSCYPDAGEITCVCRDNWHGSNRPWVSFNQNLEYQIGYICSGVFGDNPRPNDGTGSCGPVSPNGAYGVKGFSFKYGNGVWIGRTKSTNSRSGFEMIWDPNGWIGTDSSFSVKQDIVAITDWSGYSGSFVQHPELTGLDCMRPCFWVELIRGRPKESTIWTSGSSISFCGVNSDTVSWSWPDGAELPFTIDK

SEQ ID NO: 26169 - protein, 449 aa, Artificial Sequence
  derived and/or modified protein sequence (wt) from neuraminidase__InfluenzaA__BAK23431
MNPNQKIITIGSICMVIGIVSLMLQIGNMISIWVSHSIQTGNQCQAEPISNTKFLTEKAVASVTLAGNSSLCPISGWAVYSKDNSIRIGSRGDVFVIREPFISCSHLECRTFFLTQGALLNDKHSNGTVKDRSPHRTLMSCPVGEAPSPYNSRFESVAWSASACHDGTSWLTIGISGPDNGAVAVLKYNGIITDTIKSWRNNILRTQESECACVNGSCFTVMTDGPSSGQASYKIFKMEKGKVVKSVELDAPNYHYEECSCYPDAGEITCVCRDNWHGSNRPWVSFNQNLEYQIGYICSGVFGDNPRPNDGTGSCGPVSPNGAYGVKGFSFKYGNGVWIGRTKSTNSRSGFEMIWGPNGWTGTDSSFSVKQDIVAITDWSGYSGSFVQHPELTGLDCIRPCFWVELIRGRPKESTIWTSGSSISFCGVNSDTVSWSWPDGAELPFTIDK

SEQ ID NO: 26170 - protein, 449 aa, Artificial Sequence; identical to SEQ ID NO: 26163
  derived and/or modified protein sequence (wt) from neuraminidase__InfluenzaA__BAK23432

SEQ ID NO: 26171 - protein, 449 aa, Artificial Sequence; identical to SEQ ID NO: 26163
  derived and/or modified protein sequence (wt) from neuraminidase__InfluenzaA__BAK23433

SEQ ID NO: 26172 - protein, 469 aa, Artificial Sequence
  derived and/or modified protein sequence (wt) from neuraminidase__InfluenzaA__BAM65748
MNPNQKIITIGSVSLTISTICFFMQIAILITTVTLHFKQYEFNSPPNNQVMLCEPTIIERNITEIVYLTNTTIEKEICPKLAEYRNWSKPQCDITGFAPFSKDNSIRLSAGGDIWVTREPYVSCDPDKCFQFALGQGTTLNNVHSNDTVHDRTPYRTLLMNELGVPFHLGTKQVCIAWSSSSCHDGKAWLHVCVTGDDKNATASFIYNGRLVDSIVSWSKKILRTQESECVCINGTCTVVMTDGSASGKADTKILFIEEGKIVHTSTLSGSAQHVEECSCYPRYPGVRCVCRDNWKGSNRPIVDINIKDYSIVSSYVCSGLVGDTPRKTDSSSSSHCLDPNNEEGGHGVKGWAFDDGNDVWMGRTISEKSRLGYETFKVIGGWSNPNSKSQINRQVIVDMGNRSGYSGIFSVEGKSCINRCFYVELIRGRKDETEVLWTSNSIVVFCGTSGTYGTGSWPDGADIKLMSI

SEQ ID NO: 26173 - protein, 449 aa, Artificial Sequence
  derived and/or modified protein sequence (wt) from neuraminidase__InfluenzaA__BAM85817
MNPNQKIITIGSICMVTGIVSLMLQIGNMISIWVSHSIHTGNQHQSEPISNTNFLTEKAVASVKLAGNSSLCPINGWAVYSKDNSIRIGSKGDVFVIREPFISCSHLECRTFFLTQGALLNDKHSNGTVKDRSPHRTLMSCPVGEAPSPYNSRFESVAWSASACHDGTSWLTIGISGPDNGAVAVLKYNGIITDTIKSWRNNILRTQESECACVNGSCFTVMTDGPSNGQASHKIFKMEKGKVVKSVELDAPNYHYEECSCYPNAGEITCVCRDNWHGSNRPWVSFNQNLEYQIGYICSGVFGDNPRPNDGTGSCGPVSSNGAYGVKGFSFKYGNGVWIGRTKSTNSRSGFEMIWDPNGWTETDSSFSVKQDIVAITDWSGYSGSFVQHPELTGLDCIRPCFWVELIRGRPKESTIWTSGSSISFCGVNSDTVGWSWPDGAELPFTIDK

SEQ ID NO: 26174 - protein, 449 aa, Artificial Sequence
  derived and/or modified protein sequence (wt) from neuraminidase__InfluenzaA__BAM85818
MNPNQKIITIGSICMVIGIVSLMLQIGNMISIWVSHSIQTGNQHQAEPIRNTNFLTENAVASVTLAGNSSLCPIRGWAVHSKDNSIRIGSKGDVFVIREPFISCSHLECRTFFLTQGALLNDKHSNGTVKDRSPHRTLMSCPVGEAPSPYNSRFESVAWSASACHDGTSWLTIGISGPDNGAVAVLKYNGIITDTIKSWRNNILRTQESECACVNGSCFTVMTDGPSNGQASYKIFKMEKGKVVKSVELNAPNYHYEECSCYPDAGEIICVCRDNWHGSNRPWVSFNQNLEYQIGYICSGVFGDNPRPNDGTGSCGPVSPNGAYGIKGFSFKYGNGVWIGRTKSTNSRSGFEMIWDPNGWTGTDSNFSVKQDIVAITDWSGYSGSFVQHPELTGLDCIRPCFWVELIRGRPKESTIWTSGSSISFCGVNSDTVSWSWPDGAELPFTIDK

SEQ ID NO: 26175 - protein, 449 aa, Artificial Sequence
  derived and/or modified protein sequence (wt) from neuraminidase__InfluenzaA__BAM85819
MNPNQKIITIGSICMVIGIVSLMLQIGNMISIWVSHSIQTGNQNQVEPIINTNFLTEKAVASITLAGNSSLCPIRGWAIHSKDNSIRIGSKGDVFVIREPFISCSHLECRTFFLTQGALLNDKHSNGTVKDRSPHRTLMSCPVGEAPSPYNSRFESVAWSASACHDGTSWLTIGISGPDNGAVAVLKYNGIITDTIKSWRNNILRTQESECACVNGSCFTVMTDGPSDGQASYKIFKMEKGKVIKSVELDAPNYHYEECSCYPDAGEITCVCRDNWHGSNRPWVSFNQNLEYQIGYICSGVFGDNPRPNDGTGSCGPVSHNGAYGVKGFSFKYGNGVWIGRTKSPNSRSGFEMIWDPNGWSETDSSFSVKQDIVAITDWSGYSGSFVQHPELTGLDCIRPCFWVELIRGRPKESTVWTSGSSISFCGVSSDTVSWSWPDGAELPFTIDK

SEQ ID NO: 26176 - protein, 449 aa, Artificial Sequence
  derived and/or modified protein sequence (wt) from neuraminidase__InfluenzaA__BAM85820
MNPNQKIITIGSICMVIGIVSLMLQIGNMISIWVSHSIQTGNQHQAEPISNTNFLTEKAVASVTLAGNSSLCPIRGWAVHSKDNSIRIGSKGDVFVIREPFISCSHLECRTFFLTQGALLNDKHSNGTVKDRSPHRTLMSCPVGEAPSPYNSRFESVAWSASACHDGTSWLTIGISGPDNGAVAVLKYNGIITDTIKSWRNNILRTQESECACVNGSCFTVMTDGPSNGQASYKIFKMEKGKVVKSVELDAPNYHYEECSCYPDAGEITCVCRDNWHGSNRPWVSFNQNLEYQIGYICSGVFGDNPRPNDGTGSCGPVSPNGAYGVKGFSFKYGNGVWIGRTKSTNSRSGFEMIWDPNGWTGTDSSFSVKQDIVAITDWSGYSGSFVQHPELTGLDCIRPCFWVELIRGRPKESTIWTSGSSISFCGVNSDTVSWSWPDGAELPFTIDK

SEQ ID NO: 26177 - protein, 449 aa, Artificial Sequence; identical to SEQ ID NO: 15008
  derived and/or modified protein sequence (wt) from neuraminidase__InfluenzaA__BAM85821

SEQ ID NO: 26178 - protein, 449 aa, Artificial Sequence
  derived and/or modified protein sequence (wt) from neuraminidase__InfluenzaA__BAM85822
MNPNQKIITIGSICMVTGIVSLMLQIGNMISIWVSHSIHTGNQHQSEPISNTNFLTEKAVASVKLAGNSSLCPINGWAVYSKDNSIRIGSKGDVFVIREPFISCSHLECRTFFLTQGALLNDKHSNGTVKDRSPHRTLMSCPVGEAPSPYNSRFESVAWSASACHDGTSWLTIGISGPDNGAVAVVKYNGIITDTIKSWRNNILRTQESECACVNGSCFTVMTDGPSNSQASHKIFKMEKGKVVKSVELDAPNYHYEECSCYPDAGEITCVCRDNWHGSNRPWVSFNQNLEYQIGYICSGVFGDNPRPNDGTGSCGPVSSNGAYGVKGFSFKYGNGVWIGRTKSTNSRSGFEMIWDPNGWTETDSSFSVKQDIVAITDWSGYSGSFVQHPELTGLDCIRPCFWVELIRGRPKESTIWTSGSSISFCGVNSDTVGWSWPDGAELPFTIDK

SEQ ID NO: 26179 - protein, 469 aa, Artificial Sequence
  derived and/or modified protein sequence (wt) from neuraminidase__InfluenzaA__BAM85823
MNPNQKITTIGSICMVIGIVSLMLQIGNIISIWVSHSIQTGNQHQAGPCNQSIITYENNTWVNQTYVNISNTNFLTEKTVASVTLAGNSSLCPISGWAVYSKDNGIRIGSKGDVFVIREPFISCSHLECRTFFLTQGALLNDKHSNGTVKDRSPHRTLMSCPVGEAPSPYNSRFESVAWSASACHDGINWLTIGISGPDNGAVAVLKYNGIITDTIKSWRNNILRTQESECACVNGSCFTIMTDGPSNGQASYKIFRIEKGKVVKSVELNAPNYHYEECSCYPDAGEITCVCRDNWHGSNRPWVSFNQNLEYQIGYICSGIFGDNPRPNDGTGSCGPVSPNGAYGIKGFSFKYGNGVWIGRTKSTNSRSGFEMIWDPNGWTGTDSNFSVKQDIVAITDWSGYSGSFVQHPELTGLDCIRPCFWVELIRGRPKESTIWTSGSSISFCGVNSDTVGWSWPDGAELPFTIDK

SEQ ID NO: 26180 - protein, 449 aa, Artificial Sequence
  derived and/or modified protein sequence (wt) from neuraminidase__InfluenzaA__BAM85824
MNPNQKIITIGSICMVIGIVSLLLQIGNMISIWISHSIQTGNQHQAESISNTNPLTEKAVASVTLAGNSSLCPIRGWAVHSKDNSIRIGSKGDVFVIREPFISCSHLECRTFFLTQGALLNDKHSNGTVKDRSPHRTLMSCPVGEAPSPYNSRFESVAWSASACHDGTSWLTIGISGPDNGAVAVLKYNGIITDTIKSWRNNILRTQESECACVNGSCFTVMTDGPSNGQASYKIFKMEKGKVVKSVELDAPNYHYEECSCYPDASEITCVCRDNWHGSNRPWVSFNQNLEYQIGYICSGVFGDNPRPNDGTGSCGPMFPNGAYGIKGFSFKYGNGVWIGRTKSTNSRSGFEMIWDPNGWTGTDSSFSVKQDIVAITDWSGYSGSFVQHPELTGLDCIRPCFWVELIRGRPKESTIWTSGSSISFCGVNSDTVSWSWPDGAELPFTIDK

SEQ ID NO: 26181 - protein, 449 aa, Artificial Sequence
  derived and/or modified protein sequence (wt) from neuraminidase__InfluenzaA__BAM85825
MNPNQKIITIGSICMVIGIVSLMLQIGNMISIWVSHSIQTGNQNQVEPIINTNFLTEKAVASITLAGNSSLCPIRGWAIHSKDNSIRIGSKGDVFVIREPFISCSHLECRTFFLTQGALLNDKHSNGTVKDRSPHRTLMSCPVGEAPSPYNSRFESVAWSASACHDGTSWLTIGISGPDNGAVAVLKYNGIITDTIKSWRNNILRTQESECACVNGSCFTVMTDGPSNGQASYKIFKMEKGKVIKSVELDAPNYHYEECSCYPDAGEITCVCRDNWHGSNRPWVSFNQNLEYQIGYICSGVFGDNPRPNDGTGSCGPVSHNGAYGVKGFSFKYGNGVWIGRTKSPNSRSGFEMIWDPNGWSETDSSFSVKQDIVAITDWSGYSGSFVQHPELTGLDCIRPCFWVELIRGRPKESTVWTSGSSISFCGVNSDTVSWSWPDGAELPFTIDK

SEQ ID NO: 26182 - protein, 449 aa, Artificial Sequence
  derived and/or modified protein sequence (wt) from neuraminidase__InfluenzaA__BAM85826
MNPNQKIITIGSICMVIGIVSLMLQIGNMISIWVSHSIQTGNQRQAEPISNTKFLTEKAVASVTLAGNSSLCPISGWAVYSKDNSIRIGSRGDVFVIREPFISCSHLECRTFFLTQGALLNDKHSNGTVKDRSPHRTLMSCPVGEAPSPYNSRFESVAWSASACHDGTSWLTIGISGPDNGAVAVLKYNGIITDTIKSWRNNILRTQESECACVNGSCFTVMTDGPSNGQASYKIFKMEKGKVVKSVELDAPNYHYEECSCYPDAGEITCVCRDNWHGSNRPWVSFNQNLEYQIGYICSGVFGDNPRPNDGTGSCGPVSLNGAYGVKGFSFKYGNGVWIGRTKSTNSRSGFEMIWDPNGWTGTDSSFSVKQDIVAITDWSGYSGSFVQHPELTGLDCIRPCFWVELIRGRPKESTIWTSGSSISFCGVNSDTVSWSWPDGAELPFTIDK

SEQ ID NO: 26183 - protein, 449 aa, Artificial Sequence
  derived and/or modified protein sequence (wt) from neuraminidase__InfluenzaA__BAM85827
MNPNQKIITIGSICMVIGVVSLMLQTGNIISIWVSHSIQKGNQHQAESISNTNPLTEKAVASVTLAGNSSLCPIRGWAVHSKDNNIRIGSKGDVFVIREPFISCSHLECRTFFLTQGALLNDKHSNGTVKDRSPHRTLMSCPVGEAPSPYNSRFESVAWSASACHDGTSWLTIGISGPDNEAVAVLKYNGIITDTIKSWRNNILRTQESECACVNGSCFTVMTDGPSNGQASYKIFKMEKGKVVKSVELDAPNYHYEECSCYPDAGEITCVCRDNWHGSNRPWVSFNQNLEYQIGYICSGVFGDNPRPNDGTGSCGPMSPNGAYGVKGFSFKYGNGVWIGRTKSTTSRSGFEMIWDPNGWTGTDSSFSVKQDIVAITDWSGYSGSFVQHPELTGLDCIRPCFWVELIRGRPKESTIWTSGSSISFCGVDSDTVSWSWPDGAELPFTIDK

SEQ ID NO: 26184 - protein, 449 aa, Artificial Sequence
  derived and/or modified protein sequence (wt) from neuraminidase__InfluenzaA__BAM85828
MNPNQKIITIGSICMVIGIVSLMLQIGNMISIWVSHSIQTGNQRQAEPISNTKFLTEKAVASVTLAGNSSLCPISGWAVYSKDNSIRIGSRGDVFVIREPFISCSHLECRTFFLTQGALLNDKHSNGTVKDRSPHRTLMSCPVGEAPSPYNSRFESVAWSASACHDGTSWLTIGISGPDNGAVAVLKYNGIITDTIKSWRNNILRTQESECACVNGSCFTVMTDGPSNGQASYKIFKMEKGKVVKSVELDAPNYHYEECSCYPDAGEITCVCRDNWHGSNRPWVSFNQNLEYQIGYICSGVFGDNPRPNDGTGSCGPVSPNGAYGVKGFSFKYGNGVWIGRTKSTNSRSGFEMIWDPNGWTGTDSSFSVKQDIVAITDWSGYSGSFVQHPELTGLDCIRPCFWVELIRGRPKESTIWTSGSSISFCGVNSDTVSWSWPDGAELPFTIDK

SEQ ID NO: 26185 - protein, 449 aa, Artificial Sequence
  derived and/or modified protein sequence (wt) from neuraminidase__InfluenzaA__BAM85829
MNPNQKIITIGSICMIIGIVSLMLQIGNIISIWVSHSIQTGNQHQAEPISDTNFLTEKAVASVILAGNSSLCHISGWAVHSKDNSIRIGSKGDVFVIREPFISCSHLECRTFFLTQGALLNDKHSNGTVKDRSPHRTLMSCPVGEAPSPYNSRFESVAWSASACHDGTSWLTIGISGPDNGAVAVLKYNGIITDTIKSWRNYILRTQESECACVNGSCFTVMTDGPSNGQASYKIFKIEKGKVVKSVELDAPNYHYEECSCYPDAGEITCVCRDNWHGSNRPWVSFNQNLEYQIGYICSGVFGDTPRPNDGTGSCGPVSPNGAYGVKGFSFKYGNGVWIGRTKSTNSRSGFEMIWDPNGWTGTDSSFSVKQDLVAITDWSGYSGSFVQHPELTGLDCIRPCFWVELIRGRPKESTIWTSGSSISFCGVNSDTVGWSWPDGAELPFTIDK

SEQ ID NO: 26186 - protein, 470 aa, Artificial Sequence
  derived and/or modified protein sequence (wt) from neuraminidase__InfluenzaA__BAM85830
MNPNQKIITIGSICMAIGTISLILQIGNIISIWISHSIQTGSQNHTGICNQRIITYENNTWVNQTYVNISNTNVVAGKDTTSMILAGNSSLCPIRGWAIYSKDNSIRIGSKGDVFVIREPFISCSHLECRTFFLTQGALLNDKHSNGTVKDRSPYRALMSCPIGEAPSPYNSRFESVAWSASACHDGMGWLTIGISGPDDGAVAVLKYNGIITEIIKSWRKQILRTQESECVCVNGSCFTIMTDGPSNGPASYRIFKIKKGKITKSIELDAPNSHYEECSCYPDTGKVMCVCRDNWHGSNRPWVSFNQNLDYQIGYICSGVFGDNPRPKDGKGSCDPVNVDGADGVKGFSYRYGNGVWIGRTKSNSSRKGFEMIWDPNGWTDTDGNFLVKQDVVAMTDWSGYSGSFVQHPELTGLDCMRPCFWVELIRGQPREKTTIWTSGSSISFCGVNSDTVNWSWPDGAELPFTIDK

SEQ ID NO: 26187 - protein, 470 aa, Artificial Sequence
  derived and/or modified protein sequence (wt) from neuraminidase__InfluenzaA__BAM85831
MNPNQKIITIGSISIAIGIISLMLQIGNIISIWASHSIQTGSQNHTGVCNQRIITYENSTWVNHTYVNINNTNVIAGKDKTSVTLAGNSSLCSISGWAIYTKDNSIRIGSKGDVFVIREPFISCSHLECRTFFLTQGALLNDKHSNGTVKDRSPYRALMSCPLGEAPSPYNSKFESVAWSASACHDGIGWLTIGISGPDNGAVAVLKYNGIITETIKSWKKQILRTQESECVCVNGSCFTIMTDGPSNGAASYKIFKIEKGKVTKSIELNAPNFHYEECSCYPDTGTVMCVCRDNWHGSNRPWVSFNQNLDYQIGYICSGVFGDNPRPRDGEGSCNPVTADGANGVKGFSYKYGNGVWIGRTKSNRLRKGFEMIWDPNGWTDTDSDFSVKQDVVAITDWSGYSGSFVQHPELTGLGCIRPCFWVELVRGLPRENTTIWTSGSSISFCGVNSDTANWSWPDGAELPFTIDK

SEQ ID NO: 26188 - protein, 470 aa, Artificial Sequence; identical to SEQ ID NO: 21508
  derived and/or modified protein sequence (wt) from neuraminidase__InfluenzaA__BAM85832

SEQ ID NO: 26189 - protein, 469 aa, Artificial Sequence
  derived and/or modified protein sequence (wt) from neuraminidase__InfluenzaA__BAM85833
MNPNQKIITIGSTCMVIGIISLILQIGNIISIWVSHSIQTGNQNQPETCNQSVITYENKTWVNQTYVNISNTNLVIERDVISVALLGNSSLCPISGWAIYSKDNGIRIGSKGDVFVIREPFISCSHLECRTFFLTQGALLNDKHSNGTVKDRSPYRTLMSCPVGEAPSPYNSRFESVAWSASACHDGISWLTVGISGPDNGAVAVLKYNGIITDTVKSWRNNILRTQESECACINGSCFTIMTDGPSNGQASYKIFKIEKGKVVKSVELNAPNYHYEECSCYPDASEIMCVCRDNWHGSNRPWVSFNRNLEYQIGYICSGVFGDNPRPNDGTGSCGPVSSNGAYGVKGFSFKYGKGVWIGRTKSTSSRSGFEMIWDPNGWTETDSSFSVKQDIVAITDWSGYSGSFVQHPELTGLDCIRPCFWVELIRGRPKENTIWTSGSSISFCGVNSDTVGWSWPDGAELPFTIDK

SEQ ID NO: 26190 - protein, 469 aa, Artificial Sequence
  derived and/or modified protein sequence (wt) from neuraminidase__InfluenzaA__BAM85834
MNPNQKIITIGSVSLTVATVCFLMQIAILTTTVTLHFKQNECSIPANNQVMPCEPIVIERNITEIVYLNNTTIEKEICLKAAEYRNWSKPQCQITGFAPFSKDNSIRLSAGGDIWVTREPYVSCDPSKCYQFALGQGTTLENKHSNGTIHDRIPHRTLLMNELGVPFHLGTKQVCIAWSSSSCHDGKAWLHVCVTGDDRNATASFIYDGMLVDSIGSWSQNILRTQESECVCINGTCAVVMTDGSASGRADTRILFIREGKIVHISPLSGSAQHIEECSCYPRYPIIRCVCRDNWKGSNRPVIDINMADYSIDSSYVCSGLVGDTPRNDDSSSSSNCRDPNNERGNPGVKGWAFDNGNDVWMGRTISKDSRSGYETFRVIGGWATANSKSQTNRQVIVDNNNWSGYSGIFSVESKSCINRCFYVELIRGRPQETRVWWTSNSIVVFCGTSGTYGTGSWPDGANINFMPI

SEQ ID NO: 26191 - protein, 469 aa, Artificial Sequence
  derived and/or modified protein sequence (wt) from neuraminidase__InfluenzaA__BAM85835
MNPNQKIITIGSVSLTIATVCFLMQIAILATTVTLHFKQNECSIPANNQVVPCEPIIIERNITEIVYLNNTTIEKEICSKAVDYRNWSKPQCQITGFAPFSKDNSIRLSAGGDIWVTREPYVSCDTSKCYQFALGQGTTLDNKHSNGTIHDRIPHRTLLMNELGVPFHLGTKQVCIAWSSSSCHDGKAWLHVCVTGDDRNATASFIYNGMLVDSIGSWSQNILRTQESECVCINGSCTVVMTDGSASGKADTRILFVKEGKIIHISPLSGSAQHIEECSCYPRYPNVRCVCRDNWRGSNRPVIDINMADYSIDSSYVCSGLVGDTPRNDDNSSSSNCRDPNNERGNPGVKGWAFDSGDDVWMGRTISRDSRSGYETFKVIGGWATANSKSQTSRQVIVDNNNWSGYSGVFSVEHKSCINRCFYVELIRGRPQETRVWWTSNSIVVFCGTSGTYGTGSWPDGANINFMPI

SEQ ID NO: 26192 - protein, 469 aa, Artificial Sequence
  derived and/or modified protein sequence (wt) from neuraminidase__InfluenzaA__BAM85836
MNPNQKIITIGSVSLTIATICFLMQIAILATTVTLHFKQNGCSIPSNNQVVPCEPIIVERNITEIVYLNNTTIEKELCPKVLEYRDWSKPQCQITGFAPFSKDNSIRLSAGGDIWVTREPYVSCSPDKCYQFALGQGTTLDNRHSNGTIHDRIPHRTLLMNELGVPFHLGTKQVCIAWSSSSCHDGRAWLHVCVTGDDRNATASFIYDGMLVDSIGSWSQNILRTQESECVCINGTCTVVMTDGSASGRADTRILFVKEGKIVHISPLSGSAQHIEECSCYPRYPDVRCVCRDNWKGSNRPIIDINMADYSIGSSYVCSGLVGDTPRNDDSSSNSNCRDPNNERGNPGVKGWAFDYGNDVWMGRTISKDSRSGYETFRVIGGWTTANSKSQVNRQVIVDNSNWSGYSGIFSVEGKSCINRCFYVELIRGRPQETRVWWTSNSIVVFCGTSGTYGTGSWPDGANINFMPI

SEQ ID NO: 26193 - protein, 469 aa, Artificial Sequence
  derived and/or modified protein sequence (wt) from neuraminidase__InfluenzaA__BAO79717
MNPNQKIITIGSVSLTISTICFFMQIAILITTVTLHFKQYEFNSPPNNQVMLCEPTIIERNITEIVYLTNTTIEKEICPKPAEYRNWSKPQCGITGFAPFSKDNSIRLSAGGDIWVTREPYVSCDPDKCYQFALGQGTTLNNVHSNNTVRDRTPYRTLLMNELGVPFHLGTKQVCIAWSSSSCHDGKAWLHVCITGDDKNATASFIYNGRLVDSVVSWSKDILRTQESECVCINGTCTVVMTDGSASGKADTKILFIEEGKIVHTSTLSGSAQHVEECSCYPRYPGVRCVCRDNWKGSNRPIVDINIKDHSIVSSYVCSGLVGDTPRKNDSSSSSHCLDPNNEEGGHGVKGWAFDDGNDVWMGRTINETSRLGYETFKVIEGWSNPKSKLQINRQVIVDRGDRSGYSGIFSVEGKNCINRCFYVELIRGRKEETEVLWTSNSIVVFCGTSGTYGTGSWPDGADLNLMPI

SEQ ID NO: 26194 - protein, 470 aa, Artificial Sequence; identical to SEQ ID NO: 15059
  derived and/or modified protein sequence (wt) from neuraminidase__InfluenzaA__CAA33354

SEQ ID NO: 26195 - protein, 467 aa, Artificial Sequence
  derived and/or modified protein sequence (wt) from neuraminidase__InfluenzaA__CAB95858
MNPNQKIIALGSVSITIATICLLMQIAILATTMTLHFNECTNPSNNQAMPCEPIIIERNITEIVHLNNTTIEKESCPKVAEYKNWSKPQCQITGFAPFSKDNSIRLSAGGDIWVTREPYVSCGLGNCYQFALGQGTTLNNKHSNGTIHDRSPHRTLLMNELGVPFHLGTKQVCIAWSSSSCHDGKAWLHVCVTGDDRNATASIIYDGMLTDSIGSWSKNILRTQESECVCINGTCTVVMTDGSASGRADTKILFIREGKIVHISPLSGSAQHVEECSCYPRYPEVRCVCRDNWKGSNRPVLYINVADYSVDSSYVCSGLVGDTPRNDDSSSSSNCRDPNNERGGPGVKGWAFDNGNDVWMGRTIKKDSRSGYETFRVVGGWTTANSKSQINRQVIVDSDNWSGYSGIFSVEGKTCINRCFYVELIRGRPQETRVWWTSNSIIVFCGTSGTYGTGSWPDGANINFMSI

SEQ ID NO: 26196 - protein, 467 aa, Artificial Sequence
  derived and/or modified protein sequence (wt) from neuraminidase__InfluenzaA__CAB95859
MNPNQKIIALGSVSITIATICLLMQIAILATTMTLHFNECTNPSNNQAVPCEPIIIERNITEIVHLNNTTIEKESCPKVAEYKNWSKPQCQITGFAPFSKDNSIRLSAGGDIWVTREPYVSCGLGKCYQFALGQGTTLNNKHSNGTIHDRSPHRTLLMNELGVPFHLGTKQVCIAWSSSSCHDGKAWLHVCVTGDDRNATASIIYDGMLTDSIGSWSKNILRTQESECVCINGTCTVVMTDGSASGRADTKILFIREGKIVHIGPLSGSAQHVEECSCYPRYPEVRCVCRDNWKGSNRPVLYINVADYSVDSSYVCSGLVGDTPRNDDSSSSSNCRDPNNERGGPGVKGWAFDNGNDVWMGRTIKKDSRSGYETFRVVGGWTTANSKSQINRQVIVDSDNWSGYSGIFSVEGKTCINRCFYVELIRGRPQETRVWWTSNSIIVFCGTSGTYGTGSWPDGANINFMSI

SEQ ID NO: 26197 - protein, 469 aa, Artificial Sequence; identical to SEQ ID NO: 14573
  derived and/or modified protein sequence (wt) from neuraminidase__InfluenzaA__CAC19707

SEQ ID NO: 26198 - protein, 469 aa, Artificial Sequence
  derived and/or modified protein sequence (wt) from neuraminidase__InfluenzaA__CAD29959
MNPNQKIITIGSVSLTIATICFLMQIAILVTTVTLHFKQYECNSPPNNQVMLCEPTIIERNITEIVYLTNTTIEKEICPKLAEYRNWSKPQCNITGFAPFSKDNSIRLSAGGDIWVTREPYVSCDPDKCYQFALGQGTTLNNGHSNDTVHDRTPYRTLLMNELGVPFHLGTKQVCIAWSSSSCHDGKAWLHVCVTGDDENATASFIYNGRLVDSIGSWSKKILRTQESECVCINGTCTVVMTDGSASGKADTKILFIEEGKIVHTSPLSGSAQHVEECSCYPRYPGVRCVCRDNWKGSNRPIVDINVKDYSIVSSYVCSGLVGDTPRKNDSSSSSHCLNPNNEEGGHGVKGWAFDDGNDVWMGRTISEKLRSGYETFKVIEGWSKPNSKLQINRQVIVDRGNRSGYSGIFSVEGKSCINRCFYVELIRGRKQETEVLWTSNSIVVFCGTSGTYGTGSWPDGADINLMPI

SEQ ID NO: 26199 - protein, 469 aa, Artificial Sequence
  derived and/or modified protein sequence (wt) from neuraminidase__InfluenzaA__CAD29960
MNPNQKIITIGSVSLTIATICFLMQIAILVTTVTLHFKQYECNPPPNNQVMLCEPTIIERNITEIVYLTNTTIEKEICPKLAEYRNWSKPQCNITGFAPFSKDNSIRLSAGGDIWVTREPYVSCDPDKCYQFALGQGTTLNNGHSNDTVHVRTPYRTLLMNELGVPFHLGTKQVCIAWSSSSCHDGKAWLHVCVTGDDENATASFIYNGRLVDSIGSWSKKILRTQESECVCINGTCTVVMTDGSASGKADTKILFIEEGKIVHTSPLSGSAQHVEECSCYPRYPGVRCVCRDNWKGSNRPIVDINVKDYSIVSSYVCSGLVGDTPRKNDSSSSSHCLNPNNEEGGHGVKGWAFDDGNDVWMGRTISEKLRSGYETFKVIEGWSKPNSKLQINRQVIVDRGNRSGYSGIFSVEGKSCINRCFYVELIRGRKQETEVLWTSNSIVVFCGTSGTYGTGSWPDGADINLMPI

SEQ ID NO: 26200 - protein, 469 aa, Artificial Sequence
  derived and/or modified protein sequence (wt) from neuraminidase__InfluenzaA__CAD29961
MNPNQKIITIGSVSLTISTICFFMQIAILVTTVTLHFKQYECNSPPNNQVMLCEPTIIERNTTEIVYLTNTTIEKEICPKLAEYRNWSKPQCNITGFAPFSKDNSIRLSAGGDIWVTREPYVSCDPDKCYQFALGQGTTLNNGHSNDTVHDRTPYRTLLMNELGVPFHLGTKQVCIAWSSSSCHDGKAWLHVCVTGDDENATASFIYNGRLVDSIGSWSKKILRTQESECVCINGTCTVVMTDGSASGKADTKILFIEEGKIVHTSTLSGSAQHVEECSCYPRYPGVRCVCRDNWKGSNRPIVDINIKDYSIVSSYVCSGLVGDTPRKNDSSSSSHCLDPNNEEGGHGVKGWAFDDGNDVWMGRTISEKLRSGYETFKVIEGWSKPNSKLQINRQVIVDRGNRSGYSGIFSVEGKSCINRCFYVELIRGRKQETEVLWTSNSIVVFCGTSGTYGTGSGPDGADINLMPI

SEQ ID NO: 26201 - protein, 469 aa, Artificial Sequence; identical to SEQ ID NO: 21545
  derived and/or modified protein sequence (wt) from neuraminidase__InfluenzaA__CAD29962

SEQ ID NO: 26202 - protein, 469 aa, Artificial Sequence; identical to SEQ ID NO: 14284
  derived and/or modified protein sequence (wt) from neuraminidase__InfluenzaA__CAD29963

SEQ ID NO: 26203 - protein, 469 aa, Artificial Sequence; identical to SEQ ID NO: 14284
  derived and/or modified protein sequence (wt) from neuraminidase__InfluenzaA__CAD29964

SEQ ID NO: 26204 - protein, 469 aa, Artificial Sequence; identical to SEQ ID NO: 14284
  derived and/or modified protein sequence (wt) from neuraminidase__InfluenzaA__CAD29965

SEQ ID NO: 26205 - protein, 469 aa, Artificial Sequence; identical to SEQ ID NO: 14284
  derived and/or modified protein sequence (wt) from neuraminidase__InfluenzaA__CAD29966

SEQ ID NO: 26206 - protein, 469 aa, Artificial Sequence; identical to SEQ ID NO: 14040
  derived and/or modified protein sequence (wt) from neuraminidase__InfluenzaA__CAD29967

SEQ ID NO: 26207 - protein, 469 aa, Artificial Sequence; identical to SEQ ID NO: 14040
  derived and/or modified protein sequence (wt) from neuraminidase__InfluenzaA__CAD29968

SEQ ID NO: 26208 - protein, 469 aa, Artificial Sequence; identical to SEQ ID NO: 14573
  derived and/or modified protein sequence (wt) from neuraminidase__InfluenzaA__CAD29969

SEQ ID NO: 26209 - protein, 469 aa, Artificial Sequence
  derived and/or modified protein sequence (wt) from neuraminidase__InfluenzaA__CAD29970
MNPNQKIITIGSVSLTIATICFLMQIAILVTTVTLHFKQYECNSPPNNQVMLCEPTIIERNITEIVYLTNTTIEKEICPKLAEYRNWSKPQCKITGFAPFSKDNSIRLSAGGDIWVTREPYVSCDPDKCYQFALGQGTTLNNRHSNDTVHDRTPYRTLLMNELGVPFHLGTKQVCIAWSSSSCHDGKAWLHVCVTGHDENATASFIYDGRLVDSIGSWSKKILRTQESECVCINGTCTVVMTDGSASGRADTKILFIEEGKIVHISPLSGSAQHVEECSCYPRYPGIRCVCRDNWKGSNRPIVDINVKDYSIVSSYVCSGLVGDTPRKNDSSSSSHCLNPNNEEGGHGVKGWAFDDGNDVWMGRTISEKLRSGYETFKVIEGWSKPNSKLQINRQVIVDRGNRSGYSGIFSVEGKSCINRCFYVELIRGRKQETEVWWTSNSIVVFCGTSGTYGTGSWPDGADINLMPI

SEQ ID NO: 26210 - protein, 469 aa, Artificial Sequence; identical to SEQ ID NO: 16555
  derived and/or modified protein sequence (wt) from neuraminidase__InfluenzaA__CAD29971

SEQ ID NO: 26211 - protein, 469 aa, Artificial Sequence
  derived and/or modified protein sequence (wt) from neuraminidase__InfluenzaA__CAD29972
MNPNQKIITIGSVSLTIATICFLMQIVILVTTVTLHFKQYECNSPPNNQVMLCEPTIIERNITEIVYLTNTTIEKEICPKLAEYRNWSKPQCNITGFAPFSKDNSIRLSAGGDIWVTREPYVSCDPDKCYQFALGQGTTLNNGHSNDTVHDRTPYRTLLMNELGVPFHLGTKQVCIAWSSSSCHDGKAWLHVCVTGDDKNATASFIYNGRLVDSIGSWSKKILRTQESECVCINGTCAVVMTDGSASGKADTKILFIEEGKIGHTSLLSGSAQHVEECSCYPRYPGVRCVCRDNWKGSNRPIVDINVKDYSIVSSYVCSGLVGDTPRKNDSSSSSHCLDPNNEEGGHGVKGWAFDDGNDVWMGRTISEKLRSGYETFKVIEGWSKPNSKLQINRQVIVDRGNRSGYSGIFSVEGKSCINRCFYVELIRGRNQETEILWTSNSIVVFCGTSGTYGTGSWPDGADINLMPI

SEQ ID NO: 26212 - protein, 469 aa, Artificial Sequence
  derived and/or modified protein sequence (wt) from neuraminidase__InfluenzaA__CAD29973
MNPNQKIITIGSVSLTIATICFLMQIAILVTTVTLHFKQYECNSPPNNQVMLCEPTIIERNITEIVYLTNTTIEKEICPKLAEYRNWSKPQCKITGFAPFSKDNSIRLSAGGDIWVTREPYVSCDPGKCYQFALGQGTTLNNRHSNDTVHDRTPYRTLLMNELGVPFHLGTKQVCIAWSSSSCHDGKAWLHVCVTGHDENATASFIYDGRLVDSIGSWSKKILRTQESECVCINGTCTVVMTDGSASGRADTKILFIEEGKIVHISPLSGSAQHVEECSCYPRYSGVRCVCRDNWKGSNRPIVDINVKDYSIVSSYVCSGLVGDTPRKNDSSSSSHCLNPNNEEGGHGVKGWAFDDGNDVWMGRTISEKLRSGYETFKVIGGWSKPNSKLQINRQVIVDRGNRSGYSGIFSVEGKSCINRCFYVELIRGRKQETEVWWTSNSIVVFCGTSGTYGTGSWPDGADINLMPI

SEQ ID NO: 26213 - protein, 469 aa, Artificial Sequence; identical to SEQ ID NO: 22584
  derived and/or modified protein sequence (wt) from neuraminidase__InfluenzaA__CAD29974

SEQ ID NO: 26214 - protein, 469 aa, Artificial Sequence
  derived and/or modified protein sequence (wt) from neuraminidase__InfluenzaA__CAD29984
MNPNQKIITIGSVSLTIATICFLMQIAILVTTVTLHFKQYECNSPPNNQVMLCEPTIIERNITEIVYLTNTTIEKEICPKLAEYRNWSKPQCNITGFAPFSKDNSIRLSAGGDIWVTREHYVSCDRDKCYQFALGQGTTLNNGHSNDTVHDRTPYRTLLMNELGVPFHLGTKQVCIAWSSSSCHHGKAWLHVCVTGDDENATASFIYNGRLVDSIGSWSKKILRTQESECVCINGTCTVVMTDGSASGKADTKILFIKEGKIVHTSSLSGSAQHVEECSCYPRYPGVRCVCRDNWKGSNRPIVDINVKDYSIVSSYVCSGLVGDTPRKNDSSSSSHCLDPNNEEGGHGVKGWAFDDGNDVWMGRTISEKLRSGYETFKVIEGWSKANSKLQINRQVIVDRGNRSGYSGIFSVESKSCINRCFYVELIRGRKQETEVLWTSNSIVVFCGTSGTYGTGSWPDGADINLMPI

SEQ ID NO: 26215 - protein, 469 aa, Artificial Sequence
  derived and/or modified protein sequence (wt) from neuraminidase__InfluenzaA__CAD29985
MNPNQKIITIGSVSLTIATICFLMQIAILVTTVTLHFKQYECNSPPNNQVMLCEPTIIERNITEIVYLTNTTIEKEICPKLAEYRNWSKPQCNITGFAPFSKDNSIRLSAGGDIWVTREPYVSCDPDKCYQFALGQGTTLNNGHSNDTVHDRTPYRTLLMNELGVPFHLGTKQVCIAWSSSSCHDGKAWLHVCVTGDDENATASFIYNGRLVDSIGSWSKKILRTQESECVCINGTCTVVMTDGSASGKADTKILFIEEGKIVHISTLSGSAQHVEECSCYPRYPGVRCVCRDNWKGSNRPIVDINVKDYSIVSSYVCSGLVGDTPRKNDSFSSSHCLDPNNEEGGHGVKGWAFDDGNDVWMGRTISEKLRSGYETFKVIEGWSKPNSKLQINRQVIVERGNRSGYSGIFSVEGKSCINRCFYVELIRGRKEETEVWWTSNSIVVFCGTSRTYGTGSWPDGADINLMPI

SEQ ID NO: 26216 - protein, 469 aa, Artificial Sequence
  derived and/or modified protein sequence (wt) from neuraminidase__InfluenzaA__CAD29988
MNPNQKIITIGSVSLTIATICFLMQIAILVTTVTLHFKQYECNSPPNNQVMLCEPTIIERNITEIVYLTNTTIEKEICPKLAEYRNWSKPQCNITGFAPFSKDNSIRLSAGGDIWVTREPYVSCDPDKCYQFALGQGTTLNNGHSNDTVHDRTPYRTLLMNELGVPFHLGTRQVCIAWSSSSCHDGKAWLHVCVTGDDENATASFIYNGRLVDSIGSWSKKILRTQESECVCINGTCTVVMTDGSASEKADTKILFIEEGKIVHISTLSGSAQHVEECSCYPRYPGVRCVCRDNWKGSNRPIVDINVKDYSIVSSYVCSGLVGDTPRKNDSFSSSHCLDPNNEEGGHGVKGWAFDDGNDVWMGRTISEKLRSGYETFKVIEGWSKPNSKLQINRQVIVERGNRSGYSGIFSVEGKSCINRCFYVELIRGRKEETEVWWTSNSIVVFCGTSGTYGTGSWPDGADINLMPI

SEQ ID NO: 26217 - protein, 469 aa, Artificial Sequence
  derived and/or modified protein sequence (wt) from neuraminidase__InfluenzaA__CAD29990
MNPNQKIITIGSVSLTIATICFLMQIAILVTTVTLHFKQYECNSPPNNQVMLCEPTIIERNITEIVYLTNTTIEKEICPKLAEYRNWSKPQCNITGFAPFSKDNSIRLSAGGDIWVTREPYVSCDPDKCYQFALGQGTTLNNGHSNDTVHGRTPYRTLLMNELGVPFHLGTKQVCIAWSSSSCHDGKAWLHVCVTGDDENATASFIYNGRLVDSIGSWSKKILRTQESECVCINGTCTVVMTDGSASGKADTKILFIEEGKIVHTSLLSGSAQHVEECSCYPRYPGVRCVCRDNWKGSNRPIVDINVKDYSIVSSYVCSGLVGDTPRKNDNSSSSHCLDPNNEEGGHGVKGWAFDDGNDVWMGRTISEKLRSGYETFKVIEGWSKPNSKLQINRQVIVDRGNRSGYSGIFSVEGKSCINRCFYVELIRGRKQETEVLWTSNSIVVFCGTSGTYGTGSWPDGADINLMPI

SEQ ID NO: 26218 - protein, 469 aa, Artificial Sequence; identical to SEQ ID NO: 14061
  derived and/or modified protein sequence (wt) from neuraminidase__InfluenzaA__CAD29991

SEQ ID NO: 26219 - protein, 469 aa, Artificial Sequence
  derived and/or modified protein sequence (wt) from neuraminidase__InfluenzaA__CAD29992
MNPNQKIITIGSVSLTIATICFLMQIAILVTTVTLHFKQYECNSPPNNQVMLCEPTIIERNITEIVYLTNTTIEKEICPKLAEYRNWSKPQCNITGFAPFSKDNSIRLSAGGDIWVTREPYVSCDPDKCYQFALGQGTTLNNGHSNDTVHDRTPYRTLLMNELGVPFHLGTKQVCIAWSSSSCHDGKAWLHVCVTGDDENATASFIYNGRLVDSIGSWSKKILRTQESECVCINGTCTVVMTDGSASGKADTKILFIEEGKIVHTSLLSGSAQHVEECSCYPRYPGVRCVCRDNWKGSNRPIVDINVKDRSIVSSYVCSGLVGDTPRKNDSSSSSHCLDPNNEEGGHGVKGWAFDDGNDVWMGRTISEKLRSGYETFKVIEGWSKPNSKLQINRQVIVDRGNRSGYSGIFSVEGKSCINRCFYVELIRGRKQETEVLWTSNSIVVFCGTSGTYGTGSWPDGADINLMPI

SEQ ID NO: 26220 - protein, 469 aa, Artificial Sequence
  derived and/or modified protein sequence (wt) from neuraminidase__InfluenzaA__CAD29993
MNPNQKIITIGSVSLTIATTCFLMQIAILVTTVTLHFKQYECNSPPNNQVMLCEPTIIERNITEIVYLTNTTIEKEICPKLAEYRNWSKPQCNITGFAPFSKDNSIRLSAGGDIWVTREPYVSCDPDKCYQFALGQGTTLNNGHSNDTVHDRTPYRTLLMNELGVPFHLGTKQVCIAWSSSSCHDGKAWLHVCVTGDDENATASFIYNGRLVDSIGSWSKKILRTQESECVCINGTCTVVMTDGSASGKADTKILFIEEGKIVHTSPLSGSAQHVEECSCYPRYPGVRCVCRDNWKGSNRPIVDINVKDYSIVSSYVCSGLVGDTPRKNDSSSSSHCLDPNNEEGGHGVKGWAFDDGNDVWMGRTISEKLRSGYETFKVIEGWSKPNSKLQINRQVIVDRGNRSGYSGIFSVEGKSCINRCFYVELIRGRKQETEVLWTSNSIVVFCGTSGTYGTGSWPDGADINLMPI

SEQ ID NO: 26221 - protein, 469 aa, Artificial Sequence; identical to SEQ ID NO: 15749
  derived and/or modified protein sequence (wt) from neuraminidase__InfluenzaA__CAD29994

SEQ ID NO: 26222 - protein, 470 aa, Artificial Sequence; identical to SEQ ID NO: 16453
  derived and/or modified protein sequence (wt) from neuraminidase__InfluenzaA__CAD57252

SEQ ID NO: 26223 - protein, 470 aa, Artificial Sequence
  derived and/or modified protein sequence (wt) from neuraminidase__InfluenzaA__CAD57253
MNPNQKIITIGSIRIAIGIISLMLQIGNIISIWASHSIQTGSQNHTGVCNQRIITYENSTWVNHTYVNINNTNVIAGKDKTSVTLAGNSSLCSISGWAIYTKDNSIRIGSKGDVFVIREPFISCSHLECRTFFLTQGALLNDKHSNGTVKDRSPYRALMSCPLGEAPSPYNSKFESVAWSASACHDGMGWLTIGISGPDNGAVAVLKYNGIITETIKSWKKQILRTQESECVCVNGSCFTIMTDGPSNGAASYKIFKIEKGKITKSIELNAPNFHYEECSCYPDTGTVMCVCRDNWHGSNRPWVSFNQNLDYQIGYICSGVFGDNPRPKDGEGSCNPVTVDGANGVKGFSYKYGNGVWIGRTKSNRLRKGFEMIWDPNGWTDTDSDFSVKQDVVAITDWSGYSGSFVQHPELTGLDCIRPCFWVELVRGLPKENTTIWTSGSSISFCGVNSDTANWSWPDGAELPFTIDK

SEQ ID NO: 26224 - protein, 470 aa, Artificial Sequence; identical to SEQ ID NO: 14396
  derived and/or modified protein sequence (wt) from neuraminidase__InfluenzaA__CAD57255

SEQ ID NO: 26225 - protein, 470 aa, Artificial Sequence
  derived and/or modified protein sequence (wt) from neuraminidase__InfluenzaA__CAD57256
MNPNQKIITIGSISVAIGIISLMLQIGNIISIWASHSIQTGSQNHTGICNQRIITYENSTWVNHTYVNINNTNVVAGKDKTSVTLAGNSSLCSISGWAIYTKDNSIRIGSKGDVFVIREPFISCSHLECRTFFLTQGALLNDKHSNGTVKDRSPYRALMSCPLGEAPSPYNSKFESVAWSASACHDGMGWLTIGISGPDNGAVAVLKYNGIITETIKSWKKRILRTQESECVCVNGSCFTIMTDGPSNGAASYRIFKIEKGRVTKSIELDAPNYHYEECSCYPDTGTVMCVCRDNWHGSNRPWVSFNQNLDYQIGYICSGVFGDNPRPKDGEGSCNPVTVDGADGVKGFSYKYGNGVWIGRTKSNRLRKGFEMIWDPNGWTDTDSDFSVKQDVVAITDWSGYSGSFVQHPELTGLDCIRPCFWVELVRGRPRENTTIWTSGSSISFCGVNSDTANWSWPDGAELPFTIDK

SEQ ID NO: 26226 - protein, 470 aa, Artificial Sequence
  derived and/or modified protein sequence (wt) from neuraminidase__InfluenzaA__CAD57257
MNPNQKIITIGSISIAIGIISLMLQIGNIISIWASHSIQTGSQNHTGICNQRIITYENSTWVNHTYVNINNTNVVAGKDKTSVTLAGNSSLCSISGWAIYTKDNSIRIGSKGDVFVIREPFISCSHLECRTFFLTQGALLNDKHSNGTVKDRSPYRALMSCPLGEAPSPYNSKFESVAWSASACHDGMGWLTIGISGPDNGAVAVLKYNGIITETIKSWKKRILRTQESECVCVNGSCFTIMTDGPSNGAASYKIFKIEKGKVTKSIELNAPNSHYEECSCYPDTGTVMCVCRDNWHGSNRPWVSFNQNLDYQIGYICSGVFGDNPRPKDGEGSCNPVTVDGADGVKGFSYRYGNGVWIGRTKSNRLRKGFEMIWDPNGWTDTDSDFSMKQDVVAMTDWSGYSGSFVQHPELTGLDCIRPCFWVELVRGRPRENTTIWTSGSSISFCGVNSDTANWSWPDGAELPFTIDK

SEQ ID NO: 26227 - protein, 470 aa, Artificial Sequence
  derived and/or modified protein sequence (wt) from neuraminidase__InfluenzaA__CAD57258
MNPNQKIITIGSISVAIGIISLILQIGNIISIWASHSIQTGSQNYTGICNQRIITYENSTWVNQTYVNINNTNVVAGKDKTSMVLAGNSSLCPIRGWAIYTKDNSIRIGSKGDIFVIREPFISCSHLECRTFFLTQGALLNDKHSNGTVKDRSPYRALMSCPLGEAPSPYNSRFESVAWSASACHDGLGWLTIGISGPDNGAVAVLKYNGIITETIKSWKKQILRTQESECVCVNGSCFTIMTDGPSNRAASYRIFKIEKGRVTKSIELDAPNYHYEECSCYPDTGTVMCVCRDNWHGSNRPWVSFNQNLDYQIGYICSGVFGDNPRPKDGEGSCNPVTVDGADGVKGFSYRYGNGVWIGRTKSNRLRKGFEMIWDPNGWTDTDSDFSMKQDVVAMTDWSGYSGSFVQHPELTGLDCMRPCFWVELVRGLPRENTTIWTSGSSISFCGVNSETANWSWPDGAELPFTIDK

SEQ ID NO: 26228 - protein, 470 aa, Artificial Sequence
  derived and/or modified protein sequence (wt) from neuraminidase__InfluenzaA__CAD57259
MNPNQKIITIGSISIAIGIISLILQIGNIISIWASHSIQTESQNHTGICNQRIITYENSTWVNQTYVNINNTNVAAGKDKTSMTLAGNSSLCPIRGWAIYTKDNSIRIGSKGDIFVIREPFISCSHLECRTFFLTQGALLNDKHSNGTVKDRSPYRALMSCPLGEAPSPYNSRFESVAWSASACHDGLGWLTIGISGPDNGAVAVLKYNGIITETIKSWKKRILRTQESECVCMNGSCFTIMTDGPSNGAASYRIFKIEKGRVTKSIELDAPNYHYEECSCYPETGTVMCVCRDNWHGSNRPWVSFNQNLDYQIGYICSGVFGDNPRPKDGEGSCNPVTVDGADGVKGFSYRYGNGVWIGRTKSNRLRKGFEMIWDPNGWTDTDSDFSMKQDIVAMTDWSGYSGSFVQHPELTGLDCMRPCFWVELVRGLPRENTTIWTSGSSISFCGVNSDTANWSWPDGAELPFTIDK

SEQ ID NO: 26229 - protein, 470 aa, Artificial Sequence
  derived and/or modified protein sequence (wt) from neuraminidase__InfluenzaA__CAD57264
MNPNQKIITIGSISVAIGIISLILQIGNIISIWASHSIQTGSQNYTGICNQRIITYENSTWVNQTYVNINNTNVVAGKDKTSMTLAGNSSLCPIRGWAIYTKDNSIRIGSKGDVFVIREPFISCSHLECRTFFLTQGALLNDKHSNGTVKDRSPYRALMSCPLGEAPSPYNSRFESVAWSASACHDGLGWLTIGISGPDNGAVAVLKYNGIITETIKSWKKQILRTQESECVCVNGSCFTIMTDGPSNGAASYRIFKIEKGRVTKSIELDAPNYHYEECSCYPDTGTVMCVCRDNWHGSNRPWVSFNQNLDYQIGYICSGVFGDNPRPKDGEGSCNPVTVDGANGVKGFSYRYGNGVWIGRTKSNRLRKGFEMIWDPNGWTDTDSDFSMKQDVVAMTDWSGYSGSFVQHPELTGLDCMRPCFWVELVRGLPRENTTIWTSGSSISFCGVNSETANWSWPDGAELPFTIDK

SEQ ID NO: 26230 - protein, 449 aa, Artificial Sequence
  derived and/or modified protein sequence (wt) from neuraminidase__InfluenzaA__CBW54819
MNPNQKIITIGSICMVIGIVSLMLQIGNMISIWVSHSIQTGNQCQAEPISNTKFLTEKAVASVTLAGNSSLCPISGWAVYSKDNSIRIGSRGDVFVIREPFISCSHLECRTFFLTQGALLNDKHSNGTVKDRSPHRTLMSCPVGEAPSPYNSRFESVAWSASACHDGISWLTIGISGPDNGAVAVLKYNGIITDTIKSWRNNILRTQESECACVNGSCFTVMTDGPSSGQASYKIFKMEKGKVVKSVELDAPNYHYEECSCYPDAGEITCVCRDNWHGSNRPWVSFNQNLEYRIGYICSGVFGDNPRPNDGTGSCGPVSPNGAYGVKGFSFKYGDGVWIGRTKSTNSRSGFEMVWDPNGWTGTDSSFSVKQDIVAITDWSGYSGSFVQHPELTGLDCIRPCFWVELIRGRPKESTIWTSGSSISFCGVNSDTVSWSWPDGAELPFTIDK

SEQ ID NO: 26231 - protein, 449 aa, Artificial Sequence
  derived and/or modified protein sequence (wt) from neuraminidase__InfluenzaA__CBW54821
MNPNQKIITIGSICIVIGIVSLMLQIGNMISIWVSHSIQTGNQCQAEPISNTKFLTEKAVASVTLAGNSSLCPISGWAVYSKDNSIRIGSRGDVFVIREPFISCSHLECRTFFLTQGALLNDKHSNGTVKDRSPHRTLMSCPVGEAPSPYNSRFESVAWSASACHDGISWLTIGISGPDNGAVAVLKYNGIITDTIKSWRNNILRTQESECACINGSCFTVMTDGPSSGQASYKIFKMEKGKVVKSVELDAPNYHYEECSCYPDAGEITCVCRDNWHGSNRPWVSFNQNLEYQIGYICSGVFGDNPRPNDGTGSCGPVSPNGAYGVKGFSFKYGNGVWIGRTKSTNSRSGFEMIWDPNGWTGTDSSFSVKQDIVAITDWSGYSGSFVQHPELTGLDCIRPCFWVELIRGQPKESTIWTSGSSISFCGVNSDTVSWSWPDGAELPFTIDK

SEQ ID NO: 26232 - protein, 469 aa, Artificial Sequence
  derived and/or modified protein sequence (wt) from neuraminidase__InfluenzaA__CCG47912
MNPNQKIITIGSVSLTIATMCLFMQIAILITTVTLHFKQYECDSPANNQVMPCEPIIIEKNITKIVYLTNTTIEKEVCPKLGEYRNWSKPQCRITGFAPFSKDNSIRLSAGGAIWVTREPYVSCDPNKCYQFALGQGTTLDNRHSNDTIHDRTPYRTLLMNELGVPFHLGTRQVCIAWSSSSCHDGKAWLHVCVTGHDKNATASFIYDGKLVDSISSWSQNILRTQESECVCINGICTVVMTDGSASGKADTKILFIEEGKVIHISPLLGSAQHVEECSCYPRYPDVRCICRDNWKGSNRPIVDIRMKDYSIGSSYMCSGLVGDTPRNNDGSSNSNCRNPNNERGNHGVKGWAFDDGNDIWMGRTISKDSRLGYETFKVVGGWSQPNSKFQINRQVIVDSDNRSGYSGIFSVEGKSCINRCFYVELIRGRRQETRVWWTSNSIVVFCGTSGTYGSGSWPDGADINFMPI

SEQ ID NO: 26233 - protein, 450 aa, Artificial Sequence
  derived and/or modified protein sequence (wt) from neuraminidase__InfluenzaA__AAF74321
MNPNQKIITIGSICMVVGIISLMLQIGNIISVWVSHTIQTWHPNQPEPCNQSINFYTEQAAASVTLAGNSSLCPISGWAIYSKDNSIRIGSKGDVFVIREPFISCSHLECRTFFLTQGALLNDKHSNGTVKDRSPYRTLMSCPVGEAPSPYNSRFESVAWSASACHDGISWLTIGISGPDNGAVAVLKYNGIITDTIKSWRNNILRTQESECACVNGSCFTVMTDGPSNEQASYKIFKIEKGRVVKSVELNAPNYHYQECSCYPDAGEITCVCRDNWHGSNRPWVSFNQNLEYQIGYICSGVFGDSPRPNDGTGSCGPVSLNGAYGVKGFSFKYGNGVWIGRTKSTSSRSGFEMIWDPNGWTETDSSFSLKQDIIAITDWSGYSGSFIQHPELTGLNCMRPCFWVELIRGRPKEKTIWTSGSSISFCGVNSDTVGWSWPDGAELPFTIDK

SEQ ID NO: 26234 - protein, 450 aa, Artificial Sequence
  derived and/or modified protein sequence (wt) from neuraminidase__InfluenzaA__AAF74322
MNPNQKIITIGSICMVVGIISLMLQIGNTISVWVSHIIKTWHPNQPEPCNQSINFYTEQAAASVTLAGNSSLCPISGWAIYSKDNSIRIGSKGDVFVIREPFISCSHLECRTFFLTQGALLNDKHSNGTVKDRSPYRTLMSCPVGEAPSPYNSRFESVAWSASACHDGISWLTIGISGPDNGAVAVLKYNGIITDTIKSWRNNTLRTQESECACVNGSCFTVMTDGPSNEQASYKIFKIEKGRVVKSVELNAPNYHYEECSCYPDAGEITCVCRDNWHGSNRPWVSFNQNLEYQIGYICSGVFGDSPRPNDGTGSCGPVSLNGAYGVKGFSFKYGNGVWIGRTKSTSSRSGFEMIWDPNGWTETDSSFSLKQDIIAITDWSGYSGSFIQHPELTGLNCMRPCFWVELIRGRPKEKTIWTSGSSISFCGVNSDTVGWSWPDGAELPFTIDK

SEQ ID NO: 26235 - protein, 450 aa, Artificial Sequence
  derived and/or modified protein sequence (wt) from neuraminidase__InfluenzaA__AAF74323
MNPNQKIITIGSICMVVGIISLMLQIGNIISVWISHIIQTWHPNQPEPCNQSINFYTEQAAASVTLAGNSSLCPISGWAIYSKDNSIRIGSKGDVFVIREPFISCSHLECRTFFLTQGALLNDKHSNGTVKDRSPYRTLMSCPVGEAPSPYNSRFESVAWSASACHDGISWLTIGISGPDNEAVAVLKYNGIITDTIRSWRNNILRTQESECACVNGSCFTVMTDGPSNEQASYKIFKIEKGRVVKSVELNAPNYHYEECSCYPDAGEITCVCRDNWHGSNRPWVSFNQNLEYQIGYICSGVFGDSPRPNDGTGSCGPVSLNGAYGVKGFSFKYGNGVWIGRTKSTSSRSGFEMIWDPNGWTETDSSFSLKQDIIAVTDWSGYSGSFIQHPELTGLNCMRPCFWVELIRGRPKEKTIWTSGSSISFCGVNSDTVGWSWPDGAELPFTIDK

SEQ ID NO: 26236 - protein, 450 aa, Artificial Sequence
  derived and/or modified protein sequence (wt) from neuraminidase__InfluenzaA__AAF74324
MNPNQKIITIGSICMVVGIISLMLQIGNIISVWVSHIIQTWHPNQPEPCNQSINFYTEQAAASVTLAGNSSLCPISGWAIYSKDNSIRIGSKGDVFVIREPFISCSHLECRTFFLTQGALLNDKHSNGTVKDRSPYRTLMSCPVGEAPSPYNSRFESVAWSASACHDGISWLTIGISGPDNGAVAVLKYNGIITDTIKSWRNNILRTQESECACVNGSCFTVMTDGPSNEQASYKIFKIEKGRVVKSVELNAPNYHYEECSCYPDAGEITCVCRDNWHGSNRPWVSFNQNLEYQIGYICSGVFGDSPRPNDGTGSCGPVSLNGAYGVKGFSFKYGNGVWIGRTKSTSSRSGFEMIWDPNGWTETDSSFSLKQDIIAITDWSGYSGSFIQHPELTGLNCMRPCFWVELIRGRPKEKTIWTSGSSVSFCGVNSDTMGWSWPDGAELPFTIDK

SEQ ID NO: 26237 - protein, 450 aa, Artificial Sequence
  derived and/or modified protein sequence (wt) from neuraminidase__InfluenzaA__AAF74325
MNPNQKIITIGSICMVVGIISLMLQIGNTISVWVSHIIKTWHPNQPEPCNQSINFYTEQAAASVTLAGNSSLCPISGWAIYSKDNSIRIGSKGDVFVIREPFISCSHLECRTFFLTQGALLNDKHSNGTVKDRSPYRTLMSCPVGEAPSPYNSRFESVAWSASACHDGISWLTIGISGPDNGAVAVLKYNGIITDTIKSWRNNTLRTQESECACVNGSCFTVMTDGPSNEQASYKIFKIEKGRVVKSVELNAPNYHYEECSCYPDAGEITCVCRDNWHGSNRPWVSFNQNLEYQIGYICSGVFGDSPRPNDGTGSCGPVSLNGAYGVKGFSFKYGNGVWIGRTKSTSSRSGFEMIWDPNGWTETDSSFSLKQDIIAITDWSGYSGSFIQHPELTGLNCMRPCFWVELIRGRPKEKTIWTSGSSISFCGVNSDTVGWSWPDGAELPYTIDK

SEQ ID NO: 26238 - protein, 469 aa, Artificial Sequence; identical to SEQ ID NO: 16728
  derived and/or modified protein sequence (wt) from neuraminidase__InfluenzaA__EPI239900

SEQ ID NO: 26239 - protein, 469 aa, Artificial Sequence; identical to SEQ ID NO: 17077
  derived and/or modified protein sequence (wt) from neuraminidase__InfluenzaA__EPI221062

SEQ ID NO: 26240 - protein, 469 aa, Artificial Sequence; identical to SEQ ID NO: 16728
  derived and/or modified protein sequence (wt) from neuraminidase__InfluenzaA__EPI534079

SEQ ID NO: 26241 - protein, 469 aa, Artificial Sequence; identical to SEQ ID NO: 16728
  derived and/or modified protein sequence (wt) from neuraminidase__InfluenzaA__AGM53851

SEQ ID NO: 26242 - protein, 469 aa, Artificial Sequence
  derived and/or modified protein sequence (wt) from neuraminidase__InfluenzaA__EPI731464
MNPNQKIITIGSVCMTIGMANLILQIGNIISIWISHSIQLGNQNQIETCNQSVITYENNTWVNQTYVNISNTNFAAGQSVVSVKLAGGSSLCPVSGWAIYSKDNSVRIGSKGDVFVIREPFISCSPLECRTFFLTQGALLNDKHSNGTIKDRSPYRTLMSCPIGEVPSPYNSRFESVAWSASACHDGINWLTIGISGPDNGAVAVLKYNGIITDTIKSWRNNILRTQESECACVNGSCFTVMTDGPSNGQASYKIFRIEKGKIVKSVEMNAPNYHYEECSCYPDSSEITCVCRDNWHGSNRPWVSFNQNLEYQIGYICSGIFGDNPRPNDKTGSCGPVSSNGANGVKGFSFKYGNGVWIGRTKSISSRNGFEMIWDPNGWTGTDNNFSIKQDIVGINEWSGYSGSFVQHPELTGLDCIRPCFWVELIRGRPKENTIWTSGSSISFCGVNSDTVGWSWPDGAELPFTIDK

SEQ ID NO: 26243 - protein, 469 aa, Artificial Sequence; identical to SEQ ID NO: 16728
  derived and/or modified protein sequence (wt) from neuraminidase__InfluenzaA__EPI696973

SEQ ID NO: 26244 - protein, 469 aa, Artificial Sequence
  derived and/or modified protein sequence (wt) from neuraminidase__InfluenzaA__EPI662593
MNPNQKIITIGSICMTIGMANLILQIGNIISIWVSHSIQIGNQSQIETCNQSVITYENNTWVNQTYVNISNTNFAAGQSVVSVKLAGNSSLCPVSGWAIYSKDNSVRIGSKGDVFVIREPFISCSPLECRTFFLTQGALLNDKHSNGTIKDRSPYRTLMSCPIGEVPSPYNSRFESVAWSASACHDGINWLTIGISGPDSGAVAVLKYNGIITDTIKSWRNNILRTQESECACVNGSCFTIMTDGPSDGQASYKIFRIEKGKIIKSVEMKAPNYHYEECSCYPDSSEITCVCRDNWHGSNRPWVSFNQNLEYQMGYICSGVFGDNPRPNDKTGSCGPVSSNGANGVKGFSFKYGNGVWIGRTKSISSRKGFEMIWDPNGWTGTDNKFSIKQDIVGINEWSGYSGSFVQHPELTGLDCIRPCFWVELIRGRPEENTIWTSGSSISFCGVNSDTVGWSWPDGAELPFTIDK

SEQ ID NO: 26245 - protein, 469 aa, Artificial Sequence; identical to SEQ ID NO: 26244
  derived and/or modified protein sequence (wt) from neuraminidase__InfluenzaA__EPI830229

SEQ ID NO: 26246 - protein, 469 aa, Artificial Sequence; identical to SEQ ID NO: 23837
  derived and/or modified protein sequence (wt) from neuraminidase__InfluenzaA__AGU92879

SEQ ID NO: 26247 - protein, 469 aa, Artificial Sequence; identical to SEQ ID NO: 23836
  derived and/or modified protein sequence (wt) from neuraminidase__InfluenzaA__AGU92857

SEQ ID NO: 26248 - protein, 469 aa, Artificial Sequence; identical to SEQ ID NO: 23835
  derived and/or modified protein sequence (wt) from neuraminidase__InfluenzaA__AGU92846

SEQ ID NO: 26249 - protein, 469 aa, Artificial Sequence; identical to SEQ ID NO: 23846
  derived and/or modified protein sequence (wt) from neuraminidase__InfluenzaA__AGU92835

SEQ ID NO: 26250 - protein, 469 aa, Artificial Sequence; identical to SEQ ID NO: 23822
  derived and/or modified protein sequence (wt) from neuraminidase__InfluenzaA__AGU92703

SEQ ID NO: 26251 - protein, 469 aa, Artificial Sequence
  derived and/or modified protein sequence (wt) from neuraminidase__InfluenzaA__EPI643117
MNPNQKIITIGSVSLTISTICFFMQIAILITTVTLHFKQYEFNSPPNNQVMLCEPTIIERNITEIVYLTNTTIEKEICPKPAEYRNWSKPQCGITGFAPFSKDNSIRLSAGGDIWVTREPYVSCDPDKCYQFALGQGTTLNNVHSNNTVRDRTPYRTLLMNELGVPFHLGTKQVCIAWSSSSCHDGKAWLHVCITGDDKNATASFIYNGRLVDSVVSWSKDILRTQESECICINGTCTVVMTDGSASGKADTKILFIEEGKIVHTSTLSGSAQHVEECSCYPRYPGVRCVCRDNWKGSNRPIVDINIKDHSIVSSYVCSGLVGDTPRKNDSSSSSHCLDPNNEEGGHGVKGWAFDDGNDVWMGRTINETSRLGYETFKVIEGWSNPKSKLQTNRQVIVDRGDRSGYSGIFSVEGKSCINRCFYVELIRGRKEETEVLWTSNSIVVFCGTSGTYGTGSWPDGADLNLMPI

SEQ ID NO: 26252 - protein, 469 aa, Artificial Sequence
  derived and/or modified protein sequence (wt) from neuraminidase__InfluenzaA__EPI675797
MNPNQKIITIGSVSLTISTICFFMQIAILITTVTLHFKQYEFNSPPNNQVMLCEPTIIERNITEIVYLTNTTIEKEICPKPAEYRNWSKPQCGITGFAPFSKDNSIRLSAGGDIWVTREPYVSCDPDKCYQFALGQGTTLNNVHSNNKVRDRTPYRTLLMNELGVPFHLGTKQVCIAWSSSSCHDGKAWLHVCITGDDKNATASFIYNGRLVDSVVSWSKDILRTQESECICINGTCTVVMTDGSASGKADTKILFIEEGKIVHTSTLSGSAQHVEECSCYPRYPGVRCVCRDNWKGSNRPIVDINIKDHSIVSSYVCSGLVGDTPRKNDSSSSSHCLDPNNEEGGHGVKGWAFDDGNDVWMGRTINETSRLGYETFKVIEGWSNPKSKLQTNRQVIVDRGDRSGYSGIFSVEGKSCINRCFYVELIRGRKEETEVLWTSNSIVVFCGTSGTYGTGSWPDGADLNLMPI

SEQ ID NO: 26253 - protein, 469 aa, Artificial Sequence; identical to SEQ ID NO: 26251
  derived and/or modified protein sequence (wt) from neuraminidase__InfluenzaA__EPI578429

SEQ ID NO: 26254 - protein, 469 aa, Artificial Sequence; identical to SEQ ID NO: 26251
  derived and/or modified protein sequence (wt) from neuraminidase__InfluenzaA__EPI614405

SEQ ID NO: 26255 - protein, 449 aa, Artificial Sequence; identical to SEQ ID NO: 26173
  derived and/or modified protein sequence (wt) from neuraminidase__InfluenzaA__AAT73329

SEQ ID NO: 26256 - protein, 449 aa, Artificial Sequence; identical to SEQ ID NO: 26173
  derived and/or modified protein sequence (wt) from neuraminidase__InfluenzaA__AAW80723

SEQ ID NO: 26257 - protein, 449 aa, Artificial Sequence; identical to SEQ ID NO: 26173
  derived and/or modified protein sequence (wt) from neuraminidase__InfluenzaA__EF541467

SEQ ID NO: 26258 - protein, 465 aa, Artificial Sequence; identical to SEQ ID NO: 23454
  derived and/or modified protein sequence (wt) from neuraminidase__InfluenzaA__EPI439509

SEQ ID NO: 26259 - protein, 469 aa, Artificial Sequence
  derived and/or modified protein sequence (wt) from neuraminidase__InfluenzaA__EPI482776
MNTNQRIITIGTVCMIVGIISLLLQIGNIVSLWISHSIQTGWENHTVMCNQSVITYVNNTWVNRTYVNISNIKIATIQDVTSIILAGNSSLCPVSGWAVYSKDNSIRIGSKGDIFVIREPFISCSQLECRTFFLTQGALLNDKHSNGTVKDRSPYRTLMSCPIGEAPSPYNSRFESVAWSASACHDGMGWLTIGISGPDNGAVAVLKYNGIITDTIKSWRNKILRTQESECVCMNGSCFTVLTDGPSNGQASYKIFKVEKGKIIKSIELDAPNYHYEECSCYPDTGKVMCVCRDNWHASNRPWVSFNQNLDYQIGYICSGVFGDNPRSNDGKGNCGPVLSNGANGVKGFSYRYGNGVWIGRTKSINSRSGFEMIWDPNGWTETDSSFSMKQDIIALNDWSGYSGSFVQHPELTGMNCIRPCFWVELIRGQPKESTIWASGSSISFCGVNSETASWSWPDGADLPFTIDK

SEQ ID NO: 26260 - protein, 469 aa, Artificial Sequence
  derived and/or modified protein sequence (wt) from neuraminidase__InfluenzaA__EPI745533
MNPNQKIITIGSVCITIGMANLILQIGNIISIWISHSIQLGNQNQIETCNQSVITYENNTWVNQTYVNISNTNFAAGQSVVSVKLAGNSSLCPVSGWAIYSKDNSIRIGSKGDVFVIREPFISCSPLECRTFFLTQGALLNDKHSNGTIKDRSPYRTLMSCPIGEVPSPYNSRFESVAWSASACHDGISWLTIGISGPDNGAVAVLKYNGIITDTIKSWRNNILRTQESECACVNGSCFTVMTDGPSDGQASYKIFRIEKGKIVKSVEMNAPNYHYEECSCYPDSSEITCVCRDNWHGSNRPWVSFNQNLEYQIGYICSGIFGDNPRPNDKTGSCGPVSSNGANGVKGFSFKYGNGVWIGRTKSISSRNGFEMIWDPNGWTGTDNNFSIKQDIVGINEWSGYSGSFVQHPELTGLDCIKPCFWVELIRGRPKENTIWTSGSSISFCGVNSDTVGWSWPDGAELPFTIDK

SEQ ID NO: 26261 - protein, 469 aa, Artificial Sequence; identical to SEQ ID NO: 16728
  derived and/or modified protein sequence (wt) from neuraminidase__InfluenzaA__AEE69012

SEQ ID NO: 26262 - protein, 469 aa, Artificial Sequence; identical to SEQ ID NO: 16728
  derived and/or modified protein sequence (wt) from neuraminidase__InfluenzaA__EPI176609

SEQ ID NO: 26263 - protein, 469 aa, Artificial Sequence; identical to SEQ ID NO: 16728
  derived and/or modified protein sequence (wt) from neuraminidase__InfluenzaA__EPI176472

SEQ ID NO: 26264 - protein, 469 aa, Artificial Sequence
  derived and/or modified protein sequence (wt) from neuraminidase__InfluenzaA__EPI280340
MNPNQKIITIGSVCITIGMANLILQIGNIISIWISHSIQLGNQNQIETCNQSVITYENNTWVNQTYVNISNTNFAAGQSVVSVKLAGNSSLCPVSGWAIYSKDNSIRIGSKGDVFVIREPFISCSPLECRTFFLTQGALLNDKHSNGTIKDRSPYRTLMSCPIGEVPSPYNSRFESVAWSASACHDGISWLTIGISGPDNGAVAVLKYNGIITDTIKSWRNNILRTQESECACVNGSCFTVMTDGPSDGQASYKIFRIEKGKIVKSVEMNAPNYHYEECSCYPDSSEITCVCRDNWHGSNRPWVSFNQNLEYQIGYICSGIFGDNPRPNDKTGSCGPVSSNGANGVKGFSFKYGNGVWIGRTKSISSRNGFEIIWDPNGWTGTDNNFSIKQDIVGINEWSGYSGSFVQHPELTGLDCIRPCFWVELIRGRPKENTIWTSGSSISFCGVNSDTVGWSWPDGAELPFTIDK

SEQ ID NO: 26265 - protein, 469 aa, Artificial Sequence; identical to SEQ ID NO: 16728
  derived and/or modified protein sequence (wt) from neuraminidase__InfluenzaA__EPI240318

SEQ ID NO: 26266 - protein, 469 aa, Artificial Sequence; identical to SEQ ID NO: 16728
  derived and/or modified protein sequence (wt) from neuraminidase__InfluenzaA__EPI183133

SEQ ID NO: 26267 - protein, 469 aa, Artificial Sequence; identical to SEQ ID NO: 16728
  derived and/or modified protein sequence (wt) from neuraminidase__InfluenzaA__EPI369141

SEQ ID NO: 26268 - protein, 469 aa, Artificial Sequence
  derived and/or modified protein sequence (wt) from neuraminidase__InfluenzaA__EPI482787
MNTNQRIITIGTVCLIVGIVSLLLQIGNIVSLWISHSIQTGKRSHPETCSQNVITYENNTWVNQTYVNISNTNIVDGQGVTSIILAGNSPLCPISGWAIYSKDNSIRIGSKGDIFVIREPFISCSHLECRTFFLTQGALLNDRHSNGTVKDRSPYRTLMSCPIGEAPSPYNSRFESVAWSASACHDGMGWLTIGISGPDNGAVAVLKYNGIITDTIKSWRNKILRTQESECVCINGSCFTIMTDGPSNGQASYKIFKMEKGKIIKSVELDAPNYHYEECSCYPDTGKVVCVCRDNWHASNRPWVTFDQNLNYQIGYICSGVFGDNPRSNDGKGNCGPVPSNGANGVKGFSFRYGNGVWIGRTKSISSRSGFEMIWDPNGWTETDSSFSIKQDIIALTDWSGYSGSFVQHPELTGMNCIKPCFWVELIRGQPKESTIWTSGSSISFCGVDSETVSWSWPDGADLPFTIDK

SEQ ID NO: 26269 - protein, 469 aa, Artificial Sequence
  derived and/or modified protein sequence (wt) from neuraminidase__InfluenzaA__EPI482790
MNTNQRIITIGTVCLIVGIISLLLQIGNMVSLWISHSIQTGGKNHTEMCNQNVITYVNNTWVNRTYVNISNTKIVNVQDVVSVILTGNSSLCPISGWAIYSKDNSIRIGSKGDIFVIREPFISCSHLECRTFFLTQGALLNDKHSNGTVKDRSPYRTLMSCPVGEAPSPYNSRFESVAWSASACHDGMGWLTIGISGPDNGAVAVLKYNGIITDTIKSWRNKILRTQESECVCMNGSCFTVLTDGPSNGQASYKIFKMEKGKIIKSIELDAPNYHYEECSCYPDAGKVMCVCRDNWHASNRPWVSFDQNLDYQIGYICSGVFGDNPRSNDGKGNCGPVHSNGANGVKGFSYRYGNGVWIGRTKSINSRSGFEMIWDPNGWTGTDSSFSMKQDIIALTDWSGYSGSFVQHPELTGMNCIRPCFWVELIRGQPKENTIWASGSSISFCGVNGETASWSWPDGADLPFTIDK

SEQ ID NO: 26270 - protein, 469 aa, Artificial Sequence
  derived and/or modified protein sequence (wt) from neuraminidase__InfluenzaA__EPI291797
MNTNQRIITIGTVCMIVGIISLLLQIGNIVSLWISHSIQTGWENHTEMCNQSVITYVNNTWVNRTYVNISNTNIATIQDVTSIILAGNSSLCPVSGWAIYSKDNSIRIGSKGDIFVIREPFISCSQLECRTFFLTQGALLNDKHSNGTVKDRSPYRTLMSCPIGEAPSPYNSRFESVAWSASACHDGMGWLTIGISGPDNGAVAVLKYNGIITDTIKSWRNKILRTQESECVCMNGSCFTVLTDGPSNGQASYKIFKVEKGKIIKSIELDAPNYHYEECSCYPDTGKVMCVCRDNWHASNRPWVSFNQNLDYQIGYICSGVFGDNPRSNDGKGNCGPVLSNGANGVKGFSYRYGNGVWIGRTKSINSRSGFEMIWDPNGWTETDSSFSMKQDIIALTDWSGYSGSFVQHPELTGMNCIRPCFWVELIRGQPKESTIWASGSSISFCGVNSETASWSWPDGADLPFTIDK

SEQ ID NO: 26271 - protein, 469 aa, Artificial Sequence; identical to SEQ ID NO: 26270
  derived and/or modified protein sequence (wt) from neuraminidase__InfluenzaA__EPI482798

SEQ ID NO: 26272 - protein, 469 aa, Artificial Sequence
  derived and/or modified protein sequence (wt) from neuraminidase__InfluenzaA__EPI638969
MNTNQRIITIGTVCMIVGMISLLLQIGSIVSLWISHSIQTGWENHTGVCNQSVITYVNNTWVNRTYVNISNIKIATIQDVTPIILAGNSSLCPVNGWAVYSKDNSIRIGSKGDIFVIREPFISCSQLECRTFFLTQGALLNDKHSNGTVKDRSPYRTLMSCPIGEAPSPYNSRFESVAWSASACHDGMGWLTIGISGPDNGAVAVLKYNGIITDTIKSWRNKILRTQESECVCMNGSCFTVLTDGPSNGQASYKIFKVEKGKIIKSIELDAPNYHYEECSCYPDTGKVMCVCRDNWHASNRPWVSFNQNLDYQIGYICSGVFGDNPRSTDGKGNCGPVLSNGANGVKGFSYRYGNGVWIGRTKSINSRSGFEMIWDPNGWTETDSSFSMKQDIIALNDYSGYSGSFVQHPELTGMNCIRPCFWVELIRGQPKESTIWASGSSISFCGVNSETASWSWPDGADLPFAIDK

SEQ ID NO: 26273 - protein, 469 aa, Artificial Sequence
  derived and/or modified protein sequence (wt) from neuraminidase__InfluenzaA__ABI19012
MNTNQRIITIGTVCLIVGIISLLLQIGNMVSLWISHSIQTGGKNHTEMCNQNVITYVNNTWVNRTYVNISNTKIVNVQDVVSVILTGNSSLCPISGWAIYSKDNSIRIGSKGDIFVIREPFISCSHLECRTFFLTQGALLNDKHSNGTVKDRSPYRTLMSCPIGEAPSPYNSRFESVAWSASACHDGMGWLTIGISGPDNGAVAVLKYNGIITDTIKSWRNKILRTQESECVCMNGSCFTVLTDGPSNGQASYKIFKMEKGKIIKSIELDAPNYHYEECSCYPDAGKVMCVCRDNWHASNRPWVSFDQNLDYQIGYICSGVFGDNPRSNDGKGNCGPVHSNGANGVKGFSYRYGNGVWIGRTKSINSRSGFEMIWDPNGWTGTDSSFSMKQDIIALTDWSGYSGSFVRHPELTGMNCIRPCFWVELIRGQPKENTIWASGSSISFCGVNGETASWSWPDGADLPFTIDK

SEQ ID NO: 26274 - protein, 469 aa, Artificial Sequence
  derived and/or modified protein sequence (wt) from neuraminidase__InfluenzaA__EPI687791
MNPNQKIITIGSICMTIGMANLILQIGNIISIWVSHSIQIGNQSQIETCNQSVITYENNTWVNQTYVNISNTNFAARQSVVSVKLAGNSSLCPVSGWAIYSKDNSVRIGSKGDVFVIREPFISCSPLECRTFFLTQGALLNDKHSNGTIKDRSPYRTLMSCPIGEVPSPYNSRFESVAWSASACHDGINWLTIGISGPDSGAVAVLKYNGIITDTIKSWRNNILRTQESECACVNGSCFTIMTDGPSDGQASYKIFRIEKGKIIKSVEMKAPNYHYEECSCYPDSSEITCVCRDNWHGSNRPWVSFNQNLEYQMGYICSGVFGDNPRPNDKTGSCGPVSSNGANGVKGFSFKYGNGVWIGRTKSISSRKGFEMIWDPNGWTGTDNKFSIKQDIVGINEWSGYSGSFVQHPELTGLDCIRPCFWVELIRGRPEENTIWTSGSSISFCGVNSDTVGWSWPDGAELPFTIDK

SEQ ID NO: 26275 - protein, 469 aa, Artificial Sequence
  derived and/or modified protein sequence (wt) from neuraminidase__InfluenzaA__EPI841266
MNPNQKIITIGSICMTIGMANLILQIGNIISIWVSHSIQIGNQSQIETCNQSVITYENNTWVNQTYVNISNTNFAARQSVVSVKLAGNSSLCPVSGWAIYSKDNSVRIGSKGDVFVIREPFISCSPLECRTFFLTQGALLNDKHSNGTIKDRSPYRTLMSCPIGEVPSPYNSRFESVAWSASACHDGINWLTIGISGPDSGAVAVLKYNGIITDTIKSWRNNILRTQESECACVNGSCFTIMTDGPSDGQASYKIFRIEEGKIIKSVEMKAPNYHYEECSCYPDSSEITCVCRDNWHGSNRPWVSFNQNLEYQMGYICSGVFGDNPRPNDKTGSCGPVSSNGANGVKGFSFKYGNGVWIGRTKSISSRKGFEMIWDPNGWTGTDNKFSIKQDIVGINEWSGYSGSFVQHPELTGLDCIRPCFWVELIRGRPEENTIWTSGSSISFCGVNSDTVGWSWPDGAELPFTIDK

SEQ ID NO: 26276 - protein, 469 aa, Artificial Sequence
  derived and/or modified protein sequence (wt) from neuraminidase__InfluenzaA__EPI291844
MNTNQRIITIGTVCLIVGIISLLLQIGTMVSLWISHSIQTGGKNHTEMCNQNVITYVNNTWVNRTYVNISNTKIVNVQDVVSVILTGNSSLCPISGWAIYSKDNSIRIGSKGDIFVIREPFISCSHLECRTFFLTQGALLNDKHSNGTVKDRSPYRTLMSCPIGEAPSPYNSRFESVAWSASACHDGMGWLTIGISGPDNGAVAVLKYNGIITDTIKSWRNKILRTQESECVCMNGSCFTVLTDGPSNGQASYKIFKMEKGKIIKSIELDAPNYHYEECSCYPDAGKVMCVCRDNWHASNRPWVSFDQNLDYQIGYICSGVFGDNPRSNDGKGNCGPVHSNGANGVKGFSYKYGNGVWIGRTKSINSRSGFEMIWDPNGWTGTDSSFSMKQDIIALTDWSGYSGSFVQHPELTGMNCIRPCFWVELIRGQPKENTIWASGSSISFCGVNGETASWSWPDGADLPFTIDK

SEQ ID NO: 26277 - protein, 469 aa, Artificial Sequence
  derived and/or modified protein sequence (wt) from neuraminidase__InfluenzaA__EPI558120
MNTNQRIITIGTVCMIVGIISLLLQIGNIVSLWISHSIQTGWENHTEMCNQSVITYVNNTWMNRTYVNISNIKIATIQDVTSIVLAGNSSLCPVSGWAVYSKDNSIRIGSKGDIFVIREPFISCSQLECRTFFLTQGALLNDKHSNGTVKDRSPYRTLMSCPIGEAPSPYNSRFESVAWSASACHDGMGWLTIGISGPDNGAVAVLKYNGIITDTIKSWRNKILRTQESECVCINGSCFTVLTDGPSNGQASYKIFKVEKGKIIKSIELDAPNYHYEECSCYPDTGKVMCICRDNWHASNRPWVSFDQNLDYQIGYICSGVFGDNPRSNDGKGNCGPVLSNGANGVKGFSYRYGNGVWIGRTKSINSRSGFEMIWDPNGWTETDSSFSMKQDIIALNDWSGYSGSFVQHPELTGMNCIRPCFWVELIRGQPKESTIWASGSSISFCGVNSETASWSWPDGADLPFTIDK

SEQ ID NO: 26278 - protein, 469 aa, Artificial Sequence
  derived and/or modified protein sequence (wt) from neuraminidase__InfluenzaA__EPI564138
MNPNQKIITIGSVSLTISTICFFMQIAILITTVTLHFKQYEFNSPPNNQVMLCEPTIIERNITEIVYLTNTTIEKEICPKPAEYRNWSKPQCGITGFAPFSKDNSIRLSAGGDIWVTREPYVSCDPDKCYQFALGQGTTLNNVHSNNTVRDRTPYRTLLMNELGVPFHLGTKQVCIAWSSSSCHDGKAWLHVCITGDDKNATASFIYNGRLVDSVVSWSKDILRTQESECVCINGTCTVVMTDGSASGKADTKILFIEEGKIVHTSKLSGSAQHVEECSCYPRYPGVRCVCRDNWKGSNRPIVDINIKDHSIVSSYVCSGLVGDTPRKNDSSSSSHCLDPNNEEGGHGVKGWAFDDGNDVWMGRTINETSRLGYETFKVVEGWSNPKSKLQINRQVIVDRGDRSGYSGIFSVEGKSCINRCFYVELIRGRKEETEVLWTSNSIVVFCGTSGTYGTGSWPDGADLNLMPI

SEQ ID NO: 26279 - protein, 469 aa, Artificial Sequence
  derived and/or modified protein sequence (wt) from neuraminidase__InfluenzaA__ANM92825
MNPNQKIITIGSICMTIGMANLILQIGNIISIWVSHSIQIGNQSQIETCNQSVITYENNTWVNQTYVNISNTNFAAGQSVVSVKLAGNSSLCPVSGWAIYSKDNSVRIGSKGDVFVIREPFISCSPLECRTFFLTQGALLNDKHSNGTIKDRSPYRTLMSCPIGEVPSPYNSRFESVAWSASACHDGINWLTIGISGPDSGAVAVLKYNGIITDTIKSWRNNILRTQESECACVNGSCFTIMTDGPSDGQASYKIFRIEKGKIIKSVEMKAPNYHYEECSCYPDSSEITCVCRDNWHGSNRPWVSFNQNLEYQMGYICSGVFGDNPRPNDKTGNCGPVSSNGANGVKGFSFKYGNGVWIGRTKSISSRKGFEMIWDPNGWTGTDNKFSIKQDIVGINEWSGYSGSFVQHPELTGLDCIRPCFWVELIRGRPEENTIWTSGSSISFCGVNSDTVGWSWPDGAELPFTIDK

SEQ ID NO: 26280 - protein, 469 aa, Artificial Sequence
  derived and/or modified protein sequence (wt) from neuraminidase__InfluenzaA__EPI291694
MNTNQRIITIGTVCLIVGIVSLLLQIGNIVSLWISHSIQTGEKNHSEVCNQNIITYENKTWVNQTYVNISNTNIAEGQGVTSIILAGNSSLCPVSGWAIYSKDNSIRIGSKGDIFVIREPFISCSHLECRTFFLTQGALLNDRHSNGTVKDRSPYRTLMSCLTGEAPSPYNSRFESVAWSASACHDGMGWLTIGISGPDNGAVAVLKYNGIITDTIKSWRNKILRTQESECVCINGSCFTIMTDGPSNGQASYKIFKMEKGKIIKSVELDAPNYHYEECSCYPDTGKVVCVCRDNWHASNRPWVSFDQNLDYQIGYICSGVFGDNPRSNDGKGNCGPVPSNGANGVKGFSFRYGNGVWIGRTKSIISRSGFEMIWDPNGWTETDSSFSIKQDIIALTDWSGYSGSFVQHPELTGMNCIRPCFWVELIRGQPKESTIWTSGSSISFCGVDSETASWSWPDGADLPFTIDK

SEQ ID NO: 26281 - protein, 469 aa, Artificial Sequence; identical to SEQ ID NO: 17214
  derived and/or modified protein sequence (wt) from neuraminidase__InfluenzaA__EPI241027

SEQ ID NO: 26282 - protein, 469 aa, Artificial Sequence; identical to SEQ ID NO: 16738
  derived and/or modified protein sequence (wt) from neuraminidase__InfluenzaA__EPI177405

SEQ ID NO: 26283 - protein, 469 aa, Artificial Sequence; identical to SEQ ID NO: 16738
  derived and/or modified protein sequence (wt) from neuraminidase__InfluenzaA__EPI242475

SEQ ID NO: 26284 - protein, 469 aa, Artificial Sequence
  derived and/or modified protein sequence (wt) from neuraminidase__InfluenzaA__EPI590131
MNANQRIITIGTVCLIIGIISLLLQIGNMVSLWISHSIQTGGKNHTEMCNQNVITYVNNTWVNRTYVNISNTKIVNVQDVVSVILTGNSSLCSISGWAIYSKDNSIRIGSKGDIFVIREPFISCSHLECRTFFLTQGALLNDKHSNGTVKDRSPYRTLMSCPIGEAPSPYNSRFESVAWSASACHDGIGWLTIGISGPDNGAVAVLKYNGIITDTIKSWRNKILRTQESECVCMNGSCFAVLTDGPSNGQASYKIFKVKQGKIIKSIELDAPNYHYEECSCYPDAGKVMCVCRDNWHASNRPWVSFDQDLNYQIGYICSGVFGDNPRSNDGKGNCGPVHSNGANGVKGFSYRYGNGVWIGRTKSIHSRSGFEMIWDPNGWTGTDSSFSMKQDIIALTDWSGYSGSFVQHPELTGMNCIRPCFWVELIRGQPKENTIWASGSSISFCGVNGETASWSWPDGADLPFTIDK

SEQ ID NO: 26285 - protein, 469 aa, Artificial Sequence
  derived and/or modified protein sequence (wt) from neuraminidase__InfluenzaA__EPI68596
MNTNQRIITIGTVCLIVGIVSLLLQIGNIVSLWISHSIQTGEKNHSEICSQNVITYENNTWVNQTYVNISNTNIADGQGVTSIILAGNSSLCPISGWAIYSKDNSIRIGSKGDIFVIREPFISCSHLECRTFFLTQGALLNDRHSNGTVKDRSPYRTLMSCPIGEAPSPYNSRFESVAWSASACHDGMGWLTIGISGPDNGAVAVLKYNGIITDTIKSWRNKILRTQESECVCINGSCFTIMTDGPSNGQASYKIFKMEKGKIIKSVELDAPNYHYEECSCYPDTGKVVCVCRDNWHASNRPWVSFDQNLDYQIGYICSGVFGDNPRSNDGKGNCGPVLSNGANGVKGFSFRYGNGVWIGRTKSISSRSGFEMIWDPNGWTETDSSFSIKQDIIALTDWSGYSGSFVQHPELTGMNCIRPCFWVELIRGQPKESTIWTSGSSISFCGVDSETASWSWPDGADLPFTIDK

SEQ ID NO: 26286 - protein, 454 aa, Artificial Sequence; identical to SEQ ID NO: 15719
  derived and/or modified protein sequence (wt) from neuraminidase__InfluenzaA__EPI115409

SEQ ID NO: 26287 - protein, 454 aa, Artificial Sequence; identical to SEQ ID NO: 15719
  derived and/or modified protein sequence (wt) from neuraminidase__InfluenzaA__ABD77678/m1

SEQ ID NO: 26288 - protein, 469 aa, Artificial Sequence; identical to SEQ ID NO: 16728
  derived and/or modified protein sequence (wt) from neuraminidase__InfluenzaA__EPI185224

SEQ ID NO: 26289 - protein, 469 aa, Artificial Sequence; identical to SEQ ID NO: 26244
  derived and/or modified protein sequence (wt) from neuraminidase__InfluenzaA__EPI697745

SEQ ID NO: 26290 - protein, 469 aa, Artificial Sequence; identical to SEQ ID NO: 26244
  derived and/or modified protein sequence (wt) from neuraminidase__InfluenzaA__EPI768524

SEQ ID NO: 26291 - protein, 469 aa, Artificial Sequence
  derived and/or modified protein sequence (wt) from neuraminidase__InfluenzaA__EPI726929
MNPNQKIITIGSISMTIGMANLILQIGNIISIWVSHSIQIGNQSQIETCNQSVITYENNTWVNQTYVNISNTNFAAGQSVVSVKLAGNSSLCPVSGWAIYSKDNSVRIGSKGDVFVIREPFISCSPLECRTFFLTQGALLNDKHSNGTIKDRSPYRTLMSCPIGEVPSPYNSRFESVAWSASACHDGINWLTIGISGPDSGAVAVLKYNGIITDTIKSWRNNILRTQESECACVNGSCFTIMTDGPSDGQASYKIFRIEKGKIIKSVEMKAPNYHYEECSCYPDSSEITCVCRDNWHGSNRPWVSFNQNLEYQMGYICSGVFGDNPRPNDKTGSCGPVSSNGANGVKGFSFKYGNGVWIGRTKSISSRKGFEMIWDPNGWTGTDNKFSIKQDIVGINEWSGYSGSFVQHPELTGLDCIRPCFWVELIRGRPEENTIWTSGSSISFCGVNSDTVGWSWPDGAELPFTIDK

SEQ ID NO: 26292 - protein, 469 aa, Artificial Sequence; identical to SEQ ID NO: 26291
  derived and/or modified protein sequence (wt) from neuraminidase__InfluenzaA__EPI813816

SEQ ID NO: 26293 - protein, 469 aa, Artificial Sequence
  derived and/or modified protein sequence (wt) from neuraminidase__InfluenzaA__EPI466627
MNPNQKIITIGSVCMTIGMANLILQIGNIISIWVSHSIQLGNQSQIETCNQSVITYENNTWVNQTYVNISNTNFAAGQSVVSVKLAGNSSLCPVSGWAIYSKDNSVRIGSKGDVFVIREPFISCSPLECRTFFLTQGALLNDKHSNGTIKDRSPYRTLMSCPIGEVPSPYNSRFESVAWSASACHDGINWLTIGISGPDSGAVAVLKYNGIITDTIKSWRNNILRTQESECACVNGSCFTIMTDGPSDGQASYKIFRIEKGKIVKSVEMNAPNYHYEECSCYPDSSEITCVCRDNWHGSNRPWVSFNQNLEYQIGYICSGVFGDNPRPNDKTGSCGPVSSNGANGVKGFSFKYGNGVWIGRTKSISSRKGFEMIWDPNGWTGTDNNFSIKQDIVGINEWSGYSGSFVQHPELTGLDCIRPCFWVELIRGRPEENTIWTSGSSISFCGVNSDTVGWSWPDGAELPFTIDK

SEQ ID NO: 26294 - protein, 469 aa, Artificial Sequence
  derived and/or modified protein sequence (wt) from neuraminidase__InfluenzaA__EPI541965
MNPNQKIITIGSVCMTIGMANLILQIGNIISIWVSHSIQLGNQSQIETCNQSVITYENNTWVNQTYVNISNTNFAAGQPVVSVKLAGNSSLCPVSGWAIYSKDNSVRIGSKGDVFVIREPFISCSPLECRTFFLAQGALLNDKHSNGTIKDRSPYRTLMSCPIGEVPSPYNSRFESVAWSASACHDGINWLTIGISGPDSGAVAVLKYNGIITDTIKSWRNNILRTQESECACVNGSCFTIMTDGPSDGQASYKIFRIEKGKIVKSVEMNAPNYHYEECSCYPDSSEITCVCRDNWHGSNRPWVSFNQNLEYQIGYICSGVFGDNPRPNDKTGSCGPVSSNGANGVKGFSFKYGNGVWIGRTKSISSRKGFEMIWDPNGWTGTDNNFSIKQDIVGINEWSGYSGSFVQHPELTGLDCIRPCFWVELIRGRPEENTIWTSGSSISFCGVNSDTVGWSWPDGAELPFTIDK

SEQ ID NO: 26295 - protein, 469 aa, Artificial Sequence
  derived and/or modified protein sequence (wt) from neuraminidase__InfluenzaA__EPI652004
MNPNQKIITIGSVCMTIGMANLILQIGNIISIWVSHSIQIGNQSQIETCNQSVITYENNTWVNQTYVNISNTNFAAGQSVVSVKLAGNSSLCPVSGWAIYSKDNSVRIGSKGDVFVIREPFISCSPLECRTFFLAQGALLNDKHSNGTIKDRSPYRTLMSCPIGEVPSPYNSRFESVAWSASACHDGINWLTIGISGPDSGAVAVLKYNGIITDTIKSWRNNILRTQESECACVNGSCFTIMTDGPSDGQASYKIFRIEKGKIVKSVEMNAPNYHYEECSCYPDSSEITCVCRDNWHGSNRPWVSFNQNLEYQIGYICSGVFGDNPRPNDKTGSCGPVSSNGANGVKGFSFKYGNGVWIGRTKSISSRKGFEMIWDPNGWTGTDNNFSIKQDIVGINEWSGYSGSFVQHPELTGLDCIRPCFWVELIRGRPEENTIWTSGSSISFCGVNSDTVGWSWPDGAELPFTIDK

SEQ ID NO: 26296 - protein, 469 aa, Artificial Sequence
  derived and/or modified protein sequence (wt) from neuraminidase__InfluenzaA__EPI62526
MNTNQRIITIGTVCLIVGIVSLLLQIGNIVSLWISHSIQTGEKNHPEICSQNVITYENNTWVNQTYVNISNTNIVDGQGVTSIILAGNSSLCPISGWAIYSKDNSIRIGSKGDIFVIREPFISCSHLECRTFFLTQGALLNDRHSNGTVKDRSPYRTLMSCPIGEAPSPYNSRFESVAWSASACHDGMGWLTIGISGPDNGAVAVLKYNGIITDTIKSWRNKILRTQESECVCINGSCFTIMTDGPSNGQASYKIFKMEKGKIIKSVELDAPNYHYEECSCYPDTGKVVCVCRDNWHASNRPWVSFDQNLDYQIGYICSGVFGDNPRSNDGKGNCGPVLSNGANGVKGFSFRYGNGVWIGRTKSISSRSGFEMIWDPNGWTETDSSFSIKQDIIALTDWSGYSGSFVQHPELTGMNCIRPCFWVELIRGQPKESTIWTSGSSISFCGVDSETASWSWPDGADLPFTIDK

SEQ ID NO: 26297 - protein, 469 aa, Artificial Sequence; identical to SEQ ID NO: 16728
  derived and/or modified protein sequence (wt) from neuraminidase__InfluenzaA__EPI189183

SEQ ID NO: 26298 - protein, 469 aa, Artificial Sequence; identical to SEQ ID NO: 16728
  derived and/or modified protein sequence (wt) from neuraminidase__InfluenzaA__EPI180576

SEQ ID NO: 26299 - protein, 469 aa, Artificial Sequence
  derived and/or modified protein sequence (wt) from neuraminidase__InfluenzaA__EPI346918
MNTNQRIITIGTVCMIVGIISLLLQIGNIVSLWISHSIQTGWENHTEMCNQNVITYVNNTWVNRTYVNVSNTNIATIQDVTSIVLAGNSSLCPVSGWAIYSKDNSIRIGSKGDIFVIREPFISCSQLECRTFFLTQGALLNDKHSNGTVKDRSPYRTLMSCPIGEAPSPYNSRFESVAWSASACHDGMGWLTIGISGPDNGAVAVLKYNGIITDTIKSWRNKILRTQESECVCMNGSCFTVLTDGPSNGQASYKIFKVEKGRIIKSIELDAPNYHYEECSCYPDTGKVMCVCRDNWHASNRPWVSFNQNLDYQIGYICSGVFGDNPRSNDGKGNCGPVLSNGANGVKGFSYRYGNGVWIGRTKSINSRRGFEIIWDPNGWTETDSSFSMKQDIIALTDWSGYSGSFVQHPELTGMNCIRPCFWVELIRGQPKESTIWASGSSISFCGVNSETASWSWPDGADLPFTIDK

SEQ ID NO: 26300 - protein, 469 aa, Artificial Sequence; identical to SEQ ID NO: 17316
  derived and/or modified protein sequence (wt) from neuraminidase__InfluenzaA__EPI240976

SEQ ID NO: 26301 - protein, 469 aa, Artificial Sequence; identical to SEQ ID NO: 14095
  derived and/or modified protein sequence (wt) from neuraminidase__InfluenzaA__EPI3165

SEQ ID NO: 26302 - protein, 469 aa, Artificial Sequence; identical to SEQ ID NO: 26021
  derived and/or modified protein sequence (wt) from neuraminidase__InfluenzaA__EPI957

SEQ ID NO: 26303 - protein, 469 aa, Artificial Sequence; identical to SEQ ID NO: 22146
  derived and/or modified protein sequence (wt) from neuraminidase__InfluenzaA__EPI507593

SEQ ID NO: 26304 - protein, 469 aa, Artificial Sequence; identical to SEQ ID NO: 22146
  derived and/or modified protein sequence (wt) from neuraminidase__InfluenzaA__EPI461954

SEQ ID NO: 26305 - protein, 469 aa, Artificial Sequence; identical to SEQ ID NO: 22146
  derived and/or modified protein sequence (wt) from neuraminidase__InfluenzaA__EPI461954

SEQ ID NO: 26306 - protein, 469 aa, Artificial Sequence
  derived and/or modified protein sequence (wt) from neuraminidase__InfluenzaA__EPI668104
MNPNQKIITIGSVSLTISTICFFMQIAILITTVTLHFKQYEFNSPPNNQVMLCEPTIIERNITEIVYLTNTTIEKEICPKPAEYRNWSKPQCGITGFAPFSKDNSIRLSAGGDIWVTREPYVSCDPDKCYQFALGQGTTLNNVHSNNTVRDRTPYRTLLMNELGVPFYLGTKQVCIAWSSSSCHDGKAWLHVCITGDDKNATASFIYNGRLVDSVVSWSKDILRTQESECVCINGTCTVVMTDGNASGKADTKILFIEEGKIVHTSKLSGSAQHVEECSCYPRYPGVRCVCRDNWKGSNRPIVDINIKDHSIVSSYVCSGLVGDTPRKNDSSSSSHCLDPNNEEGGHGVKGWAFDDGNDVWMGRTINETSRLGYETFKVVEGWSNPKSKLQINRQVIVDRGDRSGYSGIFSVEGKSCINRCFYVELIRGRKEETEVLWTSNSIVVFCGTSGTYGTGSWPDGADLNLMPI

SEQ ID NO: 26307 - protein, 469 aa, Artificial Sequence
  derived and/or modified protein sequence (wt) from neuraminidase__InfluenzaA__EPI578445
MNPNQKIITIGSVSLTISTICFFMQIAILITTVTLHFKQYEFNSPPNNQVMLCEPTIIERNITEIVYLTNTTIEKEICPKPAEYRNWSKPQCGITGFAPFSKDNSIRLSAGGDIWVTREPYVSCDPDKCYQFALGQGTTLNNVHSNNTVRDRTPYRTLLMNELGVPFHLGTKQVCIAWSSSSCHDGKAWLHVCITGDDKNATASFIYNGRLVDSVVSWSKDILRTQESECVCINGTCTVVMTDGNASGKADTKILFIEEGKIVHTSKLSGSAQHVEECSCYPRYPGVRCVCRDNWKGSNRPIVDINIKDHSIVSSYVCSGLVGDTPRKNDSSSSSHCLDPNNEEGGHGVKGWAFDDGNDVWMGRTINETSRLGYETFKVVEGWSNPKSKLQINRQVIVDRGDRSGYSGIFSVEGKSCINRCFYVELIRGRKEETEVLWTSNSIVVFCGTSGTYGTGSWPDGADLNLMPI

SEQ ID NO: 26308 - protein, 469 aa, Artificial Sequence; identical to SEQ ID NO: 26307
  derived and/or modified protein sequence (wt) from neuraminidase__InfluenzaA__EPI551883

SEQ ID NO: 26309 - protein, 469 aa, Artificial Sequence
  derived and/or modified protein sequence (wt) from neuraminidase__InfluenzaA__EPI344388
MNPNQKIITIGSVSLIIATICFLMQIAILVTTVTLHFKQHDYNSPPNNQAMLCEPTIIERNTTEIVYLTNTTIEKEICPKLAEYRNWSKPQCNITGFAPFSKDNSIRLSAGGDIWVTREPYVSCDPDKCYQFALGQGTTLNNGHSNNTVHDRTPYRTLLMNELGVPFHLGTRQVCMAWSSSSCHDGKAWLHVCITGNDNNATASFIYNGRLVDSIGSWSKNILRTQESECVCINGTCTVVMTDGSASGKADTKILFVEEGKIVHISTLSGSAQHVEECSCYPRFPGVRCVCRDNWKGSNRPIVDINVKNYSIVSSYVCSGLVGDTPRKSDSVSSSYCLDPNNEKGGHGVKGWAFDDGNDVWMGRTINETLRLGYETFKVIEGWSKANSKLQTNRQVIVEKGDRSGYSGIFSVEGKSCINRCFYVELIRGRKEETKVWWTSNSIVVFCGTSGTYGTGSWPDGADINLMPI

SEQ ID NO: 26310 - protein, 469 aa, Artificial Sequence; identical to SEQ ID NO: 26309
  derived and/or modified protein sequence (wt) from neuraminidase__InfluenzaA__EPI347601

SEQ ID NO: 26311 - protein, 469 aa, Artificial Sequence
  derived and/or modified protein sequence (wt) from neuraminidase__InfluenzaA__EPI642512
MNPNQKIITIGSISLIIATICFLMQIAILVITVTLHFKQHNCDSSPNNQVMFCEPTIIERNKTEIVYLINTTVEKEICPKPTEYRNWSKPQCNITGFAPFSKDNSIRLSAGGDIWVTREPYVSCDPDKCYQFALGQGTTLNNGHSNDTVHDRTPYRTLLMNELGVPFHLGTRQVCIAWSSSSCHDGKAWLHVCITGDDGNATASFIYNGRLVDSIGSWSKNILRTQESECVCINGTCTVVMTDGSASGKADTKILFIEEGKIIHISTLSGSAQHVEECSCYPRYPGVRCVCRDNWKGSNRPIVDINVKDYSIVSSYVCSGLVGDTPRKNDSFSSSHCLDPNNEEGGHGVKGWAFDDGNDVWMGRTISEKSRLGYETFKVVKGWSEPNSKLQTNRQVIVGRGNRSGYSGIFSIEGKNCINRCFYVELIRGRKEETKVWWTSNSIVVFCGTSGTYGTGSWPDGADINLMPI

SEQ ID NO: 26312 - protein, 469 aa, Artificial Sequence
  derived and/or modified protein sequence (wt) from neuraminidase__InfluenzaA__AIE52540
MNPNQKIITIGSVSLIIATICFLMQIAILVTTVTLHFKQHDYNSPPNNQVMLCEPTIIERNTTEIVYLTNITIEKEICPKLAEYRNWSKPQCNITGFAPFSKDNSIRLSAGGDIWVTREPYVSCDPDKCYQFALGQGTTLNNRHSNNTVHDRSPYRTLLMNELGVPFHLGTRQVCIAWSSSSCHDGKAWLHVCITGDDNNATASFIYNGRLVDSIGSWSKNILRTQESECVCINGTCTVVMTDGSASGKADTKILFIEEGKIVHISTLSGSAQHVEECSCYPRYPGVRCVCRDNWKGSNRPIVDINMKDYSIASSYVCSGLVGDTPRKNDSFSSSHCLDPNNEKGGHGVKGWAFDDGNDVWMGRTISEEFRLGYETFKVIKGWSNPNSKLQTNRQVIVEKGNRSGYSGVFSIEDKSCINRCFYVELIRGRKEETKVWWTSNSIVVFCGTSGTYGTGSWPDGADINLMPI

SEQ ID NO: 26313 - protein, 469 aa, Artificial Sequence; identical to SEQ ID NO: 26312
  derived and/or modified protein sequence (wt) from neuraminidase__InfluenzaA__EPI465399

SEQ ID NO: 26314 - protein, 469 aa, Artificial Sequence; identical to SEQ ID NO: 26312
  derived and/or modified protein sequence (wt) from neuraminidase__InfluenzaA__EPI328899

SEQ ID NO: 26315 - protein, 469 aa, Artificial Sequence; identical to SEQ ID NO: 26312
  derived and/or modified protein sequence (wt) from neuraminidase__InfluenzaA__EPI328901

SEQ ID NO: 26316 - protein, 469 aa, Artificial Sequence
  derived and/or modified protein sequence (wt) from neuraminidase__InfluenzaA__EPI574645
MNPNQKIITIGSVSLTISTICFFMQIAILITTVTLHFKQYEFNSPPNNQVVLCEPTIIERNITEIVYLTNTTIEKEICPKPAEYRNWSKPQCGITGFAPFSKDNSIRLSAGGDIWVTREPYVSCDPDKCYQFALGQGTTLNNGHSNNTVRDRTPYRTLLMNELGVPFHLGTKQVCIAWSSSSCHDGKAWLHVCITGDDKNATASFIYNGRLVDSVVSWSKDILRTQESECVCINGTCTVVMTDGSASGKADTKILFIEEGKIIHTSTLSGSAQHVEECSCYPRYPGVRCVCRDNWKGSNRPIVDINIKDHSIVSSYVCSGLVGDTPRKNDSSSSSHCLDPNNEEGGHGVKGWAFDDGNDVWMGRTINETSRLGYETFKVIEGWSNPKSKLQINRQVIVDRGDRSGYSGIFSVEGKSCINRCFYVELIRGRKEENEVLWTSNSIVVFCGTSGTYGTGSWPDGADLNLMPI

SEQ ID NO: 26317 - protein, 469 aa, Artificial Sequence
  derived and/or modified protein sequence (wt) from neuraminidase__InfluenzaA__EPI563214
MNPNQKIITIGSVSLTISTICFFMQIAILITTVTLHFKQYEFNSPPNNQVMLCEPTIIERNITEIVYLTNTTIEKEICPKPAEYRNWSKPQCSITGFAPFSKDNSIRLSAGGDIWVTREPYVSCDPDKCYQFALGQGTTLNNVHSNNTVRDRTPYRTLLMNELGVPFHLGTKQVCIAWSSSSCHDGKAWLHVCITGDDKNATASFIYNGRLVDSVVSWSKDILRTQESECVCINGTCTVVMTDGSASGKADTKILFIEEGKIVYTSKLSGSAQHVEECSCYPRYPGVRCVCRDNWKGSNRPIVDINIKDHSIVSSYVCSGLVGDTPRKNDSSSSSHCLDPNNEEGGHGVKGWAFDDGNDVWMGRTINETSRLGYETFKVVEGWSNPKSKLQINRQVIVDRGDRSGYSGIFSVEGKSCINRCFYVELIRGRKEETEVLWTSNSIVVFCGTSGTYGTGSWPDGADLNLMPI

SEQ ID NO: 26318 - protein, 469 aa, Artificial Sequence; identical to SEQ ID NO: 26317
  derived and/or modified protein sequence (wt) from neuraminidase__InfluenzaA__EPI553998

SEQ ID NO: 26319 - protein, 469 aa, Artificial Sequence
  derived and/or modified protein sequence (wt) from neuraminidase__InfluenzaA__EPI551568
MNPNQKIITIGSVSLTISTICFFMQIAILITTVTLHFKQYEFNSPPNNQVMLCEPTIIERNITEIVYLTNTTIEKEICPKPAEYRNWSKPQCSITGFAPFSKDNSIRLSAGGDIWVTREPYVSCDPDKCYQFALGQGTTLNNVHSNNIVRDRTPYRTLLMNELGVPFHLGTKQVCIAWSSSSCHDGKAWLHVCITGDDKNATASFIYNGRLVDSVVSWSKDILRTQESECVCINGTCTVVMTDGSASGKADTKILFIEEGKIVYTSKLSGSAQHVEECSCYPRYPGVRCVCRDNWKGSNRPIVDINIKDHSIVSSYVCSGLVGDTPRKNDSSSSSHCLDPNNEEGGHGVKGWAFDDGNDVWMGRTINETSRLGYETFKVVEGWSNPKSKLQINRQVIVDRGDRSGYSGIFSVEGKSCINRCFYVELIRGRKEETEVLWTSNSIVVFCGTSGTYGTGSWPDGADLNLMPI

SEQ ID NO: 26320 - protein, 469 aa, Artificial Sequence
  derived and/or modified protein sequence (wt) from neuraminidase__InfluenzaA__EPI629737
MNPNQKIIAIGSVSLTISTICFFMQIAILITTVTLHFKQYEFNSPPNNQVMLCEPTIIERNITEIVYLTNTTIEKEICPKPAEYRNWSKPQCSITGFAPFSKDNSIRLSAGGDIWVTREPYVSCDPDKCYQFALGQGTTLNNVHSNNTVRDRTPYRTLLMNELGVPFHLGTKQVCIAWSSSSCHDGKAWLHVCITGDDKNATASFIYNGRLVDSVVSWSKDILRTQESECVCINGTCTVVMTDGSASGKADTKILFIEEGKIVYTSKLSGSAQHVEECSCYPRYPGVRCVCRDNWKGSNRPIVDINIKDHSIVSSYVCSGLVGDTPRKNDSSSSSHCLDPNNEEGGHGVKGWAFDDGNDVWMGRTINETSRLGYETFKVVEGWSNPKSKLQINRQVIVDRGDRSGYSGIFSVEGKSCINRCFYVELIRGRKEETEVLWTSNSIVVFCGTSGTYGTGSWPDGADLNLMPI

SEQ ID NO: 26321 - protein, 469 aa, Artificial Sequence; identical to SEQ ID NO: 26317
  derived and/or modified protein sequence (wt) from neuraminidase__InfluenzaA__EPI631886

SEQ ID NO: 26322 - protein, 469 aa, Artificial Sequence; identical to SEQ ID NO: 26317
  derived and/or modified protein sequence (wt) from neuraminidase__InfluenzaA__EPI577025

SEQ ID NO: 26323 - protein, 469 aa, Artificial Sequence; identical to SEQ ID NO: 23871
  derived and/or modified protein sequence (wt) from neuraminidase__InfluenzaA__EPI404926

SEQ ID NO: 26324 - protein, 469 aa, Artificial Sequence; identical to SEQ ID NO: 23871
  derived and/or modified protein sequence (wt) from neuraminidase__InfluenzaA__EPI492687

SEQ ID NO: 26325 - protein, 469 aa, Artificial Sequence
  derived and/or modified protein sequence (wt) from neuraminidase__InfluenzaA__EPI530648
MNPNQKIITIGSVSLTISTICFFMQIAILITTVTLHFKQYEFNSPPNNQVMLCEPTIIERNITEIVYLTNTTIEKEICPKPAEYRNWSKPQCGITGFAPFSKDNSIRLSAGGDIWVTREPYVSCDPDKCYQFALGQGTTLNNVHSNNTVRDRTPYRTLLMNELGVPFHLGTKQVCIAWSSSSCHDGKAWLHVCITGDDKNATASFIYNGRLVDSVVSWSKDILRTQESECVCINGTCTVVMTDGSASGKADTKILFIEEGKIVHTSTLSGSAQHVEECSCYPRYPGVRCVCRDNWKGSNRPIVDINIKDHSIVSSYVCSGLVGDTPRKNDSSSSSHCLDPNNEEGGHGVKGWAFDDGNDVWMGRTINETSRLGYETFKVIEGWSNPKSKLQTNRQVIVDRGDRSGYSGIFSVEGKSCINRCFYVELIRGRKEETEVLWTSNSIVVFCGTSGTYGTGSWPDGADLNLMPI

SEQ ID NO: 26326 - protein, 469 aa, Artificial Sequence; identical to SEQ ID NO: 26307
  derived and/or modified protein sequence (wt) from neuraminidase__InfluenzaA__EPI684314

SEQ ID NO: 26327 - protein, 469 aa, Artificial Sequence
  derived and/or modified protein sequence (wt) from neuraminidase__InfluenzaA__EPI614459
MNPNQKIITIGSVSLTISTICFFMQIAILITTVTLHFKQYKFNSPPNNQVMLCEPTIIERNITEIVYLTNTTIEKEICPKPAEYRNWSKPQCGITGFAPFSKDNSIRLSAGGDIWVTREPYVSCDPDKCYQFALGQGTTLNNVHSNNTVRDRTPYRTLLMNELGVPFHLGTKQVCIAWSSSSCHDGKAWLHVCITGDDKNATASFIYNGRLVDSVVSWSKDILRTQESECVCINGTCTVVMTDGSASGKADTKILFIEEGKIVHTSTLSGSAQHVEECSCYPRYPGVRCVCRDNWKGSNRPIVDINIKDHSIVSSYVCSGLVGDTPRKNDSSSSSHCLDPNNEEGGHGVKGWAFDDGNDVWMGRTINETSRLGYETFKVIEGWSNPKSKLQTNRQVIVDRGDRSGYSGIFSVEGKSCINRCFYVELIRGRKEETEVLWTSNSIVVFCGTSGTYGTGSWPDGADLNLMPI

SEQ ID NO: 26328 - protein, 469 aa, Artificial Sequence; identical to SEQ ID NO: 26327
  derived and/or modified protein sequence (wt) from neuraminidase__InfluenzaA__EPI541466

SEQ ID NO: 26329 - protein, 469 aa, Artificial Sequence; identical to SEQ ID NO: 26327
  derived and/or modified protein sequence (wt) from neuraminidase__InfluenzaA__EPI696968

SEQ ID NO: 26330 - protein, 469 aa, Artificial Sequence; identical to SEQ ID NO: 26327
  derived and/or modified protein sequence (wt) from neuraminidase__InfluenzaA__EPI674598

SEQ ID NO: 26331 - protein, 469 aa, Artificial Sequence; identical to SEQ ID NO: 26325
  derived and/or modified protein sequence (wt) from neuraminidase__InfluenzaA__EPI530678

SEQ ID NO: 26332 - protein, 469 aa, Artificial Sequence
  derived and/or modified protein sequence (wt) from neuraminidase__InfluenzaA__EPI530680
MNPNQKIITIGSVSLTISTICFFMQIAILITTVTLHFKQYEFNSPPNNQVMLCEPTIIERNITEIVYLTNTTIEKEICPKPAEYRNWSKPQCGITGFAPFSKDNSIRLSAGGDIWVTREPYVSCDPDKCYQFALGQGTTLNNVHSNNTVRDRTPYRTLLMNELGVPFHLGTKQVCIAWSSSSCHDGKAWLHVCITGDDKNATASFIYNGRLVDSVVSWSKDILRTQESECVCINGTCTVVMTDGSASGKADTKILFIEEGKIVHTSTLSGSAQHVEECSCYPRYPGVRCVCRDNWKGSNRPIVDINIKDHSIVSSYVCSGLVGDTPRKNDSSSSSHCLDPNNEEGGHGVKGWAFDDGNGVWMGRTINETSRLGYETFKVIEGWSNPKSKLQTNRQVIVDRGDRSGYSGIFSVEGKSCINRCFYVELIRGRKEETEVLWTSNSIVVFCGTSGTYGTGSWPDGADLNLMPI

SEQ ID NO: 26333 - protein, 469 aa, Artificial Sequence; identical to SEQ ID NO: 14038
  derived and/or modified protein sequence (wt) from neuraminidase__InfluenzaA__EPI7603

SEQ ID NO: 26334 - protein, 469 aa, Artificial Sequence; identical to SEQ ID NO: 26325
  derived and/or modified protein sequence (wt) from neuraminidase__InfluenzaA__EPI814527

SEQ ID NO: 26335 - protein, 469 aa, Artificial Sequence; identical to SEQ ID NO: 26325
  derived and/or modified protein sequence (wt) from neuraminidase__InfluenzaA__EPI674737

SEQ ID NO: 26336 - protein, 469 aa, Artificial Sequence; identical to SEQ ID NO: 26325
  derived and/or modified protein sequence (wt) from neuraminidase__InfluenzaA__EPI614443

SEQ ID NO: 26337 - protein, 469 aa, Artificial Sequence; identical to SEQ ID NO: 26325
  derived and/or modified protein sequence (wt) from neuraminidase__InfluenzaA__EPI551812

SEQ ID NO: 26338 - protein, 469 aa, Artificial Sequence; identical to SEQ ID NO: 26325
  derived and/or modified protein sequence (wt) from neuraminidase__InfluenzaA__EPI696961

SEQ ID NO: 26339 - protein, 469 aa, Artificial Sequence; identical to SEQ ID NO: 26325
  derived and/or modified protein sequence (wt) from neuraminidase__InfluenzaA__EPI740789

SEQ ID NO: 26340 - protein, 469 aa, Artificial Sequence
  derived and/or modified protein sequence (wt) from neuraminidase__InfluenzaA__EPI377498
MNPNQKIITIGSVSLTISTICFFMQIAILITTVTLHFKQYEFNSPPNNQVMLCEPTIIERNITEIVYLTNTTIEKEICPKPAEYRNWSKPQCGITGFAPFSKDNSIRLSAGGDIWVTREPYVSCDPDKCYQFALGQGTTLNNVHSNNTVHDRTPYRTLLMNELGVPFHLGTKQVCIAWSSSSCHDGKAWLHVCITGDDKNATASFIYNGRLVDSVVSWSKEILRTQESECVCINGTCTVVMTDGSASGKADTKILFIEEGKIVHTSTLSGSAQHVEECSCYPRYPGVRCVCRDNWKGSNRPIVDINIKDHSIVSSYVCSGLVGDTPRKNDSSSSSHCLDPNNEEGGHGVKGWAFDDGNDVWMGRTINETSRLGYETFKVIEGWSNPKSKLQINRQVIVDRGDRSGYSGIFSVEGKSCINRCFYVELIRGRKEETEVLWTSNSIVVFCGTSGTYGTGSWPDGADLNLMPI

SEQ ID NO: 26341 - protein, 469 aa, Artificial Sequence; identical to SEQ ID NO: 26340
  derived and/or modified protein sequence (wt) from neuraminidase__InfluenzaA__EPI377498

SEQ ID NO: 26342 - protein, 469 aa, Artificial Sequence; identical to SEQ ID NO: 26340
  derived and/or modified protein sequence (wt) from neuraminidase__InfluenzaA__EPI391246

SEQ ID NO: 26343 - protein, 469 aa, Artificial Sequence; identical to SEQ ID NO: 26340
  derived and/or modified protein sequence (wt) from neuraminidase__InfluenzaA__EPI407122

SEQ ID NO: 26344 - protein, 469 aa, Artificial Sequence; identical to SEQ ID NO: 26340
  derived and/or modified protein sequence (wt) from neuraminidase__InfluenzaA__EPI407125

SEQ ID NO: 26345 - protein, 469 aa, Artificial Sequence; identical to SEQ ID NO: 26307
  derived and/or modified protein sequence (wt) from neuraminidase__InfluenzaA__EPI562038

SEQ ID NO: 26346 - protein, 469 aa, Artificial Sequence; identical to SEQ ID NO: 26307
  derived and/or modified protein sequence (wt) from neuraminidase__InfluenzaA__EPI562038

SEQ ID NO: 26347 - protein, 469 aa, Artificial Sequence; identical to SEQ ID NO: 22617
  derived and/or modified protein sequence (wt) from neuraminidase__InfluenzaA__EU716525

SEQ ID NO: 26348 - protein, 449 aa, Artificial Sequence
  derived and/or modified protein sequence (wt) from neuraminidase__InfluenzaA__EPI232422
MNPNQKIITIGSICMVIGIVSLMLQIGNMISIWVSHSIQTGNQRQAEPISNTKFLTEKAVASVTLAGNSSLCPISGWAVYSKDNSIRIGSRGDVFVIREPFISCSHLECRTFFLTQGALLNDKHSNGTVKDRSPHRTLMSCPVGEAPSPYNSRFESVAWSASACHDGTSWLTIGISGPDNGAVAVLKYNGIITDTIKSWRNNILRTQESECACVNGSCFTVMTDGPSSGQASYKIFKMEKGKVVKSVELDAPNYHYEECSCYPDAGEITCVCRDNWHGSNRPWVSFNQNLEYQIGYICSGVFGDNPRPNDGTGSCGPVSPNGAYGVKGFSFKYGNGVWIGRTKSTNSRSGFEMIWDPNGWTGTDSSFSVKQDIVAITDWSGYSGSFVQHPELTGLDCIRPCFWVELIRGRPKESTIWTSGSSISFCGVNSDTVSWSWPDGAELPFTIDK

SEQ ID NO: 26349 - protein, 449 aa, Artificial Sequence; identical to SEQ ID NO: 26184
  derived and/or modified protein sequence (wt) from neuraminidase__InfluenzaA__EPI227593

SEQ ID NO: 26350 - protein, 449 aa, Artificial Sequence
  derived and/or modified protein sequence (wt) from neuraminidase__InfluenzaA__EPI435658
MNPNQKIVTIGSICMVIGIISLMLQIGNIISIWVSHSIQTGNQHQTEPIRNTNFLTENAVASVTLAGNSSLCPIRGWAVHSKDNSIRIGSKGDVFVIREPFISCSHLECRTFFLTQGALLNDKHSNGTVKDRSPHRTLMSCPIGEAPSPYNSRFESVAWSASACHDGTSWLIIGISGPDNGAVAVLKYNGIITDTIKSWRNNILRTQESECACVNGSCFTVMTDGPSNGQASYKIFKIEKGKVVKSVELNAPNYHYEECSCYPDAGEIICVCRDNWHGSNRPWVSFNQNLEYQIGYICSGVFGDNPRPNDGTGSCGPVSPNGAYGVKGFSFKYGNGVWIGRTKSTHSRSGFEMIWDPNGWTGTDSEFSMKQDIVAITDWSGYSGSFVQHPELTGLDCIRPCFWVELIRGRPKESTIWTSGSSISFCGVNSDTVSWSWPDGAELPFTIDK

SEQ ID NO: 26351 - protein, 449 aa, Artificial Sequence; identical to SEQ ID NO: 26350
  derived and/or modified protein sequence (wt) from neuraminidase__InfluenzaA__EPI492513

SEQ ID NO: 26352 - protein, 449 aa, Artificial Sequence; identical to SEQ ID NO: 19697
  derived and/or modified protein sequence (wt) from neuraminidase__InfluenzaA__EPI165066

SEQ ID NO: 26353 - protein, 449 aa, Artificial Sequence
  derived and/or modified protein sequence (wt) from neuraminidase__InfluenzaA__EPI531308
MNPNQKIITIGSICMVTGVVSLMLQVGNMISIWISHSIHTGNQHQAEPISNTNFHTEKAVVSAKLAGNSSLCPINGWAVYSKDNSIRIGSKGDVFVIREPFISCSHLECRTFFLTQGALLNDKHSNGTAKDRSPHRTLMSCPVGEAPSPYNSRFESVAWSASACHDGTSWLTIGISGPDNGAVAVLKYNGIITDTIKSWRNNVLRTQESECACVNGYCFTVMTDGPSNGQASHKIFKMEKGKVIKSVELDAPNYHYEECSCYPDAGEITCVCRDNWHGSNRPWISFNQNLEYQIGYICSGVFGDNPRPNDGKGSCGPVSSNGAYGVKGFSFKYGNGVWIGRTKSTNSRSGFEMIWDPNGWTETDSSFSVKQDIVAITDWSGYSGSFVQHPELTGLDCIRPCFWVELIRGRPKEGTIWTSGSSISFCGVSGDTVGWSWPDGAELPFTIDK

SEQ ID NO: 26354 - protein, 449 aa, Artificial Sequence
  derived and/or modified protein sequence (wt) from neuraminidase__InfluenzaA__EPI433308
MNPNQKIITIGSICMVIGIVSLMLQIGNLISIWVSHSIQRGNLNQVEPISNTSFPTEKAVASVTLAGNSSLCPIRGWAVHSKDNSIRIGSKGDVFVIREPFISCSHLECRTFFLTQGALLNDKHSNGTVKDRSPHRTLMSCPVGEAPSPYNSRFESVAWSASACHDGTSWLTIGISGPDNGAVAVVKYNGIITDTIKSWGNNILRTQESECACVNGSCFTVMTDGPSNGQASYKIFKMEKGKVIKSVELDAPNYHYEECSCYPDAGEITCVCRDNWHGSNRPWVSFNQNLEYQIGYICSGVFGDNPRPNDGTGSCGPVSPNGAYGVKGFSFKYGNGVWIGRTKSPNSRSGFEMIWDPNGWSETDSSFSVKQDILAVTDWSGYSGSFVQHPELTGLDCIRPCFWVELIRGRPEESTIWTSGSSISFCGVNSDTVSWSWPDGAELPFTIDK

SEQ ID NO: 26355 - protein, 449 aa, Artificial Sequence
  derived and/or modified protein sequence (wt) from neuraminidase__InfluenzaA__EPI114974
MNPNQKIITIGSICMVIGIVSLMLQIGNMISIWVSHSIQTGNQRQAEPISNTKFLTEKAVASVTLAGNSSLCPISGWAVYSKDNSIRIGSRGDVFVIREPFISCSHLECRTFFLTQGALLNDKHSNGTVKDRSPHRTLMSCPVGEAPSPYNSRFESVAWSASACHDGTSWLTIGISGPDNGAVAVLKYNGIITDTIKSWRNNILRTQESECACVNGSCFTVMTDGPSNGQASYKIFKMEKGKVVKSIELDAPNYHYEECSCYPDAGEITCVCRDNWHGSNRPWVSFNQNLEYQIGYICSGVFGDNPRPNDGTGSCGPVSPNGAYGVKGFSFKYGNGVWIGRTKSTNSRSGFEMIWDPNGWTGTDSSFSVKQDIVAITDWSGYSGSFVQHPELTGLDCIRPCFWVELIRGRPKESTIWTSGSSISFCGVNSDTVSWSWPDGAELPFTIDK

SEQ ID NO: 26356 - protein, 449 aa, Artificial Sequence
  derived and/or modified protein sequence (wt) from neuraminidase__InfluenzaA__EPI622495
MNPNQKITTIGSICMVIGIVSLMLQIGNMVSIWVSHSIQTRNQRQAEPISNTRSLTEKAVASVTLAGNSSLCPISGWAVYSKDNSIRIGSKGDVFVIREPFISCSHLECRTFFLTQGALLNDKHSNGTVKDRSPHRTLMSCPVGEAPSPYNSRFESVAWSASACHDGTSWLTIGISGPDNGAVAVVKYNGIITDTIKSWRNNILRTQESECVCVNGSCFTVMTDGPSNKQASYKIFKMEKGKVVKSIELDAPNYHYEECSCYPDAGEITCVCRDNWHGSNRPWLSFNQNLEYQIGYICSGVFGDNPRPNDGTGSCGPVSSNGAYGVKGFSFKYGNGVWIGRTKSTNSRSGFEMIWDPNGWTGTDSSFSMKQDIVAITDWSGYSGSFVQHPELTGLDCIRPCFWVELVRGRPKEGTIWTSGSSISFCGVNSDTVSWSWPDGAELPFTIDK

SEQ ID NO: 26357 - protein, 449 aa, Artificial Sequence
  derived and/or modified protein sequence (wt) from neuraminidase__InfluenzaA__EPI349847
MNPNQKITTIGSICMVIGIVSLMLQIGNMVSIWVSHSIQTRNQRQAEPISNTRSLTEKAVASVTLAGNSSLCPISGWAVYSKDNSIRIGSKGDVFVIREPFISCSHLECRTFFLTQGALLNDKHSNGTVKDRSPHRTLMSCPVGEAPSPYNSRFESVAWSASACHDGTSWLTIGISGPDNGAVAVVKYNGIITDTIKSWRNNILRTQESECVCVNGSCFTVMTDGPSNKQASYKIFKMEKGKVVKSIELDAPNYHYEECSCYPDAGEITCVCRDNWHGSNRPWLSFNQNLEYQIGYICSGVFGDNPRPNDGTGSCGPVSHNGAYGVKGFSFKYGNGVWIGRTKSTNSRSGFEMIWDPNGWTGTDSSFSMKQDIVAITDWSGYSGSFVQHPELTGLDCIRPCFWVELVRGRPKEGTIWTSGSSISFCGVNSDTVSWSWPDGAELPFTIDK

SEQ ID NO: 26358 - protein, 449 aa, Artificial Sequence
  derived and/or modified protein sequence (wt) from neuraminidase__InfluenzaA__EPI174804
MNPNQKIITIGSICMVIGIVSLMLQIGNMVSIWVSHSIQTRNQRQAEPISNTKSLTEKAVASVTLAGNSSLCPISGWAVYSKDNSIRIGSKGDVFVIREPFISCSHLECRTFFLTQGALLNDKHSNGTIKDRSPHRTLMSCPVGEAPSPYNSRFESVAWSASACHDGTSWLTIGISGPDNGAVAVLKYNGIITDTIKSWRNNILRTQESECACVNGSCFAVMTDGPSNRQASYKIFKMEKGKVVKSIELDAPNYHYEECSCYPDAGEITCVCRDNWHGSNRPWLSFNQNLEYQIGYICSGVFGDNPRPNDGTGSCGPVSSNGAYGVKGFSFKYGNGVWIGRTKSTNSRSGFEMIWDPNGWTETDSSFSMKQDIVAITDWSGYSGSFVQHPELTGLDCIRPCFWVELVRGRPKESTIWTSGSSISFCGVNSDTVSWSWPDGAELPFTIDK

SEQ ID NO: 26359 - protein, 449 aa, Artificial Sequence
  derived and/or modified protein sequence (wt) from neuraminidase__InfluenzaA__EPI492441
MNPNQKIMAIGSVCMVIGIVSLMLQIGNTISIWVSHSFQTRVQHQAEPIRNTNFLTENAVASVTLAGNSSLCPIRGWAVHSKDNSIRIGSKGDVFVIREPFISCSHLECRTFFLTQGALLNDKHSNRTVKDRSPHRTLMSCPVGEVPSPYNSRFESVAWSASACHDGTSWLTIGISGPDNGAVAVLKYNGIITDTIKSWRNNILRTQESECACVNGFCFTVMTDGPSNGQASYKIFKMKKGKVVKSVELNAPNYHYEECSCYPDAGEIMCVCRDNWHGSNRPWVSFNQNLEYQIGYICSGVFGDNPRPNDGTGSCGPVSPNGAYGIKGFSFKYGNGVWIGRTKSTNSRSGFEMVWDPNGWTDTDSDFSIKQDIVAITDWSGYSGSFVQHPELTGLDCIRPCFWVELIRGRPKESTIWTSGSSISFCGVNSETVSWSWPDGAELPFTIDK

SEQ ID NO: 26360 - protein, 449 aa, Artificial Sequence; identical to SEQ ID NO: 25987
  derived and/or modified protein sequence (wt) from neuraminidase__InfluenzaA__EPI164142

SEQ ID NO: 26361 - protein, 449 aa, Artificial Sequence
  derived and/or modified protein sequence (wt) from neuraminidase__InfluenzaA__EPI827076
MNPNQKIVTIGSICMVIGIISLMLQIGNIISIWVSHSIQTGNQHQTEPIRNTNFLTENAVASVTLAGNSSLCPIKGWAVHSKDNSIRIGSKGDVFVIREPFISCSHLECRTFFLTQGALLNDKHSNGTVKDRSPHRTLMSCPIGEAPSPYNSRFESVAWSASACHDGTSWLIIGISGPDNGAVAVLKYNGIITDTIKSWRNNILRTQESECACVNGSCFAVMTDGPSNGQASYKIFKIEKGKVVKSVELNAPNYHYEECSCYPDAGEIICVCRDNWHGSNRPWVSFNQNLEYQIGYICSGVFGDNPRPNDGTGSCGPVSSNGAYGVKGFSFKYGNGVWIGRTKSTHSRSGFEMIWDPNGWTGTDSEFSMKQDIVAITDWSGYSGSFVQHPELTGLDCIRPCFWVELIRGRPKESTIWTSGSSISFCGVNSDTVSWSWPDGAELPFTIDK

SEQ ID NO: 26362 - protein, 449 aa, Artificial Sequence; identical to SEQ ID NO: 16579
  derived and/or modified protein sequence (wt) from neuraminidase__InfluenzaA__EPI168491

SEQ ID NO: 26363 - protein, 449 aa, Artificial Sequence
  derived and/or modified protein sequence (wt) from neuraminidase__InfluenzaA__EPI827078
MNPNQKIITIGSICMVIGIASLMLQIGNIISIWISHSIQTGNQCQNESISNTKFLAEKAVASVTLAGNSSLCPVSGWAVYSKDNSIRIGSKGDVFVIREPFISCSHLECRTFFLTQGALLNDKHSNGTVKDRSPHRTLMSCPVGEAPSPYNSRFESVAWSASACHDGTSWLTIGISGPDSGAVAVLKYNGIITDTIKSWRNNIMRTQESECACVNGSCFTIMTDGPSSGQASYKIFKMEKGKVIKSVELDAPNYHYEECSCYPDAGEITCVCRDNWHGSNRPWISFNQNLEYQIGYICSGVFGDNPRPNDGTGSCGPVFPNGAYGVKGFSFKYGNGVWIGRTKSTNSRSGFEMIWDPNGWTGTDSSFSVKQDIVAITEWSGYSGSFVQHPELTGLDCIRPCFWVELIRGRPKESTIWTSGSSISFCGVNGDTVSWSWPDGAELPFTIDK

SEQ ID NO: 26364 - protein, 449 aa, Artificial Sequence
  derived and/or modified protein sequence (wt) from neuraminidase__InfluenzaA__EPI594521
MNPNQKIITIGSICVGIGIVSLMLQIGNMVSIWVNHSIQTENQCQAESISNTKFLTEKAVAPVTLMGNSSLCPISGWAVHSKDNSIRIGSKGDVFVIREPFISCSHLECRTFFLTQGALLNDKHSNGTVKDRSPHRALMSCPVGEAPSPYNSRFESVAWSASACHDGTGWLTIGISGPDNGAVAVLKYNGIITDTIKSWRNNILRTQESECACVNGSCFTVMTDGPSNGQASYKIFKLEKGKVVKSVELDAPNYHYEECSCYPDAGEITCVCRDNWHGSNRPWVSFNQNLEYQIGYICSGVFGDNPRPNDGTGSCGPVSPNGAYGVKGFSFKYGNGVWIGRTKSTNSRSGFEMIWDPNGWTETDSSFSVKQDIVAITDWSGYSGSFVQHPELTGLDCIRPCFWVELIRGRPKESTIWTSGSSISFCGVNSDTVGWSWPDGAEVPFTIDK

SEQ ID NO: 26365 - protein, 469 aa, Artificial Sequence
  derived and/or modified protein sequence (wt) from neuraminidase__InfluenzaA__EPI5787
MNPNQKIITIGSICMVVGIISLMLQIGNIISIWVSHSIQTGNQHQAEPCNQSIITYENNTWVNQTYVNISNTNFLTEKAVASVTLAGNSSLCPISGWAVHSKDNGIRIGSKGDVFVIREPFISCSHLECRTFFLTQGALLNDKHSNGTVKDRSPHRTLMSCPVGEAPSPYNSRFESVAWSASACHDGTSWLTIGISGPDNGAVAVLKYNGIITDTIKSWRNNILRTQESECACVNGSCFTVMTDGPSNGQASYKIFKMEKGKVVKSVELNAPNYHYEECSCYPDAGEITCVCRDNWHGSNRPWVSFNQNLEYQIGYICSGVFGDNPRPNDGTGSCGPVSPNGAYGVKGFSFKYGNGVWIGRTKSTNSRSGFEMIWDPNGWTGTDSSFSVKQDIVAITDWSGYSGSFVQHPELTGLDCIRPCFWVELIRGRPKESTIWTSGSSISFCGVNSDTVGWSWPDDAELPFTIDK

SEQ ID NO: 26366 - protein, 469 aa, Artificial Sequence; identical to SEQ ID NO: 26365
  derived and/or modified protein sequence (wt) from neuraminidase__InfluenzaA__EPI5787

SEQ ID NO: 26367 - protein, 449 aa, Artificial Sequence; identical to SEQ ID NO: 21065
  derived and/or modified protein sequence (wt) from neuraminidase__InfluenzaA__EPI267031

SEQ ID NO: 26368 - protein, 449 aa, Artificial Sequence; identical to SEQ ID NO: 22645
  derived and/or modified protein sequence (wt) from neuraminidase__InfluenzaA__EPI376539

SEQ ID NO: 26369 - protein, 449 aa, Artificial Sequence
  derived and/or modified protein sequence (wt) from neuraminidase__InfluenzaA__EPI124069
MNPNQKIITIGSICMVIGIVSLMLQIGNMISIWVSHSIQTGNQHQAESISNTNPLTEKAVASVTLAGNSSLCPIRGWAVHSKDNNIRIGSKGDVFVIREPFISCSHLECRTFFLTQGALLNDKHSNGTVKDRSPHRTLMSCPVGEAPSPYNSRFESVAWSASACHDGTSWLTIGISGPDNEAVAVLKYNGIITDTIKSWRNNILRTQESECACVNGSCFTVMTDGPSDGQASYKIFKMEKGKVVKSVELDAPNYHYEECSCYPDAGEITCVCRDNWHGSNRPWVSFNQNLEYQIGYICSGVFGDNPRPNDGTGSCGPMSPNGAYGVKGFSFKYGNGVWIGRTKSTNSRSGFEMIWDPNGWTGTDSSFSVKQDIVAITDWSGYSGSFVQHPELTGLDCIRPCFWVELIRGRPKESTIWTSGSSISFCGVNSDTVSWSWPDGAELPFTIDK

SEQ ID NO: 26370 - protein, 449 aa, Artificial Sequence
  derived and/or modified protein sequence (wt) from neuraminidase__InfluenzaA__EPI342499
MNPNQKIITIGSICMVIGIVSLMLQIGNMISIWISHSIQKGNQHRTESISNTNPLTEKAVASVTLTGNSSLCPIRGWAVHSKDNNIRIGSKGDVFVIREPFISCSHLECRTFFLTQGALLNDKHSNGTVKDRSPHRTLMSCPLGEAPSPYNSRFESVAWSASACHDGTGWLTIGISGPDNEAVAVLKYNGIITDTIKSWRNNILRTQESECACVNGSCFTVMTDGPSNGQASYKIFKMRKGKVVKSVELDAPNYHYEECSCYPDTGEITCVCRDNWHGSNRPWISFNQNLEYQIGYICSGIFGDNPRPNDGTGSCGPMSPNGAYGVKGFSFKYGNGVWIGRTKSTNSRSGFEMIWDPNGWTETDSSFSVKQDIVAITDWSGYSGSFVQHPELTGLDCIRPCFWVELIRGRPKESTIWTSGSSISFCGVNSDTVSWSWPDGAELPFTIDK

SEQ ID NO: 26371 - protein, 449 aa, Artificial Sequence
  derived and/or modified protein sequence (wt) from neuraminidase__InfluenzaA__EPI103069
MNPNQKIITIGSICMVIGIVSLMLQIGNMISIWVSHSIQTGNQRQAEPISNTKFLTEKAVASVTLAGNSSLCPISGWAVYSKDNSIRIGSRGDVFVIREPFISCSHLECRTFFLTQGALLNDKHSNGTIKDRSPHRTLMSCPVGEAPSPYNSRFESVAWSASACHDGTSWLTIGISGPDNGAVAVLKYNGIITDTIKSWRNNILRTQESECACVNGSCFTVMTDGPSSGQASYKIFKMEKGKVVKSVELDAPNYHYEECSCYPDAGEITCVCRDNWHGSNRPWVSFNQNLEYQIGYICSGVFGDNPRPNDGTGSCGPVSPNGAYGVKGFSFKYGNGVWIGRTKSTNSRSGFEMIWDPNGWTGTDSSFSVKQDIVAITDWSGYSGSFVQHPELTGLDCIRPCFWVELIRGRPKESTIWTSGSSISFCGVNSDTVSWSWPDGAELPFTIDK

SEQ ID NO: 26372 - protein, 449 aa, Artificial Sequence; identical to SEQ ID NO: 26348
  derived and/or modified protein sequence (wt) from neuraminidase__InfluenzaA__EPI227595

SEQ ID NO: 26373 - protein, 469 aa, Artificial Sequence
  derived and/or modified protein sequence (wt) from neuraminidase__InfluenzaA__EPI569385
MNPNQKIITIGSVSLTIATVCFLMQIAILATTVTLHFKQNECSIPPNNQVVPCEPIIIEKNITEIVYLNNTTIEKEVCPEVPEYRNWSKPQCQITGFAPFSKDNSIRLSAGGDIWVTREPYVSCSPGKCYQFALGQGTTLNNKHSNGTIHDRIPHRTLLMSELGVPFHLGTKQVCIAWSSSSCHDGKAWLHVCVTGDDRNATASFIYDGMLADSIGSWSQNILRTQESECVCINGTCTVVMTDGSASGRADTRILFIKEGKIVHISPLSGSAQHIEECSCYPRYPDVRCVCRDNWKGSNRPVIDINMADYSIDSSYVCSGLVGDTPRNDDSSSSSNCRDPNNERGNPGVKGWAFDNGNDVWMGRTISEDSRSGYETFRVTDGWTTANSKSQVNRQIIVDNNNWSGYSGIFSVEGKSCINRCFYVELIRGRPQETRVWWTSNSIVVFCGTSGTYGTGSWPDGANINFMPI

SEQ ID NO: 26374 - protein, 459 aa, Artificial Sequence
  derived and/or modified protein sequence (wt) from neuraminidase__InfluenzaA__EPI736916
MNPNQKITCISATGVTLSVVSLLIGIANLGLNIGLHYKVSDSTTISIPNMNETNPTTTNITNIIVNKNEERTFLNLTKPLCEVNSWHILSKDNAIRIGEDAHILVTREPYLSCDPQGCRMFALSQGTTLRGRHANGTIHDRSPFRALISWEMGQAPSPYNTRVECIGWSSTSCHDGISRMSICISGPNNNASAVVWYRGRPVTEIPSWAGNILRTQESECVCHKGICPVVMTDGPANNKAATKIIYFKEGKVQKIEELQGNAQHIEECSCYGAAGMIKCVCRDNWKGANRPIITIDPEMMTHTSKYLCSKILTDTSRPNDPTNGNCDAPITGGSPDPGVKGFAFLDGENSWLGRTISKDSRSGYEMLKVPNAETDTQSGPTSYQLIVNNQNWSGYSGAFIDYWANKECFNPCFYVELIRGRPKESDVLWTSNSMVALCGSRERLGSWSWHDGAEIIYFK

SEQ ID NO: 26375 - protein, 459 aa, Artificial Sequence; identical to SEQ ID NO: 25994
  derived and/or modified protein sequence (wt) from neuraminidase__InfluenzaA__EPI593891

SEQ ID NO: 26376 - protein, 459 aa, Artificial Sequence
  derived and/or modified protein sequence (wt) from neuraminidase__InfluenzaA__EPI691380
MNPNQKIVCISVTGVTLSVVSLLIGITNLGLNIGLHYKVSDSTTINIPNMNETNPTTTNITNIIMNKNEERTFLKLTKPLCEVNSWHILSKDNAIRIGEDAHILVTREPYLSCDPQGCRMFALSQGTTLRGQHANGTIHDRSPFRALISWEMGQAPSPYNTRVECIGWSSTSCHDGISRMSICISGPNNNASAVVWYRGRPVTEIPSWAGNILRTQESECVCHKGICPVVMTDGPANNKAATKIIYFKEGKIQKTEELQGNAQHIEECSCYGAAGMIKCVCRDNWKGANRPIITIDPEMMTHTSKYLCSKILTDTSRPNDPTNGNCDAPITGGSPDPGVKGFAFLDGENSWLGRTISKDSRSGYEMLKVPNAEIDIQSGPISYQLVVNNQNWSGYSGAFIDYWANKECFNPCFYVELIRGRPKESGVLWTSNSMVALCGSRERLGSWSWHDGAEIIYFK

SEQ ID NO: 26377 - protein, 470 aa, Artificial Sequence
  derived and/or modified protein sequence (wt) from neuraminidase__InfluenzaA__EPI533584
MNPNQKITCISATGMTLSVVSMLIGIANLGLNIGLHYKVSDSTNINIPNMNETSPTTTIINNHPQNNFTNITNIIVTKNEEGHLLNLTKPLCEVNSWHILSKDNAIRIGEDAHIIVTREPYLSCDPQGCRMFALSQGTTLRGKHANGTIHDRSPFRALVSWEMGQAPSPYNTRVECIGWSSTSCHDGISRMSICISGPNNNASAVVWYGGRPVTEIPSWAGNILRTQESECVCHGGICPVVMTDGPANNRAETKIIYFKEGKIKKIEELKGDAQHIEECSCYGASEMIKCICRDNWKGANRPVITIDPEMMTHTSKYLCSKILTDTSRPNDPTNGKCEAPITGGSPDPGVKGFAFLDGENSWLGRTISKDSRSGYEMLKVPNAETDTQSGAISHQIIVNNQNWSGYSGAFIDYWANKECFNPCFYVELIRGRPKESSVLWTSNSIVALCGSKERLGSWSWHDGAEIIYFK

SEQ ID NO: 26378 - protein, 459 aa, Artificial Sequence; identical to SEQ ID NO: 25998
  derived and/or modified protein sequence (wt) from neuraminidase__InfluenzaA__EPI641400

SEQ ID NO: 26379 - protein, 459 aa, Artificial Sequence; identical to SEQ ID NO: 25998
  derived and/or modified protein sequence (wt) from neuraminidase__InfluenzaA__EPI587620

SEQ ID NO: 26380 - protein, 469 aa, Artificial Sequence
  derived and/or modified protein sequence (wt) from neuraminidase__InfluenzaA__EPI569392
MNPNQKIVTIGSLSLGLVVFNVLLHAVSIILTVLALGKSENNGICNGTVVREYNETVRIEKVTQWYNTSVVEYVPHWNEGTYINNTEPICDVKGFAPFSKDNGIRVGSRGHIFVIREPFVSCSPVGCRTFFLTQGSLLNDKHSNGTVKDRSPFRTLMSVEVGQSPNVYQARFEAVAWSATACHDGKKWMAIGVTGPDSKAVAVVHYGGVPTDVVNSWAGDILRTQESSCTCIQGNCYWVMTDGPANRQAQYRIYKANQGKIIGRKDVSFSGGHIEECSCYPNDGKVECVCRDNWTGTNRPVLIISPDLSYRVGYLCAGLPSDTPRGEDTQFVGSCTSPMGNQGYGVKGFGFRQGTDVWVGRTISRTSRSGFEIIRIKNGWTQTSKEQIRRQVVVDNSNWSGYSGSFTLPVELSGRECLVPCFWVEMIRGRPEERTIWTSSSSIVMCGVDYEIADWSWHDGAILPFDIDK

SEQ ID NO: 26381 - protein, 455 aa, Artificial Sequence
  derived and/or modified protein sequence (wt) from neuraminidase__InfluenzaA__EPI459857
MNPNQKIITIGSICMVIGTVSLIVQVGNIILIWVNHSIQTCITYENNTWVNQTYVSNTNFLTGQAVASVTLAGNSSLCPISGWAIYSKDNGIRIGSKGDVFVIREPFISCSHLECRTFFLTQGALLNDKHSNGTIKDRSPYRTLMSCPVGEAPSPYNSRFESVAWSASACHDGINWLTIGISGPDNEAVAVLKYNGVITDTIKSWRNNILRTQESECACVNGSCFTVMTDGPSNGQASYKIFKIEKGKVVRSVELDAPNYHYEECSCYPDAGEITCVCRDNWHGSNRPWVSFNQNLEYQTGYICSGVFGDSPRPNDGTGSCGPVSSNGAFGVKGFSFKYGNGVWIGRTKTTNSRSGFEMIWDPNGWTETDSSFSMKQDIIAITDWSGYSGSFVQHPELTGLNCMRPCFWVELIRGQPRENTIWTSGSSISFCGVNSETVGWSWPDGAELPFTIDK

SEQ ID NO: 26382 - protein, 471 aa, Artificial Sequence
  derived and/or modified protein sequence (wt) from neuraminidase__InfluenzaA__EPI242204
MNPNQKLFALSGVAIALSVLNLLIGISNVGLNVSLHLKGEGVKQENNLTCTTITQNNTTVVENTYVNNTTIINKGTNLKAPNYLLLNKSLCSVEGWVVIAKDNAIRFGESEQIIVTREPYVSCDPSGCKMYALHQGTTIRNKHSNGTIHDRTTFRGLISTPLGTPPTVSNSDFICVGWSSTSCHDGVGRMTICIQGNNDNATATVYYNRRLTTTIKTWAKNILRTQESECVCHNGTCAVVMTDGPASSQAYTKIMYFHKGLIIKEEPLRGSARHIEECSCYGHDQKVSCVCRDNWQGANRPIIEIDMSTLEHTSRYVCTGVLTDTSRPGDKPNGDCSNPITGSPGAPGVKGFGFLNGDNTWLGRTISPRSRSGFEMLKIPNAETDPNSRIIERQEIVDNSNWSGYSGSFIDYWDEANECYNPCFYVELIRGRPEEAKYVWWTSNSLIALCGSPVSVGSGSFPDGAQIQYFS

SEQ ID NO: 26383 - protein, 471 aa, Artificial Sequence
  derived and/or modified protein sequence (wt) from neuraminidase__InfluenzaA__EPI408029
MNPNQKLFALSGVAIALSVLNLLIGISNVGLNMSLHLKGEGVKQENNLTCTTITQNNTTVVENTYVNNTTIINKGTNLKAPNYLLLNKSLCSVEGWVVIAKDNAIRFGESEQIIVTREPYVSCDPSGCKMYALHQGTTIRNKHSNGTIHDRTTFRGLLSTPLGTPPTVSNSDFICVGWSSTSCHDGVGRMTICIQGNNDNATATVYYNRRLTTTIKTWAKNILRTQESECVCHNGTCAVVMTDGPASSQAYTKIMYFHKGLIIKEEPLRGSARHIEECSCYGHDQKVSCVCRDNWQGANRPIIEIDMSTLEHTSRYVCTGVLTDTSRPGDKPNGDCSNPITGSPGAPGVKGFGFLNGDNTWLGRTISPRSRSGFEMLKIPNAETDPNSRIIERQEIVDNSNRSGYSGSFIDYWDEANECYNPCFYVELIRGRPEEAKYVWWTSNSLIALCGSPVSVGSGSFPDGAQIQYFS

SEQ ID NO: 26384 - protein, 465 aa, Artificial Sequence; identical to SEQ ID NO: 23454
  derived and/or modified protein sequence (wt) from neuraminidase__InfluenzaA__EPI439509

SEQ ID NO: 26385 - protein, 449 aa, Artificial Sequence; identical to SEQ ID NO: 25987
  derived and/or modified protein sequence (wt) from neuraminidase__InfluenzaA__EPI164223

SEQ ID NO: 26386 - protein, 465 aa, Artificial Sequence; identical to SEQ ID NO: 23454
  derived and/or modified protein sequence (wt) from neuraminidase__InfluenzaA__EPI486493

SEQ ID NO: 26387 - protein, 465 aa, Artificial Sequence
  derived and/or modified protein sequence (wt) from neuraminidase__InfluenzaA__EPI740737
MNPNQKILCTSATAITISAIAVLIGIANLGLNIGLHLKPGCNCSHSQPETTNTSQTIINNYYNETNITNIQIEERTSRNFNNLTKGLCTINSWHIYGKDNAVRIGESSDVLVTREPYVSCDPDECRFYALSQGTTIRGKHSNGTIHDRSQYRALISWPLSSPPTVHNSRVECIGWSSTSCHDGKSRMSICISGPNNNASAVVWYNRRPVAEINTWARNILRTQESECVCHNGVCPVVFTDGPATGPADTRIYYFKEGKILKWESLTGTAKHIEECSCYGERTGITCTCRDNWQGSNRPVVQIDPVAMTHTSQYICSPVLTDSPRPNDPNIGKCNDPYPGNNNNGVKGFSYLDGANTWLGRTISTASRSGYEMLKVPNALTDDRSKPIQGQTIVLNADWSGYSGSFMDYWAEGDCYRACFYVELIRGRPKEDKVWWTSNSIVSMCSSTEFLGQWNWPDGAKIEYFL

SEQ ID NO: 26388 - protein, 465 aa, Artificial Sequence
  derived and/or modified protein sequence (wt) from neuraminidase__InfluenzaA__EPI730494
MNPNQKILCTSATAITIGAIAVLIGIANLGLNIGLHLKPGCNCSHSQPEITNTSQTIINNYYSETNITNIQMEERTSKNFNNLTKGLCTINSWHIYGKDNAVRIGESSDVLVTREPYVSCDPDECRFYALSQGTTIRGKHSNGTIHDRSQYRALISWPLSSPPTVYNSRVECIGWSSTSCHDGKSRMSICISGPNNNASAVVWYNRRPVAEINTWARNILRTQESECVCHNGVCPVVFTDGSATGPADTRIYYFKEGKILKWESLTGTAKHIEECSCYGERTGITCTCRDNWQGSNRPVIQIDPVAMTHTSQYICSPVLTDNPRPNDPNIGKCNDPYPGNNNNGIKGFSYLDGANTWLGRTISTASRSGYEMLKVPNALTDDRSKPIQGQTIVLNADWSGYSGSFMDYWAEGDCYRACFYVELIRGRPKEDKVWWTSNSIVSMCSSTEFLGQWNWPDGAKIEYFL

SEQ ID NO: 26389 - protein, 465 aa, Artificial Sequence
  derived and/or modified protein sequence (wt) from neuraminidase__InfluenzaA__EPI712925
MNPNQKILCTSATAITIGAIAVLIGIANLGLNIGLHLKPGCNCSHSQPETTNTSQTIINNYYNETNITNIQIEERTSRNFNNLTKGLCTINSWHIYGKDNAVRIGESSDVLVTREPYVSCDPDECRFYALSQGTTIRGKHSNGTIHDRSQYRALISWPLSSPPTVHNSRVECIGWSSTSCHDGKSRMSICISGPNNNASAVVWYNRRPVAEINTWARNILRTQESECVCHNGVCPVVFTDGPATGPADTRIYYFKEGKILKWESLTGTAKHIEECSCYGERTGITCTCRDNWQGSNRPVVQIDPVAMTHTSQYICSPVLTDSPRPNDPNIGKCNDPYPGNNNNGVKGFSYLDGANTWLGRTISTASRSGYEMLKVPNALTDDRSKPIQGQTIVLNADWSGYSGSFMDYWAEGDCYRACFYVELIRGRPKEDKVWWTSNSIVSMCSSTEFLGQWNWPDGAKIEYFL

SEQ ID NO: 26390 - protein, 465 aa, Artificial Sequence
  derived and/or modified protein sequence (wt) from neuraminidase__InfluenzaA__EPI448938
MNPNQKILCTSATAIIIGAIAVLIGMANLGLNIGLHLKPGCNCSHSQPETTNTSQTIINNYYNETNITNIQMEERTSRNFNNLTKGLCTINSWHIYGKDNAVRIGESSDVLVTREPYVSCDPDECRFYALSQGTTIRGKHSNGTIHDRSQYRALISWPLSSPPTVYNSRVECIGWSSTSCHDGKSRMSICISGPNNNASAVVWYNRRPVAEINTWARNILRTQESECVCHNGVCPVVFTDGSATGPADTRIYYFKEGKILKWESLTGTAKHIEECSCYGERTGITCTCRDNWQGSNRPVIQIDPVAMTHTSQYICSPVLTDNPRPNDPNIGKCNDPYPGNNNNGVKGFSYLDGANTWLGRTISTASRSGYEMLKVPNALTDDRSKPIQGQTIVLNADWSGYSGSFMDYWAEGDCYRACFYVELIRGRPKEDKVWWTSNSIVSMCSSTEFLGQWNWPDGAKIEYFL

SEQ ID NO: 26391 - protein, 469 aa, Artificial Sequence
  derived and/or modified protein sequence (wt) from neuraminidase__InfluenzaA__EPI445995
MNPNQKIIALGSASLTIAIICLLIQIAILATTMTLHFMQNEHTNSTRNKVVPCESIIIERNITEIVHLNGTIIEKESCPKAVEYKNWSKPQCQITGFAPFSKDNSIRLSAGGDIWVTREPYVSCSLSKCYQFALGQGTTLNNRHSNGTTHDRSPYRTLLMSELGVPFHLGTKQVCIAWSSSSCHDGRAWLHVCVTGDDKNATASVIYGGMLTDSIGSWSKNILRTQESECVCINGTCTVVMTDGSASGRADTRILFIREGKIVHISPLSGSAQHVEECSCYPRYPEVRCVCRDNWKGSNRPVLYINVADYSIDSSYVCSGLVGDTPRNEDSSSSSNCRDPNNERGGPGVKGWAFDNGDDVWMGRTIKKDSRAGYETFRVVDGWTLANSKSQTNRQVIVDSDNWSGYSGMFSVEGKTCINRCFYVELIRGRPQETRVWWTSNSIIVFCGTSGTYGTGSWPDGADINFMSI

SEQ ID NO: 26392 - protein, 469 aa, Artificial Sequence
  derived and/or modified protein sequence (wt) from neuraminidase__InfluenzaA__EPI470861
MNPNQKIIAIGSVSLTIATICLLMQIAILATTMTLHFKQNECINSSNNQVVPCEPIIIERNITEIVHLNSTTLEKEICPKVADYRNWSKPQCQITGFAPFSKDNSIRLSAGGDIWVTREPYVSCGLGKCYQFALGQGTTLENKHSNGTAHDRTPHRTLLMNELGVPFHLATKQVCIAWSSSSCHDGKAWLHVCVTGDDRNATASIIYDGILVDSIGSWSKNILRTQESECVCINGTCAVVMTDGSASGRADTRILFIREGKIAHISPLSGSAQHVEECSCYPRYPEVRCVCRDNWKGSNRPVLYINMANYSIDSSYVCSGLVGDTPRNDDRSSSSNCRDPNNERGAPGVKGWAFDNGNDIWMGRTIKKDSRSGYETFRVIGGWTTANSKSQINRQVIVDSDNSSGYSGIFSVEGKSCINRCFYVELIRGRPKETRVWWTSNSIIVFCGTSGTYGTGSWPDGANINFMPI

SEQ ID NO: 26393 - protein, 466 aa, Artificial Sequence
  derived and/or modified protein sequence (wt) from neuraminidase__InfluenzaA__EPI498036
MNPNQKIIAIGSVSLIIAIICLLMQIAILTTTMTLHFRQNECSNPSNNQVMPCEPIILERNTVHLNSTIIEREICPKVADYKNWSKPQCQITGFAPFSKDNSIRLSAGGDIWVTREPYVSCSLDKCYQFALGQGTTLKNKHSNGTTHDRTPHRTLLMNELGVPFHLGTKQVCIAWSSSSCYDGKAWLHICVTGDDKNATASIIYDGMLVDSIGSWSKNILRTQESECVCINGTCAVVMTDGSASGKADTRVLFIREGKIINISPLSGSAQHVEECSCYPRYPEVRCVCRDNWKGSNRPILYINMADYSIESSYVCSGLVGDTPRNDDSSSSSNCRDPNNERGAPGVKGWAFDDGNDVWMGRTIKNGSRSGYETFRVVNGWTMANSKSQINRQVIVDSDDWSGYSGIFSVEGKKCINRCFYVELIRGRPQEPRVWWTSNSIIVFCGTSGTYGTGSWPDGANINFMPV

SEQ ID NO: 26394 - protein, 469 aa, Artificial Sequence
  derived and/or modified protein sequence (wt) from neuraminidase__InfluenzaA__EPI470902
MNPNQKIVAIGSASLTIATMCLLMQIALFATTMTLHFKQTGCTNSSDNQAVPCGPIIIERNITEIVHLNSTTLEKETCPKSAGYRNWSKPQCQITGFAPFSKDNSIRLAAAGDIWVTREPYVSCGLGKCYQFALGQGTTLDNKHSNGTTHDRTPHRTLLMNELGVPFHLATKQVCIAWSSSSCHDGKAWLHVCVTGDDKNATASIIYDGILVDSIASWSKNILRTQESECVCINGTCTVVMTDGSASGRADTRILFIREGKIVHISPLSGSAQHVEECSCYPRYPEVRCVCRDNWKGSNRPVLFINMADYSIDSSYVCSGLVGDTPRNDDRSSSSNCRDPNNERGAPGVKGWAFDSGNDIWMGRTIEKDSRSGYETFRVIGGWSTANSKSQINRQVIVDRDNSSGYSGIFSVEGKSCINRCFYVELIRGRPKENRVWWTSNSIIVFCGTSGTYGTGSWPDGANINLMPI

SEQ ID NO: 26395 - protein, 466 aa, Artificial Sequence
  derived and/or modified protein sequence (wt) from neuraminidase__InfluenzaA__EPI838241
MNPNQKITAIGSVSLIIAIICLLMQIAILTTTMTLHFRQNECSNSSNNQVMPCEPIIIERNTVHLNSTTIEREICPKVAEYKNWSKPQCQITGFAPFSKDNSIRLSASGDIWVTREPYVSCSLDKCYQFALGQGTTLKNKHSNGTAHDRTPHRTLLMNELGVPFHLGTKQVCIAWSSSSCYDGKAWLHVCVTGDDKNATASIIYDGMLVDSIGSWSKNILRTQESECVCINGTCAVVMTDGSASGKADTRVLFIREGKIINISPLSGSAQHVEECSCYPRYPEVRCVCRDNWKGSNRPILYINMADYSIESSYVCSGLVGDTPRNDDSSSSSNCRDPNNERGAPGVKGWAFDDGNDVWMGRTIKNGSRSGYETFRVVNGWTMANSKSQINRQVIVESDDWSGYSGIFSVEGKKCINRCFYVELIRGRPQEPRVWWTSNSIIVFCGTSGTYGTGSWPDGANINFMPI

SEQ ID NO: 26396 - protein, 466 aa, Artificial Sequence; identical to SEQ ID NO: 26395
  derived and/or modified protein sequence (wt) from neuraminidase__InfluenzaA__EPI680525

SEQ ID NO: 26397 - protein, 466 aa, Artificial Sequence; identical to SEQ ID NO: 26003
  derived and/or modified protein sequence (wt) from neuraminidase__InfluenzaA__EPI690481

SEQ ID NO: 26398 - protein, 584 aa, Artificial Sequence
  derived and/or modified protein sequence (wt) from hemagglutinin__InfluenzaB__ABL76276
MKAIIVLLMVVTSNADRICTGITSSNSPHVVKTATQGEVNVTGVIPLTTTPTKSHFANLKGTKTRGKLCPTCLNCTDLDVALGRPMCVGITPSAKASILHEVRPVTSGCFPIMHDRTKIRQLPNLLRGYEKIRLSTQNVINAEKAPGGPYRLGTSGSCPNATSRSGFFATMAWAVPRDNNKTATNPLTVEVPHICTKEEDQITVWGFHSDNKTQMKNLYGDSNPQKFTSSANGVTTHYVSQIGGFPDQTEDGGLPQSGRIVVDYMVQKPGKTGTIVYQRGILLPQKVWCASGRSKVIKGSLPLIGEADCLHEKYGGLNKSKPYYTGEHAKAIGNCPIWVKTPLKLANGTKYRPPAKLLKERGFFGAIAGFLEGGWEGMIAGWHGYTSHGAHGVAVAADLKSTQEAINKITKNLNSLSELEVKNLQRLSGAMDELHNEILELDEKVDDLRADTISSQIELAVLLSNEGIINSEDEHLLALERKLKKMLGPSAVDIGNGCFETKHKCNQTCLDRIAAGTFNAGEFSLPTFDSLNITAASLNDDGLDNHTILLYYSTAASSLAVTLMIAIFIVYMISRDNVSCSICL

SEQ ID NO: 26399 - protein, 584 aa, Artificial Sequence
  derived and/or modified protein sequence (wt) from hemagglutinin__InfluenzaB__ABL76287
MKAIIVLLMVVTSNADRICTGITSSNSPHVVKTATQGEVNVTGVIPLTTTPTKSHFANLKGTKTRGKLCPTCLNCTDLDVALGRPMCVGVTPSAKASILHEVRPVTSGCFPIMHDRTKIRQLPNLLRGYEKIRLSTQNVINAEKAPGGPYRLGTSGSCPNATSRSGFFATMAWAVPRDNNKTATNPLTIEVPHICTKEEDQITVWGFHSDNKIQMKNLYGDSNPQKFTSSANGVTTHYVSQIGGFPDQTEDGGLPQSGRIVVDYMVQKPGKTGTIVYQRGILLPQKVWCASGRSKVIKGSLPLIGEADCLHEKYGGLNKSKPYYTGEHAKAIGNCPIWVKTPLKLANGTKYRPPAKLLKERGFFGAIAGFLEGGWEGMIAGWHGYTSHGAHGVAVAADLKSTQEAINKITKNLNSLSELEVKNLQRLSGAMDELHNEILELDEKVDDLRADTISSQIELAVLLSNEGIINSEDEHLLALERKLKKMLGPSAVDIGNGCFETKHKCNQTCLDRIAAGTFNAGEFSLPTFDSLNITAASLNDDGLDNHTILLYYSTAASSLAVTLMIAIFIVYMISRDNVSCSICL

SEQ ID NO: 26400 - protein, 584 aa, Artificial Sequence
  derived and/or modified protein sequence (wt) from hemagglutinin__InfluenzaB__ABL76298
MKAIIVLLMVVTSNADRICTGITSSNSPHVVKTATQGEVNVTGVIPLTTTPTKSHFANLKGTKTRGKLCPTCLNCTDLDVALGRPMCVGVTPSAKASILHEVRPVTSGCFPIMHDRTKIRQLPNLLRGYEKIRLSTQNVINAEKAPGGPYRLGTSGSCPNATSRSGFFATMAWAVPRDNNKTATNPLTVEVPHICTKEEDQITVWGFHSDNKTQMKNLYGDSNPQKFTSSANGVTTHYVSQIGGFPDQTEDGGLPQSGRIVVDYMVQKPGKTGTIVYQRGILLPQKVWCASGRSKVIKGSLPLIGEADCLHEKYGGLNKSKPYYTGEHAKAIGNCPIWVKTPLKLANGTKYRPPAKLLKERGFFGAIAGFLEGGWEGMIAGWHGYTSHGAHGVAVAADLKSTQEAINKITKNLNSLSELEVKNLQRLSGAMDELHNEILELDEKVDDLRADTISSQIELAVLLSNEGIINSEDEHLLALERKLKKMLGPSAVDIGNGCFETKHKCNQTCLDRIAAGTFNAGEFSLPTFDSLNITAASLNDDGLDNHTILLYYSTAASSLAVTLMIAIFIVYMVSRDNVSCSICL

SEQ ID NO: 26401 - protein, 584 aa, Artificial Sequence
  derived and/or modified protein sequence (wt) from hemagglutinin__InfluenzaB__ABL76309
MKAIIVLLMVVTSNADRICTGITSSNSPHVVKTATQGEVNVTGVIPLTTTPTKSHFANLKGTKTRGKLCPTCLNCTDLDVALGRPMCVGVTPSAKASILHEVRPVTSGCFPIMHDRTKIRQLPNLLRGYEKIRLSTQNVINAEKAPGGPYRLGTSGSCPNATSRSGFFATMAWAVPRDNNKTATNPLTVEVPHICTKEEDQITVWGFHSDNKTQMKNLYGDSNPQKFTSSANGVTTHYVSQIGGFPDQTEDGGLPQSGRIVVDYMVQRPGKTGTIVYQRGILLPQKVWCASGRSKVIKGSLPLIGEADCLHEKYGGLNKSKPYYTGEHAKAIGNCPIWVKTPLKLANGTKYRPPAKLLKERGFFGAIAGFLEGGWEGMIAGWHGYTSHGAHGVAVAADLKSTQEAINKITKNLNSLSELEVKNLQRLSGAMDELHNEILELDEKVDDLRADTISSQIELAVLLSNEGIINSEDEHLLALERKLKKMLGPSAVDIGNGCFETKHKCNQTCLDRIAAGTFNAEEFSLPTFDSLNITAASLNDDGLDNHTILLYYSTAASSLAVTLMIAIFIVYMISRDNVSCSICL

SEQ ID NO: 26402 - protein, 584 aa, Artificial Sequence
  derived and/or modified protein sequence (wt) from hemagglutinin__InfluenzaB__ABL76331
MKAIIVLLMVVTSNADRICTGITSSNSPHVVKTATQGEVNVTGVIPLTTTPTKSHFANLKGTKTRGKLCPTCLNCTDLDVALGRPMCVGITPSAKASILHEVRPVTSGCFPIMHDRTKIRQLPNLLRGYEKIRLSTQNVINAEKAPGGPYRLGTSGSCPNATSRSGFFATMAWAVPRDNNKTATNPLTIEVPHICTKEEDQITVWGFHSDNKTQMKNLYGDSNPQKFTSSANGVTTHYVSQIGGFPDQTEDGGLPQSGRIVVDYMVQKPGKTGTIVYQRGILLPQKVWCASGRSKVIKGSLPLIGEADCLHEKYGGLNKSKPYYTGEHAKAIGNCPIWVKTPLKLANGTKYRPPAKLLKERGFFGAIAGFLEGGWEGMIAGWHGYTSHGAHGVAVAADLKSTQEAINKITKNLNSLSELEVKNLQRLSGAMDELHNEILELDEKVDDLRADTISSQIELAVLLSNEGIINSEDEHLLALERKLKKMLGPSAVDIGNGCFETKHKCNQTCLDRIAAGTFNAGEFSLPTFDSLNITAASLNDDGLDNHTILLYYSTAASSLAVTLMIAIFIVYMISRDNVSCSICL

SEQ ID NO: 26403 - protein, 584 aa, Artificial Sequence
  derived and/or modified protein sequence (wt) from hemagglutinin__InfluenzaB__ABL76342
MKAIIVLLMVVTSNADRICTGITSSNSPHVVKTATQGEVNVTGVIPLTTTPTKSHFANLKGTKTRGKLCPTCLNCTDLDVALGRPMCVGVTPSAKASILHEVRPVTSGCFPIMHDRTKIRQLPNLLRGYEKIRLSTQNVINAEKAPGGPYRLGTSGSCPNATSRSGFFATMAWAVPRDNNKTATNPLTVEVPHICTKEEDQITVWGFHSDNKTQMKNLYGDSNPQKFTSSANGVTTHYVSQIGDFPDQTEDGGLPQSGRIVVDYMVQKPGKTGTIVYQRGILLPQKVWCASGRSKVIRGSLPLIGEADCLHEKYGGLNKSKPYYTGEHAKAIGNCPIWVKTPLKLANGTKYRPPAKLLKERGFFGAIAGFLEGGWEGMIAGWHGYTSHGAHGVAVAADLKSTQEAINKITKNLNSLSELEVKNLQRLSGAMDELHNEILELDEKVDDLRADTISSQIELAVLLSNEGIINSEDEHLLALERKLKKMLGPSAVDIGNGCFETKHKCNQTCLDRIAAGTFNAGDFSLPTFDSLNITAASLNDDGLDNHTILLYYSTAASSLAVTLMIAIFIVYMISRDNVSCSICL

SEQ ID NO: 26404 - protein, 584 aa, Artificial Sequence
  derived and/or modified protein sequence (wt) from hemagglutinin__InfluenzaB__ABL76353
MKAIIVLLMVVTSNADRICTGITSSNSPHVVKTATQGEVNVTGVIPLTTTPTKSHFANLKGTKTRGKLCPTCLNCTDLDVALGRPMCVGVTPSAKASILHEVRPVTSGCFPIMHDRTKIRQLPNLLRGYEKIRLSTQNVINAEKAPGGPYRLGTSGSCPNATSRSGFFATMAWAVPRDNNKTATNPLTVEVPHICTKEEDQITVWGFHSDNKTQMKNLYGDSNPQKFTSSANGVTTHYVSQIGGFPDQTEDGGLPQSGRIVVDYMVQKPGKTGTIVYQRGILLPQKVWCASGRSKVIRGSLPLIGEADCLHEKYGGLNKSKPYYTGEHAKAIGNCPIWVKTPLKLANGTKYRPPAKLLKERGFFGAIAGFLEGGWEGMIAGWHGYTSHGAHGVAVAADLKSTQEAINKITKNLNSLSELEVKNLQRLSGAMDELHNEILELDEKVDDLRADTISSQIELAVLLSNEGIINSEDEHLLALERKLKKMLGPSAVDIGNGCFETKHKCNQTCLDRIAAGTFNAGDFSLPTFDSLNITAASLNDDGLDNHTILLYYSTAASSLAVTLMIAIFIVYMISRDNVSCSICL

SEQ ID NO: 26405 - protein, 584 aa, Artificial Sequence
  derived and/or modified protein sequence (wt) from hemagglutinin__InfluenzaB__ABL76375
MKAIIVLLMVVTSNADRICTGITSSNSPHVVKTATQGEVNVTGAIPLTTTPTKSHFANLKGTKTRGKLCPTCLNCTDLDVALGRPMCVGITPSAKASILHEVRPVTSGCFPIMHDRTKIRQLPNLLRGYEKIRLSTQNVINAEKAPGGPYRLGTSGSCPNATSKSGFFATMAWAVPRDNNKTATNPLTVEVPHICTKEEDQITVWGFHSDNKTQMKNLYGDSNPQKFTSSANGITTHYVSQIGGFPDQTEDGGLPQSGRIVVDYMVQKPGKTGTIVYQRGILLPQKVWCASGRSKVIKGSLPLIGEADCLHEKYGGLNKSKPYYTGEHAKAIGNCPIWVKTPLKLANGTKYRPPAKLLKERGFFGAIAGFLEGGWEGMIAGWHGYTSHGAHGVAVAADLKSTQEAINKITKNLNSLSELEVKNLQRLSGAMDELHNEILELDEKVDDLRADTISSQIELAVLLSNEGIINSEDEHLLALERKLKKMLGPSAVDIGNGCFETKHKCNQTCLDRIAAGTFNAGEFSLPTFDSLNITAASLNDDGLDNHTILLYYSTAASSLAVTLMIAIFIVYMISRDNVSCSICL

SEQ ID NO: 26406 - protein, 584 aa, Artificial Sequence; identical to SEQ ID NO: 26405
  derived and/or modified protein sequence (wt) from hemagglutinin__InfluenzaB__ABL76386

SEQ ID NO: 26407 - protein, 584 aa, Artificial Sequence
  derived and/or modified protein sequence (wt) from hemagglutinin__InfluenzaB__ABL76408
MKAIIVLLMVVTSNADRICTGITSSNSPHVVKTATQGEVNVTGAIPLTTTPTKSHFANLKGTKTRGKLCPTCFNCTDLDVALGRPMCVGITPSAKASILHEVRPVTSGCFPIMHDRTKIRQLPNLLRGYEKIRLSTQNVIDAEKAPGGPYRLGTSGSCPNATSKSGFFATMAWAVPRGNNKTATNPLTVEVPHICTKEEDQITVWGFHSDNKTQMKNLYGDSNPQKFTSSANGITTHYVSQIGGFPDQTEDGGLPQSGRIVVDYMVQKPGKTGTIVYQRGILLPQKVWCASGRSKVIKGSLPLIGEADCLHEKYGGLNKSKPYYTGEHAKAIGNCPIWVKTPLKLANGTKYRPPAKLLKERGFFGAIAGFLEGGWEGMIAGWHGYTSHGAHGVAVAADLKSTQEAINKITKNLNSLSELEVKNLQRLSGAMDELHNEILELDEKVDDLRADTISSQIELAVLLSNEGIINSEDEHLLALERKLKKMLGPSAVDIGNGCFETKHKCNQTCLDRIAAGTFNAGEFSLPTFDSLNITAASLNDDGLDNHTILLYYSTAASSLAVTLMIAIFIVYMISRDNVSCSICL

SEQ ID NO: 26408 - protein, 584 aa, Artificial Sequence
  derived and/or modified protein sequence (wt) from hemagglutinin__InfluenzaB__ABL76419
MKAIIVLLMVVTSNADRICTGITSSNSPHVVKTATQGEVNVTGAIPLTTTPTKSHFANLKGTKTRGKLCPTCFNCTDLDVALGRPMCVGITPSAKASILHEIRPVTSGCFPIMHDRTKIRQLPNLLRGYEKIRLSTQNVIDAEKAPGGPYRLGTSGSCPNATSKSGFFATMAWAVPRGNNKTATNPLTVEVPHICTKEEDQITVWGFHSDNKTQMKNLYGDSNPQKFTSSANGITTHYVSQIGGFPDQTEDGGLPQSGRIVVDYMVQKPGKTGTIVYQRGILLPQKVWCASGRSKVIKGSLPLIGEADCLHEKYGGLNKSKPYYTGEHAKAIGNCPIWVKTPLKLANGTKYRPPAKLLKERGFFGAIAGFLEGGWEGMIAGWHGYTSHGAHGVAVAADLKSTQEAINKITKNLNSLSELEVKNLQRLSGAMDELHNEILELDEKVDDLRADTISSQIELAVLLSNEGIINSEDEHLLALERKLKKMLGPSAVDIGNGCFETKHKCNQTCLDRIAAGTFNAGEFSLPTFDSLNITAASLNDDGLDNHTILLYYSTAASSLAVTLMIAIFIVYMISRDNVSCSICL

SEQ ID NO: 26409 - protein, 585 aa, Artificial Sequence
  derived and/or modified protein sequence (wt) from hemagglutinin__InfluenzaB__ABL76441
MKAIIVLLMVVTSNADRICTGITSSNSPHVVKTATQGEVNVTGVIPLTTTPTKSHFANLKGTKTRGKLCPKCLNCTDLDVALGRPKCTGNIPSAKVSILHEVRPVTSGCFPIMHDRTKIRQLPNLLRGYEHIRLSTHNVINAEKAPGGPYKIGTSGSCPNVTNGNGFFATMAWAVPKNDNNKTATNSLTIEVPYICTEGEDQITVWGFHSDNETQMAKLYGDSKPQKFTSSANGVTTHYVSQIGGFPNQTEDGGLPQSGRIVVDYMVQKSGKPGTITYQRGILLPQKVWCASGRSKVIKGSLPLIGEADCLHEKYGGLNKSKPYYTGEHAKAIGNCPIWVKTPLKLANGTKYRPPAKLLKERGFFGAIAGFLEGGWEGMIAGWHGYTSHGAHGVAVAADLKSTQEAINKITKNLNSLSELEVKNLQRLSGAMDELHNEILELDEKVDDLRADTISSQIELAVLLSNEGIINSEDEHLLALERKLKKMLGPSAVEIGNGCFETKHKCNQTCLDRIAAGTFDAGEFSLPTFDSLNITAASLNDDELDNHTILLYYSTAASSLAVTLMIAIFVVYMVSRDNVSCSICL

SEQ ID NO: 26410 - protein, 585 aa, Artificial Sequence
  derived and/or modified protein sequence (wt) from hemagglutinin__InfluenzaB__ABL76463
MKAIIVLLMVVTSNADRICTGITSSNSPHVVKTATQGEVNVTGVIPLTTTPTKSHFANLKGTKTRGKLCPKCLNCTDLDVALGRPKCTGNIPSAKVSILHEVRPVTSGCFPIMHDRTKIRQLPNLLRGYEHIRLSTHNVINAEKAPGGPYKIGTSGSCPNVTNGNGFFATMAWAVPKNDNNKTATNSLTIEVPYICTEGEDQITVWGFHSDNETQMAKLYGDSKPQKFTSSANGVTTHYVSQIGGFPNQTEDGGLPQSGRIVVDYMVQKSGKTGTITYQRGILLPQKVWCASGRSKVIKGSLPLIGEADCLHEKYGGLNKSKPYYTGEHAKAIGNCPIWVKTPLKLANGTKYRPPAKLLKERGFFGAIAGFLEGGWEGMIAGWHGYTSHGAHGVAVAADLKSTQEAINKITKNLNSLSELEVKNLQRLSGAMDELHNEILELDEKVNDLRADTISSQIELAVLLSNEGIINSEDEHLLALERKLKKMLGPSAVEIGNGCFETKHKCNQTCLDRIAAGTFDAGEFSLPTFDSLNITAASLNDDGLDNHTILLYYSTAASSLAVTLMIAIFVVYMVSRDNVSCSICL

SEQ ID NO: 26411 - protein, 585 aa, Artificial Sequence
  derived and/or modified protein sequence (wt) from hemagglutinin__InfluenzaB__ABL76474
MKAIIVLLMVVTSNADRICTGITSSNSPHVVKTATQGEVNVTGVIPLTTTPTKSHFANLKGTKTRGKLCPKCLNCTDLDVALGRPKCTGNIPSAKVSILHEVRPVTSGCFPIMHDRTKIRQLPNLLRGYEHIRLSTHNVINAEKAPGGPYKIGTSGSCPNVTNGNGFFATMAWAVPKNDNNKTATNSLTIEVPYICTEGEDQITVWGFHSDNETQMAKLYGDSKPQKFTSSANGVTTHYVSQIGGFPNQTEDGGLPQSGRIVVDYMVQKSGKTGTITYQRGILLPQKVWCASGRSKVIKGSLPLIGEADCLHEKYGGLNKSKPYYTGEHAKAIGNCPIWVKTPLKLANGTKYRPPAKLLKERGFFGAIAGFLEGGWEGMIAGWHGYTSHGAHGVAVAADLKSTQEAINKITKNLNSLSELEVKNLQRLSGAMDELHNEILELDEKVDDLRADTISSQIELAVLLSNEGIINSEDEHLLALERKLKKMLGPSAVEIGNGCFETKHKCNQTCLDRIAAGTFDAGEFSLPTFDSLNITAASLNDDELDNHTILLYYSTAASSLAVTLMIAIFVVYMVSRDNVSCSICL

SEQ ID NO: 26412 - protein, 585 aa, Artificial Sequence
  derived and/or modified protein sequence (wt) from hemagglutinin__InfluenzaB__ABL76485
MKAIIVLLMVVTSNADRICTGITSSNSPHVVKTATQGEVNVTGVIPLTTTPTKSHFANLKGTKTRGKLCPKCLNCTDLDVALGRPKCTGNIPSAEVSILHEVRPVTSGCFPIMHDRTKIRQLPNLLRGYEHIRLSTHNVINAEKAPGGPYKIGTSGSCPNVTNGNGFFVTMAWAVPKNDNNKTATNSLTIEVPYICTEGEDQITVWGFHSDNETQMAKLYGDSKPQKFTSSANGVTTHYVSQIGGFPNQTEDGGLPQSGRIVVDYMVQKSGKTGTITYQRGILLPQKVWCASGRSKVIKGSLPLIGEADCLHEKYGGLNKSKPYYTGEHAKAIGNCPIWVKTPLKLANGTKYRPPAKLLKERGFFGAIAGFLEGGWEGMIAGWHGYTSHGAHGVAVAADLKSTQEAINKITKNLNSLSELEVKNLQRLSGAMDELHNEILELDEKVDDLRADTISSQIELAVLLSNEGIINSENEHLLALERKLKKMLGPSAVEIGNGCFETKHKCNQTCLDRIAAGTFDAGEFSLPTFDSLNITAASLNDDGLDNHTILLYYSTAASSLAVTLMIAIFVVYMVSRDNVSCSICL

SEQ ID NO: 26413 - protein, 585 aa, Artificial Sequence
  derived and/or modified protein sequence (wt) from hemagglutinin__InfluenzaB__ABL76507
MKAIIVLLMVVTSNADRICTGITSSNSPHVVKTATQGEVNVTGVIPLTTTPTKSHFANLKGTKTRGKLCPKCLNCTDLDVALGRPKCTGNIPSAEVSILHEVRPVTSGCFPIMHDRTKIRQLPNLLRGYEHIRLSTHNVINAEKAPGGPYKIGTSGSCPNVTNGNGFFATMAWAVPKNDNNKTATNSLTIEVPYICTEGEDQITVWGFHSDNEIQMAKLYGDSKPQKFTSSANGVTTHYVSQIGGFPNQTEDGGLPQSGRIVVDYMVQKSGKTGTITYQRGILLPQKVWCASGRSKVIKGSLPLIGEADCLHEKYGGLNKSKPYYTGEHAKAIGNCPIWVKTPLKLANGTKYRPPAKLLKERGFFGAIAGFLEGGWEGMIAGWHGYTSHGAHGVAVAADLKSTQEAINKITKNLNSLSELEVKNLQRLSGAMDELHNEILELDEKVDDLRADTISSQIELAVLLSNEGIINSEDEHLLALERKLKKMLGPSAVEIGNGCFETKHKCNQTCLDRIAAGTFDAGEFSLPTFDSLNITAASLNDDGLDNHTILLYYSTAASSLAVTLMIAIFVVYMVSRDNVSCSICL

SEQ ID NO: 26414 - protein, 585 aa, Artificial Sequence
  derived and/or modified protein sequence (wt) from hemagglutinin__InfluenzaB__ABL76518
MKAIIVLLMVVTSNADRICTGITSSNSPHVVKTATQGEVNVTGVIPLTTTPTKSHFANLKGTKTRGKLCPKCLNCTDLDVALGRPKCTGNIPSAEVSILHEVRPVTSGCFPIMHDRTKIRQLPNLLRGYEHIRLSTHNVINAEKAPGGPYKIGTSGSCPNVTNGNGFFATMAWAVPKNDNNKTATNSLTIEVPYICTEGEDQITVWGFHSDNENQMAKLYGDSKPQKFTSSANGVTTHYVSQIGGFPNQTEDGGLPQSGRIVVDYMVQKSGKTGTITYQRGILLPQKVWCASGRSKVIKGSLPLIGEADCLHEKYGGLNKSKPYYTGEHAKAIGNCPIWVKTPLKLANGTKYRPPAKLLKERGFFGAIAGFLEGGWEGMIAGWHGYTSHGAHGVAVAADLKSTQEAINKITKNLNSLSELEVKNLQRLSGAMDELHNEILELDEKVDDLRADTISSQIELAVLLSNEGIINSEDEHLLALERKLKKMLGPSAVEIGNGCFETKHKCNQTCLDRIAAGTFDAGEFSLPTFDSLNITAASLNDDGLDNHTILLYYSTAASSLAVTLMIAIFVVYMVSRDNVSCSICL

SEQ ID NO: 26415 - protein, 585 aa, Artificial Sequence
  derived and/or modified protein sequence (wt) from hemagglutinin__InfluenzaB__ABL76529
MKAIIVLLMVVTSNADRICTGITSSNSPHVVKTATQGEVNVTGVIPLTTTPTKSHFANLKGTKTRGKLCPKCLNCTDLDVALGRPKCTGNIPSAEVSILHEVRPVTSGCFPIMHDRTKIRQLPNLLRGYEHIRLSTHNVINAEKAPGGPYKIGTSGSCPNVTNGNGFFVTMAWAVPKNDNNKTATNSLTIEVPYICTEGEDQITVWGFHSDNETQMAKLYGDSKPQKFTSSANGVTTHYVSQIGGFPNQTEDGGLPQSGRIVVDYMVQKSGKTGTITYQRGILLPQKVWCASGRSKVIKGSLPLIGEADCLHEKYGGLNKSKPYYTGEHAKAIGNCPIWVKTPLKLANGTKYRPPAKLLKERGFFGAIAGFLEGGWEGMIAGWHGYTSHGAHGVAVAADLKSTQEAINKITKNLNSLSELEVKNLQRLSGAMDELHNEILELDEKVDDLRADTISSQIELAVLLSNEGIINSEDEHLLALERKLKKMLGPSAVEIGNGCFETKHKCNQTCLDRIAAGTFDAGEFSLPTFDSLNITAASLNDDGLDNHTILLYYSTAASSLAVTLMIAIFVVYMVSRDNVSCSICL

SEQ ID NO: 26416 - protein, 585 aa, Artificial Sequence
  derived and/or modified protein sequence (wt) from hemagglutinin__InfluenzaB__ABL76540
MKAIIVLLMVVTSNADRICTGITSSNSPHVVKTATQGEVNVTGVIPLTTTPTKSHFANLKGTKTRGKLCPKCLNCTDLDVALGRPKCTGNIPSAEVSILHEVKPVTSGCFPIMHDRTKIRQLPNLLRGYEHIRLSTHNVINAEKAPGGPYKIGTSGSCPNVTNGNGFFATMAWAVPKNDNNKTATNSLTIEVPYICTEGEDQITVWGFHSDNETQMAKLYGDSKPQKFTSSANGVTTHYVSQIGGFPNQTEDGGLPQSGRIVVDYMVQKSGKTGTITYQRGILLPQKVWCASGRSKVIKGSLPLIGEADCLHEKYGGLNKSKPYYTGEHAKAIGNCPIWVKTPLKLANGTKYRPPAKLLKERGFFGAIAGFLEGGWEGMIAGWHGYTSHGAHGVAVAADLKSTQEAINKITKNLNSLSELEVKNLQRLSGAMDELHNEILELDEKVDDLRADTISSQIELAVLLSNEGIINSEDEHLLALERKLKKMLGPSAVEIGNGCFETKHKCNQTCLDRIAAGTFDAGEFSLPTFDSLNITAASLNDDGLDNHTILLYYSTAASSLAVTLMIAIFVVYMVSRDNVSCSICL

SEQ ID NO: 26417 - protein, 585 aa, Artificial Sequence
  derived and/or modified protein sequence (wt) from hemagglutinin__InfluenzaB__ABL76551
MKAIIVLLMVVTSNADRICTGITSSNSPHVVKTATQGEVNVTGVIPLTTTPTKSHFANLKGTKTRGKLCPKCLNCTDLDVALGRPKCTGNIPSAEVSILHEVRPVTSGCFPIMHDRTKIRQLPNLLRGYEHIRLSTHNVINAEKAPGGPYKIGTSGSCPNVTNGNGFFATMAWAVPKNDNNKTATNSLTIEVPYICTEGEDQITVWGFHSDNETQMAKLYGDSKPQKFTSSANGVTTHYVSQIGGFPNQTEDGGLPQSGRIVVDYMVQKSGKTGTITYQRGILLPQKVWCASGRSKVIKGSLPLIGEADCLHEKYGGLNKSKPYYTGEHAKAIGNCPIWVKTPLKLANGTKYRPPAKLLKERGFFGAIAGFLEGGWEGMIAGWHGYTSHGAHGVAVAADLKSTQEAINKITKNLNSLSELEVKNLQRLSGAMDELHNEILELDEKVDDLRADTISSQIELAVLLSNEGIINSEDEHLLALERKLKKMLGPSAVEIGNGCFETKHKCNQTCLDRIAAGTFDAGEFSLPTFDSLNITAASLNDDGLDNHTILLYYSTAASSLAVTLMMAIFVVYMVSRDNVSCSICL

SEQ ID NO: 26418 - protein, 585 aa, Artificial Sequence
  derived and/or modified protein sequence (wt) from hemagglutinin__InfluenzaB__ABL76562
MKAIIVLLMVVTSNADRICTRITSSNSPHVVKTATQGEVNVTGVIPLTTTPTKSHFANLKGTKTRGKLCPKCLNCTDLDVALGRPKCTGNIPSAEVSILHEVRPVTSGCFPIMHDRTKIRQLPNLLRGYEHIRLSTHNVINAEKAPGGPYKIGTSGSCPNVTNGNGFFATMAWAVPKNDNNKTATNSLTIEVPYICTEGEDQITVWGFHSDNETQMAKLYGDSKPQKFTSSANGVTTHYVSQIGGFPNQTEDGGLPQSGRIVVDYMVQKSGKTGTITYQRGILLPQKVWCASGRSKVIKGSLPLIGEADCLHEKYGGLNKSKPYYTGEHAKAIGNCPIWVKTPLKLANGTKYRPPAKLLKERGFFGAIAGFLEGGWEGMIAGWHGYTSHGAHGVAVAADLKSTQEAINKITKNLNSLSELEVKNLQRLSGAMDELHNEILELDEKVDDLRADTISSQIELAVLLSNEGIINSEDEHLLALERKLKKMLGPSAVEIGNGCFETKHKCNQTCLDRIAAGTFDVGEFSLPTFDSLNITAASLNDDGLDNHTILLYYSTAASSLAVTLMIAIFVVYMVSRDNVSCSICL

SEQ ID NO: 26419 - protein, 585 aa, Artificial Sequence
  derived and/or modified protein sequence (wt) from hemagglutinin__InfluenzaB__ABL76573
MKAIIVLLMVVTSNADRICTGITSSNSPHVVKTATQGEVNVTGVIPLTTTPTKSHFANLKGTKTRGKLCPKCLNCTDLDVALGRPKCTGNIPSAEVSILHEVRPVTSGCFPIMHDRTKIRQLPNLLRGYEHIRLSTHNVINAEKAPGGPYKIGTSGSCPNVTNGNGFFATMAWAVPKNDNNKTATNSLTIEVPYICTEGEDQITVWGFHSDNETQMAKLYGDSKPQKFTSSANGVTTHYVSQIGGFPNQTEDGGLPQSGRIVVDYMVQKSGKTGTITYQRGILLPQKVWCASGRSKVIKGSLPLIGEADCLHEKYGGLNKSKPYYTGEHAKAIGNCPIWVKTPLKLANGTKYRPPAKLLKERGFFGAIAGFLEGGWEGMIAGWHGYTSHGAHGVAVAADLKSTQEAINKITKNLNSLSELEVKNLQRLSGAMDELHNEILELDEKVDDLRADTISSQIELAVLLSNEGIINSEDEHLLALERKLKKMLGPSAVEIGNGCFETKHKCNQTCLDRIAAGTFDAGEFSLPTFDSLNITAASLNDDGLDNHTILLYYSTAASSLAVTLMIAIFVVYMVSRDNVSCSICL

SEQ ID NO: 26420 - protein, 585 aa, Artificial Sequence; identical to SEQ ID NO: 26419
  derived and/or modified protein sequence (wt) from hemagglutinin__InfluenzaB__ABL76584

SEQ ID NO: 26421 - protein, 585 aa, Artificial Sequence; identical to SEQ ID NO: 26419
  derived and/or modified protein sequence (wt) from hemagglutinin__InfluenzaB__ABL76595

SEQ ID NO: 26422 - protein, 585 aa, Artificial Sequence; identical to SEQ ID NO: 26419
  derived and/or modified protein sequence (wt) from hemagglutinin__InfluenzaB__ABL76606

SEQ ID NO: 26423 - protein, 585 aa, Artificial Sequence
  derived and/or modified protein sequence (wt) from hemagglutinin__InfluenzaB__ABL76617
MKAIIVLLMVVTSNADRICTGITSSNSPHVVKTATQGEVNVTGVIPLTTTPTKSHFANLKGTETRGKLCPKCLNCTDLDVALGRPKCTGNIPSAKVSILHEVRPVTSGCFPIMHDRTKIRQLPNLLRGYEHIRLSTHNVINAEKAPGGPYKIGTSGSCPNVTNGNGFFATMAWAVPKNDNNKTATNSLTIEVPYICTEGEDQITVWGFHSDNETQMAKLYGDSKPQKFTSSANGVTTHYVSQIGGFPNQTEDGGLPQSGRIVVDYMVQKSGKTGTITYQRGILLPQKVWCASGRSKVIKGSLPLIGEADCLHEKYGGLNKSKPYYTGEHAKAIGNCPIWVKTPLKLANGTKYRPPAKLLKERGFFGAIAGFLEGGWEGMIAGWHGYTSHGAHGVAVAADLKSTQEAINKITKNLNSLSELEVKNLQRLSGAMDELHNEILELDEKVDDLRADTISSQIELAVLLSNEGIINSEDEHLLALERKLKKMLGPSAVEIGNGCFETKHKCNQTCLDRIAAGTFDAGEFSLPTFDSLNITAASLNDDGLDNHTILLYYSTAASSLAVTLMIAIFVVYMVSRDNVSCSICL

SEQ ID NO: 26424 - protein, 584 aa, Artificial Sequence
  derived and/or modified protein sequence (wt) from hemagglutinin__InfluenzaB__ABL76628
MKAIIVLLMVVTSNADRICTGITSSNSPHVVKTATQGEVNVTGVIPLTTTPTKSYFANLKGTRTRGKLCPDCLNCTDLDVALGRPMCVGTTPSAKASILHEVRPVTSGCFPIMHDRTKIRQLANLLRGYENIRLSTQNVIDAEKAPGGPYRLGTSGSCPNATSKSGFFATMAWAVPKDNNKNATNPLTVEVPHICTEGEDQITVWGFHSDNKTQMKNLYGDSNPQKFTSSANGVTTHYVSQIGGFPDQTEDGGLPQSGRIVVDYMMQKPGKTGTIVYQRGVLLPQKVWCASGRSKVIKGSLPLIGEADCLHEKYGGLNKSKPYYTGEHAKAIGNCPIWVKTPLKLANGTKYRPPAKLLKERGFFGAIAGFLEGGWEGMIAGWHGYTSHGAHGVAVAADLKSTQEAINKITKNLNSLSELEVKNLQRLSGAMDELHNEILELDEKVDDLRADTISSQIELAVLLSNEGIINSEDEHLLALERKLKKMLGPSAVDIGNGCFETKHKCNQTCLDRIAAGTFNAGEFSLPTFDSLNITAASLNDDGLDNHTILLYYSTAASSLAVTLMLAIFIVYMVSRDNVSCSICL

SEQ ID NO: 26425 - protein, 584 aa, Artificial Sequence
  derived and/or modified protein sequence (wt) from hemagglutinin__InfluenzaB__ABL76639
MKAIIVLLMVVTSNADRICTGITSSNSPHVVKTATQGEVNVTGVIPLTTTPTKSYFANLKGTRTRGKLCPDCLNCTDLDVALGRPMCVGTTPSAKASILHEVRPVTSGCFPIMHDRTKIRQLANLLRGYENIRLSTQNVIDAEKAPGGPYRLGTSGSCPNATSKSGFFATMAWAVPKDNNKNATNPLTVEVPYICTEGEDQITVWGFHSDNKTQMKNLYGDSNPQKFTSSANGVTTHYVSQIGGFPDQTEDGGLPQSGRIVVDYMMQKPGKAGTIVYQRGVLLPQKVWCASGRSKVIKGSLPLIGEADCLHEKYGGLNKSKPYYTGEHAKAIGNCPIWVKTPLKLANGTKYRPPAKLLKERGFFGAIAGFLEGGWEGMIAGWHGYTSHGAHGVAVAADLKSTQEAINKITKNLNSLSELEVKNLQRLSGAMDELHNEILELDEKVDDLRADTISSQIELAVLLSNEGIINSEDEHLLALERKLKKMLGPSAVDIGNGCFETKHKCNQTCLDRIAAGTFNAGEFSLPTFDSLNITAASLNDDGLDNHTILLYYSTAASSLAVTLMLAIFIVYMVSRDNVSCSICL

SEQ ID NO: 26426 - protein, 584 aa, Artificial Sequence
  derived and/or modified protein sequence (wt) from hemagglutinin__InfluenzaB__ABL76683
MKAIIVLLMVVTSNADRICTGITSSNSPHVVKTATQGEVNVTGVIPLTTTPTKSYFANLKGTRTRGKLCPDCLNCTDLDVALGRPMCVGTTPSAKASILHEVRPVTSGCFPIMHDRTKIRQLANLLRGYENIRLSTQNVIDAEKAPGGPYRLGTSGSCPNATSKSGFFATMAWAVPKDNNKNATNPLTVEVPYICTEGEDQITVWGFHSDNKTQMKNLYGDSNPQKFTSSANGVTTHYVSQIGGFPDQTEDGGLPQSGRIVVDYMMQKPGKTGTIVYQRGVLLPQKVWCASGRSKVIKGSLPLIGEADCLHEKYGGLNKSKPYYTGEHAKAIGNCPIWVKTPLKLANGTKYRPPAKLLKERGFFGAIAGFLEGGWEGMIAGWHGYTSHGAHGVAVAADLKSTQEAINKITKNLNSLSELEVKNLQRLSGAMDELHNEILELDEKVDDLRADTISSQIELAVLLSNEGIINSEDEHLLALERKLKKMLGPSAVDIGNGCFETKHKCNQTCLDRIAAGTFNAGEFSLPTFDSLNITAASLNDDGLDNHTILLYYSTAASSLAVTLMLAIFIVYMVSRDNVSCSICL

SEQ ID NO: 26427 - protein, 583 aa, Artificial Sequence
  derived and/or modified protein sequence (wt) from hemagglutinin__InfluenzaB__ABL76694
MKAIIVLLMVVTSNADRICTGITSSNSPHVVKTATQGEVNVTGVIPLTTTPTKSHFANLKGTKTRGKLCPNCLNCTDLDVALGRPMCVGTTPSAKASILHEVRPVTSGCFPIMHDRTKIRQLPNLLRGYENIRLSTQNVINAERAPGGPYRLGTSGSCPNVTSRDGFFATMAWAVPRDNKTATNPLTVEVPYICTKGEDQITVWGFHSDNKTQMKNLYGDSNPQKFTSSANGVTTHYVSQIGGFPNQTEDGGLPQSGRIVVDYMVQKPGKTGTIVYQRGVLLPQKVWCASGRSKVIKGSLPLIGEADCLHEKYGGLNKSKPYYTGEHAKAIGNCPIWVKTPLKLANGTKYRPPAKLLKERGFFGAIAGFLEGGWEGMIAGWHGYTSHGAHGVAVAADLKSTQEAINKITKNLNSLSELEVKNLQRLSGAMDELHNEILELDEKVDDLRADTISSQIELAVLLSNEGIINSEDEHLLALERKLKKMLGPSAVDIGNGCFETKHKCNQTCLDRIAAGTFNAGEFSLPTFDSLNITAASLNDDGLDNHTILLYYSTAASSLAVTLMIAIFIVYMVSRDNVSCSICL

SEQ ID NO: 26428 - protein, 585 aa, Artificial Sequence
  derived and/or modified protein sequence (wt) from hemagglutinin__InfluenzaB__ABL76716
MKAIIVLLMVVTSNADRICTGITSSNSPHVVKTATQGEVNVTGVIPLTTTPTKSHFANLKGTETRGKLCPKCLNCTDLDVALGRPKCTGNIPSARVSILHEVRPVTSGCFPIMHDRTKIRQLPNLLRGYEHIRLSTHNVINAENAPGGPYKIGTSGSCPNVTNGNGFFATMAWAVPKNDNNKTATNSLTIEVPYICTEGEDQITVWGFHSDNETQMAKLYGDSKPQKFTSSANGVTTHYVSQIGGFPNQTEDGGLPQSGRIVVDYMVQKSGKTGTITYQRGILLPQKVWCASGRSKVIKGSLPLIGEADCLHEKYGGLNKSKPYYTGEHAKAIGNCPIWVKTPLKLVNGTKYRPPAKLLKERGFFGAIAGFLEGGWEGMIAGWHGYTSHGAHGVAVAADLKSTQEAINKITKNLNSLSELEVKNLQRLSGAMDELHNEILELDEKVDDLRADTISSQIELAVLLSNEGIINSEDEHLLALERKLKKMLGPSAVEIGNGCFETKHKCNQTCLDRIAAGTFDAGEFSLPTFDSLNITAASLNDDGLDNHTILLYYSTAASSLAVTLMIAIFVVYMVSRDNVSCSICL

SEQ ID NO: 26429 - protein, 584 aa, Artificial Sequence
  derived and/or modified protein sequence (wt) from hemagglutinin__InfluenzaB__ABL76760
MKAIIVLLMVVTSNADRICTGITSSNSPHVVKTATQGEVNVTGVIPLTTTPTKSHFANLKGTKTRGKLCPTCLNCTDLDVALGRPMCVGVTPSAKASILHEVRPVTSGCFPIMHDRTKIRQLPNLLRGYEKIRLSTQNVINAEKAPGGPYRLGTSGSCPNATSRSGFFATMAWAVPRDNNKTATNPLTIEVPHICTKEEDQITVWGFHSDNKTQMKNLYGDSNPQKFTSSANGVTTHYVSQIGGFPDQTEDGGLPQSGRIVVDYMVQKPGKTGTIVYQRGILLPQKVWCASGRSKVIKGSLPLIGEADCLHEKYGGLNKSKPYYTGEHAKAIGNCPIWVKTPLKLANGTKYRPPAKLLKERGFFGAIAGFLEGGWEGMIAGWHGYTSHGAHGVAVAADLKSTQEAINKITKNLNSLSELEVKNLQRLSGAMDELHNEILELDEKVDDLRADTISSQIELAVLLSNEGIINSEDEHLLALERKLKKMLGPSAVDIGNGCFETKHKCNQTCLDRIAAGTFDAGEFSLPTFDSLNITAASLNDDGLDNHTILLYYSTAASSLAVTLMIAIFIVYMISRDNVSCSICL

SEQ ID NO: 26430 - protein, 584 aa, Artificial Sequence
  derived and/or modified protein sequence (wt) from hemagglutinin__InfluenzaB__ABL76771
MKAIIVLLMVVTSNADRICTGITSSNSPHVVKTATQGEVNVTGVIPLTTTPTKSHFANLKGTKTRGKLCPTCLNCTDLDVALGRPMCVGVTPSAKASILHEVRPVTSGCFPIMHDRTKIRQLPNLLRGYEKIRLSTQNVINAEKAPGGPYRLGTSGSCPNATSRSGFFATMAWAVPRDNNKTATNPLTIEVPHICTKEEDQITVWGFHSDDKTQMKNLYGDSNPQKFTSSANGVTTHYVSQIGGFPDQTEDGGLPQSGRIVVDYMVQKPGKTGTIVYQRGILLPQKVWCASGRSKVIKGSLPLIGEADCLHEKYGGLNKSKPYYTGEHAKAIGNCPIWVKTPLKLANGTKYRPPAKLLKERGFFGAIAGFLEGGWEGMIAGWHGYTSHGAHGVAVAADLKSTQEAINKITKNLNSLSELEVKNLQRLSGAMDELHNEILELDEKVDDLRADTISSQIELAVLLSNEGIINSEDEHLLALERKLKKILGPSAVDIGNGCFETKHKCNQTCLDRIAAGTFDAGEFSLPTFDSLNITAASLNDDGLDNHTILLYYSTAASSLAVTLMIAIFIVYMISRDNVSCSICL

SEQ ID NO: 26431 - protein, 584 aa, Artificial Sequence
  derived and/or modified protein sequence (wt) from hemagglutinin__InfluenzaB__ABL76782
MKAIIVLLMVVTSNADRICTGITSSNSPHVVKTATQGEVNVTGVIPLTTTPTKSHFANLKGTKTRGKLCPTCLNCTDLDVALGSPMCVGITPSAKASILHEVRPVTSGCFPIMHDRTKIRQLPNLLRGYEKIRLSTQNVINIEKAPGGPYRLGTSGSCPNATSRSGFFATMAWAVPRDNNKTATNPLTVEVPHICTKEEDQITVWGFHSDNKAQMKNLYGDSNPQKFTSSANGVTTHYVSQIGGFPDQTEDGGLPQSGRIVVDYMVQKPGKTGTIVYQRGILLPQKVWCASGRSKVIKGSLPLIGEADCLHEKYGGLNKSKPYYTGEHAKAIGNCPIWVKTPLKLANGTKYRPPAKLLKERGFFGAIAGFLEGGWEGMIAGWHGYTSHGAHGVAVAADLKSTQEAINKITKNLNSLSELEVKNLQRLSGAMDELHNEILELDEKVDDLRADTISSQIELAVLLSNEGIINSEDEHLLALERKLKKMLGPSAVDIGNGCFETKHKCNQTCLDRIAAGTFNAGEFSLPTFDSLNITAASLNDDGLDNHTILLYYSTAASSLAVTLMIAIFIVYMISRDNVSCSICL

SEQ ID NO: 26432 - protein, 584 aa, Artificial Sequence; identical to SEQ ID NO: 26405
  derived and/or modified protein sequence (wt) from hemagglutinin__InfluenzaB__ABL76793

SEQ ID NO: 26433 - protein, 584 aa, Artificial Sequence; identical to SEQ ID NO: 26405
  derived and/or modified protein sequence (wt) from hemagglutinin__InfluenzaB__ABL76815

SEQ ID NO: 26434 - protein, 585 aa, Artificial Sequence
  derived and/or modified protein sequence (wt) from hemagglutinin__InfluenzaB__ABL76826
MKAIIVLLMVVTSNADRICTGITSSNSPHVVKTATQGEVNVTGVIPLTTTPTKSHFANLKGTKTRGKLCPECLNCTDLDVALGRPKCTGNIPSAKVSILHEVRPVTSGCFPIMHDRTKIRQLPNLLRGYEHIRLSTHNVINAEKAPGGPYKIGTSGSCPNVTNGNGFFATMAWAVPKNDNNKTATNSLTIEVPYICTEGEDQITVWGFHSDNETQMAKLYGDSKPQKFTSSANGVTTHYVSQIGGFPNQTEDGGLPQSGRIVVDYMVQKSGKTGTITYQRGILLPQKVWCASGRSKVIKGSLPLIGEADCLHEKYGGLNKSKPYYTGEHAKAIGNCPIWVKTPLKLANGTKYRPPAKLLKERGFFGAIAGFLEGGWEGMIAGWHGYTSHGAHGVAVAADLKSTQEAINKITKNLNSLSELEVKNLQRLSGAMDELHNEILELDEKVDDLRADTISSQIELAVLLSNEGIINSEDEHLLALERKLKKMLGPSAVEIGNGCFETKHKCNQTCLDRIAAGTFDAGEFSLPTFDSLNITAASLNDDGLDNHTILLYYSTAASSLAVTLMIAIFVVYMVSRDNVSCSICL

SEQ ID NO: 26435 - protein, 585 aa, Artificial Sequence
  derived and/or modified protein sequence (wt) from hemagglutinin__InfluenzaB__ABL76837
MKAIIVLLMVVTSNADRICTGITSSNSPHVVKTATQGEVNVTGVIPLTTTPTKSHFANLKGTKTRGKLCPKCLNCTDLDVALGRPKCTGNIPSAEVSILHEVRPVTSGCFPIMHDRTKVRQLPNLLRGYEHIRLSTHNVINAEKAPGGPYKIGTSGSCPNVTNGNGFFATMAWAVPKNDNNKTATNSLTVEVPYICTEGEDQITVWGFHSDSETQMAKLYGDSKPQKFTSSSNGVTTHYVSQIGGFPNQTEDGGLPQSGRIVVDYMVQKSGKTGTITYQRGILLPQKVWCASGRSKVIKGSLPLIGEADCLHERYGGLNKSKPYYTGEHAKAIGNCPIWVKTPLKLANGTKYRPPAKLLKERGFFGAIAGFLEGGWEGMIAGWHGYTSHGAHGVAVAADLKSTQEAINKITKNLNSLSELEVKNLQRLSGAMDELHNEILELDEKVDDLRADTISSQIELAVLLSNEGIINSEDEHLLALERKLKKMLGPSAVEIGNGCFETKHKCNQTCLDRIAAGTFDAGEFSLPTFDSLNITAASLNDDGLDNHTILLYYSTAASSLAVTLMIAIFVVYMVSRDNVSCSICL

SEQ ID NO: 26436 - protein, 584 aa, Artificial Sequence
  derived and/or modified protein sequence (wt) from hemagglutinin__InfluenzaB__ABL76848
MKAIIVLLMVVTSNADRICTGITSSNSSHVVKTATQGEVNVTGAIPLTTTPTKSHFANLKGTKTRGKLCPTCLNCTDLDVALGRPMCVGITPPAKASILHEVRPVTSGCFPIMHDRTKIRQLPNLLRGYEKIRLSTQNVINAEKAPGGPYRLGTSGSCPNATSKSGFFATMAWAVPRDNNKTATNPLTVEVPHICTKEEDQITVWGFHSDNKTQMKNLYGDSNPQKFTSSANGITTHYVSQIGGFPDQTEDGGLPQSGRIVVDYMVQKPGKTGTIVYQRGILLPQKVWCASGRSKVIKGSLPLIGEADCLHEKYGGLNKSKPYYTGEHAKAIGNCPIWVKTPLKLANGTKYRPPAKLLKERGFFGAIAGFLEGGWEGMIAGWHGYTSHGAHGVAVAADLKSTQEAINKITKNLNSLSELEVKNLQRLSGAMDELHNEILELDEKVDDLRADTISSQIELAVLLSNEGIINSEDEHLLALERKLKKMLGPSAVDIGNGCFETKHKCNQTCLDRIAAGTFNAGEFSLPTFDSLNITAASLNDDGLDNHTILLYYSTAASSLAVTLMIAIFIVYMISRDNVSCSICL

SEQ ID NO: 26437 - protein, 584 aa, Artificial Sequence; identical to SEQ ID NO: 26405
  derived and/or modified protein sequence (wt) from hemagglutinin__InfluenzaB__ABL76859

SEQ ID NO: 26438 - protein, 584 aa, Artificial Sequence
  derived and/or modified protein sequence (wt) from hemagglutinin__InfluenzaB__ABL76881
MKAIIVLLMVVTSNADRICTGITSSNSPHVVKTATQGEVNVTGVIPLTTTPTKSHFANLKGTRTRGKLCPDCLNCTDLDVALGRPMCVGTTPSAKASILHEVRPVTSGCFPIMHDRTKIRQLPNLLRGYENIRLSTQNVIDAEKASGGPYRLGTSGSCPNATSKSGFFATMAWAVPKDNNKNATNPLTVEVPYICTEGEDQITVWGFHSDNETQMKNLYGDSNPQKFTSSANGVTTHYVSQIGGFPDQKEDGGLPQSGRIVVDYMVQKPGKTGTIVYQRGVLLPQKVWCASGRSKVIKGSLPLIGEADCLHEKYGGLNKSKPYYTGEHAKAIGNCPIWVKTPLKLANGTKYRPPAKLLKERGFFGAIAGFLEGGWEGMIAGWHGYTSHGAHGVAVAADLKSTQEAINKITKNLNSLSELEVKNLQRLSGAMDELHNEILELDEKVDDLRADTISSQIELAVLLSNEGIINSEDEHLLALERKLKKMLGPSAVDIGNGCFETKHKCNQTCLDRIAAGTFNAGEFSLPTFDSLNITAASLNDDGLDNHTILLYYSTAASSLAVTLMLAIFIVYMVSRDNVSCSICL

SEQ ID NO: 26439 - protein, 584 aa, Artificial Sequence
  derived and/or modified protein sequence (wt) from hemagglutinin__InfluenzaB__ABL76892
MKAIIVLLMVVTSNADRICTGITSSNSPHVVKTATQGEVNVTGVIPLTTTPTKSHFANLKGTRTRGKLCPDCLNCTDLDVALGRPMCVGTTPSAKASILHEVRPVTSGCFPIMHDRTKIRQLPNLLRGYENIRLSTQNVIDAEKAPGGPYRLGTSGSCPNATSKSGFFATMAWAVPKDNNKNATNPLTVEVPYVCTEGEDQITVWGFHSDNKTQMKNLYGDSNPQKFTSSANGVTTHYVSQIGGFPDQTEDGGLPQSGRIVVDYMVQKPGKTGTIVYQRGVLLPQKVWCASGRSKVIKGSLPLIGEADCLHEKYGGLNKSKPYYTGEHAKAIGNCPIWVKTPLKLANGTKYRPPAKLLKERGFFGAIAGFLEGGWEGMIAGWHGYTSHGAHGVAVAADLKSTQEAINKITKNLNSLSELEVKNLQRLSGAMDELHNEILELDEKVDDLRADTISSQIELAVLLSNEGIINSEDEHLLALERKLKKMLGPSAVDIGNGCFETKHKCNQTCLDRIAAGTFNAGEFSLPTFDSLNITAASLNDDGLDNHTILLYYSTAASSLAVTLMLAIFIVYMVSRDNVSCSICL

SEQ ID NO: 26440 - protein, 584 aa, Artificial Sequence
  derived and/or modified protein sequence (wt) from hemagglutinin__InfluenzaB__ABL76903
MKAIIVLLMVVTSNADRICTGITSSNSPHVVKTATQGEVNVTGVIPLTTTPTKSYFANLKGTRTRGKLCPDCLNCTDLDVALGRPMCVGTTPSAKASILHEVRPVTSGCFPIMHDRTKIRQLPNLLRGYENIRLSTQSVIDAEKAPGGPYRLGTSGSCPNATSKSGFFATMAWAVPKDNNKNATNPLTVEVPYICTEGEDQITVWGFHSDDKTQMKNLYGDSNPQKFTSSANGVTTHYVSQIGGFPDQTEDGGLPQSGRIVVDYMIQKPGKTGTIVYQRGVLLPQKVWCASGRSKVIKGSLPLIGEADCLHEKYGGLNKSKPYYTGEHAKAIGNCPIWVKTPLKLANGTKYRPPAKLLKERGFFGAIAGFLEGGWEGMIAGWHGYTSHGAHGVAVAADLKSTQEAINKITKNLNSLSELEVKNLQRLSGAMDELHNEILELDEKVDDLRADTISAQIELAVLLSNEGIINSEDEHLLALERKLKKMLGPSAVDIGNGCFETKHKCNQTCLDRIAAGTFNAGEFSLPTFDSLNITAASLNDDGLDNHTILLYYSTAASSLAVTLMLAIFIVYMVSRDNVSCSICL

SEQ ID NO: 26441 - protein, 585 aa, Artificial Sequence
  derived and/or modified protein sequence (wt) from hemagglutinin__InfluenzaB__ABL76914
MKAIIVLLMVVTSNADRICTGITSSNSPHVVKTATQGEVNVTGVIPLTTTPTKSHFANLKGTKTRGKLCPKCLNCTDLDVALGRPKCTGNIPSAEVSILHEVRPVTSGCFPIMHDRTKIRQLPNLLRGYEHIRLSTHNVINAEKAPGGPYKIGTSGSCPNVTNGNGFFATMAWAVPKNDNNKTATNSLTIEVPYICTEGEDQITVWGFHSDNEAQMAKLYGDSKPQKFTSSSNGVTTHYVSQIGGFPNQTEDGGLPQSGRIVVDYMVQKSGKTGTITYQRGILLPQKVWCASGRSKVIKGSLPLIGEADCLHERYGGLNKSKPYYTGEHAKAIGNCPIWVKTPLKLANGTKYRPPAKLLKERGFFGAIAGFLEGGWEGMIAGWHGYTSHGAHGVAVAADLKSTQEAINKITKNLNSLSELEVKNLQRLSGAMDELHNEILELDEKVDDLRADTISSQIELAVLLSNEGIINSEDEHLLALERKLKKMLGPSAVEIGNGCFETKHKCNQTCLDRIAAGTFDAGEFSLPTFDSLNITAASLNDDGLDNHTILLYYSTAASSLAVTLMIAIFVVYMVSRDNVSCSICL

SEQ ID NO: 26442 - protein, 584 aa, Artificial Sequence
  derived and/or modified protein sequence (wt) from hemagglutinin__InfluenzaB__ABL76936
MKAIIVLLMVVTSNADRICTGITSSNSPHVVKTATQGEVNVTGVIPLTTTPTKSHFANLKGTKTRGKLCPTCLNCTDLDVALGRPMCVGTTPSAKASILHEVRPVTSGCFPIMHDRTKIRQLPNLLRGYEKIRLSTQNVINAEKAPGGPYRLGTSGSCPNATSRSGFFATMAWAVPRDNNKTATNPLTVEVPYICTKEEDQITVWGFHSDDKTQMKNLYGDSNPQKFTSSANGVTTHYVSQIGGFPDQTEDGGLPQSGRIVVDYMVQKPGKTGTIVYQRGVLLPQKVWCASGRSKVIKGSLPLIGEADCLHEKYGGLNKSKPYYTGEHAKAIGNCPIWVKTPLKLANGTKYRPPAKLLKERGFFGAIAGFLEGGWEGMIAGWHGYTSHGAHGVAVAADLKSTQEAINKITKNLNSLSELEVKNLQRLSGAMDELHNEILELDEKVDDLRADTISSQIELAVLLSNEGIINSEDEHLLALERKLKKMLGPSAVDIGNGCFETKHKCNQTCLDRIAAGTFNAGEFSLPTFDSLNITAASLNDDGLDNHTILLYYSTAASSLAVTLMIAIFIVYMVSRDNVSCSICL

SEQ ID NO: 26443 - protein, 584 aa, Artificial Sequence
  derived and/or modified protein sequence (wt) from hemagglutinin__InfluenzaB__ABL76947
MKAIIVLLMVVTSNADRICTGITSSNSPHVVKTATQGEVNVTGAIPLTTTPTKSHFANLKGTKTRGKLCPTCLNCTDLDVALGRPMCVGITPSAKASILHEVRPVTSGCFPIMHDRTKIRQLPNLLRGYEKIRLSTQNVINAEKAPGGPYRLGTSGSCPNATSRSGFFATMAWAVPRDNNKTATNPLTVEVPHICTKEEDQITVWGFHSDDKTQMKNLYGDSNPQKFTSSTNGITTHYVSQIGGFPDQTEDGGLPQSGRIVVDYMVQKPGKTGTIVYQRGILLPQKVWCASGRSKVIKGSLPLIGEADCLHEKYGGLNKSKPYYTGEHAKAIGNCPIWVKTPLKLANGTKYRPPAKLLKERGFFGAIAGFLEGGWEGMIAGWHGYTSHGAHGVAVAADLKSTQEAINKITKNLNSLSELEVKNLQRLSGAMDELHNEILELDEKVDDLRADTISSQIELAVLLSNEGIINSEDEHLLALERKLKKMLGPSAVDIGNGCFETKHKCNQTCLDRIAAGTFNAGEFSLPTFDSLNITAASLNDDGLDNHTILLYYSTAASSLAVTLMIAIFIVYMISRDNVSCSICL

SEQ ID NO: 26444 - protein, 585 aa, Artificial Sequence
  derived and/or modified protein sequence (wt) from hemagglutinin__InfluenzaB__ABL76958
MKAIIVLLMVVTSNADRICTGITSSNSPHVVKTATQGEVNVTGVIPLTTTPTKSHFANLKGTKTRGKLCPKCLNCTDLDVALGRPKCTGNIPSAKVSILHEVRPVTSGCFPIMHDRTKIRQLPNLLRGYEHIRLSTHNVINAEKAPGGPYKIGTSGSCPNVTNGNGFFATMAWAVPKNDNNKTATNSLTIEVPYICTEGEDQITVWGFHSDNEAQMAKLYGDSKPQKFTSSANGVTTHYVSQIGGFPNQTEDGGLPQSGRIVVDYMVQKSGKTGTITYQRGILLPQKVWCASGRSKVIKGSLPLIGEADCLHEKYGGLNKSKPYYTGEHAKAIGNCPIWVKTPLKLANGTKYRPPAKLLKERGFFGAIAGFLEGGWEGMIAGWHGYTSHGAHGVAVAADLKSTQEAINKITKNLNSLSELEVKNLQRLSGAMDELHNEILELDEKVDDLRADTISSQIELAVLLSNEGIINSEDEHLLALERKLKKMLGPSAVEIGNGCFETKHKCNQTCLDRIAAGTFNAGEFSLPTFDSLNITAASLNDDGLDNHTILLYYSTAASSLAVTLMIAIFVVYMVSRDNISCSICL

SEQ ID NO: 26445 - protein, 585 aa, Artificial Sequence
  derived and/or modified protein sequence (wt) from hemagglutinin__InfluenzaB__ABL76969
MKAIIVLLMVVTSNADRICTGITSSNSPHVVKTATQGEVNVTGVIPLTTTPTKSHFANLKGTRTRGKLCPKCLNCTDLDVALGRPKCTGNIPSAKVSILHEVRPVTSGCFPIMHDRTKIRQLPNLLRGYEHIRLSIHNVINAEKAPGGPYKIGTSGSCPNVTNGNGFFATMAWAVPKNDNNKTATNSLTIEVPYICTEGEDQITVWGFHSDNEAQMAKLYGDSKPQKFTSSANGVTTHYVSQIGGFPNQTEDGGLPQSGRIVVDYMVQKSGKTGTITYQRGILLPQKVWCASGRSKVIKGSLPLIGEADCLHEKYGGLNKSKPYYTGEHAKAIGNCPIWVKTPLKLANGTKYRPPAKLLKERGFFGAIAGFLEGGWEGMIAGWHGYTSHGAHGVAVAADLKSTQEAINKITKNLNSLSELEVKNLQRLSGAMDELHNEILELDEKVDDLRADTISSQIELAVLLSNEGIINSEDEHLLALERKLKKMLGPSAVEIGNGCFETKHKCNQTCLDRIAAGTFDAGEFSLPTFDSLNITAASLNDDGLDNHTILLYYSTAASSLAVTLMIAIFVVYMVSRDNVSCSICL

SEQ ID NO: 26446 - protein, 584 aa, Artificial Sequence
  derived and/or modified protein sequence (wt) from hemagglutinin__InfluenzaB__ABL76980
MKAIIVLLMVVTSNADRICTGITSSNSPHVVKTATQGEVNVTGVIPLTTTPTKSHFANLKGTKTRGKLCPTCLNCTDLDVALGRPMCVGITPSAKASILHEVRPVTSGCFPIMHDRTKIRQLPNLLRGYEKIRLSTQNVINAEKAPGGPYRLGTSGSCPNATSKSGFFATMAWAVPRDNNKTATNPLTVEVPYICTKEEDQITVWGFHSDNKTQMKNLYGDSDPQKFTSSANGVTTHYVSQIGGFPDQTEDGGLPQSGRIVVDYMVQKPGKTGTIVYQRGILLPQKVWCASGRSKVIKGSLPLIGEADCLHEKYGGLNKSKPYYTGEHAKAIGNCPIWVKTPLKLANGTKYRPPAKLLKERGFFGAIAGFLEGGWEGMIAGWHGYTSHGAHGVAVAADLKSTQEAINKITKNLNSLSELEVKNLQRLSGAMDELHNEILELDEKVDDLRADTISSQIELAVLLSNEGIINSEDEHLLALERKLKKMLGPSAVDIGNGCFETKHKCNQTCLDRIAAGTFNAGEFSLPTFDSLNITAASLNDDGLDNHTILLYYSTAASSLAVTLMIAIFIVYMISRDNVSCSICL

SEQ ID NO: 26447 - protein, 583 aa, Artificial Sequence
  derived and/or modified protein sequence (wt) from hemagglutinin__InfluenzaB__ABL76991
MKAIIVLLMVVTSNADRICTGITSSNSPHVVKTATQGEVNVTGVIPLTTTPTKSHFANLKGTKTRGKLCPNCLNCTDLDVALGRPMCIGITPSAKASILHEVRPVTSGCFPIMHDRTKIRQLPNLLRGYEHIRLSTHNVINAERAPGGPYRLGTSGSCPNVTSRSGFFATMAWAVPRDNKTATNPLTVEVPYICTKGEDQITVWGFHSDNKIQMKNLYGDSNPQKFTSSANGITTHYVSQIGGFPNQTEDGGLPQSGRIVVDYMVQKPGKTGTIVYQRGVLLPQKVWCASGRSKVIKGSLPLIGEADCLHEKYGGLNKSKPYYTGEHAKAIGNCPIWVKTPLKLANGTKYRPPAKLLKEKGFFGAIAGFLEGGWEGMIAGWHGYTSHGAHGVAVAADLKSTQEAINKITKNLNSLSELEVKNLQRLSGAMDELHNEILELDEKVDDLRADTISSQIELAVLLSNEGIINSEDEHLLALERKLKKMLGPSAVDIGNGCFETKHKCNQTCLDRIAAGTFNAGEFSLPTFDSLNITAASLNDDGLDNHTILLYYSTAASSLAVTLMIAIFIVYMVSRDNVSCSICL

SEQ ID NO: 26448 - protein, 584 aa, Artificial Sequence
  derived and/or modified protein sequence (wt) from hemagglutinin__InfluenzaB__ABL77002
MKAIIVLLMVVTSNADRICTGITSSNSPHVVKTATQGEVNVTGVIPLTTTPTKSHFANLKGTKTRGKLCPTCLNCTDLDVALGRPMCVGVTPSAKASILHEVRPVTSGCFPIMHDRTKIRQLPNLLRGYEKIRLSTQNVINAEKAPGGPYRLGTSGSCPNATSRSGFFATMAWAVPRDNNKTATNPLTIEVPHICTKEEDQITIWGFHSDDKTQMKNLYGDSNPQKFTSSANGVTTHYVSQIGGFPDQTEDGGLPQSGRIVVDYMVQKPGKTGTIVYQRGILLPQKVWCASGRSKVIKGSLPLIGEADCLHEKYGGLNKSKPYYTGEHAKAIGNCPIWVKTPLKLANGTKYRPPAKLLKERGFFGAIAGFLEGGWEGMIAGWHGYTSHGAHGVAVAADLKSTQEAINKITKNLNSLSELEVKNLQRLSGAMDELHNEILELDEKVDDLRADTISSQIELAVLLSNEGIINSEDEHLLALERKLKKMLGPSAVDIGNGCFETKHKCNQTCLDRIAAGTFDAGEFSLPTFDSLNITAASLNDDGLDNHTILLYYSTAASSLAVTLMIAIFIVYMISRDNVSCSICL

SEQ ID NO: 26449 - protein, 584 aa, Artificial Sequence
  derived and/or modified protein sequence (wt) from hemagglutinin__InfluenzaB__ABL77013
MKAIIVLLMVVTSNADRICTGITSSNSPHVVKTATQGEVNVTGVIPLTTTPTKSYFANLKGTKTRGKLCPTCLNCTDLDVALGRPMCVGITPSAKASILHEVRPVTSGCFPIMHDRTKIRQLPNLLRGYEKIRLSTQNVINAEKAPGGPYRLGTSGSCPNATSKSGFFATMAWAVPRDNNKTATNPLTVEVPYICTKEEDQITVWGFHSDNKNQMKNLYGDSDPQKFTSSANGVTTHYVSQIGGFPDQTEDGGLPQSGRIVVDYMVQKPGKTGTIVYQRGILLPQKVWCASGRSKVIKGSLPLIGEADCLHEKYGGLNKSKPYYTGEHAKAIGNCPIWVKTPLKLANGTKYRPPAKLLKERGFFGAIAGFLEGGWEGMIAGWHGYTSHGAHGVAVAADLKSTQEAINKITKNLNSLSELEVKNLQRLSGAMDELHNEILELDEKVDDLRADTISSQIELAVLLSNEGIINSEDEHLLALERKLKKMLGPSAVDIGNGCFETKHKCNQTCLDRIAAGTFNAGEFSLPTFDSLNITAASLNDDGLDNHTILLYYSTAASSLAVTLMIAIFIVYMISRDNVSCSICL

SEQ ID NO: 26450 - protein, 584 aa, Artificial Sequence
  derived and/or modified protein sequence (wt) from hemagglutinin__InfluenzaB__ABL77024
MKAIIVLLMVVTSNADRICTGITSSNSPHVVKTATQGEVNVTGAIPLTTTPTKSHFANLKGTKTRGKLCPTCLNCTDLDVALGRPMCVGITPSAKASILHEVRPVTSGCFPIMHDRTKIRQLPNLLRGYEKIRLSTQNVINAEKAPGGPYRLGTSGSCPNATSKSGFFATMAWAVPRDNNKTATNPLTVEVPHICTKEEDQITVWGFHSDDKTQMKNLYGDSNPQKFTSSANGITTHYVSQIGGFPDQTEDGGLPQSGRIVVDYMVQKPGKTGTIVYQRGILLPQKVWCASGRSKVIKGSLPLIGEADCLHEKYGGLNKSKPYYTGEHAKAIGNCPIWVKTPLKLANGTKYRPPAKLLKERGFFGAIAGFLEGGWEGMIAGWHGYTSHGAHGVAVAADLKSTQEAINKITKNLNSLSELEVKNLQRLSGAMDELHNEILELDEKVDDLRADTISSQIELAVLLSNEGIINSEDEHLLALERKLKKMLGPSAVDIGNGCFETKHKCNQTCLDRIAAGTFNAGEFSLPTFDSLNITAASLNDDGLDNHTILLYYSTAASSLAVTLMIAIFIVYMISRDNVSCSICL

SEQ ID NO: 26451 - protein, 584 aa, Artificial Sequence
  derived and/or modified protein sequence (wt) from hemagglutinin__InfluenzaB__ABL77035
MKAIIVLLMVVTSNADRICTGITSSNSPHVVKTATQGEVNVTGAIPLTTTPTKSHFANLKGTKTRGKLCPTCLNCTDLDVALGRPMCVGITPSAKASILHEVRPVTSGCFPIMHDRTKIRQLPNLLRGYEKIRLSTQNVINAEKAPGGPYRLGTSGSCPNATSRSGFFATMAWAVPRDNNKTATNPLTVEVPHICTKEEDQITVWGFHSDDKTQMKNLYGDSNPQKFTSSANGVTTHYVSQIGGFPDQTEDGGLPQSGRIVVDYMVQKPGKTGTIVYQRGILLPQKVWCASGRSKVIKGSLPLIGEADCLHEKYGGLNKSKPYYTGEHAKAIGNCPIWVKTPLKLANGTKYRPPAKLLKERGFFGAIAGFLEGGWEGMIAGWHGYTSHGAHGVAVAADLKSTQEAINKITKNLNSLSELEVKNLQRLSGAMDELHNEILELDEKVDDLRADTISSQIELAVLLSNEGIINSEDEHLLALERKLKKMLGPSAVDIGNGCFETKHKCNQTCLDRIAAGTFNAGEFSLPTFDSLNITAASLNDDGLDNHTILLYYSTAASSLAVTLMIAIFIVYMISRDNVSCSICL

SEQ ID NO: 26452 - protein, 584 aa, Artificial Sequence
  derived and/or modified protein sequence (wt) from hemagglutinin__InfluenzaB__ABL77046
MKAIIVLLMVVTSNADRICTGITSSNSPHVVKTATQGEVNVTGAIPLTTTPTKSHFANLKGTKTRGKLCPTCLNCTDLDVALGRPMCVGITPSAKASILHEVRPVTSGCFPIMHDRTKIRQLPNLLRGYEKIRLSTQNVINAEKAPGGPYRLGTSGSCPNATSKSGFFATMAWAVPRDNNKTATNPLTVEVPHICTKEEDQITVWGFHSDDKTQMKNLYGDSNPQKFTSSANGITTHYVSQIGGFPDQTEDGGLPQSGRIVVDYMVQKPGKTGTIVYQRGILLPQKVWCASGRSKVIKGSLPLIGEADCLHEKYGGLNKSKPYYTGEHAKAIGNCPIWVKTPLKLANGTKYRPPAKLLKERGFFGAIAGFLEGGWEGMIAGWHGYTSHGAHGVAVAADLKSTQEAINKITKNLNSLSELEVKNLQRLSGAMDELHNEILELDEKVDDLRADTISSQIELAVLLSNEGIINSEDEHLLALERKLKKMLGPSAIDIGNGCFETKHKCNQTCLDRIAAGTFNAGEFSLPTFDSLNITAASLNDDGLDNHTILLYYSTAASSLAVTLMIAIFIVYMISRDNVSCSICL

SEQ ID NO: 26453 - protein, 584 aa, Artificial Sequence
  derived and/or modified protein sequence (wt) from hemagglutinin__InfluenzaB__ABL77057
MKAIIVLLMVVTSKADRICTGITSSNSPHVVKTATQGEVNVTGAIPLTTTPTKSHFANLKGTKTRGKLCPTCLNCTDLDVALGRPMCVGITPSAKASILHEVKPVTSGCFPIMHDRTKIRQLPNLLRGYEKIRLSTQNVINAEKAPGGPYRLGTSGSCPNATSKSGFFATMAWAVPRDNNKTATNPLTVEVPHICTKEEDQITVWGFHSDNKPQMKNLYGDSNPQKFTSSANGITTHYVSQIGGFPEQTEDGGLPQSGRIVVDYMVQKPGKTGTIVYQRGILLPQKVWCASGRSKVIKGSLPLIGEADCLHEKYGGLNKSKPYYTGEHAKAIGNCPIWVKTPLKLANGTKYRPPAKLLKERGFFGAIAGFLEGGWEGMIAGWHGYTSHGAHGVAVAADLKSTQEAINKITKNLNSLSELEVKNLQRLSGAMDELHNEILELDEKVDDLRADTISSQIELAVLLSNEGIINSEDEHLLALERKLKKMLGPSAVDIGNGCFETKHKCNQTCLDRIAAGTFNAGEFSLPTFDSLNITAASLNDDGLDNHTILLYYSTAASSLAVTLMIAIFIVYMISRDNVSCSICL

SEQ ID NO: 26454 - protein, 585 aa, Artificial Sequence
  derived and/or modified protein sequence (wt) from hemagglutinin__InfluenzaB__ABL77068
MKAIIVLLMVVTSNADRICTGITSSNSPHVVKTATQGEVNVTGVIPLTTTPTKSHFANLKGTKTRGKLCPKCLNCTDLDVALGRPKCTGNIPSAKVSILHEVRPVTSGCFPIMHDRTKIRQLPNLLRGYERIRLSNHNVINAEKAPGGPYKIGTSGSCPNVTNGNGFFATMAWAVPKNENNKTATNSLTIEVPYICTEGEDQITVWGFHSDNENQMAKLYGDSKPQKFTSSANGVTTHYVSQIGGFPNQTEDGGLPQSGRIVVDYMVQKSGKTGTITYQRGILLPQKVWCASGRSKVIKGSLPLIGEADCLHEKYGGLNKSKPYYTGEHAKAIGNCPIWVKTPLKLANGTKYRPPAKLLKERGFFGAIAGFLEGGWEGMIAGWHGYTSHGAHGVAVAADLKSTQEAINKITKNLNSLSELEVKNLQRLSGAMDELHNEILELDEKVDDLRADTISSQIELAVLLSNEGIINSEDEHLLALERKLKKMLGPSAVEIGNGCFETKHKCNQTCLDRIAAGTFNAGEFSLPTFDSLNITAASLNDDGLDNHTILLYYSTAASSLAVTLMIAIFVVYMVSRDNVSCSICL

SEQ ID NO: 26455 - protein, 585 aa, Artificial Sequence
  derived and/or modified protein sequence (wt) from hemagglutinin__InfluenzaB__ABL77090
MKAIIVLLMVVTSNADRICTGITSSNSPHVVKTATQGEVNVTGVIPLTTTLTKSHFANLKGTKTRGKLCPKCLNCTDLDVALGRPKCTGNIPSAKVSILHEVRPVTSGCFPIMHDRTKIRQLPNLLRGYERIRLSNHNVINAEKAPGGPYKIGTSGSCPNVTNGNGFFATMAWAVPKNENNKTATNSLTIEVPYICTEGEDQITVWGFHSDNEIQMVKLYGDSKPQKFTSSANGVTTHYVSQIGGFPNQIEDGGLPQSGRIVVDYMVQKSGKTGTITYQRGILLPQKVWCASGRSKIIKGSLPLIGEADCLHEKYGGLNKSKPYYTGEHAKAIGNCPIWVKTPLKLANGTKYRPPAKLLKERGFFGAIAGFLEGGWEGMIAGWHGYTSHGAHGVAVAADLKSTQEAINKITKNLNSLSELEVKNLQRLSGAMDELHNEILELDEKVDDLRADTISSQIELAVLLSNEGIINSEDEHLLALERKLKKMLGPSAVEIGNGCFETKHKCNQTCLDRIAAGTFNAGEFSLPTFDSLNITAASLNDDGLDNHTILLYYSTAASSLAVTLMIAIFVVYMVSRDNVSCSICL

SEQ ID NO: 26456 - protein, 584 aa, Artificial Sequence
  derived and/or modified protein sequence (wt) from hemagglutinin__InfluenzaB__ABL77101
MKAIIVLLMVVTSKADRICTGITSSNSPHVVKTATQGEVNVTGAIPLTTTPTKSHFANLKGTKTRGKLCPTCLNCTDLDVALGRPMCVGITPSAKASILHEVKPVTSGCFPIMHDRTKIRQLPNLLRGYEKIRLSTQNVINAEKAPGGPYRLGTSGSCPNATSKSGFFATMAWAVPRDNNKTATNPLTVEVPHICTKEEDQITVWGFHSDDKTQMKNLYGDSNPQKFTSSANGITTHYVSQIGGFPEQTEDGGLPQSGRIVVDYMVQKPGKTGTIVYQRGILLPQKVWCASGRSKVIKGSLPLIGEADCLHEKYGGLNKSKPYYTGEHAKAIGNCPIWVKTPLKLANGTKYRPPAKLLKERGFFGAIAGFLEGGWEGMIAGWHGYTSHGAHGVAVAADLKSTQEAINKITKNLNSLSELEVKNLQRLSGAMDELHNEILELDEKVDDLRADTISSQIELAVLLSNEGIINSEDEHLLALERKLKKMLGPSAVDIGNGCFETKHKCNQTCLDRIAAGTFNAGEFSLPTFDSLNITAASLNDDGLDNHTILLYYSTAASSLAVTLMIAIFIVYMISRDNVSCSICL

SEQ ID NO: 26457 - protein, 585 aa, Artificial Sequence
  derived and/or modified protein sequence (wt) from hemagglutinin__InfluenzaB__ABL77134
MKAIIVLLMVVTSNADRICTGITSSNSPHVVKTATQGEVNVTGVIPLTTTPTKSHFANLKGTKTRGKLCPKCLNCTDLDVALGRPKCTGNIPSAKVSILHEVRPVTSGCFPIMHDRTKIRQLPNLLRGYERIRLSNHNVINAEKAPGGPYKIGTSGSCPNVTNGNGFFATMAWAVPKNENNKTATNSLTIEVPYICTEGEDQITVWGFHSDNEAQMAKLYGDSKPQKFTSSANGVTTHYVSQIGGFPNQTEDGGLPQSGRIVVDYMVQKSGKTGTITYQRGILLPQKVWCASGRSKVIKGSLPLIGEADCLHEKYGGLNKSKPYYTGEHAKAIGNCPIWVKTPLKLANGTKYRPPAKLLKERGFFGAIAGFLEGGWEGMIAGWHGYTSHGAHGVAVAADLKSTQEAINKITKNLNSLSELEVKNLQRLSGAMDELHNEILELDEKVDDLRADTISSQIELAVLLSNEGIINSEDEHLLALERKLKKMLGPSAVEIGNGCFETKHKCNQTCLDRIAAGTFNAGEFSLPTFDSLNITAASLNDDGLDNHTILLYYATAASSLAVTLMIAIFVVYMVSRDNVSCSICL

SEQ ID NO: 26458 - protein, 585 aa, Artificial Sequence
  derived and/or modified protein sequence (wt) from hemagglutinin__InfluenzaB__ABL77145
MKAIIVLLMVVTSNADRICTGITSSNSPHVVKTATQGEVNVTGVIPLTTTPTKSHFANLKGTKTRGKLCPKCLNCTDLDVALGRPKCTGNIPSAKVSILHEVRPVTSGCFPIMHDRTKIRQLPNLLRGYERIRLSNHNVINAEEAPGGPYKIGTSGSCPNVTNGNGFFATMAWAVPKNENNKTATNSLTIEVPYICTEGEDQITVWGFHSDSETQMAKLYGDSKPQKFTSSANGVTTHYVSQIGGFPNQTEDGGLPQSGRIVVDYMVQKSGKTGTITYQRGILLPQKVWCASGRSKVIKGSLPLIGEADCLHEKYGGLNKSKPYYTGEHAKAIGNCPIWVKTPLKLANGTKYRPPAKLLKERGFFGAIAGFLEGGWEGMIAGWHGYTSHGAHGVAVAADLKSTQEAINKITKNLNSLSELEVKNLQRLSGAMDELHNEILELDEKVDDLRADTISSQIELAVLLSNEGIINSEDEHLLALERKLKKMLGPSAVEIGNGCFETKHKCNQTCLDRIAAGTFNAGEFSLPTFDSLNITAASLNDDGLDNHTILLYYSTAASSLAVTLMIAIFVVYMVSRDNVSCSICL

SEQ ID NO: 26459 - protein, 584 aa, Artificial Sequence
  derived and/or modified protein sequence (wt) from hemagglutinin__InfluenzaB__ABL77156
MKAIIVLLMVVTSNADRICTGITSSNSPHVVKTATQGEVNVTGVIPLTTTPTKSYFANLKGTRTRGKLCPDCLNCTDLDVALGRPMCVGTTPSAKASILHEVRPVTSGCFPIMHDRTKIRQLPNLLRGYENIRLSTQNVIDAEKAPGGPYRLGTSGSCPNATSKSGFFATMAWAVPKDNNKNATNPLTVEVPYVCTEGEDQITVWGFHSDDKTQMKNLYGDSNPQKFTSSANGVTTHYVSQIGGFPDQTEDGGLPQSGRIVVDYMVQKPGKTGTIVYQRGVLLPQKVWCASGRSKVIKGSLPLIGEADCLHEKYGGLNKSKPYYTGEHAKAIGNCPIWVKTPLKLANGTKYRPPAKLLKERGFFGAIAGFLEGGWEGMIAGWHGYTSHGAHGVAVAADLKSTQEAINKITKNLNSLSELEVKNLQRLSGAMDELHNEILELDEKVDDLRADTISSQIELAVLLSNEGIINSEDEHLLALERKLKKMLGPSAVDIGNGCFETKHKCNQTCLDRIAAGTFNAGEFSLPTFDSLNITAASLNDDGLDNHTILLYYSTAASSLAVTLMLAIFIVYMVSRDNVSCSICL

SEQ ID NO: 26460 - protein, 585 aa, Artificial Sequence
  derived and/or modified protein sequence (wt) from hemagglutinin__InfluenzaB__ABL77178
MKAIIVLLMVVTSNADRICTGITSSNSPHVVKTATQGEVNVTGVIPLTTTPTKSHFANLKGTKTRGKLCPKCLNCTDLDVALGRPKCTGNIPSAKVSILHEVRPVTSGCFPIMHDRTKIRQLPNLLRGYERIRLSNHNVINAEKAPGGPYKIGTSGSCPNVTNGNGFFATMAWAVPKNENNKTATNSLTIEVPYICTEGEDQITVWGFHSDSETQMAKLYGDSKPQKFTSSANGVTTHYVSQIGGFPNQTEDGGLPQSGRIVVDYMVQKSGKTGTITYQRGILLPQKVWCASGRSKVIKGSLPLIGEADCLHEKYGGLNKSKPYYTGEHAKAIGNCPIWVKTPLKLANGTKYRPPAKLLKERGFFGAIAGFLEGGWEGMIAGWHGYTSHGAHGVAVAADLKSTQEAINKITKNLNSLSELEVKNLQRLSGAMDELHNEILELDEKVDDLRADTISSQIELAVLLSNEGIINSEDEHLLALERKLKKMLGPSAVEIGNGCFETKHKCNQTCLDRIAAGTFNAGEFSLPTFDSLNITAASLNDDGLDNHTILLYYSTAASSLAVTLMIAIFVVYMVSRDNVSCSICL

SEQ ID NO: 26461 - protein, 584 aa, Artificial Sequence
  derived and/or modified protein sequence (wt) from hemagglutinin__InfluenzaB__ABL77189
MKAIIVLLMVVTSNADRICTGITSSNSPHVVKTATQGEVNVTGVIPLTTTPTKSYFANLKGTRTRGKLCPDCLNCTDLDVALGIPMCVGTTPSAKASILHEVRPVTSGCFPIMHDRTKIRQLPNLLRGYENIRLSTQNVIDAEKAPGGPYRLGTSGSCPNATSKSGFFATMAWAVPKDNNKNATNPLTVEVPYVCTEGEDQITVWGFHSDNKIQMKNLYGDSNPQKFTSSANGVTTHYVSQIGGFPDQTEDGGLPQSGRIVVDYMVQKPGKTGTIVYQRGVLLPQKVWCASGRSKVIKGSLPLIGEADCLHEKYGGLNKSKPYYTGEHAKAIGNCPIWVKTPLKLANGTKYRPPAKLLKERGFFGAIAGFLEGGWEGMIAGWHGYTSHGAHGVAVAADLKSTQEAINKITKNLNSLSELEVKNLQRLSGAMDELHNEILELDEKVDDLRADTISSQIELAVLLSNEGIINSEDEHLLALERKLKKMLGPSAVDIGNGCFETKHKCNQTCLDRIAAGTFNAGEFSLPTFDSLNITAASLNDDGLDNHTILLYYSTAASSLAVTLMLAIFIVYMVSRDNVSCSICL

SEQ ID NO: 26462 - protein, 585 aa, Artificial Sequence
  derived and/or modified protein sequence (wt) from hemagglutinin__InfluenzaB__ABL77200
MKAIIVLLMVVTSNADRICTGITSSNSPHVVKTATQGEVNVTGVIPLTTTPTKSHFANLKGTKTRGKLCPKCLNCTDLDVALGRPKCMGNIPSAKVSILHEVRPVTSGCFPIMHDRTKIRQLPNLLRGYEHIRLSTHNVINAEKAPGGPYKIGTSGSCPNVTNGNGFFATMAWAVPKNDNNKTATNSLTIEVPYICTEGEDQITVWGFHSDNETQMAKLYGDSKPQKFTSSANGVTTHYVSQIGGFPNQTEDGGLPQSGRIVVDYMVQKSGKAGTITYQRGILLPQKVWCASGRSKVIKGSLPLIGEADCLHEKYGGLNKSKPYYTGEHAKAIGNCPIWVKTPLKLANGTKYRPPAKLLKERGFFGAIAGFLEGGWEGMIAGWHGYTSHGAHGVAVAADLKSTQEAINKITKNLNSLSELEVKNLQRLSGAMDELHNEILELDGKVDDLRADTISSQIELAVLLSNEGIINSEDEHLLALERKLKKMLGPSAVEIGNGCFETKHKCNQTCLDRIAAGTFDAGEFSLPTFDSLNITAASLNDDGLDNHTILLYYSTAASSLAVTLMIAIFVVYMVSRDNVSCSICL

SEQ ID NO: 26463 - protein, 584 aa, Artificial Sequence
  derived and/or modified protein sequence (wt) from hemagglutinin__InfluenzaB__ABL77222
MKAIIVLLMVVTSNADRICTGITSSNSPHVVKTATQGEVNVTGVIPLTTTPTKSYFANLKGTRTRGKLCPDCLNCTDLDVALGRPMCVGTTPSAKASILHEVRPVTSGCFPIMHDRTKIRQLANLLRGYENIRLSTQNVIDAEKAPGGPYRLGTSGSCPNATSKSGFFATMAWAVPKDNNKNATNPLTVEVPYICTEGEDQITVWGFHSDSKTQMKNLYGDSNPQKFTSSANGVTTHYVSQIGGFPDQTEDGGLPQSGRIVVDYMMQKPGKTGTIVYQRGVLLPQKVWCASGRSKVIKGSLPLIGEADCLHEKYGGLNKSKPYYTGEHAKAIGNCPIWVKTPLKLANGTKYRPPAKLLKERGFFGAIAGFLEGGWEGMIAGWHGYTSHGAHGVAVAADLKSTQEAINKITKNLNSLSELEVKNLQRLSGAMDELHNEILELDEKVDDLRADTISSQIELAVLLSNEGIINSEDEHLLALERKLKKMLGPSAVDIGNGCFETKHKCNQTCLDRIAAGTFNAGEFSLPTFDSLNITAASLNDDGLDNHTILLYYSTAASSLAVTLMLAIFIVYMVSRDNVSCSICL

SEQ ID NO: 26464 - protein, 585 aa, Artificial Sequence
  derived and/or modified protein sequence (wt) from hemagglutinin__InfluenzaB__ABL77233
MKAIIVLLMVVTSNADRICTGITSSNSPHVVKTATQGEVNVTGVIPLTTTPTKSHFANLKGTKTRGKLCPKCLNCTDLDVALGRPKCTGNIPSAEVSILHEVRPVTSGCFPIMHDRTKIRQLPNLLRGYEHIRLSTHNVINAEKAPGGPYKIGTSGSCPNVTNGNGFFATMAWAVPKNDNNKTATNSLTIEVPYICTEGEDQITIWGFHSDNEAQMAKLYGDSKPQKFTSSANGVTTHYVSQIGGFPNQTEDGGLPQSGRIVVDYMVQKSRKTGTITYQRGILLPQKVWCASGRSKVIKGSLPLIGEADCLHEKYGGLNKSKPYYTGEHAKAIGNCPIWVKTPLKLANGTKYRPPAKLLKERGFFGAIAGFLEGGWEGMIAGWHGYTSHGAHGVAVAADLKSTQEAINKITKNLNSLSELEVKNLQRLSGAMDELHNEILELDEKVDDLRADTISSQIELAVLLSNEGIINSEDEHLLALERKLKKMLGPSAVEIGNGCFETKHKCNQTCLDRIAAGTFDAGEFSLPTFDSLNITAASLNDDGLDNHTILLYYSTAASSLAVTLMIAIFVVYMVSRDNVSCSICL

SEQ ID NO: 26465 - protein, 585 aa, Artificial Sequence
  derived and/or modified protein sequence (wt) from hemagglutinin__InfluenzaB__ABL77244
MKAIIVLLMVVTSNADRICTGITSSNSPHVVKTATQGEVNVTGVIPLTTTPTKSHFANLKGTKTRGKLCPKCLNCTDLDVALGRPKCTGTIPSAKASILHEVKPVTSGCFPIMHDRTKIRQLPNLLRGYEHIRLSTHNVINAETAPGGPYKVGTSGSCPNVTNGNGFFATMAWAVPKNDNNKTATNPLTVEVPYICTEGEDQITVWGFHSDNEAQMVKLYGDSKPQKFTSSANGVTTHYVSQIGGFPNQAEDGGLPQSGRIVVDYMVQKSGKTGTITYQRGILLPQKVWCASGRSKVIKGSLPLIGEADCLHEKYGGLNKSKPYYTGEHAKAIGNCPIWVKTPLKLANGTKYRPPAKLLKEKGFFGAIAGFLEGGWEGMIAGWHGYTSHGAHGVAVAADLKSTQEAINKITKNLNSLSELEVKNLQRLSGAMDELHNKILELDEKVDDLRADTISSQIELAVLLSNEGIINSEDEHLLALERKLKKMLGPSAVEIGNGCFETKHKCNQTCLDRIAAGTFNAGEFSLPTFDSLNITAASLNDDGLDNHTILLYYSTAASSLAVTLMIAIFIVYMVSRDNVSCSICL

SEQ ID NO: 26466 - protein, 583 aa, Artificial Sequence
  derived and/or modified protein sequence (wt) from hemagglutinin__InfluenzaB__ABL77255
MKAIIVLLMVVTSNADRICTGITSSNSPHVVKTATQGEVNVTGVIPLTTTPTKSHFANLKGTKTRGKLCPNCLNCTDLDVALGRPMCMGTIPSAKASILHEVRPVTSGCFPIMHDRTKIRQLPNLLRGYENIRLSTHNVINAERAPGGPYRLGTSGSCPNVTSRNGFFATMAWAVPRDNKTATNPLTVEVPYICTKGEDQITVWGFHSDDKTQMKNLYGDSNPQKFTSSANGVTTHYVSQIGDFPNQTEDGGLPQSGRIVVDYMVQKPGKTGTIVYQRGVLLPQKVWCASGRSKVIKGSLPLIGEADCLHEKYGGLNKSKPYYTGEHAKAIGNCPIWVKTPLKLANGTKYRPPAKLLKERGFFGAIAGFLEGGWEGMIAGWHGYTSHGAHGVAVAADLKSTQEAINKITKNLNSLSELEVKNLQRLSGAMDELHNEILELDEKVDDLRADTISSQIELAVLLSNEGIINSEDEHLLALERKLKKMLGPSAVDIGNGCFETKHKCNQTCLDRIAAGTFNAGEFSLPTFDSLNITAASLNDDGLDNHTILLYYSTAASSLAVTLMIAIFIVYMVSRDNVSCSICL

SEQ ID NO: 26467 - protein, 583 aa, Artificial Sequence
  derived and/or modified protein sequence (wt) from hemagglutinin__InfluenzaB__ABL77266
MKAIIVLLMVVTSNADRICTGITSSNSPHVVKTATQGEVNVTGVIPLTTTPTKSHFANLKGTKTRGKLCPNCLNCTDLDVALGRPMCVGTTPSAKASILHEVRPVTSGCFPIMHDRTKIRQLPNLLRGYENIRLSTQNVINAERAPGGPYRLGTSGSCPNVTSRDGFFATMAWAVPRDNKTATNPLTVEVPYICTKGEDQITVWGFHSDSKTQMKNLYGDSNPQKFTSSANGVTTHYVSQIGGFPNQTEDGGLPQSGRIVVDYMVQKPGKTGTIVYQRGVLLPQKVWCASGRSKVIKGSLPLIGEADCLHEKYGGLNKSKPYYTGEHAKAIGNCPIWVKTPLKLANGTKYRPPAKLLKERGFFGAIAGFLEGGWEGMIAGWHGYTSHGAHGVAVAADLKSTQEAINKITKNLNSLSELEVKNLQRLSGAMDELHNEILELDEKVDDLRADTISSQIELAVLLSNEGIINSEDEHLLALERKLKKMLGPSAVDIGNGCFETKHKCNQTCLDRIAAGTFNAGEFSLPTFDSLNITAASLNDDGLDNHTILLYYSTAASSLAVTLMIAIFIVYMVSRDNVSCSICL

SEQ ID NO: 26468 - protein, 583 aa, Artificial Sequence
  derived and/or modified protein sequence (wt) from hemagglutinin__InfluenzaB__ABL77277
MKAIIVLLMVVTSNADRICTGITSSNSPHVVKTATQGEVNVTGVIPLTTTPTKSHFANLKGTKTRGKLCPNCLNCTDLDVALGRPMCVGNTPSAKASILHEVRPVTSGCFPIMHDRTKIRQLPNLLRGYENIRLSTQNVINAERAPGGPYRLGTSGSCPNVTNRDGFFATMAWAVPRDNKTATNPLTVEVPYICTKGEDQITVWGFHSDNKIQMKNLYGDSNPQKFTSSANGVTTHYVSQIGGFPNQTEDGGLPQSGRIVVDYMVQKPGKTGTIVYQRGVLLPQKVWCASGRSKVIKGSLPLIGEADCLHEKYGGLNKSKPYYTGEHAKAIGNCPIWVKTPLKLANGTKYRPPAKLLKERGFFGAIAGFLEGGWEGMIAGWHGYTSHGAHGVAVAADLKSTQEAINKITKNLNSLSELEVKNLQRLSGAMDELHNEILELDEKVDDLRADTISSQIELAVLLSNEGIINSEDEHLLALERKLKKMLGPSAVDIGNGCFETKHKCNQTCLDRIAAGTFNAGEFSLPTFDSLNITAASLNDDGLDNHTILLYYSTAASSLAVTLMIAIFIVYMVSRDNVSCSICL

SEQ ID NO: 26469 - protein, 583 aa, Artificial Sequence
  derived and/or modified protein sequence (wt) from hemagglutinin__InfluenzaB__ABL77288
MKAIIVLLMVVTSNADRICTGITSSNSPHVVKTATQGEVNVTGVIPLTTTPTKSHFANLKGTKTRGKLCPNCLNCTDLDVALGRPMCVGTTPSAKASILHEVRPVTSGCFPIMHDRTKIRQLPNLLRGYEHIRLSTQNVINAEKAPGGPYKLGTSGSCPNATSRSGFFATMAWAVPRDNKTATNPLTVEVPYICTKGEDQITVWGFHSDTKTQMKNLYGDSNPQKFTSSANGVTTHYVSQIGGFPDQTEDGGLPQSGRIVVDYMVQKPGKTGTIVYQRGVLLPQKVWCASGRSKVIKGSLPLIGEADCLHEKYGGLNKSKPYYTGEHAKAIGNCPIWVKTPLKLANGTKYRPPAKLLKERGFFGAIAGFLEGGWEGMIAGWHGYTSHGAHGVAVAADLKSTQEAINKITKNLNSLSELEVKNLQRLSGAMDELHNEILELDEKVDDLRADTISSQIELAVLLSNEGIINSEDEHLLALERKLKKMLGPSAVDIGNGCFETKHKCNQTCLDRIAAGTFNAGEFSLPTFDSLNITAASLNDDGLDNHTILLYYSTAASSLAVTLMIAIFIVYMVSRDNVSCSICL

SEQ ID NO: 26470 - protein, 583 aa, Artificial Sequence
  derived and/or modified protein sequence (wt) from hemagglutinin__InfluenzaB__ABL77299
MKAIIVLLMVVTSNADRICTGITSSNSPHVVKTATQGEVNVTGVIPLTTTPTKSHFANLKGTKTRGKLCPNCLNCTDLDVALGRPMCIGNIPSAKASILHEVRPVTSGCFPIMHDRTKIRQLPNLLRGYEHIRLSTHNVINAERAPGGPYRLGTSGSCPNVTSRSGFFATMAWAVPRDNKTATNPLTVEVPYICTKGEDQITVWGFHSDNETQMKNLYGDSNPQKFTSSANGITTHYVSQIGGFPNQTEDGGLPQSGRIVVDYMVQKPGKTGTIVYQRGVLLPQKVWCASGRSKVIKGSLPLIGEADCLHEKYGGLNKSKPYYTGEHAKAIGNCPIWVKTPLKLANGTKYRPPAKLLKERGFFGAIAGFLEGGWEGMIAGWHGYTSHGAHGVAVAADLKSTQEAINKITKNLNSLSELEVKNLQRLSGAMDELHNEILELDEKVDDLRADTISSQIELAVLLSNEGIINSEDEHLLALERKLKKMLGPSAVDIGNGCFETKHKCNQTCLDRIAAGTFNAGEFSLPTFDSLNITAASLNDDGLDNHTILLYYSTAASSLAVTLMIAIFIVYMVSRDNVSCSICL

SEQ ID NO: 26471 - protein, 583 aa, Artificial Sequence
  derived and/or modified protein sequence (wt) from hemagglutinin__InfluenzaB__ABL77310
MKAIIVLLMVVTSNADRICTGITSSNSPHVVKTATQGEVNVTGVIPLTTTPTKSHFANLKGTKTRGKLCPNCLNCTDLDVALGRPMCIGTIPSAKASILHEVRPVTSGCFPIMHDRTKIRQLPNLLRGYEHIRLSTHNVINAERAPGGPYRLGTSGSCPNVTSRSGFFATMAWAVPRDNKTATNPLTVEVPYICTKGEDQITVWGFHSDNKNQMKNLYGDSNPQKFTSSANGVTTHYVSQIGGFPNQTEDGGLPQSGRIVVDYMVQKPGKTGTIVYQRGVLLPQKVWCVSGRSKVIKGSLPLIGEADCLHEKYGGLNKSKPYYTGEHAKAIGNCPIWVKTPLKLANGTKYRPPAKLLKERGFFGAIAGFLEGGWEGMIAGWHGYTSHGAHGVAVAADLKSTQEAINKITKNLNSLSELEVKNLQRLSGAMDELHNEILELDEKVDDLRADTISSQIELAVLLSNEGIINSEDEHLLALERKLKKMLGPSAVDIGNGCFETKHKCNQTCLDRIAAGTFNAGEFSLPTFDSLNITAASLNDDGLDNHTILLYYSTAASSLAVTLMIAIFIVYMVSRDNVSCSICL

SEQ ID NO: 26472 - protein, 585 aa, Artificial Sequence
  derived and/or modified protein sequence (wt) from hemagglutinin__InfluenzaB__ABL77321
MKAIIVLLMVVTSNADRICTGITSSNSPHVVKTATQGEVNVTGVIPLTTTPTKSHFANLKGTKTRGKLCPKCLNCTDLDVALGRPKCTGTIPSAKVSILHEVKPVTSGCFPIMHDRTKIRQLPNLLRGYEHIRLSTHNVINAEKAPGGPYKIGTSGSCPNITNGNGFFATMAWAVPKNDNNKTATNSLTVEVPYICTEGEDQITVWGFHSDNETQMAKLYGDSKPQKFTSSANGVTTHYVSQIGGFPNQAEDGGLPQSGRIVVDYMVQKSGKTGTITYQRGILLPQKVWCASGRSKVIKGSLPLIGEADCLHEKYGGLNKSKPYYTGEHAKAIGNCPIWVKTPLNLANGTKYRPPAKLLKERGFFGAIAGFLEGGWEGMIAGWHGYTSHGAHGVAVAADLKSTQEAINKITKNLNSLSELEVKNLQRLSGAMDELHNEILELDEKVDDLRADTISSQIELAVLLSNEGIINSEDEHLLALERKLKKMLGPSAVEIGNGCFETKHKCNQTCLDRIAAGTFNAGEFSLPTFDSLNITAASLNDDGLDNHTILLYYSTAASSLAVTLMIAIFIVYMVSRDNVSCSICL

SEQ ID NO: 26473 - protein, 584 aa, Artificial Sequence
  derived and/or modified protein sequence (wt) from hemagglutinin__InfluenzaB__ABL77332
MKAIIVLLMVVTSNADRICTGITSSNSPHVVKTATQGEVNVTGVIPLTTTPTKSHFANLKGTKTRGKLCPNCLNCTDLDVALGRPMCVGTTPSAKASILHEVRPVTSGCFPIMHDRTKIRQLPNLLRGYENIRLSTQNVINAEKAPGGPYKLGTSGSCPNATSRSGFFATMAWAVPRDNNKTATNPLTVEVPYICTKGEDQITVWGFHSDDKTQMKNLYGDSNPQKFTSSANGVTTHYVSQIGGFPDQTEDGGLPQSGRIVVDYMVQKPGKTGTIVYQRGVLLPQKVWCASGRSKVIKGSLPLIGEADCLHEKYGGLNKSKPYYTGEHAKAIGNCPIWVKTPLKLANGTKYRPPAKLLKERGFFGAIAGFLEGGWEGMIAGWHGYTSHGAHGVAVAADLKSTQEAINKITKNLNSLSELEVKNLQRLSGAMDELHNEILELDEKVDDLRADTISSQIELAVLLSNEGIINSEDEHLLALERKLKKMLGPSAVDIGNGCFETKHKCNQTCLDRIAAGTFNAGEFSLPTFDSLNITAASLNDDGLDNHAILLYYSTAASSLAVTLMIAIFIVYMVSRDNVSCSICL

SEQ ID NO: 26474 - protein, 584 aa, Artificial Sequence
  derived and/or modified protein sequence (wt) from hemagglutinin__InfluenzaB__ABL77343
MKAIIVLLMVVTSNADRICTGITSSNSPHVVKTATQGEVNVTGVIPLTTTPTKSHFANLKGTKTRGKLCPNCLNCTDLDVALGRPMCVGTTPSAKASILHEVRPVTSGCFPIMHDRTKIRQLPNLLRGYENIRLSTQNVINAEKAPGGPYRLGTSGSCPNATSRSGFFATMAWAVPRDNNKTATNPLTVEVPYICTKGEDQITVWGFHSDNKIQMKNLYGDSNPQKFTSSANGVTTHYVSQIGGFPDQTEDGGLPQSGRIVVDYMVQKPGKTGTIVYQRGVLLPQKVWCASGRSKVVKGSLPLIGEADCLHEKYGGLNKSKPYYTGEHAKAIGNCPIWVKTPLKLANGTKYRPPAKLLKERGFFGAIAGFLEGGWEGMIAGWHGYTSHGAHGVAVAADLKSTQEAINKITKNLNSLSELEVKNLQRLSGAMDELHNEILELDEKVDDLRADTISSQIELAVLLSNEGIINSEDEHLLALERKLKKMLGPSAVDIGNGCFETKHKCNQTCLDRIAAGTFNAGEFSLPTFDSLNITAASLNDDGLDNHTILLYYSTAASSLAVTLMIAIFIVYMVSRDNVSCSICL

SEQ ID NO: 26475 - protein, 584 aa, Artificial Sequence
  derived and/or modified protein sequence (wt) from hemagglutinin__InfluenzaB__ABL77365
MKAIIVLLMVVTSNADRICTGITSSNSPHVVKTATQGEVNVTGVIPLTTTPTKSHFANLKGTKTRGKLCPNCLNCTDLDVALGRPMCVGTTPSAKASILHEVRPVTSGCFPIMHDRTKIRQLPNLLRGYENIRLSTQNVINAEKAPGGPYRLGTSGSCPNATSRSGFFATMAWAVPRDNNKTATNPLTVEVPYVCTEGEDQITVWGFHSDNKTQMKNLYGDSNPQKFTSSANGVTTHYVSQIGGFPDQAEDGGLPQSGRIVVDYMVQKPGKTGTIVYQRGVLLPQKVWCASGRSKVIKGSLPLIGEADCLHEKYGGLNKSKPYYTGEHAKAIGNCPIWVKTPLKLANGTKYRPPAKLLKERGFFGAIAGFLEGGWEGMIAGWHGYTSHGAHGVAVAADLKSTQEAINKITKNLNSLSELEVKNLQRLSGAMDELHNEILELDEKVDDLRADTISSQIELAVLLSNEGIINSEDEHLLALERKLKKMLGPSAVDIGNGCFETKHKCNQTCLDRIAAGTFNAGEFSLPTFDSLNITAASLNDDGLDNHTILLYYSTAASSLAVTLMIAIFIVYMVSRDNVSCSICL

SEQ ID NO: 26476 - protein, 584 aa, Artificial Sequence
  derived and/or modified protein sequence (wt) from hemagglutinin__InfluenzaB__ABL84340
MKAIIVLLMVVTSNADRICTGITSSNSPHVVKTATQGEVNVTGVIPLTTTPTKSHFANLKGTKTRGKLCPTCLNCTDLDVALGRPMCVGITPSAKASILHEVRPVTSGCFPIMHDRTKIRQLPNLLRGYEKIRLSTQNVINAEKAPGGPYRLGTSGSCPNTTSKSGFFATMAWAVPRDNNKTATNPLTVEVPHICTKEEDQITVWGFHSDNKTQMKNLYGDSNPQKFTSSANGVTTHYVSQIGGFPDQTEDGGLPQSGRIVVDYMVQKPGKTGTIVYQRGILLPQKVWCASGRSKVIKGSLPLIGEADCLHEKYGGLNKSKPYYTGEHAKAIGNCPIWVKTPLKLANGTKYRPPAKLLKERGFFGAIAGFLEGGWEGMIAGWHGYTSHGAHGVAVAADLKSTQEAINKITKNLNSLSELEVKNLQRLSGAMDELHNEILELDEKVDDLRADTISSQIELAVLLSNEGIINSEDEHLLALERKLKKMLGPSAVDIGNGCFETKHKCNQTCLDRIAAGTFNAGEFSLPTFDSLNITAASLNGDGLDNHTILLYYSTAASSLAVTLMIAIFIVYMISRDNVSCSICL

SEQ ID NO: 26477 - protein, 584 aa, Artificial Sequence; identical to SEQ ID NO: 26398
  derived and/or modified protein sequence (wt) from hemagglutinin__InfluenzaB__ABN50382

SEQ ID NO: 26478 - protein, 584 aa, Artificial Sequence; identical to SEQ ID NO: 26398
  derived and/or modified protein sequence (wt) from hemagglutinin__InfluenzaB__ABN50393

SEQ ID NO: 26479 - protein, 584 aa, Artificial Sequence
  derived and/or modified protein sequence (wt) from hemagglutinin__InfluenzaB__ABN50404
MKAIIVLLMVVTSNADRICTGITSSNSPHVVKTATQGEVNVTGVIPLTTTPTKSHFANLKGTKTRGKLCPTCLNCTDLDVALGRPMCVGVTPSAKASILHEVRPVTSGCFPIMHDRTKIRQLPNLLRGYEKIRLSTQNVINAEKAPGGPYRLGTSGSCPNATSRSGFFATMAWAVPRDNNKTATNPLTVEVPHICTKEEDQITVWGFHSDNKTQMKNLYGDSNPQKFTSSANGVTTHYVSQIGGFPDQTEDGGLPQSGRIVVDYMVQKPGKTGTIVYQRGILLPQKVWCASGRSKVIKGSLPLIGEADCLHEKYGGLNKSKPYYTGEHAKAIGNCPIWVKTPLKLANGTKYRPPAKLLKERGFFGAIAGFLEGGWEGMIAGWHGYTSHGAHGVAVAADLKSTQEAINKITKNLNSLSELEVKNLQRLSGAMDELHNEILELDEKVDDLRADTISSQIELAVLLSNEGIINSEDEHLLALERKLKKMLGPSAVDIGNGCFETKHKCNQTCLDRIAAGTFNAGEFSLPTFDSLNITAASLNDDGLDNHTILLYYSTAASSLAVTLMIAIFIVYMISRDNVSCSICL

SEQ ID NO: 26480 - protein, 584 aa, Artificial Sequence; identical to SEQ ID NO: 26407
  derived and/or modified protein sequence (wt) from hemagglutinin__InfluenzaB__ABN50415

SEQ ID NO: 26481 - protein, 584 aa, Artificial Sequence; identical to SEQ ID NO: 26407
  derived and/or modified protein sequence (wt) from hemagglutinin__InfluenzaB__ABN50426

SEQ ID NO: 26482 - protein, 584 aa, Artificial Sequence
  derived and/or modified protein sequence (wt) from hemagglutinin__InfluenzaB__ABN50437
MKAIIVLLMVVTSNADRICTGITSSNSPHVVKTATQGEVNVTGVIPLTTTPTKSYFANLKGTRTRGKLCPDCLNCTDLDVALGRPMCVGTTPSAKASILHEVRPVTSGCFPIMHDRTKIRQLPNLLRGYENIRLSTQNVIDAEKAPGGPYRLGTSGSCPNATSKSGFFATMAWAVPKDNNKNATNPLTVEVPYICTEGEDQITVWGFHSDNKTQMKNLYGDPNPQKFTSSANGVTTHYVSQIGGFPDQTEDGGLPQSGRIVVDYMMQKPGKTGTIVYQRGVLLPQKVWCASGKSKVIKGSLPLIGEADCLHEKYGGLNKSKPYYTGEHAKAIGNCPIWVKTPLKLANGTKYRPPAKLLKERGFFGAIAGFLEGGWEGMIAGWHGYTSHGAHGVAVAADLKSTQEAINKITKNLNSLSELEVKNLQRLSGAMDELHNEILELDEKVDDLRADTISSQIELAVLLSNEGIINSEDEHLLALERKLKKMLGPSAVDIGNGCFETKHKCNQTCLDRIAAGTFNAGEFSLPTFDSLNITAASLNDDGLDNHTILLYYSTAASSLAVTLMLAIFIVYMVSRDNVSCSICL

SEQ ID NO: 26483 - protein, 585 aa, Artificial Sequence
  derived and/or modified protein sequence (wt) from hemagglutinin__InfluenzaB__ABN50459
MKALIVLLMVVTSNADRICTGITSSNSPHVVKTATQGEVNVTGVIPLTTTPTKSHFANLKGTKTRGKLCPKCLNCTDLDVALGRPKCTGNIPSAEVSILHEVRPVTSGCFPIMHDRTKIRQLPNLLRGYEHIRLSTHNVINAEKAPGGPYKIGTSGSCPNVTNGNGFFATMAWAVPKNDNNKTATNSLTIEVPYICTEGEDQITIWGFHSDNEIQMAKLYGDSKPQKFTSSANGVTTHYVSQIGGFPNQTEDGGLPQSGRIVVDYMVQKSGKTGTITYQRGILLPQKVWCASGRSKVIKGSLPLIGEADCLHEKYGGLNKSKPYYTGEHAKAIGNCPIWVKTPLKLANGTKYRPPAKLLKERGFFGAIAGFLEGGWEGMIAGWHGYTSHGAHGVAVAADLKSTQEAINKITKNLNSLSELEVKNLQRLSGAMDELHNEILELDEKVDDLRADTISSQIELAVLLSNEGIINSEDEHLLALERKLKKMLGPSAVEIGNGCFETKHKCNQTCLDRIAAGTFDAGEFSLPTFDSLNITAASLNDDGLDNHTILLYYSTAASSLAVTLMIAIFVVYMVSRDNVSCSICL

SEQ ID NO: 26484 - protein, 585 aa, Artificial Sequence
  derived and/or modified protein sequence (wt) from hemagglutinin__InfluenzaB__ABN50470
MKAIIVLLMVVTSNADRICTGITSSNSPHVVKTATQGEVNVTGVIPLTTTPTKSHFANLKGTKTRGKLCPKCLNCTDLDVALGRPKCTGNIPSAKVSILHEVRPVTSGCFPIMHDRTKIRQLPNLLRGYERIRLSNHNVINAEKAPGGPYKIGTSGSCPNVTNGNGFFATMAWAVPKNENNKTATNSLTIEVPYICTEGEDQITVWGFHSDNEIQMAKLYGDSKPQKFTSSANGVTTHYVSQIGGFPNQTEDGGLPQSGRIVVDYMVQKSGKTGTITYQRGILLPQKVWCASGRSKVIKGSLPLIGEADCLHEKYGGLNKSKPYYTGEHAKAIGNCPIWVKTPLKLANGTKYRPPAKLLKERGFFGAIAGFLEGGWEGMIAGWHGYTSHGAHGVAVAADLKSTQEAINKITKNLNSLSELEVKNLQRLSGAMDELHNEILELDEKVDDLRADTISSQIELAVLLSNEGIINSEDEHLLALERKLKKMLGPSAVEIGNGCFETKHKCNQTCLDRIAAGTFNAGEFSLPTFDSLNITAASLNDDGLDNHTILLYYSTAASSLAVTLMIAIFVVYMVSRDNVSCSICL

SEQ ID NO: 26485 - protein, 584 aa, Artificial Sequence
  derived and/or modified protein sequence (wt) from hemagglutinin__InfluenzaB__ABN50481
MKAIIVLLLVVTSNADRICTGITSSNSPHVVKTATQGEVNVTGAIPLTTTPTKSHFANLKGTKTRGKLCPTCFNCTDLDVALGRPMCVGITPSAKASILHEVRPVTSGCFPIMHDRTKIRQLPNLLRGYEKIRLSTQNVIDAEKAPGGPYRLGTSGSCPNATSKSGFFATMAWAVPRDNNKTATNPLTVEVPHICTKEEDQITVWGFHSDNKTQMKNLYGDSNPQKFTSSANGITTHYVSQIGGFPDQTEDGGLPQSGRIVVDYMVQKPGKTGTIVYQRGILLPQKVWCASGRSKVIKGSLPLIGEADCLHEKYGGLNKSKPYYTGEHAKAIGNCPIWVKTPLKLANGTKYRPPAKLLKERGFFGAIAGFLEGGWEGMIAGWHGYTSHGAHGVAVAADLKSTQEAINKITKNLNSLSELEVKNLQRLSGAMDELHNEILELDEKVDDLRADTISSQIELAVLLSNEGIINSEDEHLLALERKLKKMLGPSAVDIGNGCFETKHKCNQTCLDRIAAGTFNAGEFSLPTFDSLNITAASLNDDGLDNHTILLYYSTAASSLAVTLMIAIFIVYMISRDNVSCSICL

SEQ ID NO: 26486 - protein, 584 aa, Artificial Sequence
  derived and/or modified protein sequence (wt) from hemagglutinin__InfluenzaB__ABN50503
MKAIIVLLMVVTSNADRICTGITSSNSPHVVKTATQGEVNVTGVIPLTTTPTKSHFANLKGTKTRGKLCPTCLNCTDLDVALGRPMCVGVTPSAKASILHEVRPVTSGCFPIMHDRTKIRQLPNLLRGYEKIRLSTQNVINAEKAPGGPYRLGTSGSCPNATSRSGFFATMAWAVPKDNNKTATNPLTVEVPHICTKEEDQITVWGFHSDDKTQMKNLYGDSNPQKFTSSANGVTTHYVSQIGGFPDQTEDGGLPQSGRIVVDYMVQKPGKTGTIVYQRGILLPQKVWCASGRSKVIKGSLPLIGEADCLHEKYGGLNKSKPYYTGEHAKAIGNCPIWVKTPLKLANGTKYRPPAKLLKERGFFGAIAGFLEGGWEGMIAGWHGYTSHGAHGVAVAADLKSTQEAINKITKNLNSLSELEVKNLQRLSGAMDELHNEILELDEKVDDLRADTISSQIELAVLLSNEGIINSEDEHLLALERKLKKMLGPSAVDIGNGCFETKHKCNQTCLDRIAAGTFNAGEFSLPTFDSLNITAASLNDDGLDNHTILLYYSTAASSLAVTLMIAIFIVYMISRDNVSCSICL

SEQ ID NO: 26487 - protein, 584 aa, Artificial Sequence
  derived and/or modified protein sequence (wt) from hemagglutinin__InfluenzaB__ABN50514
MKAIIVLLMVATSNADRICTGITSSNSPHVVKTATQGEVNVTGVIPLTTTPTKSYFANLKGTRTRGKLCPDCLNCTDLDVALGRPMCVGTTPSAKASILHEVRPVTSGCFPIMHDRTKIRQLPNLLRGYENIRLSTQNVIDAEKAPGGPYRLGTSGSCPNATSKSGFFATMAWAVPKDNNKNATNPLTVEVPYVCTEGEDQITVWGFHSDNKPQMKNLYGDSNPQKFTSSANGVTTHYVSQIGGFPDQTEDGGLPQSGRIVVDYMVQKPGKTGTIVYQRGVLLPQKVWCASGRSKVIKGSLPLIGEADCLHEKYGGLNKSKPYYTGEHAKAIGNCPIWVKTPLKLANGTKYRPPAKLLKERGFFGAIAGFLEGGWEGMIAGWHGYTSHGAHGVAVAADLKSTQEAINKITKNLNSLSELEVKNLQRLSGAMDELHDEILELDEKVDDLRADTISSQIELAVLLSNEGIINSEDEHLLALERKLKKMLGPSAVDIGNGCFETKHKCNQTCLDRIAAGTFNAGEFSLPTFDSLNITAASLNDDGLDNHTILLYYSTAASSLAVTLMLAIFIVYMVSRDNVSCSICL

SEQ ID NO: 26488 - protein, 584 aa, Artificial Sequence
  derived and/or modified protein sequence (wt) from hemagglutinin__InfluenzaB__ABN50525
MKAIIVLLMVVTSNADRICTGITSSNSPHVVKTATQGEVNVTGVIPLTTTPTKSYFANLKGTRTRGKLCPDCLNCTDLDVALGRPMCVGTTPSAKASILHEVRPVTSGCFPIMHDRTKIRQLPNLLRGYENIRLSTQNVIDAEKAPGGPYRLGTSGSCPNATSKSGFFSTMAWAVPKDNNKNATNPLTVEVPYVCTEGEDQITVWGFHSDNKTQMKNLYGDSNPQKFTSSANGVTTHYVSQIGGFPDQTEDGGLPQSGRIVVDYMVQKPGKTGTIVYQRGVLLPQKVWCASGRSKVIKGSLPLIGEADCLHEKYGGLNKSKPYYTGEHAKAIGNCPIWVKTPLKLANGTKYRPPAKLLKERGFFGAIAGFLEGGWEGMIAGWHGYTSHGAHGVAVAADLKSTQEAINKITKNLNSLSELEVKNLQRLSGAMDELHNEILELDEKVDDLRADTISSQIELAVLLSNEGIINSEDEHLLALERKLKKMLGPSAVDIGNGCFETKHKCNQTCLDRIAAGTFNAGEFSLPTFDSLNITAASLNDDGLDNHTILLYYSTAASSLAVTLMLAIFIVYMVSRDNVSCSICL

SEQ ID NO: 26489 - protein, 585 aa, Artificial Sequence
  derived and/or modified protein sequence (wt) from hemagglutinin__InfluenzaB__ABN50536
MKAIIVLLMVVTSNADRICTGITSSNSPHVVKTATQGEVNVTGVIPLTTTPTKSHFANLKGTKTRGKLCPKCLNCTDLDVALGRPKCTGNIPSAKVSILHEVRPVTSGCFPIMHDRTKIRQLPNLLRGYERIRLSNHNVINAEEAPGGPYKIGTSGSCPNVTNGNGFFATMAWAVPKNENNKTATNSLTIEVPYICTEGEDQITVWGFHSDNEIQMAKLYGDSKPQKFTSSANGVTTHYVSQIGGFPNQTEDGGLPQSGRIVVDYMVQKSGKTGTITYQRGILLPQKVWCASGRSKVIKGSLPLIGEADCLHEKYGGLNKSKPYYTGEHAKAIGNCPIWVKTPLKLANGTKYRPPAKLLKERGFFGAIAGFLEGGWEGMIAGWHGYTSHGAHGVAVAADLKSTQEAINKITKNLNSLSELEVKNLQRLSGAMDELHNEILELDEKVDDLRADTISSQIELAVLLSNEGIINSEDEHLLALERKLKKMLGPSAVEIGNGCFETKHKCNQTCLDRIAAGTFNAGEFSLPTFDSLNITAASLNDDGLDNHTILLYYSTAASSLAVTLMIAIFVVYMVSRDNVSCSICL

SEQ ID NO: 26490 - protein, 585 aa, Artificial Sequence
  derived and/or modified protein sequence (wt) from hemagglutinin__InfluenzaB__ABN50547
MKAIIVLLMVVTSNADRICTGITSSNSPHVVKTATQGEVNVTGVIPLTTTPTKSHFANLKGTKTRGKLCPKCLNCTDLDVALGRPKCTGNIPSAKVSILHEVRPVTSGCFPIMHDRTKIRQLPNLLRGYEHIRLSTHNVINAEKAPGGPYKIGTSGSCPNVTNGNGFFATMAWAVPKNDNNKTATNSLTIEVPYICTEGEDQLTVWGFHSDNENQMAKLYGDSKPQKFTSSANGVTTHYVSQIGGFPNQTEDGGLPQSGRIVVDYMVQKSGKTGTITYQRGILLPQKVWCASGRSKVIKGSLPLIGEADCLHEKYGGLNKSKPYYTGEHAKAIGNCPIWVKTPLKLANGTKYRPPAKLLKERGFFGAIAGFLEGGWEGMIAGWHGYTSHGAHGVAVAADLKSTQEAINKITKNLNSLSELEVKNLQRLSGAMDELHNEILELDEKVDDLRADTISSQIELAVLLSNEGIINSEDEHLLALERKLKKMLGPSAVEIGNGCFETKHKCNQTCLDRIAAGTFDAGEFSLPTFDSLNITAASLNDDGLDNHTILLYYSTAASSLAVTLMIAIFVVYMVSRDNVSCSICL

SEQ ID NO: 26491 - protein, 585 aa, Artificial Sequence
  derived and/or modified protein sequence (wt) from hemagglutinin__InfluenzaB__ABN50558
MKAIIVLLMVVTSNADRICTGITSSNSPHVVKTATQGEVNVTGVIPLTTTPTKSHFANLKGTKTRGKLCPKCLNCTDLDVALGRPKCTGNIPSAKVSILHEVRPVTSGCFPIMHDRTKIRQLPNLLRGYEHIRLSTHNVINAEKAPGGPYKIGTSGSCPNVTNGNGFFATMAWAVPKNDNNKTATNSLTIEVPYICTEGEDQITVWGFHSDKETQMAKLYGDSKPQKFTSSANGVTTHYVSQIGGFPNQTEDGGLPQSGRIVVDYMMQKSGKTGTITYQRGILLPQKVWCASGRSKVIKGSLPLIGEADCLHEKYGGLNKSKPYYTGEHAKAIGNCPIWVKTPLKLANGTKYRPPAKLLKERGFFGAIAGFLEGGWEGMIAGWHGYTSHGAHGVAVAADLKSTQEAINKITKNLNSLSELEVKNLQRLSGAMDELHNEILELDEKVDDLRADTISSQIELAVLLSNEGIINSEDEHLLALERKLKKMLGPSAVEIGNGCFETKHKCNQTCLDRIAAGTFDAGEFSLPTFDSLNITAASLNDDGLDNHTILLYYSTAASSLAVTLMIAIFVVYMVSRDNVSCSICL

SEQ ID NO: 26492 - protein, 584 aa, Artificial Sequence; identical to SEQ ID NO: 26407
  derived and/or modified protein sequence (wt) from hemagglutinin__InfluenzaB__ABN50569

SEQ ID NO: 26493 - protein, 585 aa, Artificial Sequence; identical to SEQ ID NO: 26419
  derived and/or modified protein sequence (wt) from hemagglutinin__InfluenzaB__ABN50580

SEQ ID NO: 26494 - protein, 585 aa, Artificial Sequence
  derived and/or modified protein sequence (wt) from hemagglutinin__InfluenzaB__ABN50591
MKAIIVLLMVVTSNADRICTGITSSNSPHVVKTATQGEVNVTGVIPLTTTPTKSHFANLKGTKTRGKLCPKCLNCTDLDVALGRPKCTGNIPSAKVSILHEVRPVTSGCFPIMHDRTKIRQLPNLLRGYERIRLSNHNVINAEKAPGGPYKIGTSGSCPNVTNGNGFFATMAWAVPKNENNKTATNSLTIEVPYICTEGEDQITVWGFHSDNEAQMAKLYGDSKPQKFTSSANGVTTHYVSQIGGFPNQTEDGGLPQSGRIVVDYMVQKSGKTGTITYQRGILLPQKVWCASGRSKVIKGSLPLIGEADCLHEKYGGLNKSKPYYTGEHAKAIGNCPIWVKTPLKLANGTKYRPPAKLLKERGFFGAIAGFLEGGWEGMIAGWHGYTSHGAHGVAVAADLKSTQEAINKITKNLNSLSELEVKNLQRLSGAMDELHNEILELDEKVDDLRADTISSQIELAVLLSNEGIINSEDEHLLALERKLKKMLGPSAVEIGNGCFETKHKCNQTCLDRIAAGTFNAGEFSLPTFDSLNITAASLNDDGLDNHTILLYYSTAASSLAVTLMIAIFVVYMVSRDNVSCSICL

SEQ ID NO: 26495 - protein, 585 aa, Artificial Sequence
  derived and/or modified protein sequence (wt) from hemagglutinin__InfluenzaB__ABN50602
MKAIIVLLMVVTSNADRICTGITSSNSPHVVKTATQGEVNVTGVIPLTTTPTKSHFANLKGTKTRGKLCPKCLNCTDLDVALGRPKCMGTIPSAKASILHEVKPVTSGCFPIMHDRTKIRQLPNLLRGYENIRLSTHNVINAETAPGGPYKIGTSGSCPNITNGNGFFATMAWAVPKNDNNKTATNPLTVEVPYICTEGEDQITVWGFHSDNETQMVKLYGDSKPQKFTSSANGVTAHYVSQIGGFPNQAEDGGLPQSGRIVVDYMVQKSGKTGTITYQRGILLPQKVWCASGRSKVIKGSLPLIGEADCLHEKYGGLNKSKPYYTGEHAKAIGNCPIWVKTPLKLANGTKYRPPAKLLKERGFFGAIAGFLEGGWEGMIAGWHGYTSHGAHGVAVAADLKSTQEAINKITKNLNSLSELEVKNLQRLSGAMDELHNEILELDEKVDDLRADTISSQIELAVLLSNEGIINSEDEHLLALERKLKKMLGPSAVDIGNGCFETKHKCNQTCLDRIAAGTFNAGEFSLPTFDSLNITAASLNDDGLDNHTILLYYSTAASSLAVTLMIAIFIVYMVSRDNVSCSICL

SEQ ID NO: 26496 - protein, 583 aa, Artificial Sequence
  derived and/or modified protein sequence (wt) from hemagglutinin__InfluenzaB__ABN50624
MKAIIVLLMVVTSNADRICTGITSSNSPHVVKTATQGEVNVTGVIPLTTTPTKSHFANLKGTKTRGKLCPNCLNCTDLDVALGRPMCIGTIPSAKASILHEVRPVTSGCFPIMHDRTKIRQLPNLLRGYENIRLSTHNVINAERAPGGPYRLGTSGSCPNVTSKSGFFATMAWAVPRDNKTATNPLTVEVPYICTKGEDQITVWGFHSDNKNQMKNLYGDSNPQKFTSSVNGVTTHYVSQIGGFPNQTEDGGLPQSGRIVVDYMVQKPGKTGTIVYQRGVLLPQKVWCASGRSKVIKGSLPLIGEADCLHEKYGGLNKSKPYYTGEHAKAIGNCPIWVKTPLKLANGTKYRPPAKLLKERGFFGAIAGFLEGGWEGMIAGWHGYTSHGAHGVAVAADLKSTQEAINKITKNLNSLSELEVKNLQRLSGAMDELHNEILELDEKVDDLRADTISSQIELAVLLSNEGIINSEDEHLLALERKLKKMLGPSAVDIGNGCFETKHKCNQTCLDRIAAGTFNAGEFSLPTFDSLNITAASLNDDGLDNHTILLYYSTAASSLAVTLMIAIFIVYMVSRDNVSCSICL

SEQ ID NO: 26497 - protein, 583 aa, Artificial Sequence
  derived and/or modified protein sequence (wt) from hemagglutinin__InfluenzaB__ABN50635
MKAIIVLLMVVTSNADRICTGITSSNSPHVVKTATQGEVNVTGVIPLTTTPTKSHFANLKGTKTRGKLCPNCLNCTDLDVALGRPMCIGTIPSAKASILHEVRPVTSGCFPIMHDRTKIRQLPNLLRGYEHIRLSTHNVINAERAPGGPYRLGTSGSCPNVTSRSGFFATMAWAVPRDNKTATNPLTVEVPYICTKGEDQITVWGFHSDSKTQMKNLYGDSNPQKFTSSANGVTTHYVSQIGGFPNQTEDGGLPQSGRIVVDYMVQKPGKTGTIVYQRGVLLPQKVWCASGRSKVIKGSLPLIGEADCLHEKYGGLNKSKPYYTGEHAKAIGNCPIWVKTPLKLANGTKYRPPAKLLKERGFFGAIAGFLEGGWEGMIAGWHGYTSHGAHGVAVAADLKSTQEAINKITKNLNSLSELEVKNLQRLSGAMDELHNEILELDEKVDDLRADTISSQIELAVLLSNEGIINSEDEHLLALERKLKKMLGPSAVDIGNGCFETKHKCNQTCLDRIAAGTFNAGEFSLPTFDSLNITAASLNDDGLDNHTILLYYSTAASSLAVTLMIAIFIVYMVSRDNVSCSICL

SEQ ID NO: 26498 - protein, 583 aa, Artificial Sequence
  derived and/or modified protein sequence (wt) from hemagglutinin__InfluenzaB__ABN50646
MKAIIVLLMVVTSNADRICTGITSSNSPHVVKTATQGEVNVTGVIPLTTTPTKSHFANLKGTKTRGKLCPNCLNCTDLDVALGRPMCIGTIPSAKASILHEVRPVTSGCFPIMHDRTKIRQLPNLLRGYEHIRLSTHNVINAERAPGGPYRLGTSGSCPNVTSRSGFFATMAWAVPRDNKTATNPLTVEVPYICTKGEDQITVWGFHSDNKNQMKNLYGDSNPQKFTSSANGVTTHYVSQIGGFPNQTEDGGLPQSGRIVVDYMVQKPGKTGTIVYQRGVLLPQKVWCASGRSKVIKGSLPLIGEADCLHEKYGGLNKSKPYYTGEHAKAIGNCPIWVKTPLKLANGTKYRPPAKLLKERGFFGAIAGFLEGGWEGMIAGWHGYTSHGAHGVAVAADLKSTQEAINKITKNLNSLSELEVKNLQRLSGAMDELHNEILELDEKVDDLRADTISSQIELAVLLSNEGIINSEDEHLLALERKLKKMLGPSAVDIGNGCFETKHKCNQTCLDRIAAGTFNAGEFSLPTFDSLNITAASLNDDGLDNHTILLYYSTAASSLAVTLMIAIFIVYMVSRDNVSCSICL

SEQ ID NO: 26499 - protein, 583 aa, Artificial Sequence
  derived and/or modified protein sequence (wt) from hemagglutinin__InfluenzaB__ABN50657
MKAIIVLLMVVTSNADRICTGITSSNSPHVVKTATQGEVNVTGVIPLTTTPTKSHFANLKGTKTRGKLCPNCLNCTDLDVALGRPMCVGITPSAKASILHEVRPVTSGCFPIMHDRTKIRQLPNLLRGYENIRLSTQNVINAEKAPGGPYRLGTSGSCPNVTSRTGFFATMAWAVPRDNKTATNPLTVEVPYICTKGEDQITVWGFHSDNKTQMKNLYGDSNPQKFTSSANGVTTHYVSQIGGFPDQTEDGGLPQSGRIVVDYMVQKPGKTGTIVYQRGILLPQKVWCASGRSKVIKGSLPLIGEADCLHEKYGGLNKSKPYYTGEHAKAIGNCPIWVKTPLKLANGTKYRPPAKLLKERGFFGAIAGFLEGGWEGMIAGWHGYTSHGAHGVAVAADLKSTQEAINKITKNLNSLSELEVKNLQRLSGAMDELHNEILELDEKVDDLRADTISSQIELAVLLSNEGIINSEDEHLLALERKLKKMLGPSAVDIGNGCFETKHKCNQTCLDRIAAGTFNAGEFSLPTFDSLNITAASLNDDGLDNHTILLYYSTAASSLAVTLMIAIFIVYMVSRDNVSCSICL

SEQ ID NO: 26500 - protein, 584 aa, Artificial Sequence
  derived and/or modified protein sequence (wt) from hemagglutinin__InfluenzaB__ABN50679
MKAIIVLLMVVTSNADRICTGITSSNSPHVVKTATQGEVNVTGVIPLTTTPTKSHFANLKGTKTRGKLCPNCLNCTDLDVALGRPMCVGTTPSAKASILHEVRPVTSGCFPIMHDRTKIRQLPNLLRGYENIRLSTQNVINAEKAPGGPYRLGTSGSCPNATSRSGFFATMAWAVPRDNNKTATNPLTVEVPYICTKGEDQITVWGFHSDDKTQMKNLYGDSNPQKFTSSANGVTTHYVSQIGGFPDQTEDGGLPQSGRIVVDYMVQKPGKTGTIVYQRGVLLPQKVWCASGRSKVIKGSLPLIGEADCLHEKYGGLNKSKPYYTGEHAKAIGNCPIWVKTPLKLANGTKYRPPAKLLKERGFFGAIAGFLEGGWEGMIAGWHGYTSHGAHGVAVAADLKSTQEAINKITKNLNSLSELEVKNLQRLSGAMDELHNEILELDEKVDDLRADTISSQIELAVLLSNEGIINSEDEHLLALERKLKKMLGPSAVDIGNGCFETKHKCNQTCLDRIAAGTFNAGEFSLPTFDSLNITAASLNDDGLDNHTILLYYSTAASSLAVTLMIAIFIVYMVSRDNVSCSICL

SEQ ID NO: 26501 - protein, 584 aa, Artificial Sequence
  derived and/or modified protein sequence (wt) from hemagglutinin__InfluenzaB__ABN50690
MKAIIVLLMVVTSNADRICTGITSSNSPHVVKTATQGEVNVTGVIPLTTTPTKSHFANLKGTKTRGKLCPNCLNCTDLDVALGRPMCVGTTPSAKASILHEVRPVTSGCFPIMHDRTKIRQLPNLLRGYENIRLSTQNVINAEKAPGGPYRLGTSGSCPNATSRSGFFATMAWAVPRDNNKTATNPLTVEVPYVCTEGEDQITVWGFHSDNKTQMKNLYGDSNPQKFTSSANGVTTHYVSQIGGFPDQTEDGGLPQSGRIVVDYMVQKPGKTGTIVYQRGVLLPQKVWCASGRSKVIKGSLPLIGEADCLHEKYGGLNKSKPYYTGEHAKAIGNCPIWVKTPLKLANGTKYRPPAKLLKERGFFGAIAGFLEGGWEGMIAGWHGYTSHGAHGVAVAADLKSTQEAINKITKNLNSLSELEVKNLQRLSGAMDELHNEILELDEKVDDLRADTISSQIELAVLLSNEGIINSEDEHLLALERKLKKMLGPSAVDIGNGCFETKHKCNQTCLDRIAAGTFNAGEFSLPTFDSLNITAASLNDDGLDNHTILLYYSTAASSLAVTLMIAIFIVYMVSRDNVSCSICL

SEQ ID NO: 26502 - protein, 583 aa, Artificial Sequence
  derived and/or modified protein sequence (wt) from hemagglutinin__InfluenzaB__ABN50701
MKAIIVLLMVVTSNADRICTGITSSNSPHVVKTATQGEVNVTGVIPLTTTPTKSHFANLKGTKTRGKLCPNCLNCTDLDVALGRPMCVGITPSAKASILHEVRPVTSGCFPIMHDRTKIRQLPNLLRGYENIRLSTQNVINAEKAPGGPYRLGTSGSCPNVTSRTGFFATMAWAVPRDNKTATNPLTVEVPYICTKGEDQITVWGFHSDNKAQMKNLYGDSNPQKFTSSANGVTTHYVSQIGGFPDQTEDGGLPQSGRIVVDYMVQKPGKTGTIVYQRGILLPQKVWCASGRSKVIKGSLPLIGEADCLHEKYGGLNKSKPYYTGEHAKAIGNCPIWVKTPLKLANGTKYRPPAKLLKERGFFGAIAGFLEGGWEGMIAGWHGYTSHGAHGVAVAADLKSTQEAINKITKNLNSLSELEVKNLQRLSGAMDELHNEILELDEKVDDLRADTISSQIELAVLLSNEGIINSEDEHLLALERKLKKMLGPSAVDIGNGCFETKHKCNQTCLDRIAAGTFNAGEFSLPTFDSLNITAASLNDDGLDNHTILLYYSTAASSLAVTLMIAIFIVYMVSRDNVSCSICL

SEQ ID NO: 26503 - protein, 584 aa, Artificial Sequence; identical to SEQ ID NO: 26501
  derived and/or modified protein sequence (wt) from hemagglutinin__InfluenzaB__ABN50712

SEQ ID NO: 26504 - protein, 584 aa, Artificial Sequence
  derived and/or modified protein sequence (wt) from hemagglutinin__InfluenzaB__ABN50723
MKAIIVLLMVVTSNADRICTGITSSNSPHVVKTATQGEVNVTGVIPLTTTPTKSHFANLRGTKTRGKLCPTCLNCTDLDVALGRPMCVGTTPSAKASILHEVRPVTSGCFPIMHDRTKIRQLPNLLRGYEKIRLSTQNVINAEKAPGGPYRLGTSGSCPNATSRSGFFATMAWAVPRDNNKTATNPLTVEVPYICTKEEDQITVWGFHSDNKTQMKNLYGDSNPQKFTSSANGVTTHYVSQIGGFPDQTEDGGLPQSGRIVVDYMVQKPGKTGTIVYQRGILLPQKVWCASGRSKVIKGSLPLIGEADCLHEKYGGLNKSKPYYTGEHAKAIGNCPIWVKTPLKLANGTKYRPPAKLLKERGFFGAIAGFLEGGWEGMIAGWHGYTSHGAHGVAVAADLKSTQEAINKITKNLNSLSELEVKNLQRLSGAMDELHNEILELDEKVDDLRADTISSQIELAVLLSNEGIINSEDEHLLALERKLKKMLGPSAVDIGNGCFETKHKCNQTCLDRIAAGTFNAGEFSLPTFDSLNITAASLNDDGLDNHTILLYYSTAASSLAVTLMIAIFIVYMISRDNVSCSICL

SEQ ID NO: 26505 - protein, 584 aa, Artificial Sequence
  derived and/or modified protein sequence (wt) from hemagglutinin__InfluenzaB__ABN50734
MKAIIVLLMVVTSNADRICTGITSSNSPHVVKTATQGEVNVTGAIPLTTTPTKSHFANLKGTKTRGKLCPTCLNCTDLDVALGRPMCVGITPSAKASILHEVRPVTSGCFPIMHDRTKIRQLPNLLRGYEKIRLSTQNVINAEKAPGGPYRLGTSGSCPNATSRSGFFTTMAWAVPRDNNKTATNPLTVEVPHICTKEEDQITVWGFHSDDKTQMKNLYGDSNPQKFTSSTNGITTHYVSQIGGFPDQTEDGGLPQSGRIVVDYMVQKPGKTGTIVYQRGILLPQKVWCASGRSKVIKGSLPLIGEADCLHEKYGGLNKSKPYYTGEHAKAIGNCPIWVKTPLKLANGTKYRPPAKLLKERGFFGAIAGFLEGGWEGMIAGWHGYTSHGAHGVAVAADLKSTQEAINKITKNLNSLSELEVKNLQRLSGAMDELHNEILELDEKVDDLRADTISSQIELAVLLSNEGIINSEDEHLLALERKLKKMLGPSAVDIGNGCFETKHKCNQTCLDRIAAGTFNAGEFSLPTFDSLNITAASLNDDGLDNHTILLYYSTAASSLAVTLMIAIFIVYMISRDNVSCSICL

SEQ ID NO: 26506 - protein, 585 aa, Artificial Sequence
  derived and/or modified protein sequence (wt) from hemagglutinin__InfluenzaB__ABN50745
MKAIIVLLMVVTSNADRICTGITSSNSPHVVKTATQGEVNVTGVIPLTTTPTKSHFANLKGTKTRGKLCPKCLNCTDLDVALGRPKCTGNIPSAKVSILHEVRPVTSGCFPIMHDRTKIRQLPNLLRGYEHIRLSTHNVINAEKAPGGPYKIGTSGSCPNITNGNGFFATMAWAVPKNDNNKTATNSLTIEVPYICTEGEDQITVWGFHSDNETQMAKLYGDSKPQKFTSSANGVTTHYVSQIGGFPNQTEDGGLPQSGRIVVDYMVQKSGKTGTITYQRGILLPQKVWCASGRSKVIKGSLPLIGEADCLHEKYGGLNKSKPYYTGEHAKAIGNCPIWVKTPLKLANGTKYRPPAKLLKERGFFGAIAGFLEGGWEGMIAGWHGYTSHGAHGVAVAADLKSTQEAINKITKNLNSLSELEVKNLQRLSGAMDELHNEILELDEKVDDLRADTISSQIELAVLLSNEGIINSEDEHLLALERKLKKMLGPSAVEIGNGCFETKHKCNQTCLDRIAAGTFNAGEFSLPTFDSLNITAASLNDDGLDNHTILLYYSTAASSLAVTLMIAIFVVYMVSRDNVSCSICL

SEQ ID NO: 26507 - protein, 583 aa, Artificial Sequence
  derived and/or modified protein sequence (wt) from hemagglutinin__InfluenzaB__ABN51184
MKAIIVLLMVVTSNADRICTGITSSNSPHVVKTATQGEVNVTGVIPLTTTPTKSHFANLKGTKTRGKLCPNCLNCTDLDVALGRPMCIGTIPSAKASILHEVRPVTSGCFPIMHDRTKIRQLPNLLRGYENIRLSTHNVINAERAPGGPYRLGTSGSCPNVTSKSGFFATMAWAVPRDNKTATNPLTVEVPYICTKGEDQITVWGFHSDNKIQMKNLYGDSNPQKFTSSANGVTTHYVSQIGGFPNQTEDGGLPQSGRIVVDYMVQKPGKTGTIVYQRGVLLPQKVWCASGRSKVIKGSLPLIGEADCLHEKYGGLNKSKPYYTGEHAKAIGNCPIWVKTPLKLANGTKYRPPAKLLKERGFFGAIAGFLEGGWEGMIAGWHGYTSHGAHGVAVAADLKSTQEAINKITKNLNSLSELEVKNLQRLSGAMDELHNEILELDEKVDDLRADTISSQIELAVLLSNEGIINSEDEHLLALERKLKKMLGPSAVDIGNGCFETKHKCNQTCLDRIAAGTFNAGEFSLPTFDSLNITAASLNDDGLDNHTILLYYSTAASSLAVTLMIAIFIVYMVSRDNVSCSICL

SEQ ID NO: 26508 - protein, 583 aa, Artificial Sequence
  derived and/or modified protein sequence (wt) from hemagglutinin__InfluenzaB__ABN51195
MKAIIVLLMVVTSNADRICTGITSSNSPHVVKTATQGEVNVTGVIPLTTTPTKSHFANLKGTKTRGKLCPNCLNCTDLDVALGRPMCIGTIPSAKASILHEVRPVTSGCFPIMHDRTKIRQLPNLLRGYENIRLSTHNVINAERAPGGPYRLGTSGSCPNVTSRSGFFATMAWAVPRDNKTATNPLTVEVPYICTKGEDQITVWGFHFDNKIQMKNLYGDSNPQKFTSSANGVTTHYVSQIGGFPNQTEDGGLPQSGRIVVDYMVQKPGKTGTIVYQRGVLLPQKVWCASGRSKVIKGSLPLIGEADCLHEKYGGLNKSKPYYTGEHAKAIGNCPIWVKTPLKLANGTKYRPPAKLLKERGFFGAIAGFLEGGWEGMIAGWHGYTSHGAHGVAVAADLKSTQEAINKITKNLNSLSELEVKNLQRLSGAMDELHNEILELDEKVDDLRADTISSQIELAVLLSNEGIINSEDEHLLALERKLKKMLGPSAVDIGNGCFETKHKCNQTCLDRIAAGTFNAGEFSLPTFDSLNITAASLNDDGLDNHTILLYYSTAASSLAVTLMIAIFIVYMVSRDNVSCSICL

SEQ ID NO: 26509 - protein, 585 aa, Artificial Sequence
  derived and/or modified protein sequence (wt) from hemagglutinin__InfluenzaB__ABN58661
MKAIIVLLMVVTSNADRICTGITSSNSPHVVKTATQGEVNVTGVIPLTTTPTKSHFANLKGTKTRGKLCPKCLNCTDLDVALGRPKCTGTIPSAKVSILHEVKPVTSGCFPIMHDRTKIRQLPNLLRGYEHIRLSTHNVINAEKAPGGPYKIGTSGSCPNVTNGNGFFATMAWAVPKNDNNKTATNSLTVEVPYICTEGEDQITVWGFHSDNETQMAKLYGDSKPQKFTSSANGVTTHYVSQIGGFPNQAEDGGLPQSGRIVVDYMVQKSGKTGTITYQRGILLPQKVWCASGRSKVIKGSLPLIGEADCLHEKYGGLNKSKPYYTGEHAKAIGNCPIWVKTPLKLANGTKYRPPAKLLKERGFFGAIAGFLEGGWEGMIAGWHGYTSHGAHGVAVAADLKSTQEAINKITKNLNSLSELEVKNLQRLSGAMDELHNEILELDEKVDDLRADTISSQIELAVLLSNEGIINSEDEHLLALERKLKKMLGPSAVEIGNGCFETKHKCNQTCLDRIAAGTFNAGEFSLPTFDSLNITAASLNDDGLDNHTILLYYSTAASSLAVTLMIAIFIVYMVSRDNVSCSICL

SEQ ID NO: 26510 - protein, 584 aa, Artificial Sequence; identical to SEQ ID NO: 26398
  derived and/or modified protein sequence (wt) from hemagglutinin__InfluenzaB__ABN59445

SEQ ID NO: 26511 - protein, 584 aa, Artificial Sequence
  derived and/or modified protein sequence (wt) from hemagglutinin__InfluenzaB__ABO72377
MKAIIVLLMVVTSNADRICTGITSSNSPHVVKTATQGEVNVTGAIPLTTTPTKSHFANLKGTKTRGKLCPTCFNCTDLDVALGRPMCVGITPSAKASILHEVRPVTSGCFPIMHDRTKIRQLPNLLRGYEKIRLSTQNVIDAEKAPGGPYRLGTSGSCPNATSKSGFFATMAWAVPRDNNKTATNPLTVEVPHICTKEEDQITVWGFHSDNKTQMKNLYGDSNPQKFTSSANGITTHYVSQIGGFPDQTEDGGLPQSGRIVVDYMVQKPGKTGTIVYQRGILLPQKVWCASGRSKVIKGSLPLIGEADCLHEKYGGLNKSKPYYTGEHAKAIGNCPIWVKTPLKLANGTKYRPPAKLLKERGFFGAIAGFLEGGWEGMIAGWHGYTSHGAHGVAVAADLKSTQEAINKITKNLNSLSELEVKNLQRLSGAMDELHNEILELDEKVDDLRADTISSQIELAVLLSNEGIINSEDEHLLALERKLKKMLGPSAVDIGNGCFETKHKCNQTCLDRIAAGTFNAGEFSLPTFDSLNITAASLNDDGLDNHTILLYYSTAASSLAVTLMIAIFIVYMISRDNVSCSICL

SEQ ID NO: 26512 - protein, 584 aa, Artificial Sequence; identical to SEQ ID NO: 26405
  derived and/or modified protein sequence (wt) from hemagglutinin__InfluenzaB__ABR15973

SEQ ID NO: 26513 - protein, 583 aa, Artificial Sequence
  derived and/or modified protein sequence (wt) from hemagglutinin__InfluenzaB__ABR15995
MKAIIVLLMVVTSNADRICTGITSSNSPHVVKTATQGEVNVTGVIPLTTTPTKSHFANLKGTKTRGKLCPNCLNCTDLDVALGRPMCIGITPSAKASILHEVRPVTSGCFPIMHDRTKIRQLPNLLRGYEHIRLSTHNVINAERAPGGPYRLGTSGSCPNVTSRSGFFATMAWAVPRDNKTATNPLTVEVPYICTKGEDQITVWGFHSDYKTQMKNLYGDSNPQKFTSSANGITTHYVSQIGGFPNQTEDGGLPQSGRIVVDYMVQKPGKTGTIVYQRGVLLPQKVWCASGRSKVIKGSLPLIGEADCLHEKYGGLNKSKPYYTGEHAKAIGNCPIWVKTPLKLANGTKYRPPAKLLKERGFFGAIAGFLEGGWEGMIAGWHGYTSHGAHGVAVAADLKSTQEAINKITKNLNSLSELEVKNLQRLSGAMDELHNEILELDEKVDDLRADTISSQIELAVLLSNEGIINSEDEHLLALERKLKKMLGPSAVDIGNGCFETKHKCNQTCLDRIAAGTFNAGEFSLPTFDSLNITAASLNDDGLDNHTILLYYSTAASSLAVTLMIAIFIVYMVSRDNVSCSICL

SEQ ID NO: 26514 - protein, 585 aa, Artificial Sequence
  derived and/or modified protein sequence (wt) from hemagglutinin__InfluenzaB__ABR16017
MKAIIVLLMVVTSNADRICTGITSSNSPHVVKTATQGEVNVTGVIPLTTTPTKSHFANLKGTETRGKLCPKCLNCTDLDVALGRPKCTGNIPSARVSILHEVRPVTSGCFPIMHDRTKIRQLPNLLRGYEHIRLSTHNVINAENAPGGPYKIGTSGSCPNVTNGNGFFATMAWAVPKNDNNKTATNSLTIEVPYICTEGEDQITVWGFHSDNETQMAKLYGDSKPQKFTSSANGVTTHYVSQIGGFPNQTEDGGLPQSGRIVVDYMVQKSGKTGTITYQRGILLPQKVWCASGRSKVIKGSLPLIGEADCLHEKYGGLNKSKPYYTGEHAKAIGNCPIWVKTPLKLANGTKYRPPAKLLKERGFFGAIAGFLEGGWEGMIAGWHGYTSHGAHGVAVAADLKSTQEAINKITKNLNSLSELEVKNLQRLSGAMDELHNEILELDEKVDDLRADTISSQIELAVLLSNEGIINSEDEHLLALERKLKKMLGPSAVEIGNGCFETKHKCNQTCLDRIAAGTFDAGEFSLPTFDSLNITAASLNDDGLDNHTILLYYSTAASSLAVTLMIAIFVVYMVSRDNVSCSICL

SEQ ID NO: 26515 - protein, 585 aa, Artificial Sequence; identical to SEQ ID NO: 26514
  derived and/or modified protein sequence (wt) from hemagglutinin__InfluenzaB__ACA64899

SEQ ID NO: 26516 - protein, 585 aa, Artificial Sequence
  derived and/or modified protein sequence (wt) from hemagglutinin__InfluenzaB__ACA64932
MKAIIVLLMVVTSNADRICTGITSSNSPHVVKTATQGEVNVTGVIPLTTTPTKSHFSNLKGTETRGKLCPKCLNCTDLDVALGRPKCTGNIPSARVSILHEVRPVTSGCFPIMHDRTKIRQLPNLLRGYEHIRLSTHNVINAENAPGGPYKIGTSGSCPNVTNGNGFFATMAWAVPKNDINKTATNSLTIEVPYICTEGEDQITVWGFHSDNETQMAKLYGDSKPQKFTSSANGVTTHYVSQIGGFPNQTEDGGLPQSGRIVVDYMVQKSGKTGTITYQRGILLPQKVWCASGRSKVIKGSLPLIGEADCLHEKYGGLNKSKPYYTGEHAKAIGNCPIWVKTPLKLANGTKYRPPAKLLKERGFFGAIAGFLEGGWEGMIAGWHGYTSHGAHGVAVAADLKSTQEAINKITKNLNSLSELEVKNLQRLSGAMDELHNEILELDEKVDDLRADTISSQIELAVLLSNEGIINSEDEHLLALERKLKKMLGPSAVEIGNGCFETKHKCNQTCLDKIAAGTFDAGEFSLPTFDSLNITAASLNDDGLDNHTILLYYSTAASSLAVTLMIAIFVVYMVSRDNVSCSICL

SEQ ID NO: 26517 - protein, 585 aa, Artificial Sequence; identical to SEQ ID NO: 26514
  derived and/or modified protein sequence (wt) from hemagglutinin__InfluenzaB__ACA64943

SEQ ID NO: 26518 - protein, 585 aa, Artificial Sequence
  derived and/or modified protein sequence (wt) from hemagglutinin__InfluenzaB__ACA64954
MKAIIVLLMVVTSNADRICTGITSSNSPHVVKTATQGEVNVTGVIPLTTTPTKSHFANLKGTETRGKLCPKCLNCTDLDVALGRPKCTGNIPSARVSILHEVRPVTSGCFPIMHDRTKIRQLPNLLRGYEHIRLSTHNVINAENAPGGPYKIGTSGSCPNVTNGNGFFATMAWAVPKNDNNKTATSSLTIEVPYICTEGEDQITVWGFHSDNETQMAKLYGDSKPQKFTSSANGVTTHYVSQIGGFPNQTEDGGLPQSGRIVVDYMVQKSGKTGTITYQRGILLPQKVWCASGRSKVIKGSLPLIGEADCLHEKYGGLNKSKPYYTGEHAKAIGNCPIWVKTPLKLANGTKYRPPAKLLKERGFFGAIAGFLEGGWEGMIAGWHGYTSHGAHGVAVAADLKSTQEAINKITKNLNSLSELEVKNLQRLSGAMDELHNEILELDEKVDDLRADTISSQIELAVLLSNEGIINSEDEHLLALERKLKKMLGPSAVEIGNGCFETKHKCNQTCLDRIAAGTFDAGEFSLPTFDSLNITAASLNDDGLDNHTILLYYSTAASSLAVTLMIAIFVVYMVSRDNVSCSICL

SEQ ID NO: 26519 - protein, 585 aa, Artificial Sequence; identical to SEQ ID NO: 26514
  derived and/or modified protein sequence (wt) from hemagglutinin__InfluenzaB__ACA64965

SEQ ID NO: 26520 - protein, 585 aa, Artificial Sequence
  derived and/or modified protein sequence (wt) from hemagglutinin__InfluenzaB__ACA64998
MKAIIVLLMVVTSNADRICTGITSSNSPHVVKTATQGEVNVTGVIPLTTTPTKSHFANLKGTETRGKLCPKCFNCTDLDVALGRPKCTGNIPSARVSILHEVRPVTSGCFPIMHDRTKIRQLPNLLRGYEHIRLSTHNVINAENAPGGPYKIGTSGSCPNVTNGNGFFATMAWAVPKNDNNKTATNSLTIEVPYICTEGEDQITVWGFHSDNETQMAKLYGDSKPQKFTSSANGVTTHYVSQIGGFPNQTEDGGLPQSGRIVVDYMVQKSGKTGTITYQRGILLPQKVWCASGRSKVIKGSLPLIGEADCLHEKYGGLNKSKPYYTGEHAKAIGNCPIWVKTPLKLANGTKYRPPAKLLKERGFFGAIAGFLEGGWEGMIAGWHGYTSHGAHGVAVAADLKSTQEAINKITKNLNSLSELEVKNLQRLSGAMDELHNEILELDEKVDDLRADTISSQIELAVLLSNEGIINSEDEHLLALERKLKKMLGPSAVEIGNGCFETKHKCNQTCLDRIAAGTFDAGEFSLPTFDSLNITAASLNDDGLDNHTILLYYSTAASSLAVTLMIAIFVVYMVSRDNVSCSICL

SEQ ID NO: 26521 - protein, 585 aa, Artificial Sequence
  derived and/or modified protein sequence (wt) from hemagglutinin__InfluenzaB__ACA65020
MKAIIVLLMVVTSNADRICTGITSSNSPHVVKTATQGEVNVTGVIPLTTTPTKSHFSNLKGTETRGKLCPKCLNCTDLDVALGRPKCTGNIPSARVSILHEVRPVTSGCFPIMHDRTKIRQLPNLLRGYEHIRLSTHNVINAENAPGGPYKIGTSGSCPNVTNGNGFFATMAWAVPKNDNNKTATNSLTIEVPYICTEGEDQITIWGFHSDNETQMAKLYGDSKPQKFTSSANGVTTHYVSQIGGFPNQTEDGGLPQSGRIVVDYMVQKSGKTGTITYQRGILLPQKVWCASGRSKVIKGSLPLIGEADCLHEKYGGLNKSKPYYTGEHAKAIGNCPIWVKTPLKLANGTKYRPPAKLLKERGFFGAIAGFLEGGWEGMIAGWHGYTSHGAHGVAVAADLKSTQEAINKITKNLNSLSELEVKNLQRLSGAMDELHNEILELDEKVDDLRADTISSQIELAVLLSNEGIINSEDEHLLALERKLKKMLGPSAVEVGNGCFETKHKCNQTCLDRIAAGTFDAGEFSLPTFDSLNITAASLNDDGLDNHTILLYYSTAASSLAVTLMIAIFVVYMVSRDNVSCSICL

SEQ ID NO: 26522 - protein, 585 aa, Artificial Sequence; identical to SEQ ID NO: 26520
  derived and/or modified protein sequence (wt) from hemagglutinin__InfluenzaB__ACA65031

SEQ ID NO: 26523 - protein, 585 aa, Artificial Sequence
  derived and/or modified protein sequence (wt) from hemagglutinin__InfluenzaB__ACA65042
MKAIIVLLMVVTSNADRICTGITSSNSPHVVKTATQGEVNVTGVIPLTTTPTKSHFSNLKGTETRGKLCPKCLNCTDLDVALGRPKCTGNIPSARVSILHEVRPVTSGCFPIMHDRTKIRQLPNLLRGYEHIRLSTHNVINAENAPGGPYKIGTSGSCPNVTNGNGFFATMAWAVPKNDNNKTATNSLTIEVPYICTEGEDQITVWGFHSDNETQMAKLYGDSKPQKFTSSANGVTTHYVSQIGGFPNQTEDGGLPQSGRIIVDYMVQKSGKTGTITYQRGILLPQKVWCASGRSKVIKGSLPLIGEADCLHEKYGGLNKSKPYYTGEHAKAIGNCPIWVKTPLKLANGTKYRPPAKLLKERGFFGAIAGFLEGGWEGMIAGWHGYTSHGAHGVAVAADLKSTQEAINKITKNLNSLSELEVKNLQRLSGAMDELHNEILELDEKVDDLRADTISSQIELAVLLSNEGIINSEDEHLLALERKLKKMLGPSAVEIGNGCFETKHKCNQTCLDRIAAGTFDAGEFSLPTFDSLNITAASLNDDGLDNHTILLYYSTAASSLAVTLMIAIFVVYMVSRDNVSCSICL

SEQ ID NO: 26524 - protein, 585 aa, Artificial Sequence
  derived and/or modified protein sequence (wt) from hemagglutinin__InfluenzaB__ACA65053
MKAIIVLLMVVTSNADRICTGITSSNSPHVVKTATQGEVNVTGVIPLTTTPTKSHFANLKGTETRGKLCPKCLNCTDLDVALGRPKCTGNIPSARVSILHEVRPVTSGCFPIMHDRTKIRQLPNLLRGYEHIRLSTRNVINAENAPGGPYKIGTSGSCPNVTNGNGFFATMAWAVPKNDNNKTATNSLTIEVPYICTEGEDQITVWGFHSDNETQMAKLYGDSKPQKFTSSANGVTTHYVSQIGGFPNQTEDGGLPQSGRIVVDYMVQKSGKTGTITYQRGILLPQKVWCASGRSKVIKGSLPLIGEADCLHEKYGGLNKSKPYYTGEHAKAIGNCPIWVKTPLKLANGTKYRPPAKLLKERGFFGAIAGFLEGGWEGMIAGWHGYTSHGAHGVAVAADLKSTQEAINKITKNLNSLSELEVKNLQRLSGAMDELHNEILELDEKVDDLRADTISSQIELAVLLSNEGIINSEDEHLLALERKLKKMLGPSAVEIGNGCFETKHKCNQTCLDRIAAGTFDAGEFSLPTFDSLNITAASLNDDGLDNHTILLYYSTAASSLAVTLMIAIFVVYMVSRDNVSCSICL

SEQ ID NO: 26525 - protein, 585 aa, Artificial Sequence
  derived and/or modified protein sequence (wt) from hemagglutinin__InfluenzaB__ACA65075
MKAIIVLLMVVTSNADRICTGITSSNSPHVVKTATQGEVNVTGVIPLTTTPTKSHFANLKGTETRGKLCPKCLNCTDLDVALGRPKCTGNIPSARVSILHEVRPVTSGCFPIMHDRTKIRQLPNLLRGYEHIRLSTHNVINAENAPGGPYKIGTSGSCPNITNGNGFFATMAWAVPKNDNNKTATNSLTIEVPYICTEGEDQITVWGFHSDNETQMAKLYGDSKPQKFTSSANGVTTHYVSQIGGFPNQTEDGGLPQSGRIVVDYMVQKSGKTGTITYQRGILLPQKVWCASGRSKVIKGSLPLIGEADCLHEKYGGLNKSKPYYTGEHAKAIGNCPIWVKTPLTLANGTKYRPPAKLLKERGFFGAIAGFLEGGWEGMIAGWHGYTSHGAHGVAVAADLKSTQEAINKITKNLNSLSELEVKNLQRLSGAMDELHNEILELDEKVDDLRADTISSQIELAVLLSNEGIINSEDEHLLALERKLKKMLGPSAVEIGNGCFETKHKCNQTCLDRIAAGTFDAGEFSLPTFDSLNITAASLNDDGLDNHTILLYYSTAASSLAVTLMIAIFVVYMVSRDNVSCSICL

SEQ ID NO: 26526 - protein, 585 aa, Artificial Sequence; identical to SEQ ID NO: 26514
  derived and/or modified protein sequence (wt) from hemagglutinin__InfluenzaB__ACA65086

SEQ ID NO: 26527 - protein, 585 aa, Artificial Sequence; identical to SEQ ID NO: 26514
  derived and/or modified protein sequence (wt) from hemagglutinin__InfluenzaB__ACA65097

SEQ ID NO: 26528 - protein, 585 aa, Artificial Sequence; identical to SEQ ID NO: 26514
  derived and/or modified protein sequence (wt) from hemagglutinin__InfluenzaB__ACA96552

SEQ ID NO: 26529 - protein, 585 aa, Artificial Sequence; identical to SEQ ID NO: 26514
  derived and/or modified protein sequence (wt) from hemagglutinin__InfluenzaB__ACA96563

SEQ ID NO: 26530 - protein, 585 aa, Artificial Sequence; identical to SEQ ID NO: 26514
  derived and/or modified protein sequence (wt) from hemagglutinin__InfluenzaB__ACA96574

SEQ ID NO: 26531 - protein, 585 aa, Artificial Sequence; identical to SEQ ID NO: 26514
  derived and/or modified protein sequence (wt) from hemagglutinin__InfluenzaB__ACA96585

SEQ ID NO: 26532 - protein, 585 aa, Artificial Sequence
  derived and/or modified protein sequence (wt) from hemagglutinin__InfluenzaB__ACA96596
MKAIIVLLMVVTSNADRICTGITSSNSPHVVKTATQGEVNVTGVIPLTTTPTKSHFANLKGTETRGKLCPKCLNCTDLDVALGRPKCTGNIPSARVSILHEVRPVTSGCFPIMHDRTKIRQLPNLLRGYEHIRLSTHNVINAENAPGGPYKIGTSGSCPNVTNGNGFFATMAWAVPKNDNNKTATNSLTIEVPYICTEGEDQITVWGFHSDNETQMAKLYGDSKPQKFTSSANGVTTHYVSQIGGFPNQTEDGGLPQSGRIVVDYMVQKSGKTGTITYQRGILLPQKVWCASGRSKVIKGSLPLIGEADCLHEKYGGLNKSKPYYTGEHAKAIGNCPIWVKTPLKLANGTKYRPPAKLLKERGFFGAIAGFLEGGWEGMIAGWHGYTSHGAHGVAVAADLKSTQEAIDKITKNLNSLSELEVKNLQRLSGAMDELHNEILELDEKVDDLRADTISSQIELAVLLSNEGIINSEDEHLLALERKLKKMLGPSAVEIGNGCFETKHKCNQTCLDRIAAGTFDAGEFSLPTFDSLNITAASLNDDGLDNHTILLYYSTAASSLAVTLMIAIFVVYMVSRDNVSCSICL

SEQ ID NO: 26533 - protein, 585 aa, Artificial Sequence; identical to SEQ ID NO: 26514
  derived and/or modified protein sequence (wt) from hemagglutinin__InfluenzaB__ACA96607

SEQ ID NO: 26534 - protein, 585 aa, Artificial Sequence
  derived and/or modified protein sequence (wt) from hemagglutinin__InfluenzaB__ACA96618
MKAIIVLLMVVTSNADRICTGITSSNSPHVVKTATQGEVNVTGVIPLTTTPTKSHFANLKGTETRGKLCPKCLNCTDLDVALGRPKCTGNIPSARVSILHEVRPVTSGCFPIMHDRTKIRQLPNLLRGYEHIRLSTHNVINAENAPGGPYKIGTSGSCPNVTNGNGFFATMAWAVPKNDNNKTATNSLTIEVPYICTEGEDQITVWGFHSDNETQMAKLYGDSKPQKFTSSANGVTTHYVSQIGGFPNQTEDGGLPQSGRIVVDYMVQKSGKTGTITYQRGILLPQKVWCASGRSKVIKGSLPLIGEADCLHEKYGGLNKSKPYYTGEHAKAIGNCPIWVKTPLKLANGTKYRPPAKLLKERGFFGAIAGFLEGGWEGMIAGWHGYTSHGAHGVAVAADLKSTQEAINKITKNLNSLSELEVKNLQRLSGAMDELHNEILELDEKVDDLRADTISSQIELAVLLSNEGIINSEDEHLLALERKLKKMLGPSAVEIGNGCFETKHKCNQTCLDRIAAGTFDAGEFFLPTFDSLNITAASLNDDGLDNHTILLYYSTAASSLAVTLMIAIFVVYMVSRDNVSCSICL

SEQ ID NO: 26535 - protein, 585 aa, Artificial Sequence; identical to SEQ ID NO: 26514
  derived and/or modified protein sequence (wt) from hemagglutinin__InfluenzaB__ACA96629

SEQ ID NO: 26536 - protein, 585 aa, Artificial Sequence; identical to SEQ ID NO: 26520
  derived and/or modified protein sequence (wt) from hemagglutinin__InfluenzaB__ACA96640

SEQ ID NO: 26537 - protein, 584 aa, Artificial Sequence
  derived and/or modified protein sequence (wt) from hemagglutinin__InfluenzaB__ACD56566
MKAIIVLLMVVTSNADRICTGITSSNSPHVVKTATQGEVNVTGVIPLTTTPTKSYFANLKGTRTRGKLCPDCLNCTDLDVALGRPMCVGTTPSAKASILHEVRPVTSGCFPIMHDRTKIRQLPNLLRGYENIRLSTQNVVDAENAPGGPYRLGTSGSCPNATSKSGFFATMAWAVPKDNNKNATNPLTVEVPYVCTEGEDQITVWGFHSDNKTQMKNLYGDSNPQKFTSSANGVTTHYVSQIGGFPAQTEDGGLPQSGRIVVDYMVQKPRKTGTIVYQRGVLLPQKVWCASGRSKVIKGSLPLIGEADCLHEKYGGLNKSKPYYTGEHAKAIGNCPIWVKTPLKLANGTKYRPPAKLLKERGFFGAIAGFLEGGWEGMIAGWHGYTSHGAHGVAVAADLKSTQEAINKITKNLNSLSELEVKNLQRLSGAMDELHNEILELDEKVDDLRADTISSQIELAVLLSNEGIINSEDEHLLALERKLKKMLGPSAVDIGNGCFETKHKCNQTCLDKIAAGTFNAGEFSLPTFDSLNITAASLNDDGLDNHTILLYYSTAASSLAVTLMLAIFIVYMVSRDNVSCSICL

SEQ ID NO: 26538 - protein, 584 aa, Artificial Sequence
  derived and/or modified protein sequence (wt) from hemagglutinin__InfluenzaB__ACD56577
MKAIIVLLMVVTSNADRICTGITSSNSPHVVKTATQGEVNVTGVIPLTTTPTKSYFANLKGTRTRGKLCPDCLNCTDLDVALGRPMCVGTTPSAKASILHEVRPVTSGCFPIMHDRTKIRQLPNLLRGYENIRLSTQNVIDAENAPGGPYRLGTSGSCPNATSKSGFFATMAWAVPKDNNKNATNPLTVEVPYICTEGEDQITVWGFHSDNKAQMKNLYGDSNPQKFTSSANGVTTHYVSQIGGFPAQTEDGGLPQSGRIVVDYMVQKPRKTGTIVYQRGVLLPQKVWCASGRSKVIKGSLPLIGEADCLHEKYGGLNKSKPYYTGEHAKAIGNCPIWVKTPLKLANGTKYRPPAKLLKERGFFGAIAGFLEGGWEGMIAGWHGYTSHGAHGVAVAADLKSTQEAINKITKNLNSLSELEVKNLQRLSGAMDELHNEILELDEKVDDLRADTISSQIELAVLLSNEGIINSEDEHLLALERKLKKMLGPSAVDIGNGCFETKHKCNQTCLDRIAAGTFNAGEFSLPTFDSLNITAASLNDDGLDNHTILLYYSTAASSLAVTLMLAIFIVYMVSRDNVSCSICL

SEQ ID NO: 26539 - protein, 585 aa, Artificial Sequence; identical to SEQ ID NO: 26520
  derived and/or modified protein sequence (wt) from hemagglutinin__InfluenzaB__ACF41658

SEQ ID NO: 26540 - protein, 585 aa, Artificial Sequence
  derived and/or modified protein sequence (wt) from hemagglutinin__InfluenzaB__ACF54136
MKAIIVLLMVVTSNADRICTGITSSNSPHVVKTATQGEVNVTGVIPLTTTPTKSHFANLKGTETRGKLCPKCLNCTDLDVALGRPKCTGNIPSARVSILHEVRPVTSGCFPIMHDRTKIRQLPNLLRGYEHIRLSTHNVINAENAPGGPYKIGTSGSCPNVTNGNGFFATMAWAVPKNDNNKTATNSLTIEVPYICTEGEDQITVWGFHSDNKTQMAKLYGDSKPQKFTSSANGVTTHYVSQIGGFPNQTEDGGLPQSGRIVVDYMVQKSGKTGTITYQRGILLPQKVWCASGRSKVIKGSLPLIGEADCLHEKYGGLNKSKPYYTGEHAKAIGNCPIWVKTPLKLANGTKYRPPAKLLKERGFFGAIAGFLEGGWEGMIAGWHGYTSHGAHGVAVAADLKSTQEAINKITKNLNSLSELEVKNLQRLSGAMDELHNEILELDEKVDDLRADTISSQIELAVLLSNEGIINSEDEHLLALERKLKKMLGPSAVEIGNGCFETKHKCNQTCLDRIAAGTFDAGEFSLPTFDSLNITAASLNDDGLDNHTILLYYSTAASSLAVTLMIAIFVVYMVSRDNISCSICL

SEQ ID NO: 26541 - protein, 585 aa, Artificial Sequence; identical to SEQ ID NO: 26514
  derived and/or modified protein sequence (wt) from hemagglutinin__InfluenzaB__ACF54147

SEQ ID NO: 26542 - protein, 584 aa, Artificial Sequence
  derived and/or modified protein sequence (wt) from hemagglutinin__InfluenzaB__ACF54158
MKAIIVLLMVVTSNADRICTGITSSNSPHVVKTATQGEVNVTGVIPLTTTPTKSYFANLKGTRTRGKLCPDCLNCTDLDVALGRPMCVGTTPSAKASILHEVRPVTSGCFPIMHDRTKIRQLANLLRGYENIRLSTQNVIDAEKAPGGPYRLGTSGSCPNATSKSGFFATMAWAVPKDNNKNATNPLTVEVPYICTEGEDQITVWGFHSDNKTQMKNLYGDSNPQKFTSSANGVTTHYVSQIGGFPDQTEDGGLPQSGRIVVDYMMQKPGKTGTIVYQRGVLLPQKVWCASGRSKVIKGSLPLIGEADCLHEKYGGLNKSRPYYTGEHAKAIGNCPIWVKTPLKLANGTKYRPPAKLLKERGFFGAIAGFLEGGWEGMIAGWHGYTSHGAHGVAVAADLKSTQEAINKITKNLNSLSELEVKNLQRLSGAMDELHNEILELDEKVDDLRADTISSQIELAVLLSNEGIINSEDEHLLALERKLKKMLGPSAVDIGNGCFETKHKCNQTCLDRIAAGTFNAGEFSLPTFDSLNITAASLNDDGLDNHTILLYYSTAASSLAVTLMLAIFIVYMVSRDNVSCSICL

SEQ ID NO: 26543 - protein, 584 aa, Artificial Sequence
  derived and/or modified protein sequence (wt) from hemagglutinin__InfluenzaB__ACF54169
MKAIIVLLMVVTSNADRICTGITSSNSPHVVKTATQGEVNVTGVIPLTTTPTKSYFANLKGTRTRGKLCPDCLNCTDLDVALGRPMCVGTTPSAKASILHEVRPVTSGCFPIMHDRTKIRQLPNLLRGYENIRLSTQNVIDAENAPGGPYRLGTSGSCPNATSKSGFFATMAWAVPKDNNKNATNPLTVEVPYVCTEGEDQITVWGFHSDNKTPMKNLYGDSNPQKFTSSANGVTTHYVSQIGGFPAQTEDEGIPQSGRIVVDYMVQKPRKTGTIVYQRGVLLPQKVWCASGRSKVIKGSLPLIGEADCLHEKYGGLNKSKPYYTGEHAKAIGNCPIWVKTPLKLANGTKYRPPAKLLKERGFFGAIAGFLEGGWEGMIAGWHGYTSHGAHGVAVAADLKSTQEAISKITKNLNSLSELEVKNLQRLSGAMDELHNEILELDEKVDDLRADTISSQIELAVLLSNEGIINSEDEHLLALERKLKKMLGPSAVDIGNGCFETKHKCNQTCLDRIAAGTFNAGEFSLPTFDSLNITAASLNDDGLDNHTILLYYSTAASSLAVTLMLAIFIVYMVSRDNVSCSICL

SEQ ID NO: 26544 - protein, 584 aa, Artificial Sequence
  derived and/or modified protein sequence (wt) from hemagglutinin__InfluenzaB__ACF54180
MKAIIVLLMVVTSNADRICTGITSSNSPHVVKTATQGEVNVTGVIPLTTTPTKSYFANLKGTRTRGKLCPDCLNCTDLDVALGRPMCVGTTPSAKASILHEVRPVTSGCFPIMHDRTKIRQLPNLLRGYENIRLSTQNVIDAENAPGGPYRLGTSGSCPNATSKSGFFATMAWAVPKDNNKNATNPLTVEVPYVCTEGEDQITVWGFHSDNKTPMKNLYGDSNPQKFTSSANGVTTHYVSQIGGFPAQTEDGGLPQSGRIVVDYMVQKPRKTGTIVYQRGVLLPQKVWCASGRSKVIKGSLPLIGEADCLHEKYGGLNKSKPYYTGEHAKAIGNCPIWVKTPLKLANGTKYRPPAKLLKERGFFGAIAGFLEGGWEGMIAGWHGYTSHGAHGVAVAADLKSTQEAINKITKNLNSLSELEVKNLQRLSGAMDELHNEILELDEKVDDLRADTISSQIELAVLLSNEGIINSEDEHLLALERKLKKMLGPSAVDIGNGCFETKHKCNQTCLDRIAAGTFNAGEFSLPTFDSLNITAASLNDDGLDNHTILLYYSTAASSLAVTLMLAIFIVYMVSRDNVSCSICL

SEQ ID NO: 26545 - protein, 584 aa, Artificial Sequence
  derived and/or modified protein sequence (wt) from hemagglutinin__InfluenzaB__ACF54202
MKAIIVLLMVVTSNADRICTGITSSNSPHVVKTATQGEVNVTGVIPLTTTPTKSYFANLKGTRTRGKLCPDCLNCTDLDVALGRPMCVGTTPSAKASILHEVRPVTSGCFPIMHDRTKIRQLPNLLRGYENIRLSTQNVIDAENAPGGPYRLGTSRSCPNATSKSGFFATMAWAVPKDNNKNATNPLTVEVPYVCTEGEDQITVWGFHSDNKTQMKNLYGDSNPQKFTSSANGVTTHYVSQIGGFPAQTEDEGLPQSGRIVVDYMVQKPRKTGTIVYQRGVLLPQKVWCASGRSKVIKGSLPLIGEADCLHEKYGGLNKSKPYYTGEHAKAIGNCPIWVKTPLKLANGTKYRPPAKLLKERGFFGAIAGFLEGGWEGMIAGWHGYTSHGAHGVAVAADLKSTQEAINKITKNLNSLSELEVKNLQRLSGAMDELHNEILELDEKVDDLRADTISSQIELAVLLSNEGIINSEDEHLLALERKLKKMLGPSAVDIGNGCFETKHKCNQTCLDRIAAGTFNAGEFSLPTFDSLNITAASLNDDGLDNHTILLYYSTAASSLAVTLMLAIFIVYMVSRDNVSCSICL

SEQ ID NO: 26546 - protein, 584 aa, Artificial Sequence
  derived and/or modified protein sequence (wt) from hemagglutinin__InfluenzaB__ACF54213
MKAIIVLLMVVTSNADRICTGITSSNSPHVVKTATQGEVNVTGVIPLTTTPTKSYFANLKGTRTRGKLCPDCLNCTDLDVALGRPMCVGTTPSAKASILHEVRPVTSGCFPIMHDRTKIRQLPNLLRGYENIRLSTQNVIDAEKAPGGPYRLGTSGSCPNATSKSGFFATMAWAVPKDNNKNATNPLTVEVPYICTEGEDQITVWGFHSDDKTQMKNLYGDSNPQKFTSSANGVTTHYVSQIGGFPDQTEDGGLPQSGRIVVDYMMQKPGKTGTIVYQRGVLLPQKVWCASGRSKVIKGSLPLIGEADCLHEKYGGLNKSKPYYTGEHAKAIGNCPIWVKTPLKLANGTKYRPPAKLLKERGFFGAIAGFLEGGWEGMIAGWHGYTSHGAHGVAVAADLKSTQEAINKITKNLNSLSELEVKNLQRLSGAMDELHNEILELDEKVDDLRADTISSQIELAVLLSNEGIINSENEHLLALERKLKKMLGPSAVDIGNGCFETKHKCNQTCLDRIAAGTFNAGEFSLPTFDSLNITAASLNDDGLDNHTILLYYSTAASSLAVTLMLAIFIVYMVSRDNVSCSICL

SEQ ID NO: 26547 - protein, 585 aa, Artificial Sequence
  derived and/or modified protein sequence (wt) from hemagglutinin__InfluenzaB__ACF54224
MKAIIVLLMVVTSNADRICTGITSSNSPHVVKTATQGEVNVTGVIPLTTTPTKSHFANLKGTKTRGKLCPKCLNCTDLDVALGRPKCTGNIPSAEVSILHEVRPVTSGCFPIMHDRTKIRQLPNLLRGYEHIRLSTHNVINAEKAPGGPYKIGTSGSCPNVTNGNGFFATMAWAVPKNDNNKTATNSLTIEVPYICTEGEDQITVWGFHSDNETQMAKLYGDSKPQKFTSSSNGVTTHYVSQIGGFPNQTEDGGLPQSGRIVVDYMVQKSGKTGTITYQRGILLPQKVWCASGRSKVIKGSLPLIGEADCLHERYGGLNKSKPYYTGEHAKAIGNCPIWVKTPLKLANGTKYRPPAKLLKERGFFGAIAGFLEGGWEGMIAGWHGYTSHGAHGVAVAADLKSTQEAINKITKNLNSLSELEVKNLQRLSGAMDELHNEILELDEKVDDLRADTISSQIELAVLLSNEGIINSEDEHLLALERKLKKMLGPSAVEIGNGCFETKHKCNQTCLDRIAAGTFDAGEFSLPTFDSLNITAASLNDDGLDNHTILLYYSTAASSLAVTLMIAIFVVYMVSRDNVSCSICL

SEQ ID NO: 26548 - protein, 584 aa, Artificial Sequence
  derived and/or modified protein sequence (wt) from hemagglutinin__InfluenzaB__ACF54257
MKAIIVLLMVVTSNADRICTGITSSNSPHVVKTATQGEVNVTGAIPLTTTPTKSHFANLKGTKTRGKLCPTCLNCTDLDVALGRPMCVGITPSAKASILHEVRPVTSGCFPIMHDRTKIRQLPNLLRGYEKIRLSTQNVIDAEKAPGGPYRLGTSGSCPNATSKSGFFATMAWAVPRENNKTATNPLTVEVPHICTKEEDQITVWGFHSDNKPQMKNLYGDSNPQKFTSSANGITTHYVSQIGGFPDQTEDGGLPQSGRIVVDYMVQKPGKTGTIVYQRGILLPQKVWCASGRSKVIKGSLPLIGEADCLHEKYGGLNKSKPYYTGEHAKAIGNCPIWVKTPLKLANGTKYRPPAKLLKERGFFGAIAGFLEGGWEGMIAGWHGYTSHGAHGVAVAADLKSTQEAINKITKNLNSLSELEVKNLQRLSGAMDELHNEILELDEKVDDLRADTISSQIELAVLLSNEGIINSEDEHLLALERKLKKMLGPSAVDIGNGCFETKHKCNQTCLDRIAAGTFNAGEFSLPTFDSLNITAASLNDDGLDNHTILLYYSTAASSLAVTLMIAIFIVYMISRDNVSCSICL

SEQ ID NO: 26549 - protein, 584 aa, Artificial Sequence
  derived and/or modified protein sequence (wt) from hemagglutinin__InfluenzaB__ACF54268
MKAIIVLLMVVTSNADRICTGITSSNSPHVVKTATQGEVNVTGAIPLTTTPTKSHFANLKGTKTRGKLCPTCLNCTDLDVALGRPMCVGITPSAKASILHEVRPVTSGCFPIMHDRTKIRQLPNLLRGYEKIRLSTQNVIDAEKAPGGPYRLGTSGSCPNATSKSGFFATMAWAVPRENNKTATNPLTVEVPHICTKEEDQITVWGFHSDNKIQMKNLYGDSNPQKFTSSANGITTHYVSQIGGFPDQTEDGGLPQSGRIVVDYMVQKPGKTGTIVYQRGILLPQKVWCASGRSKVIKGSLPLIGEADCLHEKYGGLNKSKPYYTGEHAKAIGNCPIWVKTPLKLANGTKYRPPAKLLKERGFFGAIAGFLEGGWEGMIAGWHGYTSHGAHGVAVAADLKSTQEAINKITKNLNSLSELEVKNLQRLSGAMDELHNEILELDEKVDDLRADTISSQIELAVLLSNEGIINSEDEHLLALERKLKKMLGPSAIDIGNGCFETKHKCNQTCLDRIAAGTFNAGEFSLPTFDSLNITAASLNDDGLDNHTILLYYSTAASSLAVTLMIAIFIVYMISRDNVSCSICL

SEQ ID NO: 26550 - protein, 584 aa, Artificial Sequence
  derived and/or modified protein sequence (wt) from hemagglutinin__InfluenzaB__ACF54279
MKAIIVLLMVVTSNADRICTGITSSNSPHVVKTATQGEVNVTGAIPLTTTPTKSHFANLKGTKTRGKLCPTCLNCTDLDVALGRPMCVGITPSAKASILHEVRPVTSGCFPIMHDRTKIRQLPNLLRGYEKIRLSTQNVIDAEKAPGGPYRLGTSGSCPNATSKSGFFATMAWAVPRENNKTATNPLTVEVPHICTKEEDQITVWGFHSDNKTQMKNLYGDSNPQKFTSSANGITTHYVSQIGGFPDQTEDGGLPQSGRIVVDYMVQKPGKTGTIVYQRGILLPQKVWCASGRSKVIKGSLPLIGEADCLHEKYGGLNKSKPYYTGEHAKAIGNCPIWVKTPLKLANGTKYRPPAKLLKERGFFGAIAGFLEGGWEGMIAGWHGYTSHGAHGVAVAADLKSTQEAINKITKNLNSLSELEVKNLQRLSGAMDELHNEILELDEKVDDLRADTISSQIELAVLLSNEGIINSEDEHLLALERKLKKMLGPSAVDIGNGCFETKHKCNQTCLDRIAAGTFNAGEFSLPTFDSLNITAASLNDDGLDNHTILLYYSTAASSLAVTLMIAIFIVYMISRDNVSCSICL

SEQ ID NO: 26551 - protein, 584 aa, Artificial Sequence
  derived and/or modified protein sequence (wt) from hemagglutinin__InfluenzaB__ACF54290
MKAIIVLLMVVTSNADRICTGITSSNSPHVVKTATQGEVNVTGVIPLTTTPTKSYFANLKGTRTRGKLCPDCLNCTDLDVALGRPMCVGTTPSAKASILHEVRPVTSGCFPIMHDRTKIRQLPNLLRGYENIRLSTQNVVDAENAPGGPYRLGTSGSCPNATSKSGFFATMAWAVPKDNNKNATNPLTVEVPYVCTEGEDQITVWGFHSDKKTQMKNLYGDSNPQKFTSSANGVTTHYVSQIGGFPAQTEDGGLPQSGRIVVDYMVQKPRKTGTIVYQRGVLLPQKVWCASGRSKVIKGSLPLIGEADCLHEKYGGLNKSKPYYTGEHAKAIGNCPIWVKTPLKLANGTKYRPPAKLLKERGFFGAIAGFLEGGWEGMIAGWHGYTSHGAHGVAVAADLKSTQEAINKITKNLNSLSELEVKNLQRLSGAMDELHNEILELDEKVDDLRADTISSQIELAVLLSNEGIINSEDEHLLALERKLKKMLGPSAVDIGNGCFETKHKCNQTCLDKIAAGTFNAGEFSLPTFDSLNITAASLNDDGLDNHTILLYYSTAASSLAVTLMLAIFIVYMVSRDNVSCSICL

SEQ ID NO: 26552 - protein, 585 aa, Artificial Sequence
  derived and/or modified protein sequence (wt) from hemagglutinin__InfluenzaB__ACF54312
MKAIIVLLMVVTSNADRICTGITSSNSPHVVKTATQGEVNVTGVIPLTTTPTKSHFANLKGTKTRGKLCPKCLNCTDLDVALGRPKCTGNIPSAEVSILHEVRPVTSGCFPIMHDRTKIRQLPNLLRGYEHIRLSTHNVINAEKAPGGPYKIGTSGSCPNVTNGNGFFATMAWAVPKNDNNKTATNSLTIEVPYICTEGEDQITVWGFHSDSETQMAKLYGDSKPQKFTSSSNGVTTHYISQIGGFPNQTEDGGLPQSGRIVVDYMVQKSGKTGTITYQRGILLPQKVWCASGRSKVIKGSLPLIGEADCLHEKYGGLNKSKPYYTGEHAKAIGNCPIWVKTPLKLANGTKYRPPAKLLKERGFFGAIAGFLEGGWEGMIAGWHGYTSHGAHGVAVAADLKSTQEAINKITKNLNSLSELEVKNLQRLSGAMDELHNEILELDEKVDDLRADTISSQIELAVLLSNEGIINSEDEHLLALERKLKKMLGPSAIEIGNGCFETKHKCNQTCLDRIAAGTFDAGEFSLPTFDSLNITAASLNDDGLDNHTILLYYSTAASSLAVTLMIAIFVVYMVSRDNVSCSICL

SEQ ID NO: 26553 - protein, 585 aa, Artificial Sequence
  derived and/or modified protein sequence (wt) from hemagglutinin__InfluenzaB__ACF54323
MKAIIVLLMVVTSNADRICTGITSSNSPHVVKTATQGEVNVTGVIPLTTTPTKSHFANLKGTETRGKLCPKCLNCTDLDVALGRPKCTGNIPSARVSILHEVRPVTSGCFPIMHDRTKIRQLPNLLRGYEHIRLSTRNVINAENAPGGPYKIGTSGSCPNVTNGNGFFATMAWAVPKNDNNKTATNSLTIEVPYICTEGEDQITVWGFHSDNEAQMAKLYGDSKPQKFTSSANGVTTHYVSQIGGFPNQTEDGGLPQSGRIVVDYMVQKSGKTGTITYQRGILLPQKVWCASGRSKVIKGSLPLIGEADCLHEKYGGLNKSKPYYTGEHAKAIGNCPIWVKTPLKLANGTKYRPPAKLLKERGFFGAIAGFLEGGWEGMIAGWHGYTSHGAHGVAVAADLKSTQEAINKITKNLNSLSELEVKNLQRLSGAMDELHNEILELDEKVDDLRADTISSQIELAVLLSNEGIINSEDEHLLALERKLKKMLGPSAVEIGNGCFETKHKCNQTCLDRIAAGTFDAGEFSLPTFDSLNITAASLNDDGLDNHTILLYYSTAASSLAVTLMIAIFVVYMVSRDNVSCSICL

SEQ ID NO: 26554 - protein, 584 aa, Artificial Sequence
  derived and/or modified protein sequence (wt) from hemagglutinin__InfluenzaB__ACF54345
MKAIIVLLMVVTSNADRICTGITSSNSPHVVKTATQGEVNVTGVIPLTTTPTKSYFANLKGTRTRGKLCPDCLNCTDLDVALGRPMCVGTTPSAKASILHEVRPVTSGCFPIMHDRTKIRQLANLLRGYENIRLSTQNVIDAEKAPGGPYRLGTSGSCPNATSKSGFFATMAWAVPKDNNKNATNPLTVEVPYICTEGEDQITVWGFHSDNKAQMKNLYGDSNPQKFTSSANGVTTHYVSQIGGFPDQTEDGGLPQSGRIVVDYMIQKPGKTGTIVYQRGVLLPQKVWCASGRSKVIKGSLPLIGEADCLHEKYGGLNKSKPYYTGEHAKAIGNCPIWVKTPLKLANGTKYRPPAKLLRERGFFGAIAGFLEGGWEGMIAGWHGYTSHGAHGVAVAADLKSTQEAINKITKNLNSLSELEVKNLQRLSGAMDELHNEILELDEKVDDLRADTISSQIELAVLLSNEGIINSEDEHLLALERKLKKMLGPSAVDIGNGCFETKHKCNQTCLDRIAAGTFNAGEFSLPTFDSLNITAASLNDDGLDNHTILLYYSTAASSLAVTLMLAIFIVYMVSRDNVSCSICL

SEQ ID NO: 26555 - protein, 584 aa, Artificial Sequence
  derived and/or modified protein sequence (wt) from hemagglutinin__InfluenzaB__ACF54367
MKAIIVLLMVVTSNADRICTGITSSNSPHVVKTATQGEVNVTGVIPLTTAPTKSYFANLKGTRTRGKLCPDCLNCTDLDVALGRPMCVGTTPSAKASILHEVRPVTSGCFPIMHDRTKIRQLANLLRGYENIRLSTQNVIDAEKAPGGPYRLGTSGSCPNATSKSGFFATMAWAVPKDNNKNATNPLTVEVPYICTEGEDQITVWGFHSDSKTQMKNLYGDSNPQKFTSSANGVTTHYVSQIGGFPDQTEDGGLPQSGRIVVDYMMQKPGKTGTIVYQRGVLLPQKVWCASGRSKVIKGSLPLIGEADCLHEKYGGLNKSKPYYTGEHAKAIGNCPIWVKTPLKLANGTKYRPPAKLLKERGFFGAIAGFLEGGWEGMIAGWHGYTSHGAHGVAVAADLKSTQEAINKITKNLNSLSELEVKNLQRLSGAMDELHNEILELDEKVDDLRADTISSQIELAVLLSNEGIINSEDEHLLALERKLKKMLGPSAVDIGNGCFETKHKCNQTCLDRIAAGTFNAGEFSLPTFDSLNITAASLNDDGLDNHTILLYYSTAASSLAVTLMLAIFIVYMVSRDNVSCSICL

SEQ ID NO: 26556 - protein, 584 aa, Artificial Sequence
  derived and/or modified protein sequence (wt) from hemagglutinin__InfluenzaB__ACN32556
MKAIIVLLMVVTSNADRICTGITSSNSPHVVKTATQGEVNVTGAIPLTTTPTKSHFANLKGTKTRGKLCPTCLNCTDLDVALGRPMCVGITPSAKASILHEVRPVTSGCFPIMHDRTKIRQLPNLLRGYEKIRLSTQNVINAEKAPGGPYRLGTSGSCPNATSKSGFFATMAWAVPRDNNKTATNPLTVEVPHICTKEEDQITVWGFHSDNKTQMKNLYGDSNPQKFTSFANGITTHYVSQIGGFPDQTEDGGLPQSGRIVVDYMVQKPGKTGTIVYQRGILLPQKVWCASGRSKVIKGSLPLIGEADCLHEKYGGLNKSKPYYTGEHAKAIGNCPIWVKTPLKLANGTKYRPPAKLLKERGFFGAIAGFLEGGWEGMIAGWHGYTSHGAHGVAVAADLKSTQEAINKITKNLNSLSELEVKNLQRLSGAMDELHNEILELDEKVDDLRADTISSQIELAVLLSNEGIINSEDEHLLALERKLKKMLGPSAVDIGNGCFETKHKCNQTCLDRIAAGTFNAGEFSLPTFDSLNITAASLNDDGLDNHTILLYYSTAASSLAVTLMIAIFIVYMISRDNVSCSICL

SEQ ID NO: 26557 - protein, 585 aa, Artificial Sequence
  derived and/or modified protein sequence (wt) from hemagglutinin__InfluenzaB__ACN32567
MEAIIVLLMVVTSNADRICTGITSSNSPHVVKTATQGEVNVTGVIPLTTTPTKSHFANLKGTETRGKLCPKCLNCTDLDVALGRPKCTGNIPSARVSILHEVRPVTSGCFPIMHDRTKIRQLPNLLRGYEHIRLSTHNVINAENAPGGPYKIGTSGSCPNVTNGNGFFATMAWAVPKNDNNKTATNSLTIEVPYICTEGEDQITVWGFHSDNETQMAKLYGDSKPQKFTSSANGVTTHYVSQIGGFPNQTEDGGLPQSGRIVVDYMVQKSGKTGTITYQRGILLPQKVWCASGRSKVIKGSLPLIGEADCLHEKYGGLNKSKPYYTGEHAKAIGNCPIWVKTPLKLANGTKYRPPAKLLKERGFFGAIAGFLEGGWEGMIAGWHGYTSHGAHGVAVAADLKSTQEAINKITKNLNSLSELEVKNLQRLSGAMDELHNEILELDEKVDDLRADTISSQIELAVLLSNEGIINSEDEHLLALERKLKKMLGPSAVEIGNGCFETKHKCNQTCLDRIAAGTFDAGEFSLPTFDSLNITAASLNDDGLDNHTILLYYSTAASSLAVTLMIAIFVVYMVSRDNVSCSICL

SEQ ID NO: 26558 - protein, 585 aa, Artificial Sequence; identical to SEQ ID NO: 26514
  derived and/or modified protein sequence (wt) from hemagglutinin__InfluenzaB__ACN32578

SEQ ID NO: 26559 - protein, 585 aa, Artificial Sequence
  derived and/or modified protein sequence (wt) from hemagglutinin__InfluenzaB__ACN32589
MKAIIVLLMVVTSNADRICTGITSSNSPHVVKTATQGEVNVTGVIPLTTTPTKSHFSNLKGTETRGKLCPKCLNCTDLDVALGRPKCTGNIPSARVSILHEVRPVTSGCFPIMHDRTKIRQLPNLLRGYEHIRLSTHNVINAENAPGGPYKIGTSGSCPNVTNGNGFFATMAWAVPKNDNNKTATNSLTIEVPYICTEGEDQITIWGFHSDNETQMAKLYGDSKPQKFTSSANGVTTHYVSQIGGFPNQTEDGGLPQSGRIVVDYMVQKSGKTGTITYQRGILLPQKVWCASGRSKVIKGSLPLIGEADCLHEKYGGLNKSKPYYTGEHAKAIGNCPIWVKTPLKLANGTKYRPPAKLLKERGFFGAIAGFLEGGWEGMIAGWHGYTSHGAHGVAVAADLKSTQEAINKITKNLNSLSELEVKNLQRLSGAMDELHNEILELDEKVDDLRADTISSQIELAVLLSNEGIINSEDEHLLALERKLKKMLGPSAVEIGNGCFETKHKCNQTCLDRIAAGTFDAGEFSLPTFDSLNITAASLNDDGLDNHTILLYYSTAASSLAVTLMIAIFVVYMVSRDNVSCSICL

SEQ ID NO: 26560 - protein, 585 aa, Artificial Sequence
  derived and/or modified protein sequence (wt) from hemagglutinin__InfluenzaB__ACN32600
MKAIIVLLMVVTSNADRICTGITSSNSPHVVKTATQGEVNVTGVIPLTTTPTKSHFSNLKGTETRGKLCPKCLNCTDLDVALGRPKCTGNIPSARVSILHEVRPVTSGCFPIMHDRTKIRQLPNLLRGYEHIRLSTHNVINAENAPGGPYKIGTSGSCPNVTNGNGFFATMAWAVPKNDNNKTATNSLTIEVPYICTEGEDQITVWGFHSDNETQMAKLYGDSKPQKFTSSANGVTTHYVSQIGGFPNQTEDGGLPQSGRIVVDYMVQKSGKTGTITYQRGILLPQKVWCASGRSKVIKGSLPLIGEADCLHEKYGGLNKSKPYYTGEHAKAIGNCPIWVKTPLKLANGTKYRPPARLLKERGFFGAIAGFLEGGWEGMIAGWHGYTSHGAHGVAVAADLKSTQEAINKITKNLNSLSELEVKNLQRLSGAMDELHNEILELDEKVDDLRADTISSQIELAVLLSNEGIINSEDEHLLALERKLKKMLGPSAVEIGNGCFETKHKCNQTCLDRIAAGTFDAGEFSLPTFDSLNITAASLNDDGLDNHTILLYYSTAASSLAVTLMIAIFVVYMVSRDNVSCSICL

SEQ ID NO: 26561 - protein, 585 aa, Artificial Sequence; identical to SEQ ID NO: 26525
  derived and/or modified protein sequence (wt) from hemagglutinin__InfluenzaB__ACN32611

SEQ ID NO: 26562 - protein, 584 aa, Artificial Sequence; identical to SEQ ID NO: 26426
  derived and/or modified protein sequence (wt) from hemagglutinin__InfluenzaB__ACN32716

SEQ ID NO: 26563 - protein, 585 aa, Artificial Sequence; identical to SEQ ID NO: 26514
  derived and/or modified protein sequence (wt) from hemagglutinin__InfluenzaB__ACN32771

SEQ ID NO: 26564 - protein, 585 aa, Artificial Sequence; identical to SEQ ID NO: 26520
  derived and/or modified protein sequence (wt) from hemagglutinin__InfluenzaB__ACN32782

SEQ ID NO: 26565 - protein, 585 aa, Artificial Sequence
  derived and/or modified protein sequence (wt) from hemagglutinin__InfluenzaB__ACO05957
MKAIIVLLMVVTSNADRICTGITSSNSPHVVKTATQGEVNVTGVIPLTTTPTKSHFANLKGTETRGKLCPKCLNCTDLDVALGRPKCTGNIPSARVSILHEVRPVTSGCFPIMHDRTKIRQLPNLLRGYEHIRLSTHNVINAENAPGGPYKIGTSGSCPNVTNGNGFFATMAWAVPKNDNNKTATNSLTIEVPYICTEGEDQITVWGFHSDNEIQMAKLYGDSKPQKFTSSANGVTTHYVSQIGGFPNQTEDGGLPQSGRIVVDYMVQKSGKTGTITYQRGILLPQKVWCASGRSKVIKGSLPLIGEADCLHEKYGGLNKSKPYYTGEHAKAIGNCPIWVKTPLKLANGTKYRPPAKLLKERGFFGAIAGFLEGGWEGMIAGWHGYTSHGAHGVAVAADLKSTQEAINKITKNLNSLSELEVKNLQRLSGAMDELHNEILELDEKVDDLRADTISSQIELAVLLSNEGIINSEDEHLLALERKLKKMLGPSAVEIGNGCFETKHKCNQTCLDRIAAGTFDAGEFSLPTFDSLNITAASLNDDGLDNHTILLYYSTAASSLAVTLMIAIFVVYMVSRDNVSCSICL

SEQ ID NO: 26566 - protein, 584 aa, Artificial Sequence
  derived and/or modified protein sequence (wt) from hemagglutinin__InfluenzaB__ACO05968
MKAIIVLLMVVTSNADRICTGITSSNSPHVVKTATQGEVNVTGVIPLTTTPTKSYFANLKGTRTRGKLCPDCLNCTDLDVALGRPMCVGTTPSAKASILHEVRPVTSGCFPIMHDRTKIRQLPNLLRGYENIRLSTQNVIDAEKAPGGPYRLGTSGSCPNATSKSGFFATMAWAVPKDNNKNATNPLTVEVPYICTEREDQITVWGFHSDNKTQMKNLYGDSNPQKFTSSANGVTTHYVSQIGSFPDQTEDGGLPQSGRIVVDYMMQKPGKTGTIVYQRGVLLPQKVWCASGRSKVIKGSLPLIGEADCLHEKYGGLNKSKPYYTGEHAKAIGNCPIWVKTPLKLANGTKYRPPAKLLKERGFFGAIAGFLEGGWEGMIAGWHGYTSHGAHGVAVAADLKSTQEAINKITKNLNSLSELEVKNLQRLSGAMDELHNEILELDEKVDDLRADTISSQIELAVLLSNEGIINSEDEHLLALERKLKKMLGPSAVEIGNGCFETKHKCNQTCLDRIAAGTFNAGEFSLPTFDSLNITAASLNDDGLDNHTILLYYSTAASSLAVTLMLAIFIVYMVSRDNVSCSICL

SEQ ID NO: 26567 - protein, 584 aa, Artificial Sequence
  derived and/or modified protein sequence (wt) from hemagglutinin__InfluenzaB__ACO05979
MKAIIVLLMVVTSNADRICTGITSSNSPHVVKTATQGEVNVTGVIPLTTTPTKSYFANLKGTRTRGKLCPDCLNCTDLDVALGRPMCVGTTPSAKASILHEVRPVTSGCFPIMHDRTKIRQLPNLLRGYENIRLSTQNVIDAEKAPGGPYRLGTSGSCPNATSKSGFFATMAWAVPKDNNKNATNPLTVEVPYICTEGEDQITVWGFHSDNKTQMKNLYGDSNPQKFTSSANGVTTHYVSQIGSFPDQTEDGGLPQSGRIVVDYMMQKPGKTGTIVYQRGVLLPQKVWCASGRSKVIKGSLPLIGEADCLHEKYGGLNKSKPYYTGEHAKAIGNCPIWVKTPLKLANGTKYRPPAKLLKERGFFGAIAGFLEGGWEGMIAGWHGYTSHGAHGVAVAADLKSTQEAINKITKNLNSLSELEVKNLQRLSGAMDELHNEILELDEKVDDLRADTISSQIELAVLLSNEGIINSEDEHLLALERKLKKMLGPSAVEIGNGCFETKHKCNQTCLDRIAAGTFNAGEFSLPTFDSLNITAASLNDDGLDNHTILLYYSTAASSLAVTLMLAIFIVYMVSRDNVSCSICL

SEQ ID NO: 26568 - protein, 584 aa, Artificial Sequence; identical to SEQ ID NO: 26567
  derived and/or modified protein sequence (wt) from hemagglutinin__InfluenzaB__ACO05990

SEQ ID NO: 26569 - protein, 585 aa, Artificial Sequence
  derived and/or modified protein sequence (wt) from hemagglutinin__InfluenzaB__ACO06001
MKAIIVLLMVVTSNADRICTGITSSNSPHVVKTATQGEVNVTGVIPLTTTPTKSHFANLKGTETRGKLCPKCLNCTDLDVALGRPKCTGNIPSARVSILHEVRPVTSGCFPIMHDRTKIRQLPNLLRGYEHIRLSTHNVINAENAPGGPYKIGTSGSCPNVTNGNGFFATMAWAVPKNDNNKTATNSLTIEVPYICTEGEDQITVWGFHSDNENQMAKLYGDSKPQKFTSFANGVTTHYVSQIGGFPNQTEDGGLPQSGRIVVDYMVQKSGKTGTITYQRGILLPQKVWCASGRSKVIKGSLPLIGEADCLHEKYGGLNKSKPYYTGEHAKAIGNCPIWVKTPLKLANGTKYRPPAKLLKERGFFGAIAGFLEGGWEGMIAGWHGYTSHGAHGVAVAADLKSTQEAINKITKNLNSLSELEVKNLQRLSGAMDELHNEILELDEKVDDLRADTISSQIELAVLLSNEGIINSEDEHLLALERKLKKMLGPSAVEIGNGCFETKHKCNQTCLDRIAAGTFDAGEFSLPTFDSLNITAASLNDDGLDNHTILLYYSTAASSLAVTLMIAIFVVYMVSRDNVSCSICL

SEQ ID NO: 26570 - protein, 584 aa, Artificial Sequence; identical to SEQ ID NO: 26567
  derived and/or modified protein sequence (wt) from hemagglutinin__InfluenzaB__ACO06012

SEQ ID NO: 26571 - protein, 584 aa, Artificial Sequence; identical to SEQ ID NO: 26567
  derived and/or modified protein sequence (wt) from hemagglutinin__InfluenzaB__ACO06023

SEQ ID NO: 26572 - protein, 584 aa, Artificial Sequence
  derived and/or modified protein sequence (wt) from hemagglutinin__InfluenzaB__ACO06062
MKAIIVLLMVVTSNADRICTGITSSNSPHVVKTATQGEVNVTGVIPLTTTPTKSYFANLKGTRTRGKLCPDCLNCTDLDVALGRPMCVGTTPSAKASILHEVRPVTSGCFPIMHDRTKIRQLPNLLRGYENIRLSTQNVIDAEKAPGGPYRLGTSGSCPNATSKSGFFATMAWAVPKDNNKNATNPLTVEVPYICTEGEDQITVWGFHSDNKTQMKNLYGDSNPQKFTSSANGVTTHYVSQIDSFPDQTEDGGLPQSGRIVVDYMMQKPGKTGTIVYQRGVLLPQKVWCASGRSKVIKGSLPLIGEADCLHEKYGGLNKSKPYYTGEHAKAIGNCPIWVKTPLKLANGTKYRPPAKLLKERGFFGAIAGFLEGGWEGMIAGWHGYTSHGAHGVAVAADLKSTQEAINKITKNLNSLSELEVKNLQRLSGAMDELHNEILELDEKVDDLRADTISSQIELAVLLSNEGIINSEDEHLLALERKLKKMLGPSAVEIGNGCFETKHKCNQTCLDRIAAGTFNAGEFSLPTFDSLNITAASLNDDGLDNHTILLYYSTAASSLAVTLMLAIFIVYMVSRDNVSCSICL

SEQ ID NO: 26573 - protein, 585 aa, Artificial Sequence
  derived and/or modified protein sequence (wt) from hemagglutinin__InfluenzaB__ACO94661
MKAIIVLLMVVTSNADRICTGITSSNSPHVVKTATQGEVNVTGVIPLTTTPTKSHFANLKGTETRGKLCPKCLNCTDLDVALGRPKCTGNIPSARVSILHEVRPVTSGCFPIMHDRTKIRQLPNLLRGYEHIRLSTHNVINAENAPGGPYKIGTSGSCPNVTNGNGFFTTMAWAVPKNDNNKTATNSLTIEVPYICTEGEDQITVWGFHSDNETQMAKLYGDSKPQKFTSSANGVTTHYVSQIGGFPNQTEDGGLPQSGRIVVDYMVQKSGKTGTITYQRGILLPQKVWCASGRSKVIKGSLPLIGEADCLHEKYGGLNKSKPYYTGEHAKAIGNCPIWVKTPLKLANGTKYRPPAKLLKERGFFGAIAGFLEGGWEGMIAGWHGYTSHGAHGVAVAADLKSTQEAINKITKNLNSLSELEVKNLQRLSGAMDELHNEILELDEKVDDLRADTISSQIELAVLLSNEGIINSEDEHLLALERKLKKMLGPSAVEIGNGCFETKHKCNQTCLDRIAAGTFDAGEFSLPTFDSLNITAASLNDDGLDNHTILLYYSTAASSLAVTLMIAIFVVYMVSRDNVSCSICL

SEQ ID NO: 26574 - protein, 585 aa, Artificial Sequence; identical to SEQ ID NO: 26514
  derived and/or modified protein sequence (wt) from hemagglutinin__InfluenzaB__ACR15622

SEQ ID NO: 26575 - protein, 585 aa, Artificial Sequence
  derived and/or modified protein sequence (wt) from hemagglutinin__InfluenzaB__ACR15633
MKAIIVLLMVVTSNADRICTGITSSNSPHVVKTATQGEVNVTGVIPLTTTPTKSHFANLKGTETRGKLCPKCLNCTDLDVALGRPKCTGNIPSARVSILHEVRPVTSGCFPIMHDRTKIRQLPNLLRGYEHIRLSTHNVINAENAPGGPYKIGTSGSCPNVTNGNGFFATMAWAVPKNDNNKTATNSLTIEVPYICTEGEDQITVWGFHSDSETQMAKLYGDSKPQKFTSSANGVTTHYVSQIGGFPNQTEDGGLPQSGRIVVDYMVQKSGKTGTITYQRGILLPQKVWCASGRSKVIKGSLPLIGEADCLHEKYGGLNKSKPYYTGEHAKAIGNCPIWVKTPLKLANGTKYRPPAKLLKERGFFGAIAGFLEGGWEGMIAGWHGYTSHGAHGVAVAADLKSTQEAINKITKNLNSLSELEVKNLQRLSGAMDELHNEILELDEKVDDLRADTISSQIELAVLLSNEGIINSEDEHLLALERKLKKMLGPSAVEIGNGCFETKHKCNQTCLDRIAAGTFDAGEFSLPTFDSLNITAASLNDDGLDNHTILLYYSTAASSLAVTLMIAIFVVYMVSRDNVSCSICL

SEQ ID NO: 26576 - protein, 584 aa, Artificial Sequence
  derived and/or modified protein sequence (wt) from hemagglutinin__InfluenzaB__ACR15644
MKAIIVLLMVVTSNADRICTGITSSNSPHVVKTATQGEVNVTGVIPLTTTPTKSYFANLKGTRTRGKLCPDCLNCTDLDVALGRPMCVGTTPSAKASILHEVRPVTSGCFPIMHDRTKIRQLPNLLRGYENIRLSTQNVIDAENAPGGPYRLGTSGSCPNATSKSGFFATMAWAVPKDNNKNATNPLTVEVPYVCTEGEDQITVWGFHSDNKIQMKNLYGDSNPQKFTSSANGVTTHYVSQIGGFPAQTEDGGLPQSGRIVVDYMVQKPRKTGTIVYQRGVLLPQKVWCASGRSKVIKGSLPLIGEADCLHEKYGGLNKSKPYYTGEHAKAIGNCPIWVKTPLKLANGTKYRPPAKLLKERGFFGAIAGFLEGGWEGMIAGWHGYTSHGAHGVAVAADLKSTQEAINKITKNLNSLSELEVKNLQRLSGAMDELHNEILELDEKVDDLRADTISSQIELAVLLSNEGIINSEDEHLLALERKLKKMLGPSAVDIGNGCFETKHKCNQTCLDRIAAGTFNAGEFSLPTFDSLNITAASLNDDGLDNHTILLYYSTAASSLAVTLMLAIFIVYMVSRDNVSCSICL

SEQ ID NO: 26577 - protein, 585 aa, Artificial Sequence
  derived and/or modified protein sequence (wt) from hemagglutinin__InfluenzaB__ACR15655
MKAIIVLLMVVTSNADRICTGITSSNSPHVVKTATQGEVNVTGVIPLTTTPTKSHFANLKGTETRGKLCPKCLNCTDLDVALGRPKCTGNIPSARVSILHEVRPVTSGCFPIMHDRTKIRQLPNLLRGYEHIRLSTHNVINAENAPGGPYKIGTSGSCPNVTNGNGFFATMAWAVPKNDNNKTATNSLTIEVPYICTEGEDQITVWGFHSDSETQMAKLYGDSKPQKFTSSANGVTTHYVSQIGGFPNQTEDGGLPQSGRIVVDYMVQKSGKTGTITYQRGILLPQKVWCASGRSKVIKGSLPLIGEADCLHEKYGGLNKSKPYYTGEHAKAIGNCPIWVKTPLKLANGTKYRPPAKLLKERGFFGAIAGFLEGGWEGMIAGWHGYTSHGAHGVAVAADLKSTQEAINKITKNLNSLSELEVKNLQRLSGAMDELHNEILELDEKVDDLRADTISSQIELAVLLSNEGIINSEDEHLLALERKLKKMLGPSAVEIGNGCFETKHKCNQTCLDRIAAGTFDAGEFSLPTFDSLNITAASLNDDGLDNHTILLYYSTAASSLAVTLMIAIFVVYMVSRDNISCSICL

SEQ ID NO: 26578 - protein, 585 aa, Artificial Sequence
  derived and/or modified protein sequence (wt) from hemagglutinin__InfluenzaB__ACR15666
MKAIIVLLMVVTSNADRICTGITSSNSPHVVKTATQGEVNVTGVIPLTTTPTKSHFANLKGTETRGKLCPKCLNCTDLDVALGRPKCTGNIPSARVSILHEVRPVTSGCFPIMHNRTKIRQLPNLLRGYEHIRLSTHNVINAENAPGGPYKIGTSGSCPNVTNGNGFFATMAWAVPKNDNNKTATNSLTIEVPYICTEGEDQITVWGFHSDDETQMAKLYGDSKPQKFTSSANGVTTHYVSQIGGFPNQTEDGGLPQSGRIVVDYMVQKSGKTGTITYQRGILLPQKVWCASGRSKVIKGSLPLIGEADCLHEKYGGLNKSKPYYTGEHAKAIGNCPIWVKTPLKLANGTKYRPPAKLLKERGFFGAIAGFLEGGWEGMIAGWHGYTSHGAHGVAVAADLKSTQEAINKITKNLNSLSELEVKNLQRLSGAMDELHNEILELDEKVDDLRADTISSQIELAVLLSNEGIINSEDEHLLALERKLKKMLGPSAVEIGNGCFETKHKCNQTCLDRIAAGTFDAGEFSLPTFDSLNITAASLNDDGLDNHTILLYYSTAASSLAVTLMIAIFVVYMVSRDNVSCSICL

SEQ ID NO: 26579 - protein, 585 aa, Artificial Sequence
  derived and/or modified protein sequence (wt) from hemagglutinin__InfluenzaB__ACR15677
MKAIIVLLMVVTSNADRICTGITSSNSPHVVKTATQGEVNVTGVIPLTTTPTKSHFANLKGTKTRGKLCPKCLNCTDLDVALGRPKCTGNIPSAKVSILHEVRPVTSGCFPIMHDRTKIRQLPNLLRGYEHIRLSTHNVINAEKAPGGPYKIGTSGSCPNITNGNGFFATMAWAVPKNDNNKTATNSLTIEVPYICTEGEDQITVWGFHSDNEAQMAKLYGDSKPQKFTSSANGVTTHYVSQIGGFPNQTEDGGLPQSGRIVVDYMVQKSGKTGTITYQRGILLPQKVWCASGRSKVIKGSLPLIGEADCLHEKYGGLNKSKPYYTGEHAKAIGNCPIWVKTPLKLANGTKYRPPAKLLKERGFFGAIAGFLEGGWEGMIAGWHGYTSHGAHGVAVAADLKSTQEAINKITKNLNSLSELEVKNLQRLSGAMDELHNEILELDEKVDDLRADTISSQIELAVLLSNEGIINSEDEHLLALERKLKKMLGPSAVEIGNGCFETKHKCNQTCLDRIAAGTFDAGEFSLPTFDSLNITAASLNDDGLDNHTILLYYSTAASSLAVTLMIAIFVVYMVSRDNVSCSICL

SEQ ID NO: 26580 - protein, 584 aa, Artificial Sequence; identical to SEQ ID NO: 26567
  derived and/or modified protein sequence (wt) from hemagglutinin__InfluenzaB__ACR15710

SEQ ID NO: 26581 - protein, 584 aa, Artificial Sequence
  derived and/or modified protein sequence (wt) from hemagglutinin__InfluenzaB__ACR15721
MKAIIVLLMVVTSNADRICTGITSSNSPHVVKTATQGEVNVTGVIPLTTTPTKSHFANLKGTKTRGKLCPNCLNCTDLDVALGRPMCVGTTPSAKASILHEVRPVTSGCFPIMHDRTKIRQLPNLLRGYENIRLSTQNVINAEKAPGGPYRLGTSGSCPNATSRSGFFATMAWAVPRDDNKTATNPLTVEVPYVCTEGEDQITVWGFHSDNKAQMKNLYGDSNPQKFTSSANGVTTHYVSQIGGFPDQTEDGGLPQSGRIVVDYMVQKPGKTGTIVYQRGVLLPQKVWCASGRSKVIKGSLPLIGEADCLHEKYGGLNKSKPYYTGEHAKAIGNCPIWVKTPLKLANGTKYRPPAKLLKERGFFGAIAGFLEGGWEGMIAGWHGYTSHGAHGVAVAADLKSTQEAINKITKNLNSLSELEVKNLQRLSGAMDELHNEILELDEKVDDLRADTISSQIELAVLLSNEGIINSEDEHLLALERKLKKMLGPSAVDIGNGCFETKHKCNQTCLDRIAAGTFNAGEFSLPTFDSLNITAASLNDDGLDNHTILLYYSTAASSLAVTLMIAIFIVYMVSRDNVSCSICL

SEQ ID NO: 26582 - protein, 585 aa, Artificial Sequence
  derived and/or modified protein sequence (wt) from hemagglutinin__InfluenzaB__ACR39336
MKAIIVLLMVVTSNADRICTGITSSNSPHVVKTATQGEVNVTGVIPLTTTPTKSHFANLKGTETRGKLCPKCLNCTDLDVALGRPKCTGNIPSARVSILHEVRPVTSGCFPIMHDRTKIRQLPNLLRGYEHIRLSTHNVINAENAPGGPYKIGTSGSCPNVTNGNGFFATMAWAVPKNDNNKTATNSLTIEVPYICTEGEDQITVWGFHSDNEAQMAKLYGDSKPQKFTSSANGVTTHYVSQIGGFPNQTEDGGLPQSGRIVVDYMVQKSGKTGTITYQRGILLPQKVWCASGRSKVIKGSLPLIGEADCLHEKYGGLNKSKPYYTGEHAKAIGNCPIWVKTPLKLANGTKYRPPAKLLKERGFFGAIAGFLEGGWEGMIAGWHGYTSHGAHGVAVAADLKSTQEAINKITKNLNSLSELEVKNLQRLSGAMDELHNEILELDEKVDDLRADTISSQIELAVLLSNEGIINSEDEHLLALERKLKKMLGPSAVEIGNGCFETKHKCNQTCLDRIAAGTFDAGEFSLPTFDSLNITAASLNDDGLDNHTILLYYSTAASSLAVTLMIAIFVVYMVSRDNVSCSICL

SEQ ID NO: 26583 - protein, 584 aa, Artificial Sequence
  derived and/or modified protein sequence (wt) from hemagglutinin__InfluenzaB__AEA51386
MKAIIVLLMVVTSNADRICTGITSSNSPHVVKTATQGEVNVTGVIPLTTTPTKSYFANLKGTRTRGKLCPDCLNCTDLDVALGRPMCVGTTPSAKASILHEVRPVTSGCFPIMHDRTKIRQLPNLLRGYENIRLSTQNVIDAEKAPGGPYRLGTSGSCPNATSKSGFFATMAWAVPKDNYKNATNPLTVEVPYICTEGEGQITVWGFHSDNKPQMKNLYGDSNPQKFTSSASGVTTHYVSQIGDFPDQTEDGGLPQSGRIVVDYMMQKPGKTGTIVYQRGVLLPQKVWCASGRSKVIKGSLPLIGEADCLHEKYGGLNKSKPYYTGEHAKAIGNCPIWVITPQKLANGTTFSPPAKLLKERGFFGAIAGFLEGGWEGMIAGWHGYTSHGAHGVAVAADLKSTQEAINKITKNLNSLSELEVKNLQRLSGAMDELHNEILELDEKVDDLRADTISSQIELAVLLSNEGIINSEDEHLLALERKLKKMLGPSAVDIGNGCFETKHKCNQTCLDRIAAGTFNAGEFSLPTFDSLNITAASLNDDGLDNHTILLYYSTAASSLAVTLMLAIFIVYMVSRDNVSCSICL

SEQ ID NO: 26584 - protein, 584 aa, Artificial Sequence
  derived and/or modified protein sequence (wt) from hemagglutinin__InfluenzaB__AEA51387
MKAIIVLLMVVTSNADRICTEITSSNSPLVVKTATQGEVNVTGVIPLTTTPTKSYFANLKGTRTRGKLCPDCLNCTDLDVALGRPMCVGTTPSAKASILHEVRPVTSGCFPIMHDRTKIRQLPNLLRGYENIRLSTQNVIDAEKAPGGPYRLGTSGSCPNATSKIGFFATMAWAVPKDNYKNATNPLTVEVPYICTEGEDQITVWGFHSDNKTQMKNLYGDSNPQKFTSSANGVTTHYVSQIGDFPDQTEDGGLPQSGRIVVDYMMQKPGKTGPIVYQRGVLLPQKVWCASGRSKVIKGSLPLIGEADCLHEKYGGLNKSKYSHTGDHAKTLGNCPIWVKTPLKLANGTKYRPPAKLLKERGFFGAIAGFLEGGWEGMIAGWHGYTSHGAHGVAVAADLKSTQEAINKITKNLNSLSELEVKNLQRLSGAMDELHNEILELDEKVDDLRADTISSQIELAVLLSNEGIINSEDEHLLALERKLKKMLGPSAVDIGNGCFETKHKCNQTCLDRIAAGTFNAGEFSLPTFDSLNITAASLNDDGLDNHTILLYYSTAASSLAVTLMLAIFIVYMVSRDNVSCSICL

SEQ ID NO: 26585 - protein, 584 aa, Artificial Sequence
  derived and/or modified protein sequence (wt) from hemagglutinin__InfluenzaB__AEA51388
MKAIIVLLMVVTSNADRICTGITSSNSPHVVKTATQGEVNVTGVIPLTTTPTKSYFANLKGTRTRGKLCPDCLNCTDLDVALGRPMCVGTTPSAKASILHEVRPVTSGCFPIMHDRTKIRQLPNLLRGYENIRLSTQNVIDAEKAPGGPYRLGTSGSCPNATSKIGFFATMAWAVPKDNYKNATNPLTVEVPYICTEGEDQITVWGFHSDNKTQMKNLYGDSNPQKFTSSANGVTTHYVSQIGDFPDQTEDGGLPQSGRIVVDYMMQKPGKTGTIVYQRGVLLPQKVWCASGRSKVIKGSLPLIGEADCLHEKYGGLNKSKPSYTGEHAKAKGNCPIWVNTPLKLANGTKYRPPAKLFKERGFFGAIAGFLEGGWEGMIAGWHGYTSHGAHGVAVAADLKSTQEAINKITKNLNSLSELEVKNLQRLSGAMDELHNEILELDEKVDDLRADTISSQIELAVLLSNEGIINSEDEHLLALERKLKKMLGPSAVDKGNGCFETKHKCNQTCLDRIAAGTFNAGEFSLPTFDSLNITAASLNDDGLDNHTILLYYSTAASSLAVTLMLAIFIVYMVSRDNVSCSICL

SEQ ID NO: 26586 - protein, 584 aa, Artificial Sequence
  derived and/or modified protein sequence (wt) from hemagglutinin__InfluenzaB__AEA51389
MKAIIVLLMVVTSNADRICTGITSSISPLVDKTATQGEVNVTGVIPLTTTPTKSYFANVKGTRTRGKLCPDCLNCTDLDVALGRPMCVGTTPSAKASILHEVRPVTSGCFPIMHDRTKIRQLPNLLRGYENIRLSTQNVIDAQKAPGGPYRLGTSGSCPNATSKIGFFATMACAVPKDNYKNATNPLTVEVPYIRTEGEDQITVWGFHSDNKTQMKNLYGDSNPPKFTSSANGVTTHYVSQTGDFPDQTEDGGLPPSGRIVVDYMMQKPGKTGTIAYQRGVLLPQKVWCASGRSKVIKGSLPLIGEADCLHEKYGGLNKSKPPHTGEHTKAIGNCPIWVKTPLKLANGTKYRPSAKLLKERGFFGAIAGFLEGGWEGMIAGWHGYTSHGAHGVAVAADLKSTQEAINKITKNLNSLSELEVKNLQRLSGAMDELHNEILELDEKVDDLRADTISSQIELAVLLSNEGIINSEDEHLLALERKLKKMLGPSAVDIGNGCFETKHKCNQTCLDRIAAGTFNAGEFFLPTFDSLNITAASLNDDGLDNHTILLYYSTAASSLAVTLMLAIFIVYMVSRDNVSCSICL

SEQ ID NO: 26587 - protein, 584 aa, Artificial Sequence
  derived and/or modified protein sequence (wt) from hemagglutinin__InfluenzaB__AEA51390
MKAIIVLLMVVTSNADRICTGITSSNSPHVVKTATQGEVNVTGVIPLTTTPTKSYFANLKGTRTRGKLCPDCLNCTDLDVALGRPMCVGTTPSAKASILHEVRPVTSGCFPIMHDRTKIRQLPNLLRGYENIRLSTQNVIDAEKAPGGPYRLGTSGSCPNATSKIGFFATMAWAVPKDNYKNATNPLTVEVPYICTEGEDQITVWGFHSDNKTQMKNLYGDSNPQKFTSSANGVTTHYVSQIGDFPDQTEDGGLPPSGRIVVDYMMQKPGKTGTIVYQRGGLLPQKVWCASGRSKVIKGSLPLIGEADCLHEKYGGLNKSKPYYTGEHAKAIGNCPIWVKPPLKLANGTKYRPPAKLFKERGFFGALAGFLEGGWEGMIAGWHGYTSHGAHGVAVAADLKSTQEAINKITKNLNSLSELEVKNLQRLSGAMDELHNEILELDEKVDDLRADTISSQIELAVLLSNEGIINSEDEHLLALERKLKKMLGPSAVDIGNGCFETKHKCNQTCLDRIAAGTFNAGEFSLPTFDSLNITAASLNDDGLDNHTILLYYSTAASSLAVTLMLAIFIVYMVSRDNVSCSICL

SEQ ID NO: 26588 - protein, 585 aa, Artificial Sequence
  derived and/or modified protein sequence (wt) from hemagglutinin__InfluenzaB__AEA51391
MKAIIVLLMVVTSNADRICTGITSSNSPHVVKTATQGEVNVTGVIPLTTTPTKSHFANLKGTETRGKLCPKCLNCTDLDVALGRPKCTGKIPSARVSILHEVRPVTSGCFPIMHDRTKIRQLPNLLRGYEHIRLSTHNVINAENAPGGPYKIGTSGSCPNITNGNGFFATMAWAVPKNDKNKTATNPLTIEVPYICTEGEDQITVWGFHSVNETQMAKLYGDSKPQKFTSSANGVTTHYISQIGGFPNQTEDGGLPQSGRIVVDYMVQKSGKTGTITYQRGILLPQKVWCASGRSKVIKGSLPLIGEADCLHEKYGGLNKSKPYYTGEHAKAIGNCPIWVKTPLKLANGTKYRPPAKLLKERGFFGAIAGFLEGGWEGMIAGWHGYTSHGAHGVPVAADLKSTQEAINKITKNLNSLSELEVKNLQRLSGAMDELHNEILELDEKVDDLRADTISSQIELAVLLSNEGIINSEDEHLLALERKLKKMLGPSAVEIGNGCFETKHKCNQTCLDRIAAGTFDAGEFSLPTFDSLNITAASLNDDGLDNHTILLYYSTAASSLAVTLMIAIFVVYMVSRDNVSCSICL

SEQ ID NO: 26589 - protein, 585 aa, Artificial Sequence
  derived and/or modified protein sequence (wt) from hemagglutinin__InfluenzaB__AEA51392
MKAIIVLLMVVTSNADRICTGITSSNSPHVVKTATQGEVNVTGVIPLTTTPTKSHFANLKGTETRGKLCPKCPNCTDLDVALGRPKCTGKIPSARVSILHEVRPVTSGCFPIMHDRTKIRQLPNLLRGYEHIRLSTHNVINAENAPGGPYKIGTSGSCPNVTNGNGFFATMAWAVPKNDKNKTATNPLTIEVPYICTEGEDQITVWGFHSDNETQMAKLYGDSKPQKFTSSANGGTTHYVSQIGGFPNQTEDGGLPQSGRIVVDYMVQKSGKTGTITYQRGILLPQKVWCASGRSKVIKGSLPLIGEADCLHEKYGGLNKSKPYYTGEHAKAIGNCPIWVKTPLKLANGTKNIAPAKLLKERGFFGAIAGFLEGGWEGMIAGWHGYTSHGAHGVAVAADLKSTQEAINKITKNLNSLSELEVKNLQRLSGAMDELHNEILELDEKVDDLRADTISSQIELAVLLSNEGIINSEDEHLLALERKLKKMLGPSAVEIGNGCFETKHKCNQTCLDRIAAGTFDAGEFSLPTFDSLNITAASLNDDGLDNHTILLYYSTAASSLAVTLMIAIFVVYMVSRDNVSCSICL

SEQ ID NO: 26590 - protein, 584 aa, Artificial Sequence
  derived and/or modified protein sequence (wt) from hemagglutinin__InfluenzaB__AEA51395
MKAIIVLLMVVTSNADRICTGITSSNSPHVVKTATLGEVNVTGVIPLTTTPTKSYFANLKGTRTRGKLCPDCLNCTDLDVALGRPMCVGTTPSAKASILHEVRPVTSGCFPIMHDRTKIRQLPNLLRGYENIRLSTQNVIDAEKAPGGPYRLGTSGSCPNATSKIGFFATMAWAVPKDNYKNATNPLTVEVPYICTEGEDQFTVWGFHSDNITQLKNLFGDSNPQRFTSSANGVTTHYVSQIGDFPDQTEDGGLPQSGRIVVDYVMQKPGKTGTIVYQRGVLLPPKVWFARGRSKVIKGSLPLIGEADCIHEKYGGLNKSKPYYTGEHAKAIGNCPIWVKTPLKLANGTKYRPPAKLLKERGFFGAIAGFLEGGWEGMIAGWHGYTSHGAHGVAVAADLKSTQEAINKITKNLNSLSELEVKNLQRLSGAMDELHNEILELDEKVDDLRADTISSQIELAVLLSNEGIINSEDEHLLALERKLKKMLGPSAVDIGNGCFETKHKCNQTCLDRIAAGTFNAGEFSLPTFDSLNITAASLNDDGLDNHTILLYYSTAASSLAVTLMLAIFIVYMVSRDNVSCSICL

SEQ ID NO: 26591 - protein, 585 aa, Artificial Sequence
  derived and/or modified protein sequence (wt) from hemagglutinin__InfluenzaB__AEA51398
MKAIIVLLMVVTSNADRICTGITSSNSPHVVKTATQGEVNVTGVIPLTTTPTKSHFANLKGTETRGKLCPKCPNCTDLDVALGRPKCTGKIPSARVSILHEVRPVTSGCFPIMHDRTKIRQLPNLLRGYEHIRLSTHNVINAENAPGGPYKIGTSGSCPNVTNGIGFFATMAWAVPKNDKNKTATNPLTIEVPYICTEGEDQITVWGFHSDNETQMAKLYGDSKPQKFTSSANGVTTHYVSQIGGFPNQTEDGGLPQSGRIVVDYMVQKSGKTGTITYQRGILLPQKVWCASGRSKVIKGSLPLIGEADCLHEKYGGLNKSKSYYTGEHAKAIGNCPIWVKTPLKLANGTKYRPPAHLSYFCGFFGAIAGFLEGGWEGMIAGWNGYTSHGAHGVAVVADLKSTQEAINKITKNLNSLSELEVKNLQRLSGAMDELHNEILELDEKVDDLRADTISSQIELAVLLSNEGIINSEDEHLLALERKLKKMLGPSAVEIGNGCFETKHKCNQTCLDRIAAGTFDAGEFSLPTFDSLNITAASLNDDGLDNHTILLYYSTAASSLAVTLMIAIFVVYMVSRDNVSCSICL

SEQ ID NO: 26592 - protein, 585 aa, Artificial Sequence
  derived and/or modified protein sequence (wt) from hemagglutinin__InfluenzaB__AEA51399
MKAIIVLLMVVTSNADRICTGITASQSPNIDKSSTQGEVNVTGVIPLTTTPTKSHFANLKGTETRGKLCPKCPNCTDLDVALGRPKCTGKIPSARVSILHEVRPVTSGCFPIMHDRTKIRQLPNLLRGYEHIRLSTHNVINAENAPGGPYKIGTSGSCPNVTNGIGFFATMAWAVPKNDKNKTATNPLTIEVPYICTEGEDQITVWGFHSDNETQMAKLYGDSKPQKFTSSANGVTTHYVSQIGGFPNQTEDGGLPQSGRIVVDYMVQKSGKTGTITYQRGILLPQKVWCASGRSKVIKGSLPLIGEADCLHEKYGGLNKSKSYYTGEHAKAIGNCPIWVKTPLKLANGTKYRPPAHLSYFCGFFGAIAGFLEGGWEGMIAGWNGYTSHGAHGVAVVADLKSTQEAINKITKNLNSLSELEVKNLQRLSGAMDELHNEILELDEKVDDLRADTISSQIELAVLLSNEGIINSEDEHLLALERKLKKMLGPSAVEIGNGCFETKHKCNQTCLDRIAAGTFDAGEFSLPTFDSLNITAASLNDDGLDNHTILLYYSTAASSLAVTLMIAIFVVYMVSRDNVSCSICL

SEQ ID NO: 26593 - protein, 585 aa, Artificial Sequence
  derived and/or modified protein sequence (wt) from hemagglutinin__InfluenzaB__AEG21014
MKAIIVLLMVVTSNADRICTGITSSNSPHVVKTATQGEVNVTGVIPLTTTPTKSHFANLKGTETRGKLCPKCLHCTDLDVALGRPKCTGKIPSARVSILHEVRPVTSGCFPIMHDRTKIRQLPNLLRGYEHIRLSTHNVINAENAPGGPYKIGTSGSCPNVTNGNGFFATMAWAVPKNDNNKTATNSLTIEVPYICTEGEDQITVWGFHSDNETQMAKLYGDSKPQKFTSSANGVTTHYVSQMGGFPNQTEDGGLPQSGRIVVDYMVQKSGKTGTITYQRGILLPQKVWCASGRSKVIKGSLPLIGEADCLHEKYGGLNKSKPYYTGEHAKAIGNCPIWVKTPLKLANGTKYRPPAKLLMERGFFGAIAGFLEGGWEGMIAGWHGYTSHGAHGVAVAADLKSTQEAINKITKNLNSLSELEVKNLQRLSGAMDELHNEILELDEKVDDLRADTISSQIELAVLLSNEGIINSEDEHLLALERKLKKMLGPSAVEIGNGCFETKHKCNQTCLDRIAAGTFDAGEFSLPTFDSLNITAASLNDDGLDNHTILLYYSTAASSLAVTLMIAIFVVYMVSRDNVSCSICL

SEQ ID NO: 26594 - protein, 584 aa, Artificial Sequence
  derived and/or modified protein sequence (wt) from hemagglutinin__InfluenzaB__AEG21015
MKAIIVLLMVVTSNADRICTGITSSNSPHVVKTATQGEVNVTGVIPLTTTPTKSYFANLKGTRTRGKLCPDCLNCTDLDVALGRPMCVGTTPSAKASILHEVRPVTSGCFPIMHDRTKIRQLPNLLRGYENIRLSTQNVIDAEKAPGGPYRLGTSGSCPNATSKNGFFATMAWAVPKDNYKGATNPKTVEVPYICTEGEGQITVWGFHSDNKPQMKNLYGDSNPQKFTSSASGVTTHYVSQIGDFPDQTEDGGLPQSGRIVVDYMMQKPGKTGTIVYQRGVLLPQKVWCASGRSKVIKGSLPLIGEADCLHEKYGGLNKSKPYYTGEHAKAIGNCPIWVITPQKLANGTTFSPPAKLLKERGFFGAIAGFLEGGWEGMIAGWHGYTSHGAHGVAVAADLKSTQEAINKITKNLNSLSELEVKNLQRLSGAMDELHNEILELDEKVDDLRADTISSQIELAVLLSNEGIINSEDEHLLALERKLKKMLGPSAVDIGNGCFETKHKCNQTCLDRIAAGTFNAGEFSLPTFDSLNITAASLNDDGLDNHTILLYYSTAASSLAVTLMLAIFIVYMVSRDNVSCSICL

SEQ ID NO: 26595 - protein, 584 aa, Artificial Sequence
  derived and/or modified protein sequence (wt) from hemagglutinin__InfluenzaB__AEG21016
MKAIIVLLMVVTSNADRICTGITSSNSPHVVKTATQGEVNVTGVIPLTTTPTKSYFANLKGTRTRGKLCPDCLNCTDLDVALGRPMCVGTTPSAKASILHEVRPVTSGCFPIMHDRTKIRQLPNLLRGYENIRLSTQNVIDAEKAPGGPYRLGTSGSCPNATSKIGFFATMAWAVPKDNYKRATNPKTVEVPYICTEGEDQITVWGFHSDNKPQMKNPYGDSNPQKFTSSASGVTTHYVSQIGDFPDQTEDGGLPQSGRIVVDYMMQKPGKTGTIVYQRGVLLPQKVWCASGRSKVIKGSLPLIGEADCLHEKYGGLNKSKPYYTGEHAKAIGNCPIWVKTPLKLANGTKYRPPAKLLKERGFFGAIAGFLEGGWEGMIAGWHGYTSHGAHGVAVAADLKSTQEAINKITKNLNSLSELEVKNLQRLSGAMDELHNEILELDEKVDDLRADTISSQIELAVLLSNEGIINSEDEHLLALERKLKKMLGPSAVDIGNGCFETKHKCNQTCLDRIAAGTFNAGEFSLPTFDSLNITAASLNDDGLDNHTILLYYSTAASSLAVTLMLAIFIVYMVSRDNVSCSICL

SEQ ID NO: 26596 - protein, 584 aa, Artificial Sequence
  derived and/or modified protein sequence (wt) from hemagglutinin__InfluenzaB__AEG21017
MKAIIVLLMVVTSNADRICTGITSSNSPHVVKTATQGEVNVTGVIPLTTTPTKSYFANLKGTRTRGKLCPDCLNCTDLDVALGRPMCVGTTPSAKASILHEVRPVTSGCFPIMHDRTKIRQLPNLLRGYENIRLSTQNVIDAEKAPGGPYRLGTSGSCPNATSKIGFFATMAWAVPKDNYKNATNPLTVEVPYICTEGEDQITVWGFHSDNKTQMKNLYGDSNPQKFTSSANGVTTHYVSQIGDFPDQTEDGGLPQSGRIVVDYMMQKPGKTGTIVYQRGVLLPQKVWCASGRSKVIKGSLPLIGEADCLHEKYGGLNKSKPSYTGEHAKAIGNCPIWVKTPLKLANGTKYRPPAKLLKERGFFGAIAGFLEGGWEGMIAGWHGYTSHGAHGVAVAADLKSTQEAINKITKNLNSLSELEVKNLQRLSGAMDELHNEILELDEKVDDLRADTISSQIELAVLLSNEGIINSEDEHLLALERKLKKMLGPSAVDIGNGCFETKHKCNQTCLDRIAAGTFNAGEFSLPTFDSLNITAASLNDDGLDNHTILLYYSTAASSLAVTLMLAIFIVYMVSRDNVSCSICL

SEQ ID NO: 26597 - protein, 584 aa, Artificial Sequence
  derived and/or modified protein sequence (wt) from hemagglutinin__InfluenzaB__AEG21018
MKAIIVLLMVVTSNADRICTGITSSISPLVDKTATQGEVNVTGVIPLTTTPTKSYFANVKGTRTRGKLCPDCLNCTDLDVALGRPMCVGTTPSAKASILHEVRPVTSGCFPIMHDRTKIRQLPNLLRGYENIRLSTQNVIDAQKAPGGPYRLGTSGSCPNATSKIGFFATMACAVPKDNYKNATNPLTVEVPYIRTEGEDQITVWGFHSDNKTQMKNLYGDSNPPKFTSSANGVTTHYVSQTGDFPDQTEDGGLPPSGRIVVDYMMQKPGKTGPIAYQRGVLLPQKVWCASGRSKVIKGSLPLIGEADCLHEKYGGLNKSKYSHTGDHAKTLGNCPIWVKTPLKLANGTKYRPSAKLLKERGFFGAIAGFLEGGWEGMIAGWHGYTSHGAHGVAVAADLKSTQEAINKITKNLNSLSELEVKNLQRLSGAMDELHNEILELDEKVDDLRADTISSQIELAVLLSNEGIINSEDEHLLALERKLKKMLGPSAVDIGNGCFETKHKCNQTCLDRIAAGTFNAGEFSLPTFDSLNITAASLNDDGLDNHTILLYYSTAASSLAVTLMLAIFIVYMVSRDNVSCSICL

SEQ ID NO: 26598 - protein, 584 aa, Artificial Sequence
  derived and/or modified protein sequence (wt) from hemagglutinin__InfluenzaB__AEG21019
MKAIIVLLMVVTSNADRICTGITSSNSPHVVKTATQGEVNVTGVIPLTTTPTKSYFANLKGTRTRGKLCPDCLNCTDLDVALGRPMCVGTTPSAKASILHEVRPVTSGCFPIMHDRTKIRQLPNLLRGYENIRLSTQNVIDAEKAPGGPYRLGTSGSCPNATSKIGFFATMAWAVPKDNYKNATNPLTVEVPYICTEGEDQITVWGFHSDNKTQMKNLYGDSNPQKFTSSANGVTTHYVSQTGDFPDQTEDGGLPPSGRIVVDYMMQKPGKTGTIVYQRGVLLPQKVWCASGRSKVIKGSLPLIGEADCLHEKYGGLNKSKPSYTGEHAKAIGNCPIWVKTPLKLANGTKYRPSAKLLKERGFFGAIAGFLEGGWEGMIAGWHGYTSHGAHGVAVAADLKSTQEAINKITKNLNSLSELEVKNLQRLSGAMDELHNEILELDEKVDDLRADTISSQIELAVLLSNEGIINSEDEHLLALERKLKKMLGPSAVDIGNGCFETKHKCNQTCLDRIAAGTFNAGEFSLPTFDSLNITAASLNDDGLDNHTILLYYSTAASSLAVTLMLAIFIVYMVSRDNVSCSICL

SEQ ID NO: 26599 - protein, 585 aa, Artificial Sequence
  derived and/or modified protein sequence (wt) from hemagglutinin__InfluenzaB__AEG21021
MKAIIVLLMVVTSNADRICTGITSSNSPHVVKTATQGEVNVTGVIPLTTTPTKSHFANLKGTETRGKLCPKCLNCTDLDVALGRPKCTGKIPSARVSILHEVRPVTSGCFPILHDRTKIRQLPNLLRGYEHIRLSTHNVINAENAPGGPYKIGTSGSCPNITNGNGFFATMAWAVPKNDKNKTATNPLSIEVPYICTEGEDQITVWGFHSDNETQMAKLYGDSKPQKFTSSANGVATHYVSQIGGFPNQTEDGGLPQSGRIVVDYMVQKSGKTGTITYQRGILLPQKVWCASGRSKVIKGSLPLFGEADCLHEKYGGFNKSKPYYTGEHAKAIGNCPIWVKTPLKLANGTKYRPPAKLFKERGFFGAIAGFLEGGWEGMIAGWHGYTSHGAHGVAVAADLKSTQEAINKITKNLNSLSELEVKNLQRLSGAMDELHNEILELDEKVDDLRADTISSQIELAVLLSNEGIINSEDEHLLALERKLKKMLGPSAVEIGNGCFETKHKCNQTCLDRIAAGTFDAGEFSLPTFDSLNITAASLNDDGLDNHTILLYYSTAASSLAVTLMIAIFVVYMVSRDNVSCSICL

SEQ ID NO: 26600 - protein, 585 aa, Artificial Sequence
  derived and/or modified protein sequence (wt) from hemagglutinin__InfluenzaB__AEG21022
MKAIIVLLMVVTSNADRICTGITSSNSPHVVKTATQGEVNVTGVIPLTTTPTKSHFANLKGTETRGKLCPKCLNCTDLDVALGRPKCTGTTPSARASILHEVRPVTSGCFPILHDRTKIRQLPNLLRGYEHIRLSTHNVINAENAPGGPYKIGTSGSCPNITNGNGFFATMAWAVPKNDKNKTATNPLSVEVPYICTEGEDQITVWGFHSDNETQMAKLYGDSKPQKFTSSANGVATHYVSQIGGFPNQTEDGGLPQSGRIVVDYMVQKSGKTGTITYQRGILLPQRGWCASGRSKVIKGSLPLFGEADCLHEKYGGLNKSKPYYTGEHAKAIGNCPIWVKTPLKLANGTKYRPPAKLFKERGFFGAIAGFLEGGWEGMIAGWHGYTSHGAHGVPVAADLKSTQEAINKITKNLNSLSELEVKNLQRLSGAMDELHNEILELDEKVDDLRADTISSQIELAVLLSNEGIINSEDEHLLALERKLKKMLGPSAVEIGNGCFETKHKCNQTCLDRIAAGTFDAGEFSLPTFDSLNITAASLNDDGLDNHTILLYYSTAASSLAVTLMIAIFVVYMVSRDNVSCSICL

SEQ ID NO: 26601 - protein, 584 aa, Artificial Sequence
  derived and/or modified protein sequence (wt) from hemagglutinin__InfluenzaB__AEG21023
MKAIIVLLMVVTSNADRICTGITSSNSPHVVKTATLGEVNETGVIPLTTTPTKSYFANLKGTRTRGKLCPDCLNCTDLDVALGRPMCVGTTPSAKASILHEVRPVTSGCFPIMHDRTKIRQLPNLLRGYENIRLSTQNVIDAEKAPGGPYRLGTSGSCPNATSKIGFFATMAWAVPKDNYKNATNPLTVEVPYICTEGEDQITVWGFHSDNKTQMKNLYGDSNPQKFTSSANGVPTHYVSQIGDFPDPTEDGGLPQSGRIGVDYMMQKPGKTGTIVYQRGVLLPQKVWCASGRSKVIKGSLPLIGEADCLHEKYGGLNKSKPYYTGEHAKAIGNCPIWVKTPLKLANGTKYRPPAKLLKERGFFGAISGFLEGGWEGMIAGWHGYTSHGAHGVAVAADLKSTQEAINKITKNLNSLSELEVKNLQRLSGAMDELHNEILELDEKVDDLRADTISSQIELAVLLSNEGIINSEDEHLLALERKLKKMLGPSAVEIGNGCFETKHKCNQTCSDRIAAGTFDAGEFSLPTFDSLNITAASLNDDGLDNHTILLYYSTAASSLAVTLMIAIFVVYMVSRDNVSCSICL

SEQ ID NO: 26602 - protein, 585 aa, Artificial Sequence
  derived and/or modified protein sequence (wt) from hemagglutinin__InfluenzaB__AEG21024
MKAIIVLLMVVTSNADRICTGITSSSSPHVVKTATQGEVNVTGVIPLTTTPTKSYFANLKGTETRGKLCPDCPNCTDLDVALGRPNCWGNIPSARVSILHEVRPVTSGCFPIMHDRTKIRQLPNLLRGYEHIRLSTHNVINAENAPGGPYKIGTSGSCPNVTNGNGFFATMAWAVPKDDKNNAATHLLTIEVPFFCTGGEHHIAVWGFPSDNDTLMAKLFGDSNPQMFSSSANGTTTHYVSQIGGFPNQTEDGGLPQSGRIVVDYMVQKSGKTGTIAYQRGVLLPQKVWCASGRSKVIKGSLPLIGEADCLHEKYGGLNKSKPYYTGEHAKAIGNCPIWVKTPLKLANGTKYRPPAKLLKERGFFGAIAGFLEGGWEGMIAGWHGYTSHGAHGVAVAADLKSTQEAINKITKNLNSLSELEVKNLQRLSGAMDELHNEILELDEKVDDLRADTISSQIELAVLLSNEGIINSEDEHLLALERKLKKMLGPSAVEIGNGCFETKHKCNQTCLDRIAAGTFDAGEFSLPTFDSLNITAASLNDDGLDNHTILLYYSTAASSLAVTLMIAIFVVYMVSRDNVSCSICL

SEQ ID NO: 26603 - protein, 584 aa, Artificial Sequence
  derived and/or modified protein sequence (wt) from hemagglutinin__InfluenzaB__AEG21025
MKAIIVLLMVVTSNADRICTGITSSNSPHVVKTATLGEVNETGVIPLTTTPTKSYFANLKGTRTRGKLCPDCLNCTDLDVALGRPMCVGTTPSAKASILHEVRPVTSGCFPIMHDRTKIRQLPNLLRGYENIRLSTQNVIDAEKAPGGPYRLGTSGSCPNATSKIGFFATMAWAVPKDNYKNATNPLTVEVPYICTEGEDQITVWGFHSDIKTQMKNLYGDSNPQKFTSSANGVPTHYVSQIGDFPDPTEDGGLPQSGRIGVDYMMQKPGKTGTIVYQRGVLLPQKVWCASGRSKVIKGSLPLIGEADCLHEKYGGLNKSKPYYTGEHAKAIGNCPIWVKTPLKLANGTKYRPPAKLLKERGFFGAISGFLEGGWEGMIAGWHGYTSHGAHGVAVAADLKSTQEAINKITKNLNSLSELEVKNLQRLSGAMDELHNEILELDEKVDDLRADTISSQIELAVLLSNEGIINSEDEHLLALERKLKKMLGPSAVEIGNGCFETKHKCNQTCSDRIAAGTFDAGEFSLPTFDSLNITAASLNDDGLDNHTILLYYSTAASSLAVTLMIAIFVVYMVSRDNVSCSICL

SEQ ID NO: 26604 - protein, 585 aa, Artificial Sequence
  derived and/or modified protein sequence (wt) from hemagglutinin__InfluenzaB__AEG21026
MKAMMVLLMVVTSNADRICTGITSSNSPHVVKTATQGEVNVTGVIPLTITPTKSHFANLKVKETRGKLCPKCPNCTDLDVALGRPKCTGKIPSARVSILHEDTPVTSGCIPIMHDRTKIRQLPNLLRGYEHIRLSTHNVINAESAPGGPYKIGTSGSCPNVTNGIGFFATMAWAVPKNDKNKTATNPLTIEVPYICTEGEDQITVWGFHFDNETQMAKLYGDSKPQVFTSSANGVNADFVSQIRGFPNQTEDGGLPQSGRIVVDYMVQKSGKTGTITYQRGILLPQKVWCASGRSKVIKESLPLIGEAYFQQEEYGGLNKSKSYYTEEHAKAIGICPIWVKTPLKLANKTKYRPPAHLSYFCGFFGAIAGFLEGGWEGMIAGWNGYTSHGAHGVAVVADLKSTQEAINKITKNLNSLSELEVETLQRLSGAMDELHNEILELDEKVDDHRADTISSQIELPDQLSNDGSINSEDEHLLALERKLKKMLGPSNGDKGSGGIETKHKCNQTCLDRIAAGTFDAGGFSHPTFDSKNVTAASLNDDGLDSGTILLYYSTDVSNLAVTVMMGIFVKYMVSRDNVSCSICL

SEQ ID NO: 26605 - protein, 585 aa, Artificial Sequence
  derived and/or modified protein sequence (wt) from hemagglutinin__InfluenzaB__AEG21027
MKAIIVLLMVVTSNADRICTGITSSNSPHVVKTATQGEVNVTGVIPLTITPTKSHFANLKGTETRGKLCPKCPNCTDLDVALGRPKCTGKIPSARVSILHEVRPVTSGCFPIMHDRTKIRQLPNLLRGYEHIRLSTHNVINAENAPGGPYKIGTSGSCPNVTNGIGFFATMAWAVPKNDKNKTATNPLTIEVPYICTEGEDQITVWGFHFDNETQMAKLYGDSKPQKFTSSANGVNADFVSQIGGFPNQTEDGGLPQSGRIVVDYMVQKSGKTGTITYQRGILLPQKVWCASGRSKVIKESLPLIGEAYFQQEEYGGLNKSKSYYTGEHAKAIGNCPIWVKTPLKLANGTKYRPPAHLSYFCGFFGAIAGFLEGGWEGMIAGWNGYTSHGAHGVAVVADLKSTQEAINKITKNLNSLSELEVETLQRLSGAMDELHNEILEIDEKVDDHRADTISSQIELAVLLSNEGIINSEDEHLLALERKLKKMLGPSNGDKGSGGIETKHKCNQTCLDRIAAGTFDAGEFSLPTFDSLNITAASLNDDGLDSGTILLYYSTDVSNLAVTVMMGIFVKYMVSRDNVSCSICL

SEQ ID NO: 26606 - protein, 585 aa, Artificial Sequence
  derived and/or modified protein sequence (wt) from hemagglutinin__InfluenzaB__AEG21028
MKAIIVLLMVVTSNADRICTGITASQSPNIDKSSTQGEVNVSCVIPLTTTPTKSHFANLKVKETRGKLCPKCPNCTDLDVSLGRPKCTGKIPSARVSILHEVRPVASGGFPIMHDRTKIRQLPNLLRGYEHIRLSTHNVINAENAPGGPYKIGTSGSCPNVTNGIGFFATMAWAVPKNDKNKTATNPLTIEVPYICTEGEDQITVWGFHSDNETQMAKLYGDSKPQKFTSSANGVTTHYAAKRPCFPNQTEDGGLPQSGRIVVDYMVQKSGKTGTITYQRGILLPQKVWCASGRSKVIKGSLPLIGEADCLHEKYGGLNKSKSYYTGEHAKAIGNCPIWVKTPLKLASRTMSKTPAHLSYFCGFFGAIAGFLEGGWEGMIAGWNGYTSHGAHGVAVVADLKSTQEAINKITKNLNSLSELEVKNLQRLSGAMDELHNEILELDEKVDDLRADTISSQIELAVLLSNEGIINSEDEHLLALERKLKKMLGPSAVEIGNGCFETKHKCNQTCLDRIAAGTFDAGEFSLPTFDSLNITAASLNDDGLDNHTILLYYSTAASSLAVTLMIAIFVVYMVSRDNVSCSICL

SEQ ID NO: 26607 - protein, 585 aa, Artificial Sequence
  derived and/or modified protein sequence (wt) from hemagglutinin__InfluenzaB__AEG21029
MKAIIVLLMVVTSNADRICTGITSSNSPHVVKTATQGEVNVTGVIPLTTTPTKSHFANLKGTETRGKLCPKCPNCTDLDVALGRPKCTGKIPSARVSILHEVRPVTSGCFPIMHDRTKIRQLPNLLRGYEHIRLSTHNVINAENAPGGPYKIGTSGSCPNVTNGIGFFATMAWAVPKNDKNKTATNPLTIEVPYICTEGEDQITVWGFHSDSETQMAKLYGDSKPQKFTSSANGVTTHYVSQIGGFPNQTEDGGLPQSGRIVVDYMVQKSGKTGTITYQRGILLPQKVWCASGRSKVIKGSLPLIGEADCLHEKYGGLNKSKPYYTGEHAKAIGNCPIWVKTPLKLANGTKYRPPAKLLKERGFFGAIAGFLEGGWEGMIAGWHGYTSHGAHGVAVAADLKSTQEAINKITKNLNSLSELEVKNLQRLSGAMDELHNEILELDEKVDDLRADTISSQIELAVLLSNEGIINSEDEHLLALERKLKKMLGPSAVEIGNGCFETKHKCNQTCLDRIAAGTFDAGEFSLPTFDSLNITAASLNDDGLDNHTILLYYSTAASSLAVTLMIAIFVVYMVSRDNVSCSICL

SEQ ID NO: 26608 - protein, 585 aa, Artificial Sequence
  derived and/or modified protein sequence (wt) from hemagglutinin__InfluenzaB__AEO80052
MKAIIVLLMVVTSNADRICTGITSSNSPHVVKTATQGEVNVTGVIPLTTTPTKSHFANLKGTETRGKLCPKCPNCTDLDVALGRPKCTGKIPSARVSILHEVRPVTSGCFPIMHDRTKIRQLPNLLRGYEHIRLSTHNVINAENAPGGPYKIGTSGSCPNVTNGNGFFATMAWAVPKNDKNKTATNPLTIEVPYICTEGEDQITVWGFHSDNETQMAKLYGDSKPQKFTSSANGVTTHYVSQIGGFPNQTEDGGLPQSGRIVVDYMVQKSGKTGTITYQRGILLPQKVWCASGRSKVIKGSLPLIGEADCLHEKYGGLNKSKPYYTGEHAKAIGNCPIWVKTPLKLANGTKYRPPAKLLKERGFFGAIAGFLEGGWEGMIAGWHGYTSHGAHGVAVAADLKSTQEAINKITKNLNSLSELEVKNLQRLSGAMDELHNEILELDEKVDDLRADTISSQIELAVLLSNEGIINSEDEHLLALERKLKKMLGPSAVEIGNGCFETKHKCNQTCLDRIAAGTFDAGEFSLPTFDSLNITAASLNDDGLDNHTILLYYSTAASSLAVTLMIAIFVVYMVSRDNVSCSICL

SEQ ID NO: 26609 - protein, 585 aa, Artificial Sequence; identical to SEQ ID NO: 26514
  derived and/or modified protein sequence (wt) from hemagglutinin__InfluenzaB__AEO80067

SEQ ID NO: 26610 - protein, 584 aa, Artificial Sequence
  derived and/or modified protein sequence (wt) from hemagglutinin__InfluenzaB__AEO80078
MKEIIVLLMVVTSNADRICTGITSSNSPHVVKTATQGEVNVTGVIPLTTTPTKSYFANLKGTRTRGKLCPDCLNCTDLDVALGRPMCVGTTPSAKASILHEVRPVTSGCFPIMHDRTKIRQLANLLRGYENIRLSTQNVIDAEKAPGGPYRLGTSGSCPNATSKSGFFATMAWAVPKDNNKNATNPLTVEVPYICTEGEDQITVWGFHSDNKTQMKNLYGDSNPQKFTSSANGVTTHYVSQIGGFPDQTEDGGLPQSGRIVVDYMMQKPGKTGTIVYQRGVLLPQKVWCASGRSKVIKGSLPLIGEADCLHEKYGGLNKSKPYYTGEHAKAIGNCPIWVKTPLKLANGTKYRPPAKLLKERGFFGAIAGFLEGGWEGMIAGWHGYTSHGAHGVAVAADLKSTQEAINKITKNLNSLSELEVKNLQRLSGAMDELHNEILELDEKVDDLRADTISSQIELAVLLSNEGIINSEDEHLLALERKLKKMLGPSAVDIGNGCFETKHKCNQTCLDRIAAGTFNAGEFSLPTFDSLNITAASLNDDGLDNHTILLYYSTAASSLAVTLMLAIFIVYMVSRDNVSCSICL

SEQ ID NO: 26611 - protein, 585 aa, Artificial Sequence
  derived and/or modified protein sequence (wt) from hemagglutinin__InfluenzaB__AEO80086
MKAIIVLLMVVTSNADRICTGITSSNSPHVVKTATQGEVNVTGVIPLTTTPTKSHFANLKGTKTRGKLCPKCLNCTDLDVALGRPKCTGNIPSAKVSILHEVRPVTSGCFPIMHDRTKIRQLPNLLRGYEHIRLSTHNVINAEKAPGGPYKIGTSGSCPNVTNGNGFFATMAWAVPKNDNNKTATNSLTIEVPYICTEGEDQITIWGFHSDNETQMAKLYGDSKPQKFTSSANGVTTHYVSQIGGFPNQTEDGGLPQSGRIVVDYMVQKSGKTGTITYQRGILLPQKVWCASGRSKVIKGSLPLIGEADCLHEKYGGLNKSKPYYTGEHAKAIGNCPIWVKTPLKLANGTKYRPPAKLLKERGFFGAIAGFLEGGWEGMIAGWHGYTSHGAHGVAVAADLKSTQEAINKITKNLNSLSELEVKNLQRLSGAMDELHNEILELDEKVDDLRADTISSQIELAVLLSNEGIINSEDEHLLALERKLKKMLGPSAVEIGNGCFETKHKCNQTCLDRIAAGTFDAGEFSLPTFDSLNITAASLNDDGLDNHTILLYYSTAASSLAVTLMIAIFVVYMVSRDNVSCSICL

SEQ ID NO: 26612 - protein, 584 aa, Artificial Sequence
  derived and/or modified protein sequence (wt) from hemagglutinin__InfluenzaB__AEO80097
MKAIIVLLMVVTSNADRICTGITSSNSPHVVKTATQGEVNVTGVIPLTTTPTKSHFANLKGTRTRGKLCPDCLNCTDLDVALGRPMCVGTTPSAKASILHEVRPVTSGCFPIMHDRTKIRQLANLLRGYENIRLSTQNVIDAEKAPGGPYRLGTSGSCPNATSKSGFFATMAWAVPKDNNKNATNPLTVEVPYICTEGEDQITVWGFHSDNKTQMKNLYGDSNPQKFTSSANGVTTHYVSQIGGFPDQTEDGGLPQSGRIVVDYMMQKPGKTGTIVYQRGVLLPQKVWCASGRSKVIKGSLPLIGEADCLHEKYGGLNKSKPYYTGEHAKAIGNCPIWVKTPLKLANGTKYRPPAKLLKERGFFGAIAGFLEGGWEGMIAGWHGYTSHGAHGVAVAADLKSTQEAINKITKNLNSLSELEVKNLQRLSGAMDELHNEILELDEKVDDLRADTISSQIELAVLLSNEGIINSEDEHLLALERKLKKMLGPSAVDIGNGCFETKHKCNQTCLDRIAAGTFNAGEFSLPTFDSLNITAASLNDDGLDNHTILLYYSTAASSLAVTLMLAIFIVYMVSRDNVSCSICL

SEQ ID NO: 26613 - protein, 584 aa, Artificial Sequence; identical to SEQ ID NO: 26426
  derived and/or modified protein sequence (wt) from hemagglutinin__InfluenzaB__AEO80108

SEQ ID NO: 26614 - protein, 585 aa, Artificial Sequence; identical to SEQ ID NO: 26514
  derived and/or modified protein sequence (wt) from hemagglutinin__InfluenzaB__AEO80145

SEQ ID NO: 26615 - protein, 585 aa, Artificial Sequence; identical to SEQ ID NO: 26573
  derived and/or modified protein sequence (wt) from hemagglutinin__InfluenzaB__AEO80154

SEQ ID NO: 26616 - protein, 585 aa, Artificial Sequence
  derived and/or modified protein sequence (wt) from hemagglutinin__InfluenzaB__AEO80183
MKAIIVLLMVVTSNADRICTGITSSNSPHVVKTATQGEVNVTGVIPLTTTPTKSHFANLKGTETRGKLCPKCLNCTDLDVALGRPKCTGNIPSARVSILHEVRPVTSGCFPIMHDRTKIRQLPNLLRGYEHIRLSTHNVINAENAPGGPYKIGTSGSCPNVTNGNGFFATMAWAVPKNDNNKTATNSLTIEVPYICTEGEDQITVWGFHSDIETQMAKLYGDSKPQKFTSSANGVTTHYVSQIGGFPNQTEDGGLPQSGRIVVDYMVQKSGKTGTITYQRGILLPQKVWCASGRSKVIKGSLPLIGEADCLHEKYGGLNKSKPYYTGEHAKAIGNCPIWVKTPLKLANGTKYRPPAKLLKERGFFGAIAGFLEGGWEGMIAGWHGYTSHGAHGVAVAADLKSTQEAINKITKNLNSLSELEVKNLQRLSGAMDELHNEILELDEKVDDLRADTISSQIELAVLLSNEGIINSEDEHLLALERKLKKMLGPSAVEIGNGCFETKHKCNQTCLDRIAAGTFDAGEFSLPTFDSLNITAASLNDDGLDNHTILLYYSTAASSLAVTLMIAIFVVYMVSRDNVSCSICL

SEQ ID NO: 26617 - protein, 585 aa, Artificial Sequence
  derived and/or modified protein sequence (wt) from hemagglutinin__InfluenzaB__AEO80194
MKAIIVLLMVVTSNADRICTGITSSNSPHVVKTATQGEVNVTGVIPLTTTPTKSHFANLKGTETRGKLCPKCLNCTDLDVALGRPKCTGNIPSARVSILHEVRPVTSGCFPIMHDRTKIRQLPNLLRGYEHIRLSTHNVINAENAPGGPYKIGTSGSCPNVTNGNGFFATMAWAVPKNDNNKTATNSLTIEVPYICTEGEDQITVWGFHSDNEAQMAKLYGDSKPQKFTSSANGVTTHYVSQIGGFPNQTEDGGLPQSGRIVVDYMVQKSGKTGTITYQRGILLPQKVWCARGRSKVIKGSLPLIGEADCLHEKYGGLNKSKPYYTGEHAKAIGNCPIWVKTPLKLANGTKYRPPAKLLKERGFFGAIAGFLEGGWEGMIAGWHGYTSHGAHGVAVAADLKSTQEAINKITKNLNSLSELEVKNLQRLSGAMDELHNEILELDEKVDDLRADTISSQIELAVLLSNEGIINSEDEHLLALERKLKKMLGPSAVEIGNGCFETKHKCNQTCLDRIAAGTFDAGEFSLPTFDSLNITAASLNDDGLDNHTILLYYSTAASSLAVTLMIAIFVVYMISRDNVSCSICL

SEQ ID NO: 26618 - protein, 585 aa, Artificial Sequence; identical to SEQ ID NO: 26565
  derived and/or modified protein sequence (wt) from hemagglutinin__InfluenzaB__AEO80205

SEQ ID NO: 26619 - protein, 585 aa, Artificial Sequence; identical to SEQ ID NO: 26565
  derived and/or modified protein sequence (wt) from hemagglutinin__InfluenzaB__AEO80216

SEQ ID NO: 26620 - protein, 584 aa, Artificial Sequence
  derived and/or modified protein sequence (wt) from hemagglutinin__InfluenzaB__AEO80227
MKAIIVLLMVVTSNADRICTGITSSNSPHVVKTATQGEVNVTGVIPLTTTPTKSYFANLKGTRTRGKLCPDCLNCTDLDVALGRPMCVGTTPSAKASILHEVRPVTSGCFPIMHDRTKIRQLANLLRGYENIRLSTQNVIDAEKAPGGPYRLGTSGSCPNATSKSGFFATMAWAVPKDNNKNATNPLTVEVPYICTEGEDQITVWGFHSDNKIQMKNLYGDSNPQKFTSSANGVTTHYVSQIGGFPDQTEDGGLPQSGRIVVDYMMQKPGKTGTIVYQRGVLLPQKVWCASGRSKVIKGSLPLIGEADCLHEKYGGLNKSKPYYTGEHAKAIGNCPIWVKTPLKLANGTKYRPPAKLLKERGFFGAIAGFLEGGWEGMIAGWHGYTSHGAHGVAVAADLKSTQEAINKITKNLNSLSELEVKNLQRLSGAMDELHNEILELDEKVDDLRADTISSQIELAVLLSNEGIINSEDEHLLALERKLKKMLGPSAVDIGNGCFETKHKCNQTCLDRIAAGTFNAGEFSLPTFDSLNITAASLNDDGLDNHTILLYYSTAASSLAVTLMLAIFIVYMVSRDNVSCSICL

SEQ ID NO: 26621 - protein, 585 aa, Artificial Sequence; identical to SEQ ID NO: 26582
  derived and/or modified protein sequence (wt) from hemagglutinin__InfluenzaB__AEO80238

SEQ ID NO: 26622 - protein, 585 aa, Artificial Sequence
  derived and/or modified protein sequence (wt) from hemagglutinin__InfluenzaB__AEP20178
MKAIIVLLMVVTSNADRICTGITSSNSPHVVKTATQGEVNVTGVIPLTTTPTKSHFSNLKGTETRGKLCPKCLNCTDLDVALGRPKCTGNIPSARVSILHEVRPVTSGCFPIMHDRTKIRQLPNLLRGYEHIRLSTHNVINAENAPGGPYKIGTSGSCPNVTNGNGFFATMAWAVPKNDNNKTATNSLTIEVPYICTEGEDQITVWGFHSDNETQMAKLYGDSKPQKFTSSANGVTTHYVSQIGGFPNQTEDGGLPQSGRIVVDYMVQKSGKTGTITYQRGILLPQKVWCASGRSKVIKGSLPLIGEADCLHEKYGGLNKSKPYYTGEHAKAIGNCPIWVKTPLKLANGTKYRPPAKLLKERGFFGAIAGFLEGGWEGMIAGWHGYTSHGAHGVAVAADLKSTQEAINKITKNLNSLSELEVKNLQRLSGAMDELHNEILELDEKVDDLRADTISSQIELAVLLSNEGIINSEDEHLLALERKLKKMLGPSAVEIGNGCFETKHKCNQTCLDRIAAGTFDAGEFSLPTFDSLNITAASLNDDGLDNHTILLYYSTAASSLAVTLMIAIFVVYMVSRDNVSCSICL

SEQ ID NO: 26623 - protein, 585 aa, Artificial Sequence
  derived and/or modified protein sequence (wt) from hemagglutinin__InfluenzaB__AEP20189
MKAIIVLLMVVTSNADRICTGITSSNSPHVVKTATQGEVNVTGVIPLTTTPTKSHFANLKGTETRGKLCPKCLNCTDLDVALGRPKCTGNIPSARVSILHEVRPVTSGCFPIMHDRTKIRQLPNLLRGYEHIRLSTHNVINAENAPGGPYKIGTSGSCPNVTNGNGFFATMAWAVPKNDNNKTATNSLTIEVPYICTEGEDQITVWGFHSDNETQMAKLYGDSKPQKFTSSANGVTTHYVSQIGGFPNQTEDGGLPQSGRIVVDYMVQKSGKTGTITYQRGILLPQKVWCASGRSKVIKGSLPLIGEADCLHEKYGGLNKSKPYYTGEHAKAIGNCPIWVKTPLKLANGTKYRPPAKLLKERGFFGAIAGFLEGGWEGMIAGWHGYTSHGAHGVAVAADLKSTQEAINKITKNLNSLSELEVKNLQRLSGAMDELHNEILELDEKVDDLRADTISSQIELAVLLSNEGIINSEDEHLLALERKLKKMLGPSAVEIGNGCFETKHKCNQTCLDRIAAGTFDAGEFSLPTFDSLNITAASLNDDGLDNHTVLLYYSTAASSLAVTLMIAIFVVYMVSRDNVSCSICL

SEQ ID NO: 26624 - protein, 585 aa, Artificial Sequence; identical to SEQ ID NO: 26514
  derived and/or modified protein sequence (wt) from hemagglutinin__InfluenzaB__AEP20200

SEQ ID NO: 26625 - protein, 584 aa, Artificial Sequence; identical to SEQ ID NO: 26405
  derived and/or modified protein sequence (wt) from hemagglutinin__InfluenzaB__AEP20211

SEQ ID NO: 26626 - protein, 584 aa, Artificial Sequence
  derived and/or modified protein sequence (wt) from hemagglutinin__InfluenzaB__AEP20222
MKAIIVLLMVVTSNADRICTGITSSNSPHVVKTATQGEVNVTGAIPLTTTPTKSHFANLKGTKTRGKLCPTCFNCTDLDVALGRPMCVGITPSAKASILHEVRPVTSGCFPIMHDRTKIRQLPNLLRGYEKIRLSTQNVIDAEKAPGGPYRLGTSGSCPNATSKSGFFATMAWAVPRDNNKTATNPLTVEVPNICTKEEDQITVWGFHSDNKTQMKNLYGDPNPQKFTSSANGITTHYVSQIGGFPDQTEDGGLPQSGRIVVDYMVQKPGKTGTIVYQRGILLPQKVWCASGRSKVIKGSLPLIGEADCLHEKYGGLNKSKPYYTGEHAKAIGNCPIWVKTPLKLANGTKYRPPAKLLKERGFFGAIAGFLEGGWEGMIAGWHGYTSHGAHGVAVAADLKSTQEAINKITKNLNSLSELEVKNLQRLSGAMDELHNEILELDEKVDDLRADTISSQIELAVLLSNEGIINSEDEHLLALERKLKKMLGPSAVDIGNGCFETKHKCNQTCLDRIAAGTFNAGEFSLPTFDSLNITAASLNDDGLDNHTILLYYSTAASSLAVTLMIAIFIVYMISRDNVSCSICL

SEQ ID NO: 26627 - protein, 584 aa, Artificial Sequence; identical to SEQ ID NO: 26511
  derived and/or modified protein sequence (wt) from hemagglutinin__InfluenzaB__AEP20233

SEQ ID NO: 26628 - protein, 584 aa, Artificial Sequence
  derived and/or modified protein sequence (wt) from hemagglutinin__InfluenzaB__AEP20244
MKAIIVLLMVVTSNADRICTGITSSNSPHVVKTATQGEVNVTGAIPLTTTPTKSHFANLKGTKTRGKLCPTCFNCTDLDVALGRPMCMGITPSAKASILHEVRPVTSGCFPIMHDRTKIRQLPNLLRGYEKIRLSTQNVIDAEKAPGGPYRLGTSGSCPNATSKSGFFATMAWAVPRGNNKTATNPLTVEVPHICTKEEDQITVWGFHSDNKTQMKNLYGDSNPQKFTSSANGITTHYVSQIGGFPDQTEDGGLPQSGRIVVDYMVQKPGKTGTIVYQRGILLPQKVWCASGRSKVIKGSLPLIGEADCLHEKYGGLNKSKPYYTGEHAKAIGNCPIWVKTPLKLANGTKYRPPAKLLKERGFFGAIAGFLEGGWEGMIAGWHGYTSHGAHGVAVAADLKSTQEAINKITKNLNSLSELEVKNLQRLSGAMDELHNEILELDEKVDDLRADTISSQIELAVLLSNEGIINSEDEHLLALERKLKKMLGPSAVDIGNGCFETKHKCNQTCLDRIAAGTFNAGEFSLPTFDSLNITAASLNDDGLDNHTILLYYSTAASSLAVTLMIAIFIVYMISRDNVSCSICL

SEQ ID NO: 26629 - protein, 585 aa, Artificial Sequence; identical to SEQ ID NO: 26419
  derived and/or modified protein sequence (wt) from hemagglutinin__InfluenzaB__AEP20255

SEQ ID NO: 26630 - protein, 585 aa, Artificial Sequence
  derived and/or modified protein sequence (wt) from hemagglutinin__InfluenzaB__AEP20277
MKAIIVLLMVVTSNADRICTGITSSNSPHVVKTATQGEVNVTGVIPLTTTPTKSHFANLKGTKTRGKLCPKCLNCTDLDVALGRPKCTGNIPSAEVSILHEVRPVTSGCFPIMHDRTKIRQLPNLLRGYEHIRLSTHNVINAEKAPGGPYKIGTSGSCPNVTNGNGFFATMAWAVPKNDNNKTATNSLTIEVPYICTEGEDQITVWGFHSDNETQMAKLYGDSKPQKFTSSANGVTTHYVSQIGGFPNQTEDGGLPQSGRIVVDYMVQKSGKTGTITYQRGILLPQKVWCASGRSKVIKGSLPLIGEADCLHEKYGGLNKSKPYYTGEHAKAIGNCPIWVKTPLKLANGTKYRPPAKLLKERGFFGAIAGFLEGGWEGMIAGWHGYTSHGAHGVAVAADLKSTQEAINKITKNLNSLSELEVKNLQRLSGAMDELHNEILELDEKVDDLRADTISSQIELAVLLSNEGIINSEDEHLLALERKLKKMLGPSAVEIGNGCFETKHKCNQTCLDKIAAGTFDAGEFSLPTFDSLNITAASLNDDGLDNHTILLYYSTAASSLAVTLMIAIFVVYMVSRDNVSCSICL

SEQ ID NO: 26631 - protein, 584 aa, Artificial Sequence
  derived and/or modified protein sequence (wt) from hemagglutinin__InfluenzaB__AEP20299
MKAIIVLLMVVTSNADRICTGITSSNSPHVVKTATQGEVNVTGVIPLTTTPTKSYFANLKGTRTRGKLCPDCLNCTDLDVALGRPMCVGTTPSAKASILHEVRPVTSGCFPIMHDRTKIRQLANLLRGYENIRLSTQNVIDAEKAPGGPYRLGTSGSCPNATSKSGFFATMAWAVPKNNNKNATNPLTVEVPYICTEGEDQITVWGFHSDNKTQMKNLYGDSNPQKFTSSANGVTTHYVSQIGGFPDQTEDGGLPQSGRIVVDYMMQKPGKTGTIVYQRGVLLPQKVWCASGRSKVIKGSLPLIGEADCLHEKYGGLNKSKPYYTGEHAKAIGNCPIWVKTPLKLANGTKYRPPAKLLKERGFFGAIAGFLEGGWEGMIAGWHGYTSHGAHGVAVAADLKSTQEAINKITKNLNSLSELEVKNLQRLSGAMDELHNEILELDEKVDDLRADTISSQIELAVLLSNEGIINSEDEHLLALERKLKKMLGPSAVDIGNGCFETKHKCNQTCLDRIAAGTFNAGEFSLPTFDSLNITAASLNDDGLDNHTILLYYSTAASSLAVTLMLAIFIVYMVSRDNVSCSICL

SEQ ID NO: 26632 - protein, 584 aa, Artificial Sequence
  derived and/or modified protein sequence (wt) from hemagglutinin__InfluenzaB__AEP20310
MKAIIVLLMVVTSNADRICTGITSSNSPHVVKTATQGEVNVTGVIPLTTTPTKSYFANLKGTRTRGKLCPDCLNCTDLDVALGRPMCVGTTPSAKASILHEVRPVTSGCFPIMHDRTKIRQLPNLLRGYENIRLSTQNVIDAEKAPGGPYRLGTSGSCPNATSKSGFFATMAWAVPKDNNKNATNPLTVEVPYICTEGEDQITVWGFHSDNKTQMKNLYGDSNPQKFTSSANGVTAHYVSQIGGFPDQTEDGGLPQSGRIVVDYMMQKPGKTGTIVYQRGVLLPQKVWCASGRSKVIKGSLPLIGEADCLHEKYGGLNKSKPYYTGEHAKAIGNCPIWVKTPLKLANGTKYRPPAKLLKERGFFGAIAGFLEGGWEGMIAGWHGYTSHGAHGVAVAADLKSTQEAINKITKNLNSLSELEVKNLQRLSGAMDELHNEILELDEKVDDLRADTISSQIELAVLLSNEGIINSEDEHLLALERKLKKMLGPSAVDIGNGCFETKHKCNQTCLDRIAAGTFNAGEFSLPTFDSLNITAASLNDDGLDNHTILLYYSTAASSLAVTLMLAIFIVYMVSRDNVSCSICL

SEQ ID NO: 26633 - protein, 585 aa, Artificial Sequence
  derived and/or modified protein sequence (wt) from hemagglutinin__InfluenzaB__AEP20332
MKAIIVLLMVVTSNADRICTGITSSNSPHVVKTATQGEVNVTGVIPLTTTPTKSHFANLKGTKTRGKLCPKCLNCTDLDVALGRPKCTGNIPSAEVSILHEVRPVTSGCFPIMHDRTKIRQLPNLLRGYEHIRLSTHNVINAEKAPGGPYKIGTSGSCPNVTNGNGFFATMAWAVPKNDNNKTATNPLTIEVPYICTEGEDQITVWGFHSDNETQMAKLYGDSKPQKFTSSANGVTTHYVSQIGGFPNQTEDGGLPQSGRIVVDYMVQKSGKTGTITYQRGILLPQKVWCASGRSKVIKGSLPLIGEADCLHEKYGGLNKSKPYYTGEHAKAIGNCPIWVKTPLKLANGTKYRPPAKLLKERGFFGAIAGFLEGGWEGMIAGWHGYTSHGAHGVAVAADLKSTQEAINKITKNLNSLSELEVKNLQRLSGAMDELHNEILELDEKVDDLRADTISSQIELAVLLSNEGIINSEDEHLLALERKLKKMLGPSAVEIGNGCFETKHKCNQTCLDRIAAGTFDAGEFSLPTFDSLNITAASLNDDGLDNHTILLYYSTAASSLAVTLMIAIFVVYMVSRDNVSCSICL

SEQ ID NO: 26634 - protein, 584 aa, Artificial Sequence; identical to SEQ ID NO: 26426
  derived and/or modified protein sequence (wt) from hemagglutinin__InfluenzaB__AEP20343

SEQ ID NO: 26635 - protein, 584 aa, Artificial Sequence; identical to SEQ ID NO: 26426
  derived and/or modified protein sequence (wt) from hemagglutinin__InfluenzaB__AEP20354

SEQ ID NO: 26636 - protein, 584 aa, Artificial Sequence; identical to SEQ ID NO: 26426
  derived and/or modified protein sequence (wt) from hemagglutinin__InfluenzaB__AEP20365

SEQ ID NO: 26637 - protein, 584 aa, Artificial Sequence; identical to SEQ ID NO: 26426
  derived and/or modified protein sequence (wt) from hemagglutinin__InfluenzaB__AEP20376

SEQ ID NO: 26638 - protein, 585 aa, Artificial Sequence
  derived and/or modified protein sequence (wt) from hemagglutinin__InfluenzaB__AEP20398
MKAIIVLLMVVTSNADRICTGITSSNSPHVVKTATQGEVNVTGVIPLTTTPTKSHFANLKGTKTRGKLCPKCLNCTDLDVALGRPKCTGNIPSAEVSILHEVRPVTSGCFPIMHDRTKIRQLPNLLRGYEHIRLSTHNVINAEKAPGGPYKIGTSGSCPNVTNGNGFFATMAWAVPKNDNNKTATNSLTIEVPYICTEGEDQITIWGFHSDNETQMAKLYGDSKPQKFTSSANGVTTHYVSQIGGFPNQTEDGGLPQSGRIVVDYMVQKSGKTGTITYQRGILLPQKVWCASGRSKVIKGSLPLIGEADCLHEKYGGLNKSKPYYTGEHAKAIGNCPIWVKTPLKLANGTKYRPPAKLLKERGFFGAIAGFLEGGWEGMIAGWHGYTSHGAHGVAVAADLKSTQEAINKITKNLNSLSELEVKNLQRLSGAMDELHNEILELDEKVDDLRADTISSQIELAVLLSNEGIINSEDEHLLALERKLKKMLGPSAVEIGNGCFETKHKCNQTCLDRIAAGTFDAGEFSLPTFDSLNITAASLNDDGLDNHTILLYYSTAASSLAVTLMIAIFVVYMVSRDNVSCSICL

SEQ ID NO: 26639 - protein, 585 aa, Artificial Sequence; identical to SEQ ID NO: 26608
  derived and/or modified protein sequence (wt) from hemagglutinin__InfluenzaB__AEP20409

SEQ ID NO: 26640 - protein, 585 aa, Artificial Sequence; identical to SEQ ID NO: 26608
  derived and/or modified protein sequence (wt) from hemagglutinin__InfluenzaB__AEP20420

SEQ ID NO: 26641 - protein, 585 aa, Artificial Sequence; identical to SEQ ID NO: 26608
  derived and/or modified protein sequence (wt) from hemagglutinin__InfluenzaB__AEP20431

SEQ ID NO: 26642 - protein, 585 aa, Artificial Sequence; identical to SEQ ID NO: 26608
  derived and/or modified protein sequence (wt) from hemagglutinin__InfluenzaB__AEP20442

SEQ ID NO: 26643 - protein, 585 aa, Artificial Sequence; identical to SEQ ID NO: 26608
  derived and/or modified protein sequence (wt) from hemagglutinin__InfluenzaB__AEP20453

SEQ ID NO: 26644 - protein, 584 aa, Artificial Sequence; identical to SEQ ID NO: 26426
  derived and/or modified protein sequence (wt) from hemagglutinin__InfluenzaB__AEQ39027

SEQ ID NO: 26645 - protein, 585 aa, Artificial Sequence
  derived and/or modified protein sequence (wt) from hemagglutinin__InfluenzaB__AEQ39260
MKAIIVLLMVVTSNADRICTGITSSNSPHVVKTATQGEVNVTGVIPLTTTPTKSHFANLKGTETRGKLCPKCLNCTDLDVALGRPKCTGKIPSARVSILHEVRPVTSGCFPIMHDRTKIRQLPNLLRGYEHIRLSTHNVINAENAPGGPYKIGTSGSCPNVTNGNGFFATMAWAVPKNDKNKTATNPLTIEVPYICTEGEDQITVWGFHSDNETQMAKLYGDSKPQKFTSSANGVTTHYVSQIGGFPNQTEDGGLPQSGRIVVDYMVQKSGKTGTITYQRGILLPQKVWCASGRSKVIKGSLPLIGEADCLHEKYGGLNKSKPYYTGEHAKAIGNCPIWVKTPLKLANGTKYRPPAKLLKERGFFGAIAGFLEGGWEGMIAGWHGYTSHGAHGVAVAADLKSTQEAINKITKNLNSLSELEVKNLQRLSGAMDELHNEILELDEKVDDLRADTISSQIELAVLLSNEGIINSEDEHLLALERKLKKMLGPSAVEIGNGCFETKHKCNQTCLDRIAAGTFDAGEFSLPTFDSLNITAASLNDDGLDNHTILLYYSTAASSLAVTLMIAIFVVYMVSRDNVSCSICL

SEQ ID NO: 26646 - protein, 585 aa, Artificial Sequence; identical to SEQ ID NO: 26645
  derived and/or modified protein sequence (wt) from hemagglutinin__InfluenzaB__AEQ39271

SEQ ID NO: 26647 - protein, 585 aa, Artificial Sequence
  derived and/or modified protein sequence (wt) from hemagglutinin__InfluenzaB__AEQ39282
MKAIIVLLMVVTSNADRICTGITSSNSPHVVKTATQGEVNVTGVIPLTTTPTKSHFANLKGTETRGKLCPKCLNCTDLDVALGRPKCTGKIPSARVSILHEVRPVTSGCFPIMHDRTKIRQLPNLLRGYEHIRLSTHNVINAENAPGGPYKIGTSGSCPNVTNGNGFFATMAWAVPKNDKNKTATNPLTIEVPYICTEGEDQITVWGFHSDNETQMAKLYGDSKPQKFTSSANGVTTHYVSQIGGFPNQTEDGGLPQSGRIVVDYMVQKSGKTGTITYQRGILLPQKVWCASGRSKVIKGSLPLIGEADCLHEKYGGLNKSKPYYTGEHAKAIGNCPIWVKTPLKLANGTKYRPPAKLLKERGFFGAIAGFLEGGWEGMIAGWHGYTSHGAHGVAVAADLKSTQEAINKITKNLNSLSELEVKNLQRLSGAMDELHNEILELDEKVDDLRADTISSQIELAVLLSNEGIINSEDEHLLALERKLKKMLGPSAVEIGNGCFETKHKCNQTCLDRIAAGTFDAGEFSLPTFDSLNITAASLNGDELDNHTILLYYSTAASSLAVTLMIAIFVVYMVSRDNVSCSICL

SEQ ID NO: 26648 - protein, 585 aa, Artificial Sequence
  derived and/or modified protein sequence (wt) from hemagglutinin__InfluenzaB__AEQ39315
MKAIIVLLMVVTSNADRICTGITSSNSPHVVKTATQGEVNVTGVIPLTTTPTKSHFANLKGTETRGKLCPKCLNCTDLDVALGRPKCTGKIPSARVSILHEVRPVTSGCFPIMHDRTKIRQLPNLLRGYEHIRLSTHNVINAENAPGGPYKIGTSGSCPNVTNGNGFFATMAWAVPKNDKNKTATNPLTIEVPYICTEGEDQITVWGFHSDNETQMAKLYGDSKPQKFTSSANGVTTHYVSQIGGFPNQTEDGGLPQSGRIVVDYMVQKSGKTGTITYQRGILLPQKVWCASGRSKVIKGSLPLIGEADCLHEKYGGLNKSKPYYTGEHAKAIGNCPIWVKTPLKLANGTKYRPPAKLLKERGFFGAIAGFLEGGWEGMIAGWHGYTSHGAHGVAVAADLKSTQEAINKITKNLNSLSELEVKNLQRLSGAMDELHNEILELDEKVDDLRADTISSQIELAVLLSNEGIINSEDEHLLALERKLKKMLGPSAVEIGNGCFETKHKCNQTCLDRIAAGTFDAGEFSLPTFDSLNITAASLNGDGLDNHTILLYYSTAASSLAVTLMIAIFVVYMVSRDNVSCSICL

SEQ ID NO: 26649 - protein, 585 aa, Artificial Sequence; identical to SEQ ID NO: 26648
  derived and/or modified protein sequence (wt) from hemagglutinin__InfluenzaB__AEQ39326

SEQ ID NO: 26650 - protein, 585 aa, Artificial Sequence
  derived and/or modified protein sequence (wt) from hemagglutinin__InfluenzaB__AEQ39337
MKAIIVLLMVVTSNADRICTGITSSNSPHVVKTATQGEVNVTGVIPLTTTPTKSHFANLKGTETRGKLCPKCLNCTDLDVALGRPKCTGKIPSARVSILHEVRPVTSGCFPIMHDRTKIRQLPNLLRGYEHIRLSTHNVINAGNAPGGPYKIGTSGSCPNVTNGNGFFATMAWAVPKNDKNKTATNPLTIEVPYICTEGEDQITVWGFHSDNETQMAKLYGDSKPQKFTSSANGVTTHYVSQIGGFPNQTEDGGLPQSGRIVVDYMVQKSGKTGTITYQRGILLPQKVWCASGRSKVIKGSLPLIGEADCLHEKYGGLNKSKPYYTGEHAKAIGNCPIWVKKPLKLANGTKYRPPAKLLKERGFFGAIAGFLEGGWEGMIAGWHGYTSHGAHGVAVAADLKSTQEAINKITKNLNSLSELEVKNLQRLSGAMDELHNEILELDEKVDDLRADTISSQIELAVLLSNEGIINSEDEHLLALERKLKKMLGPSAVEIGNGCFETKHKCNQTCLDRIAAGTFDAGEFSLPTFDSLNITAASLNDDGLDNHTILLYYSTAASSLAVTLMIAIFVVYMVSRDNVSCSICL

SEQ ID NO: 26651 - protein, 585 aa, Artificial Sequence
  derived and/or modified protein sequence (wt) from hemagglutinin__InfluenzaB__AEQ39348
MKAIIVLLMVVTSNADRICTGITSSNSPHVVKTATQGEVNVTGVIPLTTTPTKSHFANLKGTETRGKLCPKCLNCTDLDVALGRPKCTGKIPSARVSILHEVRPVTSGCFPIMHDRTKIRQLPNLLRGYEHIRLSTHNVINAENAPGGPYKIGTSGSCPNVTNGNGFFATMAWAVPKNDKNKTATNPLTIEVPYICTEGEDQITVWGFHSDNETQMAKLYGDSKPQKFTSSANGVTTHYVSQIGGFPNQTEDGGLPQSGRIVVDYMVQKSGKTGTITYQRGILLPQKVWCASGRSKVIKGSLPLIGEADCLHEKYGGLNKSKPYYTGEHAKAIGNCPIWVKTPLKLANGTKYRPPAKLLKERGFFGAIAGFLEGGWEGMIAGWHGYTSHGAHGVAVAADLKSTQEAINKITKNLNSLSELEVKNLQRLSGAMDELHNEILELDEKVDDLRADTISSQIELAVLLSNEGIINSEDEHLLALERKLKKMLGPSAVEIGNGCFETKHKCNQTCLDRIAAGTFDAGEFSLPTFDSLNITAASLNDDGLDNHIILLYYSTAASSLAVTLMIAIFVVYMVSRDNVSCSICL

SEQ ID NO: 26652 - protein, 585 aa, Artificial Sequence; identical to SEQ ID NO: 26648
  derived and/or modified protein sequence (wt) from hemagglutinin__InfluenzaB__AEQ39359

SEQ ID NO: 26653 - protein, 585 aa, Artificial Sequence
  derived and/or modified protein sequence (wt) from hemagglutinin__InfluenzaB__AEQ39370
MKAIIVLLMVVTSNADRICTGITSSNSPHVVKTATQGEVNVTGVIPLTTTPTKSHFANLKGTETRGKLCPKCLNCTDLDVALGRPKCTGNIPSARVSILHEVRPVTSGCFPIMHDRTKIRQLPNLLRGYEHIRLSTHNVVNAENAPGGPYKIGTSGSCPNVTNGNGFFATMAWAVPKNDNNKTATNSLTIEVPYICTEGEDQITVWGFHSDNETQMAKLYGDSKPQKFTSSANGVTTHYVSQIGGFPNQTEDGGLPQSGRIVVDYMVQKSGKTGTITYQRGILLPQKVWCASGRSKVIKGSLPLIGEADCLHEKYGGLNKSKPYYTGEHAKAIGNCPIWVKTPLKLANGTKYRPPAKLLKERGFFGAIAGFLEGGWEGMIAGWHGYTSHGAHGVAVAADLKSTQEAINKITKNLNSLSELEVKNLQRLSGAMDELHNEILELDEKVDDLRADTISSQIELAVLLSNEGIINSEDEHLLALERKLKKMLGPSAVEIGNGCFETKHKCNQTCLDRIAAGTFDAGEFSLPTFDSLNITAASLNDDGLDNHTILLYYSTAASSLAVTLMIAIFVVYMVSRDNVSCSICL

SEQ ID NO: 26654 - protein, 584 aa, Artificial Sequence; identical to SEQ ID NO: 26426
  derived and/or modified protein sequence (wt) from hemagglutinin__InfluenzaB__AEQ39392

SEQ ID NO: 26655 - protein, 584 aa, Artificial Sequence; identical to SEQ ID NO: 26426
  derived and/or modified protein sequence (wt) from hemagglutinin__InfluenzaB__AEQ39429

SEQ ID NO: 26656 - protein, 584 aa, Artificial Sequence; identical to SEQ ID NO: 26426
  derived and/or modified protein sequence (wt) from hemagglutinin__InfluenzaB__AEQ39440

SEQ ID NO: 26657 - protein, 584 aa, Artificial Sequence; identical to SEQ ID NO: 26426
  derived and/or modified protein sequence (wt) from hemagglutinin__InfluenzaB__AEQ39451

SEQ ID NO: 26658 - protein, 585 aa, Artificial Sequence; identical to SEQ ID NO: 26638
  derived and/or modified protein sequence (wt) from hemagglutinin__InfluenzaB__AEQ39462

SEQ ID NO: 26659 - protein, 585 aa, Artificial Sequence; identical to SEQ ID NO: 26645
  derived and/or modified protein sequence (wt) from hemagglutinin__InfluenzaB__AEQ39484

SEQ ID NO: 26660 - protein, 584 aa, Artificial Sequence; identical to SEQ ID NO: 26405
  derived and/or modified protein sequence (wt) from hemagglutinin__InfluenzaB__AEQ39506

SEQ ID NO: 26661 - protein, 585 aa, Artificial Sequence
  derived and/or modified protein sequence (wt) from hemagglutinin__InfluenzaB__AEQ39517
MKAIIVLLMVVTSNADRICTGITSSNSPHVVKTATQGEVNVTGVIPLTTTPTKSHFANLKGTKTRGKLCPKCLNCTDLDVALGRPKCTGNIPSAEVSILHEVRPVTSGCFPIMHDRTKIRQLPNLLRGYEHIRLSTHNVINAEKAPGGPYKIGTSGSCPNVTNGNGFFATMAWAVPKNDNNKTATNSLTIEVPYICTEGEDQITIWGFHSDNETQMAKLYGDSKPQKFTSSANGVTTHYVSQIGGFPNQTEDGGLPQSGRIVVDYMVQKSGKTGTITYQRGILLPQKVWCASGRSKVIKGSLPLIGEADCLHEKYGGLNKSKPYYTGEHAKAIGNCPIWVKTPLKLANGTKYRPPAKLLKERGFFGAIAGFLEGGWEGMIAGWHGYTSHGAHGVAVAADLKSTQEAINKITKNLNSLSELEVKNLQRLSGAMDELHNEILELDEKVDDLRADTISSQIELAVLLSNEGIINSEDEHLLALERKLKKMLGPSAVEIGNGCFETKHKCNQTCLDRIAAGTFDAGEFSLPTFDSLNITAASLNDNGLDNHTILLYYSTAASSLAVTLMIAIFVVYMVSRDNVSCSICL

SEQ ID NO: 26662 - protein, 585 aa, Artificial Sequence
  derived and/or modified protein sequence (wt) from hemagglutinin__InfluenzaB__AER27038
MKAIIVLLMVVTSNADRICTGITSSNSPHVVKTATQGEVNVTGVIPLTTTPTKSHFANLKGTETRGKLCPKCPNCTDLDVALGRPKCTGKIPSARVSILHEVRPVTSGCFPIMHDRTKIRQLPNLLRGYEHIRLSTHNVINAENAPGGPYKIGTSGSCPNVTNGNGFFATMAWAVPKNDKNKTATNPLTIEVPYICTKGEDQITVWGFHSDNETQMAKLYGDSKPQKFTSSANGVTTHYVSQIGGFPNQTEDGGLPQSGRIVVDYMVQKSGKTGTITYQRGILLPQKVWCASGRSKVIKGSLPLIGEADCLHEKYGGLNKSKPYYTGEHAKAIGNCPIWVKTPLKLANGTKYRPPAKLLKERGFFGAIAGFLEGGWEGMIAGWHGYTSHGAHGIAVAADLKSTQEAINKITKNLNSLSELEVKNLQRLSGAMDELHNEILELDEKVDDLRADTISSQIELAVLLSNEGIINSEDEHLLALERKLKKMLGPSAVEIGNGCFETKHKCNQTCLDRIAAGTFDAGEFSLPTFDSLNITAASLNDDGLDNHTILLYYSTAASSLAVTLMIAIFVVYMVSRDNVSCSICL

SEQ ID NO: 26663 - protein, 585 aa, Artificial Sequence; identical to SEQ ID NO: 26608
  derived and/or modified protein sequence (wt) from hemagglutinin__InfluenzaB__AER27060

SEQ ID NO: 26664 - protein, 585 aa, Artificial Sequence
  derived and/or modified protein sequence (wt) from hemagglutinin__InfluenzaB__AET10061
MKAIIVLLMVVTSNADRICTGITSSNSPHVVKTATQGEVNVTGVIPLTTTPTKSHFANLKGTETRGKLCPKCLNCTDLDVALGRPKCTGNIPSARVSILHEVRPVTSGCFPIMHDRTKIRQLPNLLRGYEHIRLSTHNVINAKNAPGGPYKIGTSGSCPNVTNGNGFFATMAWAVPKNDKNRTATNSLTIEVPYICKEGEDQITVWGFHSDNETQMAKLYGDSKPQKFTSSANGVTTHYVSQIGGFPNQTEDGGLPQSGRIVVDYMVQKSGKTGTITYQRGILLPQKVWCASGRSKVIKGSLPLIGEADCLHEKYGGLNKSKPYYTGEHAKAIGNCPIWVKTPLKLANGTKYRPPAKLLKERGFFGAIAGFLEGGWEGMIAGWHGYTSHGAHGVAVAADLKSTQEAINKITKNLNSLSELEVKNLQRLSGAMDELHNEILELDEKVDDLRADTISSQIELAVLLSNEGIINSEDEHLLALERKLKKMLGPSAVEIGNGCFETKHKCNQTCLDRIAAGTFDAGEFSLPTFDSLNITAASLNDDGLDNHTILLYYSTAASSLAVTLMIAIFVVYMVSRDNVSCSICL

SEQ ID NO: 26665 - protein, 584 aa, Artificial Sequence
  derived and/or modified protein sequence (wt) from hemagglutinin__InfluenzaB__AET10062
MKAIIVLLMVVTSNADRICTGITSSNSPHVVKTATQGEVNVTGVIPLTITPTKSYFANLKGTRTRGKLCPDCLNCTDLDVALGRPMCVGTTPSAKASILHEVRPVTSGCFPIMHDRTKIRQLPNLLRGYENIRLSTQNVIDAEKAPGGPYRLGTSGSCPNATSKIGFFATMAWAVPKDNYKNATNPLTVEVPYICKEGEDQITVWGFHSDNKTQMKNLYGDSNPQKFTSSANGVTTHYVSQIGDFPDQTEDGGLPQSGRIVVDYMMQKPGKTGTIVYQRGVLLPQKVWCASGRSKVIKGSLPLIGEADCLHEKYGGLNKSKPYYTGEHAKAIGNCPIWVKTPLKLANGTKYRPPAKLLKERGFFGAIAGFLEGGWEGMIAGWHGYTSHGAHGVAVAADLKSTQEAINKITKNLNSLSELEVKNLQRLSGAMDELHNEILELDEKVDDLRADTISSQIELAVLLSNEGIINSEDEHLLALERKLKKMLGPSAVDIGNGCFETKHKCNQTCLDRIAAGTFNAGEFSLPTFDSLNITAASLNDDGLDNHTILLYYSTAASSLAVTLMLAIFIVYMVSRDNVSCSICL

SEQ ID NO: 26666 - protein, 584 aa, Artificial Sequence
  derived and/or modified protein sequence (wt) from hemagglutinin__InfluenzaB__AET10064
MKAIIVLLMVVTSNADRICTGITSSNSPHVVKTATQGEVNVTGVIPLTTTPTKSYFANLKGTRTRGKLCPDCLNCTDLDVALGRPMCVGTTPSAKASILHEVRPVTSGCFPIMHDRTKIRQLPNLLRGYENIRLSTQNVIDAEKAPGGPYRLGTSGSCPNATSKIGFFATMAWAVPKDNYKNATNPLTVEVPYICTEGEDQITIWGFHSDNKTQMKNLYGDSNPQKFTSSANGVTTHYVSQIGDFPDQTEDGGLPQSGRIVVDYMMQKPGKTGTIVYQRGVLLPQKVWCASGRSKVIKGSLPLIGEADCLHEKYGGLNKSKPYYTGEHAKAIGNCPIWVKTPLKLANGTKYRPPAKLLKERGFFGAIAGFLEGGWEGMIAGWHGYTSHGAHGVAVAADLKSTQEAINKITKNLNSLSELEVKNLQRLSGAMDELHNEILELDEKVDDLRADTISSQIELAVLLSNEGIINSEDEHLLALERKLKKMLGPSAVDIGNGCFETKHKCNQTCLDRIAAGTFNAGEFSLPTFDSLNITAASLNDDGLDNHTILLYYSTAASSLAVTLMLAIFIVYMVSRDNVSCSICL

SEQ ID NO: 26667 - protein, 584 aa, Artificial Sequence
  derived and/or modified protein sequence (wt) from hemagglutinin__InfluenzaB__AET10065
MKAIIVLLMVVTSNADRICTGITSSNSPHVVKTATQGEVNVTGVIPLTTTPTKSYFANLKGTRTRGKLCPDCLNCTDLDVALGRPMCVGTTPSAKASILHEVRPVTSGCFPIMHDRTKIRQLPNLLRGYENIRLSTQNVIDAEKAPGGPYRLGTSGSCPNATSKIGFFATMAWAVPKDNYKNATNPLTVEVPYICKEGEDQITVWGFHSDNKTQMKNLYGDSNPQKFTSSANGVTTHYVSQIGDFPDQTEDGGLPQSGRIVVDYMMQKPGKTGTIVYQRGVLLPQKVWCASGRSKVIKGSLPLIGEADCLHEKYGGLNKSKPYYTGEHAKAIGNCPIWVKTPLKLANGTKYRPPAKLLKERGFFGAIAGFLEGGWEGMIAGWHGYTSHGAHGVAVAADLKSTQEAINKITKNLNSLSELEVKNLQRLSGAMDELHNEILELDEKVDDLRADTISSQIELAVLLSNEGIINSEDEHLLALERKLKKMLGPSAVDIGNGCFETKHKCNQTCLDRIAAGTFNAGEFSLPTFDSLNITAASLNDDGLDNHTILLYYSTAASSLAVTLMLAIFIVYMVSRDNVSCSICL

SEQ ID NO: 26668 - protein, 584 aa, Artificial Sequence; identical to SEQ ID NO: 26667
  derived and/or modified protein sequence (wt) from hemagglutinin__InfluenzaB__AET10066

SEQ ID NO: 26669 - protein, 584 aa, Artificial Sequence
  derived and/or modified protein sequence (wt) from hemagglutinin__InfluenzaB__AET10067
MKAIIVLLMVVTSNADRICTGITSSNSPHVVKTATQGEVNVTGVIPLTATPTKSYFANLKGTRTRGKLCPDCLNCTDLDVALGRPMCVGTTPSAKASILHEVRPVTSGCFPIMHDRTKIRQLPNLLRGYENIRLSTQNVIDAEKAPGGPYRLGTSGSCPNATSKIGFFATMAWAVPKDNYKNATNPLTVEVPYICKEGEDQITVWGFHSDNKTQMKNLYGDSNPQKFTSSANGVTTHYVSQIGDFPDQTEDGGLPQSGRIVVDYMMQKPGKTGTIVYQRGVLLPQKVWCASGRSKVIKGSLPLIGEADCLHEKYGGLNKSKPYYTGEHAKAIGNCPIWVKTPLKLANGTKYRPPAKLLKERGFFGAIAGFLEGGWEGMIAGWHGYTSHGAHGVAVAADLKSTQEAINKITKNLNSLSELEVKNLQRLSGAMDELHNEILELDEKVDDLRADTISSQIELAVLLSNEGIINSEDEHLLALERKLKKMLGPSAVDIGNGCFETKHKCNQTCLDRIAAGTFNAGEFSLPTFDSLNITAASLNDDGLDNHTILLYYSTAASSLAVTLMLAIFIVYMVSRDNVSCSICL

SEQ ID NO: 26670 - protein, 584 aa, Artificial Sequence
  derived and/or modified protein sequence (wt) from hemagglutinin__InfluenzaB__AET10068
MKAIIVLLMVVTSNADRICTGITSSNSPHVVKTATQGEVNVTGVIPLTTAPTKSYFANLKGTRTRGKLCPDCLNCTDLDVALGRPMCAGTTPSAKASILHEVRPVTSGCFPIMHDRTKIRQLPNLLRGYENIRLSTQNVIDAEKAPGGPYRLGTSGSCPNATSKIGFFATMAWAVPKDNYKNATNPLTVEVPYICKEGEDQITVWGFHSDNKTQMKNLYGDSNPQKFTSSANGVTTHYVSQIGDFPDQTEDGGLPQSGRIVVDYMMQKPGKTGTIVYQRGVLLPQKVWCASGRSKVIKGSLPLIGEADCLHEKYGGLNKSKPYYTGEHAKAIGNCPIWVKTPLKLANGTKYRPPAKLLKERGFFGAIAGFLEGGWEGMIAGWHGYTSHGAHGVAVAADLKSTQEAINKITKNLNSLSELEVKNLQRLSGAMDELHNEILELDEKVDDLRADTISSQIELAVLLSNEGIINSEDEHLLALERKLKKMLGPSAVDIGNGCFETKHKCNQTCLDRIAAGTFNAGEFSLPTFDSLNITAASLNDDGLDNHTILLYYSTAASSLAVTLMLAIFIVYMVSRDNVSCSICL

SEQ ID NO: 26671 - protein, 584 aa, Artificial Sequence; identical to SEQ ID NO: 26667
  derived and/or modified protein sequence (wt) from hemagglutinin__InfluenzaB__AET10069

SEQ ID NO: 26672 - protein, 585 aa, Artificial Sequence
  derived and/or modified protein sequence (wt) from hemagglutinin__InfluenzaB__AET10070
MKAIIVLLMVVTSNADRICTGITSSNSPHVVKTATQGEVKVTGVIPLTTTPTKSHFANLKGTETRGKLCPKCPNCTDLDVALGRPKCTGKIPSARVSILHEVRPVTSGCFPIMHDRTKIRQLPNLLRGYEHIRLSTHNVINAENAPGGPYKIGTSGSCPNVTNGNGFFATMAWAVPKNDKNKTATNPLTIEVPYICTEGEDQITVWGFHSDNETQMAKLYGDSKPQKFTSSANGVTTHYVSQIGGFPNQTEDGGLPQSGRIVVDYMVQKSGKTGTITYQRGILLPQKVWCASGRSKVIKGSLPLIGEADCLHEKYGGLNKSKPYYTGEHAKAIGNCPIWVKTPLKLANGTKYRPPAKLLKERGFFGAIAGFLEGGWEGMIAGWHGYTSHGAHGVAVAADLKSTQEAINKITKNLNSLSELEVKNLQRLSGAMDELHNEILELDEKVDDLRADTISSQIELAVLLSNEGIINSEDEHLLALERKLKKMLGPSAVEIGNGCFETKHKCNQTCLDRIAAGTFDAGEFSLPTFDSLNITAASLNDDGLDNHTILLYYSTAASSLAVTLMIAIFVVYMVSRDNVSCSICL

SEQ ID NO: 26673 - protein, 585 aa, Artificial Sequence; identical to SEQ ID NO: 26608
  derived and/or modified protein sequence (wt) from hemagglutinin__InfluenzaB__AET10071

SEQ ID NO: 26674 - protein, 585 aa, Artificial Sequence; identical to SEQ ID NO: 26608
  derived and/or modified protein sequence (wt) from hemagglutinin__InfluenzaB__AET10072

SEQ ID NO: 26675 - protein, 584 aa, Artificial Sequence
  derived and/or modified protein sequence (wt) from hemagglutinin__InfluenzaB__AET10073
MKAIIVLLMVVTSNADRICTGITSSNSPHVVKTATQGEVNVTGVIPLTTTPTKSYFANLKGTRTRGKLCPDCLNCTDLDVALGRPMCVGTTPSAKASILHEVRPVTSGCFPIMHDRTKIRQLPNLLRGCENIRLSTQNVIDAEKAPGGPYRLGTSGSCPNATSKIGFFATMAWAVPKDNYKNATNPLTVEVPYICKEGEDQITVWGFHSDNKTQMKNLYGDSNPQKFTSSANGVTTHYVSQIGDFPDQTEDGGLPQSGRIVVDYMMQKPGKTGTIVYQRGVLLPQKVWCASGRSKVIKGSLPLIGEADCLHEKYGGLNKSKPYYTGEHAKAIGNCPIWVKTPLKLANGTKYRPPAKLLKERGFFGAIAGFLEGGWEGMIAGWHGYTSHGAHGVAVAADLKSTQEAINKITKNLNSLSELEVKNLQRLSGAMDELHNEILELDEKVDDLRADTISSQIELAVLLSNEGIINSEDEHLLALERKLKKMLGPSAVDIGNGCFETKHKCNQTCLDRIAAGTFNAGEFSLPTFDSLNITAASLNDDGLDNHTILLYYSTAASSLAVTLMLAIFIVYMVSRDNVSCSICL

SEQ ID NO: 26676 - protein, 585 aa, Artificial Sequence
  derived and/or modified protein sequence (wt) from hemagglutinin__InfluenzaB__AET10074
MKAIIVLLMVVTSNADRICTGITSSNSPHVVKTATQGEVNVTGVIPLTTTPTRSHFANLKGTETRGKLCPKCPNCTDLDVALGRPKCTGKIPSARVSILHEVRPVTSGCFPIMHDRTKIRQLPNLLRGYEHIRLSTHNVINAENAPGGPYKIGTSGSCPNVTNGNGFFATMAWAVPKNDKNKTATNPLTIEVPYICTEGEDQITVWGFHSDNETQMAKLYGDSKPQKFTSSANGVTTHYVSQIGGFPNQTEDGGLPQSGRIVVDYMVQKSGRTGTITYQRGILLPQKVWCASGRSKVIKGSLPLIGEADCLHEKYGGLNKSKPYYTGEHAKAIGNCPIWVKTPLKLANGTKYRPPAKLLKERGFFGAIAGFLEGGWEGMIAGWHGYTSHGAHGVAVAADLKSTQEAINKITKNLNSLSELEVKNLQRLSGAMDELHNEILELDEKVDDLRADTISSQIELAVLLSNEGIINSEDEHLLALERKLKKMLGPSAVEIGNGCFETKHKCNQTCLDRIAAGTFDAGEFSLPTFDSLNITAASLDDDGLDNHTILLYYSTAASSLAVTLMIAIFVVYMVSRDNVSCSICL

SEQ ID NO: 26677 - protein, 585 aa, Artificial Sequence; identical to SEQ ID NO: 26608
  derived and/or modified protein sequence (wt) from hemagglutinin__InfluenzaB__AET10076

SEQ ID NO: 26678 - protein, 585 aa, Artificial Sequence; identical to SEQ ID NO: 26608
  derived and/or modified protein sequence (wt) from hemagglutinin__InfluenzaB__AET10077

SEQ ID NO: 26679 - protein, 585 aa, Artificial Sequence
  derived and/or modified protein sequence (wt) from hemagglutinin__InfluenzaB__AET10078
MKAIIVLLMVVTSNADRICTGITSSNSPHVVKTATQGEVNVTGVIPLTTTPTKSHFANLKGTETRGKLCPKCLNCTDLDVALGRPKCTGKIPSARVSVLHEVRPVTSGCFPIMHDRTKIRQLPNLLRGYEHIRLSTHNVINAENAPGGPYKIGTSGSCPNVTNGNGFFATMAWAVPKNDKNKTATNPLTIEVPYICTEGEDQITVWGFHSDNETQMAKLYGDSKPQKFTSSANGVTTHYVSQIGGFPNQTEDGGLPQSGRIVVDYMVQKSGKTGTITYQRGILLPQKVWCASGRSKVIKGSLPLIGEADCLHEKYGGLNKSKPYYTGEHAKAIGNCPIWVKTPLKLANGTKYRPPAKLLKERGFFGAIAGFLEGGWEGMIAGWHGYTSHGAHGVAVAADLKSTQEAINKITKNLNSLSELEVKNLQRLSGAMDELHNEILELDEKVDDLRADTISSQIELAVLLSNEGIINSEDEHLLALERKLKKMLGPSAVEIGNGCFETKHKCNQTCLDRIAAGTFNAGEFSLPTFDSLNITAASLNEDGLDNHAILLYYSTAASSLAVTLMIAIFVVYMVSRDNVSCSICL

SEQ ID NO: 26680 - protein, 585 aa, Artificial Sequence
  derived and/or modified protein sequence (wt) from hemagglutinin__InfluenzaB__AET10079
MKAIIVLLMVVTSNADGICTGITSSNSPHVVKTATQGEVNVTGVIPLTTTPTKSHFANLKGTETRGKLCPKCPNCTDLDVALGRPKCTGKIPSARVSILHEVRPVTSGCFPIMHDRTKIRQLPNLLRGYEHIRLSTHNVINAENAPGGPYKIGTSGSCPNVTNGNGFFTTMAWAVPKNDKNKTATNPLTIEVPYICTEGEDQITVWGFHSDNETQMAKLYGDSKPQKFTSSANGVTTHYVSQIGGFPNQTEDGGLPQSGRIVVDYMVQKSGKTGTITYQRGILLPQKVWCASGRSKVIKGSLPLIGEADCLHEKYGGLNKSKPYYTGEHAKAIGNCPIWVKTPLKLANGTKYRPPAKLLKERGFFGAIAGFLEGGWEGMIAGWHGYTSHGAHGVAVAADLKSTQEAINKITKNLNSLSELEVENLQRLSGAMDELHNEILELDEKVDDLRADTISSQIELAVLLSNEGIINSEDEHLLALERKLKKMLGPSAVEIGNGCFETKHKCNQTCLDRIAAGTFDAGEFSLPTFDSLNITAASLNDDGLDNHTILLYYSTAASSLAVTLMIAIFVVYMVSRDNVSCSICL

SEQ ID NO: 26681 - protein, 585 aa, Artificial Sequence; identical to SEQ ID NO: 26608
  derived and/or modified protein sequence (wt) from hemagglutinin__InfluenzaB__AET10080

SEQ ID NO: 26682 - protein, 585 aa, Artificial Sequence; identical to SEQ ID NO: 26608
  derived and/or modified protein sequence (wt) from hemagglutinin__InfluenzaB__AET10081

SEQ ID NO: 26683 - protein, 585 aa, Artificial Sequence
  derived and/or modified protein sequence (wt) from hemagglutinin__InfluenzaB__AET10082
MKAIIVLLMVVTSNADRICTGITSSNSPHIVKTATQGEVNVTGVIPLTTTPTKSHFANLKGTETRGKLCPKCLNCTDLDVALGRPKCTGKIPSARVSILHEVRPVTSGCFPIMHDRTKIRQLPNLLRGYEHIRLSTHNVINAENAPGGPYKIGTSGSCPNITNGNGFFATMAWAVPKNDKNKTATNPLTIEVPYICTEGEDQITVWGFHSDNETQMAKLYGDSKPQKFTSSANGVTTHYVSQIGGFPNQTEDGGLPQSGRIVVDYMVQKSGKTGTITYQRGILLPQKVWCASGRSKVIKGSLPLIGEADCLHEKYGGLNKSKPYYTGEHAKAIGNCPIWVKTPLKLANGTKYRPPAKLLKERGFFGAIAGFLEGGWEGMIAGWHGYTSHGAHGVAVAADLKSTQEAINKITKNLNSLSELEVKNLQRLSGAMDELHNEILELDEKVDDLRADTISSQIELAVLLSNEGIINSEDEHLLALERKLKKMLGPSAVEIGNGCFETKHKCNQTCLDRIAAGTFDAGEFSLPTFDSLNITAASLNDDGLDNHTILLYYSTAASSLAVTLMIAIFVVYMVSRDNVSCSICL

SEQ ID NO: 26684 - protein, 585 aa, Artificial Sequence
  derived and/or modified protein sequence (wt) from hemagglutinin__InfluenzaB__AET10083
MKAIIVLLMVVTSNADRICTGITSSNSPHVVKTATQGEVNVTGVIPLTTTPTKSHFANLKGTETRGKLCPKCLNCTDLDVALGRPKCTGKVPSARVSILHEVRPVTSGCFPIMHDRTKIRQLPNLLRGYEHIRLSTHNVINAENAPGGPYKIGTSGSCPNITNGNGFFATMAWAVPKNDKNKTATNPLTIEVPYICTEGEDQITVWGFHSDNETQMAKLYGDSKPQKFTSSANGVTTHYVSQIGGFPNQTEDGGLPQSGRIVVDYMVQKSGKTGTITYQRGILLPQKVWCASGRSKVIKGSLPLIGEADCLHEKYGGLNKSKPYYTGEHAKAIGNCPIWVKTPLKLANGTKYRPPAKLLKERGFFGAIAGFLEGGWEGMIAGWHGYTSHGAHGVAVAADLKSTQEAINKITKNLNSLSELEVKNLQRLSGAMDELHNEILELDEKVDDLRADTISSQIELAVLLSNEGIINSEDEHLLALERKLKKMLGPSAVEIGNGCFETKHKCNQTCLDRIAAGTFDAGEFSLPTFDSLNITAASLNDDGLDNHTILLYYSTAASSLAVTLMIAIFVVYMVSRDNVSCSICL

SEQ ID NO: 26685 - protein, 585 aa, Artificial Sequence; identical to SEQ ID NO: 26645
  derived and/or modified protein sequence (wt) from hemagglutinin__InfluenzaB__AET10084

SEQ ID NO: 26686 - protein, 585 aa, Artificial Sequence; identical to SEQ ID NO: 26608
  derived and/or modified protein sequence (wt) from hemagglutinin__InfluenzaB__AET10085

SEQ ID NO: 26687 - protein, 585 aa, Artificial Sequence; identical to SEQ ID NO: 26648
  derived and/or modified protein sequence (wt) from hemagglutinin__InfluenzaB__AET43124

SEQ ID NO: 26688 - protein, 585 aa, Artificial Sequence; identical to SEQ ID NO: 26648
  derived and/or modified protein sequence (wt) from hemagglutinin__InfluenzaB__AET43135

SEQ ID NO: 26689 - protein, 585 aa, Artificial Sequence; identical to SEQ ID NO: 26648
  derived and/or modified protein sequence (wt) from hemagglutinin__InfluenzaB__AET43146

SEQ ID NO: 26690 - protein, 585 aa, Artificial Sequence; identical to SEQ ID NO: 26648
  derived and/or modified protein sequence (wt) from hemagglutinin__InfluenzaB__AET43157

SEQ ID NO: 26691 - protein, 585 aa, Artificial Sequence
  derived and/or modified protein sequence (wt) from hemagglutinin__InfluenzaB__AET43168
MKAIIVLLMVVTSNADRICTGITSSNSPHVVKTATQGEVNVTGVIPLTTTPTKSHFANLKGTETRGKLCPKCLNCTDLDVTLGRPKCTGKIPSARVSILHEVRPVTSGCFPIMHDRTKIRQLPNLLRGYEHIRLSTHNVINAENAPGGPYKIGTSGSCPNVTNGNGFFATMAWAVPKNDKNKTATNPLTIEVPYICTEGEDQITVWGFHSDNETQMAKLYGDSKPQKFTSSANGVTTHYVSQIGGFPNQTEDGGLPQSGRIVVDYMVQKSGKTGTITYQRGILLPQKVWCASGRSKVIKGSLPLIGEADCLHEKYGGLNKSKPYYTGEHAKAIGNCPIWVKTPLKLANGTKYRPPAKLLKERGFFGAIAGFLEGGWEGMIAGWHGYTSHGAHGVAVAADLKSTQEAINKITKNLNSLSELEVKNLQRLSGAMDELHNEILELDEKVDDLRADTISSQIELAVLLSNEGIINSEDEHLLALERKLKKMLGPSAVEIGNGCFETKHKCNQTCLDRIAAGTFDAGEFSLPTFDSLNITAASLNDDGLDNHTILLYYSTAASSLAVTLMIAIFVVYMVSRDNVSCSICL

SEQ ID NO: 26692 - protein, 585 aa, Artificial Sequence; identical to SEQ ID NO: 26648
  derived and/or modified protein sequence (wt) from hemagglutinin__InfluenzaB__AET43179

SEQ ID NO: 26693 - protein, 585 aa, Artificial Sequence; identical to SEQ ID NO: 26648
  derived and/or modified protein sequence (wt) from hemagglutinin__InfluenzaB__AET43190

SEQ ID NO: 26694 - protein, 585 aa, Artificial Sequence
  derived and/or modified protein sequence (wt) from hemagglutinin__InfluenzaB__AET43201
MKAIIVLLMVVTSNADRICTGITSSNSPHVVKTATQGEVNVTGVIPLTTTPTKSHFANLKGTETRGKLCPKCLNCTDLDVALGRPKCTGKIPSARVSILHEVRPVTSGCFPIMHDRTKIRQLPNLLRGYEHIRLSTHNVINAGNAPGGPYKIGTSGSCPNVTNGNGFFATMAWAVPKNDKNKTATNPLTIEVPYICTEGEDQITVWGFHSDNETQMAKLYGDSKPQKFTSSANGVTTHYVSQIGGFPNQTEDGGLPQSGRIVVDYMVQKSGKTGTITYQRGILLPQKVWCASGRSKVIKGSLPLIGEADCLHEKYGGLNKSKPYYTGEHAKAIGNCPIWVKTPLKLANGTKYRPPAKLLKERGFFGAIAGFLEGGWEGMIAGWHGYTSHGAHGVAVAADLKSTQEAINKITKNLNSLSELEVKNLQRLSGAMDELHNEILELDEKVDDLRADTISSQIELAVLLSNEGIINSEDEHLLALERKLKKMLGPSAVEIGNGCFETKHKCNQTCLDRIAAGTFDAGEFSLPTFDSLNITAASLNDDGLDNHTILLYYSTAASSLAVTLMIAIFVVYMVSRDNVSCSICL

SEQ ID NO: 26695 - protein, 585 aa, Artificial Sequence; identical to SEQ ID NO: 26648
  derived and/or modified protein sequence (wt) from hemagglutinin__InfluenzaB__AET43212

SEQ ID NO: 26696 - protein, 585 aa, Artificial Sequence; identical to SEQ ID NO: 26648
  derived and/or modified protein sequence (wt) from hemagglutinin__InfluenzaB__AET43223

SEQ ID NO: 26697 - protein, 585 aa, Artificial Sequence; identical to SEQ ID NO: 26694
  derived and/or modified protein sequence (wt) from hemagglutinin__InfluenzaB__AET50943

SEQ ID NO: 26698 - protein, 585 aa, Artificial Sequence; identical to SEQ ID NO: 26648
  derived and/or modified protein sequence (wt) from hemagglutinin__InfluenzaB__AET50954

SEQ ID NO: 26699 - protein, 585 aa, Artificial Sequence; identical to SEQ ID NO: 26648
  derived and/or modified protein sequence (wt) from hemagglutinin__InfluenzaB__AET50965

SEQ ID NO: 26700 - protein, 585 aa, Artificial Sequence; identical to SEQ ID NO: 26648
  derived and/or modified protein sequence (wt) from hemagglutinin__InfluenzaB__AET50976

SEQ ID NO: 26701 - protein, 585 aa, Artificial Sequence; identical to SEQ ID NO: 26648
  derived and/or modified protein sequence (wt) from hemagglutinin__InfluenzaB__AET74255

SEQ ID NO: 26702 - protein, 585 aa, Artificial Sequence; identical to SEQ ID NO: 26694
  derived and/or modified protein sequence (wt) from hemagglutinin__InfluenzaB__AET74277

SEQ ID NO: 26703 - protein, 585 aa, Artificial Sequence; identical to SEQ ID NO: 26648
  derived and/or modified protein sequence (wt) from hemagglutinin__InfluenzaB__AET74288

SEQ ID NO: 26704 - protein, 585 aa, Artificial Sequence
  derived and/or modified protein sequence (wt) from hemagglutinin__InfluenzaB__AET74299
MKAIIVLLMVVTSNADRICTGITSSNSPHVVKTATQGEVNVTGVIPLTTTPTKSHFANLKGTETRGKLCPKCLNCTDLDVTLGRPKCTGKIPSARVSILHEVRPVTSGCFPIMHDRTKIRQLPNLLRGYEHIRLSTHNVINAENAPGGPYKIGTSGSCPNVTNGNGFFATMAWAVPKNDKNKTATNPLTIEVPYICTEGEDQITVWGFHSDNETQMAKLYGDSKPQKFTSSANGVTTHYVSQIGGFPNQTEDGGLPQSGRIVVDYMVQKSGKTGTITYQRGILLPQKVWCASGRSKVIKGSLPLIGEADCLHEKYGGLNKSKPYYTGEHAKAIGNCPIWVKTPLKLANGTKYRPPAKLLKERGFFGAIAGFLEGGWEGMIAGWHGYTSHGAHGVAVAADLKSTQEAINKITNNLNSLSELEVKNLQRLSGAMDELHNEILELDEKVDDLRADTISSQIELAVLLSNEGIINSEDEHLLALERKLKKMLGPSAVEIGNGCFETKHKCNQTCLDRIAAGTFDAGEFSLPTFDSLNITAASLNDDGLDNHTILLYYSTAASSLAVTLMIAIFVVYMVSRDNVSCSICL

SEQ ID NO: 26705 - protein, 585 aa, Artificial Sequence; identical to SEQ ID NO: 26648
  derived and/or modified protein sequence (wt) from hemagglutinin__InfluenzaB__AET74329

SEQ ID NO: 26706 - protein, 585 aa, Artificial Sequence; identical to SEQ ID NO: 26648
  derived and/or modified protein sequence (wt) from hemagglutinin__InfluenzaB__AET74340

SEQ ID NO: 26707 - protein, 585 aa, Artificial Sequence; identical to SEQ ID NO: 26648
  derived and/or modified protein sequence (wt) from hemagglutinin__InfluenzaB__AET74351

SEQ ID NO: 26708 - protein, 585 aa, Artificial Sequence; identical to SEQ ID NO: 26645
  derived and/or modified protein sequence (wt) from hemagglutinin__InfluenzaB__AEY69077

SEQ ID NO: 26709 - protein, 585 aa, Artificial Sequence; identical to SEQ ID NO: 26645
  derived and/or modified protein sequence (wt) from hemagglutinin__InfluenzaB__AFB77676

SEQ ID NO: 26710 - protein, 585 aa, Artificial Sequence
  derived and/or modified protein sequence (wt) from hemagglutinin__InfluenzaB__AFB77677
MKAIIVLLMVVTSNADRICTGITSSNSPHVVKTATQGEVNVTGVIPLTTTPTKSHFANLKGTETRGKLCPKCFNCTDLDVALGRPKCTGKIPSARVSILHEVRPVTSGCFPIMHDRTKIRQLPNLLRGYEHIRLSTHNVINAENAPGGPYKIGTSGSCPNVTNGNGFFATMAWAVPKNDKNKTATNPLTIEVPYICTEGEDQITVWGFHSDNETQMAKLYGDSKPQKFTSSANGVTTHYVSQIGGFPNQTEDGGLPQSGRIVVDYMVQKSGKTGTITYQRGILLPQKVWCASGRSKVIKGSLPLIGEADCLHEKYGGLNKSKPYYTGEHAKAIGNCPIWVKTPLKLANGTKYRPPAKLLKERGFFGAIAGFLEGGWEGMIAGWHGYTSHGAHGVAVAADLKSTQEAINKITKNLNSLSELEVKNLQRLSGAMDELHNEILELDEKVDDLRADTISSQIELAVLLSNEGIINSEDEHLLALERKLKKMLGPSAVEIGNGCFETKHKCNQTCLDRIAAGTFDAGEFSLPTFDSLNITAASLNDDGLDNHTILLYYSTAASSLAVTLMIAIFVVYMVSRDNVSCSICL

SEQ ID NO: 26711 - protein, 585 aa, Artificial Sequence; identical to SEQ ID NO: 26645
  derived and/or modified protein sequence (wt) from hemagglutinin__InfluenzaB__AFB77678

SEQ ID NO: 26712 - protein, 585 aa, Artificial Sequence; identical to SEQ ID NO: 26645
  derived and/or modified protein sequence (wt) from hemagglutinin__InfluenzaB__AFB77679

SEQ ID NO: 26713 - protein, 585 aa, Artificial Sequence
  derived and/or modified protein sequence (wt) from hemagglutinin__InfluenzaB__AFB77680
MKAIIVLLMVVTSNADRICTGITSSNSPHVVKTATQGEVNVTGVIPLTTTPTKSHFANLKGTETRGKLCPKCLNCTDLDVALGRPKCTGKIPSARVSILHEVRPITSGCFPIMHDRTKIRQLPNLLRGYEHIRLSTHNVINAENAPGGPYKIGTSGSCPNVTNGNGFFATMAWAVPKNDKNKTATNPLTIEVPYICTEGEDQITVWGFHSDNETQMAKLYGDSKPQKFTSSANGVTTHYVSQIGGFPNQTEDGGLPQSGRIVVDYMVQKSGKTGTITYQRGILLPQKVWCASGRSKVIKGSLPLIGEADCLHEKYGGLNKSKPYYTGEHAKAIGNCPIWVKTPLKLANGTKYRPPAKLLKERGFFGAIAGFLEGGWEGMIAGWHGYTSHGAHGVAVAADLKSTQEAINKITKNLNSLSELEVKNLQRLSGAMDELHNEILELDEKVDDLRADTISSQIELAVLLSNEGIINSEDEHLLALERKLKKMLGPSAVEIGNGCFETKHKCNQTCLDRIAAGTFDAGEFSLPTFDSLNITAASLNDDGLDNHTILLYYSTAASSLAVTLMIAIFVVYMVSRDNVSCSICL

SEQ ID NO: 26714 - protein, 585 aa, Artificial Sequence; identical to SEQ ID NO: 26645
  derived and/or modified protein sequence (wt) from hemagglutinin__InfluenzaB__AFB77681

SEQ ID NO: 26715 - protein, 585 aa, Artificial Sequence
  derived and/or modified protein sequence (wt) from hemagglutinin__InfluenzaB__AFB77682
MKAIIVLLMVVTSNADRICTGITSSNSPHVVKTATQGEVNVTGVIPLTTTPTKSHFANLKGTETRGKLCPKCLNCTDLDVALGRPKCTGKIPSARVSILHEVRPVTSGCFPIMHDRTKIRQLPNLLRGYEHIRLSTHNVINAENAPGGPYKIGTSGSCPNITNGNGFFATMAWAVPKNDKNKTATNPLTIEVPYICTEGEDQITVWGFHSDNETQMAKLYGDSKPQKFTSSANGVTTHYVSQIGGFPNQTEDGGLPQSGRIVVDYMVQKSGKTGTITYQRGILLPQKVWCASGRSKVIKGSLPLIGEADCLHEKYGGLNKSKPYYTGEHAKAIGNCPIWVKTPLKLANGTKYRPPAKLLKERGFFGAIAGFLEGGWEGMIAGWHGYTSHGAHGVAVAADLKSTQEAINKITQNLNSLSELEVKNLQRLSGAMDELHNEILELDEKVDDLRADTISSQIELAVLLSNEGIINSEDEHLLALERKLKKMLGPSAVEIGNGCFETKHKCNQTCLDRIAAGTFDAGEFSLPTFDSLNITAASLNDDGLDNHTILLYYSTAASSLAVTLMIAIFVVYMVSRDNVSCSICL

SEQ ID NO: 26716 - protein, 585 aa, Artificial Sequence; identical to SEQ ID NO: 26645
  derived and/or modified protein sequence (wt) from hemagglutinin__InfluenzaB__AFB77683

SEQ ID NO: 26717 - protein, 585 aa, Artificial Sequence; identical to SEQ ID NO: 26645
  derived and/or modified protein sequence (wt) from hemagglutinin__InfluenzaB__AFB77684

SEQ ID NO: 26718 - protein, 585 aa, Artificial Sequence
  derived and/or modified protein sequence (wt) from hemagglutinin__InfluenzaB__AFB77685
MKAIIVLLMVVTSNADRICTGITSSNSPHVVKTATQGEVNVTGVIPLTTTPTKSHFANLKGTETRGKLCPKCLNCTDLDVALGRPKCTGKTPSARVSILHEVRPVTSGCFPIMHDRTKIRQLPNLLRGYEHIRLSTHNVINAENAPGGPYKIGTSGSCPNITNGNGFFATMAWAVPKNDKNKTATNPLTIEVPYICTEGEDQITVWGFHSDNETQMAKLYGDSKPQKFTSSANGVTTHYISQIGGFPNQTEDGGLPQSGRIVVDYMVQKSEKTGTITYQRGILLPQKVWCASGRSKVIKGSLPLIGEADCLHEKYGGLNKSKPYYTGEHAKAIGNCPIWVKTPLKLANGTKYRPPAKLLKERGFFGAIAGFLEGGWEGMIAGWHGYTSHGAHGVAVAADLKSTQEAINKITKNLNSLSELEVKNLQRLSGAMDELHNEILELDEKVDDLRADTISSQIELAVLLSNEGIINSEDEHLLALERKLKKMLGPSAVEIGNGCFETKHKCNQTCLDRIAAGTFDAGEFSLPTFDSLNITAASLNDDGLDNHTILLYYSTAASSLAVTLMIAIFVVYMVSRDNVSCSICL

SEQ ID NO: 26719 - protein, 585 aa, Artificial Sequence
  derived and/or modified protein sequence (wt) from hemagglutinin__InfluenzaB__AFB77686
MKAIIVLLMVVTSNADRICTGITSSNSPHVVKTATQGEVNVTGVIPLTTTPTKSHFANLKGTETRGKLCPKCLNCTDLDVALGRPKCTGKIPSARVSILHEVRPVTSGCFPIMHDRTKIRQLPNLLRGYEHIRLSTHNVINAENAPGGPYKIGTSGSCPNITNGNGFFATMAWAVPKNDKNKTATNPLTIEVPYICTEGEDQITVWGFHSDNETQMAKLYGDSKPQKFTSSANGVTTHYVSQISGFPNQTEDGGLPQSGRIVVDYMVQKSGKTGTITYQRGILLPQKVWCASGRSKVIKGSLPLIGEADCLHEKYGGLNKSKPYYTGEHAKAIGNCPIWVKTPLKLANGTKYRPPAKLLKERGFFGAIAGFLEGGWEGMIAGWHGYTSHGAHGVAVAADLKSTQEAINKITQNLNSLSELEVKNLQRLSGAMDELHNEILELDEKVDDLRADTISSQIELAVLLSNEGIINSEDEHLLALERKLKKMLGPSAVEIGNGCFETKHKCNQTCLDRIAAGTFDAGEFSLPTFDSLNITAASLNDDGLDNHTILLYYSTAASSLAVTLMIAIFVVYMVSRDNVSCSICL

SEQ ID NO: 26720 - protein, 585 aa, Artificial Sequence
  derived and/or modified protein sequence (wt) from hemagglutinin__InfluenzaB__AFB77687
MKAIIVLLMVVTSNADRICTGITSSNSPHVVKTATQGEVNVTGVIPLTTTPTKSHFANLKGTETRGKLCPKCLNCTDLDVALGRPKCTGKIPSARVSILHEVRPVTSGCFPIMHDRTKIRQLPNLLRGYEHIKLSTHNVINAENAPGGPYKIGTSGSCPNVTNGNGFFATMAWAVPKNDKNKTATNPLTIEVPYICTEGEDQITVWGFHSDNETQMAKLYGDSKPQKFTSSANGVTTHYVSQIGGFPNQTEDGGLPQSGRIVVDYMVQKSGKTGTITYQRGILLPQKVWCASGRSKVIKGSLPLIGEADCLHEKYGGLNKSKPYYTGEHAKAIGNCPIWVKTPLKLANGTKYRPPAKLLKERGFFGAIAGFLEGGWEGMIAGWHGYTSHGAHGVAVAADLKSTQEAINKITKNLNSLSELEVKNLQRLSGAMDELHNEILELDEKVDDLRADTISSQIELAVLLSNEGIINSEDEHLLALERKLKKMLGPSAVEIGNGCFETKHKCNQTCLDRIAAGTFDAGEFSLPTFDSLNITAASLNDDGLDNHTILLYYSTAASSLAVTLMIAIFVVYMVSRDNVSCSICL

SEQ ID NO: 26721 - protein, 585 aa, Artificial Sequence
  derived and/or modified protein sequence (wt) from hemagglutinin__InfluenzaB__AFB77688
MKAIIVLLMVVTSNADRICTGITSSNSPHVVKTATQGEVNVTGVIPLTTTPTKSHFANLKGTETRGKLCPKCLNCTDLDVALGRPKCTGKIPSARVSILHEVRPVTSGCFPIMHDRTKIRQLPNLLRGYEHIRLSTHNVINAENAPGGPYKIGTSGSCPNVTNGNGFFATMAWAVPKNDKNKTATNPLTIEVPYICTEGEDQITVWGFHSDNETQMAKLYGDSKPQKFTSSANGVTTHYVSQIGGFPNQTEDGGLPQSGRIVVDYMVQKSGKTGTITYQRGILLPQKVWCASGRSKVIKGSLPLIGEADCLHEKYGGLNKSKPYYTGEHAKAIGNCPIWVKAPLKLANGTKYRPPAKLLKERGFFGAIAGFLEGGWEGMIAGWHGYTSHGAHGVAVAADLKSTQEAINKITKNLNSLSELEVKNLQRLSGAMDELHNEILELDEKVDDLRADTISSQIELAVLLSNEGIINSEDEHLLALERKLKKMLGPSAVEIGNGCFETKHKCNQTCLDRIAAGTFDAGEFSLPTFDSLNITAASLNDDGLDNHTILLYYSTAASSLAVTLMIAIFVVYMVSRDNVSCSICL

SEQ ID NO: 26722 - protein, 585 aa, Artificial Sequence; identical to SEQ ID NO: 26645
  derived and/or modified protein sequence (wt) from hemagglutinin__InfluenzaB__AFB77689

SEQ ID NO: 26723 - protein, 585 aa, Artificial Sequence; identical to SEQ ID NO: 26645
  derived and/or modified protein sequence (wt) from hemagglutinin__InfluenzaB__AFB77690

SEQ ID NO: 26724 - protein, 585 aa, Artificial Sequence; identical to SEQ ID NO: 26683
  derived and/or modified protein sequence (wt) from hemagglutinin__InfluenzaB__AFE00360

SEQ ID NO: 26725 - protein, 585 aa, Artificial Sequence; identical to SEQ ID NO: 26683
  derived and/or modified protein sequence (wt) from hemagglutinin__InfluenzaB__AFF18534

SEQ ID NO: 26726 - protein, 585 aa, Artificial Sequence; identical to SEQ ID NO: 26683
  derived and/or modified protein sequence (wt) from hemagglutinin__InfluenzaB__AFF18543

SEQ ID NO: 26727 - protein, 585 aa, Artificial Sequence; identical to SEQ ID NO: 26645
  derived and/or modified protein sequence (wt) from hemagglutinin__InfluenzaB__AFG48978

SEQ ID NO: 26728 - protein, 585 aa, Artificial Sequence; identical to SEQ ID NO: 26645
  derived and/or modified protein sequence (wt) from hemagglutinin__InfluenzaB__AFG48997

SEQ ID NO: 26729 - protein, 585 aa, Artificial Sequence
  derived and/or modified protein sequence (wt) from hemagglutinin__InfluenzaB__AFG48998
MKAIIVLLMVVTSNADRICTGITSSNSPHVVKTATQGEVNVTGVIPLTTTPTKSHFANLKGTETRGKLCPKCPNCTDLDVALGRPKCTGKIPSARVSILHEVRPVTSGCFPIMHDRTKIRQLPNLLRGYEHIRLSTHNVINAENAPGGPYKIGTSGSCPNVTNGNGFFETMAWAVPKNDKNKTATNPLTIEVPYICTEGEDQITVWGFHSDNETQMAKLYGDSKPQKFTSSANGVTTHYVSQIGGFPNQTEDGGLPQSGRIVVDYMVQKSGKTGTITYQRGILLPQKVWCASGRSKVIKGSLPLIGEADCLHEKYGGLNKSKPYYTGEHAKAIGNCPIWVKTPLKLANGTKYRPPAKLLKERGFFGAIAGFLEGGWEGMIAGWHGYTSHGAHGVAVAADLKSTQEAINKITKNLNSLSELEVKNLQRLSGAMDELHNEILELDEKVDDLRADTISSQIELAVLLSNEGIINSEDEHLLALERKLKKMLGPSAVEIGNGCFETKHKCNQTCLDRIAAGTFDAGEFSLPTFDSLNITAASLNDDGLDNHTILLYYSTAASSLAVTLMIAIFVVYMVSRDNVSCSICL

SEQ ID NO: 26730 - protein, 584 aa, Artificial Sequence
  derived and/or modified protein sequence (wt) from hemagglutinin__InfluenzaB__AFG49012
MKAIIVLLMVVTSNADRICTGITSSNSPHVVKTATQGEVNVTGVIPLTTTPTKSYFANLKGTKTRGKLCPDCLNCTDLDVALGRPMCVGTTPSAKASILHEVRPVTSGCFPIMHDRTKIRQLPNLLRGYENIRLSTQNVIDAEKAPGGPYRLGTSGSCPNATSKIGFFATMAWAVPKDNYKNATNPLTVEVPYICTEGEDQITVWGFHSDNKTQMKNLYGDSNPQKFTSSANGVTTHYVSQIGDFPDQTEDGGLPQSGRIVVDYMMQKPGKTGTIVYQRGVLLPQKVWCASGRSKVIKGSLPLIGEADCLHEKYGGLNKSKPYYTGEHAKAIGNCPIWVKTPLKLANGTKYRPPAKLLKERGFFGAIASFLEGGWEGMIAGWHGYTSHGAHGVAVAADLKSTQEAINKITKNLNSLSELEVKNLQRLSGAMDELHNEILELDEKVDDLRADTISSQIELAVLLSNEGIINSEDEHLLALERKLKKMLGPSAVDIGNGCFETKHKCNQTCLDRIAAGTFNAGEFSLPTFDSLNITAASLNDDGLDNHTILLYYSTAASSLAVTLMLAIFIVYMVSRDNVSCSICL

SEQ ID NO: 26731 - protein, 584 aa, Artificial Sequence
  derived and/or modified protein sequence (wt) from hemagglutinin__InfluenzaB__AFG49013
MKAIIVLLMVVTSNADRICTGITSSNSPHVVKTATQGEVNVTGVIPLTTTPTKSYFANLKGTKTRGKLCPDCLNCTDLDVALGRPMCVGTTPSAKASILHEVRPVTSGCFPIMHDRTKIRQLANLLRGYENIRLSTQNVIDAEKAPGGPYRLGTSGSCPNATSKSGFFATMAWAVPKDNNKNATNPLTVEVPYICTEGEDQITVWGFHSDNKTQMKNLYGDSNPQKFTSSANGVTTHYVSQIGGFPDQTEDGGLPQSGRIVVDYMMQKPGKTGTIVYQRGVLLPQKVWCASGRSKVIKGSLPLIGEADCLHEKYGGLNKSKPYYTGEHAKAIGNCPIWVKTPLKLANGTKYRPPAKLLKERGFFGAIAGFLEGGWEGMIAGWHGYTSHGAHGVAVAADLKSTQEAINKITKNLNSLSELEVKNLQRLSGAMDELHNEILELDEKVDDLRADTISSQIELAVLLSNEGIINSEDEHLLALERKLKKMLGPSAVDIGNGCFETKHKCNQTCLDRIAAGTFNAGEFSLPTFDSLNITAASLNDDGLDNHTILLYYSTAASSLAVTLMLAIFIVYMVSRDNVSCSICL

SEQ ID NO: 26732 - protein, 584 aa, Artificial Sequence
  derived and/or modified protein sequence (wt) from hemagglutinin__InfluenzaB__AFH57865
MKAIIVLLMVVTSNADRICTGITSSNSPHVVKTATQGEVNVTGVIPLTTTPTKSYFANLKGTRTRGKLCPDCLNCTDLDVALGRPMCVGTTPSAKASILHEVRPVTSGCFPIMHDRTKIRQLPNLLRGYENIRLSTQNVIDAEKAPGGPYRLGTSGSCPNATSKSGFFATMAWAVPKDNNKNATNPLTVEVPYICTEGEDQITVWGFHSDNKTPMKNLYGDSNPQKFTSSANGVTTHYVSQIGGFPDQTEDGGLPQSGRIVVDYMMQKPGKTGTIVYQRGVLLPQKVWCASGRSKVIKGSLPLIGEADCLHEKYGGLNKSKPYYTGEHAKAIGNCPIWVKTPLKLANGTKYRPPAKLLKERGFFGAIAGFLEGGWEGMIAGWHGYTSHGAHGVAVAADLKSTQEAINKITKNLNSLSELEVKNLQRLSGAMDELHNEILELDEKVDDLRADTISSQIELAVLLSNEGIINSEDEHLLALERKLKKMLGPSAVDIGNGCFETKHKCNQTCLDRIAAGTFNAGEFSLPTFDSLNITAASLNDDGLDNHTILLYYSTAASSLAVTLMLAIFIVYMVSRDNVSCSICL

SEQ ID NO: 26733 - protein, 584 aa, Artificial Sequence
  derived and/or modified protein sequence (wt) from hemagglutinin__InfluenzaB__AFH57876
MKAIIVLLMVVTSNADRICTGITSSNSPHVVKTATQGEVNVTGVIPLTTTPTKSYFANLKGTRTRGKLCPDCLNCTDLDVALGRPMCVGTTPSAKASILHEVRPVTSGCFPIMHDRTKIRQLPNLLRGYENIRLSTQNVIDAEKAPGGPYRLGTSGSCPNATSKSGFFATMAWAVPKDNNKNATNPLTVEVPYICTEGEDQITVWGFHSDNKNQMKNLYGDSNPQKFTSSANGVTTHYVSQIGSFPDQTEDGGLPQSGRIVVDYMMQKPGKTGTIVYQRGILLPQKVWCASGRSKVIKGSLPLIGEADCLHEKYGGLNKSKPYYTGEHAKAIGNCPIWVKTPLKLANGTKYRPPAKLLKERGFFGAIAGFLEGGWEGMIAGWHGYTSHGAHGVAVAADLKSTQEAINKITKNLNSLSELEVKNLQRLSGAMDELHNEILELDEKVDDLRADTISSQIELAVLLSNEGIINSEDEHLLALERKLKKMLGPSAVEIGNGCFETKHKCNQTCLDRIAAGTFNAGEFSLPTFDSLNITAASLNDDGLDNHTILLYYSTAASSLAVTLMLAIFIVYMVSRDNVSCSICL

SEQ ID NO: 26734 - protein, 584 aa, Artificial Sequence
  derived and/or modified protein sequence (wt) from hemagglutinin__InfluenzaB__AFH57942
MKAIIVLLMVVTSNADRICTGITSSNSPHVVKTATQGEVNVTGVIPLTTTPTKSYFANLKGTRTRGKLCPDCLNCTDLDVALGRPMCVGTTPSAKASILHEVRPVTSGCFPIMHDRTKIRQLPNLLRGYENIRLSTQNVIDAEKAPGGPYRLGTSGSCPNATSKIGFFATMAWAVPKDNYKNATNPLTVEVPYICTEGEDQITVWGFHSDNKNQMKSLYGDSNPQKFTSSANGVTTHYVSQIGDFPDQTEDGGLPQSGRIVVDYMMQKPGKTGTIVYQRGVLLPQKVWCASGRSKVIKGSLPLIGEADCLHEKYGGLNKSKPYYTGEHAKAIGNCPIWVKTPLKLANGTKYRPPAKLLKERGFFGAIAGFLEGGWEGMIAGWHGYTSHGAHGVAVAADLKSTQEAINKITKNLNSLSELEVKNLQRLSGAMDELHNEILELDEKVDDLRADTISSQIELAVLLSNEGIINSEDEHLLALERKLKKMLGPSAVDIGNGCFETKHKCNQTCLDRIAAGTFNAGEFSLPTFDSLNITAASLNDDGLDNHTILLYYSTAASSLAVTLMLAIFIVYMVSRDNVSCSICL

SEQ ID NO: 26735 - protein, 583 aa, Artificial Sequence
  derived and/or modified protein sequence (wt) from hemagglutinin__InfluenzaB__AFH57986
MKAIIVLLMVVTSNADRICTGITSSNSPHVVKTATQGEVNVTGVIPLTTTPTKSHFANLKGTKTRGKLCPNCLNCTDLDVALGRPMCVGTTPSAKASILHEVRPVTSGCFPIMHDRTKIRQLPNLLRGYENIRLSTQNVINAERAPGGPYRLGTSGSCPNVTSRDGFFATMAWAVPRDNKTATNPLTVEVPYICTKGEDQITVWGFHSDDKTQMKNLYGDSNPQKFTSSANGVTTHYVSQIGGFPNQTEDGGLPQSGRIVVDYMVQKPGKTGTIVYQRGVLLPQKVWCASGRSKVIKGSLPLIGEADCLHEKYGGLNKSKPYYTGEHAKAIGNCPIWVKTPLKLANGTKYRPPAKLLKERGFFGAIAGFLEGGWEGMIAGWHGYTSHGAHGVAVAADLKSTQEAINKITKNLNSLSELEVKNLQRLSGAMDELHNEILELDEKVDDLRADTISSQIELAVLLSNEGIINSEDEHLLALERKLKKMLGPSAVDIGNGCFETKHKCNQTCLDRIAAGTFNAGEFSLPTFDSLNITAASLNDDGLDNHTILLYYSTAASSLAVTLMIAIFIVYMVSRDNVSCSICL

SEQ ID NO: 26736 - protein, 585 aa, Artificial Sequence
  derived and/or modified protein sequence (wt) from hemagglutinin__InfluenzaB__AFH58249
MKAIIVLLMVVTSNADRICTGITSSNSPHVVKTATQGEVNVTGVIPLTTTPTKSHFANLKGTKTRGKLCPKCLNCTDLDVALGRPKCTGNIPPAKVSILHEVRPVTSGCFPIMHDRTKIRQLPNLLRGYERIRLSNHNVINAEEAPGGPYKIGTSGSCPNVTNGNGFFATMAWAVPKNENNKTATNSLTIEVPYICTEGEDQITVWGFHSDSETQMAKLYGDSKPQKFTSSANGVTTHYVSQIGGFPNQTEDGGLPQSGRIVVDYMVQKSGKTGTITYQRGILLPQKVWCASGRSKVIKGSLPLIGEADCLHEKYGGLNKSKPYYTGEHAKAIGNCPIWVKTPLKLANGTKYRPPATLLKERGFFGAIAGFLEGGWEGMIAGWHGYTSHGAHGVAVAADLKSTQEAINKITKNLNSLSELEVKNLQRLSGAMDELHNEILELDEKVDDLRADTISSQIELAVLLSNEGIINSEDEHLLALERKLKKMLGPSAVEIGNGCFETKHKCNQTCLDRIAAGTFNAGEFSLPTFDSLNITAASLNDDGLDNHTILLYYSTAASSLAVTLMIAIFVVYMVSRDNVSCSICL

SEQ ID NO: 26737 - protein, 585 aa, Artificial Sequence
  derived and/or modified protein sequence (wt) from hemagglutinin__InfluenzaB__AFH58260
MKAIIVLLMVVTSNADRICTGITSSNSPHVVKTATQGEVNVTGVIPLTTTPTKSHFANLKGTKTRGKLCPKCLNCTDLDVALGRPKCTGNIPSAEVSILHEVRPVTSGCFPIMHDRTKIRQLPNLLRGYEHIRLSTHNVINAEKAPGGPYKIGTSGSCPNVTNGNGFFATMAWAVPKNDNNKTATNSLTIEVPYICTEGEDQITVWGFHSDNEIQMAKLYGDSKPQKFTSSSNGVTTHYVSQIGGFPNQTEDGGLPQSGRIVVDYMVQKSGKTGTITYQRGILLPQKVWCASGRSKVIKGSLPLIGEADCLHERYGGLNKSKPYYTGEHAKAIGNCPIWVKTPLKLANGTKYRPPAKLLKERGFFGAIAGFLEGGWEGMIAGWHGYTSHGAHGVAVAADLKSTQEAINKITKNLNSLSELEVKNLQRLSGAMDELHNEILELDEKVDDLRADTISSQIELAVLLSNEGIINSEDEHLLALERKLKKMLGPSAVEIGNGCFETKHKCNQTCLDRIAAGTFDAGEFSLPTFDSLNITAASLNDDGLDNHTILLYYSTAASSLAVTLMIAIFVVYMVSRDNVSCSICL

SEQ ID NO: 26738 - protein, 584 aa, Artificial Sequence
  derived and/or modified protein sequence (wt) from hemagglutinin__InfluenzaB__AFH58271
MKAIIVLLMVVTSNADRICTGITSSNSPHVVKTATQGEVNVTGVIPLTTTPTKSYFANLKGTRTRGKLCPDCLNCTDLDVALGRPMCVGTTPSAKASILHEVKPVTSGCFPIMHDRTKIRQLPNLLRGYENIRLSTQNVIDAEKAPGGPYRLGTSGSCPNATSKSGFFATMAWAVPKDNNKNATNPLTVEVPYICTEGEDQITVWGFHSDDKTQMKNLYGDSNPQKFTSSANGVTTHYVSQIGSFPDQTEDGGLPQSGRIVVDYMMQKPGKTGTIVYQRGVLLPQKVWCASGRSKVIKGSLPLIGEADCLHEKYGGLNKSKPYYTGEHAKAIGNCPIWVKTPLKLANGTKYRPPAKLLKERGFFGAIAGFLEGGWEGMIAGWHGYTSHGAHGVAVAADLKSTQEAINKITKNLNSLSELEVKNLQRLSGAMDELHNEILELDEKVDDLRADTISSQIELAVLLSNEGIINSEDEHLLALERKLKKMLGPSAVEIGNGCFETKHKCNQTCLDRIAAGTFNAGEFSLPTFDSLNITAASLNDDGLDNHTILLYYSTAASSLAVTLMLAIFIVYMVSRDNVSCSICL

SEQ ID NO: 26739 - protein, 584 aa, Artificial Sequence; identical to SEQ ID NO: 26738
  derived and/or modified protein sequence (wt) from hemagglutinin__InfluenzaB__AFH58282

SEQ ID NO: 26740 - protein, 585 aa, Artificial Sequence
  derived and/or modified protein sequence (wt) from hemagglutinin__InfluenzaB__AFH58293
MKAIIVLLMVVTSNADRICTGITSSNSPHVVKTATQGEVNVTGVIPLTTTPTKSHFANLKGTETRGKLCPKCLNCTDLDVALGRPKCTGKIPSARVSILHEVRPVTSGCFPIMHDRTKIRQLPNLLRGYEHIRLSTHNVINAENAPGGPYKIGTSGSCPNITNGNGFFATMAWAVPKNDKNKTATNPLTIEVPYICTEGEDQITVWGFHSDDETQMAKLYGDSKPQKFTSSANGVTTHYVSQIGGFPNQTEDGGLPQSGRIVVDYMVQKSGKTGTITYQRGILLPQKVWCASGRSKVIKGSLPLIGEADCLHEKYGGLNKSKPYYTGEHAKAIGNCPIWVKTPLKLANGTKYRPPAKLLKERGFFGAIAGFLEGGWEGMIAGWHGYTSHGAHGVAVAADLKSTQEAINKITKNLNSLSELEVKNLQRLSGAMDELHNEILELDEKVDDLRADTISSQIELAVLLSNEGIINSEDEHLLALERKLKKMLGPSAVEIGNGCFETKHKCNQTCLDRIAAGTFDAGEFSLPTFDSLNITAASLNDDGLDNHTILLYYSTAASSLAVTLMIAIFVVYMVSRDNVSCSICL

SEQ ID NO: 26741 - protein, 584 aa, Artificial Sequence
  derived and/or modified protein sequence (wt) from hemagglutinin__InfluenzaB__AFH58304
MKAIIVLLMVVTSNADRICTGITSSNSPHVVKTATQGEVNVTGVIPLTTTPTKSYFANLKGTRTRGKLCPDCLNCTDLDVALGRPMCVGTTPSAKASILHEVRPVTSGCFPIMHDRTKIRQLPNLLRGYENIRLSTQNVIDAEKAPGGPYRLGTSGSCPNATSKIGFFATMAWAVPKDNYKNATNPLTVEVPYICTEGEDQITVWGFHSDDKTQMKNLYGDSNPQKFTSSANGVTTHYVSQIGDFPDQTEDGGLPQSGRIVVDYMMQKPGKTGTIVYQRGVLLPQKVWCASGRSKVIKGSLPLIGEADCLHEKYGGLNKSKPYYTGEHAKAIGNCPIWVKTPLKLANGTKYRPPAKLLKERGFFGAIAGFLEGGWEGMIAGWHGYTSHGAHGVAVAADLKSTQEAINKITKNLNSLSELEVKNLQRLSGAMDELHNEILELDEKVDDLRADTISSQIELAVLLSNEGIINSEDEHLLALERKLKKMLGPSAVDIGNGCFETKHKCNQTCLDRIAAGTFNAGEFSLPTFDSLNITAASLNDDGLDNHTILLYYSTAASSLAVTLMLAIFIVYMVSRDNVSCSICL

SEQ ID NO: 26742 - protein, 584 aa, Artificial Sequence; identical to SEQ ID NO: 26741
  derived and/or modified protein sequence (wt) from hemagglutinin__InfluenzaB__AFH58315

SEQ ID NO: 26743 - protein, 584 aa, Artificial Sequence
  derived and/or modified protein sequence (wt) from hemagglutinin__InfluenzaB__AFH58326
MKAIIVLLMVVTSNADRICTGITSSNSPHVVKTATQGEVNVTGVIPLTTTPTKSYFANLKGTRTRGKLCPDCLNCTDLDVALGRPMCVGTTPSAKASILHEVRPVTSGCFPIMHDRTKIRQLPNLLRGYENIRLSTQNVIDAEKAPGGPYRLGTSGSCPNATSKIGFFATMAWAVPKDNYKNATNPLTVEVPYICTEGEDQITVWGFHSDNKAQMKNLYGDSNPQKFTSSANGVTTHYVSQIGDFPDQTEDGGPPQSGRIVVDYMMQKPGKTGTIVYQRGVLLPQKVWCASGRSKVIKGSLPLIGEADCLHEKYGGLNKSKPYYTGEHAKAIGNCPIWVKTPLKLANGTKYRPPAKLLKERGFFGAIAGFLEGGWEGMIAGWHGYTSHGAHGVAVAADLKSTQEAINKITKNLNSLSELEVKNLQRLSGAMDELHNEILELDEKVDDLRADTISSQIELAVLLSNEGIINSEDEHLLALERKLKKMLGPSAVDIGNGCFETKHKCNQTCLDRIAAGTFNAGEFSLPTFDSLNITAASLNDDGLDNHTILLYYSTAASSLAVTLMLAIFIVYMVSRDNVSCSICL

SEQ ID NO: 26744 - protein, 584 aa, Artificial Sequence
  derived and/or modified protein sequence (wt) from hemagglutinin__InfluenzaB__AFH58337
MKAIIVLLMVVTSNADRICTGITSSNSPHVVKTATQGEVNVTGVIPLTTTPTKSYFANLKGTRTRGKLCPDCLNCTDLDVALGRPMCVGTTPSAKASILHEVRPVTSGCFPIMHDRTKIRQLPNLLRGYENIRLSTQNVIDAEKAPGGPYRLGTSGSCPNATSKIGFFATMAWAVPKDNYKNATNPLTVEVPYICTEGEDQITVWGFHSDNKAQMKNLYGDSNPQKFTSSANGVTTHYVSQIGDFPDQTEDGGLPQSGRIVVDYMMQKPGKTGTIVYQRGVLLPQKVWCASGRSKVIKGSLPLIGEADCLHEKYGGLNKSKPYYTGEHAKAIGNCPIWVKTPLKLANGTKYRPPAKLLKERGFFGAIAGFLEGGWEGMIAGWHGYTSHGAHGVAVAADLKSTQEAINKITKNLNSLSELEVKNLQRLSGAMDELHNEILELDEKVDDLRADTISSQIELAVLLSNEGIINSEDEHLLALERKLKKMLGPSAVDIGNGCFETKHKCNQTCLDRIAAGTFNAGEFSLPTFDSLNITAASLNDDGLDNHTILLYYSTAASSLAVTLMLAIFIVYMVSRDNVSCSICL

SEQ ID NO: 26745 - protein, 585 aa, Artificial Sequence
  derived and/or modified protein sequence (wt) from hemagglutinin__InfluenzaB__AFH58348
MKAIIVLLMVVTSNADRICTGITSSNSPHVVKTATQGEVNVTGVIPLTTTPTKSHFANLKGTETRGKLCPKCLNCTDLDVALGRPKCTGNIPSARVSILHEVRPVTSGCFPIMHDRTKIRQLPNLLRGYEHIRLSAHNVINAENAPGGPYKIGTSGSCPNVTNGNGFFATMAWAVPKNDNNKTATNSLTIEVPYICTEGEDQITVWGFHSDKETQMAKLYGDSKPQKFTSSANGVTTHYVSQIGGFPNQTEDGGLPQSGRIVVDYMVQKSGKTGTITYQRGILLPQKVWCASGRSKVIKGSLPLIGEADCLHEKYGGLNKSKPYYTGEHAKAIGNCPIWVKTPLKLANGTKYRPPAKLLKERGFFGAIAGFLEGGWEGMIAGWHGYTSHGAHGVAVAADLKSTQEAINKITKNLNSLSELEVKNLQRLSGAMDELHNEILELDEKVDDLRADTISSQIELAVLLSNEGIINSEDEHLLALERKLKKMLGPSAVEIGNGCFETKHKCNQTCLDRIAAGTFNAGEFSLPTFDSLNITAASLNDDGLDNHTILLYYSTAASSLAVTLMIAIFVVYMVSRDNVSCSICL

SEQ ID NO: 26746 - protein, 585 aa, Artificial Sequence
  derived and/or modified protein sequence (wt) from hemagglutinin__InfluenzaB__AFH58370
MKAIIVLLMVVTSNADRICTGITSSNSPHVVKTATQGEVNVTGVIPLTTTPTKSHFANLKGTETRGKLCPKCLNCTDLDVALGRPKCTGNIPSARVSILHEVRPVTSGCFPIMHDRTKIRQLPNLLRGYEHIRLSAHNVINAENAPGGPYKIGTSGSCPNVTNGNGFFATMAWAVPKNDNNKTATNSLTIEVPYICTEGEDQITVWGFHSDNEIQMAKLYGDSKPQKFTSSANGVTTHYVSQIGGFPNQTEDGGLPQSGRIVVDYMVQKSGKTGTITYQRGILLPQKVWCASGRSKVIKGSLPLIGEADCLHEKYGGLNKSKPYYTGEHAKAIGNCPIWVKTPLKLANGTKYRPPAKLLKERGFFGAIAGFLEGGWEGMIAGWHGYTSHGAHGVAVAADLKSTQEAINKITKNLNSLSELEVKNLQRLSGAMDELHNEILELDEKVDDLRADTISSQIELAVLLSNEGIINSEDEHLLALERKLKKMLGPSAVEIGNGCFETKHKCNQTCLDRIAAGTFNAGEFSLPTFDSLNITAASLNDDGLDNHTILLYYSTAASSLAVTLMIAIFVVYMVSRDNVSCSICL

SEQ ID NO: 26747 - protein, 585 aa, Artificial Sequence
  derived and/or modified protein sequence (wt) from hemagglutinin__InfluenzaB__AFH58392
MKAIIVLLMVVTSNADRICTGITSSNSPHVVKTATQGEVNVTGVIPLTTTPTKSHFANLKGTETRGKLCPKCLNCTDLDVALGRPKCTGKIPSARVSILHEVRPVTSGCFPIMHDRTKIRQLPNLLRGYEHIRLSTHNVINAENAPGGPYKIGTSGSCPNITNGNGFFATMAWAVPKNDKNKTATNPLTIEVPYICTEGEDQITVWGFHSDNEIQMAKLYGDSKPQKFTSSANGVTTHYVSQIGGFPNQTEDGGLPQSGRIVVDYMVQKSGKTGTITYQRGILLPQKVWCASGRSKVIKGSLPLIGEADCLHEKYGGLNKSKPYYTGEHAKAIGNCPIWVKTPLKLANGTKYRPPAKLLKERGFFGAIAGFLEGGWEGMIAGWHGYTSHGAHGVAVAADLKSTQEAINKITKNLNSLSELEVKNLQRLSGAMDELHNEILELDEKVDDLRADTISSQIELAVLLSNEGIINSEDEHLLALERKLKKMLGPSAVEIGNGCFETKHKCNQTCLDRIAAGTFDAGEFSLPTFDSLNITAASLNDDGLDNHTILLYYSTAASSLAVTLMIAIFVVYMVSRDNVSCSICL

SEQ ID NO: 26748 - protein, 585 aa, Artificial Sequence; identical to SEQ ID NO: 26740
  derived and/or modified protein sequence (wt) from hemagglutinin__InfluenzaB__AFH58403

SEQ ID NO: 26749 - protein, 585 aa, Artificial Sequence; identical to SEQ ID NO: 26740
  derived and/or modified protein sequence (wt) from hemagglutinin__InfluenzaB__AFH58414

SEQ ID NO: 26750 - protein, 585 aa, Artificial Sequence; identical to SEQ ID NO: 26740
  derived and/or modified protein sequence (wt) from hemagglutinin__InfluenzaB__AFH58425

SEQ ID NO: 26751 - protein, 585 aa, Artificial Sequence; identical to SEQ ID NO: 26740
  derived and/or modified protein sequence (wt) from hemagglutinin__InfluenzaB__AFH58436

SEQ ID NO: 26752 - protein, 585 aa, Artificial Sequence
  derived and/or modified protein sequence (wt) from hemagglutinin__InfluenzaB__AFH58458
MKAIIVLLMVVTSNADRICTGITSSNSPHVVKTATQGEVNVTGVIPLTTTPTKSHFANLKGTETRGKLCPKCLNCTDLDVALGRPKCTGKIPSARVSILHEVRPVTSGCFPIMHDRTKIRQLPNLLRGYEHIRLSTNNVINAENAPGGPYKIGTSGSCPNVTNGNGFFATMAWAVPKNDKNKTATNPLTIEVPYICTEGEDQITVWGFHSDNEIQMAKLYGDSRPQKFTSSANGVTTHYVSQIGGFPNQTEDGGLPQSGRIVVDYMVQKSGKTGTITYQRGILLPQKVWCASGRSKVIKGSLPLIGEADCLHEKYGGLNKSKPYYTGEHAKAIGNCPIWVKTPLKLANGTKYRPPAKLLKERGFFGAIAGFLEGGWEGMIAGWHGYTSHGAHGVAVAADLKSTQEAINKITKNLNSLSELEVKNLQRLSGAMDELHNEILELDEKVDDLRADTISSQIELAVLLSNEGIINSEDEHLLALERKLKKMLGPSAVEIGNGCFETKHKCNQTCLDRIAAGTFDAGEFSLPTFDSLNITAASLNDDGLDNHTILLYYSTAASSLAVTLMIAIFVVYMVSRDNVSCSICL

SEQ ID NO: 26753 - protein, 585 aa, Artificial Sequence; identical to SEQ ID NO: 26752
  derived and/or modified protein sequence (wt) from hemagglutinin__InfluenzaB__AFH58469

SEQ ID NO: 26754 - protein, 584 aa, Artificial Sequence; identical to SEQ ID NO: 26734
  derived and/or modified protein sequence (wt) from hemagglutinin__InfluenzaB__AFH58480

SEQ ID NO: 26755 - protein, 584 aa, Artificial Sequence
  derived and/or modified protein sequence (wt) from hemagglutinin__InfluenzaB__AFH58502
MKAIIVLLMVVTSNADRICTGITSSNSPHVVKTATQGEVNVTGVIPLTTTPTKSYFANLKGTRTRGKLCPDCLNCTDLDVALGRPMCVGTTPSAKASILHEVRPVTSGCFPIMHDRTKIRQLPNLLRGYENIRLSTQNVIDAEKAPGGPYRLGTSGSCPNATSKIGFFATMAWAVPKDNYKNATNPLTVEVPYICTEGEDQITVWGFHSDDKTQMKSLYGDSNPQKFTSSANGVTTHYVSQIGDFPDQTEDGGLPQSGRIVVDYMMQKPGKTGTIVYQRGVLLPQKVWCASGRSKVIKGSLPLIGEADCLHEKYGGLNKSKPYYTGEHAKAIGNCPIWVKTPLKLANGTKYRPPAKLLKERGFFGAIAGFLEGGWEGMIAGWHGYTSHGAHGVAVAADLKSTQEAINKITKNLNSLSELEVKNLQRLSGAMDELHNEILELDEKVDDLRADTISSQIELAVLLSNEGIINSEDEHLLALERKLKKMLGPSAVDIGNGCFETKHKCNQTCLDRIAAGTFNAGEFSLPTFDSLNITAASLNDDGLDNHTILLYYSTAASSLAVTLMLAIFIVYMVSRDNVSCSICL

SEQ ID NO: 26756 - protein, 585 aa, Artificial Sequence
  derived and/or modified protein sequence (wt) from hemagglutinin__InfluenzaB__AFH58513
MKAIIVLLMVVTSNADRICTGITSSNSPHVVKTATQGEVNVTGVIPLTTTPTKSHFANLKGTETRGKLCPKCPNCTDLDVALGRPKCTGKIPSARVSILHEVRPVTSGCFPIMHDRTKIRQLPNLLRGYEHIRLSTHNVINAENAPGGPYKIGTSGSCPNVTNGNGFFATMAWAVPKNDKNKTATNPLTIEVPYICTEGEDQITVWGFHSDDETQMAKLYGDSKPQKFTSSANGVTTHYVSQIGGFPNQTEDGGLPQSGRIVVDYMVQKSGKTGTITYQRGILLPQKVWCASGRSKVIKGSLPLIGEADCLHEKYGGLNKSKPYYTGEHAKAIGNCPIWVKTPLKLANGTKYRPPAKLLKERGFFGAIAGFLEGGWEGMIAGWHGYTSHGAHGVAVAADLKSTQEAINKITKNLNSLSELEVKNLQRLSGAMDELHNEILELDEKVDDLRADTISSQIELAVLLSNEGIINSEDEHLLALERKLKKMLGPSAVEIGNGCFETKHKCNQTCLDRIAAGTFDAGEFSLPTFDSLNITAASLNDDGLDNHTILLYYSTAASSLAVTLMIAIFVVYMVSRDNVSCSICL

SEQ ID NO: 26757 - protein, 585 aa, Artificial Sequence; identical to SEQ ID NO: 26756
  derived and/or modified protein sequence (wt) from hemagglutinin__InfluenzaB__AFH58524

SEQ ID NO: 26758 - protein, 584 aa, Artificial Sequence
  derived and/or modified protein sequence (wt) from hemagglutinin__InfluenzaB__AFH58535
MKAIIVLLMVVTSNADRICTGITSSNSPHVVKTATQGEVNVTGVIPLTTTPTKSHFANLKGTQTRGKLCPNCFNCTDLDVALGRPKCMGNTPSAKVSILHEVKPATSGCFPIMHDRTKIRQLPNLLRGYENIRLSTSNVINTETAPGGPYKVGTSGSCPNVANGNGFFNTMAWVIPKDNNKTAINPVTVEVPYICSEGEDQITVWGFHSDDKTQMERLYGDSNPQKFTSSANGVTTHYVSQIGGFPNQTEDEGLKQSGRIVVDYMVQKPGKTGTIVYQRGILLPQKVWCASGRSKVIKGSLPLIGEADCLHEKYGGLNKSKPYYTGEHAKAIGNCPIWVKTPLKLANGTKYRPPAKLLKERGFFGAIAGFLEGGWEGMIAGWHGYTSHGAHGVAVAADLKSTQEAINKITKNLNYLSELEVKNLQRLSGAMNELHDEILELDEKVDDLRADTISSQIELAVLLSNEGIINSEDEHLLALERKLKKMLGPSAVEIGNGCFETKHKCNQTCLDRIAAGTFNAGDFSLPTFDSLNITAASLNDDGLDNHTILLYYSTAASSLAVTLMIAIFIVYMVSRDNVSCSICL

SEQ ID NO: 26759 - protein, 583 aa, Artificial Sequence
  derived and/or modified protein sequence (wt) from hemagglutinin__InfluenzaB__AFH58557
MKAIIVLLMVVTSNADRICTGITSSNSPHVVKTATQGEVNVTGVIPLTTTPTKSHFANLKGTKTRGKLCPNCLNCTDLDVALGRPMCVGTTPSAKASILHEVRPVTSGCFPIMHDRTKIRQLPNLLRGYENIRLSTQNVINAERAPGGPYRLGTSGSCPNVTSRDGFFATMAWAVPRDNKTATNPLTVEVPYICTKGEDQITVWGFHSDDKTQMKNLYGDSNPQKFTSSANGVTTHYVSQIGGFPNQTEDGGLPQSGRIVVDYMVQKPGKTGTIVYQRGVLLPQKVWCASGRSKVIKGSLPLIGEADCLHEKYGGLNKSKPYYTGEHAKAIGNCPIWVKTPLKLANGTKYRPPAKLLKERGFFGAIAGFLEGGWEGMIAGWHGYTSHGAHGVAVAADLKSTQEAINKITKNLNSLSELEVKNLQRLSGAMDELHNEILELDEKVDDLRADTISSQIELAVLLSNEGIINSEDEHLLALERKLKKMLGPSAVDIGNGCFETKHKCNQTCLDRIAAGTFNAGEFSFPTFDSLNITAASLNDDGLDNHTILLYYSTAASSLAVTLMIAIFIVYMVSRDNVSCSICL

SEQ ID NO: 26760 - protein, 584 aa, Artificial Sequence
  derived and/or modified protein sequence (wt) from hemagglutinin__InfluenzaB__AFJ76224
MKAIIVLLMVVTSNADRICTGITSSNSPHVVKTATQGEVNVTGVIPLTTTPTKSHFANLKGTKTRGKLCPTCLNCTDLDVALGSPMCVGITPSAKASILHEVRPVTSGCFPIMHDRTKIRQLPNLLRGYEKIRLSTQNVINIEKAPGGPYRLGTSGSCPNATSRSGFFATMAWAVPRDNNKTATNPLTVEVPHICTKEEDQITVWGFHSDNKTQMKNLYGDSNPQKFTSSANGVTTHYVSQIGGFPDQTEDGGLPQSGRIVVDYMVQKPGKTGTIVYQRGILLPQKVWCASGRSKVIKGSLPLIGEADCLHEKYGGLNKSKPYYTGEHAKAIGNCPIWVKTPLKLANGTKYRPPAKLLKERGFFGAIAGFLEGGWEGMIAGWHGYTSHGAHGVAVAADLKSTQEAINKITKNLNSLSELEVKNLQRLSGAMDELHNEILELDEKVDDLRADTISSQIELAVLLSNEGIINSEDEHLLALERKLKKMLGPSAVDIGNGCFETKHKCNQTCLDRIAAGTFNAGEFSLPTFDSLNITAASLNDDGLDNHTILLYYSTAASSLAVTLMIAIFIVYMISRDNVSCSICL

SEQ ID NO: 26761 - protein, 584 aa, Artificial Sequence
  derived and/or modified protein sequence (wt) from hemagglutinin__InfluenzaB__AFJ76235
MKAIIVLLMVVTSNADRICTGITSSNSPHVVKTATQGEVNVTGVIPLTTTPTKSHFANLKGTKTRGKLCPTCLNCTDLDVALGSPMCVGITPSAKASILHEVRPVTSRCFPIMHDRTKIRQLPNLLRGYEKIRLSTQNVINIEKAPGGPYRLGTSGSCPNATSRSGFFATMAWAVPRDNNKTATNPLTVEVPHICTKEEDQITVWGFHSDNKTQMKNLYGDSNPQKFTSSANGVTTHYVSQIGGFPDQTEDGGLPQSGRIVVDYMVQKPGKTGTIVYQRGILLPQKVWCASGRSKVIKGSLPLIGEADCLHEKYGGLNKSKPYYTGEHAKAIGNCPIWVKTPLKLANGTKYRPPAKLLKERGFFGAIAGFLEGGWEGMIAGWHGYTSHGAHGVAVAADLKSTQEAINKITKNLNSLSELEVKNLQRLSGAMDELHNEILELDEKVDDLRADTISSQIELAVLLSNEGIINSEDEHLLALERKLKKMLGPSAVDIGNGCFETKHKCNQTCLDRIAAGTFNAGEFSLPTFDSLNITAASLNDDGLDNHTILLYYSTAASSLAVTLMIAIFIVYMISRDNVSCSICL

SEQ ID NO: 26762 - protein, 584 aa, Artificial Sequence; identical to SEQ ID NO: 26760
  derived and/or modified protein sequence (wt) from hemagglutinin__InfluenzaB__AFJ76246

SEQ ID NO: 26763 - protein, 585 aa, Artificial Sequence; identical to SEQ ID NO: 26514
  derived and/or modified protein sequence (wt) from hemagglutinin__InfluenzaB__AFJ76268

SEQ ID NO: 26764 - protein, 585 aa, Artificial Sequence; identical to SEQ ID NO: 26565
  derived and/or modified protein sequence (wt) from hemagglutinin__InfluenzaB__AFJ76301

SEQ ID NO: 26765 - protein, 584 aa, Artificial Sequence; identical to SEQ ID NO: 26426
  derived and/or modified protein sequence (wt) from hemagglutinin__InfluenzaB__AFJ76323

SEQ ID NO: 26766 - protein, 585 aa, Artificial Sequence
  derived and/or modified protein sequence (wt) from hemagglutinin__InfluenzaB__AFJ76334
MKAIIVLLMVVTSNADRICTGITSSNSPHVVKTATQGEVNVTGVIPLTTTPTKSHFANLKGTETRGKLCPKCLNCTDLDVALGRPKCTGNIPSARVSILHEVRPVTSGCFPIMHDRTKIRQLPNLLRGYEHIRLSTHNVINAENAPGGPYKIGTSGSCPNVTNGNGFFATMAWAVPKNDNNKTATNSLTIEVPYICTEGEDQITVWGFHSDSETQMAKLYGDSKPQKFTSSANGVTTHYVSQIGGFPNQTEDGGLPQSGRIVVDYMVQKSGKTGTITYQRGILLPQKVWCASGRSKVIKGSLPLIGEADCLHEKYGGLNKSKPYYTGEHAKAIGNCPIWVKTPLKLANGTKYRPPAKLLKERGFFGAIAGFLEGGWKGMIAGWHGYTSHGAHGVAVAADLKSTQEAINKITKNLNSLSELEVKNLQRLSGAMDELHNEILELDEKVDDLRADTISSQIELAVLLSNEGIINSEDEHLLALERKLKKMLGPSAVEIGNGCFETKHKCNQTCLDRIAAGTFDAGEFSLPTFDSLNITAASLNDDGLDNHTILLYYSTAASSLAVTLMIAVFVVYMVSRDNVSCSICL

SEQ ID NO: 26767 - protein, 585 aa, Artificial Sequence; identical to SEQ ID NO: 26514
  derived and/or modified protein sequence (wt) from hemagglutinin__InfluenzaB__AFJ77327

SEQ ID NO: 26768 - protein, 584 aa, Artificial Sequence; identical to SEQ ID NO: 26426
  derived and/or modified protein sequence (wt) from hemagglutinin__InfluenzaB__AFJ77369

SEQ ID NO: 26769 - protein, 584 aa, Artificial Sequence; identical to SEQ ID NO: 26426
  derived and/or modified protein sequence (wt) from hemagglutinin__InfluenzaB__AFJ77380

SEQ ID NO: 26770 - protein, 584 aa, Artificial Sequence
  derived and/or modified protein sequence (wt) from hemagglutinin__InfluenzaB__AFJ80139
MKAIIVLLMVVTSNADRICTGITSSNSPHVVKTATQGEVNVTGVIPLTTTPTKSHFANLKGTKTRGKLCPTCLNCTDLDVALGRPMCVGITPSAKASILHEVRPVTSGCFPIMHDRTKIRQLPNLLRGYEKIRLSTQNVINAEKAPGGPYRLGTSGSCPNATSRSGFFATMAWAVPRDNNKTATNPLTVEVPYICTKEEDQITVWGFHSDNKTQMKNLYGDSNPQKFTSSANGVTTHYVSQIGGFPDQTEDGGLPQSGRIVVDYMVQKPGKTGTIVYQRGILLPQKVWCASGRSKVIKGFLPLIGEADCLHEKYGGLNKSKPYYTGEHAKAIGNCPIWVKTPLKLANGTKYRPPAKLLKERGFFGAIAGFLEGGWEGMIAGWHGYTSHGAHGVAVAADLKSTQEAINKITKNLNSLSELEVKNLQRLSGAMDELHNEILELDEKVDDLRADTISSQIELAVLLSNEGIINSEDEHLLALERKLKKMLGPSAVDIGNGCFETKHKCNQTCLDRIAAGTFNAGEFSLPTFDSLNITAASLNDDGLDNHTILLYYSTAASSLAVTLMIAIFIVYMISRDNVSCSICL

SEQ ID NO: 26771 - protein, 584 aa, Artificial Sequence
  derived and/or modified protein sequence (wt) from hemagglutinin__InfluenzaB__AFJ80150
MKAIIVLLMVVTSNADRICTGITSSNSPHVVKTATQGEVNVTGVIPLTTTPTKSHFANLKGTKTRGKLCPTCLNCTDLDVALGRPMCVGITPSAKASILHEVRPVTSGCFPIMHDRTKIRQLPNLLRGYEKIRLSTQNVINAEKAPGGPYRLGTSGSCPNATSRSGFFATMAWAVPRDNNKTATNPLTVEVPYICTKEEDQITVWGFHSDNKTQMKNLYGDSNPQKFTSSANGVTTHYVSQIGGFPDQTEDGGLPQSGRIVVDYMVQKPGKTGTIVYQRGILLPQKVWCASGRSKVIKGSLPLIGEADCLHEKYGGLNKSKPYYTGEHAKAIGNCPIWVKTPLKLANGTKYRPPAKLLKERGFFGAIAGFLEGGWEGMIAGWHGYTSHGAHGVAVAADLKSTQEAINKITKNLNSLSELEVKNLQRLSGAMDELHNEILELDEKVDDLRADTISSQIELAVLLSNEGIINSEDEHLLALERKLKKMLGPSAVDIGNGCFETKHKCNQTCLDRIAAGTFNAGEFSLPTFDSLNITAASLNDDGLDNHTILLYYSTAASSLAVTLMIAIFIVYMISRDNVSCSICL

SEQ ID NO: 26772 - protein, 584 aa, Artificial Sequence
  derived and/or modified protein sequence (wt) from hemagglutinin__InfluenzaB__AFJ80161
MKAIIVLLMVVTSNADRICTGITSSNSPHVVKTATQGEVNVTGAIPLTTTPTKSHFANLKGTKTRGKLCPTCLNCTDLDVALGRPMCVGITPSAKASILHEVRPVTSGCFPIMHDRTKIRQLPNLLRGYEKIRLSTQNVINAEKAPGGPYRLGTSGSCPNATSRSGFFATMAWAVPRDNNKTATNPLTVEVPHICTKEEDQITVWGFHSDNKTQMKNLYGDSNPQKFTSSANGITTHYVSQIGGFPDQTEDGGLPQSGRIVVDYMVQKPGKTGTIVYQRGILLPQKVWCASGRSKVIKGSLPLIGEADCLHEKYGGLNKSKPYYTGEHAKAIGNCPIWVKTPLKLANGTKYRPPAKLLKERGFFGAIAGFLEGGWEGMIAGWHGYTSHGAHGVAVAADLKSTQEAINKITKNLNSLSELEVKNLQRLSGAMDELHNEILELDEKVDDLRADTISSQIELAVLLSNEGIINSEDEHLLALERKLKKMLGPSAVDIGNGCFETKHKCNQTCLDRIAAGTFNAGEFSLPTFDSLNITAASLNDDGLDNHTILLYYSTAASSLAVTLMIAIFIVYMIFRDNVSCSICL

SEQ ID NO: 26773 - protein, 584 aa, Artificial Sequence
  derived and/or modified protein sequence (wt) from hemagglutinin__InfluenzaB__AFJ80172
MKAIIVLLMVVTSNADRICTGITSSNSPHVVKTATQGEVNVTGVIPLTTTPTKSHFANLKGTKTRGKLCPTCLNCTDLDVALGRPMCVGITPSAKASILHEVRPVTSGCFPIMHDRTKIRQLPNLLRGYEKIRLSTQNVINAEKAPGGPYRLGTSGSCPNATSRSGFFATMAWAVPRDNNKTATNPLTVEVPYICTKEEDQITVWGFHSDNKTQMKNLYGDSNPQKFTSSANGVTTHYVSQIGDFPDQTEDGGLPQSGRIVVDYMVQKPGKTGTIVYQRGILLPQKVWCASGRSKVIKGSLPLIGEADCLHEKYGGLNKSKPYYTGEHAKAIGNCPIWVKTPLKLANGTKYRPPAKLLKERGFFGAIAGFLEGGWEGMIAGWHGYTSHGAHGVAVAADLKSTQEAINKITKNLNSLSELEVKNLQRLSGAMDELHNEILELDEKVDDLRADTISSQIELAVLLSNEGIINSEDEHLLALERKLKKMLGPSAVDIGNGCFETKHKCNQTCLDRIAAGTFNAGEFSLPTFDSLNITAASLNDDGLDNHTILLYYSTAASSLAVTLMIAIFIVYMISRDNVSCSICL

SEQ ID NO: 26774 - protein, 584 aa, Artificial Sequence; identical to SEQ ID NO: 26760
  derived and/or modified protein sequence (wt) from hemagglutinin__InfluenzaB__AFJ80183

SEQ ID NO: 26775 - protein, 584 aa, Artificial Sequence; identical to SEQ ID NO: 26771
  derived and/or modified protein sequence (wt) from hemagglutinin__InfluenzaB__AFJ80194

SEQ ID NO: 26776 - protein, 584 aa, Artificial Sequence; identical to SEQ ID NO: 26760
  derived and/or modified protein sequence (wt) from hemagglutinin__InfluenzaB__AFJ80205

SEQ ID NO: 26777 - protein, 584 aa, Artificial Sequence; identical to SEQ ID NO: 26405
  derived and/or modified protein sequence (wt) from hemagglutinin__InfluenzaB__AFJ80216

SEQ ID NO: 26778 - protein, 584 aa, Artificial Sequence; identical to SEQ ID NO: 26760
  derived and/or modified protein sequence (wt) from hemagglutinin__InfluenzaB__AFJ80227

SEQ ID NO: 26779 - protein, 585 aa, Artificial Sequence
  derived and/or modified protein sequence (wt) from hemagglutinin__InfluenzaB__AFJ80238
MKAIIVLLMVVTSNADRICTGITSSNSPHVVKTATQGEVNVTGVIPLTTTPTKSHFANLKGTKTRGKLCPKCLNCTDLDVALGRPKCTGNIPSAKVSILHEVRPVTSGCFPIMHDRTKIRQLPNLLRGYEHIRLSIHNVINAEKAPGGPYKIGTSGSCPNVTNGNGFFATMAWAVPKNDNNKTATNSLTIEVPYICTEGEDQITVWGFHSDNETQMAKLYGDSKPQKFTSSANGVTTHYVSQIGGFPNQTEDGGLPQSGRIVVDYMVQKSGKTGTITYQRGILLPQKVWCASGRSKVIKGSLPLIGEADCLHEKYGGLNKSKPYYTGEHAKAIGNCPIWVKTPLKLANGTKYRPPAKLLKERGFFGAIAGFLEGGWEGMIAGWHGYTSHGAHGVAVAADLKSTQEAINKITKNLNSLSELEVKNLQRLSGAMDELHNEILELDEKVDDLRADTISSQIELAVLLSNEGIINSEDEHLLALERKLKKMLGPSAVEIGNGCFETKHKCNQTCLDRIAAGTFDAGEFSLPTFDSLNITAASLNDDGLDNHTILLYYSTAASSLAVTLMIAIFVVYMVSRDNVSCSICL

SEQ ID NO: 26780 - protein, 584 aa, Artificial Sequence
  derived and/or modified protein sequence (wt) from hemagglutinin__InfluenzaB__AFJ80656
MKAIIVLLMVVTSNADRICTGITSSNSPHVVRTATQGEVNVTGVIPLTTTPTKSHFANLKGTKTRGKLCPTCLNCTDLDVALGRPMCVGITPSAKASILHEVRPVTSGCFPIMHDRTKIRQLPNLLRGYEKIRLSTQNVINAEKAPGGPYRLGTSGSCPNATSRSGFFATMAWAVPRDNNKTATNPLTVEVPHICTKEEDQITVWGFHSDNKTQMKNLYGDSNPQKFTSSANGVTTHYVSQIGGFPDQTEDGGLPQSGRIVVDYMVQKPGKTGTIVYQRGILLPQKVWCASGRSKVIKGSLPLIGEADCLHEKYGGLNKSKPYYTGEHAKAIGNCPIWVKTPLKLANGTKYRPPAKLLKERGFFGAIAGFLEGGWEGMIAGWHGYTSHGAHGVAVAADLKSTQEAINKITKNLNSLSELEVKNLQRLSGAMDELHNEILELDEKVDDLRADTISSQIELAVLLSNEGIINSEDEHLLALERKLKKMLGPSAVDIGNGCFETKHKCNQTCLDRIAAGTFNAGEFSLPTFDSLNITAASLNDDGLDNHTILLYYSTAASSLAVTLMIAIFIVYMISRDNVSCSICL

SEQ ID NO: 26781 - protein, 584 aa, Artificial Sequence; identical to SEQ ID NO: 26760
  derived and/or modified protein sequence (wt) from hemagglutinin__InfluenzaB__AFJ80667

SEQ ID NO: 26782 - protein, 584 aa, Artificial Sequence; identical to SEQ ID NO: 26760
  derived and/or modified protein sequence (wt) from hemagglutinin__InfluenzaB__AFJ80678

SEQ ID NO: 26783 - protein, 584 aa, Artificial Sequence; identical to SEQ ID NO: 26760
  derived and/or modified protein sequence (wt) from hemagglutinin__InfluenzaB__AFJ80689

SEQ ID NO: 26784 - protein, 584 aa, Artificial Sequence
  derived and/or modified protein sequence (wt) from hemagglutinin__InfluenzaB__AFJ80711
MKAIIVLLMVVTSNADRICTGITSSNSPHVVKTATQGEVNVTGVIPLTTTPIKSYFANLKGTKTRGKLCPDCLNCTDLDVALGRPMCVGTTPSAKASILHEVRPVTSGCFPIMHDRTKIRQLPNLLRGYENIRLSTQNVIDAEKAPGGPYRLGTSGSCPNATSKSGFFATMAWAVPKDNNKNATNPLTVEVPYVCTEGEDQITVWGFHSDNKTQMKNLYGDSNPQKFTSSANGVTTHYVSQIGGFPDQTEDGGLPQSGRIVVDYMVQKPGKTGTIVYQRGVLLPQKVWCASGRSKVIKGSLPLIGEADCLHEKYGGLNKSKPYYTGEHAKAIGNCPIWVKTPLKLANGTKYRPPAKLLKERGFFGAIAGFLEGGWEGMIAGWHGYTSHGAHGVAVAADLKSTQEAINKITKNLNSLSELEVKNLQRLSGAMDELHNEILELDEKVDDLRADTISSQIELAVLLSNEGIINSEDEHLLALERKLKKMLGPSAVDIGNGCFETKHKCNQTCLDRIAAGTFNAGEFSLPTFDSLNITAASLNDDGLDNHTILLYYSTAASSLAVTLMLAIFIVYMVSRDNVSCSICL

SEQ ID NO: 26785 - protein, 584 aa, Artificial Sequence; identical to SEQ ID NO: 26784
  derived and/or modified protein sequence (wt) from hemagglutinin__InfluenzaB__AFJ80722

SEQ ID NO: 26786 - protein, 584 aa, Artificial Sequence
  derived and/or modified protein sequence (wt) from hemagglutinin__InfluenzaB__AFJ80733
MKAIIVLLMVVTSNADRICTGITSSNSPHVVKTATQGEVNVTGVIPLTTTPTKSYFANLKGTRTRGKLCPDCLNCTDLDVALGRPMCMGTTPSAKASILHEVRPVTSGCFPIMHDRTKIRQLPNLLRGYENIRLSTQNVIDAEKAPGGPYRLGTSGSCPDATNKSGFFATMAWAVPKDNNKNATNPLTVEVPYICTEGEDQITVWGFHSDNKTQMKNLYGDSNPQKFTSSANGVTTHYVSQIGGFPDQTEDGGLPQSGRIVVDYMMQKPGKTGTIVYQRGVLLPQKVWCASGRSKVIKGSLPLIGEADCLHEKYGGLNKSKPYYTGEHAKAIGNCPIWVKTPLKLANGTKYRPPAKLLKERGFFGAIAGFLEGGWEGMIAGWHGYTSHGAHGVAVAADLKSTQEAINKITKNLNSLSELEVKNLQRLSGAMDELHNEILELDEKVDDLRADTISSQIELAVLLSNEGIINSEDEHLLALERKLKKMLGPSAVDIGNGCFETKHKCNQTCLDRIAAGTFNAGEFSLPTFDSLNITAASLNDDGLDNHTILLYYSTAASSLAVTLMLAIFIVYMVSRDNVSCSICL

SEQ ID NO: 26787 - protein, 585 aa, Artificial Sequence; identical to SEQ ID NO: 26514
  derived and/or modified protein sequence (wt) from hemagglutinin__InfluenzaB__AFJ80744

SEQ ID NO: 26788 - protein, 585 aa, Artificial Sequence; identical to SEQ ID NO: 26514
  derived and/or modified protein sequence (wt) from hemagglutinin__InfluenzaB__AFJ80755

SEQ ID NO: 26789 - protein, 585 aa, Artificial Sequence; identical to SEQ ID NO: 26514
  derived and/or modified protein sequence (wt) from hemagglutinin__InfluenzaB__AFJ80781

SEQ ID NO: 26790 - protein, 585 aa, Artificial Sequence; identical to SEQ ID NO: 26514
  derived and/or modified protein sequence (wt) from hemagglutinin__InfluenzaB__AFJ80792

SEQ ID NO: 26791 - protein, 585 aa, Artificial Sequence; identical to SEQ ID NO: 26514
  derived and/or modified protein sequence (wt) from hemagglutinin__InfluenzaB__AFJ80803

SEQ ID NO: 26792 - protein, 585 aa, Artificial Sequence; identical to SEQ ID NO: 26514
  derived and/or modified protein sequence (wt) from hemagglutinin__InfluenzaB__AFJ80814

SEQ ID NO: 26793 - protein, 585 aa, Artificial Sequence
  derived and/or modified protein sequence (wt) from hemagglutinin__InfluenzaB__AFJ80825
MKAIIVLLMVVTSNADRICTGITSSNSPHVVKTATQGEVNVTGVIPLTTTPTKSHFANLKGTETRGKLCPKCLNCTDLDVALGRPKCTGNIPSARVSILHEVRPITSGCFPIMHDRTKIRQLPNLLRGYEHIRLSTHNVINAENAPGGPYKIGTSGSCPNVTNGNGFFATMAWAVPKNDNNKTATNSLTIEVPYICTEGEDQITVWGFHSDNETQMAKLYGDSKPQKFTSSANGVTTHYVSQIGGFPNQTEDGGLPQSGRIVVDYMVQKSGKTGTITYQRGILLPQKVWCASGRSKVIKGSLPLIGEADCLHEKYGGLNKSKPYYTGEHAKAIGNCPIWVKTPLKLANGTKYRPPAKLLKERGFFGAIAGFLEGGWEGMIAGWHGYTSHGAHGVAVAADLKSTQEAINKITKNLNSLSELEVKNLQRLSGAMDELHNEILELDEKVDDLRADTISSQIELAVLLSNEGIINSEDEHLLALERKLKKMLGPSAVEIGNGCFETKHKCNQTCLDRIAAGTFDAGEFSLPTFDSLNITAASLNDDGLDNHTILLYYSTAASSLAVTLMIAIFVVYMVSRDNVSCSICL

SEQ ID NO: 26794 - protein, 585 aa, Artificial Sequence; identical to SEQ ID NO: 26514
  derived and/or modified protein sequence (wt) from hemagglutinin__InfluenzaB__AFJ80836

SEQ ID NO: 26795 - protein, 585 aa, Artificial Sequence; identical to SEQ ID NO: 26582
  derived and/or modified protein sequence (wt) from hemagglutinin__InfluenzaB__AFJ80847

SEQ ID NO: 26796 - protein, 585 aa, Artificial Sequence; identical to SEQ ID NO: 26514
  derived and/or modified protein sequence (wt) from hemagglutinin__InfluenzaB__AFJ80858

SEQ ID NO: 26797 - protein, 585 aa, Artificial Sequence; identical to SEQ ID NO: 26514
  derived and/or modified protein sequence (wt) from hemagglutinin__InfluenzaB__AFJ80869

SEQ ID NO: 26798 - protein, 585 aa, Artificial Sequence; identical to SEQ ID NO: 26514
  derived and/or modified protein sequence (wt) from hemagglutinin__InfluenzaB__AFJ80880

SEQ ID NO: 26799 - protein, 585 aa, Artificial Sequence; identical to SEQ ID NO: 26565
  derived and/or modified protein sequence (wt) from hemagglutinin__InfluenzaB__AFJ80891

SEQ ID NO: 26800 - protein, 585 aa, Artificial Sequence; identical to SEQ ID NO: 26565
  derived and/or modified protein sequence (wt) from hemagglutinin__InfluenzaB__AFJ80902

SEQ ID NO: 26801 - protein, 585 aa, Artificial Sequence; identical to SEQ ID NO: 26514
  derived and/or modified protein sequence (wt) from hemagglutinin__InfluenzaB__AFJ80913

SEQ ID NO: 26802 - protein, 585 aa, Artificial Sequence
  derived and/or modified protein sequence (wt) from hemagglutinin__InfluenzaB__AFJ80924
MKAIIVLLMVVTSNADRICTGITSSNSPHVVKTATQGEVNVTGVIPLTTTPTKSHFANLKGTETRGKLCPKCLNCTDLDVALGRPKCTGNIPSARVSILHEVRPVTSGCFPIMHDRTKIRQLPNLLRGYEHIRLSTHNVINAENAPGGPYKIGTSGSCPNVTNGNGFFATMAWAVPKNDNNKTATNSLTIEVPYICAEGEDQITVWGFHSDNETQMAKLYGDSKPQKFTSSANGVTTHYVSQIGGFPNQTEDGGLPQSGRIVVDYMVQKSGKTGTITYQRGILLPQKVWCASGRSKVIKGSLPLIGEADCLHEKYGGLNKSKPYYTGEHAKAIGNCPIWVKTPLKLANGTKYRPPAKLLKERGFFGAIAGFLEGGWEGMIAGWHGYTSHGAHGVAVAADLKSTQEAINKITKNLNSLSELEVKNLQRLSGAMDELHNEILELDEKVDDLRADTISSQIELAVLLSNEGIINSEDEHLLALERKLKKMLGPSAVEIGNGCFETKHKCNQTCLDRIAAGTFDAGEFSLPTFDSLNITAASLNDDGLDNHTILLYYSTAASSLAVTLMIAIFVVYMVSRDNVSCSICL

SEQ ID NO: 26803 - protein, 585 aa, Artificial Sequence; identical to SEQ ID NO: 26565
  derived and/or modified protein sequence (wt) from hemagglutinin__InfluenzaB__AFJ80935

SEQ ID NO: 26804 - protein, 584 aa, Artificial Sequence; identical to SEQ ID NO: 26426
  derived and/or modified protein sequence (wt) from hemagglutinin__InfluenzaB__AFJ80946

SEQ ID NO: 26805 - protein, 585 aa, Artificial Sequence
  derived and/or modified protein sequence (wt) from hemagglutinin__InfluenzaB__AFJ80957
MKAIIVLLMVATSNADRICTGITSSNSPHVVKTATQGEVNVTGVIPLTTTPTKSHFANLKGTETRGKLCPKCLNCTDLDVALGRPKCTGNIPSARVSILHEVRPVTSGCFPIMHDRTKIRQLPNLLRGYEHIRLSTHNVINAENAPGGPYKIGTSGSCPNVTNGNGFFATMAWAVPKNDNNKTATNSLTIEVPYICTEGEDQITVWGFHSDNETQMAKLYGDSKPQKFTSSANGVTTHYVSQIGGFPNQTEDGGLPQSGRIVVDYMVQKSGKTGTITYQRGILLPQKVWCASGRSKVIKGSLPLIGEADCLHEKYGGLNKSKPYYTGEHAKAIGNCPIWVKTPLKLANGTKYRPPAKLLKERGFFGAIAGFLEGGWEGMIAGWHGYTSHGAHGVAVAADLKSTQEAINKITKNLNSLSELEVKNLQRLSGAMDELHNEILELDEKVDDLRADTISSQIELAVLLSNEGIINSEDEHLLALERKLKKMLGPSAVEIGNGCFETKHKCNQTCLDRIAAGTFNAGEFSLPTFDSLNITAASLNDDGLDNHTILLYYSTAASSLAVTLMIAIFVVYMVSRDNVSCSICL

SEQ ID NO: 26806 - protein, 584 aa, Artificial Sequence; identical to SEQ ID NO: 26426
  derived and/or modified protein sequence (wt) from hemagglutinin__InfluenzaB__AFJ80968

SEQ ID NO: 26807 - protein, 584 aa, Artificial Sequence; identical to SEQ ID NO: 26426
  derived and/or modified protein sequence (wt) from hemagglutinin__InfluenzaB__AFJ80979

SEQ ID NO: 26808 - protein, 584 aa, Artificial Sequence
  derived and/or modified protein sequence (wt) from hemagglutinin__InfluenzaB__AFJ80990
MKAIIVLLMVVTSNADRICTGITSSNSPHVVKTATQGEVNVTGVIPLTTTPTKSYFANLKGTRTRGKLCPDCLNCTDLDVALGRPMCVGTTPSAEASILHEVRPVTSGCFPIMHDRTKIRQLPNLLRGYENIRLSTQNVIDAEKAPGGPYRLGTSGSCPNATNKSGFFATMAWAVPKDNNKNATNPLTVEVPYICTEGEDQITVWGFHSDNKTQMKNLYGDSNPQKFTSSANGVTTHYVSQIGGFPDQTEDGGLPQSGRIVVDYMMQKPGKTGTIVYQRGVLLPQKVWCASGRSKVIKGSLPLIGEADCLHEKYGGLNKSKPYYTGEHAKAIGNCPIWVKTPLKLANGTKYRPPAKLLKERGFFGAIAGFLEGGWEGMIAGWHGYTSHGAHGVAVAADLKSTQEAINKITKNLNSLSELEVKNLQRLSGAMDELHNEILELDEKVDDLRADTISSQIELAVLLSNEGIINSEDEHLLALERKLKKMLGPSAVDIGNGCFETKHKCNQTCLDRIAAGTFNAGEFSLPTFDSLNITAASLNDDGLDNHTILLYYSTAASSLAVTLMLAIFIVYMVSRDNVSCSICL

SEQ ID NO: 26809 - protein, 584 aa, Artificial Sequence; identical to SEQ ID NO: 26426
  derived and/or modified protein sequence (wt) from hemagglutinin__InfluenzaB__AFJ81001

SEQ ID NO: 26810 - protein, 584 aa, Artificial Sequence; identical to SEQ ID NO: 26426
  derived and/or modified protein sequence (wt) from hemagglutinin__InfluenzaB__AFJ84360

SEQ ID NO: 26811 - protein, 585 aa, Artificial Sequence; identical to SEQ ID NO: 26514
  derived and/or modified protein sequence (wt) from hemagglutinin__InfluenzaB__AFJ90395

SEQ ID NO: 26812 - protein, 584 aa, Artificial Sequence; identical to SEQ ID NO: 26426
  derived and/or modified protein sequence (wt) from hemagglutinin__InfluenzaB__AFJ90406

SEQ ID NO: 26813 - protein, 584 aa, Artificial Sequence; identical to SEQ ID NO: 26426
  derived and/or modified protein sequence (wt) from hemagglutinin__InfluenzaB__AFJ90417

SEQ ID NO: 26814 - protein, 584 aa, Artificial Sequence; identical to SEQ ID NO: 26426
  derived and/or modified protein sequence (wt) from hemagglutinin__InfluenzaB__AFJ90428

SEQ ID NO: 26815 - protein, 584 aa, Artificial Sequence; identical to SEQ ID NO: 26426
  derived and/or modified protein sequence (wt) from hemagglutinin__InfluenzaB__AFJ90450

SEQ ID NO: 26816 - protein, 584 aa, Artificial Sequence; identical to SEQ ID NO: 26426
  derived and/or modified protein sequence (wt) from hemagglutinin__InfluenzaB__AFJ91038

SEQ ID NO: 26817 - protein, 584 aa, Artificial Sequence
  derived and/or modified protein sequence (wt) from hemagglutinin__InfluenzaB__AFJ91049
MKAIIVLLMVVTSNADRICTGITSSNSPHVVKTATQGEVNVTGVIPLTITPTKSYFANLKGTRTRGKLCPDCLNCTDLDVALGRPMCVGTTPSAKASILHEVRPVTSGCFPIMHDRTKIRQLANLLRGYENIRLSTQNVIDAEKAPGGPYRLGTSGSCPNATSKSGFFATMAWAVPKDNNKNATNPLTVEVPYICTEGEDQITVWGFHSDNKTQMKNLYGDSNPQKFTSSANGVTTHYVSQIGGFPDQTEDGGLPQSGRIVVDYMMQKPGKTGTIVYQRGVLLPQKVWCASGRSKVIKGSLPLIGEADCLHEKYGGLNKSKPYYTGEHAKAIGNCPIWVKTPLKLANGTKYRPPAKLLKERGFFGAIAGFLEGGWEGMIAGWHGYTSHGAHGVAVAADLKSTQEAINKITKNLNSLSELEVKNLQRLSGAMDELHNEILELDEKVDDLRADTISSQIELAVLLSNEGIINSEDEHLLALERKLKKMLGPSAVDIGNGCFETKHKCNQTCLDRIAAGTFNAGEFSLPTFDSLNITAASLNDDGLDNHTILLYYSTAASSLAVTLMLAIFIVYMVSRDNVSCSICL

SEQ ID NO: 26818 - protein, 585 aa, Artificial Sequence
  derived and/or modified protein sequence (wt) from hemagglutinin__InfluenzaB__AFJ91060
MKAIIVLLMVVTSNADRICTGITSSNSPHVVKTATQGEVNVTGVIPLTTTPTKSHFANLKGTETRGKLCPRCLNCTDLDVALGRPKCTGNIPSARVSILHEVRPVTSGCFPIMHDRTKIRQLPNLLRGYEHIRLSTHNVINAENAPGGPYKIGTSGSCPNVTNGNGFFATMAWAVPKNDNNKTATNSLTIEVPYICTEGEDQITVWGFHSDNEAQMAKLYGDSKPQKFTSSANGVTTHYVSQIGGFPNQTEDGGLPQSGRIVVDYMVQKSGKTGTITYQRGILLPQKVWCASGRSKVIKGSLPLIGEADCLHEKYGGLNKSKPYYTGEHAKAIGNCPIWVKTPLKLANGTKYRPPAKLLKERGFFGAIAGFLEGGWEGMIAGWHGYTSHGAHGVAVAADLKSTQEAINKITKNLNSLSELEVKNLQRLSGAMDELHNEILELDEKVDDLRADTISSQIELAVLLSNEGIINSEDEHLLALERKLKKMLGPSAVEIGNGCFETKHKCNQTCLDRIAAGTFDAGEFSLPTFDSLNITAASLNDDGLDNHTILLYYSTAASSLAVTLMIAIFVVYMVSRDNVSCSICL

SEQ ID NO: 26819 - protein, 584 aa, Artificial Sequence; identical to SEQ ID NO: 26426
  derived and/or modified protein sequence (wt) from hemagglutinin__InfluenzaB__AFJ91071

SEQ ID NO: 26820 - protein, 584 aa, Artificial Sequence
  derived and/or modified protein sequence (wt) from hemagglutinin__InfluenzaB__AFJ91082
MKAIIVLLMVVTSNADRICTGITSSNSPHVVKTATQGEVNVTGVIPLTTTPTKSYFANLKGTRTRGKLCPDCLNCTDLDVALGRPMCVGTTPSAKASILHEVRPVTSGCFPIMHDRTKIRQLPNLLRGYENIRLSTQNVIDAEKAPGGPYRLGTSGSCPNATSKIGFFATMAWAVPKDNYKNATNPLTVEVPYICTEGEDQITVWGFHSDNKTQMKNLYGDSNPQKFTSSANGVTTHYVSQIGDFPDQTEDGGLPQSGRIVVDYMMQKPGKTGTIVYQRGVLLPQKVWCASGRSKVIKGSLPLIGEADCLHEKYGGLNKSKPYYTGEHAKAIGNCPIWVKTPLKLANGTKYRPPAKLLKERGFFGAIAGFLEGGWEGMIAGWHGYTSHGAHGVAVAADLKSTQEAINKITKNLNSLSELEVKNLQRLSGAMDELHNEILELDEKVDDLRADTISSQIELAVLLSNEGIINSEDEHLLALERKLKKMLGPSAVDIGNGCFETKHKCNQTCLDRIAAGTFNAGEFSLPTFDSLNITAASLNDDGLDNHTILLYYSTAASSLAVTLMLAIFIVYMVSRDNVSCSICL

SEQ ID NO: 26821 - protein, 584 aa, Artificial Sequence; identical to SEQ ID NO: 26820
  derived and/or modified protein sequence (wt) from hemagglutinin__InfluenzaB__AFJ91093

SEQ ID NO: 26822 - protein, 584 aa, Artificial Sequence; identical to SEQ ID NO: 26820
  derived and/or modified protein sequence (wt) from hemagglutinin__InfluenzaB__AFJ91104

SEQ ID NO: 26823 - protein, 584 aa, Artificial Sequence; identical to SEQ ID NO: 26820
  derived and/or modified protein sequence (wt) from hemagglutinin__InfluenzaB__AFJ91115

SEQ ID NO: 26824 - protein, 585 aa, Artificial Sequence
  derived and/or modified protein sequence (wt) from hemagglutinin__InfluenzaB__AFJ91704
MKAIIVLLMVVTSNADRICTGITSSNSPHVVKTATQGEVNVTGVIPLTTTPTKSHFANLKGTETRGKLCPKCLNCTDLDVALGRPKCTGNIPSARVSILHEVRPVTSGCFPIMHDRTKIRQLPNLLRGYEHIRLSTHNVINAENAPGGPYKIGTSGSCPNVTNGKGFFATMAWAVPKNDNNKTATNSLTIEVPYICTEGEDQITVWGFHSDNETQMAKLYGDSKPQKFTSSANGVTTHYVSQIGGFPNQTEDGGLPQSGRIVVDYMVQKSGKTGTITYQRGILLPQKVWCASGRSKVIKGSLPLIGEADCLHEKYGGLNKSKPYYTGEHAKAIGNCPIWVKTPLKLANGTKYRPPAKLLKERGFFGAIAGFLEGGWEGMIAGWHGYTSHGAHGVAVAADLKSTQEAINKITKNLNSLSELEVKNLQRLSGAMDELHNEILELDEKVDDLRADTISSQIELAVLLSNEGIINSEDEHLLALERKLKKMLGPSAVEIGNGCFETKHKCNQTCLDRIAAGTFDAGEFSLPTFDSLNITAASLNDDGLDNHTILLYYSTAASSLAVTLMIAIFVVYMVSRDNVSCSICL

SEQ ID NO: 26825 - protein, 584 aa, Artificial Sequence
  derived and/or modified protein sequence (wt) from hemagglutinin__InfluenzaB__AFK09797
MKAIIVLLMVVTSNADRICTGITSSNSPHVVKTATQGEVNVTGVIPLTTTPIKSYFANLKGTKTRGKLCPDCLNCTDLDVALGRPMCVGTTPSAKASILHEVRPVTSGCFPIMHDRTKIRQLPNLLRGYENIRLSTQNVIDAEKAPGGPYRLGTSGSCPNATSKSGFFATMAWAVPKDNNKNATNPLTVEVPYVCTEGEDQITVWGFHSDNKNQMKNLYGDSNPQKFTSSANGVTTHYVSQIGGFPDQTEDGGLPQSGRIVVDYMVQKPGKTGTIVYQRGVLLPQKVWCASGRSKVIKGSLPLIGEADCLHEKYGGLNKSKPYYTGEHAKAIGNCPIWVKTPLKLANGTKYRPPAKLLKERGFFGAIAGFLEGGWEGMIAGWHGYTSHGAHGVAVAADLKSTQEAINKITKNLNSLSELEVKNLQRLSGAMDELHNEILELDEKVDDLRADTISSQIELAVLLSNEGIINSEDEHLLALERKLKKMLGPSAVDIGNGCFETKHKCNQTCLDRIAAGTFNAGEFSLPTFDSLNITAASLNDDGLDNHTILLYYSTAASSLAVTLMLAIFIVYMVSRDNVSCSICL

SEQ ID NO: 26826 - protein, 584 aa, Artificial Sequence; identical to SEQ ID NO: 26820
  derived and/or modified protein sequence (wt) from hemagglutinin__InfluenzaB__AFN54654

SEQ ID NO: 26827 - protein, 584 aa, Artificial Sequence; identical to SEQ ID NO: 26567
  derived and/or modified protein sequence (wt) from hemagglutinin__InfluenzaB__AFN54665

SEQ ID NO: 26828 - protein, 584 aa, Artificial Sequence; identical to SEQ ID NO: 26567
  derived and/or modified protein sequence (wt) from hemagglutinin__InfluenzaB__AFN54676

SEQ ID NO: 26829 - protein, 584 aa, Artificial Sequence; identical to SEQ ID NO: 26820
  derived and/or modified protein sequence (wt) from hemagglutinin__InfluenzaB__AFN54687

SEQ ID NO: 26830 - protein, 584 aa, Artificial Sequence
  derived and/or modified protein sequence (wt) from hemagglutinin__InfluenzaB__AFN54698
MKAIIVLLMVVTSNADRICTGITSSNSPHVVKTATQGEVNVTGVIPLTTTPTKSYFANLKGTRTRGKLCPDCLNCTDLDVALGRPMCVGTTPSAKASILHEVRPVTSGCFPIMHDRTKIRQLPNLLRGYENIRLSTQNVIDAEKAPGGPYRLGTSGSCPNATSKIGFFATMAWAVPKDNYKNATNPLTVEVPYICTEGEDQITVWGFHSDNKTQMKNLYGDSNPQKFTSFANGVTTHYVSQIGDFPDQTEDGGLPQSGRIVVDYMMQKPGKTGTIVYQRGVLLPQKVWCASGRSKVIKGSLPLIGEADCLHEKYGGLNKSKPYYTGEHAKAIGNCPIWVKTPLKLANGTKYRPPAKLLKERGFFGAIAGFLEGGWEGMIAGWHGYTSHGAHGVAVAADLKSTQEAINKITKNLNSLSELEVKNLQRLSGAMDELHNEILELDEKVDDLRADTISSQIELAVLLSNEGIINSEDEHLLALERKLKKMLGPSAVDIGNGCFETKHKCNQTCLDRIAAGTFNAGEFSLPTFDSLNITAASLNDDGLDNHTILLYYSTAASSLAVTLMLAIFIVYMVSRDNVSCSICL

SEQ ID NO: 26831 - protein, 584 aa, Artificial Sequence; identical to SEQ ID NO: 26820
  derived and/or modified protein sequence (wt) from hemagglutinin__InfluenzaB__AFN54709

SEQ ID NO: 26832 - protein, 584 aa, Artificial Sequence; identical to SEQ ID NO: 26820
  derived and/or modified protein sequence (wt) from hemagglutinin__InfluenzaB__AFN54720

SEQ ID NO: 26833 - protein, 584 aa, Artificial Sequence; identical to SEQ ID NO: 26820
  derived and/or modified protein sequence (wt) from hemagglutinin__InfluenzaB__AFN54731

SEQ ID NO: 26834 - protein, 584 aa, Artificial Sequence; identical to SEQ ID NO: 26820
  derived and/or modified protein sequence (wt) from hemagglutinin__InfluenzaB__AFN54742

SEQ ID NO: 26835 - protein, 584 aa, Artificial Sequence; identical to SEQ ID NO: 26820
  derived and/or modified protein sequence (wt) from hemagglutinin__InfluenzaB__AFN54753

SEQ ID NO: 26836 - protein, 584 aa, Artificial Sequence; identical to SEQ ID NO: 26820
  derived and/or modified protein sequence (wt) from hemagglutinin__InfluenzaB__AFN54764

SEQ ID NO: 26837 - protein, 584 aa, Artificial Sequence; identical to SEQ ID NO: 26820
  derived and/or modified protein sequence (wt) from hemagglutinin__InfluenzaB__AFN54775

SEQ ID NO: 26838 - protein, 584 aa, Artificial Sequence; identical to SEQ ID NO: 26820
  derived and/or modified protein sequence (wt) from hemagglutinin__InfluenzaB__AFN54786

SEQ ID NO: 26839 - protein, 584 aa, Artificial Sequence; identical to SEQ ID NO: 26820
  derived and/or modified protein sequence (wt) from hemagglutinin__InfluenzaB__AFN54797

SEQ ID NO: 26840 - protein, 584 aa, Artificial Sequence; identical to SEQ ID NO: 26820
  derived and/or modified protein sequence (wt) from hemagglutinin__InfluenzaB__AFN54808

SEQ ID NO: 26841 - protein, 584 aa, Artificial Sequence; identical to SEQ ID NO: 26567
  derived and/or modified protein sequence (wt) from hemagglutinin__InfluenzaB__AFN54819

SEQ ID NO: 26842 - protein, 584 aa, Artificial Sequence; identical to SEQ ID NO: 26820
  derived and/or modified protein sequence (wt) from hemagglutinin__InfluenzaB__AFN54830

SEQ ID NO: 26843 - protein, 584 aa, Artificial Sequence; identical to SEQ ID NO: 26820
  derived and/or modified protein sequence (wt) from hemagglutinin__InfluenzaB__AFN54841

SEQ ID NO: 26844 - protein, 584 aa, Artificial Sequence; identical to SEQ ID NO: 26820
  derived and/or modified protein sequence (wt) from hemagglutinin__InfluenzaB__AFN54852

SEQ ID NO: 26845 - protein, 584 aa, Artificial Sequence; identical to SEQ ID NO: 26820
  derived and/or modified protein sequence (wt) from hemagglutinin__InfluenzaB__AFN54863

SEQ ID NO: 26846 - protein, 585 aa, Artificial Sequence
  derived and/or modified protein sequence (wt) from hemagglutinin__InfluenzaB__AFU34595
MKAIIVLLMVVTSNADRICTGITSSNSPHVVKTATQGEVNVTGVIPLTTTPTKSHFANLKGTETRGKLCPKCPNCTDLDVALGRPKCTGKIPSARVSILHEVRPVTSGCFPIMHDRTKIRQLPNLLRGYEHIRLSTHNVINAENAPGGPYKIGTSGSCPNVTNGNGFFATMAWAVPKNDKNKTATNPLTIEVPYICTEGEDQITVWGFHSDNETQMAKLYRDSKPQKFTSSANGVTTHYVSQIGGFPNQTEDGGLPQSGRIVVDYMVQKSGKTGTITYQRGILLPQKVWCASGRSKVIKGSLPLIGEADCLHEKYGGLNKSKPYYTGEHAKAIGNCPIWVKTPLKLANGTKYRPPTKLLKERGFFGAIAGFLEGGWEGMIAGWHGYTSHGAHGVAVAADLKSTQEAINKITKNLNSLSELEVKNLQRLSGAMDELHNEILELDEKVDDLRADTISSQIELAVLLSNEGIINSEDEHLLALERKLKKMLGPSAVEIGNGCFETKHKCNQTCLDRIAAGTFDAGEFSLPTFDSLNITAASLNDDGLDNHTILLYYSTAASSLAVTLMIAIFVVYMVSRDNVSCSICL

SEQ ID NO: 26847 - protein, 585 aa, Artificial Sequence
  derived and/or modified protein sequence (wt) from hemagglutinin__InfluenzaB__AFU34606
MKAIIVLLMVVTSNADRICTGITSSNSPHVVKTATQGEVNVTGVIPLTTTPTKSHFANLKGTETRGKLCPKCPNCTDLDVALDRPKCTGKIPSARVSILHEVRLVTSGCFPIMHDRTKIRQLPNLLRGYEHIRLSTHNVINAENAPGGPYKIGTSGSCPNVTNGNGFFATMAWAVPKNDKNKTATNPLTIEVPYICTEGEDQITVWGFHSDDETQMAKLYGDSKPQKFTSSANGVTTHYVSQIGGFPNQTEDGGLPQSGRIVVDYMVQKSGKTGTITYQRGILLPQKVWCASGRSKVIKGSLPLIGEADCLHEKYGGLNKSKPYYTGEHAKAIGNCPIWVKTPLKLANGTKYRPPAKLLKERGFFGAIAGFLEGGWEGMIAGWHGYTSHGAHGVAVAADLKSTQEAINKITKNLNSLSELEVKNLQRLSGAMDELHNEILELDEKVDDLRADTISSQIELAVLLSNEGIINSEDEHLLALERKLKKMLGPSAVEIGNGCFETKHKCNQTCLDRIAAGTFDAGEFSLPTFDSLNITAASLNDDGLDNHTILLYYSTAASSLAVTLMIAIFVVYMVSRDNVSCSICL

SEQ ID NO: 26848 - protein, 585 aa, Artificial Sequence; identical to SEQ ID NO: 26756
  derived and/or modified protein sequence (wt) from hemagglutinin__InfluenzaB__AFU34617

SEQ ID NO: 26849 - protein, 585 aa, Artificial Sequence
  derived and/or modified protein sequence (wt) from hemagglutinin__InfluenzaB__AFU34628
MKAIIVLLMVVTSNADRICTGITSSNSPHVVKTATQGEVNVTGVIPLTTTPTKSHFANLKGTETRGKLCPKCPNCTDLDVALGRPKCTGKIPSARVSILHEVRPVTSGCFPIMHDRTKIRQLPNLLRGYEHIRLSTHNVINAENAPGGPYKIGTSGSCPNVTNGNGFFATMAWAVPKNDKNKTATNPLTIEVPYICTEGEDQITVWGFHSDDETQMAKLYGDSKPQKFTSSANGVTTHYVSQIGGFPNQTEDGGLPQSGRIVVDYMVQKSGKTGTITYQRGILLPQKVWCASGRSKVIKGSLPLIGEADCLHEKYGGLNKSKPYYTGEHAKAIGNCPIWVKTPLKLANGTKYRPPAKLLKERGFLGAIAGFLEGGWKGMIAGWHGYTSHGAHGVAVAADLKSTQEAINKITKNLNSLSELEVKNLQRLSGAMDELHNEILELDEKVDDLRADTISSQIELAVLLSNEGIINSEDEHLLALERKLKKMLGPSAVEIGNGCFETKHKCNQTCLDRIAAGTFDAGEFSLPTFDSLNITAASLNDDGLDNHTILLYYSTAASSLAVTLMIAIFVVYMVSRDNVSCSICL

SEQ ID NO: 26850 - protein, 585 aa, Artificial Sequence; identical to SEQ ID NO: 26608
  derived and/or modified protein sequence (wt) from hemagglutinin__InfluenzaB__AFU34639

SEQ ID NO: 26851 - protein, 585 aa, Artificial Sequence; identical to SEQ ID NO: 26645
  derived and/or modified protein sequence (wt) from hemagglutinin__InfluenzaB__AGB08299

SEQ ID NO: 26852 - protein, 585 aa, Artificial Sequence; identical to SEQ ID NO: 26645
  derived and/or modified protein sequence (wt) from hemagglutinin__InfluenzaB__AGB08300

SEQ ID NO: 26853 - protein, 584 aa, Artificial Sequence
  derived and/or modified protein sequence (wt) from hemagglutinin__InfluenzaB__AGB97259
MKAIIVLLMVVTSNADRICTGITSSNSPHVVKTATQGEVNVTGVIPLTTTPTKSYFANLKGTRTRGKLCPDCLNCTDLDVALGRPMCVGTTPSAKASILHEVRPVTSGCFPIMHDRTKIRQLPNLLRGYEKIRLSTQNVIDAEKAPGGPYRLGTSGSCPNATSKIGFFATMAWAVPKDNYKNATNPLTVEVPYICTEGEDQITVWGFHSDNKTQMKSLYGDSNPQKFTSSANGVTTHYVSQIGDFPDQTEDGGLPQSGRIVVDYMMQKPGKTGTIVYQRGVLLPQKVWCASGRSKVIKGSLPLIGEADCLHEEYGGLNKSKPYYTGKHAKAIGNCPIWVKTPLKLANGTKYRPPAKLLKERGFFGAIAGFLEGGWEGMIAGWHGYTSHGAHGVAVAADLKSTQEAINKITKNLNSLSELEVKNLQRLSGAMDELHNEILELDEKVDDLRADTISSQIELAVLLSNEGIINSEDEHLLALERKLKKMLGPSAVDIGNGCFETKHKCNQTCLDRIAAGTFNAGEFSLPTFDSLNITAASLNDDGLDNHTILLYYSTAASSLAVTLMLAIFIVYIVSRDNVSCSICL

SEQ ID NO: 26854 - protein, 584 aa, Artificial Sequence
  derived and/or modified protein sequence (wt) from hemagglutinin__InfluenzaB__AGB97265
MKAIIVLLMVVTSNADRICTGITSSNSPHVVKTATQGEVNVTGVIPLTTTPTKSYFANLKGTKTRGKLCPDCLNCTDLDVALGRPMCVGTTPSAKASILHEVRPVTSGCFPIMHDRTKIRQLANLLRGYENIRLSTQNVIDAEKAPGGPYRLGTSGSCPNATSKSGFFATMAWAVPKDNNKNATNPLTVEVPYICAEGEDQITVWGFHSDNKTQMKNLYGDSNPQKFTSSANGVTTHYVSQIGGFPDQTEDGGLPQSGRIVVDYMMQKPGKTGTIVYQRGVLLPQKVWCASGRSKVIKGSLPLIGEADCLHEKYGGLNKSKPYYTGEHAKAIGNCPIWVKTPLKLANGTKYRPPAKLLKERGFFGAIAGFLEGGWEGMIAGWHGYTSHGAHGVAVAADLKSTQEAINKITKNLNSLSELEVKNLQRLSGAMDELHNEILELDEKVDDLRADTISSQIELAVLLSNEGIINSEDEHLLALERKLKKMLGPSAVDIGNGCFETKHKCNQTCLDRIAAGTFNAGEFSLPTFDSLNITAASLNDDGLDNHTILLYYSTAASSLAVTLMLAIFIVYMVSRDNVSCSICL

SEQ ID NO: 26855 - protein, 584 aa, Artificial Sequence; identical to SEQ ID NO: 26854
  derived and/or modified protein sequence (wt) from hemagglutinin__InfluenzaB__AGF44878

SEQ ID NO: 26856 - protein, 584 aa, Artificial Sequence; identical to SEQ ID NO: 26854
  derived and/or modified protein sequence (wt) from hemagglutinin__InfluenzaB__AGF44879

SEQ ID NO: 26857 - protein, 584 aa, Artificial Sequence
  derived and/or modified protein sequence (wt) from hemagglutinin__InfluenzaB__AGF44881
MKAIIVLLMVVTSNADRICTGITSSNSPHVVKTATQGEVNVTGVIPLTTTPTKSYFANLKGTKTRGKLCPDCLNCTDLDVALGRPMCVGTTPSAKASILHEVRPVTSGCFPIMHDRTKIRQLANLLRGYENIRLSTQNVIDAEKAPGGPYRLGTSGSCPNATSKSGFFATMAWAVPKDNNKNATNPLTVEVPYICAEGEDQIAVWGFHSDNKTQMKNLYGDSNPQKFTSSANGVTTHYVSQIGGFPDQTEDGGLPQSGRIVVDYMMQKPGKTGTIVYQRGVLLPQKVWCASGRSKVIKGSLPLIGEADCLHEKYGGLNKSKPYYTGEHAKAIGNCPIWVKTPLKLANGTKYRPPAKLLKERGFFGAIAGFLEGGWEGMIAGWHGYTSHGAHGVAVAADLKSTQEAINKITKNLNSLSELEVKNLQRLSGAMDELHNEILELDEKVDDLRADTISSQIELAVLLSNEGIINSEDEHLLALERKLKKMLGPSAVDIGNGCFETKHKCNQTCLDRIAAGTFNAGEFSLPTFDSLNITAASLNDDGLDNHTILLYYSTAASSLAVILMLAIFIVYMVSRDNVSCSICL

SEQ ID NO: 26858 - protein, 584 aa, Artificial Sequence
  derived and/or modified protein sequence (wt) from hemagglutinin__InfluenzaB__AGF44882
MKAIIVLLMVVTSNADRICTGITSSNSPHVVKTATQGEVNVTGVIPLTTTPTKSYFANLKGTKTRGKLCPDCLNCTDLDVALGRPMCVGTTPSAKASILHEVRPVTSGCFPIMHDRTKIRQLANLLRGYENIRLSTQNVIDAEKAPGGPYRLGTSGSCPNATSKSGFFATMAWAVPKDNNKNATNPLTVEVPYICAEGEDQITVWGFHSDNKTQMKNLYGDSNPQKFTSSANGVTTHYVSQIGGFPDQTEDGGLPQSGRIVVDYMMQKPGKTGTIVYQRGVLLPQKVWCASGKSKVIKGSLPLIGEADCLHEKYGGLNKSKPYYTGEHAKAIGNCPIWVKTPLKLANGTKYRPPAKLLKERGFFGAIAGFLEGGWEGMIAGWHGYTSHGAHGVAVAADLKSTQEAINKITKNLNSLSELEVKNLQRLSGAMDELHNEILELDEKVDDLRADTISSQIELAVLLSNEGIINSEDEHLLALERKLKKMLGPSAVDIGNGCFETKHKCNQTCLDRIAAGTFNAGEFSLPTFDSLNITAASLNDDGLDNHTILLYYSTAASSLAVTLMLAIFIVYMVSRDNVSCSICL

SEQ ID NO: 26859 - protein, 584 aa, Artificial Sequence; identical to SEQ ID NO: 26854
  derived and/or modified protein sequence (wt) from hemagglutinin__InfluenzaB__AGF44883

SEQ ID NO: 26860 - protein, 584 aa, Artificial Sequence; identical to SEQ ID NO: 26854
  derived and/or modified protein sequence (wt) from hemagglutinin__InfluenzaB__AGF44884

SEQ ID NO: 26861 - protein, 584 aa, Artificial Sequence; identical to SEQ ID NO: 26854
  derived and/or modified protein sequence (wt) from hemagglutinin__InfluenzaB__AGF44886

SEQ ID NO: 26862 - protein, 584 aa, Artificial Sequence; identical to SEQ ID NO: 26854
  derived and/or modified protein sequence (wt) from hemagglutinin__InfluenzaB__AGF44887

SEQ ID NO: 26863 - protein, 584 aa, Artificial Sequence; identical to SEQ ID NO: 26854
  derived and/or modified protein sequence (wt) from hemagglutinin__InfluenzaB__AGF44888

SEQ ID NO: 26864 - protein, 584 aa, Artificial Sequence
  derived and/or modified protein sequence (wt) from hemagglutinin__InfluenzaB__AGL09834
MKAIIVLLMVVTSNADRICTGITSSNSPHVVKTATQGEVNVTGVIPLTTTPTKSYFANLKGTKTRGKLCPDCLNCTDLDVALGRPMCVGTTPSAKASILHEVRPVTSGCFPIMHDRTKIRQLANLLRGYENIRLSTQNVIDAEKAPGGPYRLGTSGSCPNATSKSGFFATMAWAVPKDNNKNATNPLTVEVPYICAEGEDQIAVWGFHSDNKTQMKNLYGDSNPQKFTSSANGVTTHYVSQIGGFPDQTEDGGLPQSGRIVVDYMMQKPGKTGTIVYQRGVLLPQKVWCASGRSKVIKGSLPLIGEADCLHEKYGGLNKSKPYYTGEHAKAIGNCPIWVKTPLKLANGTKYRPPAKLLKERGFFGAIAGFLEGGWEGMIAGWHGYTSHGAHGVAVAADLKSTQEAINKITKNLNSLSELEVKNLQRLSGAMDELHNEILELDEKVDDLRADTISSQIELAVLLSNEGIINSEDEHLLALERKLKKMLGPSAVDIGNGCFETKHKCNQTCLDRIAAGTFNAGDFSLPTFDSLNITAASLNDDGLDNHTILLYYSTAASSLAVTLMLAIFIVYMVSRDNVSCSICL

SEQ ID NO: 26865 - protein, 584 aa, Artificial Sequence; identical to SEQ ID NO: 26854
  derived and/or modified protein sequence (wt) from hemagglutinin__InfluenzaB__AGL09835

SEQ ID NO: 26866 - protein, 584 aa, Artificial Sequence
  derived and/or modified protein sequence (wt) from hemagglutinin__InfluenzaB__AGL09836
MKAIIVLLMVVTSNADRICTGITSSNSPHVVKTATQGEVNVTGVIPLTTTPTKSYFANLKGTKTRGKLCPDCLNCTDLDVALGRPMCVGTTPSAKASILHEVRPVTSGCFPIMHDRTKIRQLANLLRGYENIRLSTQNVIDAKKAPGGPYRLGTSGSCPNATSKSGFFATMAWAVPEDNNKNATNPLTVEVPYICAEGEDQITVWGFHSDNKTQMKNLYGDSNPQKFTSSANGVTTHYVSQIGGFPDQTEDGGLPQSGRIVVDYMMQKPGKTGTIVYQRGVLLPQKVWCASGRSKVIKGSLPLIGEADCLHEKYGGLNKSKPYYTGEHAKAIGNCPIWVKTPLKLANGTKYRPPAKLLKERGFFGAIAGFLEGGWEGMIAGWHGYTSHGAHGVAVAADLKSTQEAINKITKNLNSLSELEVKNLQRLSGAMDELHNEILELDEKVDDLRADTISSQIELAVLLSNEGIINSEDEHLLALERKLKKMLGPSAVDIGNGCFETKHKCNQTCLDRIAAGTFNAGEFSLPTFDSLNITAASLNDDGLDNHTILLYYSTAASSLAVTLMLAIFIVYMVSRDNVSCSICL

SEQ ID NO: 26867 - protein, 584 aa, Artificial Sequence; identical to SEQ ID NO: 26854
  derived and/or modified protein sequence (wt) from hemagglutinin__InfluenzaB__AGL09837

SEQ ID NO: 26868 - protein, 584 aa, Artificial Sequence; identical to SEQ ID NO: 26854
  derived and/or modified protein sequence (wt) from hemagglutinin__InfluenzaB__AGL09838

SEQ ID NO: 26869 - protein, 584 aa, Artificial Sequence; identical to SEQ ID NO: 26854
  derived and/or modified protein sequence (wt) from hemagglutinin__InfluenzaB__AGL09839

SEQ ID NO: 26870 - protein, 584 aa, Artificial Sequence; identical to SEQ ID NO: 26854
  derived and/or modified protein sequence (wt) from hemagglutinin__InfluenzaB__AGL09840

SEQ ID NO: 26871 - protein, 584 aa, Artificial Sequence; identical to SEQ ID NO: 26854
  derived and/or modified protein sequence (wt) from hemagglutinin__InfluenzaB__AGL09841

SEQ ID NO: 26872 - protein, 585 aa, Artificial Sequence
  derived and/or modified protein sequence (wt) from hemagglutinin__InfluenzaB__AGL09842
MKAIIVLLMVVTSNADRICTGITSSNSPHVVKTATQGEVNVTGVIPLTTTPTKSHFANLKGTETRGKLCPKCLNCTDLDVALGRPKCTGKIPSARVSILHEVRPVTSGCFPIMHDRTKIRQLPNLLRGYEHIRLSTHNVINAENAPGGPYKIGTSGSCPNVTNGNGFFATMAWAVPKNDKNKTETNPLTIEVPYICTEGEDQITVWGFHSDNETQMAKLYGDSKPQKFTSSANGVTTHYVSQIGGFPNQTEDGGLPQSGRIVVDYMVQKSGKTGTITYQRGILLPQKVWCASGRSKVIKGSLPLIGEADCLHEKYGGLNKSKPYYTGEHAKAIGNCPIWVKTPLKLANGTKYRPPAKLLKERGFFGAIAGFLEGGWEGMIAGWHGYTSHGAHGVAVAADLKSTQEAINKITKNLNSLSELEVKNLQRLSGAMDELHNEILELDEKVDDLRADTISSQIELAVLLSNEGIINSEDEHLLALERKLKKMLGPSAVEIGNGCFETKHKCNQTCLDRIAAGTFDAGEFSLPTFDSLNITAASLNDDGLDNHTILLYYSTAASSLAVTLMIAIFVVYMVSRDNVSCSICL

SEQ ID NO: 26873 - protein, 584 aa, Artificial Sequence; identical to SEQ ID NO: 26854
  derived and/or modified protein sequence (wt) from hemagglutinin__InfluenzaB__AGL09843

SEQ ID NO: 26874 - protein, 584 aa, Artificial Sequence
  derived and/or modified protein sequence (wt) from hemagglutinin__InfluenzaB__AGL09844
MKAIIVLLMVVTSNADRICTGITSSNSPHVVKTATQGEVNVTGVIPLTTTPTKSYFANLKGTKTRGKLCPDCLNCTDLDVALGRPMCVGTTPSAKASILHEVRPVTSGCFPIMHDRTKIRQLANLLRGYENIRLSTQNVIDAEKAPGGPYRLGTSGSCPNATSKSGFFATMAWAVPKDNNKNATNPLTVEVPYICAEGEDQITVWGFHSDNKTQMKNLYGDSNPQKFTSSANGVTTHYVSQIGGFPDQKEDGGLPQSGRIVVDYMMQKPGKTGTIVYQRGVLLPQKVWCASGRSKVIKGSLPLIGEADCLHEKYGGLNKSKPYYTGEHAKAIGNCPIWVKTPLKLANGTKYRPPAKLLKERGFFGAIAGFLEGGWEGMIAGWHGYTSHGAHGVAVAADLKSTQEAINKITKNLNSLSELEVKNLQRLSGAMDELHNEILELDEKVDDLRADTISSQIELAVLLSNEGIINSEDEHLLALERKLKKMLGPSAVDIGNGCFETKHKCNQTCLDRIAAGTFNAGEFSLPTFDSLNITAASLNDDGLDNHTILLYYSTAASSLAVTLMLAIFIVYMVSRDNVSCSICL

SEQ ID NO: 26875 - protein, 584 aa, Artificial Sequence; identical to SEQ ID NO: 26854
  derived and/or modified protein sequence (wt) from hemagglutinin__InfluenzaB__AGL09845

SEQ ID NO: 26876 - protein, 584 aa, Artificial Sequence; identical to SEQ ID NO: 26854
  derived and/or modified protein sequence (wt) from hemagglutinin__InfluenzaB__AGL09846

SEQ ID NO: 26877 - protein, 584 aa, Artificial Sequence
  derived and/or modified protein sequence (wt) from hemagglutinin__InfluenzaB__AGL09847
MKAIIVLLMVVTSNADRICTGITSSNSPHVVKTATQGEVNVTGVIPLTTTPTKSYFANLKGTKTRGKLCPDCLNCTDLDVALGRPMCVGTTPSAKASILHEVRPVTSGCFPIMHDRTKIRQLANLLRGYENIRLSTQNVIDAEKAPGGPYRLGTSGSCPNATSKSGFFATMAWAVPKDNNKNATNPLTVEVPYICAEGEDQIAIWGFHSDNKTQMKNLYGDSNPQKFTSSANGVTTHYVSQIGGFPDQTEDGGLPQSGRIVVDYMMQKPGKTGTIVYQRGVLLPQKVWCASGRSKVIKGSLPLIGEADCLHEKYGGLNKSKPYYTGEHAKAIGNCPIWVKTPLKLANGTKYRPPAKLLKERGFFGAIAGFLEGGWEGMIAGWHGYTSHGAHGVAVAADLKSTQEAINKITKNLNSLSELEVKNLQRLSGAMDELHNEILELDEKVDDLRADTISSQIELAVLLSNEGIINSEDEHLLALERKLKKMLGPSAVDIGNGCFETKHKCNQTCLDRIAAGTFNAGEFSLPTFDSLNITAASLNDDGLDNHTILLYYSTAASSLAVTLMLAIFIVYMVSRDNVSCSICL

SEQ ID NO: 26878 - protein, 584 aa, Artificial Sequence
  derived and/or modified protein sequence (wt) from hemagglutinin__InfluenzaB__AGL09849
MKAIIVLLMVVTSNADRICTGITSSNSPHVVKTATQGEVNVTGVIPLTTTPTKSYFANLKGTKTRGKLCPDCLNCTDLDVALGRPMCVGTTPSAKASILHEVRPVTSGCFPIMHDRTKIRQLANLLRGYENIRLSTQNVINAEKAPGGPYRLGTSGSCPNATSKSGFFATMAWAVPKDNNKNATNPLTVEVPYICAEGEDQITVWGFHSDNKTQMKNLYGDSNPQKFTSSANGVTTHYVSQIGGFPDQTEDGGLPQSGRIVVDYMMQKPGKTGTIVYQRGVLLPQKVWCASGRSKVIKGSLPLIGEADCLHEKYGGLNKSKPYYTGEHAKAIGNCPIWVKTPLKLANGTKYRPPAKLLKERGFFGAIAGFLEGGWEGMIAGWHGYTSHGAHGVAVAADLKSTQEAINKITKNLNSLSELEVKNLQRLSGAMDELHNEILELDEKVDDLRADTISSQIELAVLLSNEGIINSEDEHLLALERKLKKMLGPSAVDIGNGCFETKHKCNQTCLDRIAAGTFNAGEFSLPTFDSLNITAASLNDDGLDNHTILLYYSTAASSLAVTLMLAIFIVYMVSRDNVSCSICL

SEQ ID NO: 26879 - protein, 584 aa, Artificial Sequence; identical to SEQ ID NO: 26854
  derived and/or modified protein sequence (wt) from hemagglutinin__InfluenzaB__AGL09850

SEQ ID NO: 26880 - protein, 584 aa, Artificial Sequence; identical to SEQ ID NO: 26854
  derived and/or modified protein sequence (wt) from hemagglutinin__InfluenzaB__AGL09851

SEQ ID NO: 26881 - protein, 585 aa, Artificial Sequence; identical to SEQ ID NO: 26645
  derived and/or modified protein sequence (wt) from hemagglutinin__InfluenzaB__AGL09852

SEQ ID NO: 26882 - protein, 584 aa, Artificial Sequence; identical to SEQ ID NO: 26854
  derived and/or modified protein sequence (wt) from hemagglutinin__InfluenzaB__AGL09853

SEQ ID NO: 26883 - protein, 584 aa, Artificial Sequence; identical to SEQ ID NO: 26854
  derived and/or modified protein sequence (wt) from hemagglutinin__InfluenzaB__AGL09854

SEQ ID NO: 26884 - protein, 585 aa, Artificial Sequence
  derived and/or modified protein sequence (wt) from hemagglutinin__InfluenzaB__AGL09855
MKAIIVLLMVVTSNADRICTGITSSNSPHVVKTATQGEVNVTGVIPLTTTPTKSHFANLKGTETRGKLCPKCLNCTDLDVALGRPKCTGKIPSARVSILHEVRPVTSGCFPIMHDRTKIRQLPNLLRGYEHIRLSTHNVINAENAPGGPYKIGTSGSCPNVTNGNGFFATMAWAVPKNDKNKTETNPLTIEVPYICTEEEDQITVWGFHSDNETQMAKLYGDSKPQKFTSSANGVTTHYVSQIGDFPNQTEDGGLPQSGRIVVDYMVQKSGKTGTITYQRGILLPQKVWCASGRSKVIKGSLPLIGEADCLHEKYGGLNKSKPYYTGEHAKAIGNCPIWVKTPLKLANGTKYRPPAKLLKERGFFGAIAGFLEGGWEGMIAGWHGYTSHGAHGVAVAADLKSTQEAINKITKNLNSLSELEVKNLQRLSGAMDELHNEILELDEKVDDLRADTISSQIELAVLLSNEGIINSEDEHLLALERKLKKMLGPSAVEIGNGCFETKHKCNQTCLDRIAAGTFDAGEFSLPTFDSLNITAASLNDDGLDNHTILLYYSTAASSLAVTLMIAIFVVYMVSRDNVSCSICL

SEQ ID NO: 26885 - protein, 584 aa, Artificial Sequence; identical to SEQ ID NO: 26854
  derived and/or modified protein sequence (wt) from hemagglutinin__InfluenzaB__AGL09856

SEQ ID NO: 26886 - protein, 584 aa, Artificial Sequence
  derived and/or modified protein sequence (wt) from hemagglutinin__InfluenzaB__AGL09857
MKAIIVLLMVVTSNADRICTGITSSNSPHVVKTATQGEVNVTGVIPLTTTPTKSYFANLKGTKTRGKLCPDCLNCTDLDVALGRPMCVGTTPSAKASILHEVRPVTSGCFPIMHDRTKIRQLANLLRGYENIRLSTQKVIDAEKAPGGPYRLGTSGSCPNATSKSGFFATMAWAVPKDNNKNATNPLTVEVPYICAEGEDQITVWGFHSDNKTQMKNLYGDSNPQKFTSSANGVTTHYVSQIGGFPDQTEDGGLPQSGRIVVDYMIQKPGKTGTIVYQRGVLLPQKVWCASGRSKVIKGSLPLIGEADCLHEKYGGLNKSKPYYTGEHAKAIGNCPIWVKTPLKLANGTKYRPPAKLLKERGFFGAIAGFLEGGWEGMIAGWHGYTSHGAHGVAVAADLKSTQEAINKITKNLNSLSELEVKNLQRLSGAMDELHNEILELDEKVDDLRADTISSQIELAVLLSNEGIINSEDEHLLALERKLKKMLGPSAVDIGNGCFETKHKCNQTCLDRIAAGTFNAGEFSLPTFDSLNITAASLNDDGLDNHTILLYYSTAASSLAVTLMLAIFIVYMVSRDNVSCSICL

SEQ ID NO: 26887 - protein, 585 aa, Artificial Sequence
  derived and/or modified protein sequence (wt) from hemagglutinin__InfluenzaB__AGL09859
MKAIIVLLMVVTSNADRICTGITSSNSPHVVKTATQGEVNVTGVIPLTTTPTKSHFANLKGTETRGKLCPKCLNCTDLDVALGRPKCTGKIPSARVSILHEVRPVTSGCFPIMHDRTKIRQLPNLLRGYEHIRLSTHNVINAEDAPGGPYKIGTSGSCPNVTNGNGFFATMAWAVPKNDKNKTATNPLTIEVPYICTEGEDQITVWGFHSDNETQMAKLYGDSKPQKFTSSANGVTTHYVSQIGGFPNQTEDGGLPQSGRIVVDYMVQKSGKTGTITYQRGILLPQKVWCASGRSKVIKGSLPLIGEADCLHEKYGGLNKSKPYYTGEHAKAIGNCPIWVKTPLKLANGTKYRPPAKLLKERGFFGAIAGFLEGGWEGMIAGWHGYTSHGAHGVAVAADLKSTQEAINKITKNLNSLSELEVKNLQRLSGAMDELHNEILELDEKVDDLRADTISSQIELAVLLSNEGIINSEDEHLLALERKLKKMLGPSAVEIGNGCFETKHKCNQTCLDRIAAGTFDAGEFSLPTFDSLNITAASLNDDGLDNHTILLYYSTAASSLAVTLMIAIFVVYMVSRDNVSCSICL

SEQ ID NO: 26888 - protein, 585 aa, Artificial Sequence; identical to SEQ ID NO: 26887
  derived and/or modified protein sequence (wt) from hemagglutinin__InfluenzaB__AGL09860

SEQ ID NO: 26889 - protein, 585 aa, Artificial Sequence; identical to SEQ ID NO: 26887
  derived and/or modified protein sequence (wt) from hemagglutinin__InfluenzaB__AGL09861

SEQ ID NO: 26890 - protein, 585 aa, Artificial Sequence; identical to SEQ ID NO: 26887
  derived and/or modified protein sequence (wt) from hemagglutinin__InfluenzaB__AGL09862

SEQ ID NO: 26891 - protein, 585 aa, Artificial Sequence; identical to SEQ ID NO: 26887
  derived and/or modified protein sequence (wt) from hemagglutinin__InfluenzaB__AGL09863

SEQ ID NO: 26892 - protein, 584 aa, Artificial Sequence; identical to SEQ ID NO: 26854
  derived and/or modified protein sequence (wt) from hemagglutinin__InfluenzaB__AGL09864

SEQ ID NO: 26893 - protein, 584 aa, Artificial Sequence; identical to SEQ ID NO: 26854
  derived and/or modified protein sequence (wt) from hemagglutinin__InfluenzaB__AGL09866

SEQ ID NO: 26894 - protein, 584 aa, Artificial Sequence; identical to SEQ ID NO: 26854
  derived and/or modified protein sequence (wt) from hemagglutinin__InfluenzaB__AGL09867

SEQ ID NO: 26895 - protein, 584 aa, Artificial Sequence; identical to SEQ ID NO: 26854
  derived and/or modified protein sequence (wt) from hemagglutinin__InfluenzaB__AGL09868

SEQ ID NO: 26896 - protein, 584 aa, Artificial Sequence
  derived and/or modified protein sequence (wt) from hemagglutinin__InfluenzaB__AGL09869
MKAIIVLLMVVTSNADRICTGITSSNSPHVVKTATQGEVNVTGVIPLTTTPTKSYFANLKGTKTRGKLCPDCLNCTDLDVALGRPMCVGTTPSAKASILHEVRPVTSGCFPIMHDRTKIRQLANLLRGYENIRLSTQNVIDAEKAPGGPYRLGTSGSCPNTTSKSGFFATMAWAVPKDNNKNATNPLTVEVPYICAEGEDQITVWGFHSDNKTQMKNLYGDSNPQKFTSSANGVTTHYVSQIGGFPDQTEDGGLPQSGRIVVDYMMQKPGKTGTIVYQRGVLLPQKVWCASGRSKVIKGSLPLIGEADCLHEKYGGLNKSKPYYTGEHAKAIGNCPIWVKTPLKLANGTKYRPPAKLLKERGFFGAIAGFLEGGWEGMIAGWHGYTSHGAHGVAVAADLKSTQEAINKITKNLNSLSELEVKNLQRLSGAMDELHNEILELDEKVDDLRADTISSQIELAVLLSNEGIINSEDEHLLALERKLKKMLGPSAVDIGNGCFETKHKCNQTCLDRIAAGTFNAGEFSLPTFDSLNITAASLNDDGLDNHTILLYYSTAASSLAVTLMLAIFIVYMVSRDNVSCSICL

SEQ ID NO: 26897 - protein, 584 aa, Artificial Sequence
  derived and/or modified protein sequence (wt) from hemagglutinin__InfluenzaB__AGL09870
MKAIIVLLMVVTSNADRICTGITSSNSPHVVKTATQGEVNVTGVIPLTTTPTKSYFANLKGTKTRGKLCPDCLNCTDLDVALGRPMCVGTTPSAKASILHEVRPVTSGCFPIMHDRTKIRQLANLLRGYENIRLSTQNVIDAEKAPGGPYRLGTSGSCPNATSKSGFFATMAWAVPKDNNKNATNPLTVEVPYICAEGEDQITVWGFHSDNKTQMKNLYGDSNPQRFTSSANGVTTHYVSQIGGFPDQTEDGGLPQSGRIVVDYMMQKPGKTGTIVYQRGVLLPQKVWCASGRSKVIKGSLPLIGEADCLHEKYGGLNKSKPYYTGEHAKAIGNCPIWVKTPLKLANGTKYRPPAKLLKERGFFGAIAGFLEGGWEGMIAGWHGYTSHGAHGVAVAADLKSTQEAINKITKNLNSLSELEVKNLQRLSGAMDELHNEILELDEKVDDLRADTISSQIELAVLLSNEGIINSEDEHLLALERKLKKMLGPSAVDIGNGCFETKHKCNQTCLDRIAAGTFNAGEFSLPTFDSLNITAASLNDDGLDNHTILLYYSTAASSLAVTLMLAIFIVYMVSRDNVSCSICL

SEQ ID NO: 26898 - protein, 584 aa, Artificial Sequence; identical to SEQ ID NO: 26854
  derived and/or modified protein sequence (wt) from hemagglutinin__InfluenzaB__AGL09871

SEQ ID NO: 26899 - protein, 584 aa, Artificial Sequence
  derived and/or modified protein sequence (wt) from hemagglutinin__InfluenzaB__AGL09872
MKAIIVLLMVVTSNADRICTGITSSNSPHVVKTATQGEVNVTGVIPLTTTPTKSYFANLKGTKTRGKLCPDCLNCTDLDVALGRPMCVGTTPSAKASILHEVRPVTSGCFPIMHDRTKIRQLANLLRGYENIRLSTQNVIDAEKAPGGPYRLGTSGSCPNATSKSGFFATMAWAVPKDNNKNATNPLTVEVPYICAEGEDQIAVWGFHSDNKTQMKNLYGDSNPQKFTSSANGVTTHYVSQIGGFPDQTEDGGLPQSGRIVVDYMMQKPGKTGTIVYQRGVLLPQKVWCASGRSKVIKGSLPLIGEADCLHEKYGGLNKSKPYYTGEHAKAIGNCPIWVKTPLKLANGTKYRPPAKLLKERGFFGAIAGFLEGGWEGMIAGWHGYTSHGAHGVAVAADLKSTQEAINKITKNLNSLSELEVKNLQRLSGAMDELHNEILELDEKVDDLRADTISSQIELAVLLSNEGIINSEDEHLLALERKLKKMLGPSAVDIGNGCFETKHKCNQTCLDRIAAGTFNAGEFSLPTFDSLNITAASLNDDGLDNHTILLYYSTAASSLAVTLMLAIFIVYMVSRDNVSCSICL

SEQ ID NO: 26900 - protein, 584 aa, Artificial Sequence; identical to SEQ ID NO: 26854
  derived and/or modified protein sequence (wt) from hemagglutinin__InfluenzaB__AGL09873

SEQ ID NO: 26901 - protein, 585 aa, Artificial Sequence; identical to SEQ ID NO: 26887
  derived and/or modified protein sequence (wt) from hemagglutinin__InfluenzaB__AGL09874

SEQ ID NO: 26902 - protein, 585 aa, Artificial Sequence; identical to SEQ ID NO: 26872
  derived and/or modified protein sequence (wt) from hemagglutinin__InfluenzaB__AGO02695

SEQ ID NO: 26903 - protein, 584 aa, Artificial Sequence; identical to SEQ ID NO: 26854
  derived and/or modified protein sequence (wt) from hemagglutinin__InfluenzaB__AGQ16249

SEQ ID NO: 26904 - protein, 585 aa, Artificial Sequence; identical to SEQ ID NO: 26887
  derived and/or modified protein sequence (wt) from hemagglutinin__InfluenzaB__AGQ16250

SEQ ID NO: 26905 - protein, 585 aa, Artificial Sequence; identical to SEQ ID NO: 26887
  derived and/or modified protein sequence (wt) from hemagglutinin__InfluenzaB__AGQ16251

SEQ ID NO: 26906 - protein, 584 aa, Artificial Sequence
  derived and/or modified protein sequence (wt) from hemagglutinin__InfluenzaB__AGQ16252
MKAIIVLLMVVTSNADRICTGITSSNSPHVVKTATQGEVNVTGVIPLTTTPAKSYFANLKGTRTRGKLCPDCLNCTDLDVALGRPMCVGTTPSAKASILHEVRPVTSGCFPIMHDRTKIRQLPNLLRGYENIRLSTQNVIDAEKAPGGPYRLGTSGSCPNATSKIGFFATMAWAVPKDNYKNATNPLTVEVPYICKEGEDQITVWGFHSDNKTQMKNLYGDSNPQKFTSSANGVTTHYVSQIGDFPDQTEDGGLPQSGRIVVDYMMQKPGKTGTIVYQRGVLLPQKVWCASGRSKVIKGSLPLIGEADCLHEEYGGLNKSKPYYTGKHAKAIGNCPIWVKTPLKLANGTKYRPPAKLLKERGFFGAIAGFLEGGWEGMIAGWHGYTSHGAHGVAVAADLKSTQEAINKITKNLNSLSELEVKNLQRLSGAMDELHNEILELDEKVDDLRADTISSQIELAVLLSNEGIINSEDEHLLALERKLKKMLGPSAVDIGNGCFETKHKCNQTCLDRIAAGTFNAGEFSLPTFDSLNITAASLNDDGLDNHTILLYYSTAASSLAVTLMLAIFIVYMVSRDNVSCSICL

SEQ ID NO: 26907 - protein, 584 aa, Artificial Sequence; identical to SEQ ID NO: 26854
  derived and/or modified protein sequence (wt) from hemagglutinin__InfluenzaB__AGQ16253

SEQ ID NO: 26908 - protein, 584 aa, Artificial Sequence
  derived and/or modified protein sequence (wt) from hemagglutinin__InfluenzaB__AGQ16255
MKAIIVLLMVVTSNADRICTGITSSNSPHVVKTATQGEVNVTGVIPLTTTPTKSYFANLKGTKTRGKLCPDCLNCTDLDVALGRPMCVGTTPSAKASILHEVRPVTSGCFPIMHDRTKIRQLANLLRGYENIRLSTQNVIDAEKAPGGPYRLGTSGSCPNATSKSGFFATMAWAVPKDNNKNATNPLTVEVPYICAEGEDQITVWGFHSDNKTQMKNLYGDSNPQKFTSSANGITTHYVSQIGGFPDQTEDGGLPQSGRIVVDYMMQKPGKTGTIVYQRGVLLPQKVWCASGRSKVIKGSLPLIGEADCLHEKYGGLNKSKPYYTGEHAKAIGNCPIWVKTPLKLANGTKYRPPAKLLKERGFFGAIAGFLEGGWEGMIAGWHGYTSHGAHGVAVAADLKSTQEAINKITKNLNSLSELEVKNLQRLSGAMDELHNEILELDEKVDDLRADTISSQIELAVLLSNEGIINSEDEHLLALERKLKKMLGPSAVDIGNGCFETKHKCNQTCLDRIAAGTFNAGEFSLPTFDSLNITAASLNDDGLDNHIILLYYSTAASSLAVTLMLAIFIVYMVSRDNVSCSICL

SEQ ID NO: 26909 - protein, 584 aa, Artificial Sequence
  derived and/or modified protein sequence (wt) from hemagglutinin__InfluenzaB__AGQ16256
MKAIIVLLMVVTSNADRICTGITSSNSPHVVKTVTQGEVNVTGVIPLTTTPTKSYFANLKGTKTRGKLCPDCLNCTDLDVALGRPMCVGTTPSAKASILHEVRPVTSGCFPIMHDRTKIRQLANLLRGYENIRLSTQNVIDAEKAPGGPYRLGTSGSCPNATSKSGFFATMAWAVPKDSNKNATNPLTVEVPYICAEGEDQITVWGFHSDNKTQMKNLYGDSNPQKFTSSANGVTTHYVSQIGGFPDQTEDGGLPQSGRIVVDYMMQKPGKTGTIVYQRGVLLPQKVWCASGRSKVIKGSLPLIGEADCLHEKYGGLNKSKPYYTGEHAKAIGNCPIWVKTPLKLANGTKYRPPAKLLKERGFFGAIAGFLEGGWEGMIAGWHGYTSHGAHGVAVAADLKSTQEAINKITKNLNSLSELEVKNLQRLSGAMDELHNEILELDEKVDDLRADTISSQIELAVLLSNEGIINSEDEHLLALERKLKKMLGPSAVDIGNGCFETKHKCNQTCLDRIAAGTFNAGEFSLPTFDSLNITAASLNDDGLDNHTILLYYSTAASSLAVTLMLAIFIVYMVSRDNVSCSICL

SEQ ID NO: 26910 - protein, 584 aa, Artificial Sequence; identical to SEQ ID NO: 26854
  derived and/or modified protein sequence (wt) from hemagglutinin__InfluenzaB__AGQ16257

SEQ ID NO: 26911 - protein, 584 aa, Artificial Sequence; identical to SEQ ID NO: 26854
  derived and/or modified protein sequence (wt) from hemagglutinin__InfluenzaB__AGQ16258

SEQ ID NO: 26912 - protein, 584 aa, Artificial Sequence; identical to SEQ ID NO: 26854
  derived and/or modified protein sequence (wt) from hemagglutinin__InfluenzaB__AGQ16259

SEQ ID NO: 26913 - protein, 584 aa, Artificial Sequence
  derived and/or modified protein sequence (wt) from hemagglutinin__InfluenzaB__AGQ16260
MKTIIVLLMVVTSNADRICTGITSSNSPHVVKTATQGEVNVTGVIPLTTTPTKSYFANLKGTKTRGKLCPDCLNCTDLDVALGRPMCVGTTPSAKASILHEVRPVTSGCFPIMHDRTKIRQLANLLRGYENIRLSSQNVIDAEKAPGGPYRLGTSGSCPNATSKSGFFATMAWAVPKDNNKNATNPLTVEVPYICAEGEDQITVWGFHSDNKTQMKNLYGDSNPQKFTSSANGVTTHYVSQIGGFPDQTEDGGLPQSGRIVVDYMMQKPGKTGTIVYQRGVLLPQKVWCASGRSKVIKGSLPLIGEADCLHEKYGGLNKSKPYYTGEHAKAIGNCPIWVKTPLKLANGTKYRPPAKLLKERGFFGAIAGFLEGGWEGMIAGWHGYTSHGAHGVAVAADLKSTQEAINKITKNLNSLSELEVKNLQRLSGAMDELHNEILELDEKVDDLRADTISSQIELAVLLSNEGIINSEDEHLLALERKLKKMLGPSAVDIGNGCFETKHKCNQTCLDRIAAGTFNAGEFSLPTFDSLNITAASLNDDGLDNHTILLYYSTAASSLAVTLMLAIFIVYMVSRDNVSCSICL

SEQ ID NO: 26914 - protein, 584 aa, Artificial Sequence; identical to SEQ ID NO: 26854
  derived and/or modified protein sequence (wt) from hemagglutinin__InfluenzaB__AGQ16261

SEQ ID NO: 26915 - protein, 584 aa, Artificial Sequence; identical to SEQ ID NO: 26854
  derived and/or modified protein sequence (wt) from hemagglutinin__InfluenzaB__AGQ16262

SEQ ID NO: 26916 - protein, 585 aa, Artificial Sequence; identical to SEQ ID NO: 26887
  derived and/or modified protein sequence (wt) from hemagglutinin__InfluenzaB__AGQ16263

SEQ ID NO: 26917 - protein, 585 aa, Artificial Sequence; identical to SEQ ID NO: 26887
  derived and/or modified protein sequence (wt) from hemagglutinin__InfluenzaB__AGQ16264

SEQ ID NO: 26918 - protein, 584 aa, Artificial Sequence; identical to SEQ ID NO: 26899
  derived and/or modified protein sequence (wt) from hemagglutinin__InfluenzaB__AGQ16265

SEQ ID NO: 26919 - protein, 584 aa, Artificial Sequence
  derived and/or modified protein sequence (wt) from hemagglutinin__InfluenzaB__AGQ16266
MKAIIVLLMVVTSNADRICTGITSSNSPHVVKTATQGEVNVTGVIPLTTTPTKSYFANLKGTKTRGKLCPDCLNCTDLDVALGRPMCVGTTPSAKASILHEVRPVTSGCFPIMHDRTKIRQLANLLRGYENIRLSTQNVIDAEKAPGGPYRLGTSGSCPNATSKSGFFATMAWAVPKDNNKNATNPLTVEVPYICAEGEDQITVWGFHSDNKTQMKNLYGDSNPQKFTSSANGVTTHYVSQVGGFPDQTEDGGLPQSGRIVVDYMMQKPGKTGTIVYQRGVLLPQKVWCASGRSKVIKGSLPLIGEADCLHEKYGGLNKSKPYYTGEHAKAIGNCPIWVKTPLKLANGTKYRPPAKLLKERGFFGAIAGFLEGGWEGMIAGWHGYTSHGAHGVAVAADLKSTQEAINKITKNLNSLSELEVKNLQRLSGAMDELHNEILELDEKVDDLRADTISSQIELAVLLSNEGIINSEDEHLLALERKLKKMLGPSAVDIGNGCFETKHKCNQTCLDRIAAGTFNAGEFSLPTFDSLNITAASLNDDGLDNHTILLYYSTAASSLAVTLMLAIFIVYMVSRDNVSCSICL

SEQ ID NO: 26920 - protein, 584 aa, Artificial Sequence; identical to SEQ ID NO: 26899
  derived and/or modified protein sequence (wt) from hemagglutinin__InfluenzaB__AGQ16267

SEQ ID NO: 26921 - protein, 584 aa, Artificial Sequence; identical to SEQ ID NO: 26899
  derived and/or modified protein sequence (wt) from hemagglutinin__InfluenzaB__AGQ16268

SEQ ID NO: 26922 - protein, 585 aa, Artificial Sequence; identical to SEQ ID NO: 26872
  derived and/or modified protein sequence (wt) from hemagglutinin__InfluenzaB__AGQ16269

SEQ ID NO: 26923 - protein, 584 aa, Artificial Sequence; identical to SEQ ID NO: 26899
  derived and/or modified protein sequence (wt) from hemagglutinin__InfluenzaB__AGQ16270

SEQ ID NO: 26924 - protein, 584 aa, Artificial Sequence
  derived and/or modified protein sequence (wt) from hemagglutinin__InfluenzaB__AGQ16272
MKAIIVLLMVVTSNADRICTGITSSNSPHVVKTATQGEVNVTGVIPLTTTPTKSYFANLKGTKTRGKLCPDCLNCTDLDVALGRPMCVGTTPSAKASILHEVRPVTSGCFPIMHDRTKIRQLANLLRGYENIRLSTQNVIDAEKAPGGPYRLGTSGSCPNATSKSGFFATMAWAVPRDNNKNATNPLTVEVPYICEEGEDQITVWGFHSDNKTQMKNLYGDSNPQKFTSSANGVTTHYVSQIGGFPDQTEDGGLPQSGRIVVDYMMQKPGKTGTIVYQRGVLLPQKVWCASGRSKVIKGSLPLIGEADCLHEKYGGLNKSKPYYTGEHAKAIGNCPIWVKTPLKLANGTKYRPPAKLLKERGFFGAIAGFLEGGWEGMIAGWHGYTSHGAHGVAVAADLKSTQEAINKITKNLNSLSELEVKNLQRLSGAMDELHNEILELDEKVDDLRADTISSQIELAVLLSNEGIINSEDEHLLALERKLKKMLGPSAVDIGNGCFETKHKCNQTCLDRIAAGTFNAGEFSLPTFDSLNITAASLNDDGLDNHTILLYYSTAASSLAVTLMLAIFIVYMVSRDNVSCSICL

SEQ ID NO: 26925 - protein, 584 aa, Artificial Sequence; identical to SEQ ID NO: 26854
  derived and/or modified protein sequence (wt) from hemagglutinin__InfluenzaB__AGQ16273

SEQ ID NO: 26926 - protein, 584 aa, Artificial Sequence; identical to SEQ ID NO: 26854
  derived and/or modified protein sequence (wt) from hemagglutinin__InfluenzaB__AGQ16274

SEQ ID NO: 26927 - protein, 584 aa, Artificial Sequence; identical to SEQ ID NO: 26854
  derived and/or modified protein sequence (wt) from hemagglutinin__InfluenzaB__AGQ16275

SEQ ID NO: 26928 - protein, 584 aa, Artificial Sequence; identical to SEQ ID NO: 26854
  derived and/or modified protein sequence (wt) from hemagglutinin__InfluenzaB__AGQ16276

SEQ ID NO: 26929 - protein, 584 aa, Artificial Sequence; identical to SEQ ID NO: 26899
  derived and/or modified protein sequence (wt) from hemagglutinin__InfluenzaB__AGQ16277

SEQ ID NO: 26930 - protein, 584 aa, Artificial Sequence; identical to SEQ ID NO: 26899
  derived and/or modified protein sequence (wt) from hemagglutinin__InfluenzaB__AGQ16278

SEQ ID NO: 26931 - protein, 584 aa, Artificial Sequence; identical to SEQ ID NO: 26899
  derived and/or modified protein sequence (wt) from hemagglutinin__InfluenzaB__AGQ16279

SEQ ID NO: 26932 - protein, 584 aa, Artificial Sequence; identical to SEQ ID NO: 26899
  derived and/or modified protein sequence (wt) from hemagglutinin__InfluenzaB__AGQ16280

SEQ ID NO: 26933 - protein, 584 aa, Artificial Sequence
  derived and/or modified protein sequence (wt) from hemagglutinin__InfluenzaB__AGQ16281
MKAIIVLLMVVTSNADRICTGITSSNSPHVVKTATQGEVNVTGVIPLTTTPTKSYFANLKGTKTRGKLCPDCLNCTDLDVALGRPMCVGTTPSAKASILHEVRPVTSGCFPIMHDRTKIRQLANLLRGYENIRLSTQNVIDAEKAPGGPYRLGTSGSCPNATSKSGFFATMAWAVPKDNNKNATNPLTVEVPYICAEGEDQITVWGFHSDNKTQMKNLYGDSNPQKFTSSANGVTTHYVSQIGSFPDQTEDGGLPQSGRIVVDYMMQKPGKTGTIVYQRGVLLPQKVWCASGRSKVIKGSLPLIGEADCLHEKYGGLNKSKPYYTGEHAKAIGNCPIWVKTPLKLANGTKYRPPAKLLKERGFFGAIAGFLEGGWEGMIAGWHGYTSHGAHGVAVAADLKSTQEAINKITKNLNSLSELEVKNLQRLSGAMDELHNEILELDEKVDDLRADTISSQIELAVLLSNEGIINSEDEHLLALERKLKKMLGPSAVDIGNGCFETKHKCNQTCLDRIAAGTFNAGEFSLPTFDSLNITAASLNDDGLDNHTILLYYSTAASSLAVTLMLAIFIVYMVSRDNVSCSICL

SEQ ID NO: 26934 - protein, 584 aa, Artificial Sequence
  derived and/or modified protein sequence (wt) from hemagglutinin__InfluenzaB__AGQ16282
MKAIIVLLMVVTSNADRICTGITSSNSPHVVKTATQGEVNVTGVIPLTTTPTKSYFANLKGTKTRGKLCPDCLNCTDLDVALGRPMCVGTTPSAKASILHEVRPVTSGCFPIMHDRTKIRQLANLLRGYENIRLSTQNVIDAEKAPGGPYRLGTSGSCPNATSKSGFFATMAWAVPKGNNKNATNPLTVEVPYICAEGEDQITVWGFHSDNKTQMKNLYGDSNPQRFTSSANGVTTHYVSQIGGFPDQTEDGGLPQSGRIVVDYMMQKPGKTGTIVYQRGVLLPQKVWCASGRSKVIKGSLPLIGEADCLHEKYGGLNKSKPYYTGEHAKAIGNCPIWVKTPLKLANGTKYRPPAKLLKERGFFGAIAGFLEGGWEGMIAGWHGYTSHGAHGVAVAADLKSTQEAINKITKNLNSLSELEVKNLQRLSGAMDELHNEILELDEKVDDLRADTISSQIELAVLLSNEGIINSEDEHLLALERKLKKMLGPSAVDIGNGCFETKHKCNQTCLDRIAAGTFNAGEFSLPTFDSLNITAASLNDDGLDNHTILLYYSTAASSLAVTLMLAIFIVYMVSRDNVSCSICL

SEQ ID NO: 26935 - protein, 584 aa, Artificial Sequence
  derived and/or modified protein sequence (wt) from hemagglutinin__InfluenzaB__AGQ16283
MKAIIVLLMVVTSNADRICTGITSSNSPHVVKTATHGEVNVTGVIPLTTTPTKSYFANLKGTKTRGKLCPDCLNCTDLDVALGRPMCVGTTPSAKASILHEVRPVTSGCFPIMHDRTKIRQLANLLRGYENIRLSTQNVIDAEKAPGGPYRLGTSGSCPNATSKSGFFATMAWAVPKDNNKNATNPLTVEVPYICAEGEDQIAVWGFHSDNKTQMKNLYGDSNPQKFTSSANGVTTHYVSQIGGFPDQTEDGGLPQSGRIVVDYMMQKPGKTGTIVYQRGVLLPQKVWCASGRSKVIKGSLPLIGEADCLHEKYGGLNKSKPYYTGEHAKAIGNCPIWVKTPLKLANGTKYRPPAKLLKERGFFGAIAGFLEGGWEGMIAGWHGYTSHGAHGVAVAADLKSTQEAINKITKNLNSLSELEVKNLQRLSGAMDELHNEILELDEKVDDLRADTISSQIELAVLLSNEGIINSEDEHLLALERKLKKMLGPSAVDIGNGCFETKHKCNQTCLDRIAAGTFNAGEFSLPTFDSLNITAASLNDDGLDNHTILLYYSTAASSLAVTLMLAIFIVYMVSRDNVSCSICL

SEQ ID NO: 26936 - protein, 585 aa, Artificial Sequence
  derived and/or modified protein sequence (wt) from hemagglutinin__InfluenzaB__AGQ16284
MKAIIVLLMVVTSNADRICTGITSSNSPHVVKTATQGEVNVTGVIPLTTTPTKSHFANLKGTETRGKLCPKCLNCTDLDVALGRPKCTGKIPSARVSILHEARPVTSGCFPIMHDRTKIRQLPNLLRGYEHIKLSTHNVINAENAPGGPYKIGTSGSCPNVTNGNGFFATMAWAVPKNDKNKTATNPLTIEVPYICTEGEDQITVWGFHSDNETQMAKLYGDSKPQKFTSSANGVTTHYVSQIGGFPNQTEDGGLPQSGRIVVDYMVQKSGKTGTITYQRGILLPQKVWCASGRSKVIKGSLPLIGEADCLHEKYGGLNKSKPYYTGEHAKAIGNCPIWVKTPLKLANGTKYRPPAKLLKERGFFGAIAGFLEGGWEGMIAGWHGYTSHGAHGVAVAADLKSTQEAINKITKNLNSLSELEVKNLQRLSGAMDELHNEILELDEKVDDLRADTISSQIELAVLLSNEGIINSEDEHLLALERKLKKMLGPSAVEIGNGCFETKHKCNQTCLDRIAAGTFDAGEFSLPTFDSLNITAASLNDDGLDNHTILLYYSTAASSLAVTLMIAIFVVYMVSRDNVSCSICL

SEQ ID NO: 26937 - protein, 584 aa, Artificial Sequence; identical to SEQ ID NO: 26899
  derived and/or modified protein sequence (wt) from hemagglutinin__InfluenzaB__AGQ16285

SEQ ID NO: 26938 - protein, 584 aa, Artificial Sequence; identical to SEQ ID NO: 26899
  derived and/or modified protein sequence (wt) from hemagglutinin__InfluenzaB__AGQ16286

SEQ ID NO: 26939 - protein, 584 aa, Artificial Sequence
  derived and/or modified protein sequence (wt) from hemagglutinin__InfluenzaB__AGQ16287
MKAIIVLLMVVTSNADRICTGITSSNSPHVVKTATQGEVNVTGVIPLTTTPTKSYFANLKGTKTRGKLCPDCLNCTDLDVALGRPMCVGTTPSAKASILHEVRPVTSGCFPIMHDRTKIRQLANLLRGYENIRLSTQNVIDAEKAPGGPYRLGTSGSCPNATSKSGFFATMAWAVPKDNNKNATNPLTVEVPYICEEGEDQITVWGFHSDNKTQMKNLYGDSNPQKFTSSANGVTTHYVSQIGGFPDQTEDGGLPQSGRIVVDYMMQKPGKTGTIVYQRGVLLPQKVWCASGRSKVIKGSLPLIGEADCLHEKYGGLNKSKPYYTGEHAKAIGNCPIWVKTPLKLANGTKYRPPAKLLKERGFFGAIAGFLEGGWEGMIAGWHGYTSHGAHGVAVAADLKSTQEAINKITKNLNSLSELEVKNLQRLSGAMDELHNEILELDEKVDDLRADTISSQIELAVLLSNEGIINSEDEHLLALERKLKKMLGPSAVDIGNGCFETKHKCNQTCLDRIAAGTFNAGEFSLPTFDSLNITAASLNDDGLDNHTILLYYSTAASSLAVTLMLAIFIVYMVSRDNVSCSICL

SEQ ID NO: 26940 - protein, 584 aa, Artificial Sequence; identical to SEQ ID NO: 26854
  derived and/or modified protein sequence (wt) from hemagglutinin__InfluenzaB__AGQ16289

SEQ ID NO: 26941 - protein, 584 aa, Artificial Sequence; identical to SEQ ID NO: 26854
  derived and/or modified protein sequence (wt) from hemagglutinin__InfluenzaB__AGQ16290

SEQ ID NO: 26942 - protein, 584 aa, Artificial Sequence
  derived and/or modified protein sequence (wt) from hemagglutinin__InfluenzaB__AGQ16291
MKAIIVLLMVVTSNADRICTGITSSNSPHVVKTATQGEVNVTGVIPLTTTPTKSYFANLKGTKTRGKLCPDCLNCTDLDVALGRPMCVGTTPSAKASILHEVRPVTSGCFPIMHDRTKIRQLANLLRGYENIRLSTQNVIDAEKAPGGPYRLGTSGSCPNTTSKSGFFATMAWAVPKDNNKNATNPLTVEVPYICAEGEDQIAVWGFHSDNKTQMKNLYGDSNPQKFTSSANGVTTHYVSQIGGFPDQTEDGGLPQSGRIVVDYMMQKPGKTGTIVYQRGVLLPQKVWCASGRSKVIKGSLPLIGEADCLHEKYGGLNKSKPYYTGEHAKAIGNCPIWVKTPLKLANGTKYRPPAKLLKERGFFGAIAGFLEGGWEGMIAGWHGYTSHGAHGVAVAADLKSTQEAINKITKNLNSLSELEVKNLQRLSGAMDELHNEILELDEKVDDLRADTISSQIELAVLLSNEGIINSEDEHLLALERKLKKMLGPSAVDIGNGCFETKHKCNQTCLDRIAAGTFNAGEFSLPTFDSLNITAASLNDDGLDNHTILLYYSTAASSLAVTLMLAIFIVYMVSRDNVSCSICL

SEQ ID NO: 26943 - protein, 584 aa, Artificial Sequence
  derived and/or modified protein sequence (wt) from hemagglutinin__InfluenzaB__AGQ16292
MKAIIVLLMVVTSNADRICTGITSSNSPHVVKTATQGEVNVTGVIPLTTTPTKSYFANLKGTKTRGKLCPDCLNCTDLDVALGRPMCVGTTPSAKASILHEVRPVTSGCFPIMHDRTKIRQLANLLRGYENIRLSTQNVIDAEKAPGGPYRLGTSGSCPNATSKSGFFATMAWAVPKDNNKNATNPLTVEVPYICAEGEDQIAVWGFHSDNKTQMKNLYGDSNPQKFTSSANGVTTHYVSQIGGFPDQTEDGGLPQSGRIVVDYMMQKPGKTGTIVYQRGVLLPQKVWCASGRSKVIKGSLPLIGEADCLHEKYGGLNKSKPYYTGEHAKAIGNCPIWVKTPLKLANGTKYRPPAKLLKERGFFGAIAGFLEGGWEGMIAGWHGYTSHGAHGVAVAADLKSTQEAINKITKNLNSLSELEIKNLQRLSGAMDELHNEILELDEKVDDLRADTISSQIELAVLLSNEGIINSEDEHLLALERKLKKMLGPSAVDIGNGCFETKHKCNQTCLDRIAAGTFNAGEFSLPTFDSLNITAASLNDDGLDNHTILLYYSTAASSLAVTLMLAIFIVYMVSRDNVSCSICL

SEQ ID NO: 26944 - protein, 584 aa, Artificial Sequence; identical to SEQ ID NO: 26943
  derived and/or modified protein sequence (wt) from hemagglutinin__InfluenzaB__AGQ16293

SEQ ID NO: 26945 - protein, 584 aa, Artificial Sequence; identical to SEQ ID NO: 26943
  derived and/or modified protein sequence (wt) from hemagglutinin__InfluenzaB__AGQ16294

SEQ ID NO: 26946 - protein, 585 aa, Artificial Sequence
  derived and/or modified protein sequence (wt) from hemagglutinin__InfluenzaB__AGQ16295
MKAIIVLLMVVTSNADRICTGITSSNSPHVVKTATQGEVNVTGAIPLTTTPTKSHFANLKGTETRGKLCPKCLNCTDLDVALGRPKCTGKIPSARVSILHEVRPVTSGCFPIMHDRTKIRQLPNLLRGYEHIRLSTHNVINAENAPGGPYKIGTSGSCPNVTNGNGFFATMAWAVPKNDKNKTETNPLTIEVPYICTEEEDQITVWGFHSDNETQMAKLYGDSKPQKFTSSANGVTTHYVSQIGGFPNQTEDGGLPQSGRIVVDYMVQKSGKTGTITYQRGILLPQKVWCASGRSKVIKGSLPLIGEADCLHEKYGGLNKSKPYYTGEHAKAIGNCPIWVKTPLKLANGTKYRPPAKLLKERGFFGAIAGFLEGGWEGMIAGWHGYTSHGAHGVAVAADLKSTQEAINKITKNLNSLSELEVKNLQRLSGAMDELHNEILELDEKVDDLRADTISSQIELAVLLSNEGIINSEDEHLLALERKLKKMLGPSAVEIGNGCFETKHKCNQTCLDRIAAGTFDAGEFSLPTFDSLNITAASLNDDGLDNHTILLYYSTAASSLAVTLMIAIFVVYMVSRDNVSCSICL

SEQ ID NO: 26947 - protein, 585 aa, Artificial Sequence; identical to SEQ ID NO: 26887
  derived and/or modified protein sequence (wt) from hemagglutinin__InfluenzaB__AGQ16296

SEQ ID NO: 26948 - protein, 584 aa, Artificial Sequence; identical to SEQ ID NO: 26854
  derived and/or modified protein sequence (wt) from hemagglutinin__InfluenzaB__AGQ16297

SEQ ID NO: 26949 - protein, 584 aa, Artificial Sequence
  derived and/or modified protein sequence (wt) from hemagglutinin__InfluenzaB__AGQ16298
MKAIIVLLMVVTSNADRICTGITSSNSPHVVKTATQGEVNVTGVIPLTTTPTKSYFANLKGTKTRGKLCPDCLNCTDLDVALGRPMCVGTTPSAKASILHEVRPVTSGCFPIMHDRTKIRQLANLLRGYENIRLSTQNVIDAEKAPGGPYRLGTSGSCPNATSKSGFFATMAWAVPKDNNKNATNPLTVEVPYICAEGEDQITVWGFHSDNKTQMKNLYGDSNPQKFTSSANGVTTHYVSQIGGFPDQTEDGGLPQSGRIVVDYMMQKPGKTGTIVYQRGVLLPQKVWCASGRSKVIKGSLPLIGEADCLHEKYGGLNKSKPYYTGEHAKAIGNCPIWVKTPLKLANGTKYRPPAKLLKERGFFGAIAGFLEGGWEGMIAGWHGYTSHGAHGVAIAADLKSTQEAINKITKNLNSLSELEVKNLQRLSGAMDELHNEILELDEKVDDLRADTISSQIELAVLLSNEGIINSEDEHLLALERKLKKMLGPSAVDIGNGCFETKHKCNQTCLDRIAAGTFNAGEFSLPTFDSLNITAASLNDDGLDNHTILLYYSTAASSLAVTLMLAIFIVYMVSRDNVSCSICL

SEQ ID NO: 26950 - protein, 584 aa, Artificial Sequence; identical to SEQ ID NO: 26899
  derived and/or modified protein sequence (wt) from hemagglutinin__InfluenzaB__AGQ16299

SEQ ID NO: 26951 - protein, 584 aa, Artificial Sequence; identical to SEQ ID NO: 26899
  derived and/or modified protein sequence (wt) from hemagglutinin__InfluenzaB__AGQ16300

SEQ ID NO: 26952 - protein, 584 aa, Artificial Sequence; identical to SEQ ID NO: 26854
  derived and/or modified protein sequence (wt) from hemagglutinin__InfluenzaB__AGQ16301

SEQ ID NO: 26953 - protein, 584 aa, Artificial Sequence; identical to SEQ ID NO: 26854
  derived and/or modified protein sequence (wt) from hemagglutinin__InfluenzaB__AGQ16302

SEQ ID NO: 26954 - protein, 584 aa, Artificial Sequence; identical to SEQ ID NO: 26854
  derived and/or modified protein sequence (wt) from hemagglutinin__InfluenzaB__AGQ16303

SEQ ID NO: 26955 - protein, 584 aa, Artificial Sequence; identical to SEQ ID NO: 26854
  derived and/or modified protein sequence (wt) from hemagglutinin__InfluenzaB__AGQ16305

SEQ ID NO: 26956 - protein, 585 aa, Artificial Sequence
  derived and/or modified protein sequence (wt) from hemagglutinin__InfluenzaB__AGQ16306
MKAIIVLLMVVTSNADRICTGITSSNSPHVVKTATQGEVNVTGVIPLTTTPTKSHFANLKGTETRGKLCPKCLNCTDLDVALGRPKCTGKIPSARVSILHEVRPVTSGCFPIMHDRTKIRQLPNLLRGYEHIRLSTHNVINAENAPGGPYKIGTSGSCPNVTNGNGFFATMAWAVPKNDKNKTETNPLTIEVPYICKEGEDQITVWGFHSDNETQMAKLYGDSKPQKFTSSANGVTTHYVSQIGGFPNQTEDGGLPQSGRIVVDYMVQKSGKTGTITYQRGILLPQKVWCASGRSKVIKGSLPLIGEADCLHEKYGGLNKSKPYYTGEHAKAIGNCPIWVKTPLKLANGTKYRPPAKLLKERGFFGAIAGFLEGGWEGMIAGWHGYTSHGAHGVAVAADLKSTQEAINKITKNLNSLSELEVKNLQRLSGAMDELHNEILELDEKVDDLRADTISSQIELAVLLSNEGIINSEDEHLLALERKLKKMLGPSAVEIGNGCFETKHKCNQTCLDRIAAGTFDAGEFSLPTFDSLNITAASLNDDGLDNHTILLYYSTAASSLAVTLMIAIFVVYMVSRDNVSCSICL

SEQ ID NO: 26957 - protein, 584 aa, Artificial Sequence; identical to SEQ ID NO: 26854
  derived and/or modified protein sequence (wt) from hemagglutinin__InfluenzaB__AGQ16307

SEQ ID NO: 26958 - protein, 585 aa, Artificial Sequence; identical to SEQ ID NO: 26887
  derived and/or modified protein sequence (wt) from hemagglutinin__InfluenzaB__AGQ16308

SEQ ID NO: 26959 - protein, 584 aa, Artificial Sequence
  derived and/or modified protein sequence (wt) from hemagglutinin__InfluenzaB__AGQ16309
MKAIIVLLMVVTSNADRICTGITSSNSPHVVKTATQGEVNVTGVIPLTTTPTKSYFANLKGTKTRGKLCPDCLNCTDLDVALGRPMCVGTTPSAKASILHEVRPVTSGCFPIMHDRTKIRQLANLLRGYENIRLSTQNVIDAEKAPGGPYRLGTSGSCPNATSKSGFFATMAWAVPKDNNKNATNPLTVEVPYICAEGEDQITVWGFHSDNKTQMKNLYGDSNPQKFTSSANGVTTHYVSQIGGFPDQTEDGGLPQSGRIVADYMMQKPGKTGTIVYQRGVLLPQKVWCASGRSKVIKGSLPLIGEADCLHEKYGGLNKSKPYYTGEHAKAIGNCPIWVKTPLKLANGTKYRPPAKLLKERGFFGAIAGFLEGGWEGMIAGWHGYTSHGAHGVAVAADLKSTQEAINKITKNLNSLSELEVKNLQRLSGAMDELHNEILELDEKVDDLRADTISSQIELAVLLSNEGIINSEDEHLLALERKLKKMLGPSAVDIGNGCFETKHKCNQTCLDRIAAGTFNAGEFSLPTFDSLNITAASLNDDGLDNHTILLYYSTAASSLAVTLMLAIFIVYMVSRDNVSCSICL

SEQ ID NO: 26960 - protein, 584 aa, Artificial Sequence
  derived and/or modified protein sequence (wt) from hemagglutinin__InfluenzaB__AGQ16310
MKAIIVLLMVVTSNADRICTGITSSNSPHVVKTATQGEVNVTGVIPLTTTPTKSYFANLKGTKTRGKLCPDCLNCTDLDVALGRPMCVGTTPSAKASILHEVRPVTSGCFPIMHDRTKIRQLANLLRGYENIRLSTQNVIDAEKAPGGPYRLGTSGSCPNATSKSGFFATMAWAVPKDNNKNATNPLTVEVPYICAEGEDQITVWGFHSDNKTQMKNLYGDSNPQKFTSSANGVTTHYVSQIGGFPDQTEDGGLPQSGRIVVDYMMQKPGKTGTIVYQRGVLLPQKVWCASGRSKVIKGSLPLIGEADCLHEKYGGLNKSKPYYTGEHAKAIGNCPIWVKTPLKLANGTKYRPPAKLLKERGFFGAIAGFLEGGWEGMVAGWHGYTSHGAHGVAVAADLKSTQEAINKITKNLNSLSELEVKNLQRLSGAMDELHNEILELDEKVDDLRADTISSQIELAVLLSNEGIINSEDEHLLALERKLKKMLGPSAVDIGNGCFETKHKCNQTCLDRIAAGTFNAGEFSLPTFDSLNITAASLNDDGLDNHTILLYYSTAASSLAVTLMLAIFIVYMVSRDNVSCSICL

SEQ ID NO: 26961 - protein, 585 aa, Artificial Sequence; identical to SEQ ID NO: 26887
  derived and/or modified protein sequence (wt) from hemagglutinin__InfluenzaB__AGQ16311

SEQ ID NO: 26962 - protein, 584 aa, Artificial Sequence; identical to SEQ ID NO: 26854
  derived and/or modified protein sequence (wt) from hemagglutinin__InfluenzaB__AGQ16312

SEQ ID NO: 26963 - protein, 584 aa, Artificial Sequence
  derived and/or modified protein sequence (wt) from hemagglutinin__InfluenzaB__AGQ16313
MKAIIVLLMVVTSNADRICTGITSSNSPHVVKTATQGEVNVTGVIPLTTTPTKSYFANLKGTKTRGKLCPDCLNCTDLDVALGRPMCVGTTPSAKASILHEVRPVTSGCFPIMHDRTKIRQLANLLRGYENIRLSTQNVIDAEKAPGGPYRLGTSGSCPNATSKSGFFATMAWAVPKDNNKNATNPLTVEVPYICAEGEDQIAVWGFHSDNKTQMKNLYGDSNPQKFTSSANGVTTHYVSQIGGFPDQTEDGGLPQSGRIVVDYMMQKPGKTGTIVYQRGVLLPQKVWCASGRSKVIKGSLPLIGEADCLHEKYGGLNKSKPYYTGEHAKAIGNCPIWVKTPLKLANGTKYRPPAKLLKEKGFFGAIAGFLEGGWEGMIAGWHGYTSHGAHGVAVAADLKSTQEAINKITKNLNSLSELEVKNLQRLSGAMDELHNEILELDEKVDDLRADTISSQIELAVLLSNEGIINSEDEHLLALERKLKKMLGPSAVDIGNGCFETKHKCNQTCLDRIAAGTFNAGEFSLPTFDSLNITAASLNDDGLDNHTILLYYSTAASSLAVTLMLAIFIVYMVSRDNVSCSICL

SEQ ID NO: 26964 - protein, 585 aa, Artificial Sequence
  derived and/or modified protein sequence (wt) from hemagglutinin__InfluenzaB__AGQ16314
MKAIIVLLMVVTSNADRICTGITSSNSPHVVKTATQGEVNVTGVIPLTTTPTKSHFANLKGTETRGKLCPKCLNCTDLDVALGRPKCTGKIPSARVSILHEVRPVTSGCFPIMHDRTKIRQLPNLLRGYEHIRLSTHNVINAENAPGGPYKIGTSGSCPNVTNGNGFFATMAWAVPKNDKNKTETNPLTIEVPYICTEEEDQITVWGFHSDNETQMAKLYGDSKPQKFTSSANGVTTHYVSQIGGFPNQTEDGGLPQSGRIVVDYMVQKSGKTGTITYQRGILLPQKVWCASGRSKVIKGSLPLIGEADCLHEKYGGLNKSKPYYTGEHAKAIGNCPIWVKTPLKLANGTKYRPPAKLLKERGFFGAIAGFLEGGWEGMIAGWHGYTSHGAHGVAVAADLKSTQEAINKITKNLNSLSELEVKNLQRLSGAMDELHNEILELDEKVDDLRADTISSQIELAVLLSNEGIINSEDEHLLALERKLKKMLGPSAVEIGNGCFETKHKCNQTCLDRIAAGTFDAGEFSLPTFDSLNITAASLNDDGLDNHTILLYYSTAASSLAVTLMIAIFVVYMVSRDNVSCSICL

SEQ ID NO: 26965 - protein, 584 aa, Artificial Sequence
  derived and/or modified protein sequence (wt) from hemagglutinin__InfluenzaB__AGQ16315
MKAIIVLLMVVTSNADRICTGITSSNSPHVVKTATQGEVNVTGVIPLTTTPTKSYFANLKGTKTRGKLCPDCLNCTDLDVALGRPMCVGTTPSAKASILHEVRPVTSGCFPIMHDRTKIRQLANLLRGYENIRLSTQTVIDAEKAPGGPYRLGTSGSCPNATSKSGFFATMAWAVPKDNNKNATNPLTVEVPYICAEGEDQITVWGFHSDNKTQMKNLYGDSNPQKFTSSANGITTHYVSQIGGFPDQTEDGGLPQSGRIVVDYMMQKPGKTGTIVYQRGVLLPQKVWCASGRSKVIKGSLPLIGEADCLHEKYGGLNKSKPYYTGEHAKAIGNCPIWVKTPLKLANGTKYRPPAKLLKERGFFGAIAGFLEGGWEGMIAGWHGYTSHGAHGVAVAADLKSTQEAINKITKNLNSLSELEVKNLQRLSGAMDELHNEILELDEKVDDLRADTISSQIELAVLLSNEGIINSEDEHLLALERKLKKMLGPSAVDIGNGCFETKHKCNQTCLDRIAAGTFNAGEFSLPTFDSLNITAASLNDDGLDNHIILLYYSTAASSLAVTLMLAIFIVYMVSRDNVSCSICL

SEQ ID NO: 26966 - protein, 584 aa, Artificial Sequence; identical to SEQ ID NO: 26854
  derived and/or modified protein sequence (wt) from hemagglutinin__InfluenzaB__AGQ16316

SEQ ID NO: 26967 - protein, 584 aa, Artificial Sequence; identical to SEQ ID NO: 26854
  derived and/or modified protein sequence (wt) from hemagglutinin__InfluenzaB__AGQ16317

SEQ ID NO: 26968 - protein, 585 aa, Artificial Sequence; identical to SEQ ID NO: 26645
  derived and/or modified protein sequence (wt) from hemagglutinin__InfluenzaB__AGQ16318

SEQ ID NO: 26969 - protein, 584 aa, Artificial Sequence
  derived and/or modified protein sequence (wt) from hemagglutinin__InfluenzaB__AGQ16319
MKAIIVLLMVVTSNADRICTGITSSNSPHVVKTATQGEVNVTGVIPLTTTPTKSYFANLKGTKTRGKLCPGCLNCTDLDVALGRPMCVGTTPSAKASILHEVRPVTSGCFPIMHDRTKIRQLANLLRGYENIRLSTQNVIDAEKAPGGPYRLGTSGSCPNATSKSGFFATMAWAVPKDNNKNATNPLTVEVPYICAEGEDQIAVWGFHSDNKTQMKNLYGDSNPQKFTSSANGVTTHYVSQIGGFPDQTEDGGLPQSGRIVVDYMMQKPGKTGTIVYQRGVLLPQKVWCASGRSKVIKGSLPLIGEADCLHEKYGGLNKSKPYYTGEHAKAIGNCPIWVKTPLKLANGTKYRPPAKLLKERGFFGAIAGFLEGGWEGMIAGWHGYTSHGAHGVAVAADLKSTQEAINKITKNLNSLSELEVKNLQRLSGAMDELHNEILELDEKVDDLRADTISSQIELAVLLSNEGIINSEDEHLLALERKLKKMLGPSAVDIGNGCFETKHKCNQTCLDRIAAGTFNAGEFSLPTFDSLNITAASLNDDGLDNHTILLYYSTAASSLAVTLMLAIFIVYMVSRDNVSCSICL

SEQ ID NO: 26970 - protein, 584 aa, Artificial Sequence; identical to SEQ ID NO: 26899
  derived and/or modified protein sequence (wt) from hemagglutinin__InfluenzaB__AGQ16320

SEQ ID NO: 26971 - protein, 584 aa, Artificial Sequence; identical to SEQ ID NO: 26854
  derived and/or modified protein sequence (wt) from hemagglutinin__InfluenzaB__AGQ16321

SEQ ID NO: 26972 - protein, 584 aa, Artificial Sequence; identical to SEQ ID NO: 26854
  derived and/or modified protein sequence (wt) from hemagglutinin__InfluenzaB__AGQ16322

SEQ ID NO: 26973 - protein, 585 aa, Artificial Sequence
  derived and/or modified protein sequence (wt) from hemagglutinin__InfluenzaB__AGQ16323
MKAIIVLLMVVTSNADRICTGITSSNSPHVVKTATQGEVNVTGVIPLTTTPTKSHFASLKGTETRGKLCPKCLNCTDLDVALGRPKCTGKIPSARVSILHEVRPVTSGCFPIMHDRTKIRQLPNLLRGYEHIRLSTHNVINAEDAPGGPYKIGTSGSCPNVTNGNGFFATMAWAVPKNDKNKTATNPLTIEVPYICTEGEDQITVWGFHSDNETQMAKLYGDSKPQKFTSSANGVTTHYVSQIGGFPNQTEDGGLPQSGRIVVDYMVQKSGKTGTITYQRGILLPQKVWCASGRSKVIKGSLPLIGEADCLHEKYGGLNKSKPYYTGEHAKAIGNCPIWVKTPLKLANGTKYRPPAKLLKERGFFGAIAGFLEGGWEGMIAGWHGYTSHGAHGVAVAADLKSTQEAINKITKNLNSLSELEVKNLQRLSGAMDELHNEILELDEKVDDLRADTISSQIELAVLLSNEGIINSEDEHLLALERKLKKMLGPSAVEIGNGCFETKHKCNQTCLDRIAAGTFDAGEFSLPTFDSLNITAASLNDDGLDNHTILLYYSTAASSLAVTLMIAIFVVYMVSRDNVSCSICL

SEQ ID NO: 26974 - protein, 584 aa, Artificial Sequence; identical to SEQ ID NO: 26854
  derived and/or modified protein sequence (wt) from hemagglutinin__InfluenzaB__AGQ16324

SEQ ID NO: 26975 - protein, 584 aa, Artificial Sequence; identical to SEQ ID NO: 26854
  derived and/or modified protein sequence (wt) from hemagglutinin__InfluenzaB__AGQ16325

SEQ ID NO: 26976 - protein, 584 aa, Artificial Sequence; identical to SEQ ID NO: 26854
  derived and/or modified protein sequence (wt) from hemagglutinin__InfluenzaB__AGQ16326

SEQ ID NO: 26977 - protein, 584 aa, Artificial Sequence; identical to SEQ ID NO: 26854
  derived and/or modified protein sequence (wt) from hemagglutinin__InfluenzaB__AGQ16327

SEQ ID NO: 26978 - protein, 585 aa, Artificial Sequence
  derived and/or modified protein sequence (wt) from hemagglutinin__InfluenzaB__AGQ16328
MKAIIVLLMVVTSNADRICTGITSSNSPHVVKTATQGEVNVTGVIPLTTTPTKSHFANLKGTETRGKLCPKCLNCTDLDVALGRPKCTGKTPSARVSILHEVRPVTSGCFPIMHDRTKIRQLPNLLRGYEHIRLSTHNVINAENAPGGPYKIGTSGSCPNVTNGNGFFATMAWAVPKNDKNKTATNPLTIEVPYICTEGEDQITVWGFHSDNETQMAKLYGDSNPQKFTSSANGVTTHYVSQIGGFPNQTEDGGLPQSGRIVVDYMVQKSGKTGTITYQRGILLPQKVWCASGRSKVIKGSLPLIGEADCLHEKYGGLNKSKPYYTGEHAKAIGNCPIWVKTPLKLANGTKYRPPAKLLKERGFFGAIAGFLEGGWEGMIAGWHGYTSHGAHGVAVAADLKSTQEAINKITKNLNSLSELEVKNLQRLSGAMDELHNEILELDEKVDDLRADTISSQIELAVLLSNEGIINSEDEHLLALERKLKKMLGPSAVEIGNGCFETKHKCNQTCLDRIAAGTFDAGEFSLPTFDSLNITAASLNDDGLDNHTILLYYSTAASSLAVTLMIAIFVVYMVSRDNVSCSICL

SEQ ID NO: 26979 - protein, 585 aa, Artificial Sequence
  derived and/or modified protein sequence (wt) from hemagglutinin__InfluenzaB__AGX15487
MKAIIVLLMVVTSNADRICTGITSSNSPHVVKTATQGEVNVTGVIPLTTTPTKSHFANLKGTKTRGKLCPKCLNCTDLDVALGRPKCTGNIPSAKVSILHEVRPVTSGCFPIMHDRTKIRQLPNLLRGYEHIRLSTHNVINAEKAPGGPYKIGTSGSCPNVTNGNGFFATMAWAVPKNDNNKTATNSLTIEVPYICTEGEDQITVWGFHSDNETQMAKLYGDSKPQKFTSSANGVTTHYVSQIGGFPNQTEDGGLPQSGRIVVDYMVQKSGKTGTITYQRGILLPQKVWCASGRSKVIKGSLPLIGEADCLHEKYGGLNKSKPYYTGEHAKAIGNCPIWVKTPLKLANGTKYRPPAKLLKERGFFGAIAGFLEGGWEGMIAGWHGYTSHGAHGVAVAADLKSTQEAINKITKNLNSLSELEVKNLQRLSGAMDELHNEILELDEKVDDLRADTISSQIELAVLLSNEGIINSEDEHLLALERKLKKMLGPSAVEIGNGCFETKHKCNQTCLDRIAAGTFDAGEFSLPTFDSLNITAASLNDDGLDNHTILLYYSTAASSLAVTLMIAIFVVYMVSRDNVSCSICL

SEQ ID NO: 26980 - protein, 585 aa, Artificial Sequence; identical to SEQ ID NO: 26979
  derived and/or modified protein sequence (wt) from hemagglutinin__InfluenzaB__AGX15496

SEQ ID NO: 26981 - protein, 585 aa, Artificial Sequence
  derived and/or modified protein sequence (wt) from hemagglutinin__InfluenzaB__AGX15518
MKAIIVLLMVVTSNADRICTGITSSNSPHVVKTATQGEVNVTGVIPLTTAPTKSHFANLKGTKTRGKLCPKCLNCTDLDVALGRPKCTGNIPSAEVSILHEVRPVTSGCFPIMHDRTKIRQLPNLLRGYEHIRLSTHNVINAEKAPGGPYKIGTSGSCPNVTNGNGFFATMAWAVPKNDNNKTATNSLTIEVPYICTEGEDQITIWGFHSDNETQMAKLYGDSKPQKFTSSANGVTTHYVSQIGGFPNQTEDGGLPQSGRIVVDYMVQKPGKTGTITYQRGILLPQKVWCASGRSKVIKGSLPLIGEADCLHEKYGGLNKSKPYYTGEHAKAIGNCPIWVKTPLKLANGTKYRPPAKLLKERGFFGAIAGFLEGGWEGMIAGWHGYTSHGAHGVAVAADLKSTQEAINKITKNLNSLSELEVKNLQRLSSAMDELHNEILELDEKVDDLRADTISSQIELAVLLSNEGIINSEDEHLLALERKLKKMLGPSAVEIGNGCFETKHKCNQTCLDRIAAGTFDAGEFSLPTFDSLNITAASLNDDGLDNHTILLYYSTAASSLAVTLMIAIFVVYMVSRDNVSCSICL

SEQ ID NO: 26982 - protein, 585 aa, Artificial Sequence
  derived and/or modified protein sequence (wt) from hemagglutinin__InfluenzaB__AGX15529
MKAIIVLLMVVTSNADRVCTGITSSNSPHVVKTATQGEVNVTGVIPLTTTPTKSHFANLKGTKTRGKLCPKCLNCTDLDVALGRPKCTGNIPSAEVSILYEVRPVTSGCFPIMHDRTKIRQLPNLLRGYEHIRLSTHNVINAEKAPGGPYKIGTSGSCPNVTNGNGFFATMAWAVPKNDNNKTATNSLTIEVPYICTEGEDQITIWGFHSDNETQMAKLYGDSKPQKFTSSANGVTTHYVSQIGGFPNQTEDGGLPQSGRIVVDYMVQKSGKTGTITYQRGILLPQKVWCASGRSKVIKGTLPLIGEADCLHEKYGGLNKSKPYYTGEHAKAIGNCPIWVKTPLKLANGTKYRPPAKLLKERGFFGAIAGFLEGGWEGMIAGWHGYTSHGAHGVAVAADLKSTQEAINKITKNLNSLSELEVKNLQRLSGAMDELHNEILELDEKVDDLRADTISSQIELAVLLSNEGIINSEDEHLLALERKLKKMLGPSAVEIGNGCFETKHKCNQTCLDRIAAGTFDAGEFSLPTFDSLNITAASLNDDGLDNHTILLYYSTAASSLAVTLMIAIFVVYMVSRDNVSCSICL

SEQ ID NO: 26983 - protein, 585 aa, Artificial Sequence; identical to SEQ ID NO: 26573
  derived and/or modified protein sequence (wt) from hemagglutinin__InfluenzaB__AGX15541

SEQ ID NO: 26984 - protein, 585 aa, Artificial Sequence
  derived and/or modified protein sequence (wt) from hemagglutinin__InfluenzaB__AGX15552
MKAIIVLLMVVTSNADRICTGITSSNSPHVVKTATQGEVNVTGVIPLTTTPTKSHFANLKGTETRGKLCPKCLNCTDLDVALGRPKCTGNIPSARVSILHEVRPVTSGCFPIMHDRTKIRQLPNLLRGYEHIRLSTHNVINAKNAPGGPYKIGTSGSCPNVTNGNGFFATMAWAVPKNDNNKTATNSLTIEVPYICTEGEDQITVWGFHSDNETQMAKLYGDSKPQKFTSSANGVTTHYVSQIGGFPNQTEDGGLPQSGRIVVDYMVQKSGKTGTITYQRGILLPQKVWCASGRSKVIKGSLPLIGEADCLHEKYGGLNKSKPYYTGEHAKAIGNCPIWVKTPLKLANGTKYRPPAKLLKERGFFGAIAGFLEGGWEGMIAGWHGYTSHGAHGVAVAADLKSTQEAINKITKNLNSLSELEVKNLQRLSGAMDELHNEILELDEKVDDLRADTISSQIELAVLLSNEGIINSEDEHLLALERKLKKMLGPSAVEIGNGCFETKHKCNQTCLDRIAAGTFDAGEFSLPTFDSLNITAASLNDDGLDNHTILLYYSTAASSLAVTLMIAIFVVYMVSRDNVSCSICL

SEQ ID NO: 26985 - protein, 585 aa, Artificial Sequence; identical to SEQ ID NO: 26582
  derived and/or modified protein sequence (wt) from hemagglutinin__InfluenzaB__AGX15563

SEQ ID NO: 26986 - protein, 585 aa, Artificial Sequence; identical to SEQ ID NO: 26582
  derived and/or modified protein sequence (wt) from hemagglutinin__InfluenzaB__AGX15574

SEQ ID NO: 26987 - protein, 585 aa, Artificial Sequence
  derived and/or modified protein sequence (wt) from hemagglutinin__InfluenzaB__AGX15607
MKAIIVLLMVVTSNADRICTGITSSNSPHVVKTATQGEVNVTGVIPLTTTPTKSHFANLKGTETRGKLCPKCLNCTDLDVALGRPKCTGNTPSARVSILHEVRPVTSGCFPIMHDRTKIRQLPNLLRGYEHIRLSTHNVINAENAPGGPYKIGTSGSCPNVTNGNGFFATMAWAVPKNDNNKTATNSLTIEVPYICTEGEDQITVWGFHSDNETQMAKLYGDSKPQKFTSSANGVTTHYVSQIGGFPNQTEDGGLPQSGRIVVDYMVQKSGKTGTITYQRGILLPQKVWCASGRSKVIKGSLPLIGEADCLHEKYGGLNKSKPYYTGEHAKAIGNCPIWVKTPLKLANGTKYRPPAKLLKERGFFGAIAGFLEGGWEGMIAGWHGYTSHGAHGVAVAADLKSTQEAINKITKNLNSLSELEVKNLQRLSGAMDELHNEILELDEKVDDLRADTISSQIELAVLLSNEGIINSEDEHLLALERKLKKMLGPSAVEIGNGCFETKHKCNQTCLDRIAAGTFDAGEFSLPTFDSLNITAASLNDDGLDNHTILLYYSTAASSLAVTLMIAIFVVYMVSRDNVSCSICL

SEQ ID NO: 26988 - protein, 585 aa, Artificial Sequence
  derived and/or modified protein sequence (wt) from hemagglutinin__InfluenzaB__AGX15629
MKAIIVLLMVVTSNADRICTGITSSNSPHVVKTATQGEVNVTGVIPLTTTPTKSHFANLKGTETRGKLCPKCLNCTDLDVALGRPKCTGNIPSARVSILHEVRPVTSGCFPIMHDRTKIRQLPNLLRGYEHIRLSTHNVINAENAPGGPYKIGTSGSCPNVTNGNGFFATMAWAVPKNDNNKTATNSLTIEVPYICTEGEDQITVWGFHSDNEIQMAKLYGDSKPQKFTSSANGVTTHYVSQIGGFPNQTEDGGLPQSGRIVVDYMVQKSGKTGTITYQRGILLPQKVWCTSGRSKVIKGSLPLIGEADCLHEKYGGLNKSKPYYTGEHAKAIGNCPIWVKTPLKLANGTKYRPPAKLLKERGFFGAIAGFLEGGWEGMIAGWHGYTSHGAHGVAVAADLKSTQEAINKITKNLNSLSELEVKNLQRLSGAMDELHNEILELDEKVDDLRADTISSQIELAVLLSNEGIINSEDEHLLALERKLKKMLGPSAVEIGNGCFETKHKCNQTCLDRIAAGTFDAGEFSLPTFDSLNITAASLNDDGLDNHTILLYYSTAASSLAVTLMIAIFVVYMVSRDNVSCSICL

SEQ ID NO: 26989 - protein, 585 aa, Artificial Sequence
  derived and/or modified protein sequence (wt) from hemagglutinin__InfluenzaB__AGX15651
MKAIIVLLMVVTSNADRICTGITSSNSPHVVKTATQGEVNVTGVIPLTTTPTKSHFANLKGTETRGKLCPKCLNCTDLDVALGRPKCTGKIPSARVSILHEVRPVTSGCFPIMHDRTKIRQLPNLLRGYEHIRLSTHNVINAENAPGGPYKIGTSGSCPNITNGNGFFATMAWAVPKNDKNKTATNPLTIEVPYICTEGEDQITVWGFHSDNETQMAKLYGDSKPQKFTSSANGVTTHYVSQIGGFPNQTEDGGLPQSGRIVVDYMVQKSGKTGTITYQRGILLPQKVWCASGRSKVIKGSLPLIGEADCLHEKYGGLNKSKPYYTGEHAKAIGNCPIWVKTPLKLANGTKYRPPAKLLKERGFFGAIAGFLEGGWEGMIAGWHGYTSHGAHGVAVAADLKSTQEAINKITKNLNSLSELEVKNLQRLSGAMDELHNEILELDEKVDDLRADTISSQIELAVLLSNEGIINSEDEHLLALERKLKKMLGPSAVEIGNGCFETKHKCNQTCLDRIAAGTFDAGEFSLPTFDSLNITAASLNDDGLDNHTILLYYSTAASSLAVTLMIAIFVVYMVSRDNVSCSICL

SEQ ID NO: 26990 - protein, 585 aa, Artificial Sequence; identical to SEQ ID NO: 26989
  derived and/or modified protein sequence (wt) from hemagglutinin__InfluenzaB__AGX15675

SEQ ID NO: 26991 - protein, 585 aa, Artificial Sequence; identical to SEQ ID NO: 26989
  derived and/or modified protein sequence (wt) from hemagglutinin__InfluenzaB__AGX15686

SEQ ID NO: 26992 - protein, 585 aa, Artificial Sequence
  derived and/or modified protein sequence (wt) from hemagglutinin__InfluenzaB__AGX15697
MKAIIVLLMVVTSNADRICTGITSSNSPHVVKTATQGEVNVTGVIPLTTTPTKSHFANLKGTETRGKLCPKCLNCTDLDVALGRPKCTGKIPSARVSILHEVRPVTSGCFPIMHDRTKIRQLPNLLRGYEHIRLSTHNVINAENAPGGPYKIGTSGSCPNITNGNGFFATMAWAVPKNDKNKTATNPLTIEVPYICTEGEDQITVWGFHSDNENQMAKLYGDSKPQKFTSSANGVTTHYVSQIGGFPNQTEDGGLPQSGRIVVDYMVQKSGKTGTITYQRGILLPQKVWCASGRSKVIKGSLPLIGEADCLHEKYGGLNKSKPYYTGEHAKAIGNCPIWVKTPLKLANGTKYRPPAKLLKERGFFGAIAGFLEGGWEGMIAGWHGYTSHGAHGVAVAADLKSTQEAINKITKNLNSLSELEVKNLQRLSGAMDELHNEILELDEKVDDLRADTISSQIELAVLLSNEGIINSEDEHLLALERKLKKMLGPSAVEIGNGCFETKHKCNQTCLDRIAAGTFDAGEFSLPTFDSLNITAASLNDDGLDNHTILLYYSTAASSLAVTLMIAIFVVYMVSRDNVSCSICL

SEQ ID NO: 26993 - protein, 585 aa, Artificial Sequence; identical to SEQ ID NO: 26989
  derived and/or modified protein sequence (wt) from hemagglutinin__InfluenzaB__AGX15708

SEQ ID NO: 26994 - protein, 585 aa, Artificial Sequence; identical to SEQ ID NO: 26989
  derived and/or modified protein sequence (wt) from hemagglutinin__InfluenzaB__AGX15719

SEQ ID NO: 26995 - protein, 585 aa, Artificial Sequence; identical to SEQ ID NO: 26514
  derived and/or modified protein sequence (wt) from hemagglutinin__InfluenzaB__AGX15730

SEQ ID NO: 26996 - protein, 585 aa, Artificial Sequence; identical to SEQ ID NO: 26989
  derived and/or modified protein sequence (wt) from hemagglutinin__InfluenzaB__AGX15741

SEQ ID NO: 26997 - protein, 585 aa, Artificial Sequence; identical to SEQ ID NO: 26989
  derived and/or modified protein sequence (wt) from hemagglutinin__InfluenzaB__AGX15753

SEQ ID NO: 26998 - protein, 585 aa, Artificial Sequence
  derived and/or modified protein sequence (wt) from hemagglutinin__InfluenzaB__AGX15764
MKAIIVLLMVVTSNADRICTGITSSNSPHVVKTATQGEVNVTGVIPLTTTPTKSHFANLKGTETRGKLCPKCLNCTDLDVALGRPKCTGKIPSARVSILHEVRPVTSGCFPIMHDRTKIRQLPNLLRGYEHIRLSTHNVINAENAPGGPYKIGTSGSCPNITNGNGFFATMAWAVPKNDKNKTATNPLTIEVPYICTEGEDQITVWGFHSDNETQMAKLYGDSKPQKFTSSANGVTTHYVSQIGGFPNQTEDGGLPQSGRIVVDYMVQKSGKTGTITYQRGILLPQKVWCASGRSKVIKGSLPLIGEADCLHEKYGGLNKSKPYYTGEHAKAIGNCPIWVKTPLKLANGTKYRPPAKLLKERGFFGAIAGFLEGGWEGMIAGWHGYTSHGAHGVAVAADLKSTQEAINKITKNLNSLSELEVKNLQRLSGAMDELHNEILELDEKVDDLRADTISSQIELAVLLSNEGIINSEDEHLLALERKLKKMLGPSAVEIGNGCFETKHKCNQTCLDRIAAGTFDAGEFSLPTFDSLNITAASLNDDGLDNHTILLYYSTAASSLAITLMIAIFVVYMVSRDNVSCSICL

SEQ ID NO: 26999 - protein, 584 aa, Artificial Sequence
  derived and/or modified protein sequence (wt) from hemagglutinin__InfluenzaB__AGX15775
MKAIIVLLMVVTSNADRICTGITSSNSPHVVKTATQGEVNVTGVIPLTTTPTKSYFANLKGTRTRGKLCPDCLNCTDLDVALGRPMCVGTTPSAKASILHEVRPVTSGCFPIMHDRTKIRQLPNLLRGYENIRLSTQNVIDAEKAPGGPYRLGTSGSCPNATSKSGFFATMAWAVPKDNNKNATNPLTVEVPYICTEGEDQITVWGFHSDNKIQMKNLYGDSNPQKFTSSANGVTTHYVSQIGSFPDQTEDGGLPQSGRIVVDYMMQKPGKTGTIVYQRGVLLPQRVWCASGRSKVIKGSLPLIGEADCLHEKYGGLNKSKPYYTGEHAKAIGNCPIWVKTPLKLANGTKYRPPAKLLKERGFFGAIAGFLEGGWEGMIAGWHGYTSHGAHGVAVAADLKSTQEAINKITKNLNSLSELEVKNLQRLSGAMDELHNEILELDEKVDDLRADTISSQIELAVLLSNEGIINSEDEHLLALERKLKKMLGPSAVEIGNGCFETKHKCNQTCLDRIAAGTFNAGEFSLPTFDSLNITAASLNDDGLDNHTILLYYSTAASSLAVTLMLAIFIVYMVSRDNVSCSICL

SEQ ID NO: 27000 - protein, 585 aa, Artificial Sequence
  derived and/or modified protein sequence (wt) from hemagglutinin__InfluenzaB__AGX15786
MKAIIVLLMVVTSNADRICTGITSSNSPHVVKTATQGEVNVTGVIPLTTTPTKSHFANLKGTETRGKLCPKCLNCTDLDVALGRPKCTGKIPSARVSILHEVRPVTSGCFPIMHDRTKIRQLPNLLRGYEHIRLSTHNVINAENAPGGPYKIGTSGSCPNITNGNGFFATMAWAVPKNDKNKTATNPLTIEVPYICTEGEDQITVWGFHSDNETQMAKLYGDSKPQKFTSSANGVTTHYVSQIGGFPNQTEDGGLPQSGRIVVDYMVQKSGKTGTITYQRGILLPQKVWCASGRSKVIKGSLPLIGEADCLHEKYGGLNKSKPYYTGEHAKAIGNCPIWVKTPLKLANGTKYRPPAKLLKERGFFGAIAGFLEGGWEGMIAGWHGYTSHGAHGVAVAADLKSTQEAINKITKNLNSLSELEVKNLQRLSGAMDELHNEILELDEKVDDLRADTISSQIELAVLLSNEGIINSEDEHLLALERKLKKMLGPSAVEIGNGCFETKHKCNQTCLDRIAAGTFDAGEFFLPTFDSLNITAASLNDDGLDNHTILLYYSTAASSLAVTLMIAIFVVYMVSRDNVSCSICL

SEQ ID NO: 27001 - protein, 585 aa, Artificial Sequence; identical to SEQ ID NO: 26989
  derived and/or modified protein sequence (wt) from hemagglutinin__InfluenzaB__AGX15797

SEQ ID NO: 27002 - protein, 585 aa, Artificial Sequence
  derived and/or modified protein sequence (wt) from hemagglutinin__InfluenzaB__AGX15808
MKAIIVLLMVVTSNADRICTGITSSNSPHVVKTATQGEVNVTGVIPLTTTPTKSHFANLKGTETRGKLCPKCLNCTDLDVALGRPKCTGKIPSARVSILHEVRPVTSGCFPIMHDRTKIRQLPNLLRGYEHIRLSTHNVINAENAPGGPYKIGTSGSCPNVTNGNGFFATMAWAVPKNDKNKTATNPLTIEVPYICTEGEDQITVWGFHSDNETQMAKLYGDSKPQKFTSSANGVTTHYVSQIGGFPNQTEDGGLPQSGRIVVDYMVQKSGKTGTITYQRGILLPQKVWCAIGRSKVIKGSLPLIGEADCLHEKYGGLNKSKPYYTGEHAKAIGNCPIWVKTPLKLANGTKYRPPAKLLKERGFFGAIAGFLEGGWEGMIAGWHGYTSHGAHGVAVAADLKSTQEAINKITKNLNSLSELEVKNLQRLSGAMDELHNEILELDEKVDDLRADTISSQIELAVLLSNEGIINSEDEHLLALERKLKKMLGPSAVEIGNGCFETKHKCNQTCLDRIAAGTFDAGEFSLPTFDSLNITAASLNDDGLDNHTILLYYSTAASSLAVTLMIAIFVVYMVSRDNVSCSICL

SEQ ID NO: 27003 - protein, 585 aa, Artificial Sequence; identical to SEQ ID NO: 26608
  derived and/or modified protein sequence (wt) from hemagglutinin__InfluenzaB__AGX15830

SEQ ID NO: 27004 - protein, 585 aa, Artificial Sequence; identical to SEQ ID NO: 26608
  derived and/or modified protein sequence (wt) from hemagglutinin__InfluenzaB__AGX15841

SEQ ID NO: 27005 - protein, 585 aa, Artificial Sequence; identical to SEQ ID NO: 26608
  derived and/or modified protein sequence (wt) from hemagglutinin__InfluenzaB__AGX15852

SEQ ID NO: 27006 - protein, 585 aa, Artificial Sequence; identical to SEQ ID NO: 26608
  derived and/or modified protein sequence (wt) from hemagglutinin__InfluenzaB__AGX15863

SEQ ID NO: 27007 - protein, 585 aa, Artificial Sequence
  derived and/or modified protein sequence (wt) from hemagglutinin__InfluenzaB__AGX15874
MKAIIVLLMVVTSNADRICTGITSSNSPHVVKTATQGEVNVTGVIPLTTTPTKSHFANLKGTETRGKLCPKCPNCTDLDVALGRPKCTGKIPSARVSILHEVRPVTSGCFPIMHDRTKIRQLPNLLRGYEHIRLSTHNVINAENAPGGPYKIGTSGSCPNVTNGNGFFATMAWAVPKNDKNKTATNPLTIEVPYICTEGEDQITVWGFHSDNETQMAKLYGDSKPQKFTSSANGVTTHYVSQIGGFPNQTEDGGLPQSGRIVVDYMVQKSGKTGTITYQRGILLPQKVWCASGRSKVIKGSLPLIGEADCLHEKYGGLNKSKPYYTGEHAKAIGNCPIWVKTPLKLANGTKYRPPAKLLKERGFFGAIAGFLEGGWEGMIAGWHGYTSHGAHGVAVAADLKSTQEAINKITKNLNSLSELEVKNLQRLSGAMDELHNEILELDEKVDDLRADTISSQIELAVLLSNEGIINSEDEHLLALERKLKKMLGPSAVEIGNGCFETKHKCNQTCLDRIAAGTFDAGEFSLPTFDSLNITAASLNDDGLNNHTILLYYSTAASSLAVTLMIAIFVVYMVSRDNVSCSICL

SEQ ID NO: 27008 - protein, 585 aa, Artificial Sequence; identical to SEQ ID NO: 26608
  derived and/or modified protein sequence (wt) from hemagglutinin__InfluenzaB__AGX15885

SEQ ID NO: 27009 - protein, 585 aa, Artificial Sequence
  derived and/or modified protein sequence (wt) from hemagglutinin__InfluenzaB__AGX15896
MKAIIVLLMVVTSNADRICTGITSSNSPHVVKTATQGEVNVTGVIPLTTTPTKSHFANLKGTETRGKLCPKCPNCTDLDVALGRPKCTGKIPSARVSILHEVRPVTSGCFPIMHDRTKIRQLPNLLRGYEHIRLSTHNVINAENAPGGPYKIGTSGSCPNVTNGNGFFATMAWAVPKNDKNKTATNPLTIEVPYICTEGEDQITVWGFHSDNETQMAKLYGDSKPQKFTSSANGVTAHYVSQIGGFPNQTEDGGLPQSGRIVVDYMVQKSGKTGTITYQRGILLPQKVWCASGRSKVIKGSLPLIGEADCLHEKYGGLNKSKPYYTGEHAKAIGNCPIWVKTPLKLANGTKYRPPAKLLKERGFFGAIAGFLEGGWEGMIAGWHGYTSHGAHGVAVAADLKSTQEAINKITKNLNSLSELEVKNLQRLSGAMDELHGEILELDEKVDDLRADTISSQIELAVLLSNEGIINSEDEHLLALERKLKKMLGPSAVEIGNGCFETKHKCNQTCLDRIAAGTFDAGEFSLPTFDSLNITAASLNDDGLDNHTILLYYSTAASSLAVTLMIAIFVVYMVSRDNVSCSICL

SEQ ID NO: 27010 - protein, 585 aa, Artificial Sequence; identical to SEQ ID NO: 26608
  derived and/or modified protein sequence (wt) from hemagglutinin__InfluenzaB__AGX15907

SEQ ID NO: 27011 - protein, 585 aa, Artificial Sequence; identical to SEQ ID NO: 26608
  derived and/or modified protein sequence (wt) from hemagglutinin__InfluenzaB__AGX15918

SEQ ID NO: 27012 - protein, 585 aa, Artificial Sequence
  derived and/or modified protein sequence (wt) from hemagglutinin__InfluenzaB__AGX15929
MKAIIVLLMVVTSNADRICTGITSSNSPHVVKTATQGEVNVTGVIPLTTTPTKSHFANLKGTETRGKLCPKCLNCTDLDVALGRPKCTGKIPSARVSILHEVRPVTSGCFPIMHDRTKIRQLPNLLRGYEHIRLSTNNVINAENAPGGPYKIGTSGSCPNVTNGNGFFATMAWAVPKNDKNKTATNPLTIEVPYICTEGEDQITVWGFHSDNETQMAKLYGDSKPQKFTSSANGVTTHYVSQIGGFPNQTEDGGLPQSGRIVVDYMVQKSEKTGTITYQRGILLPQKVWCASGRSKVIKGSLPLIGEADCLHEKYGGLNKSKPYYTGEHAKAIGNCPIWVKTPLKLANGTKYRPPAKLLKERGFFGAIAGFLEGGWEGMIAGWHGYTSHGAHGVAVAADLKSTQEAINKITKNLNSLSELEVKNLQRLSGAMDELHNEILELDEKVDDLRADTISSQIELAVLLSNEGIINSEDEHLLALERKLKKMLGPSAVEIGNGCFETKHKCNQTCLDRIAAGTFDAGEFSLPTFDSLNITAASLNDDGLDNHTILLYYSTAASSLAVTLMIAIFVVYMVSRDNVSCSICL

SEQ ID NO: 27013 - protein, 585 aa, Artificial Sequence; identical to SEQ ID NO: 26608
  derived and/or modified protein sequence (wt) from hemagglutinin__InfluenzaB__AGX15940

SEQ ID NO: 27014 - protein, 585 aa, Artificial Sequence
  derived and/or modified protein sequence (wt) from hemagglutinin__InfluenzaB__AGX15962
MKAIIVLLMVVTSNADRICTGITSSNSPHIVKTATQGEVNVTGVIPLTTTPTKSHFANLKGTETRGKLCPKCLNCTDLDVALGRPKCTGKIPSARVSILHEVRPVTSGCFPIMHDRTKIRQLPNLLRGYEHIRLSTHNVINAENAPGGPYKIGTSGSCPNITNGNGFFATMAWAVPKNDKNKTATNPLTIEVPYICTEGEDQITVWGFHSDNETQMAKLYGDSKPQKFTSSANGVTTHYVSQIGGFPNQTEDGGLPQSGRIVVDYMMQKSGKTGTITYQRGILLPQKVWCASGRSKVIKGSLPLIGEADCLHEKYGGLNKSKPYYTGEHAKAIGNCPIWVKTPLKLANGTKYRPPAKLLKERGFFGAIAGFLEGGWEGMIAGWHGYTSHGAHGVAVAADLKSTQEAINKITKNLNSLSELEVKNLQRLSGAMDELHNEILELDEKVDDLRADTISSQIELAVLLSNEGIINSEDEHLLALERKLKKMLGPSAVEIGNGCFETKHKCNQTCLDRIAAGTFDAGEFSLPTFDSLNITAASLNDDGLDNHTILLYYSTAASSLAVTLMIAIFVVYMVSRDNVSCSICL

SEQ ID NO: 27015 - protein, 585 aa, Artificial Sequence; identical to SEQ ID NO: 26645
  derived and/or modified protein sequence (wt) from hemagglutinin__InfluenzaB__AGX15973

SEQ ID NO: 27016 - protein, 585 aa, Artificial Sequence; identical to SEQ ID NO: 26645
  derived and/or modified protein sequence (wt) from hemagglutinin__InfluenzaB__AGX15984

SEQ ID NO: 27017 - protein, 585 aa, Artificial Sequence; identical to SEQ ID NO: 26683
  derived and/or modified protein sequence (wt) from hemagglutinin__InfluenzaB__AGX15995

SEQ ID NO: 27018 - protein, 585 aa, Artificial Sequence; identical to SEQ ID NO: 26683
  derived and/or modified protein sequence (wt) from hemagglutinin__InfluenzaB__AGX16006

SEQ ID NO: 27019 - protein, 585 aa, Artificial Sequence
  derived and/or modified protein sequence (wt) from hemagglutinin__InfluenzaB__AGX16017
MKAIIVLLMVVTSNADRICTGITSSNSPHIVKTATQGEVNVTGVIPLTTTPTKSHFANLKGTETRGKLCPKCLNCTDLDVALGRPKCTGKIPSARVSILHEVRPVTSGCFPIMHDRTKIRQLPNLLRGYEHIRLSTHNVINAENAPGGPYKIGTSGSCPNITNGNGFFATMAWAVPKNDKNKTATNPLTIEVPYICTEGEDQITVWGFHSDNEIQMAKLYGDSKPQKFTSSANGVTTHYVSQIGGFPNQTEDGGLPQSGRIVVDYMVQKSGKTGTITYQRGILLPQKVWCASGRSKVIKGSLPLIGEADCLHEKYGGLNKSKPYYTGEHAKAIGNCPIWVKTPLKLANGTKYRPPAKLLKERGFFGAIAGFLEGGWEGMIAGWHGYTSHGAHGVAVAADLKSTQEAINKITKNLNSLSELEVKNLQRLSGAMDELHNEILELDEKVDDLRADTISSQIELAVLLSNEGIINSEDEHLLALERKLKKMLGPSAVEIGNGCFETKHKCNQTCLDRIAAGTFDAGEFSLPTFDSLNITAASLNDDGLDNHTILLYYSTAASSLAVTLMIAIFVVYMVSRDNVSCSICL

SEQ ID NO: 27020 - protein, 584 aa, Artificial Sequence; identical to SEQ ID NO: 26426
  derived and/or modified protein sequence (wt) from hemagglutinin__InfluenzaB__AGX16028

SEQ ID NO: 27021 - protein, 584 aa, Artificial Sequence
  derived and/or modified protein sequence (wt) from hemagglutinin__InfluenzaB__AGX16039
MKAIIVLLMVVTSNADRICTGITSSNSPHVVKTATQGEVNVTGVIPLTTTPTKSYFANLKGTRTRGKLCPDCLNCTDLDVALGRPMCVGTTPSAKASILHEVRPVTSGCFPIMHDRTKIRQLPNLLRGYENIRLSTQNVIDAEKAPGGPYRLGTSGSCPNATSKSGFFATMAWAVPKDNNKNATNPLTVEVPYICTEGEDQITVWGFHSDNKTQMKNLYGDSNPQKFTSSANGVTTHYVSQIGGFPDQTEDGGLPQSGRIVVDYMMQKPGKTGTIVYQRGVLLPQKVWCASGRSKVIKGSLPLIGEADCLHEKYGGLNKSKPYYTGEHAKAIGNCPIWVKTPLKLANGTKYRPPAKLLKERGFFGAIAGFLEGGWEGMIAGWHGYTSHGAHGVAVAADLKSTQEAINKITKNLNSLSELEVKNLQRLSGAVDELHNEILELDEKVDDLRADTISSQIELAVLLSNEGIINSEDEHLLALERKLKKMLGPSAVDIGNGCFETKHKCNQTCLDRIAAGTFNAGEFSLPTFDSLNITAASLNDDGLDNHTILLYYSTAASSLAVTLMLAIFIVYMVSRDNVSCSICL

SEQ ID NO: 27022 - protein, 584 aa, Artificial Sequence
  derived and/or modified protein sequence (wt) from hemagglutinin__InfluenzaB__AGX16050
MKAIIVLLMVVTSNADRICTGITSSNSPHVVKTATQGEVNVTGVIPLTTTPTKSYFANLKGTRTRGKLCPDCLNCTDLDVALGRPMCVGTTPSAKASILHEVRPVTSGCFPIMHDRTKIRQLPNLLRGYENIRLSTQNVIDAENAPGGPYRLGTSGSCPNATSKSGFFATMAWAVPKDNNKNATNPLTVEVPYICTEGEDQITVWGFHSDNKTQMKNLYGDSNPQKFTSSANGVTTHYVSQIGGFPAQTEDGGLPQSGRIVVDYMVQKPRKTGTIVYQRGVLLPQKVWCASGRSKVIKGSLPLIGEADCLHEKYGGLNKSKPYYTGEHAKAIGNCPIWVKTPLKLANGTKYRPPAKLLKERGFFGAIAGFLEGGWEGMIAGWHGYTSHGAHGVAVAADLKSTQEAINKITKNLNSLSELEVKNLQRLSGAMDELHNEILELDEKVDDLRADTISSQIELAVLLSNEGIINSEDEHLLALERKLKKMLGPSAVDIGNGCFETKHKCNQTCLDRIAAGTFNAGEFSLPTFDSLNITAASLNDDGLDNHTILLYYSTAASSLAVTLMLAIFIVYMVSRDNVSCSICL

SEQ ID NO: 27023 - protein, 584 aa, Artificial Sequence
  derived and/or modified protein sequence (wt) from hemagglutinin__InfluenzaB__AGX16061
MKAIIVLLMVVTSNADRICTGITSSNSPHVVKTATQGEVNVTGVIPLTTTPTKSYFANLKGTRTRGKLCPDCLNCTDLDVALGRPMCVGTTPSAKASILHEVRPVTSGCFPIMHDRTKIRQLPNLLRGYENIRLSTQNVIDAEKAPGGPYRLGTSGSCPNATSKSGFFATMAWAVPKDNNKNATNPLTVEVPYICTEGEDQITVWGFHSDNKTQMKNLYGDSNPQKFTSSANGVTTHYVSQIGGFPDQTEDGGLPQSGRIVVDYMMQKPGKTGTIVYQRGVLLPQKVWCASGRSKVIKGSLPLIGEADCLHEKYGGLNKSKPYYTGEHAKAIGNCPIWVKTPLKLANGTKYRPPAKLLKERGFFGAIAGFLEGGWEGMIAGWHGYTSHGAHGVAVAADLKSTQEAINKITKNLNSLSELEVKNLQRLSGAMDELHNEILELDEKVDDLRADTISSQIELAVLLSNEGIINSEDEHLLALERKLKKMLGPSAVDIGNGCFETKHKCNQTCLDRIAAGTFNAGEFSLPTFDSLNITAASLNDDGLDNHTILLYYSTAASSLAVTLMLAIFIVYMVSRDNVSCSICL

SEQ ID NO: 27024 - protein, 584 aa, Artificial Sequence
  derived and/or modified protein sequence (wt) from hemagglutinin__InfluenzaB__AGX16083
MKAIIVLLMVVTSNADRICTGITSSNSPHVVKTATQGEVNVTGVIPLTTTPTKSYFANLKGTRTRGKLCPDCLNCTDLDVALGRPMCVGTTPSAKASILHEVRPVTSGCFPIMHDRTKIRQLPNLLRGYENIRLSTQNVIDAEKAPGGPYRLGTSGSCPNATSKSGFFATMAWAVPKDNNKNATNPLTVEVPYICTEGEDQITVWGFHSDNKTQMKNLYGDSNPQKFTSSANGVTTHYVSQIGGFPDQTEDGGLPQSGRIVVDYMMQKPGKTGTIVYQRGVLLPQKVWCASGRSKVIKGSLPLIGEADCLHEKYGGLNKSKPYYTGEHAKAIGNCPIWVKTPLKLANGTKYRPPAKLLKERGFFGAIAGFLEGGWEGMIAGWHGYTSHGAHGVAVAADLKSTQEAINKITKNLNSLSELEVKNLQRLSGAMDELHNEILELDEKVDDLRADTISSQIELAVLLSNEGIINSEDEHLLALERKLKKMLGPSAVEIGNGCFETKHKCNQTCLDRIAAGTFNAGEFSLPTFDSLNITAASLNDDGLDNHTILLYYSTAASSLAVTLMLAIFIVYMVSRDNVSCSICL

SEQ ID NO: 27025 - protein, 584 aa, Artificial Sequence
  derived and/or modified protein sequence (wt) from hemagglutinin__InfluenzaB__AGX16105
MKAIIVLLMVVTSNADRICTGITSSSSPHVVKTATQGEVNVTGVIPLTTTPTKSYFANLKGTRTRGKLCPDCLNCTDLDVALGRPMCVGTTPSAKASILHEVRPVTSGCFPIMHDRTKIRQLPNLLRGYENIRLSTQNVIDAEKAPGGPYRLGTSGSCPNATSKSGFFATMAWAVPKDNNKNATNPLTVEVPYICTEGEDQITVWGFHSDNKTQMKNLYGDSNPQKFTSSANGVTTHYVSQIGGFPDQTEDGGLPQSGRIVVDYMMQKPGKTGTIVYQRGVLLPQKVWCASGRSKVIKGSLPLIGEADCLHEKYGGLNKSKPYYTGEHAKAIGNCPIWVKTPLKLANGTKYRPPAKLLKERGFFGAIAGFLEGGWEGMIAGWHGYTSHGAHGVAVAADLKSTQEAINKITKNLNSLSELEVKNLQRLSGAMDELHSEILELDEKVDDLRADTISSQIELAVLLSNEGIINSEDEHLLALERKLKKMLGPSAVDIGNGCFETKHKCNQTCLDRIAAGTFNAGEFSLPTFDSLNITAASLNDDGLDNHTILLYYSTAASSLAVTLMLAIFIVYMVSRDNVSCSICL

SEQ ID NO: 27026 - protein, 584 aa, Artificial Sequence
  derived and/or modified protein sequence (wt) from hemagglutinin__InfluenzaB__AGX16116
MKAIIVLLMVVTSNADRICTGITSSNSPHVVKTATQGEVNVTGVIPLTTTPTKSYFANLKGTRTRGKLCPDCLNCTDLDVALGRPMCVGTTPSAKASILHEVRPVTSGCFPIMHDRTKIRQLPNLLRGYENIRLSTQNVIDAENAPGGPYRLGTSGSCPNATSKSGFFATMAWAVPKDNNKNATNPLTVEVPYVCTEGEDQITVWGFHSDNKTQMKNLYGDSNPQKFTSSANGVTTHYVSQIGGFPAQTEDGGLPQSGRIVVDYMVQKPRKTGTIVYQRGVLLPQKVWCASGRSKVIKGSLPLIGEADCLHEKYGGLNKSKPYYTGEHAKAIGNCPIWVKTPLKLANGTKYRPPAKLLKERGFFGAIAGFLEGGWEGMIAGWHGYTSHGAHGVAVAADLKSTQEAINKITKNLNSLSELEIKNLQRLSGAMDELHNEILELDEKVDDLRADTISSQIELAVLLSNEGIINSEDEHLLALERKLKKMLGPSAVDIGNGCFETKHKCNQTCLDRIAAGTFNAGEFSLPTFDSLNITAASLNDDGLDNHTILLYYSTAASSLAVTLMLAIFIVYMVSRDNVSCSICL

SEQ ID NO: 27027 - protein, 584 aa, Artificial Sequence
  derived and/or modified protein sequence (wt) from hemagglutinin__InfluenzaB__AGX16127
MKAIIVLLMVVTSNADRICTGITSSNSPHVVKTATQGEVNVTGVIPLTTTPTKSYFANLKGTRTRGKLCPDCLNCTDLDVALGRPMCVGTTPSAKASILHEVRPVTSGCFPIMHDRTKIRQLPNLLRGYENIRLSTQNVIDAENAPGGPYRLGTSGSCPNATSKSGFFATMAWAVPKDNNKNATNPLTVEVPYVCTEGEDQITVWGFHSDNKIQMKNLYGDSNPQKFTSSANGVTTHYVSQIGGFPAQTEDGGLPQSGRIVVDYMVQKPRKTGTIVYQRGVLLPQKVWCASGRSKVIKGSLPLIGEADCLHEKYGGLNKSKPYYTGEHAKAIGNCPIWVKTPLKLANGTKYRPPAKLLKERGFFGAIAGFLEGGWEGMIAGWHGYTSHGAHGVAVAADLKSTQEAINKITKNLNSLSELEIKNLQRLSGAMDELHNEILELDEKVDDLRADTISSQIELAVLLSNEGIINSEDEHLLALERKLKKMLGPSAVDIGNGCFETKHKCNQTCLDRIAAGTFNAGEFSLPTFDSLNITAASLNDDGLDNHTILLYYSTAASSLAVTLMLAIFIVYMVSRDNVSCSICL

SEQ ID NO: 27028 - protein, 584 aa, Artificial Sequence; identical to SEQ ID NO: 27026
  derived and/or modified protein sequence (wt) from hemagglutinin__InfluenzaB__AGX16138

SEQ ID NO: 27029 - protein, 584 aa, Artificial Sequence; identical to SEQ ID NO: 27023
  derived and/or modified protein sequence (wt) from hemagglutinin__InfluenzaB__AGX16149

SEQ ID NO: 27030 - protein, 584 aa, Artificial Sequence; identical to SEQ ID NO: 27024
  derived and/or modified protein sequence (wt) from hemagglutinin__InfluenzaB__AGX16160

SEQ ID NO: 27031 - protein, 584 aa, Artificial Sequence; identical to SEQ ID NO: 27024
  derived and/or modified protein sequence (wt) from hemagglutinin__InfluenzaB__AGX16182

SEQ ID NO: 27032 - protein, 584 aa, Artificial Sequence; identical to SEQ ID NO: 26426
  derived and/or modified protein sequence (wt) from hemagglutinin__InfluenzaB__AGX16193

SEQ ID NO: 27033 - protein, 584 aa, Artificial Sequence; identical to SEQ ID NO: 26426
  derived and/or modified protein sequence (wt) from hemagglutinin__InfluenzaB__AGX16215

SEQ ID NO: 27034 - protein, 584 aa, Artificial Sequence; identical to SEQ ID NO: 26426
  derived and/or modified protein sequence (wt) from hemagglutinin__InfluenzaB__AGX16226

SEQ ID NO: 27035 - protein, 584 aa, Artificial Sequence
  derived and/or modified protein sequence (wt) from hemagglutinin__InfluenzaB__AGX16237
MKAIIVLLMVVTSNADRICTGITSSNSPHVVKTATQGEVNVTGVIPLTTTPTKSYFANLKGTRTRGKLCPDCLNCTDLDVALGRPMCVGTTPSAKASILHEVRPVTSGCFPIMHDRTKIRQLPNLLRGYENIRLSTQNVIDAEKAPGGPYRLGTSGSCPNATSKSGFFATMAWAVPKDNNKNATNPLTVEVPYICTEGEDQITVWGFHSDNKTQMKNLYGDSNPQKFTSSANGVTTHYVSQIGGFPDQTEDGGLPQSGRIVVDYMMQKPGKTGTIVYQRGVLLPQKVWCASGRSKVIKGSLPLIGEADCLHEKYGGLNKSKPYYTGEHAKAIGNCPIWVKTPLKLANGTKYRPPAKLLKERGFFGAIAGFLEGGWEGMIAGWHGYTSHGAHGVAVAADLKSTQEAINKITKNLNSLSELEVKNLQRLSGAMDELHNEILELDEKVDDLRADTISSQIELAVLLSNEGIINSEDEHLLALERKLKKMLGPSAVDIGNGCFETKHKCNQTCLDRIAAGTFNAGEFSLPTFDSLNITAASLNDDGLDNHTILLYYSTAASSLAITLMLAIFIVYMVSRDNVSCSICL

SEQ ID NO: 27036 - protein, 584 aa, Artificial Sequence; identical to SEQ ID NO: 26426
  derived and/or modified protein sequence (wt) from hemagglutinin__InfluenzaB__AGX16248

SEQ ID NO: 27037 - protein, 584 aa, Artificial Sequence; identical to SEQ ID NO: 26426
  derived and/or modified protein sequence (wt) from hemagglutinin__InfluenzaB__AGX16259

SEQ ID NO: 27038 - protein, 584 aa, Artificial Sequence
  derived and/or modified protein sequence (wt) from hemagglutinin__InfluenzaB__AGX16270
MKAIIVLLMVVTSNADRICTGITSSNSPHVVKTATQGEVNVTGVIPLTTTPTKSYFANLKGTRTRGKLCPDCLNCTDLDVALGRPMCVGTTPSAKASILHEVRPVTSGCFPIMHDRTKIRQLANLLRGYENIRLSTQNVIDAEKAPGGPYRLGTSGSCPNATSKSGFFATMAWAVPKDNNKNATNPLTVEVPYICKEGEDQITVWGFHSDNKTQMKNLYGDSNPQKFTSSANGVTTHYVSQIGGFPDQTEDGGLPQSGRIVVDYMIQKPGKTGTIVYQRGVLLPQKVWCASGRSKVIKGSLPLIGEADCLHEKYGGLNKSKPYYTGEHAKAIGNCPIWVKTPLKLANGTKYRPPAKLLKERGFFGAIAGFLEGGWEGMIAGWHGYTSHGAHGVAVAADLKSTQEAINKITKNLNSLSELEVKNLQRLSGAMDELHNEILELDEKVDDLRADTISSQIELAVLLSNEGIINSEDEHLLALERKLKKMLGPSAVDIGNGCFETKHKCNQTCLDRIAAGTFNAGEFSLPTFDSLNITAASLNDDGLDNHTILLYYSTAASSLAVTLMLAIFIVYMVSRDNVSCSICL

SEQ ID NO: 27039 - protein, 584 aa, Artificial Sequence; identical to SEQ ID NO: 27038
  derived and/or modified protein sequence (wt) from hemagglutinin__InfluenzaB__AGX16281

SEQ ID NO: 27040 - protein, 584 aa, Artificial Sequence
  derived and/or modified protein sequence (wt) from hemagglutinin__InfluenzaB__AGX16292
MKAIIVLLMVVTSNADRICTGITSSNSPHVVKTATQGEVNVTGVIPLTTTPTKSYFANLKGTRTRGKLCPDCLNCTDLDVALGRPMCVGTTPSAKASILHEVRPVTSGCFPIMHDRTKIRQLANLLRGYENIRLSNQNVIDAEKAPGGPYRLGTSGSCPNATSKSGFFATMAWAVPKDNNKNATNPLTVEVPYICTEGEDQITVWGFHSDNKTQMKNLYGDSNPQKFTSSANGVTTHYVSQIGGFPDQTEDGGLPQSGRIVVDYMMQKPGKTGTIVYQRGVLLPQKVWCASGRSKVIKGALPLIGEADCLHEKYGGLNKSKPYYTGEHAKAIGNCPIWVKTPLKLANGTKYRPPAKLLKERGFFGAIAGFLEGGWEGMIAGWHGYTSHGAHGVAVAADLKSTQEAINKITKNLNSLSELEVKNLQRLSGAMDELHNEILELDEKVDDLRADTISSQIELAVLLSNEGIINSEDEHLLALERKLKKMLGPSAVDIGNGCFETKHKCNQTCLDRIAAGTFNAGEFSLPTFDSLNITAASLNDDGLDNHTILLYYSTAASSLAVTLMLAIFIVYMVSRDNVSCSICL

SEQ ID NO: 27041 - protein, 585 aa, Artificial Sequence; identical to SEQ ID NO: 26514
  derived and/or modified protein sequence (wt) from hemagglutinin__InfluenzaB__AGX16303

SEQ ID NO: 27042 - protein, 584 aa, Artificial Sequence; identical to SEQ ID NO: 26426
  derived and/or modified protein sequence (wt) from hemagglutinin__InfluenzaB__AGX16314

SEQ ID NO: 27043 - protein, 584 aa, Artificial Sequence; identical to SEQ ID NO: 26426
  derived and/or modified protein sequence (wt) from hemagglutinin__InfluenzaB__AGX16325

SEQ ID NO: 27044 - protein, 584 aa, Artificial Sequence; identical to SEQ ID NO: 26731
  derived and/or modified protein sequence (wt) from hemagglutinin__InfluenzaB__AGX16336

SEQ ID NO: 27045 - protein, 584 aa, Artificial Sequence; identical to SEQ ID NO: 26731
  derived and/or modified protein sequence (wt) from hemagglutinin__InfluenzaB__AGX16347

SEQ ID NO: 27046 - protein, 584 aa, Artificial Sequence; identical to SEQ ID NO: 26731
  derived and/or modified protein sequence (wt) from hemagglutinin__InfluenzaB__AGX16358

SEQ ID NO: 27047 - protein, 584 aa, Artificial Sequence
  derived and/or modified protein sequence (wt) from hemagglutinin__InfluenzaB__AGX16369
MKAIIVLLMVVTSNADRICTGITSSNSPHVVKTATQGEVNVTGVIPLTTTPTKSYFANLKGTRTRGKLCPDCLNCTDLDVALGRPMCVGTTPSAKASILHEVRPVTSGCFPIMHDRTKIRQLPNLLRGYENIRLSTQNVIDAEKAPGGPYRLGTSGSCPNATSKSGFFATMAWAVPKDNNKNATNPLTVEVPYICTEGEDQITVWGFHSDNKTQMKNLYGDSNPQKFTSSANGVTTHYVSQIGSFPDQTEDGGLPQSGRIVVDYMMQKPGKTGTIVYQRGILLPQKVWCASGRSKVIKGSLPLIGEADCLHEKYGGLNKSKPYYTGEHAKAIGNCPIWVKTPLKLANGTKYRPPAKLLKERGFFGAIAGFLEGGWEGMIAGWHGYTSHGAHGVAVAADLKSTQEAINKITKNLNSLSELEVKNLQRLSGAMDELHNEILELDEKVDDLRADTISSQIELAVLLSNEGIINSEDEHLLALERKLKKMLGPSAVEIGNGCFETKHKCNQTCLDRIAAGTFNAGEFSLPTFDSLNITAASLNDDGLDNHTILLYYSTAASSLAVTLMLAIFIVYMVSRDNVSCSICL
